United States Patent Application Publication US 2017/0114356 A1 - sequence listing, part 64

SEQ ID NO: 87261 - DNA, 1274 bp, Zea Mays
ttactattgcccgcttccctcagggagcagggcgaaccctagccaccagctctctctctctctctctctctctctcgattagccacggtgccctccgtcgtgcacactgccggcgacaacgcagccgccacccccttcttcctcccctcgcttgcagccctaaccgtgaacagtactcgccggtactgtagcgcgggtgctgtagcatgagtattgtagcgcccctgttctctcgctttctgccggccacaccgagccatggcgctccagcgccgtgatcgctgtcgggctccagcacctcatcgctattcccttcgccacatccccgtgcaactttgcttatgttatgcttgtttttggccagaattttcaggttttatgtatcctcacattagctgggttcgtctcatataaaaagaacttggttcttgaagatgcattcaatcaaaatatgctcggttcattccttctggcaaatatccttactggtctggttaatctctcagttaacacgctctctgcttcttccctcaccgccttcatgattctatgacctgacgtatcccactgacgacctagctggaggtgcgtgggcattcggccctctttccgcgtggcgtttcttcgtgcctgaggcgacgacggtttggcaccggctctctgccgtcgagagagaatggcaccagccaccagctcgtgtcaccactgccggcataggtggtctgttcctcttcagctcgctgcttatttaagaaaccgtgacagagaatgcctttgaccttaaatctgttgaaccaatgtaccgggggaggaggtaaccagtgcatcagtactccggcccctcagctccacttcagatcagatctcctgaattgcacgtttgagatcgagatctatcaggccatgctaagagagtaagaggtgatcaaatgacagtactgaaaagtgtagcaacaaccacgcttgcttgtgtgtgatggtggagtgagagacaaggagagctggatccaccaccctgtcctctggagacttgatgagtcggacgcatcaaattgcgttgcgtgatcggacgggtccaaatggtattaactcgcagcccatggattgcgagccttcatggaatggtttccggatcacgatggatcaatcgttcatcgctgacgaactagtacgtggtatttgtattgcaccgaccttgtgtggcccatagtactacttcctttaacttgttttcggtactctcgtttctgaaattgatgttgctaggttattct

SEQ ID NO: 87262 - DNA, 2027 bp, Zea Mays
atggaagcaccggaactgccggcccagccggtcgactttgaaggcgaaaacgcggaagagaaagagaggacagaggagcccgcttcaggcttcaggcttcaggcggacacatccctcgcctcaatagctccgccgctggcgattagtgaagagagctccgaggtgaaaagtggttctggaggaggagacgggatacagacttgggtcaatgaacagaccaaatgtgcacaacttccaaatctgagttttgagacccaccatagtgcatccaaccttctgaatgatactgataattccaaaattgaaccattcaagccatgtgatgagcaatacactgattacactccttgtgaggagcaaagtcgtgcaatgaccttccctagagataacatgatctatcgggagaggcattgtccaccggataaggagaagctttattgcctgatcccagcaccaaagggctatgttgcacctttccgatggccaaagagccgtgattttgttcattatgctaatgtaccacacaagagtcttactgttgagaaggctatccagaactgggtgcactatgagggcaatgttttcaggtttcctggtggcggaacacagtttcctcagggtgcagataaatatatagaccagcttgcttctgtcatcccaatagctgaaggaaaagtgagaactgcactggatactggttgtggggttgccagtttgggagcttacctgtttaagaaaaatgtgttgaccatttcatttgcaccacgggataatcatgaggcacaagtacagtttgcattggagagaggtgtccctgcatatattggtgtccttggatcaataaagctgccatttccttctcgtgcctttgacatggcccattgctcgagatgtttgattccatggagtggaaatgatggtatgtacatgatggaagttgacagagtattaaggcctggcggatattgggtgctgtcaggcccgcccattggctggaagatttattatgaggggtggcaacattctaaggaagatcttcagaatgagcaaagaaaaatagaacaattcgcacaacttctttgttggaagaagatatctgagaaggatggtattgccatatggagaaagagattaaatgacaagtcttgctccatgaaacaatataatccaaaaggtgtaaaatgtggtttgacaagtgacagtgatgtatggtacaagaagatggaagtttgtatagaccccctacccaatgttaatagtgtatctaaggttgccggtggtcaattagagccttttcccaagaggctctatgcagtacctcctcgtataacccttggttctgtgcctggtttctcagttcagtcatatgaagaggacaataaactttggcagaaatatgttgaggcttacaagaataccaataatttgcttgatactggaagatatcgcaatataatggacatgaatgctgggttctctacttatccaaggacatatgaccttatacattctaatggcatcttcagcttgtaccaaaacaaatgtcagtttgaagatatactcctggaaatggacagaatcttacgcccggagggtgcagtcataattcgtgacaaggttgatgttcttgtaaaagtggagaaaatagccaatgccatgaggtggaagacaagattggctgatcatgagggtggccctcttgtacctgagaagatactcttcgcggtcaagcaatactggaccgttgcaaaaacaagcagctaacattattcgtattttatttttttctccagtcacagagatgcagaagacatgccaaaaggatcaattgaccttgcactagtgactcatatctgatcggacagatgcagctgcttataattggaaccctgcagcagtccaggaagttatgaactagcagtggacttacagttttgtataggatactcatttacctctacacgcacctcttttttttgttgttgtatctcagaatctcatcaaatggattgcatgtggacctataa

SEQ ID NO: 87263 - DNA, 674 bp, Zea Mays
tagaaatcatacctttctcggccttttggctaagatcaagtgtagtatctgttcttatcagtttaatatctgatatgtggaccatgtgttcactttgatattaaatttattttttgtgggggagggctcgctacagtggcttgctactggggccctcaagcgtcgctcggccgttgcactataggctgagcctggcgcgccccaaccaatgcaatttcagctttaagtatgtctttagactatacgaaatgtatggttccatatcaataaatttggtcgtaagtaatgaagaagctaatatcgcccatatttagtcatcaagcagcatgccggtctagcagcatgtccctgtgctgcccggacctggtggaggccgctctcgccacgagcaggagagacccgccggttcaggtacaggcaaacgacaacaccatggacgcctatgacgggtcgggcagagaaccataacatctgagagctttcgtctactgtataaataaaccattatcagctaaaactccattgaatcgtcttagataggtactgctggaaaagtgccataccaataaaaaatcattgatagttataatgtgtgagggtcgaacgtgtcacgggcgatagaagcagcaagctaagctgtcacaagcttttcatcgaacaccttgtatgcatga

SEQ ID NO: 87264 - DNA, 635 bp, Zea Mays
caagatactgtttttttttcttatcaaatgttcatttgttcttcatacaattattcttggttcaggtgtgaagggttctctacttatccaaggacatatgaccttatacattctaatggcatcttcagcttgtaccaaaacaaatgtcagtttgaagatatactcctggaaatggacagaatcttacggccggagggtgcagtcataattcgtgacaaggttgatgttcttgtaaaagtggagaaaatagccaatgccatgaggtggaagacaagattggctgatcatgagggtggccctcttgtacctgagaagatactcttcgcggtcaagcaatactggaccgttgcaaaaacaagcagctaacattattcgtattttatttttttctccagtcacagagatgcagaagacatgccaaaaggatcaattggccttgcactagtgactcatatagtcatatctgatcggacagatgcagctgcttataattggaaccctgcagcagtccaggaagttatgaactagcagtggacttacagttttgtataggatactcatttacctctacacgcacctcttttttgttgttgtatctcagaatcccatcaaatggattgcatgtggacctataa

SEQ ID NO: 87265 - DNA, 1071 bp, Zea Mays
acattcaaggcaatgaagtccttattttgaatcaattgatctccttggtcaaacaaatatgacccccctttggaagatgggacagttccttctcaagggatgaggaatcttgaggttgaggcaaacgaagttttctcagtgtatcgtgaccagtactatgaaggtggcatctcatctgtttacatttgggaggatgaagataatgggtttatcgcatgcttcttaattaagaaagatggacaaggaaaaagagggtacatgcagattggttcatgggatgctattcatgttgttcaggttggtcctgaagaagaaggagcggcacattactgcttgaacagcactgtgatgctctcattgacaacaaacaacaagcagtctggaactttcaacctgtctggatccattagacggcagatgagtatgactcttgctgtagctgatggacaccttgttaatatggggaaaatgatagaagaaatggaggggaagctgagaaattcactggaccaagtttattttgggaagaccagagaaatggtttgcactcttcggccaccaccagaagttcttaatatgagactacctgacagctgagccagtgcatagaagtgtcaacttaacaaagaaaaacgtattcttctccactctaggcgtggtctgttcttgcttcgtagttaatagtctgtgcatctgtatcgacatctgttgaggtatctatgataggagcttattatcttctgatctcttgtgattagctgtatccgcgaagtgtttgacaggagccagtgtttgcagtggaattcagttaccaacagatgaatctccacaaaacgttgtgttggcgttctgtatcttctgaagaatctgatggtgttgtggctggccttgctatctgtcaaagtactaatgcggtgtttgttttgaggagtcacctcatatcggataagattgtgcatcctgagtccattttaaaacctggtgtttcttatgcttttacaaattagcttctgagaaatgaagtagtgctggataatttttttctgcttcacaaatcaaataaaaaaaaga

SEQ ID NO: 87266 - DNA, 972 bp, Zea Mays
gctgattttgtggttggtttgcagatctccttggtcaaacaaatatgacccccctttggaagatgggacagttccttctcaagggatgaggaatcttgaggttgaggcaaacgaagttttctcagtgtatcgtgaccagtactatgaaggtggcatctcatctgtttacatttgggaggatgaagataatgggtttatcgcatgcttcttaattaagaaagatggacaaggaaaaagagggtacatgcagattggttcatgggatgctattcatgttgttcaggttggtcctgaagaagaaggagcggcacattactgcttgaacagcactgtgatgctctcattgacaacaaacaacaagcagtctggaactttcaacctgtctggatccattagacggcagatgagtatgactcttgctgtagctgatggacaccttgttaatatggggaaaatgatagaagaaatggaggggaagctgagaaattcactggaccaagtttattttgggaagaccagagaaatggtttgcactcttcggccaccaccagaagttcttaatatgagactacctgacagctgagccagtgcatagaagtgtcaacttaacaaagaaaaacgtattcttctccactctaggcgtggtctgttcttgcttcgtagttaatagtctgtgcatctgtatcgacatctgttgagtggaattcagttaccaacagatgaatctccacaaaacgttgtgttggcgttctgtatcttctgaagaatctgatggtgttgtggctggccttgctatctgtcaaagtactaatgcggtgtttgttttgaggagtcacctcatatcggataagattgtgcatcctgagtccattttaaaacctggtgtttcttatgcttttacaaattagcttctgagaaatgaagtagtgctggataatttttttctgcttcacaaatcaaataaaaaaaaga

SEQ ID NO: 87267 - DNA, 1053 bp, Zea Mays
gctgattttgtggttggtttgcagatctccttggtcaaacaaatatgacccccctttggaagatgggacagttccttctcaagggatgaggaatcttgaggttgaggcaaacgaagttttctcagtgtatcgtgaccagtactatgaaggtggcatctcatctgtttacatttgggaggatgaagataatgggtttatcgcatgcttcttaattaagaaagatggacaaggaaaaagagggtacatgcagattggttcatgggatgctattcatgttgttcaggttggtcctgaagaagaaggagcggcacattactgcttgaacagcactgtgatgctctcattgacaacaaacaacaagcagtctggaactttcaacctgtctggatccattagacgatgagtatgactcttgctgtagctgatggacaccttgttaatatggggaaaatgatagaagaaatggaggggaagctgagaaattcactggaccaagtttattttgggaagaccagagaaatggtttgcactcttcggccaccaccagaagttcttaatatgagactacctgacagctgagccagtgcatagaagtgtcaacttaacaaagaaaaacgtattcttctccactctaggcgtggtctgttcttgcttcgtagttaatagtctgtgcatctgtatcgacatctgttgaggtatctatgataggagcttattatcttctgatctcttgtgattagctgtatccgcgaagtgtttgacaggagccagtgtttgcagtggaattcagttaccaacagatgaatctccacaaaacgttgtgttggcgttctgtatcttctgaagaatctgatggtgttgtggctggccttgctatctgtcaaagtactaatgcggtgtttgttttgaggagtcacctcatatcggataagattgtgcatcctgagtccattttaaaacctggtgtttcttatgcttttacaaattagcttctgagaaatgaagtagtgctggataatttttttctgcttcacaaatcaaataaaaaaaaga

SEQ ID NO: 87268 - DNA, 1670 bp, Zea Mays
gccacacccgctgcagcgttacaggaggcgcatgcgcctagccgtggaggagcacgcggcggcacgcgccaggcgggagcgccggagggtgccgcccacgcgtccacgcgtgcccctcccccagcctgccacctcccgcacgccctcctggcccgcgcgggtaggccgagcccaccggcgcccaacggaacggcacgagccgttacgtggccgcgccgcgcgcgacccaccgccttcttcttttctgtttctttttctccccctccagccgcccgtcctctcggtctccgaccacgactgtgcgccttcctaagtaaccctagctcggcgccctccctccgcgacatccaagcccggcaatctcatcgtcgcgcttgcaccgttacgcagtgcgacctctgcgtcttcgaatccaggaaggtagagaggaggaggaggtttgtggcaggatttgaccagcccaatggttccatccgagatggggagcgtcgccaccgccgtcagcacgcctgctgcggacaagctgctccatgggcctatctctggcaagaagtgcaagaaaccaggcccgaggaagattcataaggctgagagggagaagcttaaacgagaccacctaaatgatctctttgttgagctgggtaatatgctagaagcagatagacagaacaatgggaaagcatgcatactgactgacactactcggatactaagagacctgcttgttcaagtagactctcttcgaaaggaacatagcgacctacaaaacgaatctcattatgtaacaatggagagggatgagatgcaggatgaaaacggcgtgctccgcaaagaaatttcagagcttcaaaacgagttgacaatgcgggtttcaggcagtccagcaggttggggccatggcaccgccagatcagatccccctcttcctcactcaaccgcagtgttctcgtcggagcaggcgatgcaaccacccaccattgcaagcgttgtattcccgttgcagcagccactggcaccatcagcaatgaccaaaccacctcatgctgcaccaccactcgaactgaagctctttccagaagtggcatctgccgaaggccatgagccgtgtgaagaccacaaagctcccaaccatgtggcacgaccacaggcaaggtacccaacgcaatcagcctcatggcccgtaaacctgttctctggccttccacgaatggaagatgagcaatgcagtagcagcacaagcggcagcagcagagaggataacacagatatagaatgagtggatcagctcctacaatcaaagagtctctgttttgagtctagtggatgtaaatttgaatctcctttttggatttcagaacgatagattatactctgttggaaataggacccctcccattgcaagtctttgttggaatctctataaatgcgaatcaatcttactggcactttgcatgccgaagctatggtctgggataatcaatgtttagatacagtttagcaaagcttggccagtggccatcaaaacagaatgttgcataacatctgataattgtcaactatagaataaggggatgtttggtttttagagactaatttttagtccattcattttagtctttatgtttgtcaatttagaaactaaaatggagggaataaaaattagtctctat

SEQ ID NO: 87269 - DNA, 1447 bp, Zea Mays
cttcttcttttctgtttctttttctccccctccagccgcccgtcctctcggtctccgaccacgactgtgcgccttcctaagtaaccctagctcggcgccctccctccgcgacatccaagcccggcaatctcatcgtcgcgcttgcaccgttacgcagtgcgacctctgcgtcttcgaatccaggtctctgcaggaaggtagagaggaggaggaggtttgtggcaggatttgaccagcccaatggttccatccgagatggggagcgtcgccaccgccgtcagcacgcctgctgcggacaagctgctccatgggcctatctctggcaagaagtgcaagaaaccaggcccgaggaagattcataaggctgagagggagaagcttaaacgagaccacctaaatgatctctttgttgagctgggtaatatgctagaagcagatagacagaacaatgggaaagcatgcatactgactgacactactcggatactaagagacctgcttgttcaagtagactctcttcgaaaggaacatagcgacctacaaaacgaatctcattatgtaacaatggagagggatgagatgcaggatgaaaacggcgtgctccgcaaagaaatttcagagcttcaaaacgagttgacaatgcgggtttcaggcagtccagcaggttggggccatggcaccgccagatcagatccccctcttcctcactcaaccgcagtgttctcgtcggagcaggcgatgcaaccacccaccattgcaagcgttgtattcccgttgcagcagccactggcaccatcagcaatgaccaaaccacctcatgctgcaccaccactcgaactgaagctctttccagaagtggcatctgccgaaggccatgagccgtgtgaagaccacaaagctcccaaccatgtggcacgaccacaggcaaggtacccaacgcaatcagcctcatggcccgtaaacctgttctctggccttccacgaatggaagatgagcaatgcagtagcagcacaagcggcagcagcagagaggataacacagatatagaatgagtggatcagctcctacaatcaaagagtctctgttttgagtctagtggatgtaaatttgaatctcctttttggatttcagaacgatagattatactctgttggaaataggacccctcccattgcaagtctttgttggaatctctataaatgcgaatcaatcttactggcactttgcatgccgaagctatggtctgggataatcaatgtttagatacagtttagcaaagcttggccagtggccatcaaaacagaatgttgcataacatctgataattgtcaactatagaataaggggatgtttggtttttagagactaatttttagtccattcattttagtctttatgtttgtcaatttagaaactaaaatggagggaataaaaattagtctctat

SEQ ID NO: 87270 - DNA, 774 bp, Zea Mays
acgccgcctctaaccctccacagtccctctcgccttccccttcacaagtcacagtcacagcacatctcgcggcggctgcgtcggcggcgacagaggcaggcggcggaggcagcgtcagccatggtgcacgtgagcttctatcgcaactatggtaagactttcaagaaaccaaggcgtccttatgagaaggagcgtcttgatgctgagctgaaattggtgggtgagtatggcctgagatgcaagcgtgaactgtgccgtgtgcagtatgccctcagccgcatccgaaatgctgcaagggagctgctcacccttgatgagaagaaccccgccgtatccttgaggcgccgccttcagaccattgtcttcaagaatggcatggcaaagtccatccatcatgcgtgtgctcatcaggcagcgccacattagagttgggaggcaacttgtcaacatcccctcattcatggtgaaacttgactcagagaagcacattgacttctcccttaccagcccgctcggtggtggcgaacctggaagggtgaagagaaagaaccaaaagaaggcttctggtggaggcggtgatgatgaggaggaagagtgatcgtgtgatgctaactctttgttttgttagagcctaattttgctggctttgataggacctaattttgttacatgaaaacaaaagttggctgtcgagtttttctctctctctgaaattgcaatttaaattcttgagaactgcaattgtcgactctcgttaccgaagttttaaatgtg

SEQ ID NO: 87271 - DNA, 1913 bp, Zea Mays
gtcagcgaagggttcctctgaccgggcgaggctctcatggcggcggctgaccccgagacggcggcggcgctgcggggggaggtcgccgcgctgcggatgcgcgtacaggagctggaggcagagaatcagaggctggcaaggattgcttcgacctgtacctgcggattcaaggagggcagtgttggatccattactgcacatcataatgtgaaatttcatcaaaatagcactatggagaaagatttgagctctccatttgatcacacagtaatatccaatgcaaatgaaatgcagtgcaacagaaatgcagatgacaatggtttacctgaggattcaagcaagcatactaaaagaacaggtcgcaaggtgggcattttaagtcactgcccaaagcgactagttgctctcaaagtcatgtatttcggccagagattctatggtttttcttctgaaggtaacattgaaccaacagttgagtctgagatatttaaagcactggaaagagcaaaactgatggttgccaataggaaagaatcatgctactcgaggtgtggaagaactgacaaaggagtttctgctactggacaggtgatttctttatatctgcgatcgaacataaaggatgttgggggggacatgttagatgaaagatccgaaattgattatgtgaaggtattgaatagaattcttccaagagatatacgtgtactgggttggtgtcctgttccagcagattttcatgcaagattcacctgtttgagccgggaatataaatacttattttggaaaggggacctggatatattggaaatgcagaaagctgcatccaaattcattggagaacacgactttaggaatttttgtaagatggatgcagcaaatgtgagtaactacaggcggcacattacagaatttactatttctgcatgtgacagaaggtccaacaatgatgagctgtgttccatgacgatcaagggtagcgcttttctgtggcaccaagttcgctgcatggtagctgtgttatttctaataggtcaaggccttgagtcaccatccgtagttgattcactattggatattatgaaaacatctaggaaacctcaatataaaatggcgccagagcttccattgattttgcaatcttgtctatttgataaagccaactttatgtgttcagcagatgccagccggtctctgactgagcacttaaatgatgaatatcgtcaccatatgctccaagctgaaatatttcacatagcgtcatcctgtttaccttttccagaaccaaattcatcagaaacgcctcagaagaagaggaaccatattcctctcctgtcacgagagacagagccttcttacgaggagcgcatatcgaaagtcaaagcgaagctggctgataatctcaagtagagccaccgttttcaattgttacaccaatacttggaagagaacttatggaactgtagaaggtttcttccaaaagcctatatgtttatgacgtgcgctttttttatggcaaaattggatctgttaacatgtggagatggaaattacccggaaacatgagcttagcgtggattttaccattttgaggtgttagaaaagcgtgctgcctattttagactagatatacagactaaaacatatggagccccacatttcgggtattgtcaagttgtgcgtttcactttcaaaatagtgtaagggccttgtgttttttttcttcttctgaatttgttgtaaaatagtctagcatcccttgcaaagagggggtaatgttgttgtcacatgatggtgtgtaccaaagtgtagtaaagcatcccttgcaaagagggggtggtagtgtcctgtatgtttttttaagcaaatgtgacaaactatataagaaatgaatatttcatgtgagttatgta

SEQ ID NO: 87272 - DNA, 1486 bp, Zea Mays
  misc_feature (1486)..(1486): n is a, c, g, or t
taaagacaataactaatatacaatcatatgttatgtgcaagcgtggctaccaacctatagtcttaaaccgtcaacaaatgcagtttggtgatatgagcagcaaacagagattagagaggcagcaaagaaagataacagaagagacagacggaaagaacaccggaggcggagagccacaggaggaggagctcgagggacgacgaccagctgaattaggactggagggggcagacgacgtcgtcgtagcggcagcagcaggagaagggaagactcaaacgagggatctccgagagaggagtgtggtaggcaggaagaaagaataaggcgagccgagagccattcgcatggaggcggcgatggatctgatgcggcggatgccgccacggagcgcggagacggcgctcaacgcgctgctctccctcctccccgaccactccctcgacctcctctcccaggtttgcatggataaggagagcctgaaggaatacattctatgcgaatataaccgtgatgctgactcctaccgtgcctgatctgaatgaataaacatgacccacaccagaactttaaatcctttttggaggaagctcttattttttccctcaaacaccaggagagctgcatatctttaggctgtctccagcaaggttctctaaatttcgtcctctaaagaaatattctttgtcctttacagcatcctctaaaaaattttgtcctctatatcttcttcatctccggcaacatcctctaaaaccggtcctctatatctacagttttaacataatccatatattattaataaaacaaatatccgtgatcattgcatgcatattaatccgtatttatttacaaaattacgagacatttaaatactgcaaattattttttattcatattaataaatatgttgtacagctgcactcgcacagtggcacaattgcattttttctctttgttggatgctcgtccggtgactttcgcatcgcgctgccgcttttcctcactggccgagctcgtccgctgctgctcctcctcgatcgccatgcaccacgccgcagacgagctcctccgttcttctgctcctcgcctactgtcgcgctcgtgctcctccaggcggtccgccgcacaagctcgtccttgtccctggtgatttgctgcgcgggctgcttctcgtctttggcgatcggcgctggcgatcggcgcgtgtgctcctcctcgtccccgacgattcgattcactggacgggcgggctgcttctcgtcttcggcggcggccgatgtctattgtgttgcccacgctcattggccggatagcggacgcacaaccatccgccacaaatagcgtgcgcaaggaccatcctctactttaccggaacctttacatccttgttggacacgatacaggatgtttggttctctaaatttggcgtacaggacggtatagcggcccttgctggagcaagtcttatatattagagagaaaaaan

SEQ ID NO: 87273 - DNA, 477 bp, Zea Mays
caaatgcagtttggtgatatgagcagcaaacagagattagagaggcagcaaagaaagataacagaagagacagacggaaagaacaccggaggcggagagccacaggaggaggagctcgagggacgacgaccagctgaattaggactggagggggcagacgacgtcgtcgtagcggcagcagcaggagaagggaagactcaaacgagggatctccgagagaggagtgtggtaggcaggaagaaagaataaggcgagccgagagccattcgcatggaggcggcgatggatctgatgcggcggatgccgccacggagcgcggagacggcgctcaacgcgctgctctccctcctccccgaccactccctcgacctcctctcccaggtcgacctcccgctccaggtttgcatggataaggagagcctgaaggaatacattctatgcgaatataaccgtgatgctgactcctaccgtgcctga

SEQ ID NO: 87274 - DNA, 459 bp, Zea Mays
caaatgcagtttggtgatatgagcagcaaacagagattagagaggcagcaaagaaagataacagaagagacagacggaaagaacaccggaggcggagagccacaggaggaggagctcgagggacgacgaccagctgaattaggactggagggggcagacgacgtcgtcgtagcggcagcagcaggagaagggaagactcaaacgagggatctccgagagaggagtgtggtaggcaggaagaaagaataaggcgagccgagagccattcgcatggaggcggcgatggatctgatgcggcggatgccgccacggagcgcggagacggcgctcaacgcgctgctctccctcctccccgaccactccctcgacctcctctcccaggtttgcatggataaggagagcctgaaggaatacattctatgcgaatataaccgtgatgctgactcctaccgtgcctga

SEQ ID NO: 87275 - DNA, 1430 bp, Zea Mays
  misc_feature (1430)..(1430): n is a, c, g, or t
caaatgcagtttggtgatatgagcagcaaacagagattagagaggcagcaaagaaagataacagaagagacagacggaaagaacaccggaggcggagagccacaggaggaggagctcgagggacgacgaccagctgaattaggactggagggggcagacgacgtcgtcgtagcggcagcagcaggagaagggaagactcaaacgagggatctccgagagaggagtgtggtaggcaggaagaaagaataaggcgagccgagagccattcgcatggaggcggcgatggatctgatgcggcggatgccgccacggagcgcggagacggcgctcaacgcgctgctctccctcctccccgaccactccctcgacctcctctcccaggtcgacctcccgctccaggtttgcatggataaggagagcctgaaggaatacattctatgcgaatataaccgtgatgctgactcctaccgtgcctgatctgaatgaataaacatgacccacaccagaactttaaatcctttttggaggaagctcttattttttccctcaaacaccaggagagctgcatatctttaggctgtctccagcaaggttctctaaatttcgtcctctaaagaaatattctttgtcctttacagcatcctctaaaaaattttgtcctctatatcttcttcatctccggcaacatcctctaaaaccggtcctctatatctacagttttaacataatccatatattattaataaaacaaatatccgtgatcattgcatgcatattaatccgtatttatttacaaaattacgagacatttaaatactgcaaattattttttattcatattaataaatatgttgtacagctgcactcgcacagtggcacaattgcattttttctctttgttggatgctcgtccggtgactttcgcatcgcgctgccgcttttcctcactggccgagctcgtccgctgctgctcctcctcgatcgccatgcaccacgccgcagacgagctcctccgttcttctgctcctcgcctactgtcgcgctcgtgctcctccaggcggtccgccgcacaagctcgtccttgtccctggtgatttgctgcgcgggctgcttctcgtctttggcgatcggcgctggcgatcggcgcgtgtgctcctcctcgtccccgacgattcgattcactggacgggcgggctgcttctcgtcttcggcggcggccgatgtctattgtgttgcccacgctcattggccggatagcggacgcacaaccatccgccacaaatagcgtgcgcaaggaccatcctctactttaccggaacctttacatccttgttggacacgatacaggatgtttggttctctaaatttggcgtacaggacggtatagcggcccttgctggagcaagtcttatatattagagagaaaaaan

SEQ ID NO: 87276 - DNA, 98 bp, Zea Mays
ggctgcaagagtagtcggtcattcccgtgttctgccaccattcctgttctgccaccgttcccattcccatgtctgtcattctcattccctcctcccgc

SEQ ID NO: 87277 - DNA, 1436 bp, Zea Mays
agaagagcagatggcagagtagataggcagagcgacagtctgtccagaattcttattacaagtctgatgccttttccctaatcaatattcccttatatctcaattacaactcacacaaactccctaagccgagtactaggccggcgcagcctggatccccttcgtgggcctgcattggatggttcttctgtcggacttgttacagcagtagtaacacaggccgtggcttttatcatcatcaatcacaagtaacaacagtatcgcaagtagtaaacatgaagcgcgaagcgggtcgatggaagcacgggggagccagctaaaccagtccatacaacaccacctctcaagtgacaagagtatcgcaagaacacagcaacagtggcgactgcacaagcacaaacgcacgcgcagccgcgctccacaagttaacttgaatcgtcacatacatagaaataggtcactcagcctagacggcagcagcagcagaaggaaaccctcagaagaggtagcagcagtagtaggcgagcaggggagccgccacggcagccaacagggcggtcgccgtcatcggaggagagctcgccgccgcggcgcgcggtgaagatgccgccgcgccaccgctcgatgaccccccggcggcggacggtgcaggtgctgcgaatgacaacagcttggtggtcagaaactcagaacccaccacagctttattacagttggatcataacagcaactgtattactgaacgcccatttcaggatggttccacgaacgaacaaaaccactccagtccatccactagtttggccaaaggtgtgtagtgtagtcaacatacattattccacaggcattaaagagaagaaaaaaaatgctggccgagtactcccgtgacttgccagtcagactgtgcccgtgacaactgtgccagagaaacggctgcaggtctccaggaattaagtaatgatacttttgcacggcgacccatggtctagtactgaaggacaggcgatgaaatgtttcatgttggaatgctaaacctagagtagcaagttatctccaacaacagaatccttacccatctcatatctcactctttatttcaaactctatattcaactctctactttaaactctggtcaatatattttacatgctcgagatggcctaataataatagtgccatcataacgaggctaactaggcaggcttcaaacagctctatgtcaccaaaatcctaggtgggaacatagagggagagaagaaagtgagtgcttatggctccctagaattctagggggagaaagagcttgcttgcgtgagttaaagatgactctttcttttttttctgtcaatctaaatgatgactctctctaacttaagagtcatagaagaataagctcactatatgtatcgggtattattattggctatggcaagag

SEQ ID NO: 87278 - DNA, 606 bp, Zea Mays
aacaaaggcgccctcaacaacagggctttccggtttgattagggcctgatccgtttcgtagtttttttttctcggtaatccagccgttttccctttccccagagattcgcatattctcgcgatgggagcggaggaagcagagggtactcccccgccgctgcccgccaccggcgagcccgcaaccacggcaagggcgcagccaatatctgcagcacaattcctctcctggaagcagcgcaagttgcccgcatggagatggttgagcacgcatgcatcggtgcagattatgtatttgcggaagtctttaacctgcacctggggatacgcgtgaaagcggcgtatgtgctgggccatgctcgcgtgagcccggctgcatggacgcaggcttccaattaccaccattcttattgctcaagtaccaaataggcttgccaaatttgtgcactatatttcaatctatactggaagcatacatttttcaaacactgtatattcctgtacacagtccttatggtcttttctggctctggctattgatgtccatgctaagtgtagggagaattttgttattgtcataccctgaggttatgttgtcatctggcagtt

SEQ ID NO: 87279 - DNA, 685 bp, Zea Mays
aacaaaggcgccctcaacaacagggctttccggtttgattagggcctgatccgtttcgtagtttttttttctcggtaatccagccgttttccctttccccagagattcgcatattctcgcgatgggagcggaggaagcagagggtactcccccgccgctgcccgccaccggcgagcccgcaaccacggcaagggcgcagccaatatctgcagcacaattcctctcctggaagcagcgcaaggatgcagaggtagccgcaaggaaagctgaagcagctgagaagcgagctgatgatatcgcttcgggagcggcgcagatgaacggccgcgagctgttccaacatgagccctgggtgttcgacaacaacatttactgagatcgtgtcgggctactgttcctgcattagtccaagctccagcggtggtttcattttgtactgctatatcagctttgcgaaactgtggattttatttcaccgtttctaagattattctctcaataggtaattgaacttgtttcaaatacgttttgccaaatctttgtgcagtcaccgaatggtatctagtgtcgctattctttttctaaaactcttacaaacaaagagtattggtcggaagagaattctcgatcttcagattatcgttgttttcatctttcagttatcctattgtgaagtctgatgcaa

SEQ ID NO: 87280 - DNA, 688 bp, Zea Mays
aacaaaggcgccctcaacaacagggctttccggtttgattagggcctgatccgtttcgtagtttttttttctcggtaatccagccgttttccctttccccagagattcgcatattctcgcgatgggagcggaggaagcagagggtactcccccgccgctgcccgccaccggcgagcccgcaaccacggcaagggcgcagccaatatctgcagcacaattcctctcctggaagcagcgcaagtaggatgcagaggtagccgcaaggaaagctgaagcagctgagaagcgagctgatgatatcgcttcgggagcggcgcagatgaacggccgcgagctgttccaacatgagccctgggtgttcgacaacaacatttactgagatcgtgtcgggctactgttcctgcattagtccaagctccagcggtggtttcattttgtactgctatatcagctttgcgaaactgtggattttatttcaccgtttctaagattattctctcaataggtaattgaacttgtttcaaatacgttttgccaaatctttgtgcagtcaccgaatggtatctagtgtcgctattctttttctaaaactcttacaaacaaagagtattggtcggaagagaattctcgatcttcagattatcgttgttttcatctttcagttatcctattgtgaagtctgatgcaa

SEQ ID NO: 87281 - DNA, 1545 bp, Zea Mays
catgcatgtgcaaatggctgctacgcgcctacgctgcagtcgtagagacactataaataaacaccaggttccattcgtctctgcagtctcacccacaagagacacaaacctagcgcaacaagcaatcgaaaaagagatttggctacaaccaattaaccatattggccagcagtgtacgtgggaacgatggccctcatgcaggagagtagtagccaggatttgctccaagctcacgacgagctcttgcaccattccctgtgcttcgccaaatcgctcgcgctcgccgtggcgctagacctccgcatccccgacgcgatccaccaccacggggccggcggcgccacccttctccagatcctcgccgagactgcgctccacccaagcaagcttcgcgcccttcgccgcctcatgcgcgtgctcaccgtcacgggcatcttcagcgtcgtcgagcaaccaccagcaggtggtggtgatgattcaaccgtccacacgtcggacgacgaagctgtcgtcgtctacaggttgacggcagcctcccgcttcctcgtcagcgacgacgtgagcacggcgaccttggctccctttgtgagtctggcgctccagcctatcgctgcctgtccgcacgccctgggtatctccgcgtggttccggcaggagcagcacgagccgtccccgtatggcctggcgttccgccagaccccaacgatctgggaacatgctgacgacgtaaacgccttgctgaacaaaggcatggccgcggacagccgcttcctcatgccaattgtgctgagggagtgcggcgagacgtttcgtgggatcgactcgttggttgacgtcggtggtggccatggtggcgccgccgccaccatcgccgccgccttcccccacctcaagtgcagcgtgcttgacctcccgcacgttgtcgccggtgctccgtctgatggcaacgtgcagttcgtcgcaggcaatatgtttgagagtattccacctgcaaccgctgttttcctcaagaaaactctacatgactggggtgacgatgagtgtgtcaagatattgaagaattgcaagcaagccatatctccacgggatgcaggtgggaaggtaataatcttggatgtggtagttggatataaacagtcaaacataaagcatcaagagacacaagttatgtttgatttgtatatgatggcggttaacggagttgagcgtgacgagcaagagtggaagaagatcttcactgaagctggattcaaagactacaaaattctacccgtcattggtgatgtatcggtcatcatcgaggtctatccttgaatgctttgtgaacaaaggcctccataataaactgaagaccaagaaggtgttgatagtatattatgaattgttatttgtcctgtacacttgattctttgcgtatttgtaatgacaagttgagtaattgtgtttttgttaatgtggtgttatgaagcgcatttcaagttacaagcgtaccagtggcggacctagaaaacttcaaaatcctgggcatttgatttgcgagataga

SEQ ID NO: 87282 - DNA, 1562 bp, Zea Mays
gcagtcgtagaaaagcagaacactataaataaacaccaggttccatccgtctctgcagtcacccacaaccaattagccattggccagcacagcagtgtataggcatagctacgtacgtgggaagtgggaacgatggcactcatcatgcaggagagtagtagccatgatttgctccaagctcacgacgagctcttgcaccattccctgtgcttcgccaaatcgctcgcgctcgccgtggcgctggacctccgcatccccgacgcgatccaccaccacggcgccggcggcgccacccttctccagatcctcgccgagactgcgctccacccaagcaagcttcgcgcccttcgccgcctcatgcgcgtgctcaccgtcacgggcatcttcagcgtcgagcaaccaccagcaggtggtggtgataattcaaccgtccacacgtcggacgacgaagctgtcgtcgtctacaggttgacggcagcctcccgcttcctcgtcagcgacgaggtgagcacggcgaccttggctccctttgtgagtctggcgctccagcctatcgctgcctgtccgcacgccctgggtatctccgcgtggttccggcaggagcagcacgagccgtccccgtatggcctggcgttccggcagaccccaacgatctgggaacatgctgacgacgtaaacgccttgctgaacaaaggcatggccgcggacagccgcttcctcatgccaattgtgctgagggagtgcggcgagacgtttcgtgggatcgactcgttggttgacgtcggtggtggccatggtggcgccgccgccgccatcgccgccgccttcccccacctcaagtgcagcgtgcttgacctcccgcacgttgtcgccggtgctccgtctgatggcaacgtgcacttcgtcgcaggcaatatgtttgagagtattccacctgcaaccgctgttttcctcaagaaaactctacatgactggggtgacgatgagtgtgtcaagatattgaagaattgcaagcaagccatatctccacgggatgcaggtgggaaggtaataatcttggacgtggtagttggatataaacagtcaaacataaagcatcaagagacacaagttatgtttgatttgtatatgatggcggttaacggagttgagcgtgatgagcaagagtggaagaagatcttcattgaagctggattcaaagactacaaaattctacccgtcatcggtgacgtatcagtcatcatcgaggtctatccttgaatgctttgtgaacaaagacctccataataaactgaagaccatgaaggtgttgatagtatattatgattttttatttgtattgtacacttgattctttgagtatttgtaatgacaagctgagtaattgtgtttttttgttaatgtggtcttatagtgcacattacacatgatgtatgatatgttacttgccctcattttggtgtagatgtgtgttggtcaagtagtcgataggcaactctattatgcttggcatcaataagacaacatggaagcctatgatttgttgtgtcatggcaacaagg

SEQ ID NO: 87283 - DNA, 863 bp, Zea Mays
tttgacatatatgtatatagtgcaaaatagaagagtcctttcaaatgtttctagaacaaaacactatgcaacacttctatttaatttggcagcgattctaatgttccaatattaccaaatgaacccttaatttgggacgaaaaaagtagaagtaaatagttctaacatcataaacatacatgttattatctttgaatccaaacaccaagaacccttttgttcatcatctatcaattaacttgatgaaatctatgccagaaaactctacatgactggggtgacgatgagtgtgtcaagatattgaagaattgcaagcaagccatatctccacgggatgcaggtgggaaggtaataatcttggacgtggtagttggatataaacagtcaaacataaagcatcaagagacacaagttatgtttgatttgtatatgatggcggttaacggagttgagcgtgatgagcaagagtggaagaagatcttcattgaagctggattcaaagactacaaaattctacccgtcatcggtgacgtatcagtcatcatcgaggtctatccttgaatgctttgtgaacaaagacctccataataaactgaagaccatgaaggtgttgatagtatattatgattttttatttgtattgtacacttgattctttgagtatttgtaatgacaagctgagtaattgtgtttttttgttaatgtggtcttatagtgcacattacacatgatgtatgatatgttacttgccctcattttggtgtagatgtgtgttggtcaagtagtcgataggcaactctattatgcttggcatcaataagacaacatggaagcctatgatttgttgtgtcatggcaacaagg

SEQ ID NO: 87284 - DNA, 132 bp, Zea Mays
catctcgaaagatgtagacctcatagtgataggcatttcaaatgcggcctaaagcacggtctctgggctactaaactctataaagaatttagtgcagccattgcttaggactccatcaccctatgcttttcc

SEQ ID NO: 87285 - DNA, 1015 bp, Zea Mays
acactataaatacaacacaaggttcattcgtctctgcacccacaaacccagttatatagctagcaatcgagagaaagccaactagcagtgtataatacgtgggcacgcacgaatacgatggcactcatgcaagagagcagtagccaggaccaggacatgctccaagctcacgacgagctcttgcaccattccttgtgcttcgccaaatcgctcgcgctcaccgtggcgctggacctccgcatcccagacgccatccaccaccacggcggcggcgccacccttctccagatcatcgcggagactgggctccacccaagcaagcttcgcgccctaggccgcctcatgcgcgtgctcaccgtcacgggcaccttcagcgtccagcaaccaccagccggtagtgacgacgacgaagctgtcgtcgtctacaggctgacagcagcctcccgcttcctcgtcagcgacgaggtgagcacggcaacaaccttggctccctttgtgagcctggcgctccagcctatcgctgcctctccgcacgccctaggcatctgcgcgtggtttcggcaggagcagcacgagccgtccccgtatggcctggcattccgccagaccccaacgctctgggaacatgctgacgacgtaaacgccttactgaacaaaggcatggtggcggacagccgcttcctgatgccaattgtgctcaggcagtgcggcgagatgtttcgtggcatcaactcattggttgacgtcggtggtgggcatggtggcgccgccgccgccatcgccgctgccttcccgccactacaggagaagcctaaaatttcgtgggccggtatattttcgtcggtcggcccacgaaaataaggaagttattttcgtcggcctagtggccgacgaatataatacgtattttcgtaggcctattaatattttcgtcggcaggccgacgaaaatacggaaattattttcgtaggccgacgaaaataagctatattttcgtgggccgaggccaaaccga

SEQ ID NO: 87286 - DNA, 571 bp, Zea Mays
ttggcccacgaaaatttacgtgtttcctgtagtgcgcacgtcaagtgcagcgtgcttgacctcccgcacgttgtcgccggtgctccatctgatggcaacgtgcacttcgtcgcaggaaatatgtttgagagtattccacctgcaaccgctgttttcctcaagaaaactctacatgactggggtgacgatgagtgtgtcaagatattgaagaactgcaagcaagccatacctccacgggatgcaggtgggaaggtaataatcttggacgtggtagttggatataaacagtcaaacataaagcatcaagagacacaagttatgttcgatttgtatatgatggccgttaacggagttgagcgtgacgagcaagagtggaagaagatcttcgctgaagccggattcaaagactacaaaattctacccgtcattggtgacgtgtcggtcatcatcgaggtctatccttgaatgctttatttgtgaataataaagggcgcctaattcataataaacctaggattgtgaaggcgctggtagtacattaagaattgttcctttttattaccatgtgctt

SEQ ID NO: 87287 - DNA, 855 bp, Zea Mays
atgtttctcgttataagtgagggtgagcgcccacttgtaaacatcccataattgcttgctttccatttcgcacctcgaatgggttttgatggcgagttgattggcggatcacgagtcgggagggagtcgtgctacgttggattagggtgagactcttcctcgtccgagtatcaccctttactatctctctctcggtgattcgggcgcatgccttccttgttgtagggtgcccttgcttccatcgtccgagaggcatcaccctccatggagtcgttgtggccaggcccgctggctcctcttcccctcccttgggaatcccaggagagtcatgacaccttttcgctcggtgcaagaggccagtgagactgaggctagagtgattcgagctcagctcgctgaatccgattgtcgcatggctgataggttcctacattataacctttctatcccccttgcgttttgacccctttcatgtcttcctttccttttgctctggaagctgagctagagaagttgcgccatcaggtgggttaggttgcagagtacgtcaaggcctgtgattcgtccttgatggagtgcctagacagtgtcatgtgctgcgttcgggatattgttgactttgacgtacatcgaggggctgctgtggcactactcgtcgagggagcttcggtggggccgcactcttcgggacatcatcgcccccctcgtccttgtcagatgaggggactgatggacctcctggagggctatgataaggcggccagccgtgtcatgaaccggttgtttgtagatggcgtcgtgtgcagtgctcactgagttgtgatgtcgctgctgaataaaattagtttttatttt

SEQ ID NO: 87288 - DNA, 2734 bp, Zea Mays
aaccctaccctgccttttgttcttccgttccatcgccaccagcctgcgcggaaccccccaccctcacgactgggccggccgtcgctaacgccttcggtgccccttcgccggcgacgagcaccaccagtcatcatgtcatcatatcctgttctaaacaaccgaccaatcgatcagtggagagttactgatctgaaggatgagctccgtaaaaggaagcttcctgttaaaggtttgaaagaggaactcgtcaagagactctctgactccattcagagtgaaagagaagctgacgaagctgatgaggatgtgggagtgaatgtggatgatcagttgcctgatgccaatgctattgaggaaaatacagttactgttacagaagttcatcaggaaactgtggttgatgtcactcatcaagttgaagttcctacaaccgaagttggtcaagaatccataatttctcccactagaggcccccccagtgttgatgttgaagaggcctcaacaaccaaaggaaaagtacctgaatcagttgctcgaggaaatttgacatttgaagaagtgcaagtgcatactaaaagtactaatgagcctcttcatgagaagaccacagatgttgacaccaatgatgcagtcgatgtgaattcagacttgatccctgctgaagtcaagtttggtgctacagaagcaagcaaaattgaagaacaggattttcccccagcgcctgtagatgacttaacttcagattctactggtcctttgggtactgatgttgtcacagctgcaacttcaggtgctggccctatggatactgatgttttcatagctacaacatcagatgctggtcctatggatactgatgttgtcacagctgcaccagttagcgacgaaggggagaaactggcacccaaggatgcttcgggtaacaaggtgtcaatgcatgatgaagagcagaataattctgataccatgaacgaggactgcaagcccatcatatcacaatcaaataatcaggtacccgaggttagtcaagatttagggtctcaaattaagtgtgagtcgatttctactgataatctatcaactaacaaaaagaataatatagaaggtaatttaaatgctaataattttgatttagaactagagattcagccgaagatggtcgaaccatcatccggcattactccattaggtggagatttgcagccattggatgatgacaaagagctggttaagaaccagacatctttggaagacatagattccacagataatgtggactcatacaagaaagatagtcctgaaggtggatctccagagaaattaaatctagacaggagttcaggtgatgaatcaatggaggaggatactgtggaaattaaacaagatgagtccaatatgaaatctgatgatctcggaggaaagaatgagtttaactcagaagatgtgaaagaggtgatcctccctgattctgttgttgaggcttccaaggaggctatggctgaagaaaagtcagcagcttcaacagaaaagaggaaacttgaagctgaagaaggtgttgcaagcactgaaccaatcaagcgacaacgtcggtggactgcagatattgccaaagtttcagggagacaagcattgagtcaaactggtcctgaaactcctaaggaaagttttcagcctgctttcaaacgatcttttgggaggtctgattcaacagccagtgtagattctcctaaggagcggattgtaccaccttccgagaaacctcccacaacttctttgagaattgaccgatttgtacgcccatttaccctgaaagctgtgcaggagtttcttggtaaaactggatctgtacaagacttctggatggaccatatcaagactcattgctatgttacattttcttcggtggatgaagctgtggctactagggatgctgtttacaacctacagtggcccccaaacaatggcaataagttggttgccgagtttgttgatcctcaggaagtgaagctcaaggtcgaccctcctcccccgccagctgctcctgttagcccagctgctgccacaagggcacctcctgttcaacatactcagacaaatcaaagtgtgccacgccaggctgctgcaccaaaggaggaactgccacctccacctccccctccccttgctaagccccctatggctgacctgacgcctttaggaagagagaggcttccacccactccaaaaaagccggagcctcctgtcgtgacacttgacgatctctttaagaagacacagtcctctccgaggatctattatcttcctttatcagaagaggaggtggcagccaagctcgccgcacagggcaaaggaaaaaagggataggaggtgttagcttccattttcggctagcttggagtttgttgcggaacatggcgtgcggtggtcacagcagctgacacgtgctactgctgtggcgaaagagttgtagccttgtagggctgttctgtggaaaaaggacactagtgtaggagcagcagcttgtatttcctaatgagattgttagttttgattgggtctccgagtagagtgtgtgctgaagttatttgatctacatgaagtgttgaggtacttagtttaatttatgctgccaggtactgtaaaactgaaagatactggttctagttttgagtctatggagaatactgttacaccgtctcttattttagtcttcgccttggttgctgaccgtgaa

SEQ ID NO: 87289 - DNA, 800 bp, Zea Mays
tccttgtaggaccttagtttctgtatctgtacgcttcatgagtgactatctgttaacctttttttttatttgtgttgtagtaccaccttccgagaaacctcccacaacttctttgagaattgaccgatttgtacgcccatttaccctgaaagctgtgcaggagtttcttggtaaaactggatctgtacaagacttctggatggaccatatcaagactcattgctatgttacattttcttcggtggatgaagctgtggctactagggatgctgtttacaacctacagtggcccccaaacaatggcaataagttggttgccgagtttgttgatcctcaggaagtgaagctcaaggtcgaccctcctcccccgccagctgctcctgttagcccagctgctgccacaagggcacctcctgttcaacatactcagacaaatcaaagtgtgccacgccaggctgctgcaccaaaggaggaactgccacctccacctccccctccccttgctaagccccctatggctgacctgacgcctttaggaagagagaggcttccacccactccaaaaaagccggagcctcctgtcgtgacacttgacgatctctttaagaagacacagtcctctccgaggatctattatcttcctttatcagaagaggaggtggcagccaagctcgccgcacagggcaaaggaaaaaagggataggaggtgttagcttccattttcggctagcttggagtttgttgcggtatgcttaagttctgttgaaatgtgctttactagtccttttttgtccaaataa

SEQ ID NO: 87290 - DNA, 995 bp, Zea Mays
gaaagggctacatttcaatctctcagacactagacactacctatctactccaagatccgcggcggcgtgctggcctactctaagatccgccggcgcgtcgtggcggctcctccgcgtcccgcctccgaggccgcgggcggcgtcaggctgatcggggtggcgcgcggcgccggggagcgccccatcgtattcgtgcctctcaagaggttcgcggacgcaggtcggaccactgccgcgcccttcctcttcctgccggccgccgcactcccgccagcgccgtactacttactacctgcatactgtattctgtagtagtatgaaaagcctaggccatggagggggtatcatcagctccagaaatggacgaggctatctcaactgaccaatcaagcagatcaacaaaaagaagggctaaagtgtgggatcatgttgattcagagctaatagatgggaaagagaaggcggtttgcaaatactgtaaggcccacttatcttctgctgcgggtaaaggctaaggagttccttggtgcttccggtgacaagcgaaaggaagtcaattaactctgaatcagtggttctgctgcaaggttacacacaacattttattgaatggaaagaggacactcggtgaccacaagatcatcagatgatcatttgttgagctctggaactaaatcctctccgcaggtggtaaccaggcgggttcccatccgagttccgaggtcactgtaatgctaaattgtcaagttcagttatctgaattcagtttgagttataattctcatcaagcatcaatgtcaccaactgtgtagaaatactgaattttagcatggagcgtctttataaacattttagcatggagcagtttctcatcgatcatggctgtcaagttctatttctctacacagttgcactttgtggttgttttctatcatttgtttgtgagcccatggattttactaatttattagcttgtggtggtgcttgcttgtata

SEQ ID NO: 87291 - DNA, 842 bp, Zea Mays
gaaagggctacatttcaatctctcagacactagacactacctatctactccaagatccgcggcggcgtgctggcctactctaagatccgccggcgcgtcgtggcggctcctccgcgtcccgcctccgaggccgcgggcggcgtcaggctgatcggggtggcgcgcggcgccggggagcgccccatcgtattcgtgcctctcaagcctaggccatggagggggtatcatcagctccagaaatggacgaggctatctcaactgaccaatcaagcagatcaacaaaaagaagggctaaagtgtgggatcatgttgattcagagctaatagatgggaaagagaaggcggtttgcaaatactgctaaggagttccttggtgcttccggtgacaagcgaaaggaagtcaattaactctgaatcagtggttctgctgcaaggttacacacaacattttattgaatggaaagaggacactcggtgaccacaagatcatcagatgatcatttgttgagctctggaactaaatcctctccgcaggtggtaaccaggcgggttcccatccgagttccgaggtcactgtaatgctaaattgtcaagttcagttatctgaattcagtttgagttataattctcatcaagcatcaatgtcaccaactgtgtagaaatactgaattttagcatggagcgtctttataaacattttagcatggagcagtttctcatcgatcatggctgtcaagttctatttctctacacagttgcactttgtggttgttttctatcatttgtttgtgagcccatggattttactaatttattagcttgtggtggtgcttgcttgtata

SEQ ID NO: 87292 - DNA, 1400 bp, Zea Mays
ttcaatctctcagacactagacactacctatctactccaagatccgcggcggcgtgctggcctactctaagatccgccggcgcgtcgtggcggctcctccgcgtcccgcctccgaggccgcgggcggcgtcaggctgatcggggtggcgcgcggcgccggggagcgccccatcgtattcgtgcctctcaagcctaggccatggagggggtatcatcagctccagaaatggacgaggctatctcaactgaccaatcaagcagatcaacaaaaagaagggctaaagtgtgggatcatgttgattcagagctaatagatgggaaagagaaggcggtttgcaaatactgtaaggcccacttatcttctgctgcgggtaaaggtacaactcatctaaataggcatatttctgtgtattgccatgcaattccaccagaagagagacaaaggttcttagcgacccaaaaaacaaagcctgatgttgctcatgttttcgacccagtagtctttcgtggtctaatagccaagtacttccttagcgcagagatttcattttgaaagtgtgaagatccatcctggaaagaaatgataagttattgtcaaccatcttttcgattagtcggtcgacagactgtccgttcagattgtatgttgttgtatgaagaggagaagttgcagttaattgagcagtttacaaagttgaaatctcatgttagtttgactgctgatctttggtcctctaaccaaaaccttggatatcttggtgtaacagcacatttcattagtgaagattttgagttgcacaaaaagattattgcattcaagaagatttccttcccacatacatcttatgctgtgcaagatggtattacctcttgtttgctagagtggggattggttggtgatttgtttaccctgactttggataatgctagtgtaaacaatagagcaatgaaagatatgcgagatgctttgggcagccagatgtttttcagtggtgaacacctccatgtgaggtgttcttctcatgtgctcaacatcatggttcaagctggactaaaggctaaggagttccttggtgcttccggtgacaagcgaaaggaagtcaattaactctgaatcagtggttctgctgcaaggttacacacaacattttattgaatggaaagaggacactcggtgaccacaagatcatcagatgatcatttgttgagctctggaactaaatcctctccgcaggtggtaaccaggcgggttcccatccgagttccgaggtcactgtaatgctaaattgtcaagttcagttatctgaattcagtttgagttataattctcatcaagcatcaatgtcaccaactgtgtagaaatactgaattttagcatggagcgtctttataaacatttt

SEQ ID NO: 87293 - DNA, 1137 bp, Zea Mays
gcaagcccggcaattcgttgatctccgaatctcccgcccgtcagtctcgagtctccacacctgaaacgtctgagtccatggccgaggccgaagtcgacgccagggccacggccgacgacgagggccgcggcggcagcagcagcaacgtcgccgaagacgggcagccggctgcggcgaaggggcgcgcgaccatatccgtgacggtggtgctgctcgcgctgctggtggcctccgtggcggcgttcctgacgtcgtcgctgccgcgcgccggcgacggcgacggcgagggggtgcagggagctgctggcagggcgggggaggtcgggaagcgcgccgagcccgtcgagcacgccgtcggcatcccggggttcaacagccggctggacgcgttccgcacctgggcggcgctgacgtggatgaagctccggcggccgcgctgctccgacgagccacggtacgacgacgatggtgccgtcggctctctgggggacgccgctaagaagagcttcgagatgggcaaggagacggtggagcaggcggcggcggccacggcgagggccacgcgggacgccgcagagacggccaaggagaaggtgaagggaatagatgacgctgagctctgactcttgagaccatgcatgcatatagagctgagcgagctctatctggatttccagtccgcttagcttgctggtcaagacgcacagcaggttgtgcttgtatatgtttggtcacttggtactatcttcacttcaccttgagatagatgtcaaacctgacggagatggatagatcaaagcaaaagatgcgaaacatggcacaaatcaaataaacgcagggcagcagaagttgccggactgatttgtggcaagctcacacgaccagagctctcccatggtctagcttcgcacgcccaagctccaaaagtcacacgaccaccactttcctcaagagcccttataggctgcctccaacaacagcatgcggatgcgcgattagtaggggtggtgatgcggggcgcgcgattagtacgggtggtgatgccctctatattttatgctataaaatttaaaatttttaagaatcctattaggattagactccattactatttattttgaactattctttctccta

SEQ ID NO: 87294 - DNA, 339 bp, Zea Mays
atgtcctggaacacgggcagcctgcgacggcggctggggccatacagcttctcggtgaagaaggcgtcctcctctgcagtcgggggccactggaatgtcggcacccgtgccgacgacgacgagcacccttcgctggccggcggggccgaggtggtggtggcccttgatggtacggactgctccggctgtttgggtgccgatgtcgaggtcccttcgctgcccggcgggggcttgatggtgaccttggatcgtacgcgcggctccggcggcggcggcggcgccggcgcgtatccttctctgttcagagggaagccgatggtgataccaggcggcgggtag

SEQ ID NO: 87295 - DNA, 1623 bp, Zea Mays
gtacgaggcccatctcccatgacaaatgaaaaccctaatctccagcaccccggcggcctccagcgctcccgctccttgctcgcctccacccgcggccaccaccgccctgcggcccccgccgcttgccagcctccaccgcgccgcgagtcgcgccgttcctgcaccggctggtcctggagcacgggaggacgagcatgtactggttcggccccagccccaaggtgaccatcgtcgactcggacctggccgaggacgtgttgtccaacaagttcggccacttcgagaagctcaaggtcctggcgctgtccaagatgctgggctccggcgtggccagccacgagggcgagaagtgggtcaagcaccggaggatcctcaaccctgcgttccatcttgagaagctcaagcgcatgtgccggcgttttctacgtgctgcgaggagctggtgagcaggtgggcggcggagtcccttggctccgacagctcgtgcgagctggacgtctggccggagctgcagaacctgacgggagacgtcatttctcgcaccgcgttcagcagcagctacagcgaagggagaaggatcttccagctacaggccgagcaagcttcgcttgtcatgaccaacattcggaagatcatgatcctcggctacatgtacttgcctaccgcgaacaataggaagatgcgcaggaacaacagggaggtggagtcaatcctgcgagagataatcgggaagaggatccaggcaaggtgggtctactgctggagacaaacatgagagacgacatggggatgacgatcgaagacgtgatcgaggagtgcaaggtgttctacttcgccgggatggagaccacgtcggtgctgctcacgtggacgatggtggtgctcagcatggacccggagtggcaggaccgcgcgagggaggaggtgacggctctgttcggcagggacggcaagcccgagtacgacggcctaagccgcctcaaagtcgtgaccatggtgctctacgaggtgctccggctgtacccgccggccacctccgtcgtccggcaaacgtacaaggagatggaggtcggaggcgtcacctaccccgcgcgacgtgatcctggagctgcctgtgctgctcatccaccacgacccggacatctggggaggcgacgcgcgcgagttcaggcccgacaggttctccgagggcgtgtccagggcctccaaggaccccggcgcgttcctcccgttcggctggggcccgcgcatctgcatcggccagaacttcgcgctgctggaggccaagatggcgctctgcatgatcctccagcggttcgagttcgggctcgcgccatcctacgctcatgcgccgcataccgtgataaccttgcatcctatgcacggtgcgcagcttaagctcagagcaatatgatcttgacacgatgggtgtcccatcattgatgccattgttatgtataaccttacaattcagataggcactcggccctgttaatgtctgaaataagtatcttcgcgttggcattttgtaatgtgcttttcacgtaccattggtgctttattgccttttgtatataaacatgtggatatatgtaactcgtacattacacaaacaaacacaaa

SEQ ID NO: 87296 - DNA, 1673 bp, Zea Mays
caaatgaaaaccctaatctccagcaccccggcggcctccagcgctcccgctccttgctcgcctccacccgcggccaccaccgccctgcggcccccgccgcttgccagcctccaccgcgccgcgagtcgcgccgttcctgcaccggctggtcctggagcacgggaggacgagcatgtactggttcggccccagccccaaggtgaccatcgtcgactcggacctggccgaggacgtgttgtccaacaagttcggccacttcgagaagctcaaggtcctggcgctgtccaagatgctgggctccggcgtggccagccacgagggcgagaagtgggtcaagcaccggaggatcctcaaccctgcgttccatcttgagaagctcaaggtactactaactactacatataattaattgcatataattaattggtccttggaattatctggcaatgtgcagcgcatgtgccggcgttttctacgtgctgcgaggagctggtgagcaggtgggcggcggagtcccttggctccgacagctcgtgcgagctggacgtctggccggagctgcagaacctgacgggagacgtcatttctcgcaccgcgttcagcagcagctacagcgaagggagaaggatcttccagctacaggccgagcaagcttcgcttgtcatgaccaacattcggaagatcatgatcctcggctacatgtacttgcctaccgcgaacaataggaagatgcgcaggaacaacagggaggtggagtcaatcctgcgagagataatcgggaagaggatccaggcaaggtgggtctactgctggagacaaacatgagagacgacatggggatgacgatcgaagacgtgatcgaggagtgcaaggtgttctacttcgccgggatggagaccacgtcggtgctgctcacgtggacgatggtggtgctcagcatggacccggagtggcaggaccgcgcgagggaggaggtgacggctctgttcggcagggacggcaagcccgagtacgacggcctaagccgcctcaaagtcgtgaccatggtgctctacgaggtgctccggctgtacccgccggccacctccgtcgtccggcaaacgtacaaggagatggaggtcggaggcgtcacctaccccgcgcgacgtgatcctggagctgcctgtgctgctcatccaccacgacccggacatctggggaggcgacgcgcgcgagttcaggcccgacaggttctccgagggcgtgtccagggcctccaaggaccccggcgcgttcctcccgttcggctggggcccgcgcatctgcatcggccagaacttcgcgctgctggaggccaagatggcgctctgcatgatcctccagcggttcgagttcgggctcgcgccatcctacgctcatgcgccgcataccgtgataaccttgcatcctatgcacggtgcgcagcttaagctcagagcaatatgatcttgacacgatgggtgtcccatcattgatgccattgttatgtataaccttacaattcagataggcactcggccctgttaatgtctgaaataagtatcttcgcgttggcattttgtaatgtgcttttcacgtaccattggtgctttattgccttttgtatataaacatgtggatatatgtaactcgtacattacacaaacaaacacaaa

SEQ ID NO: 87297 - DNA, 1691 bp, Zea Mays
atgtactggttcggccccagccccaaggtgaccatcgtcgactcggacctggccgaggacgtgttgtccaacaagttcggccacttcgagaagctcaaggtcctggcgctgtccaagatgctgggctccggcgtggccagccacgagggcgagaagtgggtcaagcaccggaggatcctcaaccctgcgttccatcttgagaagctcaaggagctggtgagcaggtgggcggcggagtcccttggctccgacagctcgtgcgagctggacgtctggccggagctgcagaacctgacgggagacgtcatttctcgcaccgcgttcagcagcagctacagcgaagggagaaggatcttccagctacaggccgagcaagcttcgcttgtcatgaccaacattcggaagatcatgatcctcggctacatgtacttgcctaccgcgaacaataggaagatgcgcaggaacaacagggaggtggagtcaatcctgcgagagataatcgggaagaggatccaggcaagcatggacccggagtggcaggaccgcgcgagggaggaggtgacggctctgttcggcagggacggcaagcccgagtacgacggcctaagccgcctcaaagtcgtgaccatggtgctctacgaggtgctccggctgtacccgccggccacctccgtcgtccggcaaacgtacaaggagatggagctgcctgtgctgctcatccaccacgacccggacatctggggaggcgacgcgcgcgagttcaggcccgacaggttctccgagggcgtgtccagggcctccaaggaccccggcgcgttcctcccgttcggctggggcccgcgcatctgcatcggccagaacttcgcgctgctggaggccaagatggcgctctgcatgatcctccagcggttcgagttcgggctcgcgccatcctacgctcatgcgccgcataccgtgataaccttgcatcctatgcacgattgcaagaatgggattgctaagcaagctaagatttcaatggcatattccttcatacataggccattgagcgacgaggcacaccgcgtcagcactcccgtggtggtcacttgcaatgaccagagacgggaggtcttcgttgcccagaacatcgctaacaagaaaattgaccgcaccgttgcattcgacaaggtgctaggtccaaagtctcaacagcaggacgtcttcaaccatgctgttgtgccacttgtcagcgaggttgacggttataattgcacaatatttgcatatggccagactggaactggcaaaacgtacacaatggaaggaggaggggacaaagcactgaatgctgacctcccgactgatgccggtgtcattccaagtgttgttaagcgcatatttgacatcctcgaggcacagagtgcagagtacaacatgaaggtttcttttcttgagttgtacaatgcggagctcactgatcttctagctctacaatgagattgcaagaacgggactgctaagcaagataagatttcaatggcctattccttcatacataggccattgaaccggaaaattttgtcggtattcggtaactataggatcatgtggttgttggtcgagttggaccaattatgctggctcatttgttggatgttttgacaagtcgattctagcttccttatgatctatgttagatttggtaatgc

SEQ ID NO: 87298 - DNA, 1014 bp, Zea Mays
atgtttcacggaacgtacggggccatgccttgccttgatcaggtacttgcctaccgcgaacaataggaagatgcgcaggaacaacagggaggtggagtcaatcctgcgagagataatcgggaagaggatccaggcaaggtgggtctactgctggagacaaacatgagagacgacatggggatgacgatcgaagacgtgatcgaggagtgcaaggtgttctacttcgccgggatggagaccacgtcggtgctgctcacgtggacgatggtggtgctcagcatggacccggagtggcaggaccgcgcgagggaggaggtgacggctctgttcggcagggacggcaagcccgagtacgacggcctaagccgcctcaaagtcgtgaccatggtgctctacgaggtgctccggctgtacccgccggccacctccgtcgtccggcaaacgtacaaggagatggaggtcggaggcgtcacctaccccgcgcgacgtgatcctggagctgcctgtgctgctcatccaccacgacccggacatctggggaggcgacgcgcgcgagttcaggcccgacaggttctccgagggcgtgtccagggcctccaaggaccccggcgcgttcctcccgttcggctggggcccgcgcatctgcatcggccagaacttcgcgctgctggaggccaagatggcgctctgcatgatcctccagcggttcgagttcgggctcgcgccatcctacgctcatgcgccgcataccgtgataaccttgcatcctatgcacggtgcgcagcttaagctcagagcaatatgatcttgacacgatgggtgtcccatcattgatgccattgttatgtataaccttacaattcagataggcactcggccctgttaatgtctgaaataagtatcttcgcgttggcattttgtaatgtgcttttcacgtaccattggtgctttattgccttttgtatataaacatgtggatatatgtaactcgtacattacacaaacaaacacaaa

SEQ ID NO: 87299 - DNA, 1580 bp, Zea Mays
ttagaagtctgtttgtctgattgcagttgattataaagaagctagagctgatattagaagtctgatattagaagtctgtttgtctgattgcagttgattataaagaagctagagcttccagtcaagtttgatattagaagtcttcttttgcttttacattttgttttttatgatcttgatcttagaagcagggttttggtaccagcttaactaattttctgaagttttatgttcttactttaattataactagatgattgcaataagatatcatgaggcgcgccgaggagaacaggggcctcctctccgcctcctccttcgacaggcagctgctgcggaaggaggtggtgaggagggtcaaggccgcggtggcgggacgtgagtgaagtgagctttgtcgagcctatatgtggaggtcggtcgtgaagctgggactaggacaagggcgagctgaaggctagaagctgtaaatgcacccttcaagagtcttcataggccaagtctctacataggtgttgacaaaaagggaaattcatgacaatgcgtttatatgagattgtccaatatcgaaaccaagaatacatggggggcaactgtattcgatttttgtttctctttcgtggagtattactgaaatatatgcttccagtgttgaagtttccaaattaaatgttatctctgtacaaagtgtgcaggctcggttataggaattttataaagaaaatgacaaatatacatgtacgaacttcaaatatttcctggtactaacctctctgctctgagatgacatgttcttttgctgttatgaaatcaaatatttcttcatgatctcttataatctgtcaaatgatgtttgcccagtggcaatagaaaacccttatattaaagagataatcgatgatgatgcggacagacctaaagatgtttgctcaacttttgctatgaatttattagtaggatgtcttggatatagagtaagcaagttatgtgttgtttattttcatgctaaatgatctttctggaacttacagtgcatggaaggaaacagtgggcgatgaaagcagggaatttgggaggtacatgcgacagagagaagagcaagagaagcaggaagcggagttgttcactcgggctcctgtaaccaaacatgataagcagatcgagaagcgcataaggagacaacttcatgggctaggaggcttaactgacgattttggccttgggatgaacatgctgttgggaggagacaaggaagatgatggcggttcaagaaagtcgcatggcaaaagcggaaaccgaaagaagcacctgaagaacagcaagaagaggatgaggcattagccctagacccacactgttgtagcacttcaatatactgatagagcctagaagacggttcaagcaagccacacgaaaagtgaagccggagaaaataccaagaagccaagtagagaaaaaaagctttggttcctgtcgtattatttctgaaacacaaaacttgatctgagcgactgatcgtgagctaatgtaacagtatgaattatatggcttgaacatggtaggtgtaaaatgttttgttc

SEQ ID NO: 87300 - DNA, 1486 bp, Zea Mays
tctcccacgtgtgcgttcgttgcgcgtgacacgccgagggatcgatcgatcgatcggggtcccagccgtagcatggcgagcgcgcggccgccgcaggcgcagcgcacggcgtggtgcggccgctgcggcgcgcgcctgtccgtggcccccggtgcgcgctccgtgcggtgcgcgctctgccacgccgtgacgcgcgtcgagcgccgcccgcacggcctgcaccgcgccgccgtgggcttcatcaggggcctcatcggcggcctgacgccgccgcagcggcccgcggcggcgctccaggagctgccgccgagctccttcccgcgcgtccgcggctgcaagaagcgcgccctcctggtggggatcagctacgccggcaccaggtacgagctcgggggcgccgtcaacgacgtcaactgcatgagctacctgctccgcgagcgcttcggattcccggcggaatgcatcctcgtgctcacacaggaggacatggagcctggccgggtgccgacgcgggcgaacctgatgcgcgccctgcggtggctcgtggacggcgccagcgccggggactccctggtgttccacttctcgggccacggcgtgcagaagctggacagggacggcgacgaggcggacggctacgacgaggcgctgtgccccgtggacttcgaggacccccgcggcggcggcggcgtcatcctggacgacgagatcaacgccaccatcgtgcgcccgctcggcaagggcgtgaagctgcacgccatcgtcgacacctgccacagcggcaccatactcgacctcccctacctctgccgcctgtccaggaccgggtactggcagtgggagaaccaacagacggcccgcctcgccgcgtccggcgagaccaagtgcaccagcggcggcctcgccatctcgatcagcggctgcggcgacagccagacgtcgcaggacaccacggcgctctccgggtccgcctccaccggcgccatgacgtacagcttcatcaaggcggtggagtcggagccgggcaccacctacggccgcctgctgacggcgatgagagccaccatccgcgacaacggcggtgagttcggcataccgggccccatcggcaccttcttccgccgggtcatcacgttcagctgcgcgcaggagccccagctgtgcgcttcagagacgttcgacatctacaggaaaccttttctcttgtgaccagctcatttcatcatttgctttgtattttgtgagatgtgcgtgaaagagctagaatggcgtgcaggattttgatctcttttcagtagaaaactctacagatgcagtgaaagtggagctgagattgggaatcccagcatcttgcagtgacccgaacttagttatgctcacacagtgacgtagaggcggttcactgaacgagatgccgtaataggcgttcttttggctgaaattgtgccgatatatgctgattcgtaaggccttttttggattctca

SEQ ID NO: 87301 - DNA, 1558 bp, Zea Mays
agtgatacgatcgtttccctatataaagaggcggctgccgggaagaggtgatcgtagaagcaggcaggcagaggcaagaggcccctcaccctcaggtgatcaggtcgctagctcccggcttaactagtaggcagccatgaatttcggtgggaatggcaacgcgacgatccggtgcaagtactgcagggcgagcctgagcgtgatccccggcgagcgcgccatccagtgcgcgcaatgcaactgcgtgacccgcatccggcgggccgaccgcatcccgctggcgcggccggcgcacgtgccgccggcgttccagcgcgcccggggcaagaagcgcgccgtcctggtcggcatcacgtacgccggcgcgcgccggggctgcggcgacctgaggggccccgtcaacgacgtcaagtgcatgaggaacctcctctgccagcgcttcggcttccccgacgaccagagggacccgttcaggctgcccacgaaggagaacatccggatggcgatgcactggctggtgcagggctgcagctacggcgactccctggtgttccacttctcgggcatcggcgcgcaggtggcggacgacgacggcgacgaggcggacgggtacgacgaggccatctgcccgctggacgcgttccagagcgggcccatcctggacgacgagatcaacgaggtcatcgtgcgcccgctggtgcacggcgccaggctgcacgccgtggtggacgcctgctacagcgccacggtcctggacctcccctaccagtgccgcatgtccaggaacgggttctggcagtgggaggacgagagcccgccgtcgggcgcctggaagggcaccagcggaggccacgccgtgctcatcagcggatacagcgagggcaaaggcaacttcgccatggtcagggacatgatacatacatacatactgctgatcgagctctgctgccttgcatctatctatatacctaacatgcatatgctgctgcttggacgacgcgcggcgtgcagatgcccgacgcccacgcgtcggtcgtcggggccatgacgcacagcttcgtccggacgctggagtgccagccgcgcggggtcacctacggccacctgctcagctccatgagggccatcatgaagaaccgcggcgggggctgcgatctgcagggggccatcggcgcacccatccgcaccgtcgccaacttcagcggcgtgcaggagcctaacctgtcctcttcggagacgtttgacatttaccgcaagcagttcgtcctgtagacaccaccacaccagggtttgcccctgccggccggccgcttgtaatgaattgccgtcgtatcagaataagaaattatctatcgaccatgatatgatatgatatatcaggaaagaaggaactattacccctcaatgtaataactaagcatgttcaatgtcctctttttattagagagagagacagagagaaaacgcggaatttgagacgtgtgcatgcagtttacgtgatcaataaagttacatagaaattattttatccacgtgcgatgcaagtggagcttctact

SEQ ID NO: 87302 - DNA, 1476 bp, Zea Mays
agtgatacgatcgtttccctatataaagaggcggctgccgggaagaggtgatcgtagaagcaggcaggcagaggcaagaggcccctcaccctcaggtgatcaggtcgctagctcccggcttaactagtaggcagccatgaatttcggtgggaatggcaacgcgacgatccggtgcaagtactgcagggcgagcctgagcgtgatccccggcgagcgcgccatccagtgcgcgcaatgcaactgcgtgacccgcatccggcgggccgaccgcatcccgctggcgcggccggcgcacgtgccgccggcgttccagcgcgcccggggcaagaagcgcgccgtcctggtcggcatcacgtacgccggcgcgcgccggggctgcggcgacctgaggggccccgtcaacgacgtcaagtgcatgaggaacctcctctgccagcgcttcggcttccccggcgagtgcatcatcatgctcactgacgaccagagggacccgttcaggctgcccacgaaggagaacatccggatggcgatgcactggctggtgcagggctgcagctacggcgactccctggtgttccacttctcgggcatcggcgcgcaggtggcggacgacgacggcgacgaggcggacgggtacgacgaggccatctgcccgctggacgcgttccagagcgggcccatcctggacgacgagatcaacgaggtcatcgtgcgcccgctggtgcacggcgccaggctgcacgccgtggtggacgcctgctacagcgccacggtcctggacctcccctaccagtgccgcatgtccaggaacgggttctggcagtgggaggacgagagcccgccgtcgggcgcctggaagggcaccagcggaggccacgccgtgctcatcagcggatacagcgagggcaaaggcaacttcgccatgatgcccgacgcccacgcgtcggtcgtcggggccatgacgcacagcttcgtccggacgctggagtgccagccgcgcggggtcacctacggccacctgctcagctccatgagggccatcatgaagaaccgcggcgggggctgcgatctgcagggggccatcggcgcacccatccgcaccgtcgccaacttcagcggcgtgcaggagcctaacctgtcctcttcggagacgtttgacatttaccgcaagcagttcgtcctgtagacaccaccacaccagggtttgcccctgccggccggccgcttgtaatgaattgccgtcgtatcagaataagaaattatctatcgaccatgatatgatatgatatatcaggaaagaaggaactattacccctcaatgtaataactaagcatgttcaatgtcctctttttattagagagagagacagagagaaaacgcggaatttgagacgtgtgcatgcagtttacgtgatcaataaagttacatagaaattattttatccacgtgcgatgcaagtggagcttctactacct

SEQ ID NO: 87303 - DNA, 1055 bp, Zea Mays
atctgtagattttcttgacctactatggtcaagatcttataactgcctcctcaattcattctttgcagccttgcaaggggatattgcttttcggacctcctggcactggaaaaactatgcttgccaaagcagtagcaactgaagcaggcgctaatttcatcaatatatcaatgtcgagcattacatctaaggctaaccagtggtttggtgaaggggagaagtatgtaaaggctgttttctcactagcaagtaaaatagcacccagtgttatatttattgatgaggtcgatagtatgctaggaaggagagaaaatccaggggagcatgaagcgatgcacaagatgaagaatgaatttatggtaaattgggatgggttgcgcactaaagataaggagcgtgtgcttgttcttggtgctacaaatagaccttttgacctggacgaggctgtgattaggaggttcccccgcaggttaatggtaaacttgcccgatgcatcaaacagagagaaaattctaaaagtaattttggcaaaagaagagctgggatctgatgttgatatggactcgcttgccaatatgactgatggttattcaggaagcgacctgaaggaagctagcattggtgcagtgcctagtgatgttcaaatataccttaggaggcacagaggaccagatcctgcaaatccagatgtgttgtgcagccaaaaggcaacagatcgtgtggctgcatatggcgaggcgatgtttagtcagcacggaccagactatgactggaggacctcacctattgatcctcaggctgtgtatgcaagtggtggaaaagctaatggaaggtacacaatgttttctaacgtcatcgactcgagccaggtgagggttcagcgtggaggttcatcgaggtctgctgcttgtagctcccgtcgctccactcaagatccagcagaagtggagcaactgcgagaagaacttaggcgacatcaggattacttgaagcaacaagctacgcaacatgaatattatgctacacagattcagcaacaacaaacactcatacaa

SEQ ID NO: 87304 - DNA, 1503 bp, Zea Mays
ctttggcgccagcatctggtaacagtagtttccgttgctatataaagggaaggtaaggcaggagtgtgagggcaggctaaccgaggagctagctagccagcaacgcgtagcaagcagcgcaagcaaagctccgagcgcccggccggctagcttcgccatgaacatgggtggaaggtccccggcggcgacgacgatccggtgcaagtactgcagcgcgagcctgaccgtgtgcgccggcgagcgcgccatccagtgcgcgcaatgctgcggcgtgactcgcatccggcggtcgctgtcctcgcggctcccgctgccggcgctgacgaggccggcttccgtcgcgggcttcccgccgtgcggcggccgcggcaagaagcgcgccgtcctgatcggcatcacgtacggcggcgcgcgccggggctgcggcgagctgcggggccccatcaacgacgtcaagtgcatgaggcagctcctctgccagcgcttcgccttccccagcgacggcatcatcatgctcactgacgaccagaaggacccgttccgggtgcccaccaaggacaacatccggatggcgatgcagtggctggtgcaggggtgcagcagcggcgactccctggtgttccacttctctgggctgggcgcgcaggtcgccgacgcggactgcgacgagcaggacgggtacgacgaggccatctgcccggtggactcgttccagaagggccccatcctggacgacgagatcaacgagaccatcgtccggccgctggtgcccggcgccaagctccacgccgtcgtcgacgcgtgccacagcgattccgtcctcgacctccccttcctctgcaacatgtccaggaccgggaactggcagtgggaggatcaccgtccaccgtcgggcgtctgcaagggcacgagcggcggccaggcggtgcttatcagcggctacagcgacggcaaaagcaagttcagcatgacgccggaggcctgcgcggcggtgggggccatgacccacagcttcatcaaggcggtggaatgcgagccccagggggtcacctacggccgcctgctcacctccatgaaagccatcatgaccaacgccggcggctgcaaccagcagctgcagggcgcctgcgcacccgcccgcaaggtcgtcaacttcagcggcgtgcaggaacctaacctgtcttgctcggagatgttcgacgtctaccgcaagccctttgcgctgtgaacctcctctgcattgccattgcctttgcagactaccacagattcccgtctggactctatatataaattaccgtgacggaataataaaccagacggatttatattatatatgatgatatgtcataatgtgtgccttaattgtcttgcggccaataatgtgtgtccatgtgtcgatcggttaccggccctgagccaagcttatagcctgtggaccgacgactttgttgaccattataaatacaatgttgataatgtttatacgtgtcgagtttatta

SEQ ID NO: 87305 - DNA, 1318 bp, Zea Mays
gtgggagggtgcagtgcagaagtagagtggaggagatgggagatgaaagcaacgagcgggaggcgacgcggcgcctccagcggtgctcgtcacagctgcgcatgcgctccagcacggcatggcgggcgcacgccgggatggtggtcgtccagctcgccttcagcggctaccacgtcctcaaccaagtccgtcctgagcgcgggcatgaaccaggtggtcttctgcgtctaccgcgacctcgtggcgctcgccatcctcgcccccgtcgccttcgtcggcgagagaagggtgaggcctccgttgacccctcagatgctcgcgtccttggctcttcttggcttcactgggctgttcgtgaacccgctcctcttcctcgtcggcctccaacacaccaacgcttcgtacgccgcagcgttcgagccctgcgtgcccgtgttcgcgttcctcttggccgtgattgctggcgttgaaacgatcaacctctccacgcaacatggcgtcctcaaagtcgtcggcacagccgtgggtgtctcaggcgcccttctcatggctttgtacagaggcccgtccttggtaattggccagctgggactgggactgggagtaggaggcgccgccgccactgccaccattcctgctgctcatcagtggccgacatctaccagcatgctcgtagcgacgtggtatcttggtgccttgtgccttataggacactgcttcttggcgagtgcttatctagtgatacaggttcctgtgattacaaggtatcctgcgagcttatccttgacagcctattcctatttttttgccaccatctttatggtgttcactggagtggtttcagccaatgggctccatgagtgggcactgacgaaaactggggtcataactgttctatacgctggaattgttgcgtcttgtatgagctatgcaatcatgacgtgggcaaacaaagttcttggaccttcgctaactgccctctataatccactccagccagctttttccaccgtcctctcaactgttttccttggtgccccagtttacaccggaagcattattgggggattcttcataattgctggcctatatctagttacgtgggctcgctacaatgaagcacaacgggcaacgacagatgattatttggactcacttcttgtgggccactcaagaatcaccaagacataagaaagttgtttcatggatccataaatgttaggacttcaaatagttgtcccaattgttttctccaatacctcactagaataacatgtatatatgttatatatatttttcgaatacgcaagagaattac

SEQ ID NO: 87306 - DNA, 354 bp, Zea Mays
atgggaacaagggaggggctgggggcatccacttgctgcagaaaggggagggcactgcttgctgctagcgtggggagggggacaacatccatgctgcagggacaagctcggccatggggaaggtgctggtgtgggggaggcagccatggttggggcgtcagcttggagaggggcagcgagcagcatcggcttggagagctagagccagggagggacaacggcagctgctgttccacagctgcaaccagagaaggagacgccatggggaagagcagagggtgcgaccatggaagacgcaaggagctgggtggctgctacagactgggagaaacggactgggagaaagagacgtga

SEQ ID NO: 87307 - DNA, 902 bp, Zea Mays
ttatatagtggtatacatataactaatataactaattagttataacaattcatatgaatattaaaatttcatttgaatctttttatgtcataaataaattgcaaaaaaatatataataagatgtgattgtccttcagtgcactcagccatcttcggaaggttaaatatacgccaaaagaaattttcgaggaattctcttttttccccctggtcttcccatactgtcccaaaacctaacaaaacccccacgccgcaatcaaataaataaataaaaacacgccgccaccatctccggcgatgtcgcgcttcgggcgctccgggcagccggagaaccgcgaatctttctccctcctcgtcctcaacgtctccttccgcactacggctgacgacctcttcccgctcttcgatcgctacggcaaggtcttagacatctacatcccgcgcgaccacaggactggggatccgcgagggttcgcgttcgtgaggtacaattacgaggatgaggcgcaggatgccattgacgggcttgatgggatgaggtttgatgggcgtgcgctcatggtgcagtttgccaaatacggacccaatgctgaaaagattcataggggtagaattacagaagaaaatccaaagccaaggggtcgttgcagaagccgcagtccaagacagaggtatcgagaggattattgggatagagactatagaaggcgaagccagagcagaagtagggagcgatatgaacaggccgggtacagagatggtgatcatcgtcgccataggactcacagtattagtcctgattatgacaggaaacgtaacagacacagggcacctcatgaaggaatacctagcaagcccagagatggccgcgctgcatgttctggaagcccttgaccctgagc

SEQ ID NO: 87308 - DNA, 1234 bp, Zea Mays
ttatatagtggtatacatataactaatataactaattagttataacaattcatatgaatattaaaatttcatttgaatctttttatgtcataaataaattgcaaaaaaatatataataagatgtgattgtccttcagtgcactcagccatcttcggaaggttaaatatacgccaaaagaaattttcgaggaattctcttttttccccctggtcttcccatactgtcccaaaacctaacaaaacccccacgccgcaatcaaataaataaataaaaacacgccgccaccatctccggcgatgtcgcgcttcgggcgctccgggcagccggagaaccgcgaatctttctccctcctcgtcctcaacgtctccttccgcactacggctgacgacctcttcccgctcttcgatcgctacggcaaggtcttagacatctacatcccgcgcgaccacaggactggggatccgcgagggttcgcgttcgtgaggtacaattacgaggatgaggcgcaggatgccattgacgggcttgatgggatgaggtttgatgggcgtgcgctcatggtgcagtttgccaaatacggacccaatgctgaaaagattcataggggtagaattacagaagaaaatccaaagccaaggggtcgttgcagaagccgcagtccaagacagaggtatcgagaggattattgggatagagactatagaaggcgaagccagagcagaagtagggagcgatatgaacaggccgggtacagagatggtgatcatcgtcgccataggactcacagtattagtcctgattatgacaggaaacgtaacagacacagtggctctcctgtacttaaaagccccagtcatagcagaagtcgttctcctcgtagggcacctcatgaaggaatacctagcaagcccagagatggccgcgctgcatgttctggaagcccttgaccctgagctgtggctgaatatcacacagcttctcctggacagcttgaggcatctaagcagttctcatcatttgtattttcttactaagatggcctttgttttagtccaggttgagtagactgagctttggcaaaaacaacaatgtctgcttggttactgaatctacatggtgacaatgatggaatattgtgtggcacagcattcaacttccagtactgcgttttgtaaacatctaagcctcatttgggaactatatgcatgatggatattgtcatttcttactata

SEQ ID NO: 87309 - DNA, 366 bp, Zea Mays
gaaaactgaatgtcaaagcatgtcaaacggaatcggatgaatgccatctttcaatatgttgtgcccctattagttattaacaacttttatatttggaaaaacttgagctgttcaacaaaaatttgggaacgcgggacgttgacccgaacaatgctgatttcagacttagaagaattcgaatcctgaaatcagatttttattctgtcttgatggcactgtttgagatacttagaggttgaatcaaggcttggtttaaatataatatttgttgtataacacaggttctacaacttttattgaaggtcaaacctcatatcttgaatataaattaaagtttcacttttgtcaaggtagcatcattataag

SEQ ID NO: 87310 - DNA, 1569 bp, Zea Mays
ttttcgaacccgatggaatccctgcgaaaccccatgtttcggacgtggaaacgacccacgaatgcgtagtcgtggaactcctcccggcctcctgggtatggaagcgacggcggcgacgcgcgattcagagtagcgacgacggcgacgcatggtccctcccgccacccgccaccatcgtcgacagcgaccttttccccgattgtacctgcaccggttagagttggagaagaccaacccccgccgtcttgggacccggtaccatccccgagagttaacatgtttggaaggggttctccaagaatcaacatgctcttatcaaaaagtgcaacaaagaagccttctcctaaagctggtgatccaaaaaagcatggaggttctccaaaagagaaattaagagccgcttggaactcaactctagagaaaactcttgtggacctcttgcatgagcacaaaacagctgattataggggtcaaaatggatggacaacagaagcatggaacaaaattgtcaaggaatttcatcagagggaacaatatgtctatttcacaaagacacaaatacaagataaggaaagagagctgaaaagggactacaggttgctaaaggatgcaaagaatcaaagtggagctcattttgatgagaagatagggaggattacggctgacccagctttatggaaaaatatactaacttctcatcctaaggctaaaaagttccgcaacaagtcttttcctctatatgaggccttgggggagctttatgatgggcaaacagctgaagggacctacaactacacctccacccaacttccagatcttactcaagtaggaaatggagatgaatttctcaacatagaacatgaacaagatgaattggaagaaatcttgcctgcacatgaagaagatgatgtcaatgtagttaaggcaggagatgcaaccggtgaaaggcatgatccgacgccacagagaaggactactgctgcaagagggaacaatgaggaaacgaggacaaagaggcataaaaagggcgataacctagaaggaataatgggaagatacattgacatgagaatgaagcaagctgaggaagaagccacacatctagcaaaagagagggaggaaaaggaagtgagtcaagctgcagacttctcaatcaagaagtgcatatccattcttggtacaatggaagttacaaaggaggaaaaagcaaaagcctacaatgccttcaaagaccttgacaataggcaaattttcttgagtgcctacgatgatgatgctgagtctgcactgatttggttgagaaacgagatggcttagctgaaattacaacaaggactgcagagaaatccagaatcgcttccttttgatgagatactctactgtaacattggaaatctccattccattggccaacagccagttacctatttcagaactagatcattggataactgcattttgttcatgctttaaactgctttaaactgaaatacgttacagctagaactagatcagctgtacatgcttctgcattgaactacattttgttgaacgtggactgcattttgc

SEQ ID NO: 87311 - DNA, 1229 bp, Zea Mays
aatttcagctaactgttttcagcatagaaatttggtttaatactgtgttatataatattagttaacatgtttggaaggggttctccaagaatcaacatgctcttatcaaaaagtgcaacaaagaagccttctcctaaagctggtgatccaaaaaagcatggaggttctccaaaagagaaattaagagccgcttggaactcaactctagagaaaactcttgtggacctcttgcatgagcacaaaacagctgattataggggtcaaaatggatggacaacagaagcatggaacaaaattgtcaaggaatttcatcagagggaacaatatgtctatttcacaaagacacaaatacaagataaggaaagagagctgaaaagggactacaggttgctaaaggatgcaaagaatcaaagtggagctcattttgatgagaagatagggaggattacggctgacccagctttatggaaaaatatactaacttctcatcctaaggctaaaaagttccgcaacaagtcttttcctctatatgaggccttgggggagctttatgatgggcaaacagctgaagggacctacaactacacctccacccaacttccagatcttactcaagtaggaaatggagatgaatttctcaacatagaacatgaacaagatgaattggaagaaatcttgcctgcacatgaagaagatgatgtcaatgtagttaaggcaggagatgcaaccggtgaaaggcatgatccgacgccacagagaaggactactgctgcaagagggaacaatgaggaaacgaggacaaagaggcataaaaagggcgataacctagaaggaataatgggaagatacattgacatgagaatgaagcaagctgaggaagaagccacacatctagcaaaagagagggaggaaaaggaagtgagtcaagctgcagacttctcaatcaagaagtgcatatccattcttggtacaatggaagttacaaaggaggaaaaagcaaaagcctacaatgccttcaaagaccttgacaataggcaaattttcttgagtgcctacgatgatgatgctgagtctgcactgatttggttgagaaacgagatggcttagctggtatgctctcttccttcccctcttctctcattctatgccagggcatgtcgaaatcaaagtaattgagcatatctgtctcattctttatgccatggcatgttgaatcaaagtaattgaac

SEQ ID NO: 87312 - DNA, 1047 bp, Zea Mays
acacaagcgaatcctcgatccgcgagcataggtcataaccaatcggagcgcagcattccaagctggcgatcctcgccacgagcctaaagcgctcctggccgtccgatagcatcaaagaaacacactcacaaccgatccagacggcccacccagcgcgaaccggatataccacacggatgccgctctataaataagaccccgcggccagcctactgtacttttccggcctcccattcctcgcgcggcgaccacccgattcgaagcgtgcggagagaccgaagaagcgggagagtgcagatggctcgtaccaagcagactgctcgcaagtccacgggagggaaggctcccaggaagcagcttgccaccaaggctgcccgtaagtctgcccccaccactggtggagtgaagaagcctcaccgctaccgccctggaactgttgccctccgtgagatccgcaagtatcagaagagcactgagctgctgatcaggaagctgcccttccagaggctcgtcagggaaattgcacaggacttcaaaactgatttgcgtttccagagccatgcggtgcttgccctccaggaggctgctgaggcataccttgttggcctgtttgaggacaccaacctgtgcgccatccatgctaagcgtgtgaccatcatgccaaaggacattcagctggcaaggaggatccgcggcgagagggcctaatcgccacctcaaacatcgtgacaaaaacatgaagtcctggggttattgttaatctggtgccattgtaaggacatatgagtagggtttgttttgtggatcgcaagtttctcttctgctactgttgctgctacctttgctggtgttattgctagggtcgaatacttaagttaactatgcgctgacagtctggactagcagtgttatgtgcgctgctggaccttgcgcgcaatgctgtggccgatttgttcgttaatgtcaagaattgtgttacagtgcgtgtatatatgtgtgtcgccgcatttttatttttgagaattgttttaagctgatgtttcgtca

SEQ ID NO: 87313 - DNA, 1042 bp, Zea Mays
acacaagcgaatcctcgatccgcgagcataggtcataaccaatcggagcgcagcattccaagctggcgatcctcgccacgagcctaaagcgctcctggccgtccgatagcatcaaagaaacacactcacaaccgatccagacggcccacccagcgcgaaccggatataccacacggatgccgctctataaataagaccccgcggccagcctactgtacttttccggcctcccattcctcgcgcggcgaccacccgattcgaagcgtgcggagagaccgaagaagcgggagagatggctcgtaccaagcagactgctcgcaagtccacgggagggaaggctcccaggaagcagcttgccaccaaggctgcccgtaagtctgcccccaccactggtggagtgaagaagcctcaccgctaccgccctggaactgttgccctccgtgagatccgcaagtatcagaagagcactgagctgctgatcaggaagctgcccttccagaggctcgtcagggaaattgcacaggacttcaaaactgatttgcgtttccagagccatgcggtgcttgccctccaggaggctgctgaggcataccttgttggcctgtttgaggacaccaacctgtgcgccatccatgctaagcgtgtgaccatcatgccaaaggacattcagctggcaaggaggatccgcggcgagagggcctaatcgccacctcaaacatcgtgacaaaaacatgaagtcctggggttattgttaatctggtgccattgtaaggacatatgagtagggtttgttttgtggatcgcaagtttctcttctgctactgttgctgctacctttgctggtgttattgctagggtcgaatacttaagttaactatgcgctgacagtctggactagcagtgttatgtgcgctgctggaccttgcgcgcaatgctgtggccgatttgttcgttaatgtcaagaattgtgttacagtgcgtgtatatatgtgtgtcgccgcatttttatttttgagaattgttttaagctgatgtttcgtca

SEQ ID NO: 87314 - DNA, 1062 bp, Zea Mays
acacaagcgaatcctcgatccgcgagcataggtcataaccaatcggagcgcagcattccaagctggcgatcctcgccacgagcctaaagcgctcctggccgtccgatagcatcaaagaaacacactcacaaccgatccagacggcccacccagcgcgaaccggatataccacacggatgccgctctataaataagaccccgcggccagcctactgtacttttccggcctcccattcctcgcgcggcgaccacccgattcgaagcgtgcggagagaccgaagaagcgggagagatggctcgtaccaagcagactgctcgcaagtccacgggagggaaggctcccaggaagcagcttgccaccaaggtaaggttctttagataatggctgcccgtaagtctgcccccaccactggtggagtgaagaagcctcaccgctaccgccctggaactgttgccctccgtgagatccgcaagtatcagaagagcactgagctgctgatcaggaagctgcccttccagaggctcgtcagggaaattgcacaggacttcaaaactgatttgcgtttccagagccatgcggtgcttgccctccaggaggctgctgaggcataccttgttggcctgtttgaggacaccaacctgtgcgccatccatgctaagcgtgtgaccatcatgccaaaggacattcagctggcaaggaggatccgcggcgagagggcctaatcgccacctcaaacatcgtgacaaaaacatgaagtcctggggttattgttaatctggtgccattgtaaggacatatgagtagggtttgttttgtggatcgcaagtttctcttctgctactgttgctgctacctttgctggtgttattgctagggtcgaatacttaagttaactatgcgctgacagtctggactagcagtgttatgtgcgctgctggaccttgcgcgcaatgctgtggccgatttgttcgttaatgtcaagaattgtgttacagtgcgtgtatatatgtgtgtcgccgcatttttatttttgagaattgttttaagctgatgtttcgtca

SEQ ID NO: 87315 - DNA, 1155 bp, Zea Mays
acacaagcgaatcctcgatccgcgagcataggtcataaccaatcggagcgcagcattccaagctggcgatcctcgccacgagcctaaagcgctcctggccgtccgatagcatcaaagaaacacactcacaaccgatccagacggcccacccagcgcgaaccggatataccacacggatgccgctctataaataagaccccgcggccagcctactgtacttttccggcctcccattcctcgcgcggcgaccacccgattcgaagcgtgcggagagaccgaagaagcgggagagatggctcgtaccaagcagactgctcgcaagtccacgggagggaaggctcccaggaagcagcttgccaccaaggtaaggttctttagataatggtaccatattgtccttaatttgttttttttgatttgaccctgatattggatcaagatatgactgaatttgcccttttggctattcatatataggctgcccgtaagtctgcccccaccactggtggagtgaagaagcctcaccgctaccgccctggaactgttgccctccgtgagatccgcaagtatcagaagagcactgagctgctgatcaggaagctgcccttccagaggctcgtcagggaaattgcacaggacttcaaaactgatttgcgtttccagagccatgcggtgcttgccctccaggaggctgctgaggcataccttgttggcctgtttgaggacaccaacctgtgcgccatccatgctaagcgtgtgaccatcatgccaaaggacattcagctggcaaggaggatccgcggcgagagggcctaatcgccacctcaaacatcgtgacaaaaacatgaagtcctggggttattgttaatctggtgccattgtaaggacatatgagtagggtttgttttgtggatcgcaagtttctcttctgctactgttgctgctacctttgctggtgttattgctagggtcgaatacttaagttaactatgcgctgacagtctggactagcagtgttatgtgcgctgctggaccttgcgcgcaatgctgtggccgatttgttcgttaatgtcaagaattgtgttacagtgcgtgtatatatgtgtgtcgccgcatttttatttttgagaattgttttaagctgatgtttcgtca

SEQ ID NO: 87316 - DNA, 793 bp, Zea Mays
tcggcggtttcgttaattcgagaaggcggcgttccgtggtggttcttgcgatcgtgtgaattttgcatgttttattttttatttttttttgactcgactcgtgcgttttggggatcggccgagttggggcttccgctggatgcactgcagcggccggcggctatggtgtgctagggttgcctttcggtctccttcgacttgcgcggatactgcttgtcacgcgtcggtaggggtacttccaactgggtttgggtctactggttgggtactgtagcgattatggaggtgatcttggcagagctattacgatctcttgcaggatcgtggtgctgctaggttttgtaggtgaatgtaagggtggttgtactcatggctctagcgccctttggattttgttgttattggagatttaagtggttcacacattggatgctactcggaagttcgtatattagaacttctgatttatggactcggctattgttcttccatttagttgtagcgatccatgcttttattctctcgtggaattgcatcctccatcttgattgtaggtaggtgaatttagggctttagtgcttattcacatagttcactcactctcaggaatttaggtaggttaatttatgaattcgacacatggatgttatggtagctaatttggattgtatttaatggtctgtaagtgatttgttatgtaataccgattatatattttttgttttctgtaattctgtttgatttagtggacttggttaatttacttgcccctgtcacacagctgacgcttttt

SEQ ID NO: 87317 - DNA, 976 bp, Zea Mays
tcggcggtttcgttaattcgagaaggcggcgttccgtggtggttcttgcgatcgtgtgaattttgcatgttttattttttatttttttttgactcgactcgtgcgttttggggatcggccgagttggggcttccgctggatgcactgcagcggccggcggctatggtgtgctagggttgcctttcggtctccttcgacttgcgcggatactgcttgtcacgcgtcgatggctcgtaccaagcagactgctcgcaagtccacgggagggaaggctcccaggaagcagcttgccaccaaggctgcccgtaagtctgcccccaccactggtggagtgaagaagcctcaccgctaccgccctggaactgttgccctccgtgagatccgcaagtatcagaagagcactgagctgctgatcaggaagctgcccttccagaggctcgtcagggaaattgcacaggacttcaaaactgatttgcgtttccagagccatgcggtgcttgccctccaggaggctgctgaggcataccttgttggcctgtttgaggacaccaacctgtgcgccatccatgctaagcgtgtgaccatcatgccaaaggacattcagctggcaaggaggatccgcggcgagagggcctaatcgccacctcaaacatcgtgacaaaaacatgaagtcctggggttattgttaatctggtgccattgtaaggacatatgagtagggtttgttttgtggatcgcaagtttctcttctgctactgttgctgctacctttgctggtgttattgctagggtcgaatacttaagttaactatgcgctgacagtctggactagcagtgttatgtgcgctgctggaccttgcgcgcaatgctgtggccgatttgttcgttaatgtcaagaattgtgttacagtgcgtgtatatatgtgtgtcgccgcatttttatttttgagaattgttttaagctgatgtttcgtca

SEQ ID NO: 87318 - DNA, 1868 bp, Zea Mays
atattatccaccgggcggcagagctctctgctctccccaccactccctccacttctctgatatggccgcaccgacctccccagcgattcccaccgcgcgcccgacggcgcccctcccgaccatggaggacatcatggcgtcgtcgcgcgcgcagagcatgcgcgtgtgccttcgcacggccgggcccttcttccgcgtcacggccacccgcggtgagggtggggaggccgtggagcttggccgcgcccagggcggcatccgcccgtggcctggcggcgccgtgctgcacctcgactccatgcgcatgacgcgcgccacgctgagcgtcccggaccgcccactgttcggcctggggatgttcctcggtgccgtcgccgtgcggcacggcttcgacgccgggtgcaagcgcgccgagctgctcgccatcaacgacacgccgctgtaccacgacaagctcgttagattttacatgaggatgggtttcaaagcagttcatgaggttgatggatcatcaatcagtgatcttggtcacatgttggtgtggggaggtaggggtactagaatggatgctgatattgaagagcttcttattaagtggggaaacagattcagactacaagactaaaaggtggatggtaatactgatatgttttgtcgagacatgcagtttttgcagcatgccgcatacaaatcttgtttggatgcaataaggtacaagccttgcttcaacctttcttaacatacaattactgtacatcaagatcttgctatgtttcagttcttcagtatatccaattgaatttgttatgaagttatgtgaacacataaggttatttccttatattctaaaatagtggttagctattgcttgattgggaagtgtgattacattttccaacaagggctggccattttatcttgattgaaatggtggagtgaataaatttcctcagggaattttaggattctgaaggaggtcggcccaaaattttcccatttaaatagagctacgaggttatgagaagggtgtattaaatttttaattacccttcatctcttatacaactaatgagttgacatgtcatatttaaagtcaattcatgcacaagggaaatagtgtagtagttcctggttaaacatcctatgacatttatggactaacaattgttaggtgtgtaatggcatgacctagtgaattttttgataatagaacaaaattttagcctctaccatcagggatggtagacaggtgagcgtcaacgacaaagccaagccataaggctcaattcttacaacctaacagggaatagaaaagcaaaaagcaacataggttacatagatcggagtgctgtatgtgttccatttagtttctgttgtctcctctgttttttgactgcattcatgagtactcatatgcaatcctttgatggtgacatgaaactgacccaattgtcatattgtccgatggaaatcgcagcttatctaggatggatctatttttacccctggtgctttgacaatgtgatcgctgctaggagcatatatggatttgtacttgtatcttagacaaaatgacactctggtccttttttcatttgaagcaataaatctttgtgctggtggtgtcagctgccaacaatgattcttgtcatgaaactctgcgataatagccacttggaagagcagtctatacttaagtttttttttgatattggggatactctccggcctctgcagcaagcactgacacgatgattgtttattttcttatgttggactttgacctctgaacttcattatcatgctactgtaagtgtaaggtaacaatttagtatttttgttatgagcaaaaagttttgttgtccgtc

SEQ ID NO: 87319 - DNA, 1294 bp, Zea Mays
atattatccaccgggcggcagagctctctgctctccccaccactccctccacttctctgatatggccgcaccgacctccccagcgattcccaccgcgcgcccgacggcgcccctcccgaccatggaggacatcatggcgtcgtcgcgcgcgcagagcatgcgcgtgtgccttcgcacggccgggcccttcttccgcgtcacggccacccgcggtgagggtggggaggccgtggagcttggccgcgcccagggcggcatccgcccgtggcctggcggcgccgtgctgcacctcgactccatgcgcatgacgcgcgccacgctgagcgtcccggaccgcccactgttcggcctggggatgttcctcggtgccgtcgccgtgcggcacggcttcgacgccgggtgcaagcgcgccgagctgctcgccatcaacgacacgccgctgtaccacgacaagctcgttagattttacatgaggatgggtttcaaagcagttcatgaggttgatggatcatcaatcagtgatcttggtcacatgttggtgtggggaggtaggggtactagaatggatgctgatattgaagagcttcttattaagtggggaaacagattcagactacaagactaaaaggtggatggtaatactgatatgttttgtcgagacatgcagtttttgcagcatgccgcatacaaatcttgtttggatgcaataagcttatctaggatggatctatttttacccctggtgctttgacaatgtgatcgctgctaggagcatatatggatttgtacttgtatcttagacaaaatgacactctggtccttttttcatttgaagcaataaatctttgtgctggtggtgtcagctgccaacaatgattcttgtcatgaaactctgcgataatagccacttggaagagcagtctatacttaagtttttttttgatattggggatactctccggcctctgcagcaagcactgacacgatgattgtttattttcttatgttggactttgacctctgaacttcattatcatgctactgtaagtgtaaggtaacaatttagtatttttgttatgagcaaaaagttttgttgtccgtcaaggtgaattgaatgcatatacatttgctaagcaaaataatatatccgttgctatgtatcatgatatgatgatgaggtgtccgacaagacaatcttggctctaaagaatattgagaaaggtaaatcttgtggtgcctaggtgtaagatttagcgtgaaaatccatagtaccacttgggacgaagagcaacaa

SEQ ID NO: 87320 - DNA, 3337 bp, Zea Mays
ggaaagtttcttctgcatcttttctggaaaccagcattgagcgattggtcatagcacgtctctctgcgtcttggatcatccagggatcggttaatccagacaggtacttttctggattctatcgaagacttccgatcgaagcacccacagaaaagaaagcgatcgcgacgacgcatctcgcgaaaccccggtgggaaacccagggatcggcgggcgggcttcttgtgcgtgctcatagtcatggtcagatccgatcccttaccgcgatactccatcgggatcagctttgtccgggcaggcttctcggattgttgctgaagcaaggaaggagggaaagctagcgcaagcgactgccccacacacagcaccgtacgtgttctcttctcctagctagcagcagctttcctctctcgttcatgcatctccatggatatatatatataagacagacagatcctcgccggtaggggtcgtcggctatcgtgtaccttgtgttggcctccgatccacaagaagctagagctagtatcgagaggccaggggcaggctaggcggcgcgcggaagagcatgtggtcgtcggagatgggtcgaagaagccgccgaacgaacggcatggtggcagagccgcagacgacgcagctgctgctgcacggggtgatcgaggccaccatcctggaggccgacctgtccgtcaccacagacggcaagctgcagccgaccaagaagactctgatgaagaagaaggtcttctcatggatcaggaagctgacattctgcagaaaccagctggagaacgccatcggtctcggcacggacggcaagctgtacgcgacggtggacatcgacaaggcgcgcgtggggcggacgcgcatggtgccccccgtccactcccccatgtgggacgagtccttccacctctactgcgcgcacgacgccagcaacatcatcttcaccgtcaaggccgacaacgccatcggcgccacgctcatcggccgcgcttacctgcccacggagggcgtcgtcgccggccggaaggtggacctgtggctccccatccgcgacgagaagcgccagccgctggaaggcggtgaccagatacacgtccaggtccagttcaccgacgtcgccgcggacccgaccgccggctggggcgccgggatcggcagcgcggcgtacggcggcgtgccctacaccttcttcaagcagcgccgcggatgccgggtgcggctgtacgaggacgcgcacgtggccggcgacttcgcgccgcgcgtccggctcgcggacggcagcttctacgagccgcgccggtgctgggtggacgtgttcgacgcaatcaaccgggcccggaggatggtgtacatcgccggatggtccgtgaacaccgacgtggtgctggtgcgcgacccgcgggaaccgtcggcgtcgtccgagagtctcggcgagctgctcatccggaaggccgacgagggcgtcgcggtgctgatgctggtgtgggacgaccgcacctcggtggggctcggccccatcaagcgcgacgggctgatggccacgcacgaccaggacacggcgagcttcttccgcgacacgcgcgtgcagtgcgtgctctgcccgcgcaaccccgacaaggaccggagctacgtgcaggacatcgagacggccaccatgttcacacaccaccaaaagacggtgatcgtcgacggcggcggcgcgccggcgccggagacgccgccgggcctcgtgagcttcctcggcggcatcgacctgtgcgacgggaggtacgacacgcaggaccacccgctgttccgcacgctgggcaccacgcacagcaaggacttccaccagcccaacttccccggcgcgtccatcagcaagggcgggccgagggagccgtggcacgacatccactgccgcgtggaggggcccgcggcgtgggacgtgctggagaacttcgagcagaggtggaagaagcagggcaagggggacaacctcctggtggcgctgaacaaggcgtgggcggagcgcgaggcggccccgcggggcgacgccgagtcgtggaacgtgcaggtgttccggtccatcgacggcggcgcggcggcggggttcccggagggctccgcgaacgcgccccgggaggcggcggcgctcgggctggtgagcggcaaggaccacgtgatcgagcgcagcatccaggacgcgtacatccacgccatccggcgggcgcgggacttcatctacatcgagaaccagtacttcctggggagctcctacgcgtggcggcagaacgacggcgtgacggtggaggacatcaacgcgctgcacctcatccccaaggagctgtcgctcaagatcgtgagcaagatcgaggccggcgagcggttcgtcgtgtacgtggtggtgccgctgtggccggagggcgtgccggagagcggctccgtgcaggccatcctggattggcagcgccgcaccatggagatgatgtataaggacgtgacgctggccatccgcgccagggggctccgggccgaccccagggactacctcaccttcttctgcctcggcaaccgcgaggcgccgagccccggcgagtacgtgccgccggagcacccggaccccaacaccgactacgagagggcgcagcaggccaggcgcttcatgatctacgtccacgccaagaccatgatagtggacgatgagtacatcatcgtgggctcggcgaacatcaaccagcgctccatggacggcggccgcgacacggagatcgcgatgggcgcgtaccagccgggctacctggcgaccaggaaccggccggcgaaggggcaggtccacggcttccgggtctccctgtggcaggagcacctgggcgaggcggcggcggcgggaatgggcgacgatctcttccgtccgtcgagcctggcttgcgtgcgccggatgaaccaggtggccaagcagcactgggacatgttcgcgagcgacgcgttccagggcgacctcccgggccacctcatggcgtacccggtcagcgtgctcgacgacgacgacggccgggtcgtggccacgacggaaaccttcccggacaccaacgccaaggtgctcggcaacaagtccgacatcctcccgcccatcctcaccacatgatttaatcatcgtcgattgtattcaccgccacgccgtgggaatgtgtacacaagcgagagaagcatgcatgtttaaaaagctgaaatgtgattcatatgtcaaacaaaaacagaataatttaaaagcttaaatgtgattcatcatcctttccgaataaacacctcacacgattgttggacatgcatgagagcttcatcgata

SEQ ID NO: 87321 - DNA, 3263 bp, Zea Mays
ggaaagtttcttctgcatcttttctggaaaccagcattgagcgattggtcatagcacgtctctctgcgtcttggatcatccagggatcggttaatccagacaggtacttttctggattctatcgaagacttccgatcgaagcacccacagaaaagaaagcgatcgcgacgacgcatctcgcgaaaccccggtgggaaacccagggatcggcgggcgggcttcttgtgcgtgctcatagtcatggtcagatccgatcccttaccgcgatactccatcgggatcagctttgtccgggcaggcttctcggattgttgctgaagcaaggaaggagggaaagctagcgcaagcgactgccccacacacagcaccacagatcctcgccggtaggggtcgtcggctatcgtgtaccttgtgttggcctccgatccacaagaagctagagctagtatcgagaggccaggggcaggctaggcggcgcgcggaagagcatgtggtcgtcggagatgggtcgaagaagccgccgaacgaacggcatggtggcagagccgcagacgacgcagctgctgctgcacggggtgatcgaggccaccatcctggaggccgacctgtccgtcaccacagacggcaagctgcagccgaccaagaagactctgatgaagaagaaggtcttctcatggatcaggaagctgacattctgcagaaaccagcaacagctggagaacgccatcggtctcggcacggacggcaagctgtacgcgacggtggacatcgacaaggcgcgcgtggggcggacgcgcatggtgccccccgtccactcccccatgtgggacgagtccttccacctctactgcgcgcacgacgccagcaacatcatcttcaccgtcaaggccgacaacgccatcggcgccacgctcatcggccgcgcttacctgcccacggagggcgtcgtcgccggccggaaggtggacctgtggctccccatccgcgacgagaagcgccagccgctggaaggcggtgaccagatacacgtccaggtccagttcaccgacgtcgccgcggacccgaccgccggctggggcgccgggatcggcagcgcggcgtacggcggcgtgccctacaccttcttcaagcagcgccgcggatgccgggtgcggctgtacgaggacgcgcacgtggccggcgacttcgcgccgcgcgtccggctcgcggacggcagcttctacgagccgcgccggtgctgggtggacgtgttcgacgcaatcaaccgggcccggaggatggtgtacatcgccggatggtccgtgaacaccgacgtggtgctggtgcgcgacccgcgggaaccgtcggcgtcgtccgagagtctcggcgagctgctcatccggaaggccgacgagggcgtcgcggtgctgatgctggtgtgggacgaccgcacctcggtggggctcggccccatcaagcgcgacgggctgatggccacgcacgaccaggacacggcgagcttcttccgcgacacgcgcgtgcagtgcgtgctctgcccgcgcaaccccgacaaggaccggagctacgtgcaggacatcgagacggccaccatgttcacacaccaccaaaagacggtgatcgtcgacggcggcggcgcgccggcgccggagacgccgccgggcctcgtgagcttcctcggcggcatcgacctgtgcgacgggaggtacgacacgcaggaccacccgctgttccgcacgctgggcaccacgcacagcaaggacttccaccagcccaacttccccggcgcgtccatcagcaagggcgggccgagggagccgtggcacgacatccactgccgcgtggaggggcccgcggcgtgggacgtgctggagaacttcgagcagaggtggaagaagcagggcaagggggacaacctcctggtggcgctgaacaaggcgtgggcggagcgcgaggcggccccgcggggcgacgccgagtcgtggaacgtgcaggtgttccggtccatcgacggcggcgcggcggcggggttcccggagggctccgcgaacgcgccccgggaggcggcggcgctcgggctggtgagcggcaaggaccacgtgatcgagcgcagcatccaggacgcgtacatccacgccatccggcgggcgcgggacttcatctacatcgagaaccagtacttcctggggagctcctacgcgtggcggcagaacgacggcgtgacggtggaggacatcaacgcgctgcacctcatccccaaggagctgtcgctcaagatcgtgagcaagatcgaggccggcgagcggttcgtcgtgtacgtggtggtgccgctgtggccggagggcgtgccggagagcggctccgtgcaggccatcctggattggcagcgccgcaccatggagatgatgtataaggacgtgacgctggccatccgcgccagggggctccgggccgaccccagggactacctcaccttcttctgcctcggcaaccgcgaggcgccgagccccggcgagtacgtgccgccggagcacccggaccccaacaccgactacgagagggcgcagcaggccaggcgcttcatgatctacgtccacgccaagaccatgatagtggacgatgagtacatcatcgtgggctcggcgaacatcaaccagcgctccatggacggcggccgcgacacggagatcgcgatgggcgcgtaccagccgggctacctggcgaccaggaaccggccggcgaaggggcaggtccacggcttccgggtctccctgtggcaggagcacctgggcgaggcggcggcggcgggaatgggcgacgatctcttccgtccgtcgagcctggcttgcgtgcgccggatgaaccaggtggccaagcagcactgggacatgttcgcgagcgacgcgttccagggcgacctcccgggccacctcatggcgtacccggtcagcgtgctcgacgacgacgacggccgggtcgtggccacgacggaaaccttcccggacaccaacgccaaggtgctcggcaacaagtccgacatcctcccgcccatcctcaccacatgatttaatcatcgtcgattgtattcaccgccacgccgtgggaatgtgtacacaagcgagagaagcatgcatgtttaaaaagctgaaatgtgattcatatgtcaaacaaaaacagaataatttaaaagcttaaatgtgattcatcatcctttccgaataaacacctcacacgattgttggacatgcatgagagcttcatcgata

SEQ ID NO: 87322 - DNA, 3257 bp, Zea Mays
ggaaagtttcttctgcatcttttctggaaaccagcattgagcgattggtcatagcacgtctctctgcgtcttggatcatccagggatcggttaatccagacaggtacttttctggattctatcgaagacttccgatcgaagcacccacagaaaagaaagcgatcgcgacgacgcatctcgcgaaaccccggtgggaaacccagggatcggcgggcgggcttcttgtgcgtgctcatagtcatggtcagatccgatcccttaccgcgatactccatcgggatcagctttgtccgggcaggcttctcggattgttgctgaagcaaggaaggagggaaagctagcgcaagcgactgccccacacacagcaccacagatcctcgccggtaggggtcgtcggctatcgtgtaccttgtgttggcctccgatccacaagaagctagagctagtatcgagaggccaggggcaggctaggcggcgcgcggaagagcatgtggtcgtcggagatgggtcgaagaagccgccgaacgaacggcatggtggcagagccgcagacgacgcagctgctgctgcacggggtgatcgaggccaccatcctggaggccgacctgtccgtcaccacagacggcaagctgcagccgaccaagaagactctgatgaagaagaaggtcttctcatggatcaggaagctgacattctgcagaaaccagctggagaacgccatcggtctcggcacggacggcaagctgtacgcgacggtggacatcgacaaggcgcgcgtggggcggacgcgcatggtgccccccgtccactcccccatgtgggacgagtccttccacctctactgcgcgcacgacgccagcaacatcatcttcaccgtcaaggccgacaacgccatcggcgccacgctcatcggccgcgcttacctgcccacggagggcgtcgtcgccggccggaaggtggacctgtggctccccatccgcgacgagaagcgccagccgctggaaggcggtgaccagatacacgtccaggtccagttcaccgacgtcgccgcggacccgaccgccggctggggcgccgggatcggcagcgcggcgtacggcggcgtgccctacaccttcttcaagcagcgccgcggatgccgggtgcggctgtacgaggacgcgcacgtggccggcgacttcgcgccgcgcgtccggctcgcggacggcagcttctacgagccgcgccggtgctgggtggacgtgttcgacgcaatcaaccgggcccggaggatggtgtacatcgccggatggtccgtgaacaccgacgtggtgctggtgcgcgacccgcgggaaccgtcggcgtcgtccgagagtctcggcgagctgctcatccggaaggccgacgagggcgtcgcggtgctgatgctggtgtgggacgaccgcacctcggtggggctcggccccatcaagcgcgacgggctgatggccacgcacgaccaggacacggcgagcttcttccgcgacacgcgcgtgcagtgcgtgctctgcccgcgcaaccccgacaaggaccggagctacgtgcaggacatcgagacggccaccatgttcacacaccaccaaaagacggtgatcgtcgacggcggcggcgcgccggcgccggagacgccgccgggcctcgtgagcttcctcggcggcatcgacctgtgcgacgggaggtacgacacgcaggaccacccgctgttccgcacgctgggcaccacgcacagcaaggacttccaccagcccaacttccccggcgcgtccatcagcaagggcgggccgagggagccgtggcacgacatccactgccgcgtggaggggcccgcggcgtgggacgtgctggagaacttcgagcagaggtggaagaagcagggcaagggggacaacctcctggtggcgctgaacaaggcgtgggcggagcgcgaggcggccccgcggggcgacgccgagtcgtggaacgtgcaggtgttccggtccatcgacggcggcgcggcggcggggttcccggagggctccgcgaacgcgccccgggaggcggcggcgctcgggctggtgagcggcaaggaccacgtgatcgagcgcagcatccaggacgcgtacatccacgccatccggcgggcgcgggacttcatctacatcgagaaccagtacttcctggggagctcctacgcgtggcggcagaacgacggcgtgacggtggaggacatcaacgcgctgcacctcatccccaaggagctgtcgctcaagatcgtgagcaagatcgaggccggcgagcggttcgtcgtgtacgtggtggtgccgctgtggccggagggcgtgccggagagcggctccgtgcaggccatcctggattggcagcgccgcaccatggagatgatgtataaggacgtgacgctggccatccgcgccagggggctccgggccgaccccagggactacctcaccttcttctgcctcggcaaccgcgaggcgccgagccccggcgagtacgtgccgccggagcacccggaccccaacaccgactacgagagggcgcagcaggccaggcgcttcatgatctacgtccacgccaagaccatgatagtggacgatgagtacatcatcgtgggctcggcgaacatcaaccagcgctccatggacggcggccgcgacacggagatcgcgatgggcgcgtaccagccgggctacctggcgaccaggaaccggccggcgaaggggcaggtccacggcttccgggtctccctgtggcaggagcacctgggcgaggcggcggcggcgggaatgggcgacgatctcttccgtccgtcgagcctggcttgcgtgcgccggatgaaccaggtggccaagcagcactgggacatgttcgcgagcgacgcgttccagggcgacctcccgggccacctcatggcgtacccggtcagcgtgctcgacgacgacgacggccgggtcgtggccacgacggaaaccttcccggacaccaacgccaaggtgctcggcaacaagtccgacatcctcccgcccatcctcaccacatgatttaatcatcgtcgattgtattcaccgccacgccgtgggaatgtgtacacaagcgagagaagcatgcatgtttaaaaagctgaaatgtgattcatatgtcaaacaaaaacagaataatttaaaagcttaaatgtgattcatcatcctttccgaataaacacctcacacgattgttggacatgcatgagagcttcatcgata

SEQ ID NO: 87323 - DNA, 3253 bp, Zea Mays
ggaaagtttcttctgcatcttttctggaaaccagcattgagcgattggtcatagcacgtctctctgcgtcttggatcatccagggatcggttaatccagacaggtacttttctggattctatcgaagacttccgatcgaagcacccacagaaaagaaagcgatcgcgacgacgcatctcgcgaaaccccggtgggaaacccagggatcggcgggcgggcttcttgtgcgtgctcatagtcatggtcagatccgatcccttaccgcgatactccatcgggatcagctttgtccgggcaggcttctcggattgttgctgaagcaaggaaggagggaaagctagcgcaagcgactgccccacacacagcaccatcctcgccggtaggggtcgtcggctatcgtgtaccttgtgttggcctccgatccacaagaagctagagctagtatcgagaggccaggggcaggctaggcggcgcgcggaagagcatgtggtcgtcggagatgggtcgaagaagccgccgaacgaacggcatggtggcagagccgcagacgacgcagctgctgctgcacggggtgatcgaggccaccatcctggaggccgacctgtccgtcaccacagacggcaagctgcagccgaccaagaagactctgatgaagaagaaggtcttctcatggatcaggaagctgacattctgcagaaaccagctggagaacgccatcggtctcggcacggacggcaagctgtacgcgacggtggacatcgacaaggcgcgcgtggggcggacgcgcatggtgccccccgtccactcccccatgtgggacgagtccttccacctctactgcgcgcacgacgccagcaacatcatcttcaccgtcaaggccgacaacgccatcggcgccacgctcatcggccgcgcttacctgcccacggagggcgtcgtcgccggccggaaggtggacctgtggctccccatccgcgacgagaagcgccagccgctggaaggcggtgaccagatacacgtccaggtccagttcaccgacgtcgccgcggacccgaccgccggctggggcgccgggatcggcagcgcggcgtacggcggcgtgccctacaccttcttcaagcagcgccgcggatgccgggtgcggctgtacgaggacgcgcacgtggccggcgacttcgcgccgcgcgtccggctcgcggacggcagcttctacgagccgcgccggtgctgggtggacgtgttcgacgcaatcaaccgggcccggaggatggtgtacatcgccggatggtccgtgaacaccgacgtggtgctggtgcgcgacccgcgggaaccgtcggcgtcgtccgagagtctcggcgagctgctcatccggaaggccgacgagggcgtcgcggtgctgatgctggtgtgggacgaccgcacctcggtggggctcggccccatcaagcgcgacgggctgatggccacgcacgaccaggacacggcgagcttcttccgcgacacgcgcgtgcagtgcgtgctctgcccgcgcaaccccgacaaggaccggagctacgtgcaggacatcgagacggccaccatgttcacacaccaccaaaagacggtgatcgtcgacggcggcggcgcgccggcgccggagacgccgccgggcctcgtgagcttcctcggcggcatcgacctgtgcgacgggaggtacgacacgcaggaccacccgctgttccgcacgctgggcaccacgcacagcaaggacttccaccagcccaacttccccggcgcgtccatcagcaagggcgggccgagggagccgtggcacgacatccactgccgcgtggaggggcccgcggcgtgggacgtgctggagaacttcgagcagaggtggaagaagcagggcaagggggacaacctcctggtggcgctgaacaaggcgtgggcggagcgcgaggcggccccgcggggcgacgccgagtcgtggaacgtgcaggtgttccggtccatcgacggcggcgcggcggcggggttcccggagggctccgcgaacgcgccccgggaggcggcggcgctcgggctggtgagcggcaaggaccacgtgatcgagcgcagcatccaggacgcgtacatccacgccatccggcgggcgcgggacttcatctacatcgagaaccagtacttcctggggagctcctacgcgtggcggcagaacgacggcgtgacggtggaggacatcaacgcgctgcacctcatccccaaggagctgtcgctcaagatcgtgagcaagatcgaggccggcgagcggttcgtcgtgtacgtggtggtgccgctgtggccggagggcgtgccggagagcggctccgtgcaggccatcctggattggcagcgccgcaccatggagatgatgtataaggacgtgacgctggccatccgcgccagggggctccgggccgaccccagggactacctcaccttcttctgcctcggcaaccgcgaggcgccgagccccggcgagtacgtgccgccggagcacccggaccccaacaccgactacgagagggcgcagcaggccaggcgcttcatgatctacgtccacgccaagaccatgatagtggacgatgagtacatcatcgtgggctcggcgaacatcaaccagcgctccatggacggcggccgcgacacggagatcgcgatgggcgcgtaccagccgggctacctggcgaccaggaaccggccggcgaaggggcaggtccacggcttccgggtctccctgtggcaggagcacctgggcgaggcggcggcggcgggaatgggcgacgatctcttccgtccgtcgagcctggcttgcgtgcgccggatgaaccaggtggccaagcagcactgggacatgttcgcgagcgacgcgttccagggcgacctcccgggccacctcatggcgtacccggtcagcgtgctcgacgacgacgacggccgggtcgtggccacgacggaaaccttcccggacaccaacgccaaggtgctcggcaacaagtccgacatcctcccgcccatcctcaccacatgatttaatcatcgtcgattgtattcaccgccacgccgtgggaatgtgtacacaagcgagagaagcatgcatgtttaaaaagctgaaatgtgattcatatgtcaaacaaaaacagaataatttaaaagcttaaatgtgattcatcatcctttccgaataaacacctcacacgattgttggacatgcatgagagcttcatcgata

SEQ ID NO: 87324 - DNA, 79 bp, Zea Mays
gatccaatccggcgttgaggaagctgaatcgctgattcggaagatggacctggaagcaaggagcctacaacctagcatt

SEQ ID NO: 87325 - DNA, 1515 bp, Zea Mays
atggcggttgtggaggcgtgcgaccccgcaaggatcgacatctcgtccaagacagcagccccctcagagcggacgacgcagcttatctctggtggaaggcacgtagccacgcccccactccctcctcgtgctcccgccgacgcctgcctcgcgctcctcgtcgaccgtctctccctctcctccgtcgttgcatctcgcctctcgcgcacgcacaaagatgccccaaatgtgctgaacttaagctatcgcgtgagaacacaactttctgcttctactttaattgatctcaatggggcatttgggtggctagcaattcacattgataatttaaaagtgaatttcaggtgtacatttgatggcctccgatatggtgctgccttcaattctctacaatgcgcgagaatgctgctcaggaggatggctgaaaaactccgagtgctgctacgctaccagagtcttcatgtgcatacttacttcaagaactcaagcgagaagctcaaagaaggggaagacatctacatctatcagggtgacaaatccttttgcagcatggagtgcagagaaaatttcatggtagacgagatggaaggcaagggaggctggaagcaccttttttgcatgggagctgcatggagagaacttattggtagaaaacaaactttgaccagattcttgaatgtgccaagggaaaaaggtattaattgggaccttctatttatacaagggaaaaaggcgcggacgtacgatggcgccctcgcgcgggatatcgggctgagtgatgagacgctgctgccattggggttccaggcgcgcctgaccgctcccactcctaggcccggcatgtctctccgacgctacctaccggtgctggtgaaacgcaaacttaaaatcgtgcattgcaagatgttgccttctctttatgtctcctctactctacgcctacgagctttctttgtttataactttttctgtggtttcgctttcaacaagctcaagcggtcaacagatcaacttagacaaaatgcagatgcagtggaaatattaaggaagaccagattccctcatgttcatggagcaggtgaaaagaagtcaccagagacaattctggatcatgagactatgagaggactttggcaacaaatgttcggtttggacttctctgggtggttctatgatactttataatttcttttggcttatgtgtcatttcagaagatatgaaaatagctaagcattgtcaataatattagcttccttgtttcttgttaacctaagatgactgccctatttcacttgttttttctagctgtggtagtaggtcattagagtagttcccttcaatcgtagcactcagccatgttgtaaatggtttacttctattgtgaatcgtgtttttcttttttaatggtggggttagtggaaaatctggacgtatccgcgaatggtggagaagcacacaaaacaacaattatatgcaaaaactaaactatgttttctttctttctatggtatatg

SEQ ID NO: 87326 - DNA, 1286 bp, Zea Mays
ccaagtcgcccaccgtgacgcccatcgagtcaaccgaacccaagccgtgtggcgactggcgaggcgagtgccccagttcctaactccggtgggcgcgctcccaccgccgcgcggctcaaaacccgccctcagcctcccgcgctccagtccacacgggagcgggtggtgtcgtctgaagcggcgcgatcaaggagtcttcgggcgctccggacgtaacgtgctggcggttgcttatctccggatgtatatataagcggaaatgttctccttgttctatggcctgtggaagtatgtgttcgccaaggacgagttccgtgttctgattcttggtgttgacagagctggcaagacgactttgctggagaagttgaaatcgatatatctcaagggggaaggacttccgcctgaccgtgtcgttccaacagttgggctcaacattggccgcatcgaagacgcaaaggcaaaacttgttttctgggatctaggtggtcaggttagcctacgaacaatctgggagaaatactatgaagaggcccatgccataatgtacgttattgacgctgccacagcatcgtcatttgaagattccaaatctgctctggagaaggttattcgccatgaacatctgagaggagcaccactcttgatagttgcaaacaaacaggatttacctggagccattgatgaggaagaattggctaaatttctgcataaagaactggatgagaggccatatacatttcaggctgtatctgcatatgatggcagggggatcaaatctggcatagactggctggtggaacaaatggaaaaaagcaaacgtaccgagacactgcaggctcgtgctggcgtagctggacaaatttagaatggggtgaatttgttaaagaacaaagcattggataggacggcttccttcgtatcgcgtaagcagccatttgctgcattccgggattatcgttccaggtcgcccagagtgctgcaagaaatgtttggctggttgctcctgtggtggtggtgattggtgaggcgattcgtttggtattattgaggttgcattcatatgtacctaaaggtcgcaagcatacatgtctatatgatgcttttcaattttcgtagcaaactagtagcttcaatacagaggatcaaagagagccgtgttctttaacttgtttgtgataaaaaaaaaggaagaaaggaaagcgaagaaggaattattggtgcatctgaaagtctttattgcatatgtctaaaccattttaaccgatgctggatgagcttttctt

SEQ ID NO: 87327 - DNA, 84 bp, Zea Mays
ccactaagctgggccaatcggccaagaaactttgcttcattcagggcatggtatggacaacccactgcgggttgccaaacaaag

SEQ ID NO: 87328 - DNA, 520 bp, Zea Mays
tcaacaacattttgtgtcaccatgccaggaagaaaccagaagtggcatggtaagcattgccagtccaaccacacctctgcgaagcattatcccatcactggaaacctccacaaagtgtgtttgctaaggcaaatggcatgtatctccatctaatgaacatacaaatttttccctgcctgatgttaagtaactacaggtaccaggtagactacaagtctacaactacaacattacataacagggatggaacaattacactcaaatgaacacttgaacagcaagagtcggcctggctaatcatagccccagtaaaccataacaacagttaaatcatccgtccaagattgtccaccctcaagaagtgcatgttgtgcaaattccccaatatatcctcggatgcatcaacatcgatatgaaagttgccgatatcttcaactccgccagcaccgctaacattaaccctaccagtgccatctgtagcatgtgctgcctcatttatgttaattctcctcacctcctc

SEQ ID NO: 87329 - DNA, 1452 bp, Zea Mays
agttcatcactaatcacacttattgtgccctcgacgagtatctatagctagctcattaatcgattcgggggtgtgttgtcgaaggcggcaatggcgagctactcgtcgcggcgtccatgcaatacctgtagcacgaaggcgatggccgggagcgtggtcggcgagcccgtcgtgctggggcagagggtgacggtgctgacggtggacggcggcggcgtccggggtctcatcccgggaaccatcctcgccttcctggaggccaggctgcaggagctggacggaccggaggcgaggctggcggactacttcgactacatcgccggaaccagcaccggcggtctcatcaccgccatgctcaccgcgcccggcaaggacaagcggcctctctacgctgccaaggacatcaaccacttttacatgcagaactgcccgcgcatctttcctcagaagagcaggcttgcggccgccatgtccgcgctgaggaagccaaagtacaacggcaagtgcatgcgcagcctgattaggagcatcctcggcgagacgagggtaagcgagacgctgaccaacgtcatcatccctgccttcgacatcaggctgctgcagcctatcatcttctctacctacgacgccaagagcacgcctctgaagaacgctctgctctcggacgtgtgcattggcacgtccgccgcgccgacctacctcccggcgcactacttccagactgaagacgccaacggcaaggagcgcgaatacaacctcatcgacggcggtgtggcggccaacaacccgacgatggttgcgatgacgcagatcaccaaaaagatgcttgccagcaaggacaaggccgaggagctgtacccagtgaagccgtcgaactgccgcaggttcctggtgctgtccatcgggacggggtcgacgtccgagcagggcctctacacggcgcggcagtgctcccggtggggtatctgccggtggctccgcaacaacggcatggcccccatcatcgacatcttcatggcggccagctcggacctggtggacatccacgtcgccgcgatgttccagtcgctccacagcgacggcgactacctgcgcatccaggacaactcgctccgtggcgccgcggccaccgtggacgcggcgacgccggagaacatgcggacgctcgtcgggatcggggagcggatgctggcacagagggtgtccagggtcaacgtggagacagggaggtacgaaccggtgactggcgaaggaagcaatgccgatgccctcggtgggctcgctaggcagctctccgaggagaggagaacaaggctcgcgcgccgcgtctctgccatcaacccaagaggctctagatgtgcgtcgtacgatatctaagacaagtggctttactgtcagtcacatgcttgtaaataagtagactttattttaataaaacataaaaatatatat

SEQ ID NO: 87330 - DNA, 1371 bp, Zea Mays
agttcatcactaatcacacttattgtgccctcgacgagtatctatagctagctcattaatcgattcgggggtgtgttgtcgaaggcggcaatggcgagctactcgtcgcggcgtccatgcaatacctgtagcacgaaggcgatggccgggagcgtggtcggcgagcccgtcgtgctggggcagagggtgacggtgctgacggtggacggcggcggcgtccggggtctcatcccgggaaccatcctcgccttcctggaggccaggctgcaggagctggacggaccggaggcgaggctggcggactacttcgactacatcgccggaaccagcaccggcggtctcatcaccgccatgctcaccgcgcccggcaaggacaagcggcctctctacgctgccaaggacatcaaccacttttacatgcagaactgcccgcgcatctttcctcagaagagcaggcttgcggccgccatgtccgcgctgaggaagccaaagtacaacggcaagtgcatgcgcagcctgattaggagcatcctcggcgagacgagggccaagagcacgcctctgaagaacgctctgctctcggacgtgtgcattggcacgtccgccgcgccgacctacctcccggcgcactacttccagactgaagacgccaacggcaaggagcgcgaatacaacctcatcgacggcggtgtggcggccaacaacccgacgatggttgcgatgacgcagatcaccaaaaagatgcttgccagcaaggacaaggccgaggagctgtacccagtgaagccgtcgaactgccgcaggttcctggtgctgtccatcgggacggggtcgacgtccgagcagggcctctacacggcgcggcagtgctcccggtggggtatctgccggtggctccgcaacaacggcatggcccccatcatcgacatcttcatggcggccagctcggacctggtggacatccacgtcgccgcgatgttccagtcgctccacagcgacggcgactacctgcgcatccaggacaactcgctccgtggcgccgcggccaccgtggacgcggcgacgccggagaacatgcggacgctcgtcgggatcggggagcggatgctggcacagagggtgtccagggtcaacgtggagacagggaggtacgaaccggtgactggcgaaggaagcaatgccgatgccctcggtgggctcgctaggcagctctccgaggagaggagaacaaggctcgcgcgccgcgtctctgccatcaacccaagaggctctagatgtgcgtcgtacgatatctaagacaagtggctttactgtcagtcacatgcttgtaaataagtagactttattttaataaaacataaaaatatatat

SEQ ID NO: 87331 - DNA, 129 bp, Zea Mays
atggcgaaggcgaggaaggcgactatgctacggaagatcgatgagggtgcagggaagcctctaggtgaggaacggatgcgggagcacaaccatgccccaggagagtggtggcatcatgtctatggataa

SEQ ID NO: 87332 - DNA, 1704 bp, Zea Mays
gtgttgcgttccctacttgctcttttcttcctccgcttcaacctgtccccagcgccccccgcgcacacactgtctttctctgcctttctttccctagcgccgcgccggcgccgccattcgatcaggccgcttcgccggcgacagcatattccaggtcggttggttttggcacttcggaccggcggccatggcttccgacggcatcggccccagagatgtatgtgttgttggggttgcacgcaccccaatgggcggtttccttggtgccttgtctcccttgcctgctacgaaacttggctctatagtaattcaaggtgagatccgaatcttctctgcatttacatccgagctctgaacatggtcatggctgggggctgttagctgctctggaaagagcaaacgtggatccagccctcgtgcaggaggtctactttggaaacgtcttgagtgctaatttggggcaagctcctgcaaggcaagctgctctgggtgccgggataccaaactctgttgtttgcaccactgttaacaaagtctgtgcatctggcatgaaagctactatgtttgcagcacagtcaattcaattgggtatcaatgatattgttgtggctggtggcatggaaagcatgtccaatgccccaaagtacattgctgaagctaggaaggggtctcgttttggtcatgacacacttgttgatgccatgcttaaggatgggctttgggatgtatacaatgattgtgccatgggaatgtgtgccgagctttgtgctgacaaccatgccctcacaagagaagaccaggatgcatttgctatccaaagcaacgagcgtggaattgctgctcgtgacagtggtgcttttgcatgggagattattccggttcaagttcctgttggtagaggaaaacccccaacattaattgagagagatgaaagcctggataagtttgacccagtaaaactaaagaaacttcgcccaagtttcaaggagaatggtggtacagttacagctggaaatgcttctagtataagtgatggagctgctgcattagttttagtgagtgggcagaaggctcaagagcttggccttcaagtccttgcaaggatcaaaggttatgctgatgcagctcaagctccggagctttttacaaccactccagcacttgcaataccaaaggctatcgcaaatgctggattagagtcatcccgtgttgatttctatgagattaatgaagccttttcggctgttgcgcttgcaaatcaaaaacttcttggaattccttcagaaaagattaatgttcatggaggagctgtatccttaggacatcctctcgggtgcagtggtgctcgcattttggttacccttattggtgttctcagggcgaagagtggcaagatcggagttgctggtgtctgcaacggtggaggcggagcatcagctcttgttctggagctcgcataagaaatctagaccttgtagttagcaaaagctccctgaggtgatcttgtagtcttattttccgttgtagtagtcccatagaacatttcttaatttaatttggcaataaagcaaaagctccctgaggagatattgcttctgttggttgcatagtagagtatcatgtaataagagctacagaaatatttttgatatatttgtgaggatactacagaaatattttatatatttgtgatgtgtcttgtac

SEQ ID NO: 87333 - DNA, 1637 bp, Zea Mays
gtgttgcgttccctacttgctcttttcttcctccgcttcaacctgtccccagcgccccccgcgcacacactgtctttctctgcctttctttccctagcgccgcgccggcgccgccattcgatcaggccgcttcgccggcgacagcatattccaggtcggttggttttggcacttcggaccggcggccatggcttccgacggcatcggccccagagatgtatgtgttgttggggttgcacgcaccccaatgggcggtttccttggtgccttgtctcccttgcctgctacgaaacttggctctatagtaattcaagctgctctggaaagagcaaacgtggatccagccctcgtgcaggaggtctactttggaaacgtcttgagtgctaatttggggcaagctcctgcaaggcaagctgctctgggtgccgggataccaaactctgttgtttgcaccactgttaacaaagtctgtgcatctggcatgaaagctactatgtttgcagcacagtcaattcaattgggtatcaatgatattgttgtggctggtggcatggaaagcatgtccaatgccccaaagtacattgctgaagctaggaaggggtctcgttttggtcatgacacacttgttgatgccatgcttaaggatgggctttgggatgtatacaatgattgtgccatgggaatgtgtgccgagctttgtgctgacaaccatgccctcacaagagaagaccaggatgcatttgctatccaaagcaacgagcgtggaattgctgctcgtgacagtggtgcttttgcatgggagattattccggttcaagttcctgttggtagaggaaaacccccaacattaattgagagagatgaaagcctggataagtttgacccagtaaaactaaagaaacttcgcccaagtttcaaggagaatggtggtacagttacagctggaaatgcttctagtataagtgatggagctgctgcattagttttagtgagtgggcagaaggctcaagagcttggccttcaagtccttgcaaggatcaaaggttatgctgatgcagctcaagctccggagctttttacaaccactccagcacttgcaataccaaaggctatcgcaaatgctggattagagtcatcccgtgttgatttctatgagattaatgaagccttttcggctgttgcgcttgcaaatcaaaaacttcttggaattccttcagaaaagattaatgttcatggaggagctgtatccttaggacatcctctcgggtgcagtggtgctcgcattttggttacccttattggtgttctcagggcgaagagtggcaagatcggagttgctggtgtctgcaacggtggaggcggagcatcagctcttgttctggagctcgcataagaaatctagaccttgtagttagcaaaagctccctgaggtgatcttgtagtcttattttccgttgtagtagtcccatagaacatttcttaatttaatttggcaataaagcaaaagctccctgaggagatattgcttctgttggttgcatagtagagtatcatgtaataagagctacagaaatatttttgatatatttgtgaggatactacagaaatattttatatatttgtgatgtgtcttgtac

SEQ ID NO: 87334 - DNA, 96 bp, Zea Mays
cgcacccttccctggtgcgccacctgtgtatgcctatatattgtaaggcctgctgttcacgatgtactactatcaatacagaatattgccccattc

SEQ ID NO: 87335 - DNA, 2663 bp, Zea Mays
gcctgacctcccaccctccctcttgaatccgctcaagttcccgatctcccacctcgtcctccagctcgatcgcgttcgcggcaccccactccgtgctccagaaataagtagccggcggtttcctcgccccaggttttgcggtcgctggggagtgggaattcgttcggctccggtctggccaatgctcctgcggtttcttggagaggccgctgagattgggatccaagctgcgttaggcgagcagcagcagtagccgcatcgagattcgccgtcgttgtccgagggattctccgtttcttgggcggggatttcggttgcggcgggaaaaaaaaaagaattctttcaccggacttggcccaactccgctgtatgttagggtagccttttcgacgcgtttctttcgtcgccccagatccgtctccccgcccgattctttcggagtaatcggcggcggatcggaggcagaggggtttggaggcctgagctccgatggagatgcacgccgacgtcgacgggtgcagcgtgcccctggccgtgctcctcaagcgggagctgtgcaaccagaaggtggagaggccggacatcctgttcggggaggccaacaagagcaagaaaggggaggacttcacgctcctcgtgcccaggtgccaccgcaccccgggcggcagtggcggcggcgagaatgccggcgacgacgacaccatttccgtatttgcgatttttgacggacacaatggctctgcagctgccatatacacccgggagaatctaataagcagtgtgttggctgctattcctccaaatctcacaagtgaggagtggaaagctgcgctgccaagggcactagttgctggttttgtaaaaacagataaagacttccaaggaaaagctgcacgctcagggaccactgtgacttttgttataatagatggatgggttgtcactgtagcatcagttggcgattcacgatgcattctagaatctgctgagggttcaatatattttttatcagcagatcatcgcctggatgctaatgaagaggaggtggagcgtgtaacagcaagtggtggtgaagttgggagaataaatatcgctgggggtgccgggattggtccactcagatgctggccaggtggattgtgtttatcaaggtcaataggtgatatcgacgtcggggaatttatagttcctgtcccacacgtgaagcaagtaaagttgtccaatgctggtgggcggcttgtcattgccagtgatggtgtgtgggatgcactgcactttcaagaggctctgaactacaccaggggcctgccagctgaagctgctgctaatcgaattgtcaaggaagctgtcacttcgaagggattaagagatgatactacttgcatagtagttgatatactacctccagagaagttaagccccccactaaagagacctggaaaaggagtcatcaaagctctgttccggcggaggccctctgatgaaatgtctgaagatcagatggacagaggatgcttagaaactgatgttgtggaggaaatatacgaggagggctctgcaatgcttgctcgaaggttgaatataaattacccagaaggaaatatgttcaagctgcatgattgtgctgtctgccaattggagatgaaacctggtgagggcacctctgttcatggtaacatgcccaaacattcgagagttgacccctggggtggtccttttctctgttcctcctgtcaattgaaaaaggaggccatggaagggaagctacattcaagaagtatggatgtctttacccagatgctataactttttttctttttgcactggacaataaatgtgctgaatctttagttgccctctttttttcagattcccaatctgctgttcaacctgtacctaagtaggccttccttgacgggttcaatacattggttcatacacactaactaccactaacaacagcattagcaaataaagtagactcgtcaatgccatcttattcatcaatcaatgtttgacagagtcatgaattttcacctactacattcttatcaaatggcgatcggtacagattttagagatttatggtgtcatttatatgatgcactacagttgttcggtagtagaaggttcaagtctgagccttatcaagtctatattcagagagaccacaactgacctctaggatcaaatgaactggtagccttaaggtgtgctgctttctgtagttctttcattgattatcaagtctgcacgacttgtctacttgtgaataccagtcgttggttgaaccccatttagtcctaagtcccaacgtagattccttttttttcttcacatgacatactgcttgatgggtggccataaagaccatgttttttccactctcagtcacatgtgatgcttccttattaatcctctcaccacgtggatttccctttctttttcattctttaccatgtgtatagtcacgaggcacatcattacatcacattgactattttttttgtatttgcaccataattctgcagttgtaccattgtactctcaattttctaacattttttttattctttttgttattggaactttcgcttcctatgtacttgaaatggtgttgctgaatttgaatatatttctaagctttatggatgtaatttggt

SEQ ID NO: 87336 - DNA, 4955 bp, Zea Mays
atgtcgcaccccggaaagtttgtctccgtcaacctcaaccgatcctacggccagtccgctccctcatcacaccatggcggcggcggccgtccctcccgccctgccggcgccggttcctcagccggcggcggtatggtggtgctctctcgtccgcgcggagcctcctcccttgccaagccgcaagcgcccaagctctccgtcccgccgcctctcaatctaccgtcgctccgcaaggagcacgagagatttgacggctcggcggccgctgcggggggcggggtcgcctcggccccgcctcgatccggcgggcctgctgctggctggaccaagcccgcctcggcgtccgagaagcctcccggctccgcagcgcttcctggcggcgtccccaggccaccgtcatatgggtttgcggagaaagccggcgtcttgcgtggggaggacttcccgtccttgaaagcagctgttgccccgccaacacccccgcagcctgcgcagcggcagaaggatgctgatggggtccgggtcgtcacgccagaggcgcgaccaggatctcttgggatgcggccacaggtgacaacctcgcggaccactgagacgctggcctctggtgtcagcttgggacctggtggccgcacttccgctgagagggtgcagaagcctgatctggggccgcttccgatggtccggcttaggtatgattctgactgggctgatgacgagcgtgacacagggctgagccttccagagcgggacagcagggagaggggatttggcaggactgaggccatgcttccagggcgcgacctttatgtatcgatgagggatcccttcaaaaaggagatgtttgggagagatgtggctgcaacaaataaagaaggtgggcaggacaggctgtggcgatctcccgtgtcaaaccaacacgacagggagcgaacagatggtcgaccttacagtggtggcagaggaagcagtgggcaatcataccgagaaaacatagctgccagtggatccaaggatgtgtggagtaatggtaaggagcctcctatgagtgcctatggacagaatggggtggaagctgctagcgagcgttacggcgacagttcaaataattggcctaggttgaattctttccagaataatgttggttccaaagtgcagccctttggtggtaataaagggcctttaaataatgatccagtggcaaaatttggcagggagaagcggctgactggttcccctgcaaagcctttaatagatgatagtggttttgacagcatttctgccgttaacttgactgcaataaagaagaaaaaagaagcagctaaaccagctgattttcatgacccagcaagggagtcgtttgaggcagagcttgataggatcttgagggtacaggagcaggagagacaacgggtaatggaagaacaggaaagggccagagaagttgctcggaagcaagaagaggaacaggagaggatgatacgagaagaggaggagaggcaacggctggcggaggagcaggcaaagcaggcagcttggcaagctgagcaagagaggctagaagctgctagaagggctgaagagcagagaatcgcaagggaagaggaaagaaagaggatcgctatggaggaggagcggcgcagggaggcagcacatcagaagctcttagaattggaggcaagaattgctaaaagggaagcaaaaacaaacattgacagcacaagagctgtcaatgatgaatttattcctggagatgtcaaggacagagacctgtcacactctgctaactttggtgacagaaaggatattgacaaaatgaatgagcgcatcaatacctcaacaccattggaatcctctagtattaacaggttcagtgagacagttccaagggtgcgcactcttacagatggacgcccttcatttattgatagagaaactgcacactatagttcaaggcctgcatttccagaacaagagaatgtgcatcataggccacagcatgacccttttgcttcaaagaggggaaatttccccaagaaggatcttaatgatggatttgggagtgtttcggttaggcaatcttcaacaggccgaacaactgattcttcatgggcacttgaagatttccatcatgaaaaggttccacgatgggatgcgcctagggagattgaccgtttcagcaaacaatctgaatttgataatgagttttttaacagcgacaggtttggagatacagcttggctgcctagtagttctcatggaagcctcaatgctcaacaaggagataggatgtttcagagtcctgatgttaatgaattgtcttcttttaccagaccacgctactctatgaggcaaccacgtgttcccccacccccaattgtgacctctgtgcacagaagttcaattggtgcttcagcacaacgtttcaattcatcttttgtggatggtgggaacagagagtgttctggtagagatgatgtgcagattatgcagggtcagtacggaagtgtataccaagaggcatctcgccagcatgggatacgatctgaccacatttctgtcaatgagcaacaaattgtggacagaaaaagccctgtattgggttcacaatcttctctttctgtttcaagccctcctagctcacctccacatgtttcacatgatgagatggacgtatctggtgattctcctgtgttaccgacttctgctgatggtgaacatacggcgctctctgacaaccatcatgcagctctgactgtagatgcagacaatacaagcagaattgctgcctcaggagtgccccacttggaggaggatgaatggtcaagtgtaaacaatgatgataggcgaaaacaggatgaatatgatgaagacaatgatagctaccaggaagatgaaatgaatgaagctgatgatgagaacatagacttggatgatgagttcttagaggggcaggatacacccgtagaactggaaccagttatacttgggtttgatgagggcgtgcaggttgaaattccaccgaatagtcaacttgaattagcttctgtgaggagcacggaaaggacagttggagtacatctaaactcaggagttgcagagcaagagaatgtcagtggttcagttgtccattctgatcctgttactgaagcagagaaagcactgcaggcattgactcttgatggtgtaaatggcctgacagaagacagtaatggggagccatccaatagctcaaggacacctgcttcaagttcccagttacctcaggcatcttctgtgggtcctattttttcgtcagcttcaacagtagttgggcagaatgaagtacctgtcagcctccagtttggtttgtttacaggtcctcctctaataccaactccggttccagccattcaaattggttccatacagatgccaatccatctccacaatcagtttaacccatccctgcctcatatgcacccttcaacaacccctttgtatcaatttggccagttgaggtatgtacgtcctatcgctccgagtgttcgatcgctgccttctcaggccacccgccctgcacattcttccatatcagctcaacatacattgaatcagaatgtgtccagtgttctacctgagctaatggatggaggtacaaaccagaacatcccagctcaggcaagctcatccacctttatcaacaaatcagcagcacctacaaccaaggttccccttggcatggacaattcaaattcccagtatctcaatgctcctgcaaacaatcagatggctggtgtggacggatttagtagtcaagtggacagagagtttgctgagggtacaactccaagtgggaggaatcaaggtctctctttgaagaggaattacaggcctacgtccaacaatgtagaatcttctcaatatggtttggaggggagagccatgggtgatccaaaggctcttggtgttgtctctgatagaagggggaggagatatggatatgctgttaaagacattaacatgagatctactggctcaattgttgagccttctcataaggattccaaaggaggattccagagaagggctcgtaggaatgtaagacgaactgagtttagagttcgggaaaacatcgagaagaatcaaaatgaaacttctgaatcattttgccatggtgaacaagatgagataacaagctccaatggaacaagagatattccagcgagaaatactaatagaagggaacttgatatgagcaaggcatctaggataaatggagcaagtgatcagagtctctcgtttagaagtacacacaatgtcccttatgagagatctcatggtgggaacaagaagtctagaacgggtgctgttcctgatggagatactacctcattgcaagctggagctgtccgtgttgtgaagcagcaaggcattgaggtccctgttgatgcagatggcttcattgaagtaagatccaaaaggcagatcatgagtgtcaggagagagcagagggagaaagaaaacagatccaaaataaggatggcaaaggctccccgcaaacagcatagtatttccctacaaagctcagttggtcctagtgtgaataagcgagcagctccttctagtggagaagttacaaagaaagtttcttctggttccgccatcacagtagaaggaagaattgttgactatgctgaatcttcaattccattgatgggtgatacagcctccatgaacctcatagggccaccctcaaccaatgcagaaactcatacaaactgctttgccaatcagcctatccagatccaggcatcctctgacttggtcacctcgagtcctgcaaagcttgtgagtggcttatctgatggcgacaataaagggccatctattagtactccatttaacatggtttcctgggataattcacaaataaaccaacaggcgagcaaattcgtcttgcctgtgctggcaag

SEQ ID NO: 87337 - DNA, 2266 bp, Zea Mays
ggtcatgccattaactcaaactcaacttgaagaagctatgggaccagctaaatttgaacagcaggctgggcctggcttttcgttggagtccaacaatgctttgtctcccacagtaatcacagaaaaggtgttgccttcatctgctagtcctattaactcccttctggctggagagaagattcaatttggggcagtaacgtcaccaaccatgctacccccagtcagccgaactgtttcaagtggtcttggagctccaggttcatctaggcctgatatgaagatcgatcgaggcttgcctagcgataacagtggtcctgataaggcaaattccaaggaattatgtccgagtaccgaggatgcggaagcagaggctgaagcagctgcttctgctgtggctgtggcagctattagcactgatgagggatctccagctgatgcaactactgcatcggctccagacaagagctttacaagcaaggatctcagtgggttaacatcaggaggggcaagaacaggtcaagctggtcaatcatccacagaagagccactcgcagttgctcttcctgcagacttatcggttgatactccatccatgtccttgtggcctcctatagccagtccacaagcatcagggccaatgctttctcagtttcatggtgcacagccatcccacttttcctgctttgatatgaactcgatgttaggagggcacatttttgcatttggcccaagtgacgaatctgctggttctcaaggtcagcaccctcaaagaagcaatgcattgccttcagcaccattgggagcttggccacagtgtcattctggggtagactctttctaccgccctccaactgggtacgctggtcctttcatcactccgggaggaatcccaggcgtgcaagcccccccacatatggtggtctataaccacttcgccccagtaggtcaatttggtcagatgggacttggttttatgggagccacttatatccctggtgacaagcagcctgactggaagcaaagtcaagggccacctattgttggtgtaagccagagtgatccaaacagccaaaatatggtgtctggtcaagtaaacgctcctagtgttcctgctccagttccacatctacgcccaacttctatcatgccaatcccgtctccattgaccatgttcgacattgctcctttccagacatctacagacatacagatgcaaacgtgctggccacatatgcctgtacctcctctacactcagttccattatcagttgcacttaagcagcatccagtagagggtacagccacacaacagtttgttcataacgtgccaatagacaagtctggtacaaataaccgatttcaggagtcctctgcttctgctgggccatcagacggcaacaaaaccttcccaaatgcagccgtttctcagtacagggatgagttaggtcttgtcgaacagccagcctcaaccagctcaagctcccaaactgttcagccttcgtttggccaggcgggcttgatcagcaatgaagtcccaaccagtgccaaagccatggttagggtgaccccatccaaagtcaaccctggaattgcagcaggggcggctggcagcacgaacgccccccaggtcaccagcataccttccaagacccatcagtcctcgtcatcatcatcagacccgcaataccagcatctggttaacaatcaggatcgccgtgcccgtgcgactcagaaggctggtactggtaacgagtggcagcgacgatcagggtaccagggtaggaatcaaggttctggttccgacaggagttcaggcactggtaggatgaagcagatctacgttgcgaagccctctgcaacaagtggccatgcctcgtcaggctagagagtggtggtgctgacttcactgagcctgctccacgctggtacacagctcagagcatccttggcatcagacacatgtgaaacatattttcgctccatgtctgtctattctggtttgttttggtgattgtggcatggtgctggttgtgtatgtttttggttcattttgttgcatagaagaaaatagagtgtgctgttgcactgcaaaaagacattcgaagcgataccatatcatgcatgataaattttgcagccgatggaatcggctgcccgtgtaagtcactggtgtgatgtaaggattactattgtttattgttactatttgttggctggctcaacgtctggacaggcgaggaaatgtaacgtgggggggtatgttaat

SEQ ID NO: 87338 - DNA, 2068 bp, Zea Mays
aatagccaatatgttcagatgtctattcccgttcagcttgtagcagcttcctagtcctagggttagatttccaagcaccacgccacccgtacacggtttccagcagagcattccggaaggagggggcgcgatgtggcacgaggcgcggcggtcggagcggaaggtccacgacctcatggacgcggcccgccgccgggcgcagcgccgagccgtctacctcgcccgccgccgcggcgacccgcagcaggcgctccaggtctccggcacgcggtgccgcgttcaccgcgacgacgccctgtaccaggccaccgaggaccagcagggattgatacaatggaatggaaagcaagatgttttgattgacagatttgatggccgtgcattgcttgattttatccgagactcgagctctcgcccttttcgagtccaagggaaatctgaagaagaggaagagttagaggaatttgttaattttgaacgttaccgggatttgattaagcatcgtcgcagaggatgtcgtttctgatgaggccggtttgcagcatgttgtgcaagagttggaggcaaaagctcttcttccttttagctttgacaaaccacaatcctcacagcctcctgctagcaaaggcgcatattcacaggttggatactcatacaagggagacggaaatgaggaatctgaagacctagacagtgatgacgacgacgaagaggaagaagttgatgatgatgacaaggacttcagtagtgatgatagcagtgatgaacgaatggaaagtatagcgaaagaatttgggataaaaagatataactggcttgtttacatggataaaaaaaacaaagaacaggagaagaggcagaaagaaattgttaaaggcgacccatctataaaaaaaatgagccgtagagaaagaaggaaggcttctcagattgagcgggaaaaggagcgggaggcagcacgttctgttggaagggtatcttatcgtgatccttatagggaacaaaggagaagcccatcatatgaagcatattcaaggggcagaagatcaagatcgagatcaagatctcgttcaccatcccattctaggcgtcatggccgtgggatacatgctgaaagcaattattggagcaagcaaaaggctcctagggttgaatatattactgaatttggaggttccgatgataccagtgaaccaaaagtttcagggatctctccgccttcgtctccaatacgaattgacatacctaaccggttgtctggtggtcaaattcttgaggcacttcacagtgatcctgcctcttctttgtctgtggaacaggaaagaactgcaaaacttttgaaaccttcccccaggtttgtcatgatgattacaatgttatgaagagagcggctgtatgtgcatccaaggtacatcatcagcattagctaaactaagcaaggttgcttctgggggaactggtaaaactccccagactgaaaagaaagaaacaccacaagaaagacttaagaggataatgagcaaacagcttaacaagcaaattaaaaaggacacggctgctgagattgccaagaaacgagaacaggaacgacaaaggcaggaaaaacttgctgaagttggtcgatacaagcgtcgtagccgcagtagaagtcttagccgttccccaccaagaaggcggcgatatagcagaagccgtagtaggagcagaagcccaagaaggtaccgatcccgctcgctctccagttcccggtcgccctctcgctctccaaggtaccgaagcaggtcaagacactgaaaatatccaggcagccactaacaaagtgccttgccatgttgtagttaatttattttatagactttttcattcctgcagcgatgtgtactcatgagaagcctccgtttttgttttcttagtcctattatcgacagtgtgtgttccttgtgtttcagaaggtttattctctgttcctcatggcttgcccctttcaagcaagcgtaattttagggcatgtttggccagaccagcttccaggccgaatttagtagtattgccaagcagttcttttatt

SEQ ID NO: 87339 - DNA, 2476 bp, Zea Mays
aatagccaatatgttcagatgtctattcccgttcagcttgtagcagcttcctagtcctagggttagatttccaagcaccacgccacccgtacacggtttccagcagagcattccggaaggagggggcgcgatgtggcacgaggcgcggcggtcggagcggaaggtccacgacctcatggacgcggcccgccgccgggcgcagcgccgagccgtctacctcgcccgccgccgcggcgacccgcagcaggcgctccaggtctccggcacgcggtgccgcgttcaccgcgacgacgccctgtaccaggccaccgaggaccagcagggattgatacaatggaatggaaagcaagatgttttgattgacagatttgatggccgtgcattgcttgattttatccgagactcgagctctcgcccttttcgagtccaagggaaatctgaagaagaggaagagttagaggaatttgttaattttgaacgttaccgggatttgattaagcatcgtcgcagaggatcatgttgtgcaagagttggaggcaaaagctcttcttccttttagctttgacaaaccacaatcctcacagcctcctgctagcaaaggcgcatattcacaggttggatactcatacaagggagacggaaatgaggaatctgaagacctagacagtgatgacgacgacgaagaggaagaagttgatgatgatgacaaggacttcagtagtgatgatagcagtgatgaacgaatggaaagtatagcgaaagaatttgggataaaaagatataactggcttgtttacatggataaaaaaaacaaagaacaggagaagaggcagaaagaaattgttaaaggcgacccatctataaaaaaaatgagccgtagagaaagaaggaaggcttctcagattgagcgggaaaaggagcgggaggcagcacgttctgttggaagggtatcttatcgtgatccttatagggaacaaaggagaagcccatcatatgaagcatattcaaggggcagaagatcaagatcgagatcaagatctcgttcaccatcccattctaggcgtcatggccgtgggatacatgctgaaagcaattattggagcaagcaaaaggctcctagggttgaatatattactgaatttggaggttccgatgataccagtgaaccaaaagtttcagggatctctccgccttcgtctccaatacgaattgacatacctaaccggtcgggaaactcgacttttaatatttgcaaatatacattgggcgaacttttctctgatggagcttattacctcaatcctggtgttctgaagatgactatgtcaggaataggatagatcaagacatggtcatgatggtatctatggtgtaaaaaatagttgttttgtagataggcatgcattttatggttcgttttatttttgctaagcaggaagaagatttaacacacatatatctacagtcagctgtggagtttatgacctgtgcatctttgccatgtaaattattatggctataataccccatattttgcaggttgtctggtggtcaaattcttgaggcacttcacagtgatcctgcctcttctttgtctgtggaacaggaaagaactgcaaaacttttgaaaccttcccccaggtttgtcatgatgattacaatgttatgaagagagcggctgtatgtgcatccaagggtgtttgtctagaaccctttactttatttttcatgggctgtctcgacttgagcatgtctctgttacttagagaaccgtcttgtatttttcatcattactgacatgtgatttctgttaacagtacatcatcagcattagctaaactaagcaaggttgcttctgggggaactggtaaaactccccagactgaaaagaaagaaacaccacaagaaagacttaagaggataatgagcaaacagcttaacaagcaaattaaaaaggacacggctgctgagattgccaagaaacgagaacaggaacgacaaaggcaggaaaaacttgctgaagttggtcgatacaagcgtcgtagccgcagtagaagtcttagccgttccccaccaagaaggcggcgatatagcagaagccgtagtaggagcagaagcccaagaaggtaccgatcccgctcgctctccagttcccggtcgccctctcgctctccaaggtaccgaagcaggtcaagacactgaaaatatccaggcagccactaacaaagtgccttgccatgttgtagttaatttattttatagactttttcattcctgcagcgatgtgtactcatgagaagcctccgtttttgttttcttagtcctattatcgacagtgtgtgttccttgtgtttcagaaggtttattctctgttcctcatggcttgcccctttcaagcaagcgtaattttagggcatgtttggccagaccagcttccaggccgaatttagtagtattgccaagcagttcttttatt

SEQ ID NO: 87340 - DNA, 2200 bp, Zea Mays
aatagccaatatgttcagatgtctattcccgttcagcttgtagcagcttcctagtcctagggttagatttccaagcaccacgccacccgtacacggtttccagcagagcattccggaaggagggggcgcgatgtggcacgaggcgcggcggtcggagcggaaggtccacgacctcatggacgcggcccgccgccgggcgcagcgccgagccgtctacctcgcccgccgccgcggcgacccgcagcaggcgctccaggtctccggcacgcggtgccgcgttcaccgcgacgacgccctgtaccaggccaccgaggaccagcagggattgatacaatggaatggaaagcaagatgttttgattgacagatttgatggccgtgcattgcttgattttatccgagactcgagctctcgcccttttcgagtccaagggaaatctgaagaagaggaagagttagaggaatttgttaattttgaacgttaccgggatttgattaagcatcgtcgcagaggatgtcggtacctttttggtttctctgttctattgctgttgctgtagaaatttcatatcttgcatccatttacatcacttgagggattgtcctaatgcacactttatttgtttctaaattggtacagaaaaagggtgctatttcttaattcaaagcactagttaactgaacatttacctagcttcttttcacagtttctgatgaggccggtttgcagcatgttgtgcaagagttggaggcaaaagctcttcttccttttagctttgacaaaccacaatcctcacagcctcctgctagcaaaggcgcatattcacaggttggatactcatacaagggagacggaaatgaggaatctgaagacctagacagtgatgacgacgacgaagaggaagaagttgatgatgatgacaaggacttcagtagtgatgatagcagtgatgaacgaatggaaagtatagcgaaagaatttgggataaaaagatataactggcttgtttacatggataaaaaaaacaaagaacaggagaagaggcagaaagaaattgttaaaggcgacccatctataaaaaaaatgagccgtagagaaagaaggaaggcttctcagattgagcgggaaaaggagcgggaggcagcacgttctgttggaagggtatcttatcgtgatccttatagggaacaaaggagaagcccatcatatgaagcatattcaaggggcagaagatcaagatcgagatcaagatctcgttcaccatcccattctaggcgtcatggccgtgggatacatgctgaaagcaattattggagcaagcaaaaggctcctagggttgaatatattactgaatttggaggttccgatgataccagtgaaccaaaagtttcagggatctctccgccttcgtctccaatacgaattgacatacctaaccggttgtctggtggtcaaattcttgaggcacttcacagtgatcctgcctcttctttgtctgtggaacaggaaagaactgcaaaacttttgaaaccttcccccagtacatcatcagcattagctaaactaagcaaggttgcttctgggggaactggtaaaactccccagactgaaaagaaagaaacaccacaagaaagacttaagaggataatgagcaaacagcttaacaagcaaattaaaaaggacacggctgctgagattgccaagaaacgagaacaggaacgacaaaggcaggaaaaacttgctgaagttggtcgatacaagcgtcgtagccgcagtagaagtcttagccgttccccaccaagaaggcggcgatatagcagaagccgtagtaggagcagaagcccaagaaggtaccgatcccgctcgctctccagttcccggtcgccctctcgctctccaaggtaccgaagcaggtcaagacactgaaaatatccaggcagccactaacaaagtgccttgccatgttgtagttaatttattttatagactttttcattcctgcagcgatgtgtactcatgagaagcctccgtttttgttttcttagtcctattatcgacagtgtgtgttccttgtgtttcagaaggtttattctctgttcctcatggcttgcccctttcaagcaagcgtaattttagggcatgtttggccagaccagcttccaggccgaatttagtagtattgccaagcagttcttttatt

SEQ ID NO: 87341 - DNA, 2009 bp, Zea Mays
aatagccaatatgttcagatgtctattcccgttcagcttgtagcagcttcctagtcctagggttagatttccaagcaccacgccacccgtacacggtttccagcagagcattccggaaggagggggcgcgatgtggcacgaggcgcggcggtcggagcggaaggtccacgacctcatggacgcggcccgccgccgggcgcagcgccgagccgtctacctcgcccgccgccgcggcgacccgcagcaggcgctccaggtctccggcacgcggtgccgcgttcaccgcgacgacgccctgtaccaggccaccgaggaccagcagggattgatacaatggaatggaaagcaagatgttttgattgacagatttgatggccgtgcattgcttgattttatccgagactcgagctctcgcccttttcgagtccaagggaaatctgaagaagaggaagagttagaggaatttgttaattttgaacgttaccgggatttgattaagcatcgtcgcagaggattttctgatgaggccggtttgcagcatgttgtgcaagagttggaggcaaaagctcttcttccttttagctttgacaaaccacaatcctcacagcctcctgctagcaaaggcgcatattcacaggttggatactcatacaagggagacggaaatgaggaatctgaagacctagacagtgatgacgacgacgaagaggaagaagttgatgatgatgacaaggacttcagtagtgatgatagcagtgatgaacgaatggaaagtatagcgaaagaatttgggataaaaagatataactggcttgtttacatggataaaaaaaacaaagaacaggagaagaggcagaaagaaattgttaaaggcgacccatctataaaaaaaatgagccgtagagaaagaaggaaggcttctcagattgagcgggaaaaggagcgggaggcagcacgttctgttggaagggtatcttatcgtgatccttatagggaacaaaggagaagcccatcatatgaagcatattcaaggggcagaagatcaagatcgagatcaagatctcgttcaccatcccattctaggcgtcatggccgtgggatacatgctgaaagcaattattggagcaagcaaaaggctcctagggttgaatatattactgaatttggaggttccgatgataccagtgaaccaaaagtttcagggatctctccgccttcgtctccaatacgaattgacatacctaaccggttgtctggtggtcaaattcttgaggcacttcacagtgatcctgcctcttctttgtctgtggaacaggaaagaactgcaaaacttttgaaaccttcccccagtacatcatcagcattagctaaactaagcaaggttgcttctgggggaactggtaaaactccccagactgaaaagaaagaaacaccacaagaaagacttaagaggataatgagcaaacagcttaacaagcaaattaaaaaggacacggctgctgagattgccaagaaacgagaacaggaacgacaaaggcaggaaaaacttgctgaagttggtcgatacaagcgtcgtagccgcagtagaagtcttagccgttccccaccaagaaggcggcgatatagcagaagccgtagtaggagcagaagcccaagaaggtaccgatcccgctcgctctccagttcccggtcgccctctcgctctccaaggtaccgaagcaggtcaagacactgaaaatatccaggcagccactaacaaagtgccttgccatgttgtagttaatttattttatagactttttcattcctgcagcgatgtgtactcatgagaagcctccgtttttgttttcttagtcctattatcgacagtgtgtgttccttgtgtttcagaaggtttattctctgttcctcatggcttgcccctttcaagcaagcgtaattttagggcatgtttggccagaccagcttccaggccgaatttagtagtattgccaagcagttcttttatt

SEQ ID NO: 87342 - DNA, 1388 bp, Zea Mays
ttcctcatccaaacaccacttcgctctgctccgacagtccgacttcgccgcgatcccgcaatggtcgacgtcgaccgccggccgtcgcacccgcacggcctcccgcgtcctccttcccacgccgccggcctgcgccgtctctccacccgtgcctcggcacccagcagcccggctcctccgtctccctccgcctccgcgccctccccgacggcgcttctcgctcacctcgccgcggccggagtggccgtcctcccgggcctctccgccaccgagttcgccctcgcggaggccgcgctcggcggcgtccagctgccgcccgacctccgcgagctcctcgcgctgggcctgccgtcgggggacggattcccggactaccgcaccccggcggggctgcgcctcctccgcttcgccgcgcaggaggtccccgcggccgtcgccgcgacgctgccgctcgccccgggccggcgcgcggggcgggccgcgccgccgcccctcgtcccgctgtgcggccggcattacgtgccggcgacgccctgcctcgcgggcaacccggtgttctacgtgtccgactcgggcgtcacgttcgcgggcgccaacgccgccgacttcctcctccgcgccttcgccgccgagccgccgcccggcgcgccgctccggcgccagctctccgcgccggtcccgcccccgtccggcgcgccgccgtccactgcgcgccggagcctggactccgtcaccggcagggccccgcgctggatcgagttctggacggacgccgccgcggccggggaccggttcctggaagtcccaacgggggccacaagcgccgccgcgtccagcgcggcgccggagtggctgcggcccagccttgaggaggcggcctcgatgctgaggcgcggcgggtggggcctctgcgaggtggaggagatggtgacgggagagggtcccagcggcgccggcgaggtgaatgtggtggcgttggcgttgactgtcgaccggtgctgccgggacctgaagagtggagggtggggcgcggaggaagtggtggagatgctgggggcgctgctggggccgaggaagccgcggcgggcggtggcggcgctgccgccggacgtggccgcacggatggggcggctcgccgaggccgtgtcgcgggctgtcgggtcccatgccaaggcgaaacctccgaggccatcttgagaaacagatgttgtagtctaggtcctaggaattcttttccccctgttttccctgtattgagtacgtgcgtgtacgtgtaagtgaactactagtcttgtacaacgagcagcacgtgccttgtatgtctgtaatgtacgtacatgttagatatgctagagtgaatgaataaatataaggactgtcatttcgta

SEQ ID NO: 87343 - DNA, 2593 bp, Zea Mays
cacgcccaacggccgtttcccgcaccccctatccgggaaggaagaaagccagaactcacccctgcttcgtctggcggcgccgtttcccgcacgcgatgccgtcgacggcggaggatttcccggcgataaggaagctggggaagctcttccggcttaccgaagtgtacctctgggacgattcgtatggcgctggacctcacgatggacagaagaacgggcgctcggcggaggctgctctcgtggactctcatacagataaaacatgcaatgaagcatccaatagcactgacaaaggccatttctttgttgaagatttggaattggtcaatctcatgggttctttggggcttcctgtttcattcagcacaagtaaagtgaacaagaacacatgcaacaagggaaagaaaaaaggaagacaagcaccgctcaaagcagcaaacactcaaatcaatgatgctgtgaggatatgtatcaatactgaagatagagaaaattctgttgaatcattggatgctatggagcaaacgcactcatgcaatttatttgtgacaccactgggtcaaaatgaaccctcccgtgatgacactgacaagaggcttagggaagacagctcttgtgttgaagaacaagaagagtctggctgtagcaccatctactctgctggcaaagcccctggctgtgatgctaaaaatcatctcactgaacttggggcttttgagctttctgataacttggccaactcagcaaaagaagaatactcaattcaagaaaatcaagcttatgaaagtgtgttgctagattctgaagagatgtcaaggaatgactgtgttgatgatgaatctacacattcctgtgttggcatttatcaggatgaaagagtgtccacaaggggagatcaaacatctgaagaaactctatcagtaccccatgattacaatgatgttggcagagaagctagtctaagtttggcagagccatcatctattgatgagcatgcacaaagctctgccaacaacttttactatgactatggtgaatggagggttatctgggatccattctataatcggtattatttttacaacatccagacacaagagtccacatggtgtcctcctgaaggactggaggattttgcatcatattgtagcccagataccactaaagagctagctgaactgggatctcagtgttcaagcatggcaccacaagagaacaatctggctactcatgtcaatcatttagaagcacaggagcaagatcactgcattcatgatttatctgacattcctgttgaaaagccaatatatcaaagtatgataactacctctgacaaagcacagcacactgaaaataagtacagcgattcaacaactactgtgttagagatgaaccaggaagttgctagcaccaaaacgaaaaagagaatcattcatgccaagacatggcagggaacgtctctaatgacatcatcaagtactgggctcagcggtattcacttttctcactttttgatagtggtataaagatggatgaagtagggtggttttcagttacgccagagccaattgcaaagcatcatgcatctcgtgtgggtgcgggagtaatgattgattgtttcacaggagttggtggaaatgccatccaatttgccaaaaagtgcaagcatgtaattgcagttgatattgatccacaaaagattgattgcgcgcatcataatgcatccatttatggagtaaatgatcacatagatttcattgtaggtgattttatacatatagctcctcatctgaagggagaaactgctttcatgtcgcctccttggggtggccctgactatgccaaagttgatgtttatgatatgaaaagcatgcttattccttgtgatgggtactctctttttaaactcggaaccatgatagcttcaagagtagtgatgtttcttcctcgcaacattgacctaaaccaattggcggacatgtccttgtctgtggatcccccgtgggcagttgaggtcgagaagaacttcctcaacggaaagctgaaagccataacagcttactttgaagaacaggatcgttgaaccaagcatcggcgctggtgatacaaatcatcttgttagctatgactcacgacaaatttttgtggtgaccctaaacagaacctttgtgttcggagacagaaagaagcggtttatcatcttcaccgagcatagataatttatttgcagagatgagtcattggtatcatacaaaagcagctcagcttatctcaattcacagcaagtgaaactgtcgaaggaaaactacaaggctgacagtcgaacgcgtgggagttagcttaattttgccttatgataagcaagcatgcttcctggtttatttcatacagctactagtagtttcagctgcaacagttgtgcgttggtgtgcgtgtgattctcacatatctggtcctgcggatgtgagtgatgcaaatgtatgtgtcatcatcccatgtaagggtttgtttgtttgctctcaatctatgtagattgagtgggattaagtgagtttaaatctcagacaagtcaaaaaaaaatgttttcaatctc

SEQ ID NO: 87344 - DNA, 2476 bp, Zea Mays
tgccgtttgcgaggagtacgtctcctcaaactactctctcttcctgcagggacgattcgtatggcgctggacctcacgatggacagaagaacgggcgctcggcggaggctgctctcgtgataaaacatgcaatgaagcatccaatagcactgacaaaggccatttctttgttgaagatttggaattggtcaatctcatgggttctttggggcttcctgtttcattcagcacaagtaaagtgaacaagaacacatgcaacaagggaaagaaaaaaggaagacaagcaccgctcaaagcagcaaacactcaaatcaatgatgctgtgaggatatgtatcaatactgaagatagagaaaattctgttgaatcattggatgctatggagcaaacgcactcatgcaatttatttgtgacaccactgggtcaaaatgaaccctcccgtgatgacactgacaagaggcttagggaagacagctcttgtgttgaagaacaagaagagtctggctgtagcaccatctactctgctggcaaagcccctggctgtgatgctaaaaatcatctcactgaacttggggcttttgagctttctgataacttggccaactcagcaaaagaagaatactcaattcaagaaaatcaagcttatgaaagtgtgttgctagattctgaagagatgtcaaggaatgactgtgttgatgatgaatctacacattcctgtgttggcatttatcaggatgaaagagtgtccacaaggggagatcaaacatctgaagaaactctatcagtaccccatgattacaatgatgttggcagagaagctagtctaagtttggcagagccatcatctattgatgagcatgcacaaagctctgccaacaacttttactatgactatggtgaatggagggttatctgggatccattctataatcggtattatttttacaacatccagacacaagagtccacatggtgtcctcctgaaggactggaggattttgcatcatattgtagcccagataccactaaagagctagctgaactgggatctcagtgttcaagcatggcaccacaagagaacaatctggctactcatgtcaatcatttagaagcacaggagcaagatcactgcattcatgatttatctgacattcctgttgaaaagccaatatatcaaagtatgataactacctctgacaaagcacagcacactgaaaataagtacagcgattcaacaactactgtgttagagatgaaccaggaagttgctagcaccaaaacgaaaaagagagtaaggagatctcgatcgtatcattcatgccaagacatggcagggaacgtctctaatgacatcatcaagtactgggctcagcggtattcacttttctcactttttgatagtggtataaagatggatgaagtagggtggttttcagttacgccagagccaattgcaaagcatcatgcatctcgtgtgggtgcgggagtaatgattgattgtttcacaggagttggtggaaatgccatccaatttgccaaaaagtgcaagcatgtaattgcagttgatattgatccacaaaagattgattgcgcgcatcataatgcatccatttatggagtaaatgatcacatagatttcattgtaggtgattttatacatatagctcctcatctgaagggagaaactgctttcatgtcgcctccttggggtggccctgactatgccaaagttgatgtttatgatatgaaaagcatgcttattccttgtgatgggtactctctttttaaactcggaaccatgatagcttcaagagtagtgatgtttcttcctcgcaacattgacctaaaccaattggcggacatgtccttgtctgtggatcccccgtgggcagttgaggtcgagaagaacttcctcaacggaaagctgaaagccataacagcttactttgaagaacaggatcgttgaaccaagcatcggcgctggtgatacaaatcatcttgttagctatgactcacgacaaatttttgtggtgaccctaaacagaacctttgtgttcggagacagaaagaagcggtttatcatcttcaccgagcatagataatttatttgcagagatgagtcattggtatcatacaaaagcagctcagcttatctcaattcacagcaagtgaaactgtcgaaggaaaactacaaggctgacagtcgaacgcgtgggagttagcttaattttgccttatgataagcaagcatgcttcctggtttatttcatacagctactagtagtttcagctgcaacagttgtgcgttggtgtgcgtgtgattctcacatatctggtcctgcggatgtgagtgatgcaaatgtatgtgtcatcatcccatgtaagggtttgtttgtttgctctcaatctatgtagattgagtgggattaagtgagtttaaatctcagacaagtcaaaaaaaaatgttttcaatctc

SEQ ID NO: 87345 - DNA, 276 bp, Zea Mays
cttaagcttggccaagacctcaggtgcagtcctcccagagacgcaaatcatgaagacgaagccaaacttctccctgtcttgggcatttcactctatgagctcctgcagcgggtggaagaaaaaacagtccatactttatatatgacatataaggaaaactgagagttgatgtagccgttgggccatcaaatccgtggttgtggagagcgctgatgattgctcctccttgctccacctaaaccagaaaggaaacatagattaccaacacagtgactg

SEQ ID NO: 87346 - DNA, 2462 bp, Zea Mays
atgagaggggtgaaggaagcccaggagagccgaggaacacgccaagaagcgtcggcgatgagatttatgctctgtgaagtcgtcgagccaccaaggacgggggcgacgtggggggtggcggcgcagaggcgaggattggggtggcaggagcatgcgcatgcgtggagaaaggtgggcccagcgaggatcgcagggcatggacggtggcgtacctggaagcaccgatggaagggcgaggagtgcggggaagagacgtacctggacgggcgccgatggaagggtgaggagtgggggttaggaccacggaggcgagaatcgtggaggcggggaagaatgatgcctgttcgagctcggagagcgagaaccccccgtgctggccagtgggccaccttctgcccacgaacgaagagcggcgcgatacgtgggcccagcaagatcagggcccgccccgaagcacccaggcaccttcgtgctcgtgccgtgcccgtgcccgtgcccgtgcccggcgcatcggcgtctcctctcctcgcgcatttctcactcgaccaccacttcggcaccgcagcgtccgaatccctccgaaccccgacccaagcgcgctgtccggcggtcctcatcgaacccgccctgatccctagcgctcgcgtgctccactctacctacggagggagcccgcccagccggccgcctctgcgttggtcctggccgcggcctcgcacgcagatgatggtggcggagaagccggcgccgggggtgttccaggtgcacgaggcggcggacgacgagcaggagccggcgtcgccgtcgtcgccacggaagatgcactcgctggacttcgagcacatcggcgcgctcgccgccgtggccgagtcgctggcgcccgggagcaggtggcggagagcgctcaccagcgcgcgcttcgtcatcttccaggccaagatcaacgtgctgctccccttcggcccgctcgccatcgtgctccactatctctccggaacgcaccaaggatgggttttccttttcagcttaatcggcattaccccgttggccgagagactgggatacgcgaccgagcaacttgcttgctacactggcccaacagttggggggctactgaatgctacatttggaaatgcaacggaaatgattatatcaatatacgcactgaaaaatgggatgattcgagtcgtccagcagtcactactaggctcaatactgtcaaatatgctgctggttcttggctgtgctttctttgccggcggtcttgtccactccgacagggatcaggtcttcaacaaggcatcagctgttgtaaactcaggactactgttgatggctgtcttaggccttatgttcccagcagtgcttcacttcacgcattcagaagcgcagtatggaaaatccgaagtagctctttcaaggtttagtagctgcatcatgcttgtggcctatgctagctatctgttttttcaactgaagagccaccgcagtatgtacagcccaattggtgatgaagaagaagccactgaggaggatgaggatgaaaaggagataacacaatgggaggccatctgctggctttttatgttgactatttggatttcaatactctcagggtacctggttgatgccattcagggtgcgtccgaatcattaaacttgccagtagcctttattagtgttattctgcttcctattgtggggaatgctgctgaacatgcgagcgccattatgtttgccatgaagaacaaattggacattacattgggagttgcaataggttcatcaacacagatctccatgtttgtgattccattctgcgtggtaattggctggatgatggggcgggaaatggacttgaattttcaattgtttgagacagcgactctctttataactgtactagtggtggcattcatgctacaggaaggcacatcaaactattttaaaggccttatgctcatcttgtgctacctcatagtcgctgcaagcttcttcgtccatgttgatcctgatgcaagtgagaactaggtgaaaaatctgcaatacagcatacctgtgaacagaatggaggggctacgacctaactgcagagttagcaaattgcgtagatgaggttctgcaagagtcctgaatttggatgtaacttgttggcagaatcccggaccgagggtttaactcgggctctcaagattaaggagctgatgcagctttttttaggatagcaacagcatcgcccgttgaggaactgtaactttatgcggcgatcacagaatttaccgttgcatttgttcacagtttttgatgttgctgtgatgttacggtgttaccgttggttggtacgatgatgttagaagggctccaacggttcccgaggctctctccccctcgccatgttccgtgtacatgtagaaagaaacttactatattttgcgacttgaaacacacaagatttttagacc

SEQ ID NO: 87347 - DNA, 2260 bp, Zea Mays
tcgtcttcgcgagcagtcgcggtggctgtggcggcgtcatcgtcatcactcatcagcgattccaaatacaaactcccacagcttccacagaaaaccctaacactagatccccaccatggatctcctccagtcctcttacgcgccggacgccgcctcgtccccggaggactcggcggccgcgtcctcgccggagtcctcgccgctccgccttccgtccaagtccgccgcccccgccgtcgacgacaccgcgctcgcgctctcctccgccgcgtccgccgcccgcccgctcgacccctcgctccacctcgtcgccttcaaccccaccgctgaccagctctgggcgcccatcctagggccccagcacccccacgccccaatctcctccgcctcaggcaatcgcaaccacaagctcggccacgtcgaggacgccgcggtcctgcccttcctattcgacgagcagtacaacaccttccaccgcttcggttacgctgccgacccctccggcctccacatcgtcggcgacgcccatccccaggcgcctgagcccgacaccgtctacaacctcgccccctccgagcacaagcgccgccgcctcctggccaaggcggacaaccaggaggagcccgcccctccggaggccaagaaccccgcctccgaggaatgggtcctccacaacaagcagagtccctgggctgggaagaaggaagcgcctcccgcggagctcaccgacgagcagaggcagtatgcggaggcgcacgctgccaagaaggccgagaaggaggctcgcgccgaaggaaagagcgagagggcagaggttgtggtcaagaccaccttccacggcaaggaggagaaggactaccagggacgctcctggatcacgccgcccaaggacgccaaggccaccaacgaccactgctacatcccaaagaggtgtgtccacgagtgggtcggccacaccaagggggtctcggccatcaggttttttccaaagtatggacatttgctgctgtctgcaagtatggattgcaagattaaaatctgggatgtgcttgggtcacggacatgtatgcggacttatatggggcactcaaaggccgtaagggatatatcattctctaatgatgggactaaattcttgagtgctgggtatgacaggaatatacagtactgggatactgagacagggcaggtgatctcgaccttctcaaccgggaaggtcccatatgttgtgaagctcaatcctgatgaggataagcagcatattctccttgccggaatgagtgataaaaagattgtgcaatgggatatgaagtcagggcagattacacaagagtatgatcagcatttaggggctgtgaacaccataacttttgtggataacaacaggagatttgtgacctcgagtgatgacaagtctcttcgtgtgtgggagtttggcatccctgtggtgattaagtatatcagtgagccgcacatgcactcaatgccatcaattgcactgcatcccaactcaaattggctggcagcacagagcttggacaatcagatactgatatacagcaccaaggagaggtttcagcttaataagaagaagagatttgccggacatattgtggcaggttatgcttgtcaagtgaacttctcacctgatgggaggtttgtgatgtctggtgatggtgagggtagctgctggttctgggactggaaaagctgcaggagatttaagactttgaggtgccacaacggagtttgcattggatgtgagtggcatccattggaaactagcaaggttgcaacctgtggatgggatggtgtaattaaatactgggattgaagtttggcagagagattgcttgagctcctgggggaggttttgtaacaatccaattcacaagggctgaatgtcatgagatactgtaagttaacacgcccgacgagagaatcccggttcaatggaggagaaaaaaagttgtacttttgaggttaagtatatgtatgttggagaaataagaaggggattttagcctcattttcccctaggacgcgtggtccccactcagcgctgtcgtcgtccccatgctcgctcgctgcacaagacggaccagtgactggacgacctccgacatgggcggcctgaattctggctcaggttgcgcaaccggaaaccgaccaatctgcaacaccgcacaaaatggctggagacgggaacagcaactaaacccgtcaacagcttacctggacgcagaggacttcgcgtggc

SEQ ID NO: 87348 - DNA, 229 bp, Zea Mays
agaaagttacatatatttatataatagaaaagagttatgctcttaccactatataatccatcagtttaaactttgcaaaaatcacacaaccaaatcaccccatactcattatccccactaaattcacctaacatattgtactcaaacttaacacactatcaaaatcaacggtccagatagttgaataactcatctcccttccccatgaactactttatatgaatcatcc

SEQ ID NO: 87349 - DNA, 1382 bp, Zea Mays
gtgacagccagcgtcgctcttcactttcccctccctcctcgttccaccggcaatccactcctcctccttccgcatcccaatcactccgcgcgcgtgtgtgtatatataccacagaacgccccaattccgctcccaaagaccaaagttcctccactagctaagctagtcgctactcccaatctcagagcgcgccgccggtctccaccgcggccaagaacagtggtactagccaagaaagctggggaacaggctgcttcctgggacgaggaacaggacgacaagggatctggagccggagcccccgatggcggtgacgggaacctcggtggcagccgcggcgacgatgctggcggcggcggcggcaatcttcatcaccttcgtcatctgcttctacctcttcctgtgcgcgaagcggtaccgcggggccgccccgaccatcggcggcgacagggcccggccccgcttcgtgttcgcgggcggcgcggggtgccacggcgggctggacgaggccgccatcgcggcgctgccgagggaggaggcggcggcggcgggcggggactgcgccgtgtgcatcggcgagctggccgcgggggaggccgcgcgggtgctgccccgctgcggccacgcgttccacgtggagtgcgtcgacatgtggctgcgctcccactccacctgcccgctgtgccgccgccgcgcggtcgccggcgacgacgccgcgccgcgggcgcccgaggcggacccggactcgcccaacttccccaccaacgtcctcttcttcggctcccaggacggcgccgtcagcacccggggcgccggcgccgcgccgtcgcagccggttgcagcagcagggcccatcgccggagtcgcggcggtcgtggaggcggccagtgttgccgccctacggcgactgcttggctgcggcggcgccacggccgcgcccccgccggcgcagcagcagcagcagcagcagccgcagaatgaagacggcgacttggagtctggtctcggcggcggcggcggcgagaccagcgggtcgcctccggcgaaaccgcagtgaaggatcctcaaatcatggttccgttcctccatacctctcgtcttgctctcctcctcgttgtcgttgaggcatttgatttgaggcagcacccaaggatgggagtaaaagaggcaagcaagtgtacagtgatctgtaatgaacgaatgaacgaactcttattactcgtagtagtagtacttgttttagtgatctataaacaagtttccctgccatttcgctgtcgactcgagtggcgcactgtgtttgcacatggcgctcgccctgccctgctgcagtgccgctactacggatggcaggggcagcgcgtgcaaaaaaaaaaaaaaaa

SEQ ID NO: 87350 - DNA, 1946 bp, Zea Mays
atgtcgtcatccgatggcggccagtcgcgcaagaggctcgtcgtcggcgtcctgtcggtgtgcctgctgatcgccatggtcatcgggacggtcgtgttcttcgtgagcgagaaggctggctacaactcggagctgagcaagcgcaacatgagcaagacgatgcgcagcgtggagctcttctgcgcgcccgcggactaccagggcacgtgccacgagacgctggaggcggcgctgtcgcggacggacccggatgagcacccgcacgccgccgcggccgccgcgatcaccgccgtggagcgcgcgctggcggaggggttcaaccggtcgtcggtgctggacgcggtgcggcagagcaacgacaccctggtgtgggaggccatccacgactgccggatgctcctggaggactgccgcggcaacgtggagcgcgcgctgtccagcatcgcgtggcgcggcgtcgacgggcccgcgcaggacctccaggcctggctcagcgcggtgatcacgttccaggggtcctgcgtcgacatgttccccaagggagaggtccgcgacgaggtgaataacaccatggagaaggcgcgagaggtatccagcaacgccctcgccatcatcaagcagggcgccgccctcgcctccatgctggaccttcacaccagcctcgacaagggcggccgtcagctggaggaaaaggagaaatccgcgtcatcatcgtcgtcgtccgtccccacgtgggtgcccagcgaggagcgaaagctgctcggcgccaagggcgagcggcgcagggccgcgctcacgcccaacgtgacggtggccaaggacggcagcggcgacttcaccaatatctcggccgcgctggacgccatgccggagaagtacagcggcaggtacttcatctacgtgaaggaaggcgtgtacgaggagacggtgaacatcaccggtaggatggccaacgtcaccatgtacggcgacgggtccaagaggtccatcgtgacgggcagcaagaacatcgtggacggcatcaggatgtggagaaccgccacttttgcggtggacggcgacagtttcatggcgatgaagctgggcatccggaacacggcgggggtggagaagcagcaagcgctggctctgcgggtgaagggcgacaaggccatcttcttcaactgccggatcgagggcaaccaggacacgctgttcgcgcaggcctaccgacagttctaccgcagctgcgtcatctccggcaccgtggatttcatcatgggcgacgcctcggccgtgttccagcgctgcctgctggtggtgcggaagccccggccgggacagccggccgtggtcaccgcgcaggcgcggcgtgaccaccagcagaccacgggcttcgtcatccaccggagccagatcgtcgccgacgagcagctcgccagcagcagcaacagcaacaagtccgggtccgcgccggtcaatacgtacctgggccggccgtggaaggagttcgcgaggacggtggtgatggagtccgtcattgacggattcgtgcaccgccaggggtacatgccctgggagggcaaggacaacctgggcacggccttcttcggagagttcaggaacggcggcgacggcgccaacgtcaccgggcggaaggagatgcaggggttccacgtgatgggcaaggacagggcgctgcagttcacggtggggcacttcttgcacggcgcggactggataccggagactggcacgccggtgagcttgggcttgtctggcgaggaagagtaatcgttatgcctagacccggtgtgtgtgcatgtgtgtgattataatgtgtatatgtatgtgcagctgatcaaaacgtacgtcctacgagccgtgtgttacaacatacagggtagaacgacaggatacaggtgtgttcgatccaagttaaattcgaaagaaattagaaggacaaa

SEQ ID NO: 87351 - DNA, 1947 bp, Zea Mays
atgtcgtcatccgatggcggccagtcgcgcaagaggctcgtcgtcggcgtcctgtcggtgtgcctgctgatcgccatggtcatcgggacggtcgtgttcttcgtgagcgagaaggctggctacaactcggagctgagcaagcgcaacatgagcaagacgatgcgcagcgtggagctcttctgcgcgcccgcggactaccagggcacgtgccacgagacgctggaggcggcgctgtcgcggacggacccggatgagcacccgcacgccgccgcggccgccgcgatcaccgccgtggagcgcgcgctggcggaggggttcaaccggtcgtcggtgctggacgcggtgcggcagagcaacgacaccctggtgtgggaggccatccacgactgccggatgctcctggaggactgccgcggcaacgtggagcgcgcgctgtccagcatcgcgtggcgcggcgtcgacgggcccgcgcaggacctccaggcctggctcagcgcggtgatcacgttccaggggtcctgcgtcgacatgttccccaagggagaggtccgcgacgaggtgaataacaccatggagaaggcgcgagaggtatccagcaacgccctcgccatcatcaagcagggcgccgccctcgcctccatgctggaccttcacaccagcctcgacaagggcggccgtcagctggaggaaaaggagaaatccgcgtcatcatcgtcgtcgtccgtccccacgtgggtgcccagcgaggagcgaaagctgctcggcgccaagggcgagcggcgcagggccgcgctcacgcccaacgtgacggtggccaaggacggcagcggcgacttcaccaatatctcggccgcgctggacgccatgccggagaagtacagcggcaggtacttcatctacgtgaaggaaggcgtgtacgaggagacggtgaacatcaccggtaggatggccaacgtcaccatgtacggcgacgggtccaagaggtccatcgtgacgggcagcaagaacatcgtggacggcatcaggatgtggagaaccgccacttttgcggtggacggcgacagtttcatggcgatgaagctgggcatccggaacacggcgggggtggagaagcagcaagcgctggctctgcgggtgaagggcgacaaggccatcttcttcaactgccggatcgagggcaaccaggacacgctgttcgcgcaggcctaccgacagttctaccgcagctgcgtcatctccggcaccgtggatttcatcatgggcgacgcctcggccgtgttccagcgctgcctgctggtggtgcggaagccccggccgggacagccggccgtggtcaccgcgcaggcgcggcgtgaccaccagcagaccacgggcttcgtcatccaccggagccagatcgtcgccgacgagcagctcgccagcagcagcaacagcaacaagtccgggtccgcgccggtcaatacgtacctgggccggccgtggaaggagttcgcgaggacggtggtgatggagtccgtcattgacggattcgtgcaccgccaggggtacatgccctgggagggcaaggacaacctgggcacggccttcttcggagagttcaggaacggcggcgacggcgccaacgtcaccgggcggaaggagatgcaggggttccacgtgatgggcaaggacagggcgctgcagttcacggtggggcacttcttgcacggcgcggactggataccggagactggcacgccgctgatcaaaacgtacgtcctacgagccgtgtgttacaacatacagggtagaacgacaggatacaggtgtgttcgatccaagttaaattcgaaagaaattagaaggacaaatggattgaagcgctatctatatgggaaccggtgcaaaccaacccctttagggcttgtttggaacaaagggtattggaggggattgagggggctataa

SEQ ID NO: 87352 - DNA, 83 bp, Zea Mays
gcaccggcgtgatgtatatgctgcgtctctataatatattattcagaatatatattttattaatgcactttgaagccatgcat

SEQ ID NO: 87353 - DNA, 121 bp, Zea Mays
gtttataaatttcaggtttcgcctattcacccccctctaggcgacttacaccctcctcggtgcactgatgtttcctacgtctttggatctactcccctaagcagctaaaccttattcacgg

SEQ ID NO: 87354 - DNA, 1135 bp, Zea Mays
tcccacttcctcgccctccaacctctcctgatctcctcctctggtccgcatagaggagcagcttgccagccaaggacaccggagcacgggcacgggcgcacggccagcgcgaacctcctcccctcccctcttcttccgtttccaacagcgaggcatagtggagaaggcgaggagcatggcgcgcaaactagagatcccccagtggaagcacgacggccttccgtcgccgacgagcccgctggaccgcgcgtcgccccgtgggtggcgccaccgcgacgccgtcggaggcgtcgggctcgggatcctggcggcgctggaggccgagggcccgctgcccggcgccggcgccgccgccgcgccgcgggtgtccatcccgcggcgcgcggcgcggctggaggtatcggagctcgcgtgcagcgggcggtgcgccaccagtctgtgcggcggcccggtgtccggccgggccggcggcggcggtggagcggcgttccgcgtggcggagttcctctcgtgctgcgacatgtgccgccgggcgctggacgggaaggacgtcttcatgtaccgcggggagcgcgccttctgcagcatggagtgccggtaccacgccatcgtgagcgacgagttccgggaggcggaggaggagaaggagcggaagcgccgcgcggcggccgccgacgtgcccaggaagtcggccgctgagatggtggccggctcgccgtgcagcggcggcgggcagatcttcttcaccaccggcatcgtcgtcgcatgatgggcgcgcggtgcggatccgtcgttccgtctagtctagtgacgaaacaaaaaaaaaatccagctggaggaaccggcggacgctgtaagataaacatgacaaaactaaaaaaaaaggaagcacgagaaataagggtgggtgtgtttgtgtagagaaatgggtgggtgggggaaactttgttcctcctctcctcctctttggtagaggaggcatcatgaggatggtgggcgggatgagatgttttgtagcatagtagcaggagggaaggagagggatgatggcaagttttccaaggattgttgcttcccttttgttttctcatctgtctgctctggcaaaaaggaataacattcttgttcaaatcca

SEQ ID NO: 87355 - DNA, 211 bp, Zea Mays
atgaacgcctggtgctgctcgtgcaaaatggccctgtcgaggtcgctatggcctgcgccggtggacgagcccttggtgttggccatgcggagccgggacgtcgtctgtgtatgacctgcaagagaagaagggaatggcggggtcaggtggtgtggtgtggtggtggccacgactatgttgccattgaagaataaaaggtttattctaggac

SEQ ID NO: 87356 - DNA, 1437 bp, Zea Mays
agcaaagtggtcggcgtacgtacgtgaacacacatcgatctcgatatatctgtctagttagctagctagtagacatatggtgggctcgcagtacgacgacgacgacgatgacaatgttgttgttggtcgccggcagacgaggtggtacgcggtgaccggcggccgggggttcatggcgaggcacctggtggcggccttgctccgctccggtgagtggcgtgtccgggtcactgacctcgcccctactctagccctcggccatggagagacagaggggattctgagcgacgctctccgtgatggccgtgccgtctatgcctctgttgatgtctgcaaccttgaccagcttaccaaagcctttgaaggggtagacgttgttttccacacagctgctgcggatcctagcaagaacaacctgcaacttcactacaagaggttaacgtggagggaacgaagaatgtaattgacgcttgcaagatatgcaaggtgaagaggctgatccacaccagtactagtgctgttgtgtttgacggcgttcatggactttttgacgcggatgagtcattgccatacccagataagtttcctgatgcatatgcacaaacaaaggcagaagcagagaagttagtcatcaaggccaatggcattaatggccttctaacttgttgcatacgtcctggtagtatgtttggcccaggtgacattatgatgccaactttggatcgttatggatggtcaaatgttactattggtgaagggaagaactatgatgattttgtgtatgttgaaaatgttgtccatggtcatctttgtgctgataagactctttctactattgagggtgcaagaaccagtggaggaaaagcatactttataactaatatggagccaatgaatatgtgggacttcttatatcttgttcaagaagaacttggatacaaaagaatattcaagataagggtacctataattgttatcaagccagcaagctatttgatagagttggcatatagggctgttttctctcattttggaacttgccagcctcaaatactaacaccggcgaggattagatatgtaacgctcaatagaacatttagttgcaataaagctgttgaagaacttggctacaaacctattgtgacactacaggatggtttgaagaaagcggtgaaatcgtatattcaactgagggataaagatttacctaaaatatagtgaagttgtgatgtaaaacaactctaccaaaatatcataagccaaagccagaggtgatcgatgatgtcccatcaataaaaatcgggtttgtgttttttattataataaaaaaagctatgtaaaggactacgaaatattgttgtaatgctctaatggtcaggcatgtatttatgttatctgggacgtagacgacattatatttgcttttatgttcctctc

SEQ ID NO: 87357 - DNA, 2324 bp, Zea Mays
cttttattcccattacaacgtgcgcacaaaaagtggcaccaaaactttgaacggtggccatgctggagcgcttccctgtggccaactggccaatggaggagaaatatgaaccaaccaatgacaagtcggacccactggattgacagcctctgacgccgaaaaagccacagatcggatcgcggcgggcagaggccacctccggattcgggcgctcggcgtagccgcgcagtggtgtgtctgcctccctccttgtatcctcctcgaattcgagcggcggcgacggcgggaagggagatggaggcggttagaggcgatgggaggtggtgcgtggtgactggcggccgcgggttcgccgcgaggcatctggtgacgatgctgctccgctccggcgagtggcgggtgcgcgtggccgacctgggccctgccatcacgctcgaccgcgacgaagaagagggtttcctgggtgctgctctccgcgaaggccaggccgtctacgtgtccgccgacctccgtgacaaggcccaggtcgccagagcttttgaaggggcagaagtagttttccatatggctgctccagattcatccatcaacaacttccaccttcattatggagtcaatgtcgatggaacaaagaatgttattgacacttgtatccgttgcaaggtgaagagactcatctatactagttcacctagtgtcgtgtttgatggagttcatggaatttttaatgcagatgaatcaatgccttacccagataagtttaatgattcatattcagaaacgaaagcggatgcagaaaagcttgtgatgagagctaatggtagggaagggcttcttacatgctgtatacgcccaagtagcatttttggccctggtgataagctaatggttccatctttggttgctgctgcaagggcagggaagtccaaatacattattggtgatgggaacaactactatgatttcacctacgtggaaaatgtggcatatggccatgtttgtgcggagaaaactctatcatctgaagatggtgcaaagatagccgctggaaaaacctatttcataacaaatatggagcctataaaattctgggagttcatgtcattgattttagaaggtcttggatatgaaaggccttcagtaaaaataccagtctctgttatgatgccggtggctcatgttgtagaatggacttaccagaaatttgccaagtatggaatgaaagttcctcagctgaccccttcaaggatcaggctgctttcatgtaacaggacattcagttgctcaagagcaaaggagcagcttggttatgaacctctcgtgtcccttaaggatggagtgaagagaacagtagagtcgtactcccatctacaagctcagaatcataggagtatatcaaaggcttcaattttcctcgggaatggaaatcttgcaaaaacagtactttgggaagatgcgaagcaaactgtgacagtgcttctactgttggctgttatctactaccacttatttacatgtggttacaccttcatcacagcgatggcaaagcttttgtcactaactgctctgttcttattcattcatggcatgctgccatcaaatctgttcggtcacaaggttgagaaactcgaggcctctaattttcacatcacccaggcacaggctcatcatattgctaattccattagttcgaattggaactctttagtcagtgcgctaagatctctttgtagaggaaatgattggctattgtttctcaaggtttcactatctctgctggttgtcagcatccttagttccatgtcttctcaggctgcatttaaaataggtactgctctggttttcacaggcttcaaagcgtatgagaaatgggaggacagcattgatagtatggtgggcgacgcctgtaccattcttctgcactttggttctgccaaggaatcatctagctagaaacaaacgtaggtgtagcttgcagactgccagttactttgtttactgatattatcttcagctccagctgtttctgggtttcgttgacctaaattttcttctgtattcatctgatggtgttgtagaattgcctagcggcacatatgcaagttttggactcttttcctcttgatagttgatgtacaatatgaaattgtacattttccccctttcccctcggagtggttctcttcccatcaacggtgacaataggctctagtaaagatcgaattggattatgattggactctatttctattcatttttgaactaaaatttatttagagtccaaagaaattgtgaagaaacatttggatcgcgatccattacca

SEQ ID NO: 87358 - DNA, 2472 bp, Zea Mays
cttttattcccattacaacgtgcgcacaaaaagtggcaccaaaactttgaacggtggccatgctggagcgcttccctgtggccaactggccaatggaggagaaatatgaaccaaccaatgacaagtcggacccactggattgacagcctctgacgccgaaaaagccacagatcggatcgcggcgggcagaggccacctccggattcgggcgctcggcgtagccgcgcagtggtgtgtctgcctccctccttgtatcctcctcgaattcgagcggcggcgacggcgggaagggagatggaggcggttagaggcgatgggaggtggtgcgtggtgactggcggccgcgggttcgccgcgaggcatctggtgacgatgctgctccgctccggcgagtggcgggtgcgcgtggccgacctgggccctgccatcacgctcgaccgcgacgaagaagagggtttcctgggtgctgctctccgcgaaggccaggccgtctacgtgtccgccgacctccgtgacaaggcccaggtcgccagagcttttgaaggggcagaagtagttttccatatggctgctccagattcatccatcaacaacttccaccttcattatggagtcaatgtcgatggaacaaagaatgttattgacacttgtatccgttgcaaggtgaagagactcatctatactagttcacctagtgtcgtgtttgatggagttcatggaatttttaatgcagatgaatcaatgccttacccagataagtttaatgattcatattcagaaacgaaagcggatgcagaaaagcttgtgatgagagctaatggtagggaagggcttcttacatgctgtatacgcccaagtagcatttttggccctggtgataagctaatggttccatctttggttgctgctgcaagggcagggaagtccaaatacattattggtgatgggaacaactactatgatttcacctacgtggaaaatgtggcatatggccatgtttgtgcggagaaaactctatcatctgaagatggtgcaaagatagccgctggaaaaacctatttcataacaaatatggagcctataaaattctgggagttcatgtcattgattttagaaggtcttggatatgaaaggccttcagtaaaaataccagtctctgttatgatgccggtggctcatgttgtagaatggacttaccagaaatttgccaagtatggaatgaaagttcctcagctgaccccttcaaggatcaggctgctttcatgtaacaggacattcagttgctcaagagcaaaggagcagcttggttatgaacctctcgtgtcccttaaggatggagtgaagagaacagtagagtcgtactcccatctacaagctcagaatcataggagtatatcaaaggcttcaattttcctcgggaatggaaatcttgcaaaaacagtactttgggaagatgcgaagcaaactgtgacagtgcttctactgttggctgttatctactaccacttatttacatgtggttacaccttcatcacagcgatggcaaagcttttgtcactaactgctctgttcttattcattcatggcatgctgccatcaaatctgttcggtcacaaggttgagaaactcgaggcctctaattttcacatcacccaggcacaggctcatcatattgctaattccattagttcgaattggaactctttagtcagtgcgctaagatctctttgtagaggaaatgattggctattgtttctcaaggcatgctaagccctgcttctgtctgatactttcattagattagaatttttgttacatgctttacaagtcaatttccaaatgccatgtgaagcattagtcattgttcgtatactttttatgttaaaacatcattgtccgtttttgctaggtttcactatctctgctggttgtcagcatccttagttccatgtcttctcaggctgcatttaaaataggtactgctctggttttcacaggcttcaaagcgtatgagaaatgggaggacagcattgatagtatggtgggcgacgcctgtaccattcttctgcactttggttctgccaaggaatcatctagctagaaacaaacgtaggtgtagcttgcagactgccagttactttgtttactgatattatcttcagctccagctgtttctgggtttcgttgacctaaattttcttctgtattcatctgatggtgttgtagaattgcctagcggcacatatgcaagttttggactcttttcctcttgatagttgatgtacaatatgaaattgtacattttccccctttcccctcggagtggttctcttcccatcaacggtgacaataggctctagtaaagatcgaattggattatgattggactctatttctattcatttttgaactaaaatttatttagagtccaaagaaattgtgaagaaacatttggatcgcgatccattacca

SEQ ID NO: 87359 - DNA, 1774 bp, Zea Mays
tgcctctcttcaatcggggcttcggcgtcagcgtctcagcgaccagaacaatcaccaccgtccgtccgtcccgttcctcttctcgcaggttggacccgtcagtcacacacctccgaagtcggaacctccctgccccaacacaatggcctcctccctcgccgcgcgccgcctcctctcccgcgcagccgccgtgcgccgtttccccgtccccttcgcctccgccccagcccccgcgatggctccccgcagtttctccgccgacgcgggaccgcctccgccgctcccgccaccgccgccgcagcccgtcgtcgagccgcccacgtcggagggcgcgggtgcctcgtcctcctccaccaccgctggtgccggaggggcccacaggtcgtcgccgggagccgcggcgggggcgcggcgccagggtggtgcgggctacgaggaggagcaggagaaggtcctccgcgcgtcgctgctccacgtgccgcgcatggggtggagcgagtcggccatggtcgcgggggcgagggacgttggcgtgtcccctgccatcgtgggcgcatttccaaggaaggaggccgcccttgtggagtttttcatggatgactgcctccaacaactgatggatcgaattgatgctggagaaggagagcagttgaagaacttgatactgagtgagagactctcaaaacttgttcggatgaggctggaaatgcaggcaccttatatatctaagtggcctcaagcactgagtattcagtctcaaccagcaaacgtctcaacaagcttgaagcagcgagctatcctggtggatgagatatggcatgctgctggagattctgggtcagatattgattggtatgtgaaacgtacagtgcttggtggtatctactcaacctcagaggtgtatatgttgacagacaattctccaggtttgcagttctcaatagctctatgttggtttccatttcttgctacatactgaagttaattttacccctgcaacaacttaacagcaaggattgaaacgaaagtgtttcactgtttcgggtaaactagctgaactgaaagcctcacttttttgcccgtttattttgttgtttttgttactgtacagcactacagctgaagcatggaacacaagcagtactaaactgaaatacagatatttttgcttgttcagtgttgaaaaagcacaagatataattaatgatatggtttcttgccttgtttgctgtcttctactaaattttagaaaacatgaattcgaagtattatgagatgctagactgtcaagatgtagtgctatttgtatgactgcataccagtgttcacatgttaatgtattgttcctacttatggcacatggcagagttccgtgatacttggacgtttgtgaaccgcagaataaaggatgctcttgatcttcagaaaaccttccaagaggccgcatacctcgctgaagccgtgggagcaggcatgagcggtaccgtgcagggtgttctcaacagggtcttccagaaccgtagtggatgaactttctttttctcaaacacgtagtgtggatggactaattccgtcttttgcacgctgcacaggataaagcacattttcccgttgaccaactggcgtatgtttataataaagcaaatggtgatgtggttgagatgcatcacgttagggtaggaagtgacgatgtgtatgctggtggtggtgttgaccgaattttttgtattttagccctttattaggtttaaaatcacgtttagacctaaaaaaa

SEQ ID NO: 87360 - DNA, 1334 bp, Zea Mays
tgcctctcttcaatcggggcttcggcgtcagcgtctcagcgaccagaacaatcaccaccgtccgtccgtcccgttcctcttctcgcaggttggacccgtcagtcacacacctccgaagtcggaacctccctgccccaacacaatggcctcctccctcgccgcgcgccgcctcctctcccgcgcagccgccgtgcgccgtttccccgtccccttcgcctccgccccagcccccgcgatggctccccgcagtttctccgccgacgcgggaccgcctccgccgctcccgccaccgccgccgcagcccgtcgtcgagccgcccacgtcggagggcgcgggtgcctcgtcctcctccaccaccgctggtgccggaggggcccacaggtcgtcgccgggagccgcggcgggggcgcggcgccagggtggtgcgggctacgaggaggagcaggagaaggtcctccgcgcgtcgctgctccacgtgccgcgcatggggtggagcgagtcggccatggtcgcgggggcgagggacgttggcgtgtcccctgccatcgtgggcgcatttccaaggaaggaggccgcccttgtggagtttttcatggatgactgcctccaacaactgatggatcgaattgatgctggagaaggagagcagttgaagaacttgatactgagtgagagactctcaaaacttgttcggatgaggctggaaatgcaggcaccttatatatctaagtggcctcaagcactgagtattcagtctcaaccagcaaacgtctcaacaagcttgaagcagcgagctatcctggtggatgagatatggcatgctgctggagattctgggtcagatattgattggtatgtgaaacgtacagtgcttggtggtatctactcaacctcagaggtgtatatgttgacagacaattctccagagttccgtgatacttggacgtttgtgaaccgcagaataaaggatgctcttgatcttcagaaaaccttccaagaggccgcatacctcgctgaagccgtgggagcaggcatgagcggtaccgtgcagggtgttctcaacagggtcttccagaaccgtagtggatgaactttctttttctcaaacacgtagtgtggatggactaattccgtcttttgcacgctgcacaggataaagcacattttcccgttgaccaactggcgtatgtttataataaagcaaatggtgatgtggttgagatgcatcacgttagggtaggaagtgacgatgtgtatgctggtggtggtgttgaccgaattttttgtattttagccctttattaggtttaaaatcacgtttagacctaaaaaaa

SEQ ID NO: 87361 - DNA, 949 bp, Zea Mays
cacacctccgaagtcggaacctccctgccccaacacaatggcctcctccctcgccgcgcgccgcctcctctcccgcgcagccgccgtgcatggggtggagcgagtcggccatggtcgcgggggcgagggacgttggcgtgtcccctgccatcgtgggcgcatttccaaggaaggaggccgcccttgtggagtttttcatggatgactgcctccaacaactgatggatcgaattgatgctggagaaggagagcagttgaagaacttgatactgagtgagagactctcaaaacttgttcggatgaggctggaaatgcaggcaccttatatatctaagtggcctcaagcactgagtattcagtctcaaccagcaaacgtctcaacaagcttgaagcagcgagctatcctggtggatgagatatggcatgctgctggagattctgggtcagatattgattggtatgtgaaacgtacagtgcttggtggtatctactcaacctcagaggtgtatatgttgacagacaattctccagagttccgtgatacttggacgtttgtgaaccgcagaataaaggatgctcttgatcttcagaaaaccttccaagaggccgcatacctcgctgaagccgtgggagcaggcatgagcggtaccgtgcagggtgttctcaacagggtcttccagaaccgtagtggatgaactttctttttctcaaacacgtagtgtggatggactaattccgtcttttgcacgctgcacaggataaagcacattttcccgttgaccaactggcgtatgtttataataaagcaaatggtgatgtggttgagatgcatcacgttagggtaggaagtgacgatgtgtatgctggtggtggtgttgaccgaattttttgtattttagccctttattaggtttaaaatcacgtttagacctaaaaaaattttaaactc

SEQ ID NO: 87362 - DNA, 480 bp, Zea Mays
cgaaagtgtttcactgtttcggagttccgtgatacttggacgtttgtgaaccgcagaataaaggatgctcttgatcttcagaaaaccttccaagaggccgcatacctcgctgaagccgtgggagcaggcatgagcggtaccgtgcagggtgttctcaacagggtcttccagaaccgtagtggatgaactttctttttctcaaacacgtagtgtggatggactaattccgtcttttgcacgctgcacaggataaagcacattttcccgttgaccaactggcgtatgtttataataaagcaaatggtgatgtggttgagatgcatcacgttagggtaggaagtgacgatgtgtatgctggtggtggtgttgaggtgcagatttttcaaatgaatgctttcgtcgcggagtccagtccacacgcatgcgtgcaaagacgtggggcttattataatttgatgccagctgcatgcattacttgcc

SEQ ID NO: 87363 - DNA, 477 bp, Zea Mays
ctgttaggaactgaaagtggatttgctttacctttttgcacttgtttgttctgcaagactgatattttgagttccaacttttatcgcacactattttaaaggacaccattcattatttttaccattagaataaaatccctataaaacgtggccatgcaatcactggttgtaaactgatggggcagaatgttgtaggatggattgggtcaagaactaataaagcttacttatgacaatgtagtaattcatgaagttattgttccttatgttcatggagtttgttctgcaagttttttccccatctatggttgagcagaggttcctggagaccatgaaggccatacagggggcactgatagtgtcctcaagcattcagatcattctgggctacagccagctgtggggtattttctccagttctctctacgcaccaaattcatgatcttggcagcgagtttaagcgtacctgatctgtgc

SEQ ID NO: 87364 - DNA, 2279 bp, Zea Mays
tcttgcaaccgaaggaaccaaaccaggcggccaagccgcggacccccgcatccccggtgcggcgcagcggttcctgcctcgtgcacgtctgtataacccgacggagcgggcgcccgaggacgacgagggaggaaggcagccagtcagccagaggaacctagagccagtcccgtcccgtccatcagccgccacaccacaaacacccaccactctgctctcgcccgcttgctttctctcccccgctccagcttatggcggaggcggcgccagcagccggcggcggcatcggggacatcctcgccacgagcgatcgggacttcctcgtccgcaactccggcgagcaggtgaagatcagcagcgttgaggcgagccctgtggccatctacttctccgcctcatggtgcccgccatgcaggaggttcacgcccaagcttattgaagtatacgaaaaactggcctcacagggcaagagcttcgaggtcgtctttgcttcggccgatcgcaatgaggaagctttcaatgaatactttgcaaagatgccatggttggctgtccccttttctgacagtgaaggccgtgaggcccttgatggccagttcaaggtctctggtatcccacacctggtcatccttgatgcaaaaactggtgaagtttacactgaagatggtgttgaattcgtgagtgagtatggcgtggaggcttaccctttcacaccagatcggatcaatgaactgaaggaacaggaaaaggcagaaaaggagaatcaaactattcaaagcgtgcttggcacatctactcgagactatctcatttcaaacaagggagacaaggtacccatctctgagcttgaggggaagtatgttggtctttgctttgtggtggatggctttccaccactcgctgaattcactgaggtgcttgctaagatctatgagaaactcaaagaagtgggagagaaatttgaagttgtagctgtatccttggacagtgaagagtcatcatttaatgagagttttgcaaagatgccttggcttgcaattcctcaaggtgacattaagtgtcagacgctggttcgttactttgagcttagttctcttccaacactagttctgattggccctgatgggaagacactgaacaacaatgtcgccgacataattgacgaccatggttttgaggcatgggagggcttccccttcagtgctgagaagctggaaattcttgctgagaaggcaaagattaaagctgcatcacagaccttggagtccattctaatcagtggtcatttagactttgtcattggaaaagatggtgcaaaggttcctgtatcagaacttgttgggaagactgtccttgtttacttctcagcaaaatggtgcccaccatgccgtgccttcctgcccacacttgtcaaggagtacaacaagatcaaagagaagaacagtgattttgagatcgtcttcatctctagtgacgaggatcagagctcattcgatgattttttctctgaaatgccatggcttgctgtaccctgggaagatgaaaggaaagcatcgctgaagaaaaccttcaagatccgtggaatcccttcacttgtcgccatcggacctactgggcagacagtcagcagggacgcaaagtcccagctgatgatccacggtgctgatgctttcccattcaccgaggagagacttgaggagctacagaagaagctggatgagatggcgaaggggtggcctcagaagctgaagcatgagctgcatgacgagcacgaacttgtcctgctgcgccgtggtacgtaccgctgtgatggttgtaacgagatgggcagcagctggtcctacaggtgcgacgagtgtgactttgacctgcaccccaagtgcgcgttgggtgaggaaaagatgggcgaggaagcccctgctgggtatgtgtgcgagggaggcgtgtgcaggaaggcctaatctgaatgctgtgaaggatgacaataatcgtgagatggctgtgttttgatgtaaggtttttcggccgttgatgtttgtgtgttaataaatagtagttgcaggagcaaatgtgtgtatgcaaaactatgtgagtattgtgtcagatcaaagtaatggttttgctgcatggtatttctggtcttaatcatatgatgttgttggcatttttttgccttatattcctgcaatcttgcatgctagacattgttttggttttcgatcgacatgttcggatttgggaaggatggtcaggaatgaagtgattagtttggtagttcg

SEQ ID NO: 87365 - DNA, 511 bp, Zea Mays
agtatagataggcttccagaatccagcccccatttttttagttcccaatgcagttacattacaacacaacaggtacaactactttagaaatgtgcactctacaaataacacacccaagcgtggaccatcgccacaagagcaaaaacatcagaaaaaaacaccaccacgccagagtaacccgatatgcttcctaccgtgttcttgcagggtgcaagagatatacattacaatgccagtgtgttctccatcagttatcttgcccttgagggtcgcccttccgtttcgtggtgcctcggggccgagacgatttgttgcctcttgacaagtgcctatcctctagcttttgcttgtcatccaataactcggatggaagctcggtggtggtttcaggccatggagtgcgctttgcggggacgacgatttccaaaggtggctcaattacccacctgcaaaagaacatatttggttgtggctaagaaagaaaacgaaagctaaatgggcaaaagaaata

SEQ ID NO: 87366 - DNA, 2069 bp, Zea Mays
cgcatcccccttgcggcgcagacgttactcgttcacgcctatataaaccgacgaggcgggcgcccagaaccagtcccgtccgtactccgtccacccaggcacccaccgctccgctctctcccgccgtcccgcgtgctttctctctcccgctccaacgcatggcaaaggcggcgcccgcagccggcggcggcattgctgacatcctcgtcacccgcgaccgggactttctcgtccgcaactccggcgagcaggtgaagatcagcagcattgaggcaagccctgtggccatctacttctcgaactcatggttcccgccatccaggtggttcacgcccaagcttatccaagtatacaaacaactggcctcagagggcaagagcttcgaggtcatctttgcttggggcgatcttaaagaaaaaacattcaatgaatactttgcaaagatgccatggttggctctccctttttctgacattgaacgtcgtgaggcccttgatatccggttcaaggtcactgataccccacacctggtcatccttgatgcaaaaactggtgaagtttacactaaagatggtgttagaatcgtgagtgagtatggcgtggatgcttaccctttcacaccagatcggatcaatgaactgaaagaactggaaaaggaagaaaaggagaatcaaactattcaaatcgtgcttggcacatctactcgagactatctcatttcaaacaagggagacaaagtacccatctctgagcttgaggggaagtatgttggtcttttctttgtgggggttggctatccaccattcattgagttcattgacttgcttgctaagatctatgagaaactcaaagaagtgggggagaaatttgaagttgtagctgtatccatctacagcgaagagtcatcatttaatgagagttttgcaaagatgccttggcttgcaattcctcatggtgacaacaagtgtttgaccctgactcgttactttgggtttatgagtcttccaacactagttctgattggccctgatgggaagacactgaacaacaatgttgcggaaataattatcgatcatggttttgacgtatgggagggtttccccttcagtgctgagaagctggattttcttgctgagaaggtaaaggttaaagctgcaacacagaccttggagtccctgttaatcagtggtcatctggactttgtcattggaaaagatggtgtaaaggttcctgtatcagaacttgttgggaagactgtccttctttacttctcatcaaaatggtgtggaccatcccgtggcttcctgcccacacttgtggaggcatacagcaagatcaaagagaagaacagtgattttgaggtcgtcttcatctcccatgacagggaccagaggtcgttcgatgaatatttctccgaaatgccatggctcgctgtgccctgggaagatgaaaggacagcacccctgaagacgaccttcaaggcccgcgggttccctatacttgtcgtcatcggtcctaatgggaagacagtcagctgggacgcaacggaactgctggtggtccacggcgctgatgctttcccattcaccgaggagagacttgaggagctacagaagaaggtggatgagatggcgaaggcgatgggatggcctaagaagctgaagcatgagctgcatggcgagcacgaacttgtcctgcaataccgtggtactgatacatacgcctgtgatcgttgtgtacagatgggcagcagctgggtctacacttgcgattgcgaggagtgtgactttgacctgcaccccaagtgcgctttgcgtaagaagggcgaggaggaggaaaccaagtcgtccactgctgggtgttatgtgtgcaagggaagtgatgtgtgcattaaggcctagagttattctaccttggagctgctgaggtttgtttgttaataaatagtagtcgcacgttgaacccttacgagcatatgtgtatgcaaggctatgtgagtattgtgtccgatcaaagtaatgtggttttgctgcatggtatttctggtcttaagcatgtaatgttggtgg

SEQ ID NO: 87367 - DNA, 1279 bp, Zea Mays
gaacacaagagtcccatcccatcccatcccatagaaactgtgatgtgatcctgctctccccttcgttacacgcaacgcatacgcatggcatatgctcccacagattcgcttctcccgggccttccctcctgttctgctgctgctcgaatgctccaactaacacccacctccctccctatattaagctgcccgtcgctaatgattcagcctcctcttattctcattcgattacacacacacacggagagatcaaattgatacactgcgatctcgatcaaacaaatcaaaaaaaaaaaaaatcttgcgagacattactgaccgatgaagttcggcaagcgcctcaagaagcagatcgaggagagcctgccggagtggcggagccagttcctcaactacaaggagctgaagcggcgcgtgaatgccgtgtcctcccgcgggtcggcggcggatccgtcgtcgtccagcgccgcggaggccgacttcctgacgctcctggacgccgagatcgacaagttcaacgccttcttcctggagcgggaggaggagttcgtgatccggcagagggagctccaggagcgcatcgggcgtgcgggcgggcccgaggccacgctggcgcgcgtccggcgcgaggtggtggacttgcacggcgagatggtgctgctgctcaactacagcagcgtcaactacacgggcctcgccaagatcctcaagaagttcgacaagcgcaccggcggcgtgctccgcctccccgtcatcgcgcgggtgctgcggcagcccttcttcaccaccgacctcatctccgagctggtcagggactgcgaggccgcgatggaggccgtcttcccgcccgccgccagcagggacctccacgggcgccaggcgctggccgtcgccgggcagggcatcttccgcaacaccgtcgccgcgctgctcaccatgcaggaggtgcgcagcgggagctccaccgtcggccatttctcgctgccgcccatgcagccgctgccggagtcggactggctcgtccagtccgttgacagcacgccgacggcgtcgcccctcatccccacgcagtgactgacgacaccatggtccacttccagttccatgatccatggcactacagtgctacagcacagcggggcgtattatatagtatgcaatatatatacgagaaggcacaataatctacatactgtagtggtgctctgtatgcggctgatgtgtacagtagtagtatttttttttctccttttgttgatgaggtgttcttttctgctcc

SEQ ID NO: 87368 - DNA, 1858 bp, Zea Mays
cggagatctccgctccagctccgattgagcccaagagaagtcgttggtgcagacagccttggattggatgtggaatgaggcgatggcatctgacggatcatcctcctctaccttccgggggttgtacggcaacgtccacggcccggcggtgctcactggcgcggcgttcgcgctcgtggcgctcctcatctcgctctggctcatcctgcagcacctcagatcctacagcgatccagctgaacagaagtggatcatagctgtgctgttcatggtgcctgtttatgcctgcgaatcgataatctcactgtggaactcgaagctctctctggcctgtgatatattacggaattgttacgaagcctttgctctgtacgccttcggacgatacttggtggcttgccttggcggggaacggcaagtgttccgtctgcttgagagcaggaagagggacgagctgagccaggagttgctagacaaggcacgagctcgtaaccgcggcggagcgtacagtttcttctgtgaccctgacgctctgggagagaacctgtacacgattataaagttcggccttgttcaatacatgattctcaagacactatgcgctctcttggcgttggtcttggagccttttggagcctatggagatggcgaattcaagtggaattacgggtatccttacattgccgctgtcataaacttcagccagacatgggccttgtattgccttgtgaagttttacaacgcgacgcatgaaaagctacaggcgataaggccactagccaagttcataagctttaaggccatcgtgtttgccacttggtggcagggagtcggcattgcgatcatctgccaaactggactcctgcccaaagagggcaaagtgcagaacgcgctacaggacttcctcatctgcatcgagatggctatcgcagcggtagcgcatgcctacgtcttcaccgtggagccgtaccagcacgtccctgctctacctcctgatcacggggaagtcatgtgtcaggaaagcaaaatggaggtggaggtggatgtcgacgacgatacaggcggtacaccagcttccattgcgcagcaggagacccatgtcgaagctccaggagggacgagcatcaaggagagcgtgcaggatgtcgtcctcggcggcggccagcatgttgtcaaggatgtcgcgcttacgatctcacaagcgatcgggcccgtggaaaagggcgtcgggaagatccaggagaaattccaccacatctcgctgaagccaggggacaagaaagagcctcaagttgctgtggaggagcacgtaactgagaacgtggtggatggcaaacctgctgttgcggtcaacgcggaggttgaagtccaacagaaggcgcaggatcgtcgtggcgaggaagaaggtgtgcaactcaaaagaacagagaaggaaggacgattgtcacacctgagagtgccatggtggaagatgcaaaggaagcgggagcaggtgcaggagcaagcggagtcgaaggctgaagctgtgcgagggccggacggtgaacaggggtgattgtgttggcctgcatctaaatgggctgtaagaccaactccagcagcctccgtatacggctctccatccccttttttcactgcgcagtacactattcatcagtccagcagactccgtatccctctccctaaaaagcacgctgtgtacttatactcctcttttccacgtcttctctcctctccgtacaagtctgagaaatggtgcaattaaaagccccgatagagtgtaaatacggagtctgttggaatgcaccatgcaaaaaaaccactttatctatgatcacgtctgcttattttacggata

SEQ ID NO: 87369 - DNA, 285 bp, Zea Mays
atggcggcgcaggcctgcgccatgacgatggcgcactggtcgttcatcttgctgcacgccttgatgaagcacatgcagcagcagcagtccgccatgcggctgcagcagccagcggccttctccaacatcacaaacttctcggctgctttcatgtctccgaatcctgttgtcaggttctctgttgttgccgctacgtcgccaaatccgaccgctaggccacctagcggcatcgctggcagctcatctgggctactgctttgtttcgttggtttattcttcgcctga

SEQ ID NO: 87370 - DNA, 546 bp, Zea Mays
aagggcaaggtaaggatgagtgcatatgctggacctggtgagccatgggcacgacgatgcggcagtggcacgcgcggctgcgcgtgatgcagtgcagccaccagcgcgcgcgcagggcgacctcggcggtggcgcagccggcggcgcagtcgacgcggagctcgacctcccgcatctggagcgggatgagcgcgggcgggtcgaggcggccgtagacgtggggctggtagctgggcacgtcggggctgtcgacggcggccgggtcgacgacgacggcgtacgccatgggcgccgccggcatgagctgctgcagcgccgcggcggggtcgtcgcggtccatcgccaggtgcgggcgcggcggcggcggcatcccgcccccgctgggcaggacgaggcgcttggtgagcttgaggccgtcctccaccgcgcgcgcgaaggcctcgtccatggctgcccggaagaggcgcggcggtggggatggcgggcgatgcgggtcagattcaggccagtgggaggaatcgcgagctggtttttggcgtggtttaa

SEQ ID NO: 87371 - DNA, 300 bp, Zea Mays
atggggcaggcgcaggagcagcagcgcgggcaggcgcaggtgcagtcgcacgagcagcgcgggcacggcgcgcagcacccgcagccggcggcggcgtacacgacgcggaaccggcagcagcaacagctgcagcaggaggaggcggtggaggagcagagcttccccagccgcggcgcgcaggagcagctcggcgccggtggcctcttgagctgcaacggcggcgggcaccaccacccgccaccgcagatccacgagagggctgggctgacaacgtgtgatgttgacggcatggcagtttaa

SEQ ID NO: 87372 - DNA, 1206 bp, Zea Mays
atgttctcagcaggaaaaaatgaagatggtgcctacaaaggaacagccgaatacacacctcccgttgtcctcgcggtgggtgacgacatcgcctatggtgcccctttctccctctttaatagtaatcacggtgtcatggcgaagatggaaggagcacaacgtgggggagaggatggaaggggaacacagagcgctgattggggacgtggatttgaggtagctcctatggaaggtgagatcggcgtggtggcgagaaaggaagctatcttggaggtaaccagtggcggaccgagtgcccaggcagtacaggccgtcgcctgggctgccagcctgccacgccacgagagtgcatgtaagaagtccaaaaaattccagtccatttctctaccagcccaggcccaggccgatacagcgatatactggactacggctactgctagaccggacagcgccaggcggccaggagaaaaagaatacgacctctccaaccctagcccgccgcccgccacgacgccatctgcaaatccctgctgcccagccccaggcaccgccagccaccgctccagcccccacgcagccacgctcggacgctcccacctggggcacctggccacctccatctcctatcaagggacagcacacggcagggagcagcagcacctgcagcaggttgccaggttggcccggttgcctggttccacttctcggctgctgcagagtgcagacctcccccatctccttgtgaaaatgagaagattcttggttgatagaagtttactgtctgaaccacaaggtcaaggtgcagcacaaccaaacccaccacaagctcaatctagaggtggcggcgagatcaatttggatgagattgtaagcgatcctgcacttagaaaacctatacatgagtatgctccagagattcgtgaccaaattaaaagggcatacatattgaagggaccaacacaacctattgttaatttccctaagaagaaatttggtgattctagtagggcttttcaacaagcatggtacaagaaatttgattggttagaatatagtgtgtccaaggatgcaacattttgtttctattgttttctcttcaaggaaccaggaagggcagaatttcatggatttgatgtattcaataaactaggatttaataattggaagatggcatataaatcattgcctgagcatgttgattgttga

SEQ ID NO: 87373 - DNA, 1079 bp, Zea Mays
gggcatgttccactcccagaactcctcgctctggcccggagcccgtctcctgacggccctcttcgggttcggggacctggccggcgctttatcgggccggcgcgccttgtctctgcgatcgccgccgtcgcttctcctcgtcctgtccttcctctccggctccacgcacgccgtcggctcgctggcgggcacgtcgtcgtcggcagtggccgtgagcagcggctccaggtcctggacgacccgggacatgtccggccggttcttggggctgccgctgaggcactggtacgccaccagcgccgcccggtgcgcggcggcggcggggtacctgccctccagggccgggtccatgacccgggccagcttctgcgggtccttgagccacgaccgcatgtgctccaccaggtgctgctcccggctgggccggtccctgtccaccgcccgccgccccgacagcatctccagcagcaccacgccgaagctgtacacgtcgctcttggccgtgaggtgccccgtgaggatgtactccggggccgcgtacccctgggtgcccatcacgcgggtcgacacgtgggtgtcgtccccctccggcccgtccttcgccagcccgaagtccgacagcttcgcctcgtagtcctgcaaaaaaaaattcatcaaaatgtcagtcatctgtgtatgtttagtctcagttgggctgaatttattacggcccatctttaggcccatgtcccgatccgttggtccagtacactccactggataactcaaagtttttttttcttcttctaatataaagaataacaaactgtgacacctcgagacgatttgacttttgaatcgaatgaagaaatcaaagtacaagagcggattctagccaaccacctccacatttgaaacagcaccgaatcggccgaaattcaagaaagggctctctcttttattttgtctacgatcgagactttccatgggtttccccttttcatttactacttttttttgcaggaacaaagaggagtagtatgaaaaggaagcatcgaacgatgaattgtgcggtgggaaggaaagaaagaaaaataaaa

SEQ ID NO: 87374 - DNA, 174 bp, Zea Mays
atggctctcacggtggcttcagcgcctttccacctcgactaccccatgccccgggggatctctacaacagtcatgcagctagactccctagaactagtttatgataatactgatactaattatgctacacggtgtagatatttatgcaatgagggtgacaagaatgtgcattga

SEQ ID NO: 87375 - DNA, 923 bp, Zea Mays
tagctcaccacatcatgatccgacttgattttttttttgcaagaacgacgacagcctttgattgaagtcttctatcgaacatctggcgagcgatgcgcatagaccttctcttcatcacccaaccctggggttcctctctccaacaacgccaaggatttcagtccacatcaaacacacaaacacatatagttaatatcaagatgcaggtaccaaatggggatcgaacaaggcatgaacaacaagcctcaccgatgaggaacacaatatgtggactgcgcacaagactggcggggtcgcggataagaaacgacgacaattccttggttctcccatttcgtcgaacacctagagcacgccgaatgggatggacgacgtcgctgccggggctgcgcaggcacgtcgtgctgcacgacggccaccaaggcgttacacgagggaggaaacacaaccagtgcatgtgtgctggacggcatccatggcaaggacaaagcagggactcgccatagggccagcaacgagcacaactagaggatggggctggtgcagcagccatgtgagagtgatggggagggcggctggaaaaacaaactggagcagggagagcgtcatacagagggcagggcacagagggagggcgagctcgccataggagcagctggaggcggccatgggaaacatcaagagggtggtgccctagcttctggcgtgggggctgatgcccaggagccgagcgtggctaacagaggaggcagtttagtgctgcagcatctgcgtggggagggagcaaggaagggtgccggcgtgtttaggagatggatatgagaagcctccagatcgtagacatgtgctggagtagggcgtgtccgtgtgtgataagaacaaaaggagagagaacgtgtacatgtgacgtgctggatagggag

SEQ ID NO: 87376 - DNA, 1282 bp, Zea Mays
gtccgacgcctgagagattcgaactctcgcggggaaaccccatgtacttagcaggcacacgccttaaccactcggccaaagcgtcagttgctgcagtacagaatatttgacaatataaggtagttaaacataatctctccgtgtgctgaagcaggttgcctgagcccctgacacggtgacaccacactcccgaaacgccgaaaccccaccccgcaccactcatggacgccgccggcgcgcgtccatcggcaccgtcggccgctgctgccgcagtcgccggggcctccgtcgcggacgagccccgggacgcgcgggtggtgcgggagctcctgcgctcgatgggtctcggtgagggcgagtacgaaccccgcgtcgtgcaccagttcctggacctggcctaccgatacgtcggagacgtgctaggggacgcccaagtctacgccgaccacgccgggaaggctcagatcgacgccgacgacgtccgcctcgccatccaggccaaggtcaatttctccttctcccagccgccgccgcgtgaggttctccttgagctggcccgcagccgaaacagaatgccgctgcccaaatcaattgctcctcctggctcaattcccctcccgcctgagcaggacacactgttggcccagaactaccaactcctgcctccgttgaagccgccacctcaatatgaggaaaacgaggatgagaatgaagaatccaacccaagtctgacaccgaacccggcaaattctaatccaaccttctcgcaggatcagcggagtaacgagcaacagcacactccccagcatggccagagggtttcatttcaactcaatgctgtggcagctgctgctgcaaagcgacctcggatgaccgtcgaccagctgaacatcggctaaccagttatcgttggttagactgtagtatcattttcccccatcttttagtgtggtgaatcatgtttcgaagagatttagtgttgtagtggtatgatcttatttaccacccacctatttaaccacgagatgtgcagtacagcagcagcatcataaagtttctgactgcaagaacgttgctgtagggaaggaaagtaactgtgctagtagtgtacttgcttacttaaaggttaatatctgccaaaattgtatctgggtctacatattcttagcttcatgtcaagagggcaaatattgcattgtcagtattgcaactcatgagttatgatggcaccaaattgcgtttttttatccaggaccagaactgaaagaataaaaataaaaac

SEQ ID NO: 87377 - DNA, 940 bp, Zea Mays
ttaaggttgttgcagcacaggtcaagtcacatttttttccaatttgtcaatatctccaattgaggaaaatccacctccaatgtctacagcacccaataaatccaggtcacaaaccttgctttactattaaatatcgatggagacagaatgtcagccattcggatctgaaatcaccgaaaacaagtcacgaaaccaacatacgtggaatgaacatgctctagactctgacctgcccccagttccaaaatcatttatttgctacatggatttccaattgtcaacatcctgcaacacatgcaaaagcgagagcgcaaaaacatagataagccagatgaagcacctaaaagcatagataagccagacgaaccatccacagatagaaatcccaaaccaaacattatgacagttgaactaccaattacttgagctaaatgatctgcagaacacagaaataccagtcgcacaagaattaaagcttcggtcagagcatagcaagataaagcagaaacacgcttgattaaatgaaagttgtagagctagttgttttattcataacttacacaatattcatccaaaaatagtaaactaagactttttggaaagcttataaagtcctctaaaattttggtattatcatcaccatgagattcgacatttagaaatgtcaaacaatactaaacgcaatttctgtccagatttggatagaattcgactacttacttcattaattcataactggagttttagaaatccaaatcaggtgatcctagactttttagaaagctaatagaattgtctacagttcatttataatcatctcaaggtgattcaatgtgtatcgaagtcagttaatacaaacaagcattgctgtccagattttgacagcttcaaacatcacatttcaaacagccataacctgacttatagaccaccaaaattg

SEQ ID NO: 87378 - DNA, 2088 bp, Zea Mays
atggagggcaaggcgcgagcacattgtacggaagcaagcagcacgtggcacgagcacaggcgtggggatcacaccgtattctcgcctaggctgtcatcagttcctggaagagaacaagttgttgagactcttaagagtcttataggatttttctcggacctccttttatatcttaaggaggaacaacggttatatggaaggtcgtcgtcctcaacgccctctctctatctttcacatttggcgctcgagcgtcttggtcttccagcgggcgcggcggttctggaaccagacgacgacctgacgcggctgcagggcgaggtcgcacgcgatgaggtcgccgcgcgcccgccggccactgccagggccagcttgtcctcgtcctcgtccatctcggcctcgtcgtcgggctccatcttccgcgccggcagggcctcttccaccgcgaacgtcagcttctcccctgcaataggcgttgtccctgctccagtaagagtaggcgaggacgagcctcccccatcctgggtgttggtgcctgacccattttctcaagttttccttatgtctcttgatgctacttttagttttgctatggacatgagcaatagagatcacattaggaggagggaggaggatgatgatgacctcttccttttgattctcccttccctacatctcttgggctatcttggacgtagtaaaaagaaattgaggcatacatcagcgctgaccggggaggaaaaggttcgagagctacttgaaggccatatcaagaactgcagggtatcatttagaatggaacctttcattttcaaatccttggccaactatcttagaatggaaggattggttaaagatacaaaaatcaaagttgaggaaaaacttgggttcttcttattcatgattagccacaatgcgacatttgaagatctccaagtcttttttggtcatagcaatgatacatttcaccgtgtcatcaaacatttcttcgacattgttatccctggccttagcatgcggttcctaaagcctccttccaatcttgttcatccaaaaattcatggagacaaccgattttatccatacttcaagatgttcagaggttctcctaagatagtagctttatctaaagctgctcaaaagaaggcttctcctaaagctgcaacaacaaagaaatgtggcggtggtgttgagagagctgcatggaatgttgaattggagaagagtcttgttgacttgttgtttgaacacaacatgcctccatatagggctcaaaatgggtggagtccagatgcttggaataaaatagtttctgaattccacaagaagcatgaatatgttacattcaacaagatccaaattcaggaaaaggagagggaattgaaaagggaatacaagatattgaaggaggcaagaaaacaaagtggagtttcttggaatgaaaaaagatgcatgatcattgctgaaccaacgatatgggacaacattatcactacatttcctagagctaagaagttccgcaagaagtcttttcctctctttgatgccttgggtgaattatatgatggtcacatcgcacaagggacttggaacattacctctactcaaccagtacaaaattctaatgatggagagcaactaaaaaccatagaagtggaagatgaagatactaatgaaccagaagaagatgcaagaatagaacaagatgaagatataataattgttgaaagggttgaacagaggttacctaaaaggtcaggtgcaccaactgtcaatcaagagaaggagacaaaaagagtgaggaaagatgcactagaagggctgatagggaggtaccttgatgtgaaaacgaagcaagttgcagatgaggctgcacaatcagcaaaagtaaaggatgttgctcaagataatgatttttctatcaagaggtgtatttctgttcttaagactatggatatgacaagagatgagaaggtcaaagcagctgaggtgttcaacataccaaattacagggaaacatttatttgtttcaatgatgatgagccagaagtcgctctcctttggctaagagggaagatggataaactctaa

SEQ ID NO: 87379 - DNA, 694 bp, Zea Mays
aacgaacctacctgcaggctgtggcctccctcaatgtctccatcgagctagggttttgaggcggcggcggcggcttgtcccatttaaagctggactgctccatcagactcgcctcctcggccgctatctgtttgttgtgttagggtttcgtctcgtgtataaggcgttcggagctcgcaaatcctttcctctctcgcgttcgaggctaggtagccgtcaccatgagccgctcggggcagcctccggatctcaagaagtacatggacaagaagcttcagattaagatgaatgcaaaccgtgttgttatcggcacacttcgtgggttcgaccagttcatgaatctggtggtggacaacactgtggaggtcaatggaaatgacaaaacagatattggaatggtggttatcaggggaaacagtgttgtaatgatcgaggcactggagccagttgcgaggtcacagtgaatcattgttctttagcactagcagcgtgaaaactgatgtaaaagatatcagtggaccctgttgtatttgactaatgcttttgcacagcaacataacttcggaggtggaatgtctatccctttttctatgggatgcttgtagctatacaatcatcgagctcttaaattacatgatctaacgcatgctcatcgagctcttaaattacatgatctaacgcatgctcctggttc

SEQ ID NO: 87380 - DNA, 1235 bp, Zea Mays
cagtctccgcgaatctcgcctcccccgcccccgcaaatctcgctgttgccgttctgacgagggttttgctgctccgtacaccgcgtgctgttcgccgccccggatcgaggatggggatgagccagcggaggcccctgtggtggctgcgggggcgggagcgccatgaggggcggtggtcgtggcgatggcgggaggtagccttcctacgcggcgccggatgggacggatgcggcggcgatcccggtcgcctccaggaagatggtgcagagcttcaaggggatcctggccgaccgctcggagggcgagatctacgccacgctctgcgactgcggaatggaccccgacatagccgtcgacaggctcatctcccagggtgtcatgacaagaagtccccaccaggacattattattccaaggatctcaatgttcaaatagcttctttttacgatgaagattccgtttttgtaacaagttgttatatacatttgcatctgtggacaattgaaagttttaatccatatctggtattgttttccctagcaaatgctttagccccctttacttgtttgggcattcatgggctattagatgggtttgaggtggtggagccctccaaaaagggaagatatttgacaaagaagcgcttgaagcttcaaaggaagcgtataaagaatgagaggaaagaggcaaataaaaatgatcagcaaagtattatgcgtaagggaaagaagataaaacaaaaattcctcaaagccaaagctaggctcaaatataaaattgagaagttgattcatttgaccatagtgatcaatgtgtcctcattttcataccttctgtcttctggtgtgttaaatactatacaatcaattgtaaattttgttgttgtgttgttggacaaatccggggaaccaaatgggaaaaatatacacatgggatgctccaaagcaatcattccctttctgcgaaagcgtcttggatactcagctcataagctgctcagtgctgatttccctagcgaagatgccagaaaaggatggcagagtaaagtgataagcctggaaaaggatttcgaggtcgaattcgaggagtttggggtgaaggccgacgactcggagctcgactctgcagatgaggcaatgaccttcgccgcccccggtgaacgtattttggggcttggagatattggatgccagattttatatgctttatgtagctttctaagcttagaaagctaa

SEQ ID NO: 87381 - DNA, 2605 bp, Zea Mays
cgtcatcctagggccaaggaaacgccaccgctccagtcatatccccgccgcccgcgccgccgaaggccgaaccctcgtcgcctcccctgcccacgcccgccgcctccagcaggaccacaccgccggattcgacttttttgtcctcgccctctccccctcctctcgtctcctttgatggcgtcgaggggaggctcctccggctttatcgagtattttcataacagcacaaagcgtcatggcagcaatagagagaacacaagtcagcaaggcatgaatgctatcagggtgcaaaaagaaatgaaaaaagaatgggcaagacctggaagagttttcaatagaaatattactagaggaggctactctcgaagttcattgcctggagtcacacaggaatttcgtgttgtcaaagataacagaattaaactgaaagaagttagtgagactttgccagaagcatctcagaacggcgattctagcaatgaatgtgctttttcaaatgttagagataaatgctcaaccaaaaagcttgctgcccaacaccacttggttacttgcaatgttaatgggcatggagcggcccatgctgacaatggtatcaaaattgcggctcaagcccatgacaaggaagtcaagccttctattgtccgaaaaatggaacaatatgaagggacacaagcatcattggttggatctcatgcagttcttggaaagggcaaccagaacacggtggacactgcagcatcagggaaaaataattttggtggcgaactttgctgttcttcatcagatccaatccatgtgccctctcctggttctaaatcagctggaacttttggagccataaagcgtgaagttggagtagttggtgctaggcaaaggccagctgatagtgcagcaatatacacatctacttctaatggcttagtcaaagtggtatcagcaccaaaggttagcccacatttggaatggaagcccaaatcagtaagccccagcactgctgcacctcctggtgctccatcacctgttgatgatggaagtaaaacagaagtgtctgctttgtctaagaagctttcacatgctaatgtatcacatgaacatgtcattataccggagcacatcaggataccagattctgaaagaactcatttcatcttcggttcttttgaatctgaaatttatccaaaggcttctttagcagcctattatgatgctgtggctaaagaagacttgaatgatcactctccatcaaggatggataatgttggttcctgcagtccacttccacagtcagagcctgctgtttcagtttctgaacatgagcagtcattgacggagtgtgtggatgttcggagccctggtgttgtcggtggaacaaatgagacgatttcaagcaaggtaacacattctcaacctcgactccagcatcaggaagctgcacagaattttaaggcatatgagccagattctggttatgggatgtcatttattactaaagttgatggtgaagcagcccaaggtatagcttattcatctgaggctatggttttacattctgtaaatggctatcagttacctgcatctacagcaactcaacaaccagtgccccagatgttttctcaacaattccaagcacctcagtatccaaactttttgccatatcggcatgttttctcaccacagtttgggtctctaatggttgttccaaactattcaagcaaccatgcatttcctcagttgccacatgccagcagctatctggtaatgccaaatggagcctcacaactagctgccaatggcatgaaatatggatcaaaccatcagtataagcaagtatttcaaggagcccctgctggatatggctacggaaatcataatggttaccctaacggtgttattggcggcacaggtgctattgaggatatgaatatgagtaaatataaggacaactgcctctatgcacccaatccacaggtggaaacagcagatgtatggattcaaagtcagaaagagagtcccaatatgccatctgcaccgttctacaatatggtgggacaaccagtgtctccacatgcagcatacttaccaccacaaagtggccacactgccttcagtcccgccccttcccatcctggtcacttgcagtacccgggctttgtgcatgcactgcagccaacatccatgaccatggtgcagaacccgcagaccatgatacatcagccggctgcaccgccattggcaggaaatctaggcctggacatgtcggccatggttcctggaaatcaagtaggagcgtttcaacataaccagcttgcccatcttggctggaccacacaatccttttgagattttggtgtgcttctatggctggataagtgaaatttcggttccgtgtggatagaacctaattgaagtgatatgctgtaatatgcaggataggcctgatgaataccaggtttttctttgttttaattataaaaggggaaccgttttttcgtgccgttgtgatttgcaagaacgtgtttaatgttcacttccagtttttgttccaaaattttgttgtaagtgctagtttggaaactcaaattctctttcgggattagaatga

SEQ ID NO: 87382 - DNA, 210 bp, Zea Mays
gaagggttccggagacctgctctcctgatcgcagatgcacctctgcggtcgggacgaagggaactaaaaggcggctcagctatgaagagaggcgaaagcgaactgggatctgggatgatttggaggctggctgccgggctccttttatagggccgagtccgcgaccccagtgcttatccgcccacgaaaatctcgcaatcagttgagatt

SEQ ID NO: 87383 - DNA, 804 bp, Zea Mays
caaatggaattgtgagtatctatggtttatagttctacagcattttcaatgtttatacttgttagcatggttaagttacataacaaacatgatccatatattttgcctaagttattaacattcagttactgaaacattttgtccctacctttcattcgtgaatttgctgtgtggaatccttatttattatcatgcaggtccatccccaaattagtggtgcagcaaacactagggtaccattgccagttgggcctgcagcagaggaacccatatttgtcaatgcaaagcaatacaatgctatcctccggaggaggcaaaaacgcgcaaaactggaggcccaaaataaactggtgaaaggtcggaagccagcatattcctgtcatgcaaattaagttggatacaccatatctccatgaatctcggcatcgtcatgcaatgaagcgagtccgtggaccagggggcgtttcctcaacaaaaaggagctccaggagcagcagctgaaggcactgccttcacttcagactccaacaggtggggtcagcaaaatggcctttggcaggaacctatgccctgaaagcagcacatctcactcgccttcgacgagctctacaatctcgagtgcttcaaactggagtggcacgctagctcatcaagagcacgttagcttcgcatctgctaataaattcctccccagcatgaacttccacgcggagaatggaggtgaaaagatggccatcaatggcgtccgccaccacacccctgtcctgaggtgaacaacctcaactgtgggggtgctgtgctggt

SEQ ID NO: 87384 - DNA, 928 bp, Zea Mays
caaatggaattgtgagtatctatggtttatagttctacagcattttcaatgtttatacttgttagcatggttaagttacataacaaacatgatccatatattttgcctaagttattaacattcagttactgaaacattttgtccctacctttcattcgtgaatttgctgtgtggaatccttatttattatcatgcaggtccatccccaaattagtggtgcagcaaacactagggtaccattgccagttgggcctgcagcagaggaacccatatttgtcaatgcaaagcaatacaatgctatcctccggaggaggcaaaaacgcgcaaaactggaggcccaaaataaactggtgaaaggtcggaagccatatctccatgaatctcggcatcgtcatgcaatgaagcgagtccgtggaccagggggcgtttcctcaacaaaaaggagctccaggagcagcagctgaaggcactgccttcacttcagactccaacaggtggggtcagcaaaatggcctttggcaggaacctatgccctgaaagcagcacatctcactcgccttcgacgagctctacaatctcgagtgcttcaaactggagtggcacgctagctcatcaagagcacgttagcttcgcatctgctaataaattcctccccagcatgaacttccacgcggagaatggaggtgaaaagatggccatcaatggcgtccgccaccacacccctgtcctgaggtgaacaacctcaactgtgggggtgctgtgctggtaccatcactggcgcgctccggtgtgcccgtggcaattcatccttggcttatgatgtatcttatagtaatttgctttcactttcatatggaacttgtctcagattaaactcggtgatatttattgcaactggatgactgaaataatctcatgtttcttacaa

SEQ ID NO: 87385 - DNA, 342 bp, Zea Mays
tttttttgtttttgtgactgatttgtttattcgtccagattttttttatccagcgagcacatcgactgtgtgccacagtggccacaagccgtcaacttcccccttatttgctcagctaaccacaataaaaaatcaaatgagaacactcttacttcaatcatgaccaaataaaaatattatattttcattgagttcttttgaacataaattctaaatacataataacatatttccagtaaaaagaagcacacatattcatctttttttcctctgcactaaataaaagtatactccattatatacttgtctcatggatgatatattttacaatttactgcataa

SEQ ID NO: 87386 - DNA, 252 bp, Zea Mays
ctttcctattctcttcttctcccctcaccggcaagcgccaagcactggcaggtctgtggtcatcgatgtcggcgccgcgccgccgacagacagatatcccgccaccatgaacgagcctcccccggaatgcaacgattttggtggaccaccgaggttgaacactggatctgcgtcagcattggctcttgtgcgattcactcgtactcatgttagcataatatcatttgtttcttctctggctgatttgtttgg

SEQ ID NO: 87387 - DNA, 857 bp, Zea Mays
agttccttctcatcatctcttgctttgttttgttcttccgaccttgcctcgccgcatctgctcctccagacacagcgcacccgccttcctcatcctgattccgtggccggcggccgcctaacctcagccccctcacccccaccgacgccgccggagcccttgaagtagcggacccgggctctcgcgcccatccgcgtcaggagttcgatgtccgtttgcgcctgatggatccgcaccggctgaccggccccgccgcgtccgacgccgacgatgccgatgactgggataatgatgactttgtgatcccaagttttagtgttgaagaatctgatatcggtgactgggaagcttcacgggctaccgatcctcaaccacctccaaagcccagcaaagatacagagaacatatatcttggaccacacggagcaccgccatctcgagcgaagaaggcagaggatacttgggctacggctgggtaccgtgagaagaacaacaaagcgagggaagctgagcagaaggcctttggaactgggcggaacagcaaagggggcaacacaggagaattccatcgccacaatggtggcagccatggcaaggacccctacaagagatctgcttaaccttgtgtcggtcgaggctcgtccacattgatacacctatatcgtgcctacacctcaactaaaggagagtgtggtgatctatccgtgtactggaaattacttcacttgtggccagcgctatacattcattatcttgagctgcaggtgttcctggtcagctggtatgtacacacactatcattatactgctgcagaacttcattgtatttgcttgggatggaaaaacctgccgattca

SEQ ID NO: 87388 - DNA, 2282 bp, Zea Mays
agttccttctcatcatctcttgctttgttttgttcttccgaccttgcctcgccgcatctgctcctccagacacagcgcacccgccttcctcatcctgattccgtggccggcggccgcctaacctcagccccctcacccccaccgacgccgccggagcccttgaagtagcggacccgggctctcgcgcccatccgcgtcaggagttcgatgtccgtttgcgcctgatggatccgcaccggctgaccggccccgccgcgtccgacgccgacgatgccgatgactgggataatgatgactttgtgatcccaagttttagtgttgaagaatctgatatcggtgactgggaagcttcacgggctaccgatcctcaaccacctccaaagcccagcaaagatacagagaacatatatcttggaccacacggagcaccgccatctcgagcgaagaaggcagaggatacttgggctacggctgggtaccgtgagaagaacaacaaagcgagggaagctgagcagaaggcctttggaactgggcggaacagcaaagggggcaacacaggagaattccatcgccacaatggtggcagccatggcaaggacccctacaagagatctgcttaaccttgtgtcggtcgaggctcgtccacattgatacacctatatcgtgcctacacctcaactaaaggagagtgtggtgatctatccgtgtactggaaattacttcacttgtggccagcgctatacattcattatcttgagctgcaggtgttcctggtcagctgatttgtgtgggggttgtcgatgcaatgatttgctggtccaagcagggacagctgagctgcgtcatcattgtgcagccgtccccgttggttgatgatgataaagttgcgcgggatatattttgttatttttgcatccgccgcggcgcgtctggacagtggaatctggatctgcaggggttatcagatgtcgacggtggtcatgggggtggatcttgagtgccacaagtgctacaagaagatcaggaaggtcctctgcaaggtccaagacaaggtgagcatcaggaccatctcctacgacgagaagaacaacacggtgacggtgtccgggcccttcgacgccgaggaggtcgccgacaggctcaccgccgacgccggcaaggtcatcaccgacatacacgtcgtcgggggcttcggcttcggcttgggcgggggcggaggcggaggcggagggaaacaacagaagcacggcgccgtcgctcccggcaaggcgcccaagccagggaaggccagcggcaacgggcacggccagggcgggcacggaggcggaggccatggcggcggcggcggaggcaacgggcacggccatggccaggccggcgggcacggaggcggaggccatggcgggcacggcggcggaggcaagccgggtaagaataagcacgtcaagttcgacgacatggacatggacgacgacttcgacgacctggacatggacgagccggccggccgccacgcgcacgcgcacgcgcacgggcacgggcacggcgacggcaagccgaagatcgtcaggacgacaaacacccccatcgcggcgcggctggaggcgccccgcacgggcccggcgatgtcgatggccgcggcggcgcccgtgaggatgccgatgccggcgatggcgccaatgccgcagcagcagggcatggggggcgcgccgtccatctggccgcccgcccccgagtggggctacagcgcgcagccatacggcagctacagcggcccgcctactggcgggtactacggcggcgggggcggccccgccgggcactggccctatggtggcggctacggccggaacccgtacggccagcagtactacgaggacgaagagcccagcgctgcgtgcagcgtcatgtgatgtcaccggctcgtctccgctacgcgacatctcgtgtcacgcgctctccgtgtccacgaccacgaccactgctgtaaaattattcctagtgctcgtgtatgtatgtatattaagctgtatttttattttcgccagccctattttcactgtttttttatggcgtttggtttgcttcatgtgttgtcagagtatcttgtttgtttgtgttgtgtgtgtgtgttttggagtggataaagttcgtcatagattgacggtacggtagtaggacctaggacgaacgaagctccatctccagactccagtgtgtatatgtatgctacactcttttatgttcttcttaaactgtgttaatgcacggacaactgcact

SEQ ID NO: 87389 - DNA, 1573 bp, Zea Mays
cgagagcgtcacggcgccagcctgcctgtgccaatcatcatctgctgctgctggtggtggtgtggtggcgtcgtctcaacaaaagcgagccgagcagagtgctgaggcacaaacaagtacaacaccatcccctctctaccttcttatctcttctcctcgtgcaccagcaacaaaggtggcaggcacagagagagctagctttggccaggcgtccacagcagccagcacaagaaccagagtagtttgcgttcttcagatgtcgacggtggtcatgggggtggatcttgagtgccacaagtgctacaagaagatcaggaaggtcctctgcaaggtccaagacaaggtgagcatcaggaccatctcctacgacgagaagaacaacacggtgacggtgtccgggcccttcgacgccgaggaggtcgccgacaggctcaccgccgacgccggcaaggtcatcaccgacatacacgtcgtcgggggcttcggcttcggcttgggcgggggcggaggcggaggcggagggaaacaacagaagcacggcgccgtcgctcccggcaaggcgcccaagccagggaaggccagcggcaacgggcacggccagggcgggcacggaggcggaggccatggcggcggcggcggaggcaacgggcacggccatggccaggccggcgggcacggaggcggaggccatggcgggcacggcggcggaggcaagccgggtaagaataagcacgtcaagttcgacgacatggacatggacgacgacttcgacgacctggacatggacgagccggccggccgccacgcgcacgcgcacgcgcacgggcacgggcacggcgacggcaagccgaagatcgtcaggacgacaaacacccccatcgcggcgcggctggaggcgccccgcacgggcccggcgatgtcgatggccgcggcggcgcccgtgaggatgccgatgccggcgatggcgccaatgccgcagcagcagggcatggggggcgcgccgtccatctggccgcccgcccccgagtggggctacagcgcgcagccatacggcagctacagcggcccgcctactggcgggtactacggcggcgggggcggccccgccgggcactggccctatggtggcggctacggccggaacccgtacggccagcagtactacgaggacgaagagcccagcgctgcgtgcagcgtcatgtgatgtcaccggctcgtctccgctacgcgacatctcgtgtcacgcgctctccgtgtccacgaccacgaccactgctgtaaaattattcctagtgctcgtgtatgtatgtatattaagctgtatttttattttcgccagccctattttcactgtttttttatggcgtttggtttgcttcatgtgttgtcagagtatcttgtttgtttgtgttgtgtgtgtgtgttttggagtggataaagttcgtcatagattgacggtacggtagtaggacctaggacgaacgaagctccatctccagactccagtgtgtatatgtatgctacactcttttatgttcttcttaaactgtgttaatgcacggacaactgcact

SEQ ID NO: 87390 - DNA, 1954 bp, Zea Mays
ctcctctctctctctctcatgcagtcatggcctcatggcaactcatctcctgccatgcatatctgcacgtatagctttgcccgggatcttttgagcaagcgactcagctagacggccacctttgctttgtttttttgcttttttttcgcatttctccataacccgtgttgcataaattgaacagaggggagaattttgtgacacctccgttctcaccatctcttcagcttgttattagttctgcttcaaacctctgccgcctaagctacgaatttgttcccaagatactagtaaagtaacttgatgctgcctcccccgctactcgattaccacgcgtgaagtagacaacaagcaacgcggttgattccttctccttttttctttctgcgaaacggaccaaccggcgcaccactgtacaatacaccattccattcaggttcagggatatctagttagcttgcgaagcactctgcctacctcgaccagttagctagcatgttaccactataatctctagctactgctctcctctgcttcccattgggggggagaacattcttcaatctcgagcttcttttttatgtacatctgactgtgtgtatggaactgaagaaccagagtagtttgcgttcttcagatgtcgacggtggtcatgggggtggatcttgagtgccacaagtgctacaagaagatcaggaaggtcctctgcaaggtccaagacaaggtgagcatcaggaccatctcctacgacgagaagaacaacacggtgacggtgtccgggcccttcgacgccgaggaggtcgccgacaggctcaccgccgacgccggcaaggtcatcaccgacatacacgtcgtcgggggcttcggcttcggcttgggcgggggcggaggcggaggcggagggaaacaacagaagcacggcgccgtcgctcccggcaaggcgcccaagccagggaaggccagcggcaacgggcacggccagggcgggcacggaggcggaggccatggcggcggcggcggaggcaacgggcacggccatggccaggccggcgggcacggaggcggaggccatggcgggcacggcggcggaggcaagccgggtaagaataagcacgtcaagttcgacgacatggacatggacgacgacttcgacgacctggacatggacgagccggccggccgccacgcgcacgcgcacgcgcacgggcacgggcacggcgacggcaagccgaagatcgtcaggacgacaaacacccccatcgcggcgcggctggaggcgccccgcacgggcccggcgatgtcgatggccgcggcggcgcccgtgaggatgccgatgccggcgatggcgccaatgccgcagcagcagggcatggggggcgcgccgtccatctggccgcccgcccccgagtggggctacagcgcgcagccatacggcagctacagcggcccgcctactggcgggtactacggcggcgggggcggccccgccgggcactggccctatggtggcggctacggccggaacccgtacggccagcagtactacgaggacgaagagcccagcgctgcgtgcagcgtcatgtgatgtcaccggctcgtctccgctacgcgacatctcgtgtcacgcgctctccgtgtccacgaccacgaccactgctgtaaaattattcctagtgctcgtgtatgtatgtatattaagctgtatttttattttcgccagccctattttcactgtttttttatggcgtttggtttgcttcatgtgttgtcagagtatcttgtttgtttgtgttgtgtgtgtgtgttttggagtggataaagttcgtcatagattgacggtacggtagtaggacctaggacgaacgaagctccatctccagactccagtgtgtatatgtatgctacactcttttatgttcttcttaaactgtgttaatgcacggacaactgcact

SEQ ID NO: 87391 - DNA, 1967 bp, Zea Mays
tgttcacaaagcaatcgccaagaacatcgatgtccattcgaccattcctgacaacccatatcccaatcaatctaccacctctccggccgttccacactgatcggatggcggccttgaccttccacccggccgcctgcttcttcccacgaccacgagaggcagcagcgacaacgaagcagccgctccaccattactgctcgcctctccggaccctcgtccctagaactacaagaccgtgccttctcagggccaggtcctccaacgggctcccgcagaccggcggcgcctcgttcggcagcagcaacgaggtgctggatgggacgccgacgggagatggggcaccggggcaggggcagcggggagggagcaccgtcagcatcacggtcgtcggcgcctccggcgacctcgccaagaagaagatcttcccggctctcttcgccttgttctacgagggctggctcccggagcattttacagtgttcggctatgcccgtagcgagatgaacgaccaagagctcaggaacatgattagcatgaccctgacgtgccgaatcgacaaaagtgagaactgcggcgacaagatggaacagttcctgaagaggtgcttctaccagtctgggcagtacaactcggaggaggggtttgcggagttagacagaaagctcaaagaaaaagaggcaggcaggctaccgaacaggctattttacctgtcgatcccgccaaacatattcgtggatgtggttagatccgctagccgcaccgcgtcgtcttcaagcgggtggacaagatttatagtggagaagccattcggccgtgactcggagtcctccggcgagctcactcggtccttgaagaagtacttggtcgaggagcaaatattcaggatcgaccattacctgggcaaggaactggttgagaatctctccgtcctccgcttctccaacctcgtcttcgagccgctgtggtcgaggaactacatccggaacgtgcagctcatattctctgaagatttcggcaccgagggtcgaggcggctacttcgacaactacggcatcatccgggacatcatgcagaaccacctgctgcagatcctggccctgttcgccatggagaccccggtgagcctggacgccgaggacatccgcaacgagaaggtgaaggtgctgaggtccatgaggcagctgaagctcgaggacgtggtggtgggccagtacaagggccactccaagggcggcaagtcgtacccgggctacgccgacgaccccaccgtgcccaagggcagcgtcacgcccaccttcgccgccgccgcgctcttcatcgacaacgcgcgctgggacggtgtgccgttcctgatgaaggcaggcaaggcgctgcacacacgacgcgcggagatccgggtgcagttccggcgcgtgccgggaaacctgtaccggcggaacatcggcgcggacctggacaaggcgaccaacgagctggtgctccgggtgcagcccgacgaggccatctacctcaaggtcaacaacaaggtgcccgggctgggcatgcgcctcgaccgcagcaacctcaacctgctctactccgagcgctaccgccgcgagatccccgacgcgtacgagcgccttctgctggacgccatggagggcgagcgccgcctcttcatccggagcgacgagctcgacgccgcctgggccatcttcacgcccgcgctcagggagctggaggacaggaaagtggcgccggagctctacccgtacggcagcaggggccccgtcggcgcgcactacctcgccgccaactacaacgtcaggtggggagacatcaccagcgatgacgacggcgccttctagctctagacagagacatgcatccatcgattcgtgacgctacgccttattgtggaagggacacgcagttgtatccaatccaatcaaatttaacaaaaatggcaagggggcttggcacagaat

SEQ ID NO: 87392 - DNA, 1589 bp, Zea Mays
attatttattttggagatgggcatgcctggtgcaatggtgagagttgtctcactgagtcaccgggtcgcgagttcgaagcagcctctctgcatttgcgaggaaggcttctctcggtttattccttctcctccggcactaagtctgccctgccctaattatttattttggactacacagaaaaagaaacgagagggtgaagaggaagcagaggatagagtaaaacattctgactgtgatttgctggacaacaaatattcatgtgctgatagtaagaatggaaaattcccaaatgaacagaccaactttgagccttctgggaggataaattactctgtatcagagaatttagatggagcatcactcagtgaagcgccaattcctacagatgagcaagcaataataaccacaccacctacaaagtttgttacagctgctgaggatgatagtactgacgtgaaggctttacaaaggaaaatgtcttctattgccaagaaaaaaacgacttctaaggaagattgcaaagtcaaattgtgtggtaatcgggagtctaaaggagacacaaagcctcgaaaacaagtaatcaaaccaagtaaagatgagctgagggaagctgtctttcttatcttggatactgcggactttgccactatgacctttggcgatgttgtaaaagaagtcgacaaatactttggcaaggatctgtttgagagaaagccactaataaggtcgcttatagaagaggagctctttaggctagcagacgaggcagagaagaaggaactggaagagtcggaagcagcagaggcgaaggctagagccgagcaagctgccaaggagatggcacaagttcaaacagttgaattggttatcaacgagcaaaatgtacttgaagatggtcgagatagcaacaccaaagacagtctaaagaacgcaaatgacagtgctaacaagaaatgtatcgatggtggggcttctgtggagtatggtttcaatgaaaacagctgttacgctgctgaaggttcagaagagcacaaagttgatgatgataataaaaacataactaaggatggcaatggtggaaaggtcgcagttgcacccactgcaaacactgattgtaccttacaactacagggttcaagcaacgtcgaagctgagacgactatgaagagcaatgttggaaccctagaagcgtcaaaagatggagaagtgagagatgccagaaatggagaaaacaatggcactgaagatggtgggaatgaaggaatcaggagtgggaatgttggtagcaatgcagaagctgaagagtctcacggtcatggaaataatgaacgcgcagaacataccgaagatgacaaggctcaggaatgtagccacaatgagaacagtgcaagtgtaggaatccttggcgatggagacggtgaagctagagaaggcgatataaatgcggaagcggaacaaagtcaagcagacggtggcggcaatagtaaagcggaagatgctgagcacaatgaaaacaccaaaactgacgccaattcaagcaagaatggtactactgctgctgtggagtttgaatatgaggatgtggatg

SEQ ID NO: 87393 - DNA, 1257 bp, Zea Mays
tgttttttggttgttgatcctaggaccacgctgtgcagtgcagttcagtccagcaacgtttttacaaagatactagccagaaacctaggatgactatcttcgttgtctgtctctgagtgagtcttgatcttgacacaggcagcagggccagagaagtcgagaactgttgtgaggaactagcaggtgagagatcaggccggcagctgcaggcgcaagcacatgaggctcgacgccgcgctcagtccgctgtgatcgcagtcgctgcgcgaagacttgggccgctgcctctgcctgacgagcggctccagcccgagcgtgagctccagcgcgagctcctcgtcttcgtcgtcctgatgctcctggttagcctgctgctggctgcaggctggcggcgcgtggctctgcggctcggtctcgggctcgggctctggctcggcttggctcacgtgggagtgggcatgggaagccgcctccacgtcggtgtcctcctccgacccctgcaggcggtggtgctggtcgtggtcgtggtcgtggctgccggcggactcctcgccgtgctcaacgaccatgggcaccggctcttgttctgccctttgcctgttcttgccgagcgacgcgcgcttactgctcccgggctggttgtgcttggaggaggtggaagacgacgcggcgcgcttgcggctgctgctgcggaggaggacgtcgggcgcggcggcggggtccctggcgacgtggcggatgtcgtggcgacgtggtccgagcggcggcgaggcgtcggacgcggcgtcgacctgcacctgcacgatggggtcgcccttgagcacggcctcgacggcggcctggcacgcctgccactggcccgaccagagcaggccgacggagccgtagaccgggttgacgatgcggccgcacgcctcgtagagcagggagcggaaggcggcggggcggaggtggtcggcgggcggcgcggccagcaggttgagcagccccgcccggccgtagaacttggcgaggaagacggtggcgttggcctgcgcctcgggggacttgatccactgcaggcaggggcggatggtgcaggcgtcgctgcagcccttgcgcaggacgcggcagccgttgcagctcatccgcatctccgatcgtcggactggtgatgagatgagctctcggttggatggaatggaacttgggaggcgaggacgtggtgggtggtcgagtcgaggtggttggttgaaagaacggtgctgatggagcggc

SEQ ID NO: 87394 - DNA, 886 bp, Zea Mays
cttcgagcaagaaacgccactgccctccatctctcgtgtccctggccaggagcactgtccccctcaccaccccgcctaactttcctagcctcatcccgacgcctggagatccatcctcaaacgccgctgctagggcaccgtcccgcgctaggaccccccgcgcctcacaatcatgtcaccggcaactctgacgacctagggctcacaagcaagtaccgcttctcatgtccgccttctgcttcccctcgcgctcgccgccggcatgaatccctgcttcgggccttctagaggctagcgccacgatggccgacccgggcgcctccgtcaacatcgctgcgcgccaccacctcgcgtcgcagctcgcgaggcagccgctagtgacgcacacgggctggtggggaggggcgcgttcgtaccaccatgggaggggcgtggggcgtggcatcaagggtgagggaggggcgtcgaggaggcggacggcaacaagcccacacatccaacaccctaccaggtctttgatgctgctgcttcaccaaacaatgaaatgctcttgatgcatgattcaggagctaggaggatatctattgtcgtcgagttacatgaagttgactttcctctgctgctgttgtgctcagtgtggatgacattgtgctgcctcaggtacatcatctattccacttttctgaagcttattctagcaaaaaaaaccattcacatgcgtccatggctggtttgatgtttttgtacaataaattttcagaaaatgtactaacatggtttgatgtttttggatatcagttatactttattttcccgagtgggactaccttaaaaaaaatcaaccacatgcttccatggctggtagtagcttcattttgctcacgta

SEQ ID NO: 87395 - DNA, 518 bp, Zea Mays
atggcgagtgtaaaacttcgcaccaacacactcgacaagcttgatggcgacccctacgtcaacatccgcatgggcaagatgctttgtgtgcataaatcgtctacagttaccatctggacttttttagccatgtttgagagatgtgacggagtttggatttcacataaaaaatgcaatgtcaacctcaacaccttgatgaacatgttcagtgtgcttggtgatggtggtggccttggtggtcgaaatgcttctaatggctctggaccgccatgcttgcgtctgccgcgggacgtccacgccgccatcgcccgtgagcagctccgacagcctcatcgtcgcgttgcacctgcacttgtgtcgcaggctcgggttaccgtcggtgctcacgccgaggaaggcatgatccatgcggagcagcccaaggcgcgatgccacctccgctgtcacgcatgatgagctgcttcgcctctggcaccgccttgttccttcgcgatctcacattggtactgatcgcttcg

SEQ ID NO: 87396 - DNA, 600 bp, Zea Mays
atggctccagggaagaggtccacatggacctcacggaaacccgaagaacctgtgccaactgattacgagaaaataagggctatgaatatgatgaagaacaatcaattgtttcaacggctaggccttggacaactgaaatcactagtgactgctacagctacaaacaacaaagaagactgtcctcagcaatcagagagtttatatgatggtgaaaacactgacaattctaatgaagaggaatcccaatgtcgtaacgatggtcgtgccaacatatccaatgatggtgatcagatctcaacaaaagtaacaagaggaaataaaagaattgtggcacctgtgcaggagcgaacaattagagtcactaggcaaagaattgctgaaataaaccaagaaaatagccacaacctgtctgttcataaacaactcagttcatgtcctgctacaaaccatgattcgatcgaaactcttgttgttcctacacaacctagtgcaaataccaccatagacaataacccaacacataacatagataatgctatagagcctaattctctgatacaggaggagagtgataaccacaatgcagttgaaggtaactaa

SEQ ID NO: 87397 - DNA, 1661 bp, Zea Mays
cttcctccttccccaagtcggcgcggtagcttcccgtgtaccgtacacagcaggatcctccgccttccttgtgttccgcgcttccacaacagtttaccgcaaggaaggaaccatggacatgaactccaacgccaacaacagcactgccgcagcagcatcggctcccatcaacaaccagcaggaggctgtggtgtcatccccaaccagaaaggagcaagccaggaaccccaagaaggcgcgggcggcgccgcagcaggcgggcggcagcggggagcctaggccgcggcctccgccggacgcggcgcacagctgcccgcgctgctcctccaccaacacaaagttctgctactacaacaactacaacctgacgcagccgcgctacttctgcaagacgtgccgccgctactggacacacggcggcaccctccgcaacgtccccgtcggcggcggctgccgcaggaacaagcgcgcctccagctcctcgtccccgtttccgggcccctccagcaccgccgccaccagcgccgcgatggagaagaccgtcagcacgcggctgatgctgatggcgaccagcaccatggcgatgccctccccgacggcaggcctgtttgttcccgatgacatgtccccggcattcacgccgacgacgggcggtagcggcttcgacgacctcgccggcatggacgagcagcaccagcagggcttcctgcccttctcgccgctgtccctgtccgaccaggcgccggagctggctcctggaggagggggtgacacgacgccgtctttcctggacatgctgacaggagggtatctcgatggcggcggctacggcggcatgagcggtggcagcgatgcgatggacatgccgttctcgctgcctgagatggggcccccgacaactgatccaatgccgtttcagctccagtggacgtcatcagagcttgacaactacatcaacgacgacggtggttatgcagcaggaccagccgccggagtgcagcagcagcagcagcagcagcagcagcagattaatggtggtgatcaccagaagcaggacgagaacaaagaggcggggaacggcaaaggcaacgacgacggcggcggcgggtcgtcgtcggtgtacagcttctggatgaacaccagcggcagcgacggggcagaggggtagtgcgccactgccagtgccagccacaggaggaggcgaaagtgctgctgcaaactccctcgcatcatctggtcggtgcaagtgcagcagacatccttcgtcgacgcaatcaaatcatcaaaaggtggcaacagggagtgaaagggggaagaagttcaccatccagcgtagaggatagggtgcatgttcatgtttgatttatctgcattgtggtcggtcgtggttgcaagtcatcttgcaccaccctttgttttggttcagtttgcatgcgttcgttcgtcagagttttacttgcagcagtctttggatcgccggcagagattagttaggtatctatgctttgttttcgtcagttcgttctggataatgtcttaataattcctcagtttatttctttgttaactagtcgtcgtctaaaccttttcgtgtgtagtatttagtttggacgcgtcgttcaagcgggctgtgttagcctgcgttatatctgcttgatgac

SEQ ID NO: 87398 - DNA, 1027 bp, Zea Mays
gtggaaagacgccctgcctctggacgtcggacaaccatcgctccgattgtctcgtctattcctcatctcgtggatggtggcggcgtcctatctctgttgctgttgatgatttcttgaacgcacgacgaacgcgagctatgtcgaaccctaccaaatcacagattccctcggtcggtccccaaccatagcggctgtcaaatccccagatcaaatgcttattcggtgggtgcagagataaaactgtcgcatgcttcctccctcgcaggccgggtccaaggaaacctgctagctgccatgtcaaaggaaggtgcaagggcgtcctggaactcaacatatgagaagggtttagtcgatgtactacatgacaacaaagataacccaaagttgaagggtcaaaatggatggaattcagagggatggaagtgtatcactgctaagtttaatgaaaggttctctttggctcatttcacaaaacaacaattacaagagaaggacaaagaacttaaatcaagttataaagcagtaagagattcaagaaaagaaagttggactggttggaatgactccctatgtatgatattagctgaaccagaggtttgggcaaggttgattagtgctcacccaaaggttgcaaggtttcgcaagaagccatttcctcttttctactctttagaagcactttatgaagagtgctaagtggaagcaacacttgaagctgacatggagaagaaaaatggaacaacaatccacatgaagcttgtaaaaaagaagttaaactaataatttattctagtgtcaaagttcataatgactggacttgtactctgttattatgctataataatttgttgaatattagatgatcatgtcatgtgctgttttttttacatttttagtgatgtttcattgtgtttttgtttttctaaatatttcctatttttctttgatttttatgattttttgaagaattttgtctccagagaggtttttagccccttgtttgccaaacagtgagtgacaggaaaat

SEQ ID NO: 87399 - DNA, 896 bp, Zea Mays
gtggaaagacgccctgcctctggacgtcggacaaccatcgctccgattgtctcgtctattcctcatctcgtggatggtggcggcgtcctatctctgttgctgttgatgatttcttgaacgcacgacgaacgcgagctatgtcgaaccctaccaaatcacagccatgtcaaaggaaggtgcaagggcgtcctggaactcaacatatgagaagggtttagtcgatgtactacatgacaacaaagataacccaaagttgaagggtcaaaatggatggaattcagagggatggaagtgtatcactgctaagtttaatgaaaggttctctttggctcatttcacaaaacaacaattacaagagaaggacaaagaacttaaatcaagttataaagcagtaagagattcaagaaaagaaagttggactggttggaatgactccctatgtatgatattagctgaaccagaggtttgggcaaggttgattagtgctcacccaaaggttgcaaggtttcgcaagaagccatttcctcttttctactctttagaagcactttatgaagagtgctaagtggaagcaacacttgaagctgacatggagaagaaaaatggaacaacaatccacatgaagcttgtaaaaaagaagttaaactaataatttattctagtgtcaaagttcataatgactggacttgtactctgttattatgctataataatttgttgaatattagatgatcatgtcatgtgctgttttttttacatttttagtgatgtttcattgtgtttttgtttttctaaatatttcctatttttctttgatttttatgattttttgaagaattttgtctccagagaggtttttagccccttgtttgccaaacagtgagtgacaggaaaat

SEQ ID NO: 87400 - DNA, 2025 bp, Zea Mays
ggcgcgtgtgcgctccatttcacttcaccgttcgagtgggcaaaaagcagaatcctgcctttccaactccaagggggagttgccattcctgtcatccggtgtggcctttgggagagggagagagaaggaaggggaggcttcttccgttccggcagcggctccctccgctttcggttctttgcaagatcgagcgagcgcaatcatcgatcgctgccatcatcaccaggcaagcatggcagcattagcggatggagaggcggattattcttcttgggacagtgacgacgagtaccagaaattcatccaaaacatgaaccctccaagggtcaccatcgacaacacatcatgtccaaatgctacagtcatccatgtggacagcgcgaacaagtatgggatactgttggaggtagtgcaggtcctcaccgacctcaagctcatagtcaagaaggcatacatatcctcagacgggggatggttcatggacgtcttcactgtgacgaaccaaagtgggcacaagataacggacgaatctgtgctgcaaggaataaaagactacatttacaagtctatcgggcctgactcctgcttccttccctcgcggaggagagccgtcggggtggagccgtcctccgaccacaccctgatagagctaacggggaccgacaggccgggcctcctctcggaggtgagcgcggtgctcacgagcctggagtgcaacgtggtgagcgcggagctgtggacgcacaacgggagagccgccgccgtgatgcaggtcaccgacagggagtccgggctggcggtctcggacgcggagagggtcggcaggatcaaggggcggctctacaacgtgttcagagggaggagccgggacgccaagaccgcggtcgcgacgacgggcgccacccacccggagcggaggctgcaccagatgatgttcgaggaccgggactacgagaggcgcggcaaggacgatggcagggcggcggcgagcggcagcaaccccggtccggtggtttcggtcgtgaactggcttcagaaatactactccgtggtgacggtccggtgcagggaccggcccaagctcctgttcgacacggtgtgcaccctgacggacatgcagtacgtggtgttccatggcagcgtggataccgagggccccgaagcttaccaggactactacatcaggcacatcgatgggtgtcccgtcaattcggaggccgagaggaagaggatcatccagtgccttgaagcagccatagaacggagagtgtccgagggcctgaagctagagctgtcgacaggcgacagggtgggtctgctgtcggacgtgacgcgcatcttccgcgagaacggcctgacggtgacgagagcggaggtctcgaccaggggcgacgaggcggtcaacaccttctacgtccgcgacgcggccgggagcgccgtcgagctgaggacgctggaggccatccgccaggagattggccagaccgttctccaggtgaaggggcaccccgagcagccgaagccgccggtagccgcgcaggactcgcccaccaggttcctcttcagcagcctgttgttcagaccgaggtcgctgtgcaacctcgggccctgatgatgagttccagctccagttccagctagcgcagcgcgtgcatgagaattgagaactgtctgttgtcgggagatgctgctgtaccccaagggcccaagggcaagagttgtacaacgcgatcaggagtgttcattcgtcagaagctcagaacaggtgaccagaagtcgtttaaagcgaagcccacacccaacagctggtgaatactgaatacaccctatagcatcgtccaccgttgagtagtgaaaggtgtagttctgtaaggctatctccagtcctgtcgacatggtggtgccccattgcaagtatgattcattcaagcttgctgtaaatactgcctcccacggccatctccatctatttattctctagacatcagcagcggtcactgatggcgttgcctcttggggatattc

SEQ ID NO: 87401 - DNA, 2022 bp, Zea Mays
ggcgcgtgtgcgctccatttcacttcaccgttcgagtgggcaaaaagcagaatcctgcctttccaactccaagggggagttgccattcctgtcatccggtgtggcctttgggagagggagagagaaggaaggggaggcttcttccgttccggcagcggctccctccgctttcggttctttgcaagatcgagcgagcgcaatcatcgatcgctgccatcatcaccaggcaagcatggcattagcggatggagaggcggattattcttcttgggacagtgacgacgagtaccagaaattcatccaaaacatgaaccctccaagggtcaccatcgacaacacatcatgtccaaatgctacagtcatccatgtggacagcgcgaacaagtatgggatactgttggaggtagtgcaggtcctcaccgacctcaagctcatagtcaagaaggcatacatatcctcagacgggggatggttcatggacgtcttcactgtgacgaaccaaagtgggcacaagataacggacgaatctgtgctgcaaggaataaaagactacatttacaagtctatcgggcctgactcctgcttccttccctcgcggaggagagccgtcggggtggagccgtcctccgaccacaccctgatagagctaacggggaccgacaggccgggcctcctctcggaggtgagcgcggtgctcacgagcctggagtgcaacgtggtgagcgcggagctgtggacgcacaacgggagagccgccgccgtgatgcaggtcaccgacagggagtccgggctggcggtctcggacgcggagagggtcggcaggatcaaggggcggctctacaacgtgttcagagggaggagccgggacgccaagaccgcggtcgcgacgacgggcgccacccacccggagcggaggctgcaccagatgatgttcgaggaccgggactacgagaggcgcggcaaggacgatggcagggcggcggcgagcggcagcaaccccggtccggtggtttcggtcgtgaactggcttcagaaatactactccgtggtgacggtccggtgcagggaccggcccaagctcctgttcgacacggtgtgcaccctgacggacatgcagtacgtggtgttccatggcagcgtggataccgagggccccgaagcttaccaggactactacatcaggcacatcgatgggtgtcccgtcaattcggaggccgagaggaagaggatcatccagtgccttgaagcagccatagaacggagagtgtccgagggcctgaagctagagctgtcgacaggcgacagggtgggtctgctgtcggacgtgacgcgcatcttccgcgagaacggcctgacggtgacgagagcggaggtctcgaccaggggcgacgaggcggtcaacaccttctacgtccgcgacgcggccgggagcgccgtcgagctgaggacgctggaggccatccgccaggagattggccagaccgttctccaggtgaaggggcaccccgagcagccgaagccgccggtagccgcgcaggactcgcccaccaggttcctcttcagcagcctgttgttcagaccgaggtcgctgtgcaacctcgggccctgatgatgagttccagctccagttccagctagcgcagcgcgtgcatgagaattgagaactgtctgttgtcgggagatgctgctgtaccccaagggcccaagggcaagagttgtacaacgcgatcaggagtgttcattcgtcagaagctcagaacaggtgaccagaagtcgtttaaagcgaagcccacacccaacagctggtgaatactgaatacaccctatagcatcgtccaccgttgagtagtgaaaggtgtagttctgtaaggctatctccagtcctgtcgacatggtggtgccccattgcaagtatgattcattcaagcttgctgtaaatactgcctcccacggccatctccatctatttattctctagacatcagcagcggtcactgatggcgttgcctcttggggatattc

SEQ ID NO: 87402 - DNA, 1939 bp, Zea Mays
ccattctacctgctttcgcccagtagccgcaagcccgcaatcaccgcgtggacgcggccacactttctttctctcttgcatttctggtctgcagctgcggttcggttcaatcttgactcttgagtgaagcgtttgtttcttttcgtgaagcagcattagcggatggagaggcggattattcttcttgggacagtgacgacgagtaccagaaattcatccaaaacatgaaccctccaagggtcaccatcgacaacacatcatgtccaaatgctacagtcatccatgtggacagcgcgaacaagtatgggatactgttggaggtagtgcaggtcctcaccgacctcaagctcatagtcaagaaggcatacatatcctcagacgggggatggttcatggacgtcttcactgtgacgaaccaaagtgggcacaagataacggacgaatctgtgctgcaaggaataaaagactacatttacaagtctatcgggcctgactcctgcttccttccctcgcggaggagagccgtcggggtggagccgtcctccgaccacaccctgatagagctaacggggaccgacaggccgggcctcctctcggaggtgagcgcggtgctcacgagcctggagtgcaacgtggtgagcgcggagctgtggacgcacaacgggagagccgccgccgtgatgcaggtcaccgacagggagtccgggctggcggtctcggacgcggagagggtcggcaggatcaaggggcggctctacaacgtgttcagagggaggagccgggacgccaagaccgcggtcgcgacgacgggcgccacccacccggagcggaggctgcaccagatgatgttcgaggaccgggactacgagaggcgcggcaaggacgatggcagggcggcggcgagcggcagcaaccccggtccggtggtttcggtcgtgaactggcttcagaaatactactccgtggtgacggtccggtgcagggaccggcccaagctcctgttcgacacggtgtgcaccctgacggacatgcagtacgtggtgttccatggcagcgtggataccgagggccccgaagcttaccaggactactacatcaggcacatcgatgggtgtcccgtcaattcggaggccgagaggaagaggatcatccagtgccttgaagcagccatagaacggagagtgtccgagggcctgaagctagagctgtcgacaggcgacagggtgggtctgctgtcggacgtgacgcgcatcttccgcgagaacggcctgacggtgacgagagcggaggtctcgaccaggggcgacgaggcggtcaacaccttctacgtccgcgacgcggccgggagcgccgtcgagctgaggacgctggaggccatccgccaggagattggccagaccgttctccaggtgaaggggcaccccgagcagccgaagccgccggtagccgcgcaggactcgcccaccaggttcctcttcagcagcctgttgttcagaccgaggtcgctgtgcaacctcgggccctgatgatgagttccagctccagttccagctagcgcagcgcgtgcatgagaattgagaactgtctgttgtcgggagatgctgctgtaccccaagggcccaagggcaagagttgtacaacgcgatcaggagtgttcattcgtcagaagctcagaacaggtgaccagaagtcgtttaaagcgaagcccacacccaacagctggtgaatactgaatacaccctatagcatcgtccaccgttgagtagtgaaaggtgtagttctgtaaggctatctccagtcctgtcgacatggtggtgccccattgcaagtatgattcattcaagcttgctgtaaatactgcctcccacggccatctccatctatttattctctagacatcagcagcggtcactgatggcgttgcctcttggggatattc

SEQ ID NO: 87403 - DNA, 1425 bp, Zea Mays
cggctcgtcaccaagcgtcgcttccatctctagattttctttctgctgtgccgtcaccgcttccctcttcaaaaatctcatcacccgtcggccttatcctgccgccgtcttcatcttcctcgctgctgcgctcgtgcccacacggagcatcagttctggcgcagcagaagcagccatcctcgcccaggctttgctcggcctcctctccatctctctgcgtcggcctctcctgcctgctgctcggtcccaagctccctgtgcgcgcggtactcttccttcccatgttactgcgcgctctacctttcttcccatctccctgcgctcgccgcggctccctgctgcactgcagctcgccgcgcggctctcatggcgtgctcctctctgccgagcggctcttccccacgatgccgtcgaatcccgtcttcctctgctcgcgcgggccgcgcccctgcttcccctccctagccgagctcgccggccggccgctcgcccctgtgccttcgctcagctcgccatggaggttgtccgccatggtactctgcatcccgagctcccgtgctcgcgcggcttcctgctcgtcggttcttagactgaagctcgcccggcgcgcccatctctctgtctccccaacgctcgccatcgtctcctgtctggtcgcgccctgctccgccgtcgtgttctagccgcgcgtgctctggtggccgtcgtgctgatcgccggctgaaacccctttagtgcctgacactgcatctccctggtgttcgcctctgttttcccctggcgccgagcccctccatcctgtcctagcagcaaaagcccagccactgcgcaagctacctgctcgatagaatgttcagccgctcgtcagatctgcgcagtccctgcacgatgtcgcaaaatccgctcgttgtcgatgccgcgcttcgtgcatcgtgtgttcgacgaaaatctccagcatgtggacagcacacgcgtgagccgagtttggtttggccagttgttcggtttgcgatttactcttcctgcgattatagtactctgatggaccctgttttgctctcgacctctcagcacgtgggttacagcatcaggtacaatccagtggtaagaattcgtcatgacgttgtgtggctaggagatgggaggtaggtcagtgttgagcaccaaaatgaggtgcggacggtccggccctgaggccggacggtccgcggtccggacggtccgcgcctgtgggccggacggtccgcgcacgcgcagaatagattagagttccgagttttgtgctatgtttgttagctatatccgcggaattagctcggaatccggtcgtgtaaagggtccagcccccctcctctataaaaagagaggcctacggccgatttgtaatcatcaacaatcgaataaatacaacttttattcgcattt

SEQ ID NO: 87404 - DNA, 106 bp, Zea Mays
ctaattatggtccccgatagatctcaacgtgtgtcacaaccagctgttttcaattgcccggtcgccaagttctccatcgcctcaattttacttagccaatgtggta

SEQ ID NO: 87405 - DNA, 1686 bp, Zea Mays
catggatctaacaagcacaaccactgccttcttatccggtctgatactgatccttgtgtcacttgttgctcacaaagccagaacaagcagatccatgaagaggaggcctcctggtccacgggcgctccccttcatcggatgcatccaccacgtgctcacctcgcagccgcaggccgccctacgtgacctggctcagaagcatggcccggtgatgtacctgaagctggggcaggtggacaccgtcgtcatctcctcgccgacggcggcgcaggaggcgctccgggagaaggacagaagcctggcgtcgcggccgagcttgctcggctcggagatcatctgctacggcaaccgcgacatcgccttcgcgccctacggcgactactggcgctcgctgcgcaagatgtgcacggtcgagctcctcaacgcttccaaggtgaggcggttcgcggccatcagggacagcgagaccatgtccctggtcagggagatacgccgcgcctgcgccgccgccagcggagagcccgtggacctcggcggcctgctcctgtcgtgcaccaactccgtaaccggaagggcagcgttcggcaaccgctgcagcagggagctcacggcggatttcctgtccgccatctccgtggtgataagcaacatctcggggctctgcgtctcggacctcttcccgtcgctgcggttcgtggacgccctcaccggcaccaaacgccgcctgcggagggcgcaccagcggctcgaagacgtgtttgccaggatcatctctgacggggaggcacggcgggcggaaaggaaggggactggtgctggtgcaggaggagacgacgacgacgacgaccttctaagcgtcatgctgaggattcgcgacgagggtgagtttgagatcccgatcaacaacacaaacatcaaggcaatcatcctggatttattcacaggagggacggagacgacttcgtcggtggccgagtggctcatggcggagctgatgaggaaccccgacgcaatgcacaaggcgcaagacgaggtgcggcaagcattcgagcacagcagccccgacgagcacgaagcccagatggacaagctgcgctacaccaagacggtgatcaaggagaccctgaggctgtacccgcccctcccgctgctcctccctcgccagtgccgagagacctgcgacatcggcgggttccaggtggccaagggcagcagggtgatcgtgaacgcatgggcgatcgcgaggagcccggcgcactgggacgacgccgacaggttcatgcctgaaagatttgagcgcgacgatagcgcggcaggttattccagggctactactgatggcactacacagtttgagtacctgccgtttgggcacgggaggaggatttgcccgggcatgggcttcggcttgtccaccttggagatcctagttgcgcggctcctctactactttgactggagccttccggaaggaatgcaggtggtggacctggacatggacatgactgtcggtgcgtcggccaggaggaccaacaaactgcacctagtggcctcgccgtatcaagtgcccacgtagatttcatatgatggttgcagttttgcaaccaaaagttgtgcctctttttcttttcctggcttctttcctatcctgcggaaatcaaataaggccttgttcggttatctctt

SEQ ID NO: 87406 - DNA, 1906 bp, Zea Mays
catggatctaacaagcacaaccactgccttcttatccggtctgatactgatccttgtgtcacttgttgctcacaaagccagaacaagcagatccatgaagaggaggcctcctggtccacgggcgctccccttcatcggatgcatccaccacgtgctcacctcgcagccgcaggccgccctacgtgacctggctcagaagcatggcccggtgatgtacctgaagctggggcaggtggacaccgtcgtcatctcctcgccgacggcggcgcaggaggcgctccgggagaaggacagaagcctggcgtcgcggccgagcttgctcggctcggagatcatctgctacggcaaccgcgacatcgccttcgcgccctacggcgactactggcgctcgctgcgcaagatgtgcacggtcgagctcctcaacgcttccaaggtgaggcggttcgcggccatcagggacagcgagaccatgtccctggtcagggagatacgccgcgcctgcgccgccgccagcggagagcccgtggacctcggcggcctgctcctgtcgtgcaccaactccgtaaccggaagggcagcgttcggcaaccgctgcagcagggagctcacggcggatttcctgtccgccatctccgtggtgataagcaacatctcggggctctgcgtctcggacctcttcccgtcgctgcggttcgtggacgccctcaccggcaccaaacgccgcctgcggagggcgcaccagcggctcgaagacgtgtttgccaggatcatctctgacggggaggcacggcgggcggaaaggaaggggactggtgctggtgcaggaggagacgacgacgacgacgaccttctaagcgtcatgctgaggattcgcgacgagggtgagtttgagatcccgatcaacaacacaaacatcaaggcaatcatcctggtaatactacataacgttgaatcgttgatacgtagcgtactgccatgatatgatacaacacgtaacctgaattttgtccagcgcaggatttattcacaggagggacggagacgacttcgtcggtggccgagtggctcatggcggagctgatgaggaaccccgacgcaatgcacaaggcgcaagacgaggtgcggcaagcattcgagcacagcagccccgacgagcacgaagcccagatggacaagctgcgctacaccaagacggtgatcaaggagaccctgaggctgtacccgcccctcccgctgctcctccctcgccagtgccgagagacctgcgacatcggcgggttccaggtggccaagggcagcagggtgatcgtgaacgcatgggcgatcgcgaggagcccggcgcactgggacgacgccgacaggttcatgcctgaaagatttgagcgcgacgatagcgcggcaggttattccagggctactactgatggcactacacagtttgagtacctgccgtttgggcacgggaggaggatttgcccgggcatgggcttcggcttgtccaccttggagatcctagttgcgcggctcctctactactttgactggagccttccggaaggaatgcaggtggtggacctggacatggacatgactgtcggtgcgtcggccaggaggaccaacaaactgcacctagtggcctcgccgtatcaagtgcccacgtagatttcatatgatggttgcagttttgcaaccaaaagttgtgcctctttttcttttcctggcttctttcctatcctgcggaaatcaaataaggccttgttcggttatctcttaatccatgtggattgagttggattgggtgggtttaaatcccaaacaagtcaaagttcttctaaattttttccaatcccgctcaatccatatataatgggaataaccgaacaagacctaaacagtttacgtattc

SEQ ID NO: 87407 - DNA, 531 bp, Zea Mays
atggcgggctggcggctactgcctgctgctagcctgctaggcgctcggtgcggttcgacgggcgacggtcgatggcaactcggcacgctcgggcgctcggctgctaggttagacggcaggcggcagcggctgctgggatgtggacgacggcggctgctaggttacggcagcggctgctgggagcctaggatgtggacacgcggctgctggcctgctgctatggtgctaccagcctgggatgttgccatgttggatggagaattggagatggagcagccgcagcccaccagacctaatgggcatcggcagcggcaatgcgttgaggcgccgctgcttgagggcggcggcgcaccttttgatgcgtcatttttatgccttggtccgggtggaatgattaggccccgggcatatggcattggccacattgtggctaacgaggcggagttcactggtctcttgggcgagaaagtcgagggagccgaagttgatctggttcccgggagcgaaagtcttgcccccggcaaacgctaa

SEQ ID NO: 87408 - DNA, 1038 bp, Zea Mays
atgcagagccggcggccggagcacggcagctccggcgagctcgacgtgttcggggcgacgagttactttgccggcttgccggcgcctggtggtgaccactgtcgtcgtcctagtagtgtaacagagctgtgcttccaagccaataagcaggtggagcttgacacgacgaggagcgtgacacggcacggccctccacagcagcagcatcagcatcagcgcgctgggtggcatgatgatcacgcatcgtcagagcgccacgccaccgacaagctcctgcagctgcaggtagtagtggccgccaacaagcggcggccttcatcggcttcgtcaggcaagagcaagctcgccgccctcttgagcttcatggtgtcgccgtcgccgagagctagcttccgcaaggagaataataggcaggaggccctgccgtcgccgtcgtcggctaggatgctgcggcaggcggaggccgcacgcggcggcggcgacggcgacggcgaagagccagagcctgctagtaatattgatggcagcgcgacggcggcctccccgccgccgccgccgtcgtcctcgcgcgagagcagcgcgcagctgcaaggcctgttcggcgcgctcgacgatgatgacgacgacgagtttgacctgggcgtggcgacgggggacaggaggctgcagggcatcacggtcgtgaggggcggcggcggcggcggcgaggagaggtgggtggtgaggtgctgcgtgcccggcggcggcggcggcagcgcctgggacgacgaggagcgccgcgagaaggcggtcgacgcagagtcatcaagtgagcagagcatcaagcaggacgagcagctggtcgtcgttgaggctgagcaggctgaacaaaacatcaaggacgtggttgttgaggttgaagttgaacaagcaggagatgttgatgatgtcgacgacgacggtagtggtaatgttgacgaccctgctcacagtcacagtgacagctgggacagcgattctagttctgatctgttcgatttggatctcgagcacagatga

SEQ ID NO: 87409 - DNA, 393 bp, Zea Mays
atgcccgggtgcagcaccatccgcgccatcacccactccagcaggatcgccaccgtgtcggtccctcgaaagatcatctcccagaggacagcgatcatgtcggagtccgacagcttctcctcgccatccagtcccagcaagacgtcgacgaagtctccggcggcggccggctctccaatggcgtcgtccttcttgtgcctgtgctcttcgatgatcctggccacgaacacgttgactctgcccaccaggctcctgcaccgcctcctgacgccctgcaggtccagccacctgagcagcggcaggtggtcaccccagttgaacatgccgagcaggtcgtacccttccttcaccatctcctccagctccgcgccctccgggctggcggcgtcgtag

SEQ ID NO: 87410 - DNA, 502 bp, Zea Mays
cctagggaggtgaaaccctgcggatcgacgacagtggctcacaaaggtcaacagatccgcgtctaccgacatggagcggacgctcggaaggcaggaatggacgcggatccaacgccgcgggtatattcaggagcttggggcgcaaatcggggcagggaaacgagacgacgacccgagggtagagcgggcagaggagggggccttaccgaaggcagtgacgaggaagtatgagggcgaccggcggcgggatcgccgggactgcggctgctccggccctctcgtttctgcgctcgaaagtcgaaatggaggccgaacggaagcctgcggatggttttgtatagaaaaaggagacggtgggccctggaccccgggatggatgggctcagcacctctagctggccgtccgatctcaccattgacggtggagatgggaccgggcgcccgcgtgaaggagacgctcgatcgatactccctaccggctactacggccggaaacgcataa

SEQ ID NO: 87411 - DNA, 432 bp, Zea Mays
atggagcggacgctcggaaggcaggaatggacgcggatccaacgccgcgggtatattcaggagcttggggcgcaaatcggggcagggaaacgagacgacgacccgagggtagagcgggcagaggagggggccttaccgaaggcagtgacgaggaagtatgagggcgaccggcggcgggatcgccgggactgcggctgctccggccctctcgtttctgcgctcgaaagtcgaaatggaggccgaacggaagcctgcggatggttttgtatagaaaaaggagacggtgggccctggaccccgggatggatgggctcagcacctctagctggccgtccgatctcaccattgacggtggagatgggaccgggcgcccgcgtgaaggagacgctcgatcgatactccctaccggctactacggccggaaacgcataa

SEQ ID NO: 87412 - DNA, 1416 bp, Zea Mays
aattcggattagacggccacgtcccccgccgagcctcaccaatcgccctctgcaggcagggaaggacggggcggggcggagatctgctgattgctctctttcttatcttctcgcctcccctcccctcccgttctcccaattccaacctgctgctcgcggtcgcggtggccattgcctcgctcgcgtctccttggccgcgggcggatccggccgcatcctgctgctgttccccattcgtcggtcgttgccagtccatggattcttaaccaattcttccccaagcttcttccttgcctgggagcagctagctgcatcctgttaaataatagctctagcgtgcggggggaggccgcgatggcgtccagggacttcctgcgcgtcttcggggcaggggcgggccaccaggacgacgccgccgccgccgccggccggacagacgacgtcgagctcagcctcggtctctccctgggcggccgcttcggcaccaccgacgccaagcgcccgcgcctggcgcgctcctcctccatcgcctccgtctgctccgtctcctccctccacgccgacgccgacgccgcgccgctgccgctgctgcgcaccacctcgctgcccaccgagaccgaggaggagcgctggcgccgccgcgagacgcagagccgccgccgcctcgaggcccggcagaagcgcgtcgagcgccgcaactccatggcctccctggcgcccgccgtcgtcggcgggaccgggaggaggtccaacgcctcgcaggggagcaactctgccagcaccacggagcaaggtattggtgggagcgcgagtaaccaatccacagacgcgaggagtccatcatcaacctctgataataatacaaatcaaaacaacatgcttcctccgacgactaaagcagccgagaagccactaaacggcactgcgacagagcagccgcagcctcgcctgcggacgcttgggtccctgacgacgcggacgagcagtaccggcgacatcaggaagctcatgatggaggacatgccgatggtctcgtccaaggtagaggggcctaacgccaggaggatcgacggcttcctgtacaggtacaagaagggcgaggacgtgaggatagtgtgcgtctgccatggcagcttcctcacccccgcggagttcgttaagcacgctggcggcggtgacgtatcgaacccgcttcgacatatcgtcgtcaaccctgcgccgttctcgtgaagagggagggttacgctgttgctgctggtatcgatcgtgctgtaacatgttgtagtaggctccttgtttccgggagttcaatggaaggtctctctctatatttgacatggattgagtgtgacagcaaatccaagagaaacatcatctacaaatgttagacttgtctacaaattgacaaggattcag

SEQ ID NO: 87413 - DNA, 438 bp, Zea Mays
aactcggctcgtgaaaaaatcaattcaaaaaagctgatccacgccgcgccaaacacgaacacatgagccgatgagtcaagaacatttcgttcatctctaccaacaaatagaaacaagggaaaaaaatgaaagaaacagccacaattgactgcagctcacatcgatttatcaatggagctgcagcaaagacacatcttggcatgttgcgatttggatttatacagacagctttagaaccatacatacatgaccgcttttacacatcttacaccgcagcaccctacaatcttcagtttcagcatctgacaatcaatatacacaatgtggcatacggtggatatatctcaacttctcatgggcaagctgcaggctgcaagagttcgttagactgattttacaggagctagtttcagcatccgaactaaagcatgaactgtt

SEQ ID NO: 87414 - DNA, 321 bp, Zea Mays
caggccggcatgacgtgcatgtgccatagttgtggcccgcgtgcatctagcccgtgtcgggcgtcgttacactgatttaattaaatggatcaatgggctaacgagctggtccgacacagttagcaggccgacatgacgtgtctgtgtcatagttgtggctcgtgtgcatgtagtccgtgtcgggtgttgtttgacatctatagacgtgcagcagattaatttgaaatagatgtgagaggttatttgtaaaaataatgacgcatgacgaccgttgaaactggtgctttaagtataaaaatatagataaactaatttactttt

SEQ ID NO: 87415 - DNA, 288 bp, Zea Mays
atgccgaaggcgaaggggtcggcgccgggcgggggcggctggcgcccgctcggctgctgctggaaacgcggcatcgacggcgacggcgacggcggcggcggcgagcggcgtctctgcgccgagtcggaggtgacgtcagacatcgcgaggagggtgggcgggggtcaccgggaaccgtcacaggtggaacgggcgacgggagtggacgaaaccgcgaggaagacgaaggctggtgtgcggtgtgccactcgcccactcctggcgtggagtgttgcccgtgttgggtaa

SEQ ID NO: 87416 - DNA, 153 bp, Zea Mays
gtttatatgggagttgacttctgtaagaagctttgtggagtctctattgtgcgaagtggtgagagtatggagaacgcattgcgtgtttgttgtaaaggaataaaaattgggaaaattctaattcatcgtgttggagacaatggacaacaggta

SEQ ID NO: 87417 - DNA, 222 bp, Zea Mays
gtatcaaaagaaaatgtaagtgaaaaggaagactctgagattgttcgttcgcctagagttccaacacgttctatcaagaagccgattggtgctaaaaatcctggaaataagactgtcggacttggtgcacggaagcttacatcaaagccaaatgaaagcctgtatgagcagaagcccgaagaaacagctcctgtcctaccatcatcggtgattgcaagtact

SEQ ID NO: 87418 - DNA, 876 bp, Zea Mays
ccgtcggatctccatccgacgaccaaacgccgaaccccgtcatatataaatttacgctccgcctgccacgccgctcctccaaaccctagtctcagagcagccgcatccacaacctgcctctctcgtcccctggcggcgtccgcggcaggatggcggaatctacggcgaggacggtgaaggatgtcaacccgcacgagttcgtcaaggcctactccgcccacctcaagcgctccggcaagatggagctccctgagtgggttgacattgtgaagactgcgaggttcaaggagcttcctccttatgatcctgactggtactacatcagggctgcatccattgcaaggaagatctacctaaggcaaggcatcggtgtgggtggctttcagaagatctacggtggccgccagaggaatggctcccgcccaccacacttctgcaagagcagtggtgctgttgcacgcaacatcctgcagcagctgcagattatgggcatcatcgatgtcgatcccaaggggtaaatcagctgccacacccctttctcttgcaataacttatcctggttgttgaagtttgctgcttattggacatttccattgtgctgcagtggacgcctcatcaccaaccagggaaggcgtgatctggaccaagtggctggaagggtcgctgttgaagcgtgagcagtgtcatctttggtttcaatggtgtcatgtttgatggttgagaaggctgcgctctatttgctcttttgggttaggattttcgagttcagaggactttaaggtttattgcatctagctatggcgccacactatgttccccgagtacctaatgtgatatcaagactcaattctcgaatctaagatatatgtttgcaaa

SEQ ID NO: 87419 - DNA, 1222 bp, Zea Mays
ccgtcggatctccatccgacgaccaaacgccgaaccccgtcatatataaatttacgctccgcctgccacgccgctcctccaaaccctagtctcagagcagccgcatccacaacctgcctctctcgtcccctggcggcgtccgcggcaggatggcggaatctacggcgaggacggtgaaggatgtcaacccgcacgagttcgtcaaggcctactccgcccacctcaagcgctccggcaagatggagctccctgagtgggttgacattgtgaagactgcgaggttcaaggagcttcctccttatgatcctgactggtactacatcagggctgcatccattgcaaggaagatctacctaaggcaaggcatcggtgtgggtggctttcagaagatctacggtggccgccagaggaatggctcccgcccaccacacttctgcaagagcagtggtgctgttgcacgcaacatcctgcagcagctgcagattatgggcatcatcgatgtcgatcccaagggtggacgcctcatcaccaaccagggaaggcgtgatctggaccaagtggctggaagggtcgctgttgaagcgtgagcagtgtcatctttggtttcaatggtgtcatgtttgatggttgagaaggctgcgctctatttgctcttttgggttaggattttcgagttcagaggactttaaggtttattgcatctagctatggcgccacactatgttccccgagtacctaatgtgatatcaagactcaattctcgaatctaagatatatgtttgcaaagtgtctgaccaggtatcaataatgtgtctttcttttggtacagatatacgtgataataacgtgcagttattggccacccttggttaccgatagcaaggctaataactcagctattgactcggtagatttttgtagtccaactgtagtcctttcgtttttctttattaatatatgggctcacttagctagctttaagcgtatttttatgtgagttaggacagctccaacaatctgacttatcagctaccttaggtcatttttttctacatattttaatttattaacatagtgatttttttctttttgttttaatagaagcgggtggaaaacaagattttatttccgtatacacattttaagattatgtgagatatacacatttcaagattatgtgttatgtggggctggctattcattgcagacattttaagattgc

SEQ ID NO: 87420 - DNA, 1060 bp, Zea Mays
tatacgtcggttttaggcaaaatctaacagtattttgaagatcccccagcatttcatctatgcagggcctatatgagatggagctccctgagtgggttgacattgtgaagactgcgaggttcaaggagcttcctccttatgatcctgactggtactacatcagggctgcatccattgcaaggaagatctacctaaggcaaggcatcggtgtgggtggctttcagaagatctacggtggccgccagaggaatggctcccgcccaccacacttctgcaagagcagtggtgctgttgcacgcaacatcctgcagcagctgcagattatgggcatcatcgatgtcgatcccaagggtggacgcctcatcaccaaccagggaaggcgtgatctggaccaagtggctggaagggtcgctgttgaagcgtgagcagtgtcatctttggtttcaatggtgtcatgtttgatggttgagaaggctgcgctctatttgctcttttgggttaggattttcgagttcagaggactttaaggtttattgcatctagctatggcgccacactatgttccccgagtacctaatgtgatatcaagactcaattctcgaatctaagatatatgtttgcaaagtgtctgaccaggtatcaataatgtgtctttcttttggtacagatatacgtgataataacgtgcagttattggccacccttggttaccgatagcaaggctaataactcagctattgactcggtagatttttgtagtccaactgtagtcctttcgtttttctttattaatatatgggctcacttagctagctttaagcgtatttttatgtgagttaggacagctccaacaatctgacttatcagctaccttaggtcatttttttctacatattttaatttattaacatagtgatttttttctttttgttttaatagaagcgggtggaaaacaagattttatttccgtatacacattttaagattatgtgagatatacacatttcaagattatgtgttatgtggggctggctattcattgcagacattttaagattgc

SEQ ID NO: 87421 - DNA, 1113 bp, Zea Mays
cttcattgcattggttatgttggtatgtgtgattaattataagtgtactcttctgttagatggagctccctgagtgggttgacattgtgaagactgcgaggttcaaggagcttcctccttatgatcctgactggtactacatcagggctgcatccattgcaaggaagatctacctaaggcaaggcatcggtgtgggtggctttcagaagatctacggtggccgccagaggaatggctcccgcccaccacacttctgcaagagcagtggtgctgttgcacgcaacatcctgcagcagctgcagattatgggcatcatcgatgtcgatcccaagggtggacgcctcatcaccaaccagggaaggcgtgatctggaccaagtggctggaagggtcgctgttgaagcgtgagcagtgtcatctttggtttcaatggtgtcatgtttgatggttgagaaggctgcgctctatttgctcttttgggttaggattttcgagttcagaggactttaaggtttattgcatctagctatggcgccacactatgttccccgagtacctaatgtgatatcaagactcaattctcgaatctaagatatatgtttgcaaagtgtctgaccaggtatcaataatgtgtctttcttttggtacagatatacgtgataataacgtgcagttattggccacccttggttaccgatagcaaggctaataactcagctattgactcggtagatttttgtagtccaactgtagtcctttcgtttttctttattaatatatgggctcacttagctagctttaagcgtatttttatgtgagttaggacagctccaacaatctgacttatcagctaccttaggtcatttttttctacatattttaatttattaacatagtgatttttttctttttgttttaatagaagcgggtggaaaacaagattttatttccgtatacacattttaagattatgtgagatatacacatttcaagattatgtgttatgtggggctggctattcattgcagacattttaagattgcgtgactgcgtgagggtcacgtgcagctatcaattgagtgaatctatagttcataggttcatgcctaatttt

SEQ ID NO: 87422 - DNA, 516 bp, Zea Mays
atggtgtttgctgctggaggcacatcccgattcgtcggtatggacttgaagtttaatgccacacctgctctaggagagcagacaaccttcaagtgggtcattgatcatgggtgtaaaatgatgaagttgctaaatccaagcaatcaactgtctccacaaaaaacaaagaagtttaaggaaattcaatttcagaaacttcagagattgccagatgggtgccatcctgattttgataatgatcatctgtgttctataaataatcatgacctgcttcctaaaatgagtactccaagtgctgaccttcatctacttcctgagacaggagtggaaaacatgaggacacctaaaagtcttcacgctgaacttaagcgtgagctgtcaaaactaaatacggtgttaaagctaccatgttggtgtgctgcttcttttctgaaatacactgagttggatcatcgagaatcacttgcccttgcttcagatggattgaattatgaatgcaatgaggctccatcatag

SEQ ID NO: 87423 - DNA, 1204 bp, Zea Mays
gtttcttcgccggccggccggccgggagagacacactgcttgctaattatgactgcgatgatgatgaggaggtacatgcctcacgctctgatggtcctggcgcagctcttcttcacgctcctctacttcatcgccgaggccgccttcaacagggggctcaactccttcgtctacgtcacctaccgccacctcctcgccgcctgcatcctctgcccattcgcctacttcaaggagaagacgctgaggccgaaaatgacaccaatgctgttcctggagatattcgtgctgtcacttgtggggtgagcagagctagcgagcatatatatgcagaacggggagcttaactctgaacatgtacttctcgagcttgaagtacacgtccccgaccttcgtcacctccatgctcaacaccgtggcctcgatcacgttcgtcgtcgccgtcgtcctcaggttggagatcgtagacgtgaggaccctgcgggggctcgccaagatcgcggggaccgcggtgtcgctggccggggtgaccaccatcagcctgtacagaggagcggccgtgaagaggccgtggagggcgcccgccgtccacgtacacggcatcggcggcgccggtcacgtggagccacacgagagctgggtcaaagggtcgctgctcgcgctggcgagctgcatctgctggtcgatctgcttcatcttgcaggcttcgtccataaagaggtacccggccaagctgtctctgacggcgtggacgtccctggtcggcggcctgcagtcggcggccttcgcggcgttcgtgcagcgggacgcgcgggactggctcgtcggcttcggcctcaacttctgggccatcgtgtacgcggcgatcgcctgcaatggcttgaccgtcgtcatccagctgtggtgcaacagggagaaaggccccgtgttcgtcgccatgttcaaccccctcctcaccgtcatggtggcactcctcgcctacttcgtcttcggcgaaaacctatacgttgggagcgtgattggagggctgcttgtgattctggggctctacatgctgctgtggggcaaggacaaggaccaagaacagcacgtgtcgtcgtcatcggaggagggcaaagagcaggagcacccccatggccatgatgagctggacctgcactacagcgtcagcttgcgagaagcagcagtcggccgaggccgaccgtga

SEQ ID NO: 87424 - DNA, 1457 bp, Zea Mays
gtttcttcgccggccggccggccgggagagacacactgcttgctaattatgactgcgatgatgatgaggaggtacatgcctcacgctctgatggtcctggcgcagctcttcttcacgctcctctacttcatcgccgaggccgccttcaacagggggctcaactccttcgtctacgtcacctaccgccacctcctcgccgcctgcatcctctgcccattcgcctacttcaaggagaagacgctgaggccgaaaatgacaccaatgctgttcctggagatattcgtgctgtcacttgtgggggggagcttaactctgaacatgtacttctcgagcttgaagtacacgtccccgaccttcgtcacctccatgctcaacaccgtggcctcgatcacgttcgtcgtcgccgtcgtcctcaggttggagatcgtagacgtgaggaccctgcgggggctcgccaagatcgcggggaccgcggtgtcgctggccggggtgaccaccatcagcctgtacagaggagcggccgtgaagaggccgtggagggcgcccgccgtccacgtacacggcatcggcggcgccggtcacgtggagccacacgagagctgggtcaaagggtcgctgctcgcgctggcgagctgcatctgctggtcgatctgcttcatcttgcaggcttcgtccataaagaggtacccggccaagctgtctctgacggcgtggacgtccctggtcggcggcctgcagtcggcggccttcgcggcgttcgtgcagcgggacgcgcgggactggctcgtcggcttcggcctcaacttctgggccatcgtgtacgcggcgatcgcctgcaatggcttgaccgtcgtcatccagctgtggtgcaacagggagaaaggccccgtgttcgtcgccatgttcaaccccctcctcaccgtcatggtggcactcctcgcctacttcgtcttcggcgaaaacctatacgttgggagcgtgattggagggctgcttgtgattctggggctctacatgctgctgtggggcaaggacaaggaccaagaacagcacgtgtcgtcgtcatcggaggagggcaaagagcaggagcacccccatggccatgatgagctggacctgcactacagcgtcagcttgcgagaagcagcagtcggccgaggccgaccgtgatatgtatgtatgtctgtataagtgatcattttgttggcagttggcactgtacgcactactacagcacacctctgtacaggcggtctggttcgccactacacaggcggttccaggaaccgcttgtggtgcaccgcctgtgatgtagcggtcaatcaaaaaccgcctgtgaaaaacacagattacaggcggtccagttcaacggaaccgcctgtgatagacacacatcacaggcggtccagttcaaaggaaccgactgcattcactataaatcacagacgattttcatt

SEQ ID NO: 87425 - DNA, 648 bp, Zea Mays
tccgtttggccataacgaatctggccgaggagcgctcctgaccgagctccctcccggcagcgagccggtcccgtccattactggcggcgctcccatccttctcttccccgcgcctcgtccgtgagctccagttaagcgcgcatggccccggttggcgagctccagtggccgtcgtgccgagctgaggccattgctctcctccactctcccaggcagatactgcaatggatactcccggcagcaatggagaatccacagcaaccggcgacgagaaccacggttcgtttccaattcaagcttccttgacctcctcgtgccccatagatttttcaatgaaattgatgttcagcgacacaatgcgacatatgtgaattggtccctcgccattgaagatgttgagcacttgttgattgaggtaccagccgcgccttaggatattagtgctccccctcccattaatgttgtagagcaaggtcattcggtaccggattcgtcaactcaaggaaatgattttgagggaattttaccggatttacgatgggaagaagaaggacctcaacatgtacccaacgagagtgttatgtacctcaaacttggattagttgtcgaggatgaacgagaaaataaagagagagaggatgcttgcaa

SEQ ID NO: 87426 - DNA, 1552 bp, Zea Mays
ctcccatgaccgccgcgtcttgccgtggagtttctcacgcgcttcttccctgctgcgctcctctgctcggtcgtcccaccctagcgcccttgcagccgagctcccacctcccatggttgcctgctccactgcgccgtcgcccagctactgaccatcgcgcgcgcgcctgctaggagctcgcaggcgacgatggtcgcgctccccgaccttgccttggcttcctactgcagttcgtcagcacctccttgcgccctgtccagcgtcctgctcggttcggttcctttccggcaaccagctgaagctccgccccatgacgtttggatccggccaccgtgttcaggcaactggccgttcgtcttccactttctcttccttcgttgacctgcccgcttgctttttctctgcgttcctgtgagcgtacgtctccctgtgtgcttaccgtggaagctggccgcgccccttctcggcctcttctctccatggcgctccgccgagtggctcccctgcgcgtctctctctgctcgctcacgcacagctcacggagcttttcctcgtcggccccagctcagtcgagtctccctggtattccagctcgtcgtcgcgtcattcgtcgtcgacctcgctaaatacgttgtcgcttggtcctgtgtcgttaggctaatcaaccatgttcgctgccgcgcgcttgtctctaatactgctcgcgtggtatttggatctcgtcgattagccccaccatccttgttttcctctggtcacgataaaatcctgtcccaccaggtcatcgggagctgttcccagctcactatggagtttgctgggctcgccatatttttaaatgtcgtcaaatcatcggagttgctcaactcaccaatcgtattttggccatccctatccgaacttaccagctcgccgactgaccgtcgtgttccttgaaatcccttgtcggtcgacctcgtgacttagttcgtcgtgtcgtgtgtgcagctctatatatgccactctcctatatcgtcgtcaaagctgtcatcccctgttcgacccccacctcaccagctcactccaaacacgatcttgtcgtcgtttcgtgtgtcgtcaagaaatcctaagcgtcgggtgaagacgaagttaacagcgcgatatttccccaagcgctcgacaagttggttggatcggaaaatcgctaccgatctcgcggattcgtgtcagctgtggaaacggtaagctgataaatccgaatagttcgatcgttgaataaattaatgtgttagtgcgaggcttattaaggtgctcgataaattgcgtgagtcacgaaactctcgtcgacttcgcagttcttgcgattattgagccagattcacgtatagcgaattattttgctattccggtcacttagctgaattagtggatcgggtagaattttagtaggcatgtgtgttgatgaaataatttaatcacttataaagatgtagtatatttataaggtagagattagttcagaattaaattaattaactgatagttatgattaggctattggtatttcgtggtg

SEQ ID NO: 87427 - DNA, 1949 bp, Zea Mays
cgacaagcccatatgccttcctccaaatccaatacattctgaccactagatgaactggcattgattggtgctagcgatcagttgtgaaattaatctacacacctccccaatcttttttcagattgcaaatcaatctacatgaattgcaaatctcatattttagtatcatatttcaatttttttcagattgcagtatcctccgatacttcctcacgtatattacagtatcacttgtactttttttatagatcgaatgttcgtgtaattaatatgtatgtagcaatgaaacaaatataggaagtatcaggcctgctatagatattcagaacactgccaatctacgatgtacagagcaatctgtaatggtacgactaggacacaaaggagcaggtccagatctgaaggtaggtaggtactgacctcgccggagcttgatcttcttcttgtgggtgatgccctgcacggctgcacggagatccggccttggagtcgtccggcggtctgcgtggccttgggtgatgccctgcatggagcttgatcttcttcctgttcgggtcggcggtctgcgtggccttggcgtcgtccggcgcgaagagcacgacgtcgatgccctgcacggagatcctgccgtcggtgtagatgtccgggtccaagaggtagcggatcttgtgcggcagaaaccagaatgaaacgtaccttgtgcggcagaaaccagaagcaaaccggaatcaaacgacggaggcgctcagggcgttggagcgacggaggtgctggtgcatagcgaagacgagacgaggcggcggagaatcgcctggcctcctaaggccagggttgtttccgacgggaaaatggaacgaatatctgcacgagattgggctgccaaatgacacacatgaataatccgaggacaattttctggtgggctttctcccaggagaaaaggccaggaaacccgctggattttgggctgccaaaccagtcctgatatgtcttttttcccccctctagcgcgtctcagtaagacattaaggactaacgcggaggctttaaagagaatctttagttattaaatattaagatgactcttatgtttctttgttgggcttcatcagttcttaaataaggtgctatatgcgagggaaggggccaagagcatcattgacagggcttttgtggacttaccatggcaagttcggttggaagtcgatggcaccgagatcgagataccagaggactcggaaggcgtgcttgtcgcgaacatcccgagctacatgggaggggttgacctgtggcaaaacgagggtgaggatcccgaagattttgacccgcagtcgatccatgacaagatgctcgaagtggtcagcattacaggagcatggcatctgggaacactccaggttggactttctcgggcgcggaggatcgcgcaaggccagtcgatcaagatacagatgtttgcccctttccccgttcaagtcgacggtgagccttgggtccagcagccctgcacgctcaagatatctcatcacgggcttttatgttgaggagagcagttgaagagccactgggtcatgccgctgctatgatcaccgacgtccttgagcatgcagagtccagccatgtaatcactgcttcgcagaagaaagccctcctccgagaaatggctctacggctgtcatgaagcaagcgccgctcattcggacgtcgcagaagaacggtttcctgcctctgcctgcacatcggtggttagtacgaggatctgtgatctcaacatgagctcgatcatgttgttagcagaagatacaggcccggagggacgtgtccacgtgcacatagagtttttttttttggggtcatgttcacgttttggaaatagcgaggcaatgttgtgtgcagctatgtatggtgtgtagacctcgggtaagccagttccttccttctgtgcaaaa

SEQ ID NO: 87428 - DNA, 78 bp, Zea Mays
ttttttttttgcaaaatattattgggtgtacgtgcacatccatacccttcacttggtccgccactggtcaagacttaa

SEQ ID NO: 87429 - DNA, 612 bp, Zea Mays
tcaagcataaaatcgtacagtttttagcgtaaataatatatgtggtaggcataaaacacaattaatcgaaaagaaagctgcaccggatcggaggatgtcacgcgcgatcatcgctgcgcgcatctcgcgccttccgtgacgccgctcgctcgaacatcgcgcctcatgcgtcactgtcgctactcgcacgtcgacgagcgtcgcttgctcgccggccttggaagtgtcgcctcctcggggcttcggggacgccgccgcttgcccacacaagggccccgctgtcgctcgccctctggataggggagccgccgccaccgacctaggaaccgccgcactacttcggatcgaggaacctccgccaccgcgcgtcgaggtaatggagttgcggccaccggcctcggaaccgccgccaccgcacaagggcactgccgtcgctcgccctctggatcgggagccgccgccaccggcctgggaaccgccgcctctacttcggatcgaggaaccgccgccaccgcatgtcgaggtcggagagccgcggccaccgcagccactggccggggatccaccggcgcgcgcgctatcgggcaaccaccgtcgctaatgaatcgagat

SEQ ID NO: 87430 - DNA, 2413 bp, Zea Mays
atggcggagaaggctgctgctgctgactgctcacgtctaaaatggcttttggcctcccagacagcatttaaaggactgctgactgctcacgctgaaactagacataccattttggtgagatgggatgttgacctcactgataaagttgatgctacagtagagatgcagtggcagaggaacgtttgcaaacctggtgatgtactacctattctgattactgttttgggcaccagggctcttattggttgggcactaggtttcttgttgcgtgctattgcgaaggagggtgaggaatcgattagcatcttctgtgtcactgtagcacacaacaagctaacaacaaaatggattcgtgctgctccaccaatcacttgtgcccaaccaaacatacagatttcgcaaccactagtgaaacaaagcactgtggataatatgttgtccacgcatgaggcaaatgctgatcagtttgatcttctttcttatggtaatctaaggggactagaggctagtagaagttctgaggaatctaattttggaaatgacttaaaggatggttcttcagtttcttctgagaacttcggctcctcttgtctgcctggcgagagctatcaatctgccacagtagatcatgaaaaacgacctctttctgatgtcaagacatgccaaattgcttgcaaacgtccaaagcaaacagatcactgtacctggttatattcctttgaggaacaccctttgaccagtgaagtgggaatatcttctccagctttatatgatggattggttgagatcaaacaaccaaatgacattcctgcaattaatggtgccacaacctgcagtggtagttcagtgatcccttgccgtaatcatgatcaatcaattttagtggaaaacttagacatacctgattgggcgacttccttccctggttattttgaagactgtgggccagttgttacatatagccatgttgatgacattggttcgcctagaaagggtgtgccaattggacctgagcaccaggctgacattccagaatggaggcccctaaactctatgattgtacctggtgcttcagagttttgtgctaatctggattgtagttctgcttccacttcagagtctgttcccagaggtgatgactatgtaagtgacaagtggatcaggtactgtgttgttccggtgacatgctgctcatctcctgttgactgggctggagacagcaaaatagattgcaactgcagtgacgagggttctatgaggtgttccagacagcatattattgaagcaagggataaccttaaaatgatcttgggacaggacaggtttcgtgagttaggtctttgtgaaatgggagaggatgttgctctgagatggactgatgaggaggagaagctattccaaagagttgttttcttaaatcctgtctccttgggcaagaacttttgggaccaccttccggatgcatttcctaataaaactagccaggagtttgttagctactattttaacgttttcatgctcaggaaaagggctcagcagaacaggtctgacgtgttggctgtggacagtgatgatgatgaactgcatggtgaacctctagctgagcgggtggaaggggatcctgcagttgagtcctctacacatgaacattctgtcagcaattctctgcccatggatgatgaccataaagagtttgaaggagcacagtttgatggatctttgtgtgagaagtcagtatacaatgcagtcgagtgcagacatctaccaaatcagatgcctgcagattcaaatacggtgaacactgcactagatgtttgtgaccaagataatggagctcagtgttcagagtttcacatgtcactgccgagcgatacttcaaacagtcttggggatcaaagtgcatctgtataggagatgttgtgtggacaaggctctttggccgtcgagatgtccaaccaagaccatgaacaacaatgaaatggataacacattcagtttggatctgacatctacttcagatgggtgctgttttgccatggcttggagttgtaaattcagcttcatctggagttgatagttcatgaagttgtacattcttcaactactatgtacttttcgcggcattttgttagcacacttggaactcaactgagcttccacggggttttgctgcccccaccccctaccccccatccccattcgagaaatcaaccttgttgtatgtaccatctgttgtattttcatcgctgtatgtccattcgagaaactgaacatgtagattgtaagagttgccactgtctggattacccgcggtggttttcgtttgcagaccgagtgctttcggaatcgattcatgcaaataatgtgctaccgacagactccagttgaatccatttgatgtgatacgtttgtc

SEQ ID NO: 87431 - DNA, 1346 bp, Zea Mays
tttgcccacctttgctcactcgcttcgctttccatcctgttgcgcggccgcggcgcaggtgcggttggccatcacaggccaaggacccctcttcctcttccctttgacccaccaccgcccccctcttcccttcttcccccactgtcgccgctcctcgtcttccactctctccactttgctgcttcttctcccttattaatgctcgtgggctcctatgatccgccctccgccgcgggtttcttgatccatccccggcccaaggaagcggaccccggcgaacactcctgacagattcgcccgtccgccgctccctcgattcggtcctccccgtcagcggtaagacacagccggctcctcattcctcgtggcgtgccgtgtctttccttctattaatgttaagtatttatacagcgttgacgccttgacggtatgaagccctattcttggcaggcaggtgtttaggacctctgcagcatagcatctggtccgtccctggagatgtccggcgtacaggagcagttcgagatcaagttccggctgccggacggcaccgacatcggacccaggcggttcccgccggcgtccaccgtcgccacgctcaaggagaccatcatcgcccagtggcccaaagataaggaaaaaggtcctaggactgtgaatgatcttaagcttattaatgctgggaagatactggagaacaacaaaaccctatcagaatgcaaaagcccgatttgcgacttctctgcgatgacaacaatgcatgtcgtcatccgcgcaccgacttcaagcaaacagtctgataaaagagcagaaaagaaagcgaaaaatttcaggtgcggttgtgccattatgtgacagcattgtgaatagtagcagagagaacgtggccatttcagttttctccctttttttttcctgctctcgctggagtgttgtattatgttcgaggcgctttctcctttcattttgttttgaagtaccgcgtgcaagcttcaacagctgtcaagtgccctttaatcgtgagtgtgcatcaagcacagaattagaaggcggttggctgctaattacccttaatcttgagtttgtcaagcacacaatttgaaggcagtcattagcgtcgaaactacgatgtccaccctatccaatcttccatggtttcacgcttctcttctatatttatgctaccctgggtgacaaatgtttaatgtatgccttccatgctagatgaactttttggaacgccattctaactcatcaatttctattctgtaaaactaaaaccagttgtaatctgccatagatcagtatgcttgctatatgggagtcacattgatatgttttgcaac

SEQ ID NO: 87432 - DNA, 1232 bp, Zea Mays
tttgcccacctttgctcactcgcttcgctttccatcctgttgcgcggccgcggcgcaggtgcggttggccatcacaggccaaggacccctcttcctcttccctttgacccaccaccgcccccctcttcccttcttcccccactgtcgccgctcctcgtcttccactctctccactttgctgcttcttctcccttattaatgctcgtgggctcctatgatccgccctccgccgcgggtttcttgatccatccccggcccaaggaagcggaccccggcgaacactcctgacagattcgcccgtccgccgctccctcgattcggtcctccccgtcagcggcaggtgtttaggacctctgcagcatagcatctggtccgtccctggagatgtccggcgtacaggagcagttcgagatcaagttccggctgccggacggcaccgacatcggacccaggcggttcccgccggcgtccaccgtcgccacgctcaaggagaccatcatcgcccagtggcccaaagataaggaaaaaggtcctaggactgtgaatgatcttaagcttattaatgctgggaagatactggagaacaacaaaaccctatcagaatgcaaaagcccgatttgcgacttctctgcgatgacaacaatgcatgtcgtcatccgcgcaccgacttcaagcaaacagtctgataaaagagcagaaaagaaagcgaaaaatttcaggtgcggttgtgccattatgtgacagcattgtgaatagtagcagagagaacgtggccatttcagttttctccctttttttttcctgctctcgctggagtgttgtattatgttcgaggcgctttctcctttcattttgttttgaagtaccgcgtgcaagcttcaacagctgtcaagtgccctttaatcgtgagtgtgcatcaagcacagaattagaaggcggttggctgctaattacccttaatcttgagtttgtcaagcacacaatttgaaggcagtcattagcgtcgaaactacgatgtccaccctatccaatcttccatggtttcacgcttctcttctatatttatgctaccctgggtgacaaatgtttaatgtatgccttccatgctagatgaactttttggaacgccattctaactcatcaatttctattctgtaaaactaaaaccagttgtaatctgccatagatcagtatgcttgctatatgggagtcacattgatatgttttgcaac

SEQ ID NO: 87433 - DNA, 330 bp, Zea Mays
tccattgagacaattatgagtttgattgagtttccgttactcgaccaaacaagttccaattccgttatttcaactacaccaaacgatctttcaaattggtgaagactctcaagtttatggccccttctatatggtaccagttgttgtttcattgaatttgcttcattaataggctcacgattcgactttgatcgttatggcggccctgtgtatcagatgaccaataaaagaatggaacaagtatcatgcttgtctgcctctgattttgacagtcaactccagtgctggctaagtctgacctctcgactatcaatgctgtttcgattttga

SEQ ID NO: 87434 - DNA, 1186 bp, Zea Mays
cctgaacctcccagaacctcctcctccgcttgtctccaccctccacgccgccaccgatttatacacgcttcgtcccgccccgccgcgaccttctgttccataccatgccataccatttctcctgataaaccatccaatccagagttccattccagtctgaattgctcctcctaccttctgataagcaatcacgattgtgccatcaacactacagcgccccaccatggccgccgcgccgcctctgtccgccgacgcactttccttcctaacctccgcccccgccgcggccgcggccgtgccgacgccggtcgtagccgcggcgtggggcgcggcgagggcgggtcatgtgaggggtaaggcgggactaaggacgacgggaggaggaaggggcggggtactggctccggtggtcgggaagaggctctgccggacgccgctctccgttcgctgcaacgccaccagccgggacggcaggattacacaacaagagttcactgagatggcgtggcaagcaattgtctcatcccctgaggtggcgaaggagagcaagcaccagattgtggagactgagcatatgatgaaatccctgctggagcaacggaatggccttgcccgccgcattttttctaaggcaggagttgataatacaaggcttcttgatgccacggagaagttcatccagagacagcctaaggtattaggtgaagaacctggatctatgttggggcgtgacttagaagctctgatacaaagagcccgggacttcaagaaagagtacggcgattcatatgtctcagttgagcatctagtccttggctttgctgaagataagcggtttgggaaacagctgttcaaggattttcagattactgtgaagacgttgaaatcagccattgaatcgattagagggaagcaaaatgtaatcgatcaagatcctgagggaaagtacgaagctttggagaaatatggaaaggatctgacagctatggcacgtcaagggaagcttgatccagttattggaagagatgatgagattcgaagatgtatacagattttatcacgaagaacaaagaacaatccagttctgattggtgaacctggtgtagggaaaacagctatagctgaagggttagctcagaggatcgttcaaggagatgtcccacaagctctgacaaaccgtcgagta

SEQ ID NO: 87435 - DNA, 2426 bp, Zea Mays
agtgcatttaaattgtaaccactgtgccttcttggctttggatacttttgttaacatttttacaggtcaattttaactctctattctattgtttcttttaaacagctaattgcacttgatatgggtgcattgattgctggtgcaaaatatcgtggagagttcgaggatagactcaaggctgttctcaaagaagttacagattctgatgggcagaccgttcttttcattgatgagattcacacagttgtcggagcaggtgccacaaatggtgcaatggatgctggtaatcttctcaaaccaatgcttgggagaggagaactacggtgtattggtgcaacaacccttgatgaataccgcaaatatattgagaaagatccagcactggagcggcgcttccaacaagtttttgttgatcaaccttcagttgaagatacaatttcaatactccgagggctaagagagagatatgagttgcaccatggtgtacgaatatctgacagtgcccttgtagctgcagctgttctttcagatcgctatatcagtggacgattcttgcctgacaaagcaattgatctggttgatgaatcagctgccaagttaaaaatggagataacatcaaaacctactgctctggatgagattgatcgtgctgtcttgaagcttgagatggagcgtctctcacttacaaatgatacagacaaagcatcaagggacagactgtcccgtcttgaagcagaactatcactcttgaaggataaacaacgtcaattgactgagcagtgggagcatgagaaagcagtaatgactaaaattcaatctatcaaagaagagattgacagggtaaatgtggagatacagcaggcagaacgtgagtacgaccttaatcgtgctgctgaactgaaatatggcagtctgaatgccttgcagcgccagcttcaagcgacagagaaggagcttgatgaatatcagagttctgggaaatccatgctaagggaagaggtgacccaagatgatattgcagaaatagtgagcaggtggacaggaattccagtttctaaactaaagcaatctgatagggagaaattgttgtatctggaggatgagctgcacaagcgagttgtcggtcaggatcctgctgtaaaagcagttgcagaggccattcagagatccagggctggattatccgacccaaaccgtcccattgctagtttcatgttcatgggacctacaggagttggcaaaacagagttagcgaaagcccttgcagcttttatgttcaacactgaggaagctgttgtcaggattgacatgagcgagtacatggagaagcattcagtctcaagattgattggtgctccaccaggttatgttgggtatgaagagggtggtcaactaacagaagctgttcgtcgtaggccatattccgtcgtcttgtttgatgagatcgagaaagctcattcggatgtgttcaatgtcttccttcaaatactggacgacggtagggttaccgactctcaaggacggaaagtgagcttcaccaacaccataattatcatgacgtccaacgttgggtcgcagtatatactaaacatggacgaagaagttggatcatctgattcagcctatgagaacataaagaggagggtgatggatgctgcaagatctgtgttccgtccagagttcatgaatcgtgtagatgagtatattgtcttcaagcctctcgagagagaacagatcaacagcattgtcaaattacagctcgcaagagtacagaagaggatcgcagaccgcaaaatcaagctggaagtctcacccggtgctattgaattcttgggaagcctggggtatgacccgaactatggcgcgaggccggtgaagagagtgattcaacagcacgtggagaacgaactcgcgaagggcatcctcagaggtgatttcaaggacgaggacagcatctttgtggacacccaggtcacggtgccctctaacggccagcttccgcaacagaagctagttttccggaaagtgggtgagcaatcgaagcccgctgctgaaggcgagaagttcttgccggctgtctgatggagcacggttgcagttctacagatcgtgagcaataaaatgtacatataaaggtgccaaactggtagagtactccgtttggcttagtagagcatcacagccagaatttgttctatggtacagctcagtttacatggagcagcgaattttgttttgtttctgccatttttcttttcagtggaagtggtatccacaagtctcctgtcctcatcagggataaaactcatattttctctttttccttgaatgtattgtttgtagcacctagagaagataatattcccggatgctgttaagacatatttaaggatgccgataaacaaaaggaggttttgttcgattgc

SEQ ID NO: 87436 - DNA, 123 bp, Zea Mays
atggcgatggcgtacgggatagcagaggtggccatggtgacggcgggctggtggccatggttcttgtggaacctatacttgaagtcagggcaggagctgctcgagctatggggtgtcttataa

SEQ ID NO: 87437 - DNA, 861 bp, Zea Mays
atggcgaggcagtacacgcggttgcgagaggcgccgttgagcatgtcaaagttggaggtggcggcaaggagctacttgtggtggcatctcgttccgcccgctccttgtcgcttctgtttccctcgtcgccgggggccagtagtcatgtcgtgttcccacctctccaccgcctggtcctcatcggcgctcgccagcagcgcctcctccacccggcggtgctccgccccacgcatgggcctcgtggtgcggttttccctccgtgagctccatagccgcatcgactccgtcaggaacacgcagaagatcatacctagtgactattatcacataaagaggcaaattgaatcagagctgattcaatctggtggcattgcatcgtcaaagccttttcttgacctctcaaaaccagaacatttacttcaattaaaggatcgttggaagaaatactgccagaaggcgcacaaaagagttgttgataaaccaattactgaagtcagagaagcgggaatatgcatgcgtgaaaattctttctatgtagacatagtgcgtagccacttgatgaaacctgctgtcccactaaagaaaatatatatggctgttgcacaaaaaaagggagattcttctaagagtgactctgatgatgactcggatgaggaagtgcctccagagtcaaaggctccagtagcaactatcaaaaaggaagattccagtgaaagtgagtcagagagtgtttctgaggttgagaactatttagaacccatagctcttattgaattgtacattagttttgtgactggaagtcgtgtgtttgcagtcaattgcagacacatgatgatcttgtttgttattgcaagaacctga

SEQ ID NO: 87438 - DNA, 2529 bp, Zea Mays
atgaggatgctagcaataagatatctgcataggactgttgctgcaaaagccgatacgattatggcgctgaagctatgcaggaggctatcaggatttattgttggtgcgaattctagatgttgtaggctaagtgatgttgataagtttgctttactgttccaaaactgcacagatgtgaggtctctgaagaagctccatgctcgtgttctgacacttggacttggcagggatgttattcttggctctgaaattttgatttgttatgctagtttaggtgtcctgtgcaagacaagactttgtttccaaggcttcttaaataatgatcttgctgagtggaattcagtcatggttgacatttttagggctggttatcctgaggaagctattcttttgtacagaggattgaagttgcgtcagattgacttagatgagaaaactgttacttttggcttgaagagctgcattgaacttcggaatttgttattgggcaaaggaatgcatgcagactcagtaaagcttggcctcagtagggataaatttgttggttcttctcttgttgggttatactctaagcttgccagaatggatgattcacagaaggcatttgaagagattctggacaaggacatcgtttcttacacctcgatgatcactggttattctgaaaatatggattctacttcatggaatgcatttaaaattgttagtgacatgtcgtggagcaacttggaagtaaatcgtgtgactctggttagcttactgcaagttgcgggtaatctgggagcaattagagaagggaaatcagtacattgctattcaataaggagagatattggtatctcagatgaagttctagagaccagccttgttcacatgtacatgcaatgtggagcttgccaattagcatctgctgtcttgaaaaattcggcgcaatctgtggcttcctggaatgcaatgcttgctggtcttgttcgaaccggacagagtggaaatgcaatacactatctttatatcatgctatatgagcataaggtagttccagattctgtaacctatgcaaatgtgatatctgcttgtgctgagctatgcaattcaggctatgctgccagtgttcatgcctacataattagaaggtctattcctctagatgtagttttggccacagctcttatcaaagtatacttgaaatgcactagaattacgatatccaagcgtctctttaatcaattggtggttaaagatacagtctcctataacgccatgatctatggttatctccaaaatggcatggtcaatgaagctattgcgttgctcaaagaaatggtgacagaatgtgttgcaccaaattttgtgaccattcttagtctgcttgcagctatcgctgatcacaaagattttgctagagggaggtggattcacgggttttcaattagacatggtttttgttccaatgtcgacattgcaaatcaaatcatacgtatgtattctggttgtggaaagattgcatcagcaaggattgtatttgcttcatttgaaaacaaaaatttaatttcatggactaccatgatgatgggatgcttattctgtggacatggaggtcaaacagttgaattatttcaattattaatgcaacaacacgacaataaacctgattctatcgctgttatgactgcaattcaggctgtttctgagtttggacatttgaaaggtgtaaagcaagttcattgctttgtctaccgtgccttgttggagaaagatacgaagaccatgaattctttgataactgcatatgccaaatgtggcaggttggatttatcagtaagtttgttcttgagtttggaacacagagatctagattcatggaattctatgatcagcgcttatgggatgcatggattttatactaaggtacttgaaatgtttaagctgatggaagaaggaaatattaatcctgatgggttaacattttcttcagtgctttctgcatgcagtcatgctggtctaattaaggagggtctgcatatttttcagtcaatgacctcaatgtattcagttcgtccacaggaagagcattatggttgctttgttgatttaatgagtcgagcgggacatcttgaagaaggatacaagttcataaagttatctaccttaaatgacaaatctagtgtactttgtgctttactttctgcatgcagaacttatggaaatacaatgcttgggcaggttattagcaatgagctccttgaggttggacaacagaatccaggtacttatgctttgatttcagaagtatttgctcagaaaggacaatggaataaatcagctagtataaggaatagagcaaaagaaaatgggttgagaaaacttcctggttctagcttgatcgaatcagtggagcaagttagcaaggtgtgttagacaggtgtaagagcatcacatgtaattggtgcctttatcatgtgcttgaaccaccattcaatctcaatatgaagcaaaattttgttatgctctgaaagcctgaaccatttt

SEQ ID NO: 87439 - DNA, 75 bp, Zea Mays
acttggagagtaggtgagagctcaggtgcacgccaagacaaacggtggggaactatagcttctcgttatgcgtgt

SEQ ID NO: 87440 - DNA, 662 bp, Zea Mays
tccctctccgtttcttcccctacttccctccgcatggcggcccgcgaggcctccgccccggccccgtcgacgccccacgctggagacggggtgagccgcccgccgcggcctacgctcgccctgcccccgcgctccgtcatcgagtccctcttcgccgccggcgccgccgagacaagccccggcccgctcaccctcgccgccgcgctcttccccgacgcgccctccccggccttccacggctccttcacccagctcctcgtcggcgccataggctccccggccgtaccctcgtcgccctccccgttcgctgtcccgccgaggctcagccctgccacgctcttgggctcccccggcttcttctctcccacggcattccctcaactccgtttacgaattggaccaccagatgccctcatcactgcaccagtaccactgtaccagtagcttaataaaaagccgcagggaatatgcttgctactacgtactatttactgtatcctaatagtgttgcggattcgtgagggttgtacggcgtggagggtgcctaccttggacccgccctgggagatgtgcttcaggactggaaaggccaagctcgattacccgtggtcctgctcagtactcactactttggaatgctgtgcactactttggacttcaaa

SEQ ID NO: 87441 - DNA, 877 bp, Zea Mays
ccacgcgtttctttaccctaacctttccactgctccagcgaaggcactcagcctccgccatttcttcatctccaatctccatccttccatcttccgctccctcccctgcttgcgctcggcacgcaggcgacctcggcggcgctcgggctcggtctctcagcgacggcgtcagcagattcccctcctgcctctcgccagtcccctcgccactggtcctctgcgaaccggccggtgactctgcgaaactattccagcacaggtacccaagtatggcggcaagacgcaatgttcggtactcgcctcttccttcagaggacggggatgacagcaattttattaaagaagatgttgacctccgatacacttacactccgaaatcgtacagaaggatcccatggaagtcaattgccctggcattgttcctcctcctcctaggaacttcacttctctttctttcttacttcatattcacaggtcacatggagggtgatagttctcaggcatatggtctcttgttcctgggtttcctttcctttcttcctggtttctacgagactcgagttgcttactattcatggcggggagcaccagggtacacttttgcatccataccagattattagcctttcagtttgcgctgctgatgcagtaaggataatgaacaagcaaacaacttcaaactttccttgggaaccaattttagtgataaaagagttaagcatgcatatgtagtggctcaaatgattgttgtgtttataggatgttattgcttcgtcggtcagtaaaagaataattccttgtgatattgtgtaagagcaaaggttgattttgcaatttcttggtatttccttgtcaaatataacagaaattagtgcca

SEQ ID NO: 87442 - DNA, 782 bp, Zea Mays
aggtgcagatagacctgaagcgaatggacaggtgtgtatatcacaaaaggaggcaggtgcgtatcgtatgtacttgtggatggcgacggcgatttgaagcacgaggacaactgcagtgcgggtggctgacggtagcgggtcacaggtgtggatgaccggcagtgaaatggacttgaggaggtgtacttcaatagaggagcgcccaagcggcgaatcagggctgctgcctttgctgcctgccaccaagagctccagttctgccctccaccttctcgttttccctcctcctctctccttgaagttgcgtgagctccaagcggtcgatttcctgttcaaaagagcacatatgtgattcatgtctggcgtccgctgcagttctataggcgtcttcctgacgccatttcatgcctaggcaacacctaatcatatagggcggatgcatcccgaggtttctacgagactcgagttgcttactattcatggcggggagcaccagggtacacttttgcatccataccagattattagcctttcagtttgcgctgctgatgcagtaaggataatgaacaagcaaacaacttcaaactttccttgggaaccaattttagtgataaaagagttaagcatgcatatgtagtggctcaaatgattgttgtgtttataggatgttattgcttcgtcggtcagtaaaagaataattccttgtgatattgtgtaagagcaaaggttgattttgcaatttcttggtatttccttgtcaaatataacagaaattagtgcca

SEQ ID NO: 87443 - DNA, 787 bp, Zea Mays
aggtgcagatagacctgaagcgaatggacaggtgtgtatatcacaaaaggaggcaggtgtggatgaccggcagtgaaatggacttgaggaggtgtacttcaatagaggagcgcccaagcggcgaatcagggctgctgcctttgctgcctgccaccaagagctccagttctgccctccaccttctcgttttccctcctcctctctccttgaagttgcgtgagctccaagcggtcgatttcctgttcaaaagagcacatatgtgattcatgtctggcgtccgctgcagttctataggcgtcttcctgacgccatttcatgcctaggcaacacctaatcatatagggcggatgcatcccgaggtttctacgagactcgagttgcttactattcatggcggggagcaccagggtacacttttgcatccataccagattattagcctttcagtttgcgctgctgatgcagtaaggataatgaacaagcaaacaacttcaaactttccttgggaaccaattttagtgataaaagagttaagcatgcatatgtagtggctcaaatgattgttgtgtttataggatgttattgcttcgtcggtcagtaaaagaataattccttgtgatattgtgtaagagcaaaggttgattttgcaatttcttggtatttccttgtcaaatataacagaaattagtgccaccagtatgtgtttgtgtgatggtatctgttgatgaagatagactatgtactccatttggggctttggagtatgtatataatgtggctgcaccag

SEQ ID NO: 87444 - DNA, 1960 bp, Zea Mays
gcttctcctcccgctagcgtacgtcctcccccaccccggaccgcctcaacgacggccggccgtgcggaagggagaggcgtggccattgcattgcccctcgtcaataatggcgcggcagatgcacgcgcgcacgcacgtcgccgttgctcccagcgttcagaggtcgttaggttttcatttgtaactccacaccgtgttagggcgatctggaggtgaatcgctgaaaaagtagcagaaacagcagccgcacacaggtgtccgccatgggttcctgtacctccaagtccgcgcttgatcacaggaggccggcgaggtactacaccagggggcggcgagtccacagccgccggtccatcatgccggaggcgccccagtcgcagcagctgggcgatgccagcagaggccgcatgaccggcttctccatgagcgagatcgtgcacgtggagacggccaaccggggcaagtcggagcactccaagacgttccacctcacgcagatggaatggcaccacagccagagggactctaaagggtgcagcaacgaagacgcctggttcgattctgtcagcatcctcgaagatgattctgacgacgaattcaagagcgtcgatggagacagcgacgaagacgaagagcaggcggagaagcagcaatacgcgagcgtgtccagcttcgccgacgcgctctctcgcatcggagacatatgccgcggcgtgcctttacccgacatccttgcgctgaaaggcgacggacgtcggagccagcagagcatgccgtcctccttcggcctcaaggcggtcctcatcaaggacaagagcgacgccgcagacgacgacgacgacgacggcgacggcggtggcggcaaggagacctccacgccgtcccgcctgcgcaagctgctgcagtccatcagcttcaacgagagggtgcagcagctgacgggcggcagccccgcgaagaagaagtccaccgtcattcgcctctcgtacaagacgacgtcgtcgtgcggcggggacgactacgaggacggcggcggcggcggaggcggcgaatgcggtagatctaagaagtacgttgttcgtccgaaggtagggcagacagtcccgtgcggaggagagaggccggcgacgggatgctggtcgcggatggacccgtccctcttcaagctcaggagcgacaccttcctaaaagacaagaagaaatgcgcggctccaaactacgctgcctactatccgataggcgttgacctgtttgcctgccccaagaaggtccatcacatcgcccagcacctggaccttccgcagatcaagacgcaccccaagatcccgtcgctcctcatcgtgaacatccagatgcctacctaccccgctgctatgttcctcggcgacagcgacggggaaggcttgagcctggtcctgtacttcagggtgtccgaatgctacgacaaggaggtttccgaacatttcaaggagtctatgatgaggtttttcgaggacgaaaccgagaaggtgaaagggttcacgtcagaatccactgtgagctacagagatcggctgaagatcatggccggcctggtcaacccggacgacctccagctgggctctacggagagaaagctcgtccaggcgtacaacgagaagccagtcctctcgcggccccagcacagcttctacgagggagaggactaccttgaggtggaccttgacatccaccggttcagctacattgctaggaaggggctggactcgttcagggcacgcctcaagaacggcatcctcgatctggggttaacgatccaggcccagaagcagtcggagctccctgagcaggtcctctgctgcgtcaggctgaacaagatcgatttcactgaccaagaagttccaacaatagtcaccgttgatgacaactgacgcatttgatcaaaatggtcatcacacgtgcgagctattattaactgctg

SEQ ID NO: 87445 - DNA, 976 bp, Zea Mays
actttctttttatttttctcatgtgacaagcttttcaatcgcagatgcctacctaccccgctgctatgttcctcggcgacagcgacggggaaggcttgagcctggtcctgtacttcagggtgtccgaatgctacgacaaggaggtttccgaacatttcaaggagtctatgatgaggtttttcgaggacgaaaccgagaaggtgaaagggttcacgtcagaatccactgtgagctacagagatcggctgaagatcatggccggcctggtcaacccggacgacctccagctgggctctacggagagaaagctcgtccaggcgtacaacgagaagccagtcctctcgcggccccagcacagcttctacgagggagaggactaccttgaggtggaccttgacatccaccggttcagctacattgctaggaaggggctggactcgttcagggcacgcctcaagaacggcatcctcgatctggggttaacgatccaggcccagaagcagtcggagctccctgagcaggtcctctgctgcgtcaggctgaacaagatcgatttcactgaccaagaagttccaacaatagtcaccgttgatgacaactgacgcatttgatcaaaatggtcatcacacgtgcgagctattattaactgctgcaaggctagatccatgggattcagaggcgacacaacaactgatgactccacgccttggtttctgcctaatatgttcgccgatctgcctacttttaagcacgggctttttcttgtcttccctgtaactataatataataatgtatattatatacaagacgatacaaccctgcgggtgttggtcatgttcctaacctttttgcacactccacttgctggttgcaatatgcctgcttccagatgcagaaagacattgaacctgacaatattcaaatgcccatgcatcagacggacatgtacatccataataggattttgacagaaat

SEQ ID NO: 87446 - DNA, 458 bp, Zea Mays
gcaactgtacctttatatatcctgtagaaataacatttacgaagaacaggaaggaagccgtgtatctacaaaccatgtctcatttacaggtttttaatcgagtatatacacttgggcaggtgaaagttgtcatctactatagttctccaggggaacgactgttggcatttacaaccaatggccttaatgacaacataatatacgccacgcagccagcagggtgcatagaagaagctgaggatgtgttttgtaagtctgccattctgcgactactggatgctgaactctggaccctgtgtgctacgctggtggaacatgacccattggcattggcagcggcatggctactgttcctggctgctggaacatcatggctgtgcttcccttcgtacgttgttatgatggcatttgggtcttgggatgatctttcaatatgcttcttcacatcgcacccttga

SEQ ID NO: 87447 - DNA, 114 bp, Zea Mays
gttatttttaacaagtactctatccattcaaaattataagacgttttgcctttctaggtacattgcttttgctatatatttaggcatacattatagctaagtacatagcaaaaa

SEQ ID NO: 87448 - DNA, 115 bp, Zea Mays
gctatgggttgttgtaggttgtgtcccagtgtccctaatgtagcaggagtatactccttttgtacttcttctcttctcttattaataaaacacacaattctcttgtgggttcgag

SEQ ID NO: 87449 - DNA, 1510 bp, Zea Mays
atccatgcttaaggtgaagcaagcagcacacgagacgatatagagggagggatcatggctctcttccgtgccgccgcctcaggagggttcgcgctgatccttctcgcgtgctgcagcctcataatgctggcggcggcgtctggcggcggcggcgtggacgacgacggcgtcggtggtgacaggctgatgatggaccggttcctcagctggcaggcgacgtacaaccggtcgtacccgacggcggaggagaggcagcgccggttccaggtgtaccgccgcaacattgagcacatcgaggccaccaaccgggcgggcaacctgacgtacacgctcggcgagaaccagttcgccgacctcacggaggaggagttcctggacctgtacaccatgaaggggatgcccgtccgccgtgacgccggcaagaagcgggccaacgtatcctcctccgccgctgccgtggacgctccgaccagcgtcgactggaggtccaagggcgccgtcacgccgatcaagaaccagggcccgtcgtgctctagctgctgggcattcgtgacggcggcgacgatcgagagcatcaccaagatcacgacagggaagctggtgtcgctgtcggagcaggagctgatcgactgcgacccctacgacggcggctgcaacctgggctacttcgtgaacggctacaggtgggtgatccagaacggcgggctcaccaccgaggccaactacccgtaccaggcgcggcggtacgcgtgcagccgctccagggccgcccagcacgccgccaccatctccgactacgtgcagctgccggcgggcgagggccagctgcagcaggcggtggcgcagcagcccgtggccgcggccatcgagatgggcggcagcctgcagttctacagcggcggcgtcttctcggggcagtgcgggaccaggatgaaccacgccatcaccgtcgtcggctacggcgccgactcctcctcgggcctcaagtactggctcgtcaagaactcgtgggggcagagctggggcgagcgcggatacctgcggatgcgccgcgacgtcgggcgcgggggactgtgcggcatcgcgctcgacctcgcgtacccggtcgtgtgattcatatactatcatcgtatgcatgcatgatgcgtacgtgcgtgcgcgcctgcttgttgcatatcggcggcacgtacgtacgtgtatacatatatacgtactactactacactacggattgatctgcatgctgcgacgtataccacgcatatatatatacacacatgaaaactacgtgtaatcaatcgatactagtagacatataccaacggtaacgtgttgcatcccattgtaaaagccggctatcactttcagggacaaaatgcccacattaattattataaaaggctttgttattattattgtcgtggtccagttggcacagctagcacctagcagggccaaataatgccaaattaccaccattaatgaaatattacgggccttaattaatgct

SEQ ID NO: 87450 - DNA, 456 bp, Zea Mays
atgcccctgctcgccgatggaaggtctccacgtgcaatccgccgcctgccatcgccagcgcgcaatcctttccatctgcgcccgcaacgctcgcccatgtgccaaatcctccttggacgcgccccgacggctggcgcaacccctcctcgtgccacgacttgcggagaatggaaggtccgtggagcaataaagggtggagcgaaggttattggcggcggcgggatcttcaacctatttgattggaagcgaaagtcgcgcaagaagctgttctccaactcgcccgaggggtccaagcttgttaagaggagcgaagaaacattgctgtcagggtgtctccacttgcttgatgaactcaagacactggcgaatgattgtcaacaccgtgaaatgagtctcgaagtcgttcctgatgacggggggtggtggaggttggggccgttgttgctccaggtgtag

SEQ ID NO: 87451 - DNA, 342 bp, Zea Mays
tcgttccaaatctgataaagcatgggtagcgcaagcagagatgcagggtttttcctgcgatattatgtttactgataaggagctagatataattgagatggctgtgtatggggacatcattcgtccagggaagcaatgtcgctgcagaacagtagtagaggtgctcgggcaggtgaagccaacgaatcgcatggctgcatgtgagttaccagacaaaggtgcctattaaaatgtataattcgaataaattggtttcgactctcacctgtcagaacacaaccttttgtagcgcagttgattccattcaacatgggaacttgagttctttctcacaaggcataa

SEQ ID NO: 87452 - DNA, 92 bp, Zea Mays
ccgctttggatcttgaaaacagtgaaggaaaaaacttgcagcgtcttgtccatttgtcttccgacctagctaggcatgttgccatggttctg

SEQ ID NO: 87453 - DNA, 215 bp, Zea Mays
ccttctataaacacaagctcatgtggtcgtccatcaaccaaagaggagatcaatgaagtccatcaagagaagcaaaagtttgttgaaggagcaaagaaagaagtccgaggccgtcgtgcccgtcgtatgcaggtaaacgttatgtttacaagttgcagatttcgttggcatgcacccacaaaactgatatgtaaataagacaaaattattagtca

SEQ ID NO: 87454 - DNA, 2458 bp, Zea Mays
atgtatatatgtaatataaaccgcacccaccgtacggcagaaactacacgagccatacgaccctcgccctcgccagtcgccgccacaagagtccacgacagcgtacgtgcacggtgcaccggtatccgtcctacctacgctaaagctagccacaagcccacaactcatggacgacgcgtggtcgtggctggcctccctgccgcctcctcttcgtgatgaagacgggcccgacacaccgttgccggcgccatggtctctcccgctcgctgcctccaccgacggcgcttccatcgtgctgcgggccgacacaagtcccgctgcttcttcgtctccggccgacggcgatgacggtgacggcgagcccgcgctgctcgtcgctttctccgtcgccatcaacggcgcaggcggcgacgcgcgcgcgctgtgggcgtccgaaggcttcgcggcgtcctcgccggtcgcgccgagggtgcagcttctggtacagctcctcaacgaggtactcgcgctctctccgtacgtcccttgcttgggcgcgggcgttgacggtctcggcggggacgcgtccgaggccaaggtggacgcggagacggtctccgccgtcgtcggcgccgctgaagccggtccatctgcgcccggcgcggccttcttctcgctcgctcttcttctgcggctcttctggctgtgtgcaaccgacgccccggcagacgctgggtacctctacttccgagaccttggatcggagatcgagcgcggcctcggcgagtgccggccggcgctcgccgtgttcctgcgctccgtcggcccggacgtcgaggaccggttcatgcgctcgctcgggtacatgctcgccaagtggtgcttgctgcgggagatacaggctgttgccgggtcggcggccaaactggaagcaccgcgtcgccgtcgcgcgctccccgccgcgtgcctgtcgtacgccaccgaggtgcacggcctcttgatcctgaaaggctacgcgcctgtgctcgccatgccgcgcgtcacgggtcccgcgtccacgtccatcgccgcgtcgccgcacgagctgcccgaggagccggcgctgcggtacggcctggcgcaccagcagctggaggccgtggcgcagctggagtacgcggcgcgcgtgcgtgacaggaggttcgtaaccgtctccgtgcgcgtcgacaacgtccgggtacgcgtcgcgccgctcgcgttccgtagtaatgacggcggaggtaacgacggggaagaagcagaagacgacgacgacgccggcgtcgacgacatcatggacggcgagagccatttcccatcccgtatccgcctctgggtcggcccgcggttcggcgcgtcctatgccaccggcccaagcctcggccgctccacggggaacccagaacgcgacgtcgagatgacgcgcaccgttaagggcgccttctccggcgccactaaaccagccaacggcggcgtcgtgcccaggatcaaggcgaagatgcgctcgtcggcgcggacgcgtagcaggagctggcgctgggagcaggaggccgagggcagcgccggcgtgttcgagggggttctgtacgacccggtcaccgggacggaggtgtccgcgtggcgcccagctggtactggcggcggcggcggcactggagcgacagacccgaggaacggcatgagaaggcggtatggcgggcctgggcgagcgttcagtaagatgcgagggctggtggtggccggcgacgagctgccggaggagatgacgtggagggtggggagggaagcggaagggaggacgctgcgttggcgcttagggctcaaggcttgggtgacctacctgcccaacgaagcaaggagccgccacttcgagacccgctgcatcgagtgggcgcacgaggtggatctgccgcttctggccgtcgacggcgaccagagctaataaggattgatccaatcttcacctcgatctcctctttatcagcgatgtatgatattagaggctgatagttgtagatttacgttgcacctacttcggttgtagggatcgataggacgatagcacgtgaaacatttctaataattgtaacacgagaacatctgctgcagtaaaagataaaattttcggcgactaaagtcgttgtaaataaaccataaactgtgggacataacttatgtccgatgatcaaagacttatatccgatgatatttgtccctcgatcgtaacgtgtcgaaaataacattattttcgacgacaaccgtcgaaaataacttatgtctgacgaccacaaagggccatcaacaatcgacatttaccacagttaatggttgtaacggtcgccggtgggtctcacaggcattatgttcaacgccagacgttaagccataggatataatactattttatgtccgacggcccttcgtacatccatcgacgatccttcttgatcgagaaacgcaa

SEQ ID NO: 87455 - DNA, 2100 bp, Zea Mays
acacgagccatacgaccctcgccctcgccagtcgccgccacaagagtccacgacagcgtacgtgcacggtgcaccggtatccgtcctacctacgctaaagctagccacaagcccacaactcatggacgacgcgtggtcgtggctggcctccctgccgcctcctcttcgtgatgaagacgggcccgacacaccgttgccggcgccatggtctctcccgctcgctgcctccaccgacggcgcttccatcgtgctgcgggccgacacaagtcccgctgcttcttcgtctccggccgacggcgatgacggtgacggcgagcccgcgctgctcgtcgctttctccgtcgccatcaacggcgcaggcggcgacgcgcgcgcgctgtgggcgtccgaaggcttcgcggcgtcctcgccggtcgcgccgagggtgcagcttctggtacagctcctcaacgaggtactcgcgctctctccgtacgtcccttgcttgggcgcgggcgttgacggtctcggcggggacgcgtccgaggccaaggtggacgcggagacggtctccgccgtcgtcggcgccgctgaagccggtccatctgcgcccggcgcggccttcttctcgctcgctcttcttctgcggctcttctggctgtgtgcaaccgacgccccggcagacgctgggtacctctacttccgagaccttggatcggagatcgagcgcggcctcggcgagtgccggccggcgctcgccgtgttcctgcgctccgtcggcccggacgtcgaggaccggttcatgcgctcgctcgggtacatgctcgccaagtggtgcttgctgcgggagatacaggctgttgccgggtcggcggccaaactggaagcaccgcgtcgccgtcgcgcgctccccgccgcgtgcctgtcgtacgccaccgaggtgcacggcctcttgatcctgaaaggctacgcgcctgtgctcgccatgccgcgcgtcacgggtcccgcgtccacgtccatcgccgcgtcgccgcacgagctgcccgaggagccggcgctgcggtacggcctggcgcaccagcagctggaggccgtggcgcagctggagtacgcggcgcgcgtgcgtgacaggaggttcgtaaccgtctccgtgcgcgtcgacaacgtccgggtacgcgtcgcgccgctcgcgttccgtagtaatgacggcggaggtaacgacggggaagaagcagaagacgacgacgacgccggcgtcgacgacatcatggacggcgagagccatttcccatcccgtatccgcctctgggtcggcccgcggttcggcgcgtcctatgccaccggcccaagcctcggccgctccacggggaacccagaacgcgacgtcgagatgacgcgcaccgttaagggcgccttctccggcgccactaaaccagccaacggcggcgtcgtgcccaggatcaaggcgaagatgcgctcgtcggcgcggacgcgtagcaggagctggcgctgggagcaggaggccgagggcagcgccggcgtgttcgagggggttctgtacgacccggtcaccgggacggaggtgtccgcgtggcgcccagctggtactggcggcggcggcggcactggagcgacagacccgaggaacggcatgagaaggcggtatggcgggcctgggcgagcgttcagtaagatgcgagggctggtggtggccggcgacgagctgccggaggagatgacgtggagggtggggagggaagcggaagggaggacgctgcgttggcgcttagggctcaaggcttgggtgacctacctgcccaacgaagcaaggagccgccacttcgagacccgctgcatcgagtgggcgcacgaggtggatctgccgcttctggccgtcgacggcgaccagagctaataaggattgatccaatcttcacctcgatctcctctttatcagcgatgtatgatattagaggctgatagttgtagatttacgttgcacctacttcggttgtagggatcgataggacgatagcacgtgaaacatttctaataattgtaacacgagaacatctgctgcagtaaaagataaaattttcggcgactaaagtcgttgtaaat

SEQ ID NO: 87456 - DNA, 1774 bp, Zea Mays
agactagtcgtcgactcgtcgtctcggaatagggtaggcgaggcgacccgaatccgcgtggggacacgtttgcgcggctgcagccgcgcaataactactgggcaccggcgcacgaacgccgcgtgctccccgaccaccagctccaattccctccctccaaagcccccccccccaatcccttcacactgttctgcccaacacccaattgaagccgtcccaatcccaaccctactcccttgcctccccctaatgacatcgcctggcggcgtcttctccgccgcgctcgtcgccgaggacttcccttgggtgcgtggcttgtgctggtccagcccgattcgtccatttatttgttgagccaggagaggtggacatggaggaggagatggggatggccccggacatgtaccgcgaggtgttcgacctcgcgcagcgcgggacacgagcctttcgcgaccgcctcttcgacgaggcaatatcctgttacactaaagctcaaaatttgagaccagatccaattatccttggcaatcgaagtttgactttctgccggttaagtcaactgttgagggagagatcagcagctgactctgaatatcagcccttgaatggccttgatcctacaactcatgcagagttagctctgaaggatgcagagaagatattatctatcaacagtaattctcctagaccatatattctcaaggcatatgcgctatttctgatggagcattaccatgaggcacgtgagacccttcttgctggtcttcaagttgatcccctcagtcatgtcttgcaaacctgtctgaatgatctggataggaatacaaatattgcagctggggcaaggcgtgcaaggttagctaggattgatgattttgagtgcacattatgctttaagctattgtatgaacctgtcactacaccatgtggccattcattttgtcgctcttgtctacatcagtcaatggatcatggtaataagtgccccatgtgtcggacagtattatttatcggtccaagaacatgccctataagtgtaacattaagcaacataattcagagaaatttcccagaagaatatgctgagaggaggtcagaacatgagactatgacatatgctggtgttgatttgatgcctctctttgtcatggatgttgtacttccatcccaaaagatggcactgaacatatttgaacctcgctacagactgatggtacggagaataatggaagggaaccatcggatgggaatggttgctattgattcggcaacgggtactgtagcagattgtggctgtgaggtggaaatttcagagtgtgaaccacttccagatgggcgcttttatttagaggtggaaggcacacgtcggtttcgtatcgtgcgatcatgggatcaagatggatatagagttgctgaagttgaatggttgaaagatatacctctgccagaaggttcacaagggagaagagaactaatggaactggccaatggagcttcagagctggccagggcatatatcagacatgctagagataccgtacggactgcaaggcgaacaagacatctggatcttgagggcatgcctgggccacaggacccggaaaaatttagtttctggctagccaacttgataagtttgaggccctcggatagattagatacgttacgccttcgcgacactagggagagaatttctagtagcatcagtttgctccgtgattccgaacaaggctgccgtgtacaatgacggaaacagtacaagaatcgtttccac

SEQ ID NO: 87457 - DNA, 1597 bp, Zea Mays
agactagtcgtcgactcgtcgtctcggaatagggtaggcgaggcgacccgaatccgcgtggggacacgtttgcgcggctgcagccgcgcaataactactgggcaccggcgcacgaacgccgcgtgctccccgaccaccagctccaattccctccctccaaagcccccccccccaatcccttcacactgttctgcccaacacccaattgaagccgtcccaatcccaaccctactcccttgcctccccctaatgacatcgcctggcggcgtcttctccgccgcgctcgtcgccgaggacttcccttgggtggacatggaggaggagatggggatggccccggacatgtaccgcgaggtgttcgacctcgcgcagcgcgggacacgagcctttcgcgaccgcctcttcgacgaggcaatatcctgttacactaaagctcaaaatttgagaccagatccaattatccttggcaatcgaagtttgactttctgccggttaagtcaactgttgagggagagatcagcagctgactctgaatatcagcccttgaatggccttgatcctacaactcatgcagagttagctctgaaggatgcagagaagatattatctatcaacagtaattctcctagaccatatattctcaaggcatatgcgctatttctgatggagcattaccatgaggcacgtgagacccttcttgctggtcttcaagttgatcccctcagtcatgtcttgcaaacctgtctgaatgatctggataggaatacaaatattgcagctggggcaaggcgtgcaaggtaataagtgccccatgtgtcggacagtattatttatcggtccaagaacatgccctataagtgtaacattaagcaacataattcagagaaatttcccagaagaatatgctgagaggaggtcagaacatgagactatgacatatgctggtgttgatttgatgcctctctttgtcatggatgttgtacttccatcccaaaagatggcactgaacatatttgaacctcgctacagactgatggtacggagaataatggaagggaaccatcggatgggaatggttgctattgattcggcaacgggtactgtagcagattgtggctgtgaggtggaaatttcagagtgtgaaccacttccagatgggcgcttttatttagaggtggaaggcacacgtcggtttcgtatcgtgcgatcatgggatcaagatggatatagagttgctgaagttgaatggttgaaagatatacctctgccagaaggttcacaagggagaagagaactaatggaactggccaatggagcttcagagctggccagggcatatatcagacatgctagagataccgtacggactgcaaggcgaacaagacatctggatcttgagggcatgcctgggccacaggacccggaaaaatttagtttctggctagccaacttgataagtttgaggccctcggatagattagatacgttacgccttcgcgacactagggagagaatttctagtagcatcagtttgctccgtgattccgaacaaggctgccgtgtacaatgacggaaacagtacaagaatcgtttccac

SEQ ID NO: 87458 - DNA, 2256 bp, Zea Mays
agactagtcgtcgactcgtcgtctcggaatagggtaggcgaggcgacccgaatccgcgtggggacacgtttgcgcggctgcagccgcgcaataactactgggcaccggcgcacgaacgccgcgtgctccccgaccaccagctccaattccctccctccaaagcccccccccccaatcccttcacactgttctgcccaacacccaattgaagccgtcccaatcccaaccctactcccttgcctccccctaatgacatcgcctggcggcgtcttctccgccgcgctcgtcgccgaggacttcccttgggtggacatggaggaggagatggggatggccccggacatgtaccgcgaggtgttcgacctcgcgcagcgcgggacacgagcctttcgcgaccgcctcttcgacgaggcaatatcctgttacactaaagctcaaaatttgagaccagatccaattatccttggcaatcgaagtttgactttctgccggttaagtcaactgttgagggagagatcagcagctgactctgaatatcagcccttgaatggccttgatcctacaactcatgcagagttagctctgaaggatgcagagaagatattatctatcaacagtaattctcctagaccatatattctcaaggcatatgcgctatttctgatggagcattaccatgaggcacgtgagacccttcttgctggtcttcaagttgatcccctcagtcatgtcttgcaaacctgtctgaatgatctggataggaatacaaatattgcagctggggcaaggcgtgcaaggttagctaggattgatgattttgagtgcacattatgctttaagctattgtatgaacctgtcactacaccatgtggccattcattttgtcgctcttgtctacatcagtcaatggatcatggtaataagtgccccatgtgtcggacagtattatttatcggtccaagaacatgccctataagtgtaacattaagcaacataattcagagaaatttcccagaagaatatgctgagaggaggtcagaacatgagactatgacatatgctggtgttgatttgatgcctctctttgtcatggatgttgtacttccatcccaaaagatggcactgaacatatttgaacctcgctacagactgatggtacggagaataatggaagggaaccatcggatgggaatggttgctattgattcggcaacgggtactgtagcagattgtggctgtgaggtggaaatttcagagtgtgaaccacttccagatgggcgcttttatttagaggtggaaggcacacgtcggtttcgtatcgtgcgatcatgggatcaagatggatatagagttgctgaagttgaatggttgaaagatatacctctgccagaaggttcacaagggagaagagaactaatggaactggccaatggagcttcagagctggccagggcatatatcagacatgctagagataccgtacggactgcaaggcgaacaagacatctggatcttgagggcatgcctgggccacaggacccggaaaaatttagtttctggctagccaacttgataagtttgaggccctcggatagattagatacgttacgccttcgcgacactagggagagaatttctagtagcatcagtttgctccgtgattccgaacaaggctgccgtgtacaatgacggaaacagtacaagaatcgtttccacagaccaattcgttcgtctaggagtatatcgatttggagctactccgtgattccgaacaaggctgccgtgtacaatgacggaaacagtacaagaatcgtttccacgtaccaattcgttcgtctaggagtatatcgatttggagctacaccgtgattccgaacaaggctgccgtatacaatgacggaaacagtacaagaatcgtttccacagaccaattcgttcgtctaggagtatatcgatttggagctagggatgtaatatggttcagaaaatatctgtccagatccagactcgaagatggtgaatactggttcggatagaattttcggatatccggacttttttcggataacggatataaatacggatattttattcggatattgaattcgaatacaatatgtttgatatctgtcggatatcaaatatccagatattttctcggataaatcttctcggatatccggatatcttatctggatagctgtgtgtattttgttgatttttttagaaaaaatttaataatacacaaatatcctc

SEQ ID NO: 87459 - DNA, 153 bp, Zea Mays
cctctccagcttcctcctttttgcccccctaccttccaaccatccaagaaacccacacaaggccaacccacgcccacgccgcgccgcgccacgccaaaaggagcccaagaagctgtgatcctgctgccccggaagaagctgcgcagcagtacc

SEQ ID NO: 87460 - DNA, 3388 bp, Zea Mays
atggagggggaagcggtgcccaagaacgagaggaaggccggcggcggcggcggcggaggcgttagcaatgacggtggcgcgagcgcgaatgcgaggaggaggtggaagggcggaggcggcaggcatcacccgatcatccaggcctacccggcgctcctgccgttgccgctacacgcgcgtcgcaacggcatcatcgcgctgccgctgccgccgcccgtgctggtctacttgcaccagccgccgccgccgccgctgctgttccccaaggtgccggcgtgctacgggaagcccaccggccccccgctgcttagggggccgccgtggagatcgaggaagccgccgccgccgccgcacgccgtcaccgccgcgctgctgccgctaccgcacgataccgagctgattcagcacaagtgcttcattcacgagaaccaaacatcagaaacgaagccaaatcatctgagcacccatcacaactcatccaccaccgtgcatggagttaccgttgcgaccagaccagacagtggcggtgttggggggactgcaattcctctctacgcaaaccatttcctcgtgcgtttcgatcccgggcagaagatctttcattacgatgtcgacatatccccgcacccgtcaaaagaaacggcgagaatgatcaagaacaagctagttgaggaaaactcaaatgtcctctcgggcgcccttccggccttcgatggccgcaagaatctatttagtcccattgagtttcaacaggacaggcttgaattcttcgttagccttccagcagctgcatcaacaaggtttatagcagctaaagagaatgcccacatggttgacaggcacaaccataaggttttcagggtgaaccttcggttggtttcgaagctgagcggcgaggacttgaacaagtatttgaatgaagagaaggatggcattcctcttcctcaagactaccttcatgcactggatgtcatcctgagggaaggcgctatggagaaatctattcccataggccggtctttgtattcgcgttccatgggagaggcgaaggagattggtggtggagctgtcgtgttacgaggtttcttccagagcttgaggccaacgaagcaaggtcttgccctcaatgttgacctctcgcttacagcgttccatgaaaatacgggcataatcgcatacttgcagaagcgctgtgactttatgaaggacctttcgcaggtgaagactagggcattggcggtagatgagaggagggaggtggagaaagcattgaagaacatccgagttttcgtgtgccaccgtgaaactgaccaaaggtaccatgtgcatggcctgaccgaggagacaacggagaacctcaagttccgagaccgcagcggcaaggattatacggtggtagattacttcaaagagcactacaaccatgatattaaattcaggaacctgccctgcctgcagattggtaagagcaagccatgctatgtgccaatggagctttgcgtggtttgcgagggccagaagtttcttggcaagctctcagatgaacagacctccaaaatgctcagaatgggctgccaaaggccaagcgaaagaaagggaatcataaagggtgttgttgaaggagcatttgctacaagaagcaattcgtatgcggatcagttcaaccttgaagtgtccaaggacatgactcagctattggggagggtcctcttgccaccgaaactgaagctcggcaagggggggcgcatcaaggatctaacaccggacaggtttgatcggcaatggaatttgatggacagccatgtcgccgagggttccaagatcaagagctgggctttgataagctttggtggcagcccagagcatcagtctttcattccaaagtttatcaaccatctagcaagccgctgtgagcagcttgggatcttactcagcaagaaaacagtcgtcagcccattgttcgagcggatccaaatcctgaacaacgtgggcgttctggagagcaggctgaagaaaatccaggaagctgcctccggcaatttacagctgctaatctgcgtcatggagcggaggcaccggggctatgctgatctgaagcgtatcgcagaaacgtccattggcgtcttgacgcagtgctgcctgtattccaacttgagcaagctaagcttccagttcttggccaacttagcgctgaagataaacgcgaagcttggcggatgcaacgtcgccctctacaacagcttgccgtgccagattcctagggtgttttcggacgaggagccagcgatgttcatgggtgccgacgtgacacacccgcaccccctagacgactcgagcccgtccgtggtcgccgtggtcgcgagcatgaactggccttcggcgaacaagtacatctccaggatgaggtcgcagacgcaccgcaaagagatcatcgagcgcctggacgtgatgaccggcgagctgctcgacgagttcgtgaaggaagtcggcaagctccccagcagaatcatattcttcagggacggcgtcagcgagacgctgttctacaaggtgctgacggaggagctgcaggcggtgcggctggcgtgctcgaggcacccgggctacaagccggcgatcacgttcgtggtggtccagaagaggcagcacaccaggctgttccacagggagaagaatggcggcggtggcggcggctccacgcactacgccgaccagaatgtgccgccggggacggtggtggacaccgtgatcacgcatccgagggagttcgacttctacctgtgcagccactggggcaccaaggggacgaccaggccgacgcactaccgcgtgctgtgggacgagaacggcttcgggtccgacgagatgcagcagctgatacacagcctttgctacacgttcgcccggtgcaccaagcccgtgtccctcgtcccgccggcgtactacgcgcacctggccgcgtacagaggacggctgtaccttgagaggtcggactcggcggcgaccggccggacgactctgtacagggcggcgccattgcagactgcgccgctccctaagctcagagatagcgtgaaggggctcatgttctactgctgatcttatgatgatttttagtggtggttatgaaggggccggcgttctctttgcccatatatcgcgtgcgttctatattctggtgttgtattatttgggaatcatgtatagtgtctgtggagcggcatgtgcaagactgcgagtctgcgatgctcatgatactttgctagtggcatgcaaaaaattccgatccctaactgttaggtgtactagagtattggtagggacccgtgtgcatgtaggatggggcctcgcattttgcaccgtgtgggtaggcacgctggccttggaa

SEQ ID NO: 87461 - DNA, 881 bp, Zea Mays
cggtgcatcttttggtttcggtggtaaacttgtttctttccatccggtggcacccacccaaggtgcgcaaacatctacatctgaggtacatgtgcacaatttggtgattgagcaaagtctggtgagccgatcaactgaatttgaagctgttattcagaatggcgacaaaagttcgctacgtgctgtgtgaaaaaaaatcacaagaatctttatctgacgaggagagagaaacctggggcttcttaagggttatgttcgaggacggggattttgcaaggacaaaattgcttgctcatcttggcttcgaaccacctcaggcaccgcctgcaagttcaactgatgaattgagccaaatattggcagatacacttaatattgatcatgctgcagtaaccgataatgcggatgcccagtttcttattgataatggggatgattttttcaacaatcctcaaccttcagaggctagcttggctgaagaatcagtttctacaaatggtcaacatatagaacaggaagtttctggagatgctgtgccatcagatccatcaattgacaaaagcattcaacatgcgttggtggttggagactacaaaggggcagttaaccagtgtcttgcttctaatcgtatggctgatgctttggttatagcccatgccggtggttctgctctctgggaaagcacaagaaatcattatctcaagaacagtatctcaccctacttaaaggttgtctctgctatggtgggcaatgatttaatgagttttgtgagtacctggccactaagttcatggaaagaaactcacgtccacctatggacctaccccctcgcctcacagcatggccgccggcttggtgtcgcccctgaccaaggttattaa

SEQ ID NO: 87462 - DNA, 2487 bp, Zea Mays
tccacacccatccttccatccaccatcaggtcagggcatcacacttcacacaacaacaacaactcctcctcctcctccaccatcagggatcgtctccaccgcttggctcaaccaactcctctgctcctgttcaatcgaccccacctctctcgctcctattccaccgggatcccatttccatccggacgatggcggtgatgaccgacatgcccgcggccacggcgctgcgcgcgccggcgccggccccggcgggctgcgacggtcaaaaggacgccgagaagctgaggttcatcgaggagatgacctccgacgtcgacgccgtgcaggagcgcgtcctggccgagatcctggccaggaacgccgggaccgagtacctcgcccgctgcggcctcgccggcgccacggaccgcgccgccttccgcgccaaggtgcccgtcgtcacctacgaggacctgcagcccgacatccagcgcatcgccaacggggaccgctcgcccatcctctccgcgcatcccatctccgagttcctcaccagctctgggacttcggccggcgagcgcaagctgatgccaactatcaaggaggagctcgaccggcgccagctgctgtacagcctccttatgcccgtcatgaacctgtacctgccggggctggacaagggcaaggcgctctacttcctgttcgtcaagtcggagacgacgacgcccggcgggctgacggcgcggcccgtgctgacgagctactacaagagcgagcacttcaagaaccggccgttcgacccgtaccacgactacacgagccccacggcggccatcctgtgcgccgacgcgttccagagcatgtacgcgcagatggtgtgcgggctgtgccagcgccacgacgtgctccgcgtgggcgccgtcttcgcgtcgggcctgctgcgcgccatccgcttcctgcagctgcactgggagcagctcgccgacgacatcgagtccgggtcgctgaccccgcgcgtggccgacccgtccgtccgggacgccgtcgcgcgcgtgctccgcggggacccggagctggcgcgcttcgtccgcgccgagtgctcccgcggcgactgggcgggcatcgtcacccgcgtgtggcccaacacccggtacctggacgtgatcgtcaccggcgcgatgcagcagtacatccccaccctggagtactacagcggcggcctccccatggcgtgcacaatgtacgcctcctccgagtgctacttcgggctgaacctccggcccatgtgccgcccgtcggaggtgtgctacaccatcatgcccaacatgggctacttcgagttcctccccgtggacgaggcgagcggcgtggcccccggcgacgcggcgcagctggtggacctggcccgcgtggaggccgggcgcgagtacgagctggtgatcaccacgtacgcggggctgtaccggtaccgcgtcggcgacatcctgcgcgtggccggcttccacaacgcggcgccgcagttccggttcgtgcgccgcaagaacgtgctgctgtccatcgagtccgacaagaccgacgaggcggagctgcagcgcgccgtggaccgcgcgtcggcgctgctccgcgcgcgctgcggcggcggcgcggcggtggtggagtacacgagccacgcctgcacccgcagcatcccgggccactacgtcatctactgggagctgctggccaccaccaaggccagcaagcagggggcggcgcaggccgtggcgggcgacgtgctggagcgctgctgcctggagatggaggaggcgctcaactcggtgtatcgacagagccgcgtggcggacggatccatcgggccgctggagatccgggtggtccggtcgggcacgttcgaggagctcatggactacgccatttcccgcggcgcgtccatcaaccagtacaaggtgccccgctgcgtctccttcccgcccatcgtggagctgctcgactcccgcgtcgtgtcgcgccacttcagcccggcgccgccgcactgggcgccagctgctcgcccgtcgtccgactagaccgcggtgcagcgtcacgttcgccgcttgattggtcgcacctagtagtagtagcagcagcagcattagcgtttgttttttttttctggtcgtgtcaggcggggcagtgatgatgcttgtgttaattattaggccagtcgctctgagctagaggagtgtgtcgatgtaatgtgggtgtgggtgtgggtgggtggacactctgcaagttgttgctgggtgttgttgatcactggtagtgcagtgcttagtgagtggtgccgttgctagtacaagtactagagttgtatcccaacaaggaaatgtgagtattgacgtgcctggatggtggtatggtatcgctgtgtttgtcgcgttttcactgctagtggtagaattggaactcgtcagggatgatttgctgcaaataatgataaaatccagagttgcagcatgagtatcgtag

SEQ ID NO: 87463 - DNA, 394 bp, Zea Mays
tattttgcaatgtgttgatccttattggtccctagtatataacatgcaaacctggcacagatagcaagatgtttgaattacaggagaactggtgctgataaatgagcaggataataaggatgcagaacaacagtatagaagtgaatagcaaggatgaattattattagggaacaatcttgaagaccttcagcttctcgatccatgtgttgaaagagctgacagtgttcctgaagccgaggaagccatgctccttgcttttgttcatgctgtccagaagctgggtctccacagcaaacatggcatcgacgaaccaccaattcgtgatctcgtcaagctccgtggctataaggtcgttttccctgacaatctctgcccagacagcttccttcccgg

SEQ ID NO: 87464 - DNA, 483 bp, Zea Mays
gaggatgtcctccatgtcgtagtagaagttggggcagtcgaggcgcggcatgtcctcggtgaagggcgggtccggggcggcgaccttgccgatggcctcgaaggggccgacgtagtgcttgcggccggtctggaggcagacgtggacgagcgcggggcagttcgggacgacgacggagaggacgttacggagcatggcggagttggcctcccggttctccgcctcggtggggcggttggtccaggcgacgaagaagacgtgggtgatgtcggtgaggggctggagagcctccgcgacggcggcggagtcggcgaggtcgaggtggaggatgtcgaggagggaggtgccgacgatgccggtggatccgacgacgagggcgacgctctggtaggagggctcggcggcggccgcctgctcgtcctggcgcttcttgaccgcgccgatcgcgcccgtccaccaccaactcatcgcggctggggctcg

SEQ ID NO: 87465 - DNA, 1055 bp, Zea Mays
ccaaaaacaagaagcccagaaaacaaaaggagcagcttcgattcgagatcgcggcgccatcgaccatgcagctcaagaatcgccgcgaagccgtgacggcgacagtgctcgtggccgtatcagtcctggcgaccctggcgcgcaccgacggcgccctctgcgacaagtccgacaaggcagccttgcttgccgtgaagtcggcgctgggcaacccactggcgctctccggctggaactccaccgtggcctgctgctcctgggagggcatctcctgcaacgccaccaccggccgcgtcaccgacctgaccgtcttcgcgctcaacatctcggcgccggtcccggccgccatcgccaacctcaccgcgctgcagagcgtcaacctggcctacaaccagctgtacggcagcatcccggcgttcctgggcccgcgcgcgctgccggacctcaccttcctccgcctcgacggcaaccggctctcgggcgccatcccgcccacggcgaccgtcttcaacctcctcctcgtcggcaaccgcctcacggggccgatcccggccgccttcgccggcgcggcgttcggcgacgtggagctctcggacaaccagctcacgggcgacgcgtcggcgctgttcggcgccgagaagccgctgaacgcgctgtccctgtcgcgcaaccggttcaggttcgacctcggccgcgtggagctgccggaggcgatggacatcctggagatcgaccacaacatggtgtacgggagcatcccggccgccgcggcggagaggaagtggctggcgttcgacgtcagctacaaccagctgtgcgggcccataccgcaggggcggtacacgcaccggttcggggccaagcacttcgctggcaacaagtgcctctgcggccgcccgctcccgccgtgcgcttattagaagaaggccggaacagtacattcatactagtataatagctttattattggaataatgatcctccgtgctgctgtactcgaacgttttgtaatcttgaagcgagccattattaagatatcctgtggcatctatatg

SEQ ID NO: 87466 - DNA, 969 bp, Zea Mays
atggcccggcagctcgccgctgccgccgccctggtggccctgtgcgtagccgcactcggtgtggccgctcagccacctgcgccgcgcccgctgccatccaactaccagatgatcaacccgggcaggtacaagagggaccagcagctggcgtgcgacgatcccaaggacaacaagcccaagtgcatggccaagtgcgacaagcgctgccccaacaagtgcatcgtcctctgccccggatgcaagacgttctgcatgtgcgacttctaccccggcgtgtcgtgcggcgacccgcgcttcacgggcggcgacggcaacaacttctacttccacggcaagaagggccacgacttctgcatcctctccgacgccggcctccacatcaacgcgcacttcatcggcaagcgcaacccggccatgaaccgcgacttcacgtggatccaggcgctcggcatccgcttcggcggccaccgcctctacatgggcgcccggaagacggccaggtggagcgacgacgccgaccgcctcgagctggccttcgacggcgagcccgtcagcgtcccggccgaggccggcgccgcgtggcagccagccgccgcgcccgggctcaccgtcgccaggaccgccgccgccaacggcgtgcggttgcagctccgcggcgtgttcgacatcgtggccagcgtggtgcccgtcagcgcggaggactcgcgcgtccacggatacggcgtggcggaggacgactgcctcgcgcacttcgacctcggcttcaggttcttcgggctcaccgacgacgtgcacggcgtcctcggccagacataccgccccgactacgtcaaccgcctcagcgtcagctccaagatgccggtcatgggcggggcgcctagctacgtctcctcggacatcttcgccaccgactgcgccgtcgccaggtttggtgcccgccacgccggcatcgccatggttacagctgag

SEQ ID NO: 87467 - DNA, 1657 bp, Zea Mays
cagcgaccgataacaacctgtttcaataatcaggtttggacgtttggtacaactgagtttgaataacttgcaattacattggttttttttttcatacacatggaaggagttccttgctaatttggtccgatctatctccttcgcaaagaacccagaactatacaagcacatcgatcctacagccccaaatgatgatcatcgacaccaacatatacaagatggtaatttcatacgggaaaaaaaagaacacaaatgacatgaagagcttctgaaggacttcagatgtcagagcatccaacatggtagcctacattagacgaccaatggataacacatacatatatgctacactttccaccgccaacactacataacacctttgaaaccttattagaacatcaaatagatgcgatcctacgttgaacaattaagcaagatacaaacagacaagtagacagcttcggatgctcatcgtcttggaggaacgattgaccaacctagactgcgatatcgtgctggatgtgtcggagtaagacagggattacaatgtccggagagctaagctggggaagatggccttcagagggcatcacctccacgatggagtcgccaccaaggtgcctgtgcaggtactcagacaccacgaccggcaccgcgagatccttggtgctctgaacaatgtggcatgggacagtgacgtgcgggaggaggctgcgcacgtcgctctggaagatcgtctgggcaacactaagcgcaatgtccggacgtatattgaagagcgtcctgctaaactcctgaactgccactgattccatgtctccgccaacacacaggggcgcaaaacctgagcaccaggccttgtagtttgatcgcatcgcctcaaacagctcatcaagctcatcttgctcaaacccgccatagtagtccacatcattgagttaccttggggacgcggagaggagcacgagcttggtgaagaggtcaggcctggagatggaggcgagcgcgccgatgaccgcggagacggagtggccgacgtagatgcaggagcggacgccgagctcctggaggatggcgaggaggtcgagcgcgtagccctcgagcgtggcgtagcgggagaagtcgaagtagtccgggttggtggggccggcgcccatggtgtcgaagagcacgacgcggtagtcggcgacgaggtgcggcaccaggtgcttccacacggactggtcggtgccgaagccgtgcgccagcacgatgaccccgcgcttcccctcgcccaccactcgcaggttgtgcgcctcctccacgatccccatgccgcggggttggttcctcgtggggacgcgctgggcgggaaggggagaggaggaaagaccgggagaggaggaaagacggggagcagagcagagcagagcacagcacagccgcggaagggcagtgagaaacgggattagtggcgggcgttttaaggcgggggcgtggacggggaatctgccggtcggggaggggaacgaacgcgcgcggaccggacggacgcccctgcccgctgctgctgcctgggcttcggcgacaggggtgctcgctgacggactgggtcgctcggcggggcggtttggtgggggcgaccgcaccggaccggactgttgttgccacttggtag

SEQ ID NO: 87468 - DNA, 104 bp, Zea Mays
ggtagtattttaatttatgagaaagctgaacttgctaggacaataaatccttttgcacaccatctacaaaattacaggaagtaggcagatcaagcaggtcctat

SEQ ID NO: 87469 - DNA, 804 bp, Zea Mays
atggtgttgtccccttttactgttgggactacactggggagaggatggatgggcaggcatcgcccgattgttaagacctacaaaaaatccacagaaaaggtgaggaaggcgccagcgacgaccaccacgagcaagaaccagtgtagaagaccttacctgacttgtgggcgacgacggcatcccatcccagtgggtcaccttcgggcatcggtgtccctctccacgtggtggctgtcgtcaccgtcagccgcctctgcctgtgcagcggtaaaaatcatcgtcacggcgagcagagcgtcgtgcacccggaccgcagcttcctcacccgccatcgtctccaccttctgcctcggcttccacgtccgccacatcattgccgcggggcacaaggttgagttggtgcgccagaccgagaccgctgccatgaagcccacagtcggggccacgagaggcgccccattcacaccacaatcgaggtcgccgcatgcgagctggagggtggttgtgcagccacgcccgaggaggggaagcaactaccacatctgtgtcatggataagggaggtggaggcatcggggagggaggggctccaagtgaaggttgggagatttcaggtaggaagaagagtgtgccttatgtgcttgggaaggctggtgaaagggggaaaggtacagcgctgaaggatgacgagcgccgccatttttctgaggtacaagttgtacccggcggcggctatcgcgttggggtctcccacgccggtgaacctagcgagacctccttcgcccaccggccggctcccaagtga

SEQ ID NO: 87470 - DNA, 1162 bp, Zea Mays
tatggcaacccctgtcggttaatagttcctcgcggctggattgacggcccagatctcctcaagagcgcgttcccggcacggcaccgacggcgacgggcacggcctcgaattaaaaactgccgttgggcgactccgcgtggcccacggatccaccggagagatctggtctgccattccctcgctccttcccgtgaaccacaaacctaacgcggagcggcgcgggccggccgccgggcgaggtgcgcgtagctgccgtcgattgtcgccggatccatccaccatgggcggtggcaacggccagaagtccaagatggcccgcgagcgcaacttggagaagaacaagggggccaagggtgcgcgcctcttttctctcttccttcaacgaccccccttccgcttcttggatgctatgtgttctcttcgagccattgctctgggagggcgctccgatctgatggatctgcgtgtttccgctgtgcagggagccagctcgagaccaacaagaaggccatgagcatccaggtaccctgtctagatccgtgtttttgctcttacgttttggtgtcatttggtggaatttcttgatggattggtggtagggtatgttatgctcatagaatccgctggattagggactgtatctgtattagatgagagtttcttttccacggttaggatcagttgtgaattttttctgtgggagatactacgagcgatgtaagtttcaatagtgctatgtggctattggtttgtactgctcgaatttggaggctagaaacaaggtatgcatatgatgtatctttagggggtgtttggttttagagactaatttttagttcctccaaattattctactttagtcactaaattgtcaaatatggaaactaaaatagagttatagtttccatattttgcaatttatagattaaagtggaataaaattgagggactaaaaattagtccctagtaaccaaacactaccttatacatggcaaagaacataaccagtcataatgtcatgctttcccttaatggggcttctccgatcagtcaagcaggcaacactgtttatgtgcctagttttatttgcagcccaatcttagggcatgtttggataccatgtgctaacttttagctcaaaatagccacagtgcatcgggag

SEQ ID NO: 87471 - DNA, 1029 bp, Zea Mays
tatggcaacccctgtcggttaatagttcctcgcggctggattgacggcccagatctcctcaagagcgcgttcccggcacggcaccgacggcgacgggcacggcctcgaattaaaaactgccgttgggcgactccgcgtggcccacggatccaccggagagatctggtctgccattccctcgctccttcccgtgaaccacaaacctaacgcggagcggcgcgggccggccgccgggcgaggtgcgcgtagctgccgtcgattgtcgccggatccatccaccatgggcggtggcaacggccagaagtccaagatggcccgcgagcgcaacttggagaagaacaagggggccaaggggagccagctcgagaccaacaagaaggccatgagcatccagtgcaaagtgtgcatgcaaacattcatgtgtaccacgactgaagtgaagtgccgggagcacgccgaggccaagcatcccaagacagacgtgtaccagtgcttcccccatctgaagaagtgaaaggcctgaacttagcaaccagtgctggtttggtcactacgatcgggccagggggcgttccttgtgttgagggtgttcattccgtgttatcttcccgtcagtcatgcgtcctgtcctatgttaacctacataagaaagcgatgtggtgtccacttctagtgaaactactgtctgctgttaaaacctggttggtttcagaacgatgattttcgtgtgcaaaacagattactggtccgtgggagttgggccagtttgcattgtcttagtatgtgcctcctgcccagcgcaagaattcctttgcaaatacaatttttcgtagttttagatatccctgaggccttgttcgtttgtgccggattggtgggttggaacgaattctaaccggattgtttctctaatttatataaactttgattagcgggaataattccgggtgcaattcgacacaaacgaacaaggtctgaccttagtagtattccataaacatgcatgtgtgttatgatgtcagttatgta

SEQ ID NO: 87472 - DNA, 765 bp, Zea Mays
atgtcaaggtatcatctgaagcagttcgagaaggagcgcatgaagatggccatgctaaggcaagaagagacgttcaggcaacaggtccaggagctgcaccggctgtaccgggcccagcagctactgatggccggcgatgacgcggcgacgaacgaggcaacaagatcggcaacggcaacggcaatgccgcccgcggccacgcgacgcgaccttgaggcggcggcggaggacgacgacgacgagagacgcaccgtggggaccggcgccggctcgagcagcaggtcgtgggacgacgacgcccactcgccgccgcagcagcatgggcggagtggcaacagcgaggcccctccgctccttctccgagagagcgagctggagctgacgctggctctagggtgcttcggcggcgcggcgcccgggaagaaggaggcgtcgtctactagcgtggactcgaggacgagcgtgtcgtcgtcgtcgacggagtccgggtccgccggcagccccgagcgcggggtccgacgacgactgcctccccccgtcgtctctgatgatcatcgggtcggtgccgccgggccagcctaccactactactaccagcagggctgggcagcgtctggaccacgaagcaggcggcctgccgcagcctccctgctggctccacaagtgcctgaatttggcacgatagggtagttccgaccgagtctcactgtatttgtgggtaccactaccaaccattcgattcttatgccaccgcagatatactta

SEQ ID NO: 87473 - DNA, 456 bp, Zea Mays
gatcaagggcacaacttgccttcattgagctcctgctcagctacttctacttgctgaacctcagaatccacagtggcttgctcgtcgagattgcacccgcagagaccctccgcccacggcgcagtgacgatgaaaaatcccggcgagaaattcccggcggccccgtgcttcttcaatcgccgcgagaggctgaacagcaccaccacgcccccgcgatgtaccacggcacgacaacgtgcccagatcggcgaggggaaaggtttgcctcgtgcggcggcactcggccctcacggttcttacggcggcgatggagattagtttggttggggctaattgcgcgtggacggagtaatgggaggataggggctcggctgcgtcccttttatggttgcccgggattggttcgctcgctcacaacggattccgcatcgcccgccgcgaccgagctcgcccgag

SEQ ID NO: 87474 - DNA, 390 bp, Zea Mays
tccatggaatggtgctcaccgagattgcacccgtagagaccctccgcccacggcgcagcgacgatgaaaaatcccggcgagaaattcccggcggccccgtgcttcttcaatcgccgtgagaggctaaacagcaccaccacgcccccgcgatgtaccacgacacgacaacgtgcccagatcggcgaggggaaaggcttgccccgtgcggcggcactcgaccctcacggttcttacggtggcgatggagattagtttggttggggctaattgcgcgttgatggagtaaagggaggataggggctcggctgtgtcccttttatggttgcctaggattggttcgcgcgctcacaacggattccgcatcgcccactgcgaccgagctcgcccgag

SEQ ID NO: 87475 - DNA, 2097 bp, Zea Mays
atggccccggtttgcgtggagggtggtcaggatggtgacgccgttgcgggctccggtggaggcggtggtctgagctccggcggcggcggtcaccgtcgaactcgacgggggcacaggaggcggagggcgagcggtgggctcggtggtggggaccgtgctgaggcctctggtgggacgccccaggcggccctggaggttgatcgcgtccttcccggtgtcgcttcccggccttcgcgcttctttaggcgcacccagaggatcactcaagctgaagacgatctccggcgtgccctgctcgtctctgttgtgggtcgggaggtctctggctacgccgcggaagtctctgatgcgctcatctcgagatatgatcttgaggcggatgcgctcgatcttcgtcgtgttgcgccgagcacctttgttgccctccttcccaacgtcgagctggctgatcgggtgttcaatggtggtcagtccctctacgcacctcccctcctgcacatcagaagatggtctcgtcatttcatggcctctggtggtagcgctttgccgcgactgctggacgtcgagcttcttggtctcccgattcatctctgggagatccgtacggcggagcagcttctggatgaacactgtataatcctcgatttgcatgatgacactaaggatggtggggacctgtccgtgttcaagttacgggtctggtgtgctgatccagggggtcttccgtcgattattgacctgcatgtggaggagtcgtcggtgctggagggggatgtgccttcgtccccgcgcacggtgatctaccatgtttcgatcatggtgtctcactctgaccggtcatcgatggtgccccctaccccaccttctccgtcgtttccgggcggccgcgacgatggccgggatcgcgactctggttctaggcagaagcgtcgtttcagctgccggccccagtcgtcttcggttcgtgcttcggttctctcgtgcctggggccgcgggtccattcaagccgcgacaatggcgggggtcgcgactctggttccaagcagacgcgtcgttgcggcttccagcatcagtcgtcttcggttcgcgcttcggttctctcgcgcctggggccacgcgacaactcaaattcggattttggcgggccaatcgatgccctagccttcccggtttctccggtcgatgggctggcggcgcctgtgcctgcaatctcctcccgggaggcggatgatgcttcgtttctgaggcctgtcggaccagttgatgcgtcagctcccccaaccttttcggtctctgagttggcagcgcctgtgtcttccaaggccttaattgctctggacgcttcctctcccgcctcctcgggtcctgtccttccatccgctggggataattattctctccaacttgctgtggtgcctggtgatcggtgtctgggcggctctgcctccacccatatccccggagatcttctgtcggaaacagcatcccctcctgtggtcaaccagattacgacgcacttggaccaggaggatctccagaacgcgacaccctcggatctccattcaagtaacctggggttggttccttccagaaccctgtggtgtatgcccccgaaggtttattccagaagatgccgggttttacagcagcatccccaagtttcgttggtcgactctcagttagttcagagctctgaaaacgtttcggtggatgtctccatttcgccttcggattcgcccatatcagatcagctcagatcttccttcagatgcagggttaccaagtctacagtgcatatcttgcctgctcctcagactggtagacctggggctgcgaactccactgttgttcctcctcgtcgcagccggcgtattgccggaattggtgtcgagaaccttgccacttccagcgatggtcagacaagattcaggaagaaggtgatgagggtccttcacgtgattgacgagaacgaaggcatcaatccagaggctctggatcgttacagcaaattgtttgacaagcctctctccccttcccatattcaggcgcttgcagccctttttggctggtctgcccctgaggtgggagagtgctga

SEQ ID NO: 87476 - DNA, 1276 bp, Zea Mays
cccaaaaccagaattaattatctgacggtgcatgccatgcccatgacacccctcgagtgcgacatggcccctgcagcttctcgccagtcgtggcctcttcctcgctgcggcctgctggtcttggcccttgcactggcgacgaccgccgcggtgggcagcgcgcagctgtcgtcggagagctactacgacgcgtcctgccccgccgcccttctcaccatcaggaccgccgtctcgacggccgtgctgctggagccccgcatgggggcctcccttctccgcctccacttccacgactgtttcgtgcagggttgcgacgcgtcggtgctgctagacgacacggcgagcttcaccggcgagaagggggcggggccgaacgcggggtcgctccggggcttcgacgtgatcgacaacatcaagatgctgctggagctgctgtgcccgcagaccgtctcctgcgccgacatcctcgccgtcgccgcccgcgactcggttgcacaactgggaggaccatcgtgggcggttccgctgggcaggagggacgcgaccacggcgagcgcgtccctggccaacagtgacctccctgggcctaccagcagcctcaacggcctgctcaacgctttctccaacaagggtttgagcagcaccgacatggttgccctctcaggtgcccacaccgtcggccgggcgcagtgcaagaactgccgggcccggatctacaacgacaccgacatcgacgcctccttcgcggcgtcgctgcgggccagctgtcccgcgcaggccggcgccggcgacggcgcgctcgagccgctcgacggctccacgccggacgccttcgacaacgcctacttcggcaacctgctctcccagcgcggcctgctccactccgaccaggcgctcttcggcggcggcggcggcggcgcgactgacggcctggtcagcgcctacgcgtccaacgccggccagtggggggccgacttcgcggcggccatggtcaagatgggcagcatcagcccgctcaccggcacggacggcgagatcagggtcaactgccggagagtgaattaattatttattacagccacgttgattgcatttgctcttggggtagtggactagcgtgcatattttgcaaagaggcagagaagaattgaaatggagcctaagctcatatgtatacaaatgttgtttattattccatattatttcttgcatatataatatatatagcatacatgtactccctctgtctaaaaatattagtcattttagaccttga

SEQ ID NO: 87477 - DNA, 1386 bp, Zea Mays
cccaaaaccagaattaattatctgacggtgcatgccatgcccatgacacccctcgagtgcgacatggcccctgcagcttctcgccagtcgtggcctcttcctcgctgcggcctgctggtcttggcccttgcactggcgacgaccgccgcggtgggcagcgcgcagctgtcgtcggagagctactacgacgcgtcctgccccgccgcccttctcaccatcaggaccgccgtctcgacggccgtgctgctggagccccgcatgggggcctcccttctccgcctccacttccacgactgtttcgtgcaggtaagtcatcagtcgtctcaatctaacagagacgacagatagtgagtgagtgagtgagtgaccatggctctgcgctgtgtatatgcatgcacctattatatgtacggcagggttgcgacgcgtcggtgctgctagacgacacggcgagcttcaccggcgagaagggggcggggccgaacgcggggtcgctccggggcttcgacgtgatcgacaacatcaagatgctgctggagctgctgtgcccgcagaccgtctcctgcgccgacatcctcgccgtcgccgcccgcgactcggttgcacaactgggaggaccatcgtgggcggttccgctgggcaggagggacgcgaccacggcgagcgcgtccctggccaacagtgacctccctgggcctaccagcagcctcaacggcctgctcaacgctttctccaacaagggtttgagcagcaccgacatggttgccctctcaggtgcccacaccgtcggccgggcgcagtgcaagaactgccgggcccggatctacaacgacaccgacatcgacgcctccttcgcggcgtcgctgcgggccagctgtcccgcgcaggccggcgccggcgacggcgcgctcgagccgctcgacggctccacgccggacgccttcgacaacgcctacttcggcaacctgctctcccagcgcggcctgctccactccgaccaggcgctcttcggcggcggcggcggcggcgcgactgacggcctggtcagcgcctacgcgtccaacgccggccagtggggggccgacttcgcggcggccatggtcaagatgggcagcatcagcccgctcaccggcacggacggcgagatcagggtcaactgccggagagtgaattaattatttattacagccacgttgattgcatttgctcttggggtagtggactagcgtgcatattttgcaaagaggcagagaagaattgaaatggagcctaagctcatatgtatacaaatgttgtttattattccatattatttcttgcatatataatatatatagcatacatgtactccctctgtctaaaaatattagtcattttagaccttga

SEQ ID NO: 87478 - DNA, 300 bp, Zea Mays
atggcggtgaacatcggccccaccgactacatcaacgatcacaatgctctggaggtcatcgccctcgaggtacctccaaagatgcaaggggtgaccacgagcaaggcggccaccaagatcacgtgggacgcactcaagaaaacgcacctcgacatggaccgagtgcgccaagcaaaggcaaacacgctacgacacgagtttgactcacttcggttcaaggacagtgagcctattgacgaatttagcatgtgcatcatcaacttggtcaaccagctagaggtcctcgatgtcggctactag

SEQ ID NO: 87479 - DNA, 764 bp, Zea Mays
atggagctctgcggcggcggcgagctgttcgacaggattgtgcagaaaggccactacatcgagaggaaggtcgccgagctcgccagggtcatcgtaggcgtcgttgaggcatgccactccatgggcgtcatgcaccgggatctcaagccagagaatttcctcttcgctgaccagaaggaggaggccgcactgaagaccatcgattttggtctctccattttctttcaccctgatctagcagaagtggagcaactgcgagaagaacttaggcgacatcaggattacttgaggcaacaagctgcgcaacatgaatactatgctacacagattcaacaaccacaatcactcatacaacaactagcacaggcccaagggttacacgtcccggtgcccccaccaccaccacctctagtacattatccttgggcttcacctccacctacacctacatctccacctatcgaacatcagacccctccagctaccttgccgatgcaggaacaagaagacgagttagactttgtcgaagccctcttcgctagtggaggtatcgaccatcactcgtcactgtaccccgatggtgatcggcgattgtgagcttccatgttatgtgttgtgatacttgagacttttattatgactatatatgacatattgtctcttattatgaccggatgagatgtgtattatgactatggatgagacttttgtgatgtaattgatgagactatggatttaaatattgttatgtgattgtgtgtgag

SEQ ID NO: 87480 - DNA, 659 bp, Zea Mays
atcgcctgttacggtcgacacagccccgctcccatcttctcaggcgtctgccatggtcgacgtcggcctgccccgatcttctcaggcgcatgccatggtcgacgccagcctacctcgatcttctaccgcgtctaccatggtcgacatagcacgaccccaatcttctccaccgcatgccatggttgacgctaactcgcctcgatcttgtacctgtgatgccatggttgacgtcgacctacctcgatcttctacatgtgatgccatggttgacgtcgatccgccccaaacgagcatagctccatgcgtcttgaccccatcaagcacaaccacatggatcccatccgcaggaaccacacatctcatttcaacttttggaacacctgaaaagaatacaatcatgtcccccttgatgtatgctactcatgttcctgaagtacatgaatctatgaagccatttgttggacaaatttatgaaagattgcaagatgcagaggatttttatagaagatatgcaaaagaggctcgttttggagttcgtattggtccacatacagatttgaatggtgttagaagatggcaaagatggttgtgttctaaacagggatataggtctaagaaaaaggtagacagcaaaccgaaacgtattcaaaagatttcta

SEQ ID NO: 87481 - DNA, 1008 bp, Zea Mays
acccgttatgaaatccgtgcatcatgggtcccaattttctttagacatgtgttttttagctggaatccttaacacaacctcaagatcaggaagtaccaactcattttcaaccgtttcattggttacaaaaatacattggtcgaattttggatcaggtttgttaatgcaatggatgaacagaggcatcaagaattggaaaatgataatgctagtctgcatacatcacctgtgttgcagactagttgggcattagaaaggcatgggagtgaggtgttcactttcaatgttttctctgaactacaaaaacaaattattaatgcttgggataattgtgtcatagagacaattgtaagcgagggagactataaaatatcaacagttaatgatgaaagaaaaaagatgagagagttccgtgtcaatattacaacaaacgatgggcactgcacttgtatgttctttgagatgtatggtattccttgttgccatctaattcgtgttttacaatgtccatcacttaaaaatattacagatcagtttaatttgaagagatggactaaactagtgactaagaatgatgtcttcgatggagagggaaacatgttgaaagaagtatcaaaggatgttgtagaaacaactaatgcaaagttggcatctgaaattagaagcaagattgaagaattaattcaccatgccgaaggatcaaacaatgggttacaaacacttcgggatagtattgttgcatttggtgaagatctttccatattgcttccagagagaatgacaagtcaagttcaagagatcgagtcctttattggttgttcaatccctaaccatgttattatacagccacctaatgaagtcaaatctgtgggtaggtgcaaacgaacaaaacctggttagaaggtaaagaagcccggtgacaatgtggagaagaaacataaagttcctcgtatgtgcaggtgttgcaagcaagtagactatcatgatgctcgaaattgtcctgtaaag

SEQ ID NO: 87482 - DNA, 243 bp, Zea Mays
atgaagcagcccactaccgtccttctcgccatcgcactgctttggggtgctctcctcgtccctgctgcagatgccgcaaggcaactaccaccggaaggccgggtcgccgtcgagaaccatgaggcggcggcggcggcaacggcgtacacgacgctgcgggagagggcatggtcgaagacgacggccatggcgtggacgcagcagctcccgtcagggccgagcccgaggggtcctggccactag

SEQ ID NO: 87483 - DNA, 474 bp, Zea Mays
atggcgagcactctacggcgcctgggctccttcgccgtacgccggagtccctgcgcgcctgccgtcgaactctccggccacgggagcgggcgccggttcggcctcggcaaccggtctagtggaaaagggagctctaagcaagggattcccagccagcgtccatccaccgccccggggattgcagggctgcgagcgtcgcaggcatcggctccagctccggctctaccgccatggttgattcggacgcagggcgaggtcgggattctaggcgctgccgcgtggaacatcgccggcgactgccactccggctgctcctatgatcgggtcgggcggtcgcggcctgggtcgtgcgctggtgggcactgggtgcgaaggcatcgaccagatttgggggaattcctcaccgaagatcaacagtgccgccgatccgctgctcacgatgaccgtctctgccactacttcgaccgccattga

SEQ ID NO: 87484 - DNA, 213 bp, Zea Mays
atgtcgctacaatgtcagggctcggtggctgagtccgcagtggatgccagcagcgatgtggagattcatggcgagctcgagctcggtgccctcacctcttcgctcgagcaccctggcggcgcgctcggcgaactcaagcacgcgaggcggcgccaccctcgcccaataccatggcttgaggatgaagggccccagatttgggttgtggagtga

SEQ ID NO: 87485 - DNA, 1612 bp, Zea Mays
tagcacaaaactcggaaccctaatctgttctgcgcacgcgcggaccgtccggcccacaggcgcggaccgtccggaccgcggaccgtccggcctcagggccggaccatccgcttgctcatttctggttcaaacacacactaaccaatgcatgtgggttgttttgaataagaatatttttaaaaggtcctcccatctctatcgtgtcatttatcttggttggatggttgcaccaatatgtatggttgtgtcatatatgtctttttttaattgctagtttgctactcacctactccacaacaaagtatttgtttctagacaacaaaacgatgattttgttatctttcactaccgttcatgtcacacacatgtgctcaatgctcacttgtagatatgtcatgcctcaagctcaaaggtttccttcacaaaataagaccaaacacaagtgagcatgactgcattgctgaaatttgtttgaaatctgatttcaagttccaattagtagattttgtacaaggacacacatttcatttatgttttcttcatattttccccaataccttctgctgtaacaaatatctcccctactcagattcatcgtctaataacagtatttacttttaatgagtagtgactgtctttcaaaactttcccatgtatgtcccttttaccggtgaacttaaattaatatatactagatgtatgtgggaaagaggtccgaagaacatctctaactcaatatatactattagttggcttcatcccctgaaatcaaacacctctaatttctaatccatcgctctggctgcaccattacaactagtttggttagacgggagttaaaggagattggggagaattaagggagaaatgaactaattttctctcaatgtccttctactaaaataatgtgagcaactagacaactatactgcgaagacctttgcagagtaagacgatgatgttgtgcgggaggagatggccctaggtggatgtcatgtacggtaagccgtacacaaggcgcaggcgcgcacgcgacatccggcgggcagcagagcgcgccaaaagtgcagcagcgccacagatggcagacactcaagtttaggaaagcagcagccacttatggcgagggataaataggaaagtatcaatttggctcttatggcaaggaataagtaggaaagtagcaatttggcacttatggcaaggaataagtaggaaagtagtattttggcagggaggataattagggagcttgctccatttgtgtggccgccggctctatatatccccaggtgcgcagcactgttgagggcaataaaatatcaagtcatttcccacctctctctctcaagcctgcggttaggaggaatactcctaccggagaagacggccgaaggctacgagttacgtagccgaggcccggcgagtcaagggttcgacgctcttgacagctcttggtatcctgagtccggagatccttgcctcacccagtcccgcccaccgatccactcaccacaccaccatccccgaccacgcccactagcggttcgccatcctccatccacatggtcgagcccactttagccgacgtcatcgagattgatgaaggcca

SEQ ID NO: 87486 - DNA, 414 bp, Zea Mays
atggaaacaagcccggtccatgcgagaacatctgttcggttagccctcgtaggtttctgccccggtccaatcccagtgaaatcccttcaccctggcccggtattcgacccacgactcctgactcgtggaacttttcctcttcagtcgcaggcccgcagcaagtgcggaggcgagacacgagcgccaggcgacgtaagcggcggcgctgcaatctccctagcggcatctgtcctctccagtagccaaaactttcttgccaaatacgtcgaggaccaaaacaatgctcccatggcaggcattctggaagaagttgtgtcaaccgtcaagtatggacaattgctggatctgaaaagtgaagatgcttatgcaagcagtggggagcgcctgccagggttctcgatgctgtgctcgtga

SEQ ID NO: 87487 - DNA, 1645 bp, Zea Mays
gagacagtcttcctcaccgagcaccgcaaccacgcacaataatggagagctcgagcgcagcaacgacgatgaccggctccagttccggtcgagagcacggtggcgtccacgtcctgctggttcccctgccggcgcagggccacatgaacccgatgatccagttcggccgccgcctcgcgtaccacggcctgattcccacgctggtgaccaccaggtacgtgatgtccacctctcctgccgccggcgtgcccttccccttgctggccatctccgacggcttcgacgagggcggcatggcctcgtgctcggaccccgtggagtgctgccggcggctggaggccgtggggtcggagacgctggcgcgggccatcgacgccgaggcccgggcggggagggcgccggccgtgatggtgtacgacccgcacatgccgtgggcgcagcgggtggcgagcgccgcgggcgtcccgaccgccgtgttcctgccgcagtcctgcgccgttgacctcatctacggggaagcgtgggcggggcgcgcgccgctgccgatggcggacgggggcgcgctccggcggcggagggtgatcagcgtggacctgggagcggaggacctgccgcccttcgtggtggcgccggagatctacgcccagtacctcaaggtatctattggtcaattcgagttcctcgacgccgccgccgacgtgttcgtcaactcgttccgcgacctcgagccgctggaagcagagtacatggagtcgacgtggcgcgcgaagacggtcggcccagccctgccgtctttctatctcgacgacggccggatgccgtccaacttggcctccggcgtcagcttcttcagcagcagcgcgccaacaatgggatggctggacaggcagcccccctgctccgtggtccttgcttcctacgggaccgtctacagcctggacgccgaccagctcggcgagctcggcaacgggctgtgcgattccggctggccgttcatctgggtcgtgaggcccgacgaggcgcagaagctgcctcaagatctcgaggacgcctgcagggagaaggagaagggcctcatcgtgcagtggtgtcctcagctagaggtcttgtcgcacaaggccacgggttgtttcatcacgcactgcggatggaactcgacggtggaggcgatcgtcgccggcgtgccgatggtgggcatgccgcggtcggcggaccagccgaccaatgcgaggtacgtggagagcgcgtgggggatcggcctgcgaatgcggttggaccagaatggcttgctgaagagggaggaggtgcagaggtgcatccggcaagtgatggaaggggagaggaagacagagttcaggcggaatgcggcgaagtggatgagcaaggccaaggaggcgatgcaggaaggtgggagctctgacaagaacattgctgaatttgcagcaaagtatttgtcagcttagtgcttgttcggttagctctcaatccatgtggattgagtgggattggatgggtttgaatcccaagcaagtcaaacttctcaattttttccaatcccatccaatccatgtgtattgggaataaccgaacaagcccttaaaaggcgcagtttgttgactgaataaatcctggttcacttgctgtt

SEQ ID NO: 87488 - DNA, 1057 bp, Zea Mays
ccctcttacagagggttggccgcgcggggaaggacgggatggcgctcgcgcaaggccgctcgctccctcccgcgtggacgcttgtaaccccctactgcaagcgcacccgacctgggcgcggggctaacacgaaggccgcgggttccacctcccacgcctgtctccctccggctgctctgcccccttcgcgttccgcctcgcgccgacccatctgggctagggcacgcggcgacaattcactcgtcggtccagggacccctcgggttccgaaacaccgacaactatagaccgcccttgcctccgcccgcccgacctctagaaaccccgccgcgattccaacagcaatccgcccgcctccgcaaacctccgcgagagtccgccgcaaacccagcctcgttcacgccctctcccgccgactctggctcgcggagccggtacggtggcctcaggagtggcgcggtgcgctgacgactggtcgcgggggaagaagccgctgccatcaggcccgtcacgctacccaagcctcggctccgcgggcagtggcttccgcgactcgcccgtctcaaccgactcctccgaccgttggtcccgtgccgcgctgagcaatgacgagcgtgagaggcctcgcatcgtgcttgatccgcccaaacgtgacgccttggccacccctacccctcctgctgaggcaggacgcagccgaccgagcccatttggagccacgaggccacaggaggatgtgctggctgataaggggctggactagaagaagatggaaactgagattgatcagaagaggactagccgatccactagctcgcagtcgagtaggagtgcaggacagagagtgctcgaccatcacgtcctaggagccccgggtcacagatatcaaccaccgatagtgaagccgcacctatgaccgtacggcgcagccgaaggttaatccttttggtgaagcaaagccaagggaggtgattctgcaagagaaagggaaggattggaggaagattgaccaagagctggagcatcgccagattgattggtatgccatgtattgatc

SEQ ID NO: 87489 - DNA, 1398 bp, Zea Mays
atggacgacggcgccgcaaccacaatcgtccaaggcggcgacgcgcacgtcctgctcctgccgttccctgggatgcagggccacgcgaacccgatgctccagcttggccggcggctggccttccacggcctgcgccccaccttggtggtctcccgccacgtcctctccaccacctccacctccaggtcgtgccccatccccgtggccgccatctcggacggcttcgacgacggcgggatctcctcatgcccggacaccgcggagtacgtgcgccggatggaggccgcggggtcggagacgctggcggggctcctggacgccgaggcccgcgcggggcggcccgtccgcgtgctggtgtacgactcgcacctgccatgggcgcgccgcgtggcgcgggccgccggcgtggccgccgccgcgttcatgacgcagatgtgcgcggtgggcctcgtctacggcgaggcgtgggccgggcgggtggccctgccactggcggacggggccgcgctgcgcgggaggctcgccgtggagctgggccccgacgacgtgccgccgttcgtggcggcgcccgagtggtacccggcgttcaccgagtccgcgctgagccagttcgacgggctggagcacgccgacgacgtgctcgtcaactcgttccgtgacctggagccaatggaagcggattacctggagtcgacgtggcgcgcgaagaccgtcggcccgacactgccgtcgttctacctcgacgacggccgcttgccatgcgacaagacatacggcgtggacctcttctcgagcaccgactccgaggcggcgccgtgcatgacgtggcttgacaagcaggagccctgctccgtcgtcctcgcgtcgtacgggaccgtcgccaacctcaacaaggagcagctggacgagctcggcaacggactgtgcgattccggcaagcctttcgtttgggtgctgaggtccaacgaggcagagaagctgtctcgacagctcggtggcaggtgcaaggagaggggcctcattgtccccttctgtcctcagctcgaggtgctggcacacaaggccacaggttgcttcctgacgcactgcgggtggaactcgacgattgaatccatcgctagtggtgttccaatggtggcgatgccgcagtgggcggaccagccgacgacggccaagtatgtggagagcgcgtgggggattggggtgcgcatgcggaagggttccttggtgaggaaggaggtggagaggtgcataagggaggtgatgggcggggagaggaagcatgtgtacgggaggaatgccgctcgttggatgcacaaggccaaggaggccatgcaggaaggaggaagctctgacaagaacattgcagaattcgcagccaagtatttaccaaagtag

SEQ ID NO: 87490 - DNA, 1864 bp, Zea Mays
cctggaataacactacgttagtgttggttagacgatgtccgcttgacgagtatccctcgaccgagcacttgcttaatttaaccatcttcaggttggtccatcagcttcatcctgcggatttagcacgtgcttggggtcgacttggctcgtcttccgcatcacatgattatttatcgtacctcatgagatgcacgatgcacatgtatgagcacaagtagaacgagtataagatagatactctatactaaaaaggatgaaacacttaaaatcaagcattaagcaccatggatatcatagcagagcatcgactacattcattaaccaaattgacctaataacactagaaaatctatttttattcctagctttttattaactctctaaactgtgtaacttaattacttgatttagcgagctatctaaatcgatcatcacaatatacgcatgctaaattcataatatttactgtgaccaacaattctatttaatctatttatagacctagttaacgggaatacgaatcaacttaccctgactaattcgacgcgatagttgcaagcacgaggatggttcccggttgacgtctttgatcacatatggctggcgagtgatgcacacacgacgcgacgacgagattgagtatgaagcgagctgacgaggtgtgatcgagcagcttagcgcgagctttggccaccagcaagcgcagtatcgacgacgaggatcgaggcggggttgactagcacgacaagcccatgcagtgggcaagggccaacggtcgggagatggcagcacggttcaggcaagcccgcgcaaacactgaacgaggaaaacgacggctcgccgacacacgaagctatcacctcccagttggacattccgtcgagcatcggataagcgacgcacggaacagtactgtcttctctaatcccagctcgatatcgaggatccaccgactgcaagcacctacactactcctgcacatccaagacaacggccaagcgagcacgaagccgcgcgaggaaacagagcgcgcgcagggcgacgggcaccgcggcacgtcagggagccggacgcggcacacaaggagatccacggctggaaaaacgccggccagcagagaagtagaggtgagggcgcaccatggacatagaaggcagtgcgcacccacggaacgagcagaggcgagcgtgtagcgtccgatgggtgagcgactggagcagggtgcggctgaggaatgggcagaggccaagctggggcaccgcagcgccggagaggacgcgcagaaagaatccacggcgagggagctcgggggaaaccgcggcgcgtgcgcagggacgagcagggcatagagagcaggacgccgagcgctagtcaccggagcagggagctgggcgaactccatgggtgagcaggagtcgagctcgcaggggaagaggctaggggaagccgagcggtcgagctgagctacggtggccatggcgacaagcgaacagaggggaggggcgctggggaagagagcggcgttgggggccgggcggccgagctcggctgggagttggggctgggcgctggagaagtggagaggctgggcgtgcaggaagctgaagcttgcagggaatccggcgctgggagcttcgagcagaggatccacatccgaccaggcgccggggagaagaggagcagaggctgggcgagtcaccagggagaggcgaccgcgccatgggggctcggtagggagcagggcaggggcactcggctaagagcagaagatggacaccgcgatgggatttttatccagggtggccgagcggatgggaacgaggcaacggcggtgagaaaaattttgagcagagcggcggcaggg

SEQ ID NO: 87491 - DNA, 783 bp, Zea Mays
atggacagagaaggcagtgcgcacccacggaacgagcagaggcgagcgtgtagcgtcagatgggtgagcgactggagcagggtgcgactgaggaatgggcagaggccaagctggggcaccgcagcgccggagaggacgcgcagaaagaatccacggcgagggagctcggggaaaccgcggcgcgtgcgcagggacgagcagggcatagagagcaggacgccgagcgctagtcaccggagcagggagctgggcgaactccatgggcgagcaggagtcgagctcgcaggggaagaggctaggggaagccgagcggtcgagctgagctacggcggccatggcgacaagcgaacagaggggaggggcgctggggaagagagcggcgttgggggccgggcggccgagctcggctgggagttggggctgggcgctggagaagtggaaaggctgggcgcgcaggaagctgaagcttgcagggaatccggcgctgggagcttcgagcagagaatccacatccgaccaggcgccggggagaagaggagcagaggctgggcgagtcaccagggagaggcgaccgcgccatgggggctcggtagggagcagggcaggggcactcgtctaagagcagaagatggacaccgcgatgggatttttatccagggtggccgagcggatgggaacgaggcaacgacggtgagaaaaattttgagcagagcggcggcagggataagggaagaagacggctggaaggatagagccgcgagatttttcttcctgagcatatga

SEQ ID NO: 87492 - DNA, 406 bp, Zea Mays
ggtggacttccggatcgtacttagtgatttgcccaaacttccggtgaaggcacctgatctttgctttgggaaagaagggacgttgcagcactgccaccacaccttcaaaaaaggaaccactgcttaataatgatgtttaacagggagggtcaagtctaggggattattacattctaatctttcatggtagttgaactgtttagtttggtgggctgtgttgtctatcttttgtctggtcatgaatgctcttttctaccattgcagttcgattatactatgtcaattatctttcttttatatcctgtataaactctatgcttcccttgttatgctactttcaagggaggtgctgccggattttgcaatactttctttctctatgtgttgcataagttttgtaggaagg

SEQ ID NO: 87493 - DNA, 406 bp, Zea Mays
ggtggacttccggatcgtacttagtgatttgcccaaacttccggtgaaggcacctgatctttgctttgggaaagaagggacgtagcagcatggccaccacacctttaaaaaaggaaccactgcttaataatgatatttaagaggaagggccaagtctaggggattattacattctaatctttcatggtagttgaactgtttagtttggtgggctgtgttgtctatcttttgtctggtcatgaatgctcttttctaccattgcagttcgattatactatgtcaattatctttcttttatatcctgtataaactctatgcttcccttgttatgctactttcaagggaggtgctgtcagattttgcaatactttctttctctatgtgttgcataagttttgtaggaagg

SEQ ID NO: 87494 - DNA, 843 bp, Zea Mays
cttttcatgggactttttgatggaacctctagtaattcatctcgttatggagatttctttgaagactattctagcatgaatggaggtcgccaagatggcaagcttcatggtggataccagagacgtacagagagtagaaactctcctcttgcagcttctccaggctcagcaaagtcattgtcgcaaggtgttgctagggacagcttctattcaacgtttcacaccaccccagagaggaggaaattctccaaagaggaatacgaagcattcacgagagaggagacaaagaaagctatgaagcaactgttgtcctcaccggatttcaacaggtgggcgttggctaacgcggacagaatatctgtggctccaccaggaggaaactacagcagcagcaacagcaaccagcagcgacatcgtttcttgggactgttttaagctgcgcgcgtggtgtgctttcagcaataggagtgctcattgctcaatgatttcgtgcgtgatttgattagcaagggtaggataacatcagtgttccacattttgaagtggcagcaaatatgtagaatattgtagtttagtcgcatcttaggtccaaagttcaaacagcatctgtctcttgtaacattccattcagtgctaagttgagtgaatctcaacttgagttgtatatgacgcttgatcatcattaggataggatgaaagcattcaagtgtttctatgcctgcataggaactaggaagcaagctgtgtgtgcagtattttgggtttgtagtcgggtcatgcgttggatactatttctcatttatgtctctaaactaataatttgttcttgattgtttaatatgt

SEQ ID NO: 87495 - DNA, 867 bp, Zea Mays
cttttcatgggactttttgatggaacctctagtaattcatctcgttatggagatttctttgaagactattctagcatgaatggaggtcgccaagatggcaagcttcatggtggataccagagacgtacagagagtagaaactctcctcttgcaggctcagcaaagtcattgtcgcaaggtgttgctagggacagcttctattcaacgtttcacaccaccccagagaggaggaaattctccaaagaggaatacgaagcattcacgagagaggagacaaagaaagctatgaagcaactgttgtcctcaccggatttcaacaggtgggcgttggctaacgcggacagaatatctgtggctccaccaggaggaaactacagcagcagcaacagcaaccagcagcgacatcgtttcttgggactgttttaagctgcgcgcgtggtgtgctttcagcaataggagtgctcattgctcaatgatttcgtgcgtgatttgattagcaagggtaggataacatcagtgttccacattttgaagtggcagcaaatatgtagaatattgtagtttagtcgcatcttaggtccaaagttcaaacagcatctgtctcttgtaacattccattcagtgctaagttgagtgaatctcaacttgagttgtatatgacgcttgatcatcattaggataggatgaaagcattcaagtgtttctatgcctgcataggaactaggaagcaagctgtgtgtgcagtattttgggtttgtagtcgggtcatgcgttggatactatttctcatttatgtctctaaactaataatttgttcttgattgtttaatatgtatgaatgatatgatacatactattttgcctttc

SEQ ID NO: 87496 - DNA, 1434 bp, Zea Mays
acaaggagtcgctggagttaggaggtgcagttatagcagacgcagagcaatggaggccgccgaggctcctaactatgacagtattgtcaacagggatgagatcaccgacgctgcagctgcagcgttcgccaacccggagcaggtcccggagaagtacgtccggacggaggaggtccttgacggcgtcgtcgtcggcgcggacgagagctacgagctgccggtcgtcgacatggccaggctcctcgacccggagctggcgccgtcggaggtcgccaagctcggcgacgcctgccgaaactggggtttctttcaggtcgtcccgtggcccgcccggattccttcagttctaaacttctagtagccagctgctagtatctgtttagaatcgattaattaatcacatttgtcccgtctgcatgcatgtctacagctgacaaaccatggagtggacgaagcggtggtgcagcggatgaaagacgccacggtgcagttcttcagctccccgctggacagcaaggccaaggtggcggtccgagggaacggcttcgaaggattcgggcaccactacagcagagcgtccagcggcaagctggactgggcagagagcatgattctcatcacgcagccagtcaaggacaggaacatggagatgtggcctacaaatccacccacgttcaggtctgcagtacgcatatcctggcctctctctgtctctactagtcaatcatctgacacgtacgtacgtctcccatgcacgcacgcacgcacggactctgtttgttaatcagggacgcgctcgacgtctactcggtagagatgatcggcctcgcaatgcggctcctggggttcatggcggccgacctcggggtggagccggaggcgctgcaggacgccttcacggggaagcggcagagcatggcggtccaccactacccgccctgccgccagcgggagaaggtgatgggcatcacgccgcacacggacgggctgggcctcacgctgctgctgcacgtggacgacacgcccggcctgcagatccgcaggggcggcaggtggttccccgtgcgcccgctgccgggcgccttcgtcgtcaacgtcgccgacatcctggacgtgctcaccaacggcgcctacgccagcgtcgagcaccgagtgctcccggacgccgagagggctcggaccaccgtcgtcgtgttccaggaggcgtccgtcgggggcctggtggcgccgctgccggggctcctcgaccagcagggcgcgcgcgcgcgctacaggtccattgagatcgaggagtacatcaagggcaacttcaacgcgctggagcaagggacacggttcatccagagcctcaggatatagctatctagttgctccttccatcaaaaaataattacccaacatatcgataaatcaatcaatctcaatcttcaccaa

SEQ ID NO: 87497 - DNA, 1939 bp, Zea Mays
acaaggagtcgctggagttaggaggtgcagttatagcagacgcagagcaatggaggccgccgaggctcctaactatgacagtattgtcaacagggatgagatcaccgacgctgcagctgcagcgttcgccaacccggagcaggtcccggagaagtacgtccggacggaggaggtccttgacggcgtcgtcgtcggcgcggacgagagctacgagctgccggtcgtcgacatggccaggctcctcgacccggagctggcgccgtcggaggtcgccaagctcggcgacgcctgccgaaactggggtttctttcagctgacaaaccatggagtggacgaagcggtggtgcagcggatgaaagacgccacggtgcagttcttcagctccccgctggacagcaaggccaaggtggcggtccgagggaacggcttcgaaggattcgggcaccactacagcagagcgtccagcggcaagctggactgggcagagagcatgattctcatcacgcagccagtcaaggacaggaacatggagatgtggcctacaaatccacccacgttcagggacgcgctcgacgtctactcggtagagatgatcggcctcgcaatgcggctcctggggttcatggcggccgacctcggggtggagccggaggcgctgcaggacgccttcacggggaagcggcagagcatggcggtccaccactacccgccctgccgccagcgggagaaggtgatgggcatcacgccgcacacggacgggctgggcctcacgctgctgctgcacgtggacgacacgcccggcctgcagatccgcaggggcggcaggtggttccccgtgcgcccgctgccgggcgccttcgtcgtcaacgtcgccgacatcctggacgtgctcaccaacggcgcctacgccagcgtcgagcaccgagtgctcccggacgccgagagggctcggaccaccgtcgtcgtgttccaggaggcgtccgtcgggggcctggtggcgccgctgccggggctcctcgaccagcagggcgcgcgcgcgcgctacaggtccattgagatcgaggagtacatcaagggcaacttcaacgcgctggagcaagggacacggttcatccagagcctcaggatatagctatctagttgctccttccatcaaaaaataattacccaacatatcgataaatcaatcaatctcaatcttcaccaatcatatccataccttccgtatctaatattaaagagagtgttaatttcttcctccaatctctatactacttcttaagacgttattgtaggcgtccacagattattttggtccgatccctctgcccacccacctccccctctgctccccgccatcaacgcgacgccgatccgccatcaacaccgatccagggccgccccacccaccaccctcctcgatccgccttcaacgtgtcgcggatcccccaccctcctcgatctttgctcctcgccatcaacgcgacgccgagggtgctcgcccagatggtgctcgcccgaatggtgcgcccgccccgctcaccttccatcgacggggccaccccacccaccgccctcctcgatccaccatcaactgtcgtggatcccccaccctcctcgatctctcctccctgccatcaacgcgacaccgatggtgctcgcccggatgttgcacccgccctgctcaccttccatcgacgggcgctcaacccagatccccttccaccgatctcatgctcaccttccacgttcgcagccgccccgctccccttccgtgctcattctcacgccccgctctatcgatggaagtgctgatggtccgcggccgccctcgcaatcaaccccatggtggatggaatccccttccactgacggcgctcaccttccaatgacgaatcggatcttcctcggcgtcctctccctacctacagctatatga

SEQ ID NO: 87498 - DNA, 210 bp, Zea Mays
atgagcaggcaaaaatgcctaggaagcatttcaggtgcgaaggctgaagatgctagatgtagaaagagggaagacgtggagactgctactaaaaagagtgaagaatcggatactgaatctgaaaaggaagaacaaacacggactgaatcaagcacaattgaatagaaaaactttcctggagaagagaatgtcccagcatattatgcgggt

SEQ ID NO: 87499 - DNA, 100 bp, Zea Mays
caaaatctttattacgctataggatatatcagccgctcgagtccgttcacatttaggccttattcggttattcccattatacatagattgagtgagattg

SEQ ID NO: 87500 - DNA, 386 bp, Zea Mays
atgacgcctagggaacttaacaactaccctcgaaaagatactctttacgtgtggacagcaagcgccagtgaaatagttgcttcagcacttcatgacaattgcaaagctgttcttgttggcgaaaggacttttggcaagggcttaatccaatctgtatttgaacttcatgatggttctggtattatcgtcacagttggcaaatacatgacaccaaaccacaaggatatcaatgggaatggaatagaaccggattacaatcgtcttcctgatttcaatgaagccagaggttacctttcacgatgtggaattaaagaattaagctgacagacgtttgcggcagatttcaatgaagcattatattctgaaggttctctcacggtaagaag

SEQ ID NO: 87501 - DNA, 1041 bp, Zea Mays
ggtcttttctgactatcagtacactcaaacttttatatggtgcattttgtcaccaagcattgccttaaattagttcaatgtttttcctcacaaagtaatgcaccattttctatggaatggatcagtgctacctagatttggattagaaaaacgaaacaatgtattggttaatatgataataatatagattagataaaaataaatatcaataccttcactttctacaatcagttttctacttttctttttgtatggctggaaagcaactgaagatttttcaatttatattccacagtatcatttactgaacttcatgctgacgtgcatgttcgttatttccagaacaaggccatctcagataaaagtagatgtagctttcataggacttagttccagcaaagcaaaggttggcagtgcaccaaacaatagcgtttatacttcattcttatggattggagaagcctatgcaacatgtcaaaccagatgacatgcagatgagaaggttctgcatcaatagaaaccagagaaaaacctttgcatcaagagagcaccgatgaaaagctgatgaagaggccaattgacaaacttatggagaccagctgaccaaataattgaaaatctattgaactatgtatcaagttcattaatttatgtaattctgaacgagaccttttatgctactgcaacgtctgtgaccacaaatgactgttgcaacaagaccatactctaggagtggagttgtctatatgaagagtgtaggtagaggcaattggctaatattgtacaggtccagtttgcaggatcgtagcaacagggttcaaagacgtgtgtttgaaagggcagttcctgatgatcagcatgatgaaaggtggggagttctatagctggtttaagctggagctagcttctgaagtccggtcaggtgtctgtatgtgttgcccttttttatttcatttcatgagaaaggattgttatttgttccttgaactgtacttggtcgtacttgtgaataaatattttagcatggctgttcgacttctt

SEQ ID NO: 87502 - DNA, 1750 bp, Zea Mays
agcttcttttgctcattggctagggacatgtaaaaccttgtacaccactagtctacctagtaagcagcagcctgatccaacaagtgcagtgtgtgcacggtacgtaatctcaagccgccaaagctaacaatggcagaacagcacaaaggcccaacaaacagggtagcctccgatggcctcccggacggtgttgcgccgccgcggaagaagagcaacgtccggttcgccttcgcctgcgctatcttggcctccatgacctccatcctcctcggctatgacatcggggtgatgagcggcgcggcgctgttcatcaaggaggacctcaagatctcagacgtggaggtggaggtcctgcttggcatcctcaacctctactcgctgatcggctccttcgcggcagggcgcacctccgactggatcggacgccggctcaccatcatccttgcggccgtcatcttcttcgtcggggccttcatgatgggcttctcggtcaactaccccatgctcatggccggcaggttcgtcgcgggcatcggcgtgggctacgcgctcatgatcgcgcccgtctacacggccgaggtctcgccggcgtcgtcacggggcttcctcacctccttccccgaggtgttcatcaacttcggcatcctgctcggctacgtttccaactacgccttctcccacctcagcttgaaggtcggctggcgccttatgctcggcgtcggcgccgcgccttccgtcgtcctcgcgctcatggtgctcggcatgcccgagtccccacggtggttggtcatgaagggccgtctcgccgacgccaaagtggtgctcggcaagacctccgacacgccggaggaggctgctctgcgcctcgcggacatcaaggaggcggccggcatccccgctgacctcgacggggacgtcgtcgcggtgcccaagcggaccggcggcgaggagcgcgtgtggaaagagctgatcctctccccgacgccggccgtccggcgcatcctcctgtcggcgctcggcatccacttcttccagcagtcgtcgggcatcgactcggtggtgctctacagcccgcgcgtgttccagagcgccggcatcgccgacaagaacaagctgctcggcaccacgtgcgccgtcggcgtgaccaagacgctcttcatcctggtggccacgttcacgctggaccgctttggccgccggcctctcctgctggcgagcaccgggggcatggtcgtcagcctcgtcggcctcgggttcggcctcaccgtcatcggccaccaccaagagggcaccaccatcccctgggccatcggcgtctgcatcgcctccatcctcggggtggtggccttcttctccatcgggctcggccccatcacgtgggtgtacagctccgagatcttcccgcttcacctgcgcgcgctcgggtgcgctctcggcgtaggcttgaaccgcgtcaccagcggggtcatctccatgaccttcctgtcgctgtccaagggcatcactatcgggggcagcttcttcctctacgcgggcatcgcctcgctcgcctgggtcttcttcttcacctacctccccgagacacgcggccgcacgctcgagcagatgggcgggctcttcggcatccccaacatggccggcgacagcgaccagctgaccagcagtcgcccgagaaggagaagaccttgagcaacgtcgagatgtcatcgacggccactagtaatgatatcgatctgagacgaacgaactg

SEQ ID NO: 87503 - DNA, 2769 bp, Zea Mays
atggttctttcatcgtcttgcacaacagttcctcacctttcttcccttgcggtcgttcaactaggcccatggagttcccgcatcaagaagaagacggatgcagtcgccgtccccgcggccgccggccggtggagggcgcgggcgcgggcccaggacaccagcgaatccgccgccgtcgccaaaggttcgtccctaacgcccatcgtgagaaccgatgccgaaagccgccgcacgagatggcctacggacgacgacgacgctgagccgctggtcgacgagatcagggcaatgctgacgtcgatgagcgacggggacatcagcgtgtcggcgtacgacaccgcctgggtcggtcttgtgcccaggctggacggcggcgagggcccgcagttcccggccgccgtgcggtggatccggaacaaccagctccccgacggctcgtggggcgacgcggccctgttctccgcgtacgaccgcctgatcaacacgctggcgtgcgtcgtcacgctcaccaggtggtcgctggagcccgagatgcgcggcagagggctctctttcctcggccggaacatgtggaagctagcgacggaggacgaggagtccatgccgatagggttcgagctcgcgttcccttccctcatcgaactagccaagagtctgggcgtccacgacttcccgtacgaccaccaggctctgcaggcaatatactcgagcagggagatcaaggtgaagaggattcctaaggaagtgatgcacacggttcccacatccattctccacagcctggaagggatgcccgggctagactgggcaaggcttctgaaactgcagtcgagcgacgggtccttcctcttctcacccgcggccaccgcgtacgctctcatgaacaccggcgacgacaggtgcttcagctacatcgacaggacagtcaagaaattcaacggaggagcgttgcccactgcatgcgccttccttctcgtctcttcaacggttcgtcttctctcgccgtttctcgcagtgcccaacgtctaccccgtggaccttttcgagcacatatgggctgtcgatcgcctggagcgtctcgggatctcccgctacttccagaaagagattgagcagtgcatggactacgtgaacaggcactggactgaggacgggatctgctgggcgaggaactccgacgtgaaggaggtggacgacacggccatggctttccgcctgctacggctgcacggatacagcgtctcgccagatgtgttcaagaacttcgagaaggacggggagttcttcgccttcgtggggcagtcgaaccaggcggtgacggggatgtacaacctcaacagggcctcccagataagcttcccgggggaggacgtcctgcaccgtgcagggcctttctcgtacgagttcctcaggcggaaacaagccgagggagcgctccgtgacaaatggatcatatctaaggacctgcctggagaggtagtgtacaccctggacttcccttggtatgggaacctgccgcgcgtggaggccagagactatctcgaacagtacggcggcggcgacgatgtctggatcgggaagacgctctacaggatgcctcttgtgaataacgacgtgtatcttgagctggctaggatggacttcaaccattgccaagccctacatcagcttgagtggcaaggcctgaaaaagtggtacactgagaaccggctcatggatttcggagtggcgcaagaggatgctctgcgagcgtatttcctggccgccgcttccgtctacgagccgtgccgagccgcggagcggcttgcgtgggccagagcggcgatacttgccaacgccgtctctacccatctccgtaacagcccctcattcagagaacgcttggaacactccttgcgttgccgccccagtgaagaaacggatggatcatggttcaactcatcaagtggaagtgacgctgttcttgtgaaggcagttctgcggcttaccgactcgttagcgcgagaagcgcagccgattcacggcggtgatccggaggacatccacaagctactgagatcagcttgggctgaatgggtcagggagaaggcagatgcagcagacagcgtgtgtaatggatccagtgctgtggaacaagaagggtcgcgcatggttcatgacaagcaaacgtgtctgcttttagctcgaatgatcgagatcagcgctgggcgagctgcaggtgaggctgcgagcgaagatggtgaccgtcggattatccagctcactgggtctatatgtgacagtctcaagcagaagatgctagtatctcaggaccccgagaagaacgaagagatgatgagccatgtcgatgacgaattgaagctgcgtatacgagagttcgttcagtatcttctgagactcggtgagaagaaaaccggcagcagcgagacaaggcagacctttctgagcatcgtgaaaagctgttactacgctgctcactgcccgccgcatgtggtagacaggcatatttccagagttatttttgaacctgtttccgccgcaaaataatggtaatggtagatgtgaatgtgatatggagataagagagagagaaaatgttgatagtggaaattggcgttgatgtcgcctccacattctttacgcaaaagtagcgtctgttttggataaaaaaaatccagtttctgtaaattatagaataaatcaatcgctgtgtcccaaactctaaaatgttattctgtgaagtatggaataaatcggtcactataccta

SEQ ID NO: 87504 - DNA, 1163 bp, Zea Mays
acaggatctcccactcgtctcgaagacggccgcaccgcagacgccgcgggaatttaacgagagagactggcgccgcgcctcgcggagaccgcagcctggagccagcccgtgacgctgacgcggcgggccacgggcggggcgatgccaggagccatggagccggcagaggcggacgcggcggcagccgctgttgcgggaaggcggccgacggcgtccgagcgccggcgcatgtaccgcgacctggcgctgtcgctgcggtgcggactccgcgacgcggccgcggggttctcgttcctgcgcctgcgcggcctccgcgcgctcctccgcgccctccgctccacctccgacgccgacgccgacgccgacgcgggcctcttccgcgactcccagtccatccgagatctccaagtgatcccggtgctgttcgagcacagcctgcgcaaggcgaccggggacgcggtgctgacggtggcgcaggtgctgggcatggagcccgccgccgccaggctcaggaaccccgccacggactccgaggtcgtgcttgcgctcagggtgctcgaaggttgctgcctcctctgcccggcctgcgcagccgcggcgcaccgctacaatgccgtcaaggtggttttgaatatactgatgacacgtggtatcctcgagcaaagagcatgtctcgacactctcttagcgttgctggtgaattgttcaggaaacctgacggatttcaaagaacaagatggactaaataaaattgctgtcattgtaaaagatgcaaatagggatgaccatgtaaggttaaaatgttccgagtttctgcttctttactctggaaacgcaaaagaaaaatgtggcgcagattccgagtctaatatgcgagaagatttggcaaaggttttcggagaaaaatgtgcatcatttatctcctcaatgaacctattcagctcaactctagagtcacaaatgaggcaatctgagctaagctttcttgcagagcatgtgttggattacatgtagagccatactaaagataaccataatcgtgccattttctccacacacaacagagttcagtgctccaaaatgtatgtttcctattaacttgggtaattattgacgatgctactgtatatgaactcaactacgagaatgttactgttcaccga

SEQ ID NO: 87505 - DNA, 365 bp, Zea Mays
aggtatcagatcttgggtatttttctgttgattcagttgtgtattattggagctgaaagacttggaagaagtaatatatcggcaatagctagttccattaatcaaatatcatctagaagctatccatcgactacaggtcggagcatccatcttctaaatgaaggtggaaatatagtcagtatcatccgcagtggtaaagctgcagatatagcttctcattcagaggtatctgctttgtcaaaccggtgtacaccggactgtccggtgagccaacagtcggccgggccaacggtcggccgcgcgatctgcgcgggacacgtggccaagccaacggctagaagggggcaccggactgtccggtgtgc

SEQ ID NO: 87506 - DNA, 292 bp, Zea Mays
atgctcagcctcggcctcctgctctgcagcagcggtggggggaccgaacttgccaaccctaccggtggcaaccgcctcatagtactcgaaccggcgcggtgggggccagggtgctgcgacgaagaacgccacgtggggaggcgacgcgaacaaacacactaccttctgttgcggagagggaggggcaccgcggcagcgcgcggcacgaactcctgcgcctgcacgttgaggcggctggtggagccgctccgcgggagacctcccagccgctcatccgtcactcagccgtgga

SEQ ID NO: 87507 - DNA, 89 bp, Zea Mays
caacaatatacatctgctagagaacacgcagagatcagttgtggcgcaacattcactaaaatctcatgaaggttttcacctaccgagtc

SEQ ID NO: 87508 - DNA, 390 bp, Zea Mays
atggaggacgcaaggtttatactagttcgggcagaacgtccctacttccagtcatcggtggcttgcgctaccgacaccattgatgatcaaactcgtagtatgggttacaagtggtcaagagagggaggtgaggctcccaagtctctttattggggtggaggaaaggggtccgccagtggtggcttccctgggaaggagccgcagggcaagggtaaaaacagtgttttaccccggtggagtcacatgtactcatggggcccgggactgcctggctatttcgtatttatcatggcggatggtgtgggggcggcgatggtcacaggcgtcatctttatggctacgtcaatcactagcctctatagctcgggctcggcgcaacccatcgtgtag

SEQ ID NO: 87509 - DNA, 669 bp, Zea Mays
cgcctcgcctagtcgcttcccactgcgcgccgccacgcaccagcccagccagccatggcgttcgccgcgcggaggagcatcgccacccggctctctcaccatctcacgcgacgcctccatccctgcgttccacattcgcgtacctccgactccctcgacgagcaggcgtcgagaccctcgccaccgctcccgctcccgctcccaccacttcacgtccagctcaagcaacgttctagagaagtccaaatcctaggcttcctccctttctcgctccgcctcgcggggccaacccgccgcaccttctcgtcctcagcccccgcccccaacctcgaggcggcaccagccgccgaggtcgatgccgcgggcgtgcttgcggatgcagcggaggcggcggcgtcagtgccagcgccgttcccaggggaggtagccgccgcggctgcggactcattcccccctgttgccgcacttcagcacattatcgacgctatccatacctttaccgggctgaactggtgagctttgaggatttagctgatgttaaggttcgggatctactcacttgggtcgtctgcttcgcctcttctatggtgtgtggtcaggtgggtgtgcatcgcgctgacaacatttattatccggatcgccacagtcccgttgctcgtgaaccagttg

SEQ ID NO: 87510 - DNA, 1837 bp, Zea Mays
cgcctcgcctagtcgcttcccactgcgcgccgccacgcaccagcccagccagccatggcgttcgccgcgcggaggagcatcgccacccggctctctcaccatctcacgcgacgcctccatccctgcgttccacattcgcgtacctccgactccctcgacgagcaggcgtcgagaccctcgccaccgctcccgctcccgctcccaccacttcacgtccagctcaagcaacgttctagagaagtccaaatcctaggcttcctccctttctcgctccgcctcgcggggccaacccgccgcaccttctcgtcctcagcccccgcccccaacctcgaggcggcaccagccgccgaggtcgatgccgcgggcgtgcttgcggatgcagcggaggcggcggcgtcagtgccagcgccgttcccaggggaggtagccgccgcggctgcggactcattcccccctgttgccgcacttcagcacattatcgacgctatccatacctttaccgggctgaactggtgggtgtgcatcgcgctgacaacatttattatccggatcgccacagtcccgttgctcgtgaaccagttgaaggccacgacgaagctaagagcaataaatccagagatggaagtcattaaagaccagatgaatagtatggatccaaaatcagtgcaggagggacaagctaaaatgaaagcgctgttcaaaaaacatggtgttagtccacttactccaatgaaaggactcctgatccaagggccaatattcatgagctttttctttgccatatcaaacatggttgagaaagtaccttcattcaaaggaggtggaacattgtggtttactgacctgacgactccagattctctttacatcttgcctatgttaacaggactgaccttcttggccacagtggagcttaacttgcaagaaggaatggagggaaatcctatggctggtaaaatgaagtacttttctagaggagtagctgttttgacagtcccatttacaatgaactttgccacggcagttttctgttactggacctcatcaaacatattcaccctgttatatggtcttgttatccggcgaccagctgtgaggaagtggtttgatcttcctgctttggaaaatacgcgttcgctcacggcaaagccagtattcaatatgtttggtggatccaaggcaataccagccgcacagtcaccagtagcgatcgcaggagcccagcaatctggtctggaccaacctgatgcttctgctcttggctataaggtcaaaaatcttgagaagaaagtgaaatccaggggtaaatctcggaaacacaggtaaaattttgtgcatctgtgccccagatgagcaatctgtacttccaccatcggaatgatggatacttgatttgtcctgatatgccccccaaaaatcagattttgtattaggaacctatcttttcgtcgtttttggctgcttttgttttgatttttcaggggggggcgggggtgaaataagccacataaatgtttgacttagtaccagagttgattatacacaaaatgtatttcagtaacttgtgatagttaaaacattggagggtcatcttccaaggattggtatgaaagctacgttgaagttcagggacagtcaatcaacttttgaggcaccattcgacattctgtagcaattggcaattaggttcaaagtgtgctgggcagaattttgtggcctgaatgaatattgagtttgtatgtactaaactgtcttagaataccatttacaggacgtttggatcctttcattttagaggaattggaattcactcaataaagtaacttatttagtttgg

SEQ ID NO: 87511 - DNA, 2643 bp, Zea Mays
acgtttcaagaaccactcctccgtcacccccctcacaagccttgcttgtagtcgtagctactagcctcaacaactaacaccacacgacccactccattactacttagtttttcccttccttcgcagaccatcacctccatccagctccaggctcgctcgctcttctcccatggccgcaggagctgcctccacgggcaactggtcgcgtgcgaccggcgcaatgcgtgcggccatggtattgtgggtttgtttggcttacatgcgcggtgtgtgcgaggactggtcgccattgcggctgctggtgctcttggtggcggcgacgctggtggcgaggtggttcctaaacgccgtgcggccgcctccctcgacgccgtgcggcacgcccgggggcccgccggtgacggcgcccagggtgcggctgcgcgacgggcggtacctggcgtacgcccagtccggcgtgagcagggacagggcgcgcttcaaggtggtgtactcgcacggcttctccggcagccgcatggactcgccccgcgcttcccaggagctgctggaggagctgggcgtgtacatggtggcgttcgaccgggccgggtacggcgagagcgacccggacccgcggcggtcgccggagagcgcggcgctggacatccaggacctggccgacgcgctgggtctgggtgacaagttccacctcgtctgctcctccctcggttcccacgccggctgggccgccgtcaggtacatcccgcacaggctggcggggctggcaatgatggcgccggtcatcaactaccgctggcgcgggctgccgcgggggctggcccggcagctctacgggaggcagccggtcggcgaccagtggtcgctccgggtcgcctactacgcgccgtggctgctgcactggtggatgagccagccgtggctgcccacctccaccgtcgtcgacggctccgcgcccttccccaacgcgctggacgagaagaaccgcgtcatggcgctctccaacggcatgttccactcgagggcgaggctggcgacgcagcagggcgtacaggagtccttctaccgcgacatgacggtcatgttcgggaggtggacggacttcgagccgacggacctcgagaagccgccgtttccggtgcacctgttccagggtgacgaggacggcgtcgtgcccgtgcagctgcagcggcacatatgcaataagctcggctgggtcagctaccacgagctccccggagctgggcacttcttgtcagcggtgccaggactcggcgacaggatcctcagcacgctcctgtcctcgccggcgtcggcgtgactgatccacgactcgcacctagcaagtactagactactagtacatgactgatgttgctgtagctatgtctccaaagcattgctggtcgctgaagaaaagcactttatatgagcttagactatctctagcagatttattatcacatctcatatctcactctctatttcaaactccattgtacaaacagtacaatctacagtacaaaacaatattttacacaacgtactggatatggccttagccactactggtgttgtaccaagaaaccgacgagaaggcacttttatactccctccaatccaaaatagtagtcgttttagctctaaatcatactcaatatctcatttcttatttcaaactagtctataaacagaatctacaattcaaagcaatattttacaagctcacatccagctccgctggagatggccttagagggtacttcactcgttgtatataaatatttatcatcagggacagaaagtaattccatccagatctgcaatttacatacagctacaaagaaccgtaactggctagcaacttcgaaggctatctagattcacaggtacacatgaaccatagtaacaaaactgttacaacacacacgctacggctgcaaaggacgcagcagcatttcaccaatcaagaaaacattggctgtagataggaggaaggaacatagctggggtggaaaaaacaaccgctgctcatctcccgcgttggagctgctacgaatccaaacttaattcagaaccacagataaagaatcaagcgttgatctccgcatcacactgctgctccctgtgacagcttcttcggctccagaacatgcctgagcaactggcccggtctagatccccctcccccctcttgtccagctccatgcttgcgctgtgcgagggccggggagactggaactcgggaccatcctgcacgtctgtatcgccgcatggatcgtcgtcgctgcacctgcaggttgggagggcggacgacgggaatgggctgcaggtgattggacagaccagctccgaagagacagctgccacacggttccgtctgatttcagctttggagaaagtggctggcgagtccatggaccgggcgttcagtatgcatgggttgcagaatgtgagcgctgaacctgatttaagcccttctgttggtgtgcttggtaacttggtgaaagacattatgccgttccgacaaagagggcacgggatggacccaggtgggcctgtgaactcgacacggatgttgctggttgagcagaggtagagagcacatttgatgcagaattcatgactgcaacctgaaccgaa

SEQ ID NO: 87512 - DNA, 1235 bp, Zea Mays
cgtttcaagaaccactcctccgtcacccccctcacaagccttgcttgtagtcgtagctactagcctcaacaactaacaccacacgacccactccattactacttagtttttcccttccttcgcagaccatcacctccatccagctccaggctcgctcgctcttctcccatggccgcaggagctgcctccacgggcaactggtcgcgtgcgaccggcgcaatgcgtgcggccatggtattgtgggtttgtttggcttacatgcgcggtgtgtgcgaggactggtcgccattgcggctgctggtgctcttggtggcggcgacgctggtggcgaggtggttcctaaacgccgtgcggccgcctccctcgacgccgtgcggcacgcccgggggcccgccggtgacggcgcccagggtgcggctgcgcgacgggcggtacctggcgtacgcccagtccggcgtgagcagggacagggcgcgcttcaaggtggtgtactcgcacggcttctccggcagccgcatggactcgccccgcgcttcccaggagctgctggaggagctgggcgtgtacatggtggcgttcgaccgggccgggtacggcgagagcgacccggacccgcggcggtcgccggagagcgcggcgctggacatccaggacctggccgacgcgctgggtctgggtgacaagttccacctcgtctgctcctccctcggttcccacgccggctgggccgccgtcaggtacatcccgcacaggctggcggggctggcaatgatggcgccggtcatcaactaccgctggcgcgggctgccgcgggggctggcccggcagctctacgggaggcagccggtcggcgaccagtggtcgctccgggtcgcctactacgcgccgtggctgctgcactggtggatgagccagccgtggctgcccacctccaccgtcgtcgacggctccgcgcccttccccaacgcgctggacgagaagaaccgcgtcatggcgctctccaacggcatgttccactcggttcgtctcgcctcgctcggttgccctgccttagttagcttctctctgtctcccaccacaatgaaacggacttcgatctttctttcttgcagagggcgaggctggcgacgcagcagggcgtacaggagtccttctaccgcgacatgacggtcatgttcgggaggtggacggacttcgagccgacggacctcgagaagccgccgtttccggtgcac

SEQ ID NO: 87513 - DNA, 264 bp, Zea Mays
atgctagtagatgtgcttgcctcagcatccctattagatgttgacgatgattcttggtctatccgcacaggtttatcctcggttaagtgtggctccataacaatatctcctgctccatcctgctcaaactttggtcttttggagccagagtcaccacccggatcggagaccgacgagcggccggaggcgatgctcttgagccgccgcatcatatgcatcctcctccctcagacgcagcccagcagcagcgaccccgaaccctag

SEQ ID NO: 87514 - DNA, 1660 bp, Zea Mays
gttccggtgccgcgtgcggcgtgcctgcccgagccgtgaagccgtgtcgcgccgacaagttgggtcacggccagctcgccccctgaccttccgcctccctgccaggtgccagctcgcacagttgcacacccacaaaacgcgccggagacaacgcacgtaactgccgagaagccgaagtccgaacgccgcccaccggcatccgccaagtgcggccgtttatatacttgcacgcctcccctcccctccagcctccccttgcacgacgtctccaccactacaccacacctcaagtccacaacaccaccagcctcgtctcagccgcttcagcataccacaccgcacgcaaacccaccgcgcgctacgaccaccaccgtcaccatggccgccgcgcgctacgacgtggagaagggcgggaggaataacggggatgggaagccttcgccgccgccgccgggccacctgtacccgcagcgcgacggggagagggagtgggtgccgtggttggtgccgctcgtcgtggccgtcaacatcgtgctcttcgccgtggcgatgtacgtcaacaactgcccggcccacgccgcctcgtctcgccgcggcggcgccggatcatgcgtcgcccgcgggttcctccaccgcttctcgttccagccgctcagcgagaacccgctcctcgggccctcgtcggccacgtgagtgctcaaggccccctagatccgtttcctgccttttcttcagttatcagtgttgcgcatcttctccgttagatcggtcggtatcacatagatagagaaaaaagattccataaccgactccgccctagtatctctgattgttcttccattcaaggattacaagtttatttttcccacagtaaacgctactcgaaattgttcgcatgccatgtgtacgatttctcatatcagaccaccgccaccttcttccccgcaggctgcagaagctgggagcgcttgtatgggacaaagttgtgcgggagcaccaggggtggaggctcgtcacctgcatctggctgcacgccggtgttgcccacctcctggccaacatgatcagcctcgtgctcatcgggctcagactggagcaacagtttggatacgtgagagttggcatcatctaccttgtctctggcgtcggaggcagcgtgctttcgtctctgttcatcaggaacaacatctctgtcggcgcttccggagctctgttcgggctccttggggccatgctgtcggagctcttcaccaactggaccatctatgcaaacaaggctgcagccctggtgaccctgctggtcgtcatcgccatcaacctcgccatcggcatcctcccgcacgtcgacaacttcgcgcacatcggagggttcctcaccggcttcctcctcgggttcgtcttactgatgcgcccgcactacggctggatgcagcgctacgccctgccctccgacgtcaagtacaccaccaagaagtacctggcctaccagtgggctctgctggccgtggcctcggtcctcgctgtcatcgggttcgccgtagggctggggatgcttttcagaggagtgaacgcgaatgatcactgcggctggtgccactacctcagctgtgttccgacctccagatggagctgtgggaactcgcagtcttactgtacataa

SEQ ID NO: 87515 - DNA, 1864 bp, Zea Mays
gttccggtgccgcgtgcggcgtgcctgcccgagccgtgaagccgtgtcgcgccgacaagttgggtcacggccagctcgccccctgaccttccgcctccctgccaggtgccagctcgcacagttgcacacccacaaaacgcgccggagacaacgcacgtaactgccgagaagccgaagtccgaacgccgcccaccggcatccgccaagtgcggccgtttatatacttgcacgcctcccctcccctccagcctccccttgcacgacgtctccaccactacaccacacctcaagtccacaacaccaccagcctcgtctcagccgcttcagcataccacaccgcacgcaaacccaccgcgcgctacgaccaccaccgtcaccatggccgccgcgcgctacgacgtggagaagggcgggaggaataacggggatgggaagccttcgccgccgccgccgggccacctgtacccgcagcgcgacggggagagggagtgggtgccgtggttggtgccgctcgtcgtggccgtcaacatcgtgctcttcgccgtggcgatgtacgtcaacaactgcccggcccacgccgcctcgtctcgccgcggcggcgccggatcatgcgtcgcccgcgggttcctccaccgcttctcgttccagccgctcagcgagaacccgctcctcgggccctcgtcggccacgtgagtgctcaaggccccctagatccgtttcctgccttttcttcagttatcagtgttgcgcatcttctccgttagatcggtcggtatcacatagatagagaaaaaagattccataaccgactccgccctagtatctctgattgttcttccattcaaggattacaagtttatttttcccacagtaaacgctactcgaaattgttcgcatgccatgtgtacgatttctcatatcagaccaccgccaccttcttccccgcaggctgcagaagctgggagcgcttgtatgggacaaagttgtgcgggagcaccaggggtggaggctcgtcacctgcatctggctgcacgccggtgttgcccacctcctggccaacatgatcagcctcgtgctcatcgggctcagactggagcaacagtttggatacgtgagagttggcatcatctaccttgtctctggcgtcggaggcagcgtgctttcgtctctgttcatcaggaacaacatctctgtcggcgcttccggagctctgttcgggctccttggggccatgctgtcggagctcttcaccaactggaccatctatgcaaacaaggctgcagccctggtgaccctgctggtcgtcatcgccatcaacctcgccatcggcatcctcccgcacgtcgacaacttcgcgcacatcggagggttcctcaccggcttcctcctcgggttcgtcttactgatgcgcccgcactacggctggatgcagcgctacgccctgccctccgacgtcaagtacaccaccaagaagtacctggcctaccagtgggctctgctggccgtggcctcggtcctcgctgtcatcgggttcgccgtagggctggggatgcttttcagaggagtgaacgcgaatgatcactgcggctggtgccactacctcagctgtgttccgacctccagatggagctgtgggaagtgaagatcggcgtgctgacaaaatggacttgaagccaggatagagcccatggccgcccatgggaccttttcgagcaagcatttccatgaatagatagatatacagctcgcagtcttactgtacataatgtcaccaggatgtggtttatatatgacattatttatgctatctgattgatcgatggttcattctatttattcagcgagtgaaaattgaaatgccttc

SEQ ID NO: 87516 - DNA, 1655 bp, Zea Mays
gttccggtgccgcgtgcggcgtgcctgcccgagccgtgaagccgtgtcgcgccgacaagttgggtcacggccagctcgccccctgaccttccgcctccctgccaggtgccagctcgcacagttgcacacccacaaaacgcgccggagacaacgcacgtaactgccgagaagccgaagtccgaacgccgcccaccggcatccgccaagtgcggccgtttatatacttgcacgcctcccctcccctccagcctccccttgcacgacgtctccaccactacaccacacctcaagtccacaacaccaccagcctcgtctcagccgcttcagcataccacaccgcacgcaaacccaccgcgcgctacgaccaccaccgtcaccatggccgccgcgcgctacgacgtggagaagggcgggaggaataacggggatgggaagccttcgccgccgccgccgggccacctgtacccgcagcgcgacggggagagggagtgggtgccgtggttggtgccgctcgtcgtggccgtcaacatcgtgctcttcgccgtggcgatgtacgtcaacaactgcccggcccacgccgcctcgtctcgccgcggcggcgccggatcatgcgtcgcccgcgggttcctccaccgcttctcgttccagccgctcagcgagaacccgctcctcgggccctcgtcggccacgctgcagaagctgggagcgcttgtatgggacaaagttgtgcgggagcaccaggggtggaggctcgtcacctgcatctggctgcacgccggtgttgcccacctcctggccaacatgatcagcctcgtgctcatcgggctcagactggagcaacagtttggatacgtgagagttggcatcatctaccttgtctctggcgtcggaggcagcgtgctttcgtctctgttcatcaggaacaacatctctgtcggcgcttccggagctctgttcgggctccttggggccatgctgtcggagctcttcaccaactggaccatctatgcaaacaaggctgcagccctggtgaccctgctggtcgtcatcgccatcaacctcgccatcggcatcctcccgcacgtcgacaacttcgcgcacatcggagggttcctcaccggcttcctcctcgggttcgtcttactgatgcgcccgcactacggctggatgcagcgctacgccctgccctccgacgtcaagtacaccaccaagaagtacctggcctaccagtgggctctgctggccgtggcctcggtcctcgctgtcatcgggttcgccgtagggctggggatgcttttcagaggagtgaacgcgaatgatcactgcggctggtgccactacctcagctgtgttccgacctccagatggagctgtgggaagtgaagatcggcgtgctgacaaaatggacttgaagccaggatagagcccatggccgcccatgggaccttttcgagcaagcatttccatgaatagatagatatacagctcgcagtcttactgtacataatgtcaccaggatgtggtttatatatgacattatttatgctatctgattgatcgatggttcattctatttattcagcgagtgaaaattgaaatgccttcaatctttcgcttgccagctatatttgaaaactagatgcagttgtgttgtt

SEQ ID NO: 87517 - DNA, 1800 bp, Zea Mays
gttccggtgccgcgtgcggcgtgcctgcccgagccgtgaagccgtgtcgcgccgacaagttgggtcacggccagctcgccccctgaccttccgcctccctgccaggtgccagctcgcacagttgcacacccacaaaacgcgccggagacaacgcacgtaactgccgagaagccgaagtccgaacgccgcccaccggcatccgccaagtgcggccgtttatatacttgcacgcctcccctcccctccagcctccccttgcacgacgtctccaccactacaccacacctcaagtccacaacaccaccagcctcgtctcagccgcttcagcataccacaccgcacgcaaacccaccgcgcgctacgaccaccaccgtcaccatggccgccgcgcgctacgacgtggagaagggcgggaggaataacggggatgggaagccttcgccgccgccgccgggccacctgtacccgcagcgcgacggggagagggagtgggtgccgtggttggtgccgctcgtcgtggccgtcaacatcgtgctcttcgccgtggcgatgtacgtcaacaactgcccggcccacgccgcctcgtctcgccgcggcggcgccggatcatgcgtcgcccgcgggttcctccaccgcttctcgttccagccgctcagcgagaacccgctcctcgggccctcgtcggccacaagctgggagcgcttgtatgggacaaagttgtgcgggagcaccaggggtggaggctcgtcacctgcatctggctgcacgccggtgttgcccacctcctggccaacatgatcagcctcgtgctcatcgggctcagactggagcaacagtttggatacgtgagagttggcatcatctaccttgtctctggcgtcggaggcagcgtgctttcgtctctgttcatcaggaacaacatctctgtcggcgcttccggagctctgttcgggctccttggggccatgctgtcggagctcttcaccaactggaccatctatgcaaacaaggctgcagccctggtgaccctgctggtcgtcatcgccatcaacctcgccatcggcatcctcccgcacgtcgacaacttcgcgcacatcggagggttcctcaccggcttcctcctcgggttcgtcttactgatgcgcccgcactacggctggatgcagcgctacgccctgccctccgacgtcaagtacaccaccaagaagtacctggcctaccagtgggctctgctggccgtggcctcggtcctcgctgtcatcgggttcgccgtagggctggggatgcttttcagaggagtgaacgcgaatgatcactgcggctggtgccactacctcagctgtgttccgacctccagatggagctgtgggaagtgaagatcggcgtgctgacaaaatggacttgaagccaggatagagcccatggccgcccatgggaccttttcgagcaagcatttccatgaatagatagatatacagctcgcagtcttactgtacataatgtcaccaggatgtggtttatatatgacattatttatgctatctgattgatcgatggttcattctatttattcagcgagtgaaaattgaaatgccttcaatctttcgcttgccagctatatttgaaaactagatgcagttgtgttgttatcaactcccccgttcttttttatttatcgtcatttagttaaaaaataaactagtgagccacaaagaaggtagacctgtcaaccacaatcggccttccatgattactgtggttatttcataatataagttatgtgatgctggttttcatctc

SEQ ID NO: 87518 - DNA, 849 bp, Zea Mays
aggagggctttatctgatctggatgtgcgttcccgttttcgttgcagtgagagttggcatcatctaccttgtctctggcgtcggaggcagcgtgctttcgtctctgttcatcaggaacaacatctctgtcggcgcttccggagctctgttcgggctccttggggccatgctgtcggagctcttcaccaactggaccatctatgcaaacaaggctgcagccctggtgaccctgctggtcgtcatcgccatcaacctcgccatcggcatcctcccgcacgtcgacaacttcgcgcacatcggagggttcctcaccggcttcctcctcgggttcgtcttactgatgcgcccgcactacggctggatgcagcgctacgccctgccctccgacgtcaagtacaccaccaagaagtacctggcctaccagtgggctctgctggccgtggcctcggtcctcgctgtcatcgggttcgccgtagggctggggatgcttttcagaggagtgaacgcgaatgatcactgcggctggtgccactacctcagctgtgttccgacctccagatggagctgtgggaagtgaagatcggcgtgctgacaaaatggacttgaagccaggatagagcccatggccgcccatgggaccttttcgagcaagcatttccatgaatagatagatatacagctcgcagtcttactgtacataatgtcaccaggatgtggtttatatatgacattatttatgctatctgattgatcgatggttcattctatttattcagcgagtgaaaattgaaatgccttcaatctttcgcttgccagctatatttgaaaactagatgcagttgtgttgtt

SEQ ID NO: 87519 - DNA, 1757 bp, Zea Mays
catgaaacttgttttagtttaacaataaatctaggtatattcttgtactggtttcagtttgtaatggtttaaaggtcatggatcaactttcataattcaacaataaatcattggctttatagtccaagattctttttttgctgccagatttctctgttcccagagtttgatgtctctgtgcttggcagggaagatggctaccattgttactcgattgttcctgcgtgtccctgctatttgtttgacaggaaattgtgcatcgcattgttgtttgacagagaattggctaggttcactgtaattttaagttacagggttgcacaatgaaagatccggttcagtctacaaacaacacatgttcagtgtactctggaagttgcagttctgcacactcaaacacatgttcagtcaaacacaggttcagtctacattgcaggtttgggttagcagctgaaccttgtgcatgtatattctgttttttgtcaggccttgttgattaaagtgattagttttgtgtactctgggagagaaaccattcggtgcttactggtcacttattattattgttagagataaatttgtgcagccgcatagggcttctatgtttttggtatgtatgattctatttatggtagagatagagcttgttgcccattaggttgtacccagtgcttcgtagtgcaatggttaattttaccacatgcctctccttctatcaggattgatctttacacgtacagtcaatcatataggctccttaacttgactgagttgttttgcttattaaaaattacaaagtgttcctgttcaagttgggaaaacgcccccaatcttgcaatactttggcccattgctaactcgagggaagctcaatgcctttcagtctcttgagctatctcgacttgtcgtcaatcagaacaaaaataatcttctaaaaaattggtttgcagaagataagctggagggaagtagtgcagaagataatcacctgagttgttgcagtgctgagcgctggcgaagaaaagtaaacaagcgacacaaaaaaatgacatgtggacgcccaactgcgtcgtgtggtggctacgacagatgaaaaataaaaaagcgacctgtgaacgtccagcgcgtcagctacaagaaatgaaatcatgcgccacatgtcatgatatcaataggcctgcaaaattattctggttgtttcttttgttctctcggaaaatgacaagatttatgaggtgtgtgtatggtctttccttcagcagtcacacagctgcaattgctgctagaaacaatgggattccagtgcaaattatttgacagtgaatgtctccattttttccttttcataattcacttatgccatgtgttgctcttatgctctctttttgtgtgactattatctcgcactataggtcaaacaatggacttcagaacacagaacaacaaaagatatccaagtatatcagcacacatgttacagaggctttccctgtgagaaaagcaggaaagtttggtaacgaaaattgcaagttggatatttggttcggtgctaagtgtgaataccctacatgatgccttatagaatatcgtgaaggtttctaagtctgttgattctacaacaacctcaagttttgcaccatcttcactataatgctgcaaaaccaggtttcaaggaagttgagaaatggagtgaaaatgctttgtggagtgtatctgagcttcatgttggcgatgagaagcagactggttctaacaaa

SEQ ID NO: 87520 - DNA, 1700 bp, Zea Mays
accttcctctttaaattgcccctcctattcccccgtcccgaagctagaggctctctggcgccgacggccgacccacacgcgcgtccagcgatttcgccggggggagatcttgccattccgtggagcaccatccgcggtagcctagccgcgactggggatcggggcttgcgggccgtggagccacccagaaggtagccgggaaaagcttgatccggccggggacggggccttcggaggttcgtccctcgatcgggtgtcgtctgcgaaagccgggtcgaacaaatcgtcgcgactggaggcggcgcggggtcatgggggcgtgggtctcggtcctgctcgggatggacggagccgcggcggccgggcctgctgctgtgggcctgggcgacctgccggagctctgcgccgcccaggtgctgctccggctcgacccgccggagatctgcaggctcgcgcaggtcaaccacgcgttccgcggcgccgcgggggctgacttcgtgtgggaagccaagctgccggagaactacaactatctgatggagttcgtggggagcggcgacgaggggaagcggaggcggcggcgggccgggaagaaggagatctacgcgaggctcgccaggcctgtgccttttggcgacggcaagaaggaattctggttggacaagaacaaaggcatgatctgtatggcactgtcgtccaaagcactggtgattactgggattgatgacagaagatactggcaacacatgccaacttcagaatcgaggtgaatatggctttgatatcacatttactaatatttgtctgttcaatttatgccagttttctgaaaacaaagatggtctgttggcattaattgcgatggaatgggctgaagatatttactcatgattccagtctgtagcctaccttcagcaaatctggtggtttgaggtggttggtgaagtcgatttctgcttccctgttggaacatatagcttgtacttcagggtccatcttgggaagttctacagacgatttggccgccgccagtgcacctcagagcatgttcatggttgggacaagaagcctgttcgcttccagctatcgacctctgacgggcagcaggcattgtctcagtgctacctggaggagcccgggagctgggtcctgtaccatgctggcgattttgtggcctcaaagcctgaccagctgatgaagctgaagttctccatggcacagatcgactgcacgcacacaaaaggcgggctgtgcatcgactcggttcttatctatccaaaagggaaggggtttcaccaggagagggtggtcaggtctcagaaatgagggttgtagatgttgtggaggtattcacattaggatgttagagcaaatgcagcttgcagcctgatcttatttttactttgggctctagttcgcagcagaggtgaagtgtatgtggttgtagaactcaggtattgtgtggtcaggtgaccaccagagtgctctgtcagtcctttggcaaggtcgttttcgccccccttcagctgaatttggacagcgagatagccatgaaactgtactgaaatgagttcgaaggtgtcattcccagtttctaatttgctttctactgcttagtttcggatgctccctttttcctatttgtcatgatccggtcttgacttggtcttaacttaatattaagaatcattattatgatt

SEQ ID NO: 87521 - DNA, 1540 bp, Zea Mays
cccgaagctagaggctctctggcgccgacggccgacccacacgcgcgtccagcgatttcgccggggggagatcttgccattccgtggagcaccatccgcggtagcctagccgcgactggggatcggggcttgcgggccgtggagccacccagaaggtagccgggaaaagcttgatccggccggggacggggccttcggaggttcgtccctcgatcgggtgtcgtctgcgaaagccgggtcgaacaaatcgtcgcgactggaggcggcgcggggtcatgggggcgtgggtctcggtcctgctcgggatggacggagccgcggcggccgggcctgctgctgtgggcctgggcgacctgccggagctctgcgccgcccaggtgctgctccggctcgacccgccggagatctgcaggctcgcgcaggtcaaccacgcgttccgcggcgccgcgggggctgacttcgtgtgggaagccaagctgccggagaactacaactatctgatggagttcgtggggagcggcgacgaggggaagcggaggcggcggcgggccgggaagaaggagatctacgcgaggctcgccaggcctgtgccttttggcgacggcaagaaggaattctggttggacaagaacaaaggcatgatctgtatggcactgtcgtccaaagcactggtgattactgggattgatgacagaagatactggcaacacatgccaacttcagaatcgagattccagtctgtagcctaccttcagcaaatctggtggtttgaggtggttggtgaagtcgatttctgcttccctgttggaacatatagcttgtacttcagggtccatcttgggaagttctacagacgatttggccgccgccagtgcacctcagagcatgttcatggttgggacaagaagcctgttcgcttccagctatcgacctctgacgggcagcaggcattgtctcagtgctacctggaggagcccgggagctgggtcctgtaccatgctggcgattttgtggcctcaaagcctgaccagctgatgaagctgaagttctccatggcacagatcgactgcacgcacacaaaaggcgggctgtgcatcgactcggttcttatctatccaaaagggaaggggtttcaccaggagagggtggtcaggtctcagaaatgagggttgtagatgttgtggaggtattcacattaggatgttagagcaaatgcagcttgcagcctgatcttatttttactttgggctctagttcgcagcagaggtgaagtgtatgtggttgtagaactcaggtattgtgtggtcaggtgaccaccagagtgctctgtcagtcctttggcaaggtcgttttcgccccccttcagctgaatttggacagcgagatagccatgaaactgtactgaaatgagttcgaaggtgtcattcccagtttctaatttgctttctactgcttagtttcggatgctccctttttcctatttgtcatgatccggtcttgacttggtcttaacttaatattaagaatcattattatgatt

SEQ ID NO: 87522 - DNA, 1544 bp, Zea Mays
agctagaggctctctggcgccgacggccgacccacacgcgcgtccagcgatttcgccggggggagatcttgccattccgtggagcaccatccgcggtagcctagccgcgactggggatcggggcttgcgggccgtggagccacccagaaggtagccgggaaaagcttgatccggccggggacggggccttcggaggttcgtccctcgatcgggtgtcgtctgcgaaagccgggtcgaacaaatcgtcgcgactggaggcggcgcggggtcatgggggcgtgggtctcggtcctgctcgggatggacggagccgcggcggccgggcctgctgctgtgggcctgggcgacctgccggagctctgcgccgcccaggtgctgctccggctcgacccgccggagatctgcaggctcgcgcaggtcaaccacgcgttccgcggcgccgcgggggctgacttcgtgtgggaagccaagctgccggagaactacaactatctgatggagttcgtggggagcggcgacgaggggaagcggaggcggcggcgggccgggaagaaggagatctacgcgaggctcgccaggcctgtgccttttggcgacggcaagaaggaattctggttggacaagaacaaaggcatgatctgtatggcactgtcgtccaaagcactgttttctgaaaacaaagatggtctgttggcattaattgcgatggaatgggctgaagatatttactcatgattccagtctgtagcctaccttcagcaaatctggtggtttgaggtggttggtgaagtcgatttctgcttccctgttggaacatatagcttgtacttcagggtccatcttgggaagttctacagacgatttggccgccgccagtgcacctcagagcatgttcatggttgggacaagaagcctgttcgcttccagctatcgacctctgacgggcagcaggcattgtctcagtgctacctggaggagcccgggagctgggtcctgtaccatgctggcgattttgtggcctcaaagcctgaccagctgatgaagctgaagttctccatggcacagatcgactgcacgcacacaaaaggcgggctgtgcatcgactcggttcttatctatccaaaagggaaggggtttcaccaggagagggtggtcaggtctcagaaatgagggttgtagatgttgtggaggtattcacattaggatgttagagcaaatgcagcttgcagcctgatcttatttttactttgggctctagttcgcagcagaggtgaagtgtatgtggttgtagaactcaggtattgtgtggtcaggtgaccaccagagtgctctgtcagtcctttggcaaggtcgttttcgccccccttcagctgaatttggacagcgagatagccatgaaactgtactgaaatgagttcgaaggtgtcattcccagtttctaatttgctttctactgcttagtttcggatgctccctttttcctatttgtcatgatccggtcttgacttggtcttaacttaatattaagaatcattattatgatt

SEQ ID NO: 87523 - DNA, 210 bp, Zea Mays
tcggtcgacgccgcctctccatcttccccgaggctgctccaggtgcttcctttgcctccctcacataggggtgaggcatggcgtcgctggtggcgtcgacggccatggtcgacgcggtggtgatgatgcacctcacgcaacacgacactgtggtgatcgacaagcaactcatgggcccgatagggttcagcgtcgaccagctcatggtca

SEQ ID NO: 87524 - DNA, 1589 bp, Zea Mays
gtatgcgttcggcgacgcgacgcgcacggcgcaccattccgcggccacgaagagcacaatcctgttcgccacgccatgcctctccacgcccgcgcaccgccgctccgccactcccaccttctactcaccgccgccaccgctcggctccgcccgtgcgcagcgccagcgaccaagccccgccgccgctccctcgtcctcgtccgcgcctccagctcggaccctccgcagcagcagctcaacctctccgtgctccgcttcaccctcgggattccggggctggacgaatcgtacctcccccggtggataggcctcggtttcggcgcgctcgtcgtgctcaaccacctcctctctgcgtccccgacgcccgcgcagctcaggtccgaggctgtggggctgtgcctggccgcgttctcggcgacgctgccgttcctggggaggttccttgagggcgctgatgctgccagccgagtgccgttgcccgaggggagcatccaagtattcgtcatgtctgagaacctgtcagctgtgcagaaggaggacatggcgtgggcgtcgtacgtcctgctccggaacacaaacaccacgtctgtggtcatagcaattggggatctcttgtgcgtacgaggatactggaatccacctgcaaatacttcaaaatattccacgatcgagtggttcaaaagtcagatgcagcaactaggacttgttgatttgaggggtgctttatacttccctaattcgtcaggaaagtttctcttacgctgtcaatcatgctactctgaccagattctcagcttgcgaagattctgccagatgggattctttctgtgctagcgcaacctattctgagtcctgatccagctaataatgaaacaaaaactgaaggtgtcatcctgttggcctgcaatgcaaattatgcatatagtgagaaagatagggcttggataagaacagttgcagacaaatttcaacgtgcttaatttagaggtaccaaagaaatgttgacagtcaggcagtactggaaaatggaccgggaaagattggggagtgtaaagtagactgactggtccaagaaggatttggagtcttggcaacgtggactgagcagaataagagagttttgcagttgggaggaaatcagcattaagctactgtttattagggttggcgctagttgaagcaaaatagtccagcaatagtttgttcagttggctagagactatgtggtgatgtgtttggtttgtctctgtgcctcttgctttggtatgtatgtctgattggatttggcattgaagcagaaaggctgctccagagattagtgacatgtgcaaagtagcaatgctgtcataatttacgcatactccagcccaattgaggcagttgatcacctggctgcatttatataagcagtaaaagcatttttagttcaaagtgttgtcacatttaagattgcaaatactgctgatcaatcacattccttcatatatgtacctagattttctattgcaggcttgcagctagtgaccttttcagttgctattgctagtatacacaaacttaacagacaagggaaatgtttgaatcttctg

SEQ ID NO: 87525 - DNA, 1548 bp, Zea Mays
gtatgcgttcggcgacgcgacgcgcacggcgcaccattccgcggccacgaagagcacaatcctgttcgccacgccatgcctctccacgcccgcgcaccgccgctccgccactcccaccttctactcaccgccgccaccgctcggctccgcccgtgcgcagcgccagcgaccaagccccgccgccgctccctcgtcctcgtccgcgcctccagctcggaccctccgcagcagcagctcaacctctccgtgctccgcttcaccctcgggattccggggctggacgaatcgtacctcccccggtggataggcctcggtttcggcgcgctcgtcgtgctcaaccacctcctctctgcgtccccgacgcccgcgcagctcaggtccgaggctgtggggctgtgcctggccgcgttctcggcgacgctgccgttcctggggaggttccttgagggcgctgatgctgccagccgagtgccgttgcccgaggggagcatccaagtattcgtcatgtctgagaacctgtcagctgtgcagaaggaggacatggcgtgggcgtcgtacgtcctgctccggaacacaaacaccacgtctgtggtcatagcaattggggatctcttgtgcgtacgaggatactggaatccacctgcaaatacttcaaaatattccacgatcgagtggttcaaaagtcagatgcagcaactaggacttgttgatttgaggggtgctttatacttccctaattcgtcagattctcagcttgcgaagattctgccagatgggattctttctgtgctagcgcaacctattctgagtcctgatccagctaataatgaaacaaaaactgaaggtgtcatcctgttggcctgcaatgcaaattatgcatatagtgagaaagatagggcttggataagaacagttgcagacaaatttcaacgtgcttaatttagaggtaccaaagaaatgttgacagtcaggcagtactggaaaatggaccgggaaagattggggagtgtaaagtagactgactggtccaagaaggatttggagtcttggcaacgtggactgagcagaataagagagttttgcagttgggaggaaatcagcattaagctactgtttattagggttggcgctagttgaagcaaaatagtccagcaatagtttgttcagttggctagagactatgtggtgatgtgtttggtttgtctctgtgcctcttgctttggtatgtatgtctgattggatttggcattgaagcagaaaggctgctccagagattagtgacatgtgcaaagtagcaatgctgtcataatttacgcatactccagcccaattgaggcagttgatcacctggctgcatttatataagcagtaaaagcatttttagttcaaagtgttgtcacatttaagattgcaaatactgctgatcaatcacattccttcatatatgtacctagattttctattgcaggcttgcagctagtgaccttttcagttgctattgctagtatacacaaacttaacagacaagggaaatgtttgaatcttctg

SEQ ID NO: 87526 - DNA, 1539 bp, Zea Mays
gtatgcgttcggcgacgcgacgcgcacggcgcaccattccgcggccacgaagagcacaatcctgttcgccacgccatgcctctccacgcccgcgcaccgccgctccgccactcccaccttctactcaccgccgccaccgctcggctccgcccgtgcgcagcgccagcgaccaagccccgccgccgctccctcgtcctcgtccgcgcctccagctcggaccctccgcagcagcagctcaacctctccgtgctccgcttcaccctcgggattccggggctggacgaatcgtacctcccccggtggataggcctcggtttcggcgcgctcgtcgtgctcaaccacctcctctctgcgtccccgacgcccgcgcagctcaggtccgaggctgtggggctgtgcctggccgcgttctcggcgacgctgccgttcctggggaggttccttgagggcgctgatgctgccagccgagtgccgttgcccgaggggagcatccaagtattcgtcatgtctgagaacctgtcagctgtgcagaaggaggacatggcgtgggcgtcgtacgtcctgctccggaacacaaacaccacgtctgtggtcatagcaattggggatctcttgtgcgtacgaggatactggaatccacctgcaaatacttcaaaatattccacgatcgagtggttcaaaagtcagatgcagcaactaggacttgttgatttgaggggtgctttatacttccctaattcgtcagattctcagcttgcgaagattctgccagatgggattctttctgtgctagcgcaacctattctgagtcctgatccagctaataatgaaacaaaaactgaaggtgtcatcctgttggcctgcaatgcaaattatgcatatagtgagaaagatagggcttggataagaacagttgcagacaaatttcaacgtgcttaatttagagaaatgttgacagtcaggcagtactggaaaatggaccgggaaagattggggagtgtaaagtagactgactggtccaagaaggatttggagtcttggcaacgtggactgagcagaataagagagttttgcagttgggaggaaatcagcattaagctactgtttattagggttggcgctagttgaagcaaaatagtccagcaatagtttgttcagttggctagagactatgtggtgatgtgtttggtttgtctctgtgcctcttgctttggtatgtatgtctgattggatttggcattgaagcagaaaggctgctccagagattagtgacatgtgcaaagtagcaatgctgtcataatttacgcatactccagcccaattgaggcagttgatcacctggctgcatttatataagcagtaaaagcatttttagttcaaagtgttgtcacatttaagattgcaaatactgctgatcaatcacattccttcatatatgtacctagattttctattgcaggcttgcagctagtgaccttttcagttgctattgctagtatacacaaacttaacagacaagggaaatgtttgaatcttctg

SEQ ID NO: 87527 - DNA, 1532 bp, Zea Mays
gtatgcgttcggcgacgcgacgcgcacggcgcaccattccgcggccacgaagagcacaatcctgttcgccacgccatgcctctccacgcccgcgcaccgccgctccgccactcccaccttctactcaccgccgccaccgctcggctccgcccgtgcgcagcgccagcgaccaagccccgccgccgctccctcgtcctcgtccgcgcctccagctcggaccctccgcagcagcagctcaacctctccgtgctccgcttcaccctcgggattccggggctggacgaatcgtacctcccccggtggataggcctcggtttcggcgcgctcgtcgtgctcaaccacctcctctctgcgtccccgacgcccgcgcagctcaggtccgaggctgtggggctgtgcctggccgcgttctcggcgacgctgccgttcctggggaggttccttgagggcgctgatgctgccagccgagtgccgttgcccgaggggagcatccaagtattcgtcatgtctgagaacctgtcagctgtgcagaaggaggacatggcgtgggcgtcgtacgtcctgctccggaacacaaacaccacgtctgtggtcatagcaattggggatctcttgtgcgtacgaggatactggaatccacctgcaaatacttcaaaatattccacgatcgagtggttcaaaagtcagatgcagcaactaggacttgttgatttgaggggtgctttatacttccctaattcgtcagattctcagcttgcgaagattctgccagatgggattctttctgtgctagcgcaacctattctgagtcctgatccagctaataatgaaacaaaaactgaaggtgtcatcctgttggcctgcaatgcaaattatgcatatagtgagaaagatagggcttggataagaacagttgcagacaaatttcaacgtgcttaatttagaggtaccaaaggcagtactggaaaatggaccgggaaagattggggagtgtaaagtagactgactggtccaagaaggatttggagtcttggcaacgtggactgagcagaataagagagttttgcagttgggaggaaatcagcattaagctactgtttattagggttggcgctagttgaagcaaaatagtccagcaatagtttgttcagttggctagagactatgtggtgatgtgtttggtttgtctctgtgcctcttgctttggtatgtatgtctgattggatttggcattgaagcagaaaggctgctccagagattagtgacatgtgcaaagtagcaatgctgtcataatttacgcatactccagcccaattgaggcagttgatcacctggctgcatttatataagcagtaaaagcatttttagttcaaagtgttgtcacatttaagattgcaaatactgctgatcaatcacattccttcatatatgtacctagattttctattgcaggcttgcagctagtgaccttttcagttgctattgctagtatacacaaacttaacagacaagggaaatgtttgaatcttctg

SEQ ID NO: 87528 - DNA, 1619 bp, Zea Mays
gtatgcgttcggcgacgcgacgcgcacggcgcaccattccgcggccacgaagagcacaatcctgttcgccacgccatgcctctccacgcccgcgcaccgccgctccgccactcccaccttctactcaccgccgccaccgctcggctccgcccgtgcgcagcgccagcgaccaagccccgccgccgctccctcgtcctcgtccgcgcctccagctcggaccctccgcagcagcagctcaacctctccgtgctccgcttcaccctcgggattccggggctggacgaatcgtacctcccccggtggataggcctcggtttcggcgcgctcgtcgtgctcaaccacctcctctctgcgtccccgacgcccgcgcagctcgtcggtcctcggcgactcctcctcacccccctccgtcccctttcttcacccgtaaccgtcccgcgtaactggttgtgcccgcctactcgcagaggtccgaggctgtggggctgtgcctggccgcgttctcggcgacgctgccgttcctggggaggttccttgagggcgctgatgctgccagccgagtgccgttgcccgaggggagcatccaagtattcgtcatgtctgagaacctgtcagctgtgcagaaggaggacatggcgtgggcgtcgtacgtcctgctccggaacacaaacaccacgtctgtggtcatagcaattggggatctcttgtgcgtacgaggatactggaatccacctgcaaatacttcaaaatattccacgatcgagtggttcaaaagtcagatgcagcaactaggacttgttgatttgaggggtgctttatacttccctaattcgtcagattctcagcttgcgaagattctgccagatgggattctttctgtgctagcgcaacctattctgagtcctgatccagctaataatgaaacaaaaactgaaggtgtcatcctgttggcctgcaatgcaaattatgcatatagtgagaaagatagggcttggataagaacagttgcagacaaatttcaacgtgcttaatttagagtcaggcagtactggaaaatggaccgggaaagattggggagtgtaaagtagactgactggtccaagaaggatttggagtcttggcaacgtggactgagcagaataagagagttttgcagttgggaggaaatcagcattaagctactgtttattagggttggcgctagttgaagcaaaatagtccagcaatagtttgttcagttggctagagactatgtggtgatgtgtttggtttgtctctgtgcctcttgctttggtatgtatgtctgattggatttggcattgaagcagaaaggctgctccagagattagtgacatgtgcaaagtagcaatgctgtcataatttacgcatactccagcccaattgaggcagttgatcacctggctgcatttatataagcagtaaaagcatttttagttcaaagtgttgtcacatttaagattgcaaatactgctgatcaatcacattccttcatatatgtacctagattttctattgcaggcttgcagctagtgaccttttcagttgctattgctagtatacacaaacttaacagacaagggaaatgtttgaatcttctg

SEQ ID NO: 87529 - DNA, 1438 bp, Zea Mays
gtatgcgttcggcgacgcgacgcgcacggcgcaccattccgcggccacgaagagcacaatcctgttcgccacgccatgcctctccacgcccgcgcaccgccgctccgccactcccaccttctactcaccgccgccaccgctcggctccgcccgtgcgcagcgccagcgaccaagccccgccgccgctccctcgtcctcgtccgcgcctccagctcggaccctccgcagcagcagctcaacctctccgtgctccgcttcaccctcgaggtccgaggctgtggggctgtgcctggccgcgttctcggcgacgctgccgttcctggggaggttccttgagggcgctgatgctgccagccgagtgccgttgcccgaggggagcatccaagtattcgtcatgtctgagaacctgtcagctgtgcagaaggaggacatggcgtgggcgtcgtacgtcctgctccggaacacaaacaccacgtctgtggtcatagcaattggggatctcttgtgcgtacgaggatactggaatccacctgcaaatacttcaaaatattccacgatcgagtggttcaaaagtcagatgcagcaactaggacttgttgatttgaggggtgctttatacttccctaattcgtcagattctcagcttgcgaagattctgccagatgggattctttctgtgctagcgcaacctattctgagtcctgatccagctaataatgaaacaaaaactgaaggtgtcatcctgttggcctgcaatgcaaattatgcatatagtgagaaagatagggcttggataagaacagttgcagacaaatttcaacgtgcttaatttagaggtaccaaagaaatgttgacagtcaggcagtactggaaaatggaccgggaaagattggggagtgtaaagtagactgactggtccaagaaggatttggagtcttggcaacgtggactgagcagaataagagagttttgcagttgggaggaaatcagcattaagctactgtttattagggttggcgctagttgaagcaaaatagtccagcaatagtttgttcagttggctagagactatgtggtgatgtgtttggtttgtctctgtgcctcttgctttggtatgtatgtctgattggatttggcattgaagcagaaaggctgctccagagattagtgacatgtgcaaagtagcaatgctgtcataatttacgcatactccagcccaattgaggcagttgatcacctggctgcatttatataagcagtaaaagcatttttagttcaaagtgttgtcacatttaagattgcaaatactgctgatcaatcacattccttcatatatgtacctagattttctattgcaggcttgcagctagtgaccttttcagttgctattgctagtatacacaaacttaacagacaagggaaatgtttgaatcttctg

SEQ ID NO: 87530 - DNA, 625 bp, Zea Mays
cgctccggtcctcagcgcccgttccacggggcccacgctcctcgatccgacggctcgcttcgcctcgaattcaaaaactcgttccgaagcagcagccgtcctgtgatcctgtactcctgtgtcctgtccaagtccaccggaatttaaatccctcaacgactcgctagctggggacttacacgacgcgacgccagaggaggaggaactctgtcggggggcggctacaagaggcggtggtgctcgcgccaatctacctctggttggactctgcgtcgcggcgagcggcgccgggaggaggaggtggaggccgccggaaagtggcggtgggcgaggaggggtggcgggcggcgacacgaccggcatcggtgagagaggtaaccgcaggacatggctctgtttttttatcccctttttttcgctcttcgttctcgatcgcgcttcgctccatgtgctgggagggtgagcttcgaagccaagcgtccgctcttcctgctccgctcctggctgccgcattcgccattcggccgtgctttctccaccatgcaagccatgatctctgcaatagtgtctcgaattttctaacaatcacacgccaagtcgtcgtttgcttggggttggggagttg

SEQ ID NO: 87531 - DNA, 2374 bp, Zea Mays
cgctccggtcctcagcgcccgttccacggggcccacgctcctcgatccgacggctcgcttcgcctcgaattcaaaaactcgttccgaagcagcagccgtcctgtgatcctgtactcctgtgtcctgtccaagtccaccggaatttaaatccctcaacgactcgctagctggggacttacacgacgcgacgccagaggaggaggaactctgtcggggggcggctacaagaggcggtggtgctcgcgccaatctacctctggttggactctgcgtcgcggcgagcggcgccgggaggaggaggtggaggccgccggaaagtggcggtgggcgaggaggggtggcgggcggcgacacgaccggcatcggtgagagaggtttaccagcttctggtgtcctagctgccaagaaatgagctttgggagctgtccggccgtggccgggggcgcgacggcagaggagctgcttgaacgggcgcgggggctggtgccacccgccctggccgctgcgcgcgcggccactggcttcggtgggcggtggaaggctatcgcagcgaggctggggaggctgccgcagtgcctgtcggacctgtctagccacccctgcttctccaagaactcgctctgtcgggagctgttgcagtcggtggctgcaacgctagcggaggccgccgagctcggtgcgcgctgccacgagcctccgaaggcggggaagctgcagatgcagagcgacctcgacgcgctggccgggaagctggatctcaacctcagggattgctctcttcttgtcaagactggtgtgttgtctgacgcgacggttcccgcggccccggctgagacagcgtcggctgctggcgcacaggtggacgtgcgggagctgcttgccaggctgcagattgggcacgcagaggcgaagcaccgggctgtggatggcctgctcgatgctctgcgcgaggacgagaagagcgtgctgtcggcgctcggccgtggcaacgtggccgcactcgtgcagctgctcacggcgacgacacccaaggttagggagaaggccgccactgttttgtgcttgctcgccgagtctggcagctgcgagggcttactggtgtcagaaggcgcgctgccaccgctcatccggctggctgagtccggtagccttgttgggcgggagaaggccgtcatcacgctgcagcggctgtccatgtcggccgacattgcccgtgcgatcgtcggccacagcggcttccgcgctctcatcgacatgtgccagaccggggactcgatcacacagtccgccgcgtcgggagcgctcaagaacatctctgcggtgccagaagtccggcaagcgctggccgaggaaggcgtggtgcgagtcatgatcaacatcctcgactccggcgtcgttctcggctccaaggagtacgccgcggagtgcctgcagaacctcacgtcaagcaacgacaacctgcggcgcgccgtcgtgtccgagggcggcctccgtagcctgctcgcctacctcgacgggccactgccgcaggagccacccgtggccgcgctccggaacctggtcaccgttgtcccacctgacagcctggtgtcactttgcgtgctcccgcgcctcgcacacgtgctccgcgacggttccgtgggtgcccagcaggctgccgcggcgaccatctgcaaggtctccggcagcatggacatgaagcggctggtgggcgagcacgggtgcgtcctgctcctggtgcgcctgctggaggccaagtcgaacggcgctcgcgaggccgcggcgcaggcggtggcgagcctgatggggtgccccgcgaacgcgagggacgtcaagaaggacgagaagagcgtgcccaacctggtgcagctgctggacccgagcccccagaacacggccaagaagtacgccatctcctgcctgctggcgctttcggcgagcaagcggtgcaagaagctgatggtctctcacggcgccatcgggtacctgaagaagctctcggagaaggacgtggccggcgcgaggaagctgctcgagaagctggaccgcggtaggcttcgcagcctgttcagcaggaagtagcgtgatgattgatgatctctgaagcagctagcggtgaagcgatagtgtgaaggtgcacggtaacctgtacaaagatatcgtcctgtttcatagcctctatgaagtgaagtgcggcagagcggtggacagagttgcgtgatgcggcagagcgatcgtgtgaagtgttgtaatttcggtggctaatatgtgtgtaaggcccagttcgttcgttagctccctaaccatggctgagtgaattcccaggcagcggtccctcccgtcgtaatgctaataaaatctctttagggaaaga

SEQ ID NO: 87532 - DNA, 2272 bp, Zea Mays
atgaaatgattcccagatcctcctcccaatcatgcagcgatcgagtaggagcaacaacgcccacgcgcgcagcggcgttcccaggatggttgtcgtttgattgatgatcggcgtccacgcgtcctgattgcagccaatctacctctggttggactctgcgtcgcggcgagcggcgccgggaggaggaggtggaggccgccggaaagtggcggtgggcgaggaggggtggcgggcggcgacacgaccggcatcggtgagagaggtttaccagcttctggtgtcctagctgccaagaaatgagctttgggagctgtccggccgtggccgggggcgcgacggcagaggagctgcttgaacgggcgcgggggctggtgccacccgccctggccgctgcgcgcgcggccactggcttcggtgggcggtggaaggctatcgcagcgaggctggggaggctgccgcagtgcctgtcggacctgtctagccacccctgcttctccaagaactcgctctgtcgggagctgttgcagtcggtggctgcaacgctagcggaggccgccgagctcggtgcgcgctgccacgagcctccgaaggcggggaagctgcagatgcagagcgacctcgacgcgctggccgggaagctggatctcaacctcagggattgctctcttcttgtcaagactggtgtgttgtctgacgcgacggttcccgcggccccggctgagacagcgtcggctgctggcgcacaggtggacgtgcgggagctgcttgccaggctgcagattgggcacgcagaggcgaagcaccgggctgtggatggcctgctcgatgctctgcgcgaggacgagaagagcgtgctgtcggcgctcggccgtggcaacgtggccgcactcgtgcagctgctcacggcgacgacacccaaggttagggagaaggccgccactgttttgtgcttgctcgccgagtctggcagctgcgagggcttactggtgtcagaaggcgcgctgccaccgctcatccggctggctgagtccggtagccttgttgggcgggagaaggccgtcatcacgctgcagcggctgtccatgtcggccgacattgcccgtgcgatcgtcggccacagcggcttccgcgctctcatcgacatgtgccagaccggggactcgatcacacagtccgccgcgtcgggagcgctcaagaacatctctgcggtgccagaagtccggcaagcgctggccgaggaaggcgtggtgcgagtcatgatcaacatcctcgactccggcgtcgttctcggctccaaggagtacgccgcggagtgcctgcagaacctcacgtcaagcaacgacaacctgcggcgcgccgtcgtgtccgagggcggcctccgtagcctgctcgcctacctcgacgggccactgccgcaggagccacccgtggccgcgctccggaacctggtcaccgttgtcccacctgacagcctggtgtcactttgcgtgctcccgcgcctcgcacacgtgctccgcgacggttccgtgggtgcccagcaggctgccgcggcgaccatctgcaaggtctccggcagcatggacatgaagcggctggtgggcgagcacgggtgcgtcctgctcctggtgcgcctgctggaggccaagtcgaacggcgctcgcgaggccgcggcgcaggcggtggcgagcctgatggggtgccccgcgaacgcgagggacgtcaagaaggacgagaagagcgtgcccaacctggtgcagctgctggacccgagcccccagaacacggccaagaagtacgccatctcctgcctgctggcgctttcggcgagcaagcggtgcaagaagctgatggtctctcacggcgccatcgggtacctgaagaagctctcggagaaggacgtggccggcgcgaggaagctgctcgagaagctggaccgcggtaggcttcgcagcctgttcagcaggaagtagcgtgatgattgatgatctctgaagcagctagcggtgaagcgatagtgtgaaggtgcacggtaacctgtacaaagatatcgtcctgtttcatagcctctatgaagtgaagtgcggcagagcggtggacagagttgcgtgatgcggcagagcgatcgtgtgaagtgttgtaatttcggtggctaatatgtgtgtaaggcccagttcgttcgttagctccctaaccatggctgagtgaattcccaggcagcggtccctcccgtcgtaatgctaataaaatctctttagggaaagatggtttgctc

SEQ ID NO: 87533 - DNA, 2273 bp, Zea Mays
gtggtcaccgcatttacgcctctcagttcgacgtaccaatcgacgaatcgtccagccaaagcaagaaaagaccaaagggcaaggacctttatggttttctggaattgtcctagactcctagtctcctagatgaatttcgattgttttaaaatagccggcgcctgtttccttccagcttcttttgtgcttgctctttttttttttcaagatttgttttttctgctttcgttaagggagagagcgagttcaaattctgagtagtgagcacttcaggtttaccagcttctggtgtcctagctgccaagaaatgagctttgggagctgtccggccgtggccgggggcgcgacggcagaggagctgcttgaacgggcgcgggggctggtgccacccgccctggccgctgcgcgcgcggccactggcttcggtgggcggtggaaggctatcgcagcgaggctggggaggctgccgcagtgcctgtcggacctgtctagccacccctgcttctccaagaactcgctctgtcgggagctgttgcagtcggtggctgcaacgctagcggaggccgccgagctcggtgcgcgctgccacgagcctccgaaggcggggaagctgcagatgcagagcgacctcgacgcgctggccgggaagctggatctcaacctcagggattgctctcttcttgtcaagactggtgtgttgtctgacgcgacggttcccgcggccccggctgagacagcgtcggctgctggcgcacaggtggacgtgcgggagctgcttgccaggctgcagattgggcacgcagaggcgaagcaccgggctgtggatggcctgctcgatgctctgcgcgaggacgagaagagcgtgctgtcggcgctcggccgtggcaacgtggccgcactcgtgcagctgctcacggcgacgacacccaaggttagggagaaggccgccactgttttgtgcttgctcgccgagtctggcagctgcgagggcttactggtgtcagaaggcgcgctgccaccgctcatccggctggctgagtccggtagccttgttgggcgggagaaggccgtcatcacgctgcagcggctgtccatgtcggccgacattgcccgtgcgatcgtcggccacagcggcttccgcgctctcatcgacatgtgccagaccggggactcgatcacacagtccgccgcgtcgggagcgctcaagaacatctctgcggtgccagaagtccggcaagcgctggccgaggaaggcgtggtgcgagtcatgatcaacatcctcgactccggcgtcgttctcggctccaaggagtacgccgcggagtgcctgcagaacctcacgtcaagcaacgacaacctgcggcgcgccgtcgtgtccgagggcggcctccgtagcctgctcgcctacctcgacgggccactgccgcaggagccacccgtggccgcgctccggaacctggtcaccgttgtcccacctgacagcctggtgtcactttgcgtgctcccgcgcctcgcacacgtgctccgcgacggttccgtgggtgcccagcaggctgccgcggcgaccatctgcaaggtctccggcagcatggacatgaagcggctggtgggcgagcacgggtgcgtcctgctcctggtgcgcctgctggaggccaagtcgaacggcgctcgcgaggccgcggcgcaggcggtggcgagcctgatggggtgccccgcgaacgcgagggacgtcaagaaggacgagaagagcgtgcccaacctggtgcagctgctggacccgagcccccagaacacggccaagaagtacgccatctcctgcctgctggcgctttcggcgagcaagcggtgcaagaagctgatggtctctcacggcgccatcgggtacctgaagaagctctcggagaaggacgtggccggcgcgaggaagctgctcgagaagctggaccgcggtaggcttcgcagcctgttcagcaggaagtagcgtgatgattgatgatctctgaagcagctagcggtgaagcgatagtgtgaaggtgcacggtaacctgtacaaagatatcgtcctgtttcatagcctctatgaagtgaagtgcggcagagcggtggacagagttgcgtgatgcggcagagcgatcgtgtgaagtgttgtaatttcggtggctaatatgtgtgtaaggcccagttcgttcgttagctccctaaccatggctgagtgaattcccaggcagcggtccctcccgtcgtaatgctaataaaatctctttagggaaaga

SEQ ID NO: 87534 - DNA, 1753 bp, Zea Mays
gtttccctccaaaagctccgcgtccacaagtgctccgcgtcagtgggaaaagctagcttgcgtcgccatgtgtgaggggctcgttggccagctgttgccgccgtgcctgtgcaatgccaaggacggcggtgtcggggacggccaccgtccccgcgctgtcgtcctctctccggatgtcgctgtcgtcgttttgaacgaaacgacgaccttgacaacatgcacggagccgccgccgctcttggccgacaggcggccgtcgttgaccatgggcgcggcgagcgaggccgcgtcgattttgagtctgtcattgccgatgatcatgacgggtctcatactctacgtccggccgatgatatcaatgctctttcttggccgtctcggcgagctcgcgctcgccggtgggtcactcgccatcggcttcgctaacatcactggctactccgtcctgtccggactcgctatgggtatggagccggtgtgcggccaagccgtgggcgccagcaacctccccctcgtcggcgccaccatgcagcggatggtgctccttctcctcgcgctctccgtgcccgtcgccttcctctgggcgcacatggagccgctgctcctgctgtgcggtcaggacgcggccatatccgccgccgcgcagcgctacattctcctctgcctccctgaccttctcttccagtcgttcctccaccctctccgcatctacctccgcacgcagtccatcaacttcccgctcactgtctgcgccgtgctcgcagtcgccatgcacctccccgtcaactacctcctcgtctcggtcctcggcctcggcgtcgaaggcgtcgcactcgcctctgccttggccaacctcaacctcgtggtcctcctcctcgcttacatctacttttccggcgtgcaccgcgccaccggcggcttcaccctttctgaaaagctgttcaaggacgttactgggtggatgcggctggcccggctcgccgtcgagagctgcgccagcgtgtgcctcgagtggtggtggtacgagatcatgatccttctgtgcggcatcttggcggatcccaaggccagcgtcgcgtcaatgggggtcctcatccagaccacgtccctgctctacatcttcccgtcatcgctcagctttggcgtgtcgacgcgggtcagcaacgagctcggcgcgaatcgcccgggcgccgcgcgcgctgcggcccgtgcagggctcgcgctgagcgtgctccagggcctcgcctccttcctgttcgccgtgtccgtgcgcgacgtgtgggcacgcatgttcacgtcggacgcgtccatcctagcgctcacggcgtccgtgcttcccatcctcggattgtgtgagctcggcaactgtccgcagaccaccggttgcggggttctccgtgggagcgctcgccccaaggacggcgcgcacatcaacctgggcgcgttctacggcgtcggcacgcccgtggccgtggcgctggcgttctgggtggggcagggcttcaggggcctctggttcggcctcctggccgcgcaggccgcctgcgtcaccatcatgctcgtggtgatctcccgcacggactgggtcaagcaagccgagctcgcgcaggtgctcgccggagttgttgcacccggcgccgacgccgttgtgaacggagacgacgatagtgggaaagacacggggccgcacgccaagattgcggcatcgcatggcgacgaggactccagcttgctcatcaccgtgcagggctga

SEQ ID NO: 87535 - DNA, 101 bp, Zea Mays
aaattgtccacagttgtacgcggaatatctatacctatactacaatctatctatactacaatctattaagaatctaatgtggacactggtgctaccacgac

SEQ ID NO: 87536 - DNA, 145 bp, Zea Mays
attcttttagttactgatttttttgttggatttcactctacccgcggttgggaactactaattcgttgggtctacaacaatcttggatgggctcctaacaagctaattttcactatttttgtttgtagttttcctgtgattctag

SEQ ID NO: 87537 - DNA, 1806 bp, Zea Mays
cggcgcgcggcgccacgccctgtctcccctggtcgctccccgctgaccctccgtcccccgcatcccacgcgcgcaattcgcagccccgagcgagcgagcacctgctctgctcccggatcaagacaagcttcaactcgcgcacttgtttacgcccgcccgcacgggcacggccagccacgacgccgcggcggaagctgcccagcagccgcgcctcccctggcggtgccgagtgccgacccttaaaaaaccacagccgcgcgagcgctgatcggtgcctagcacagttggcacacacacacacacgcgtgcagtgacagtgagagagagagtgacaaaaacacagagacccggcgatggctggcccgccgccgctgaggctcaaggacctcctggagctggactgcgactcgtgcagcgccgcgggcttccgctgctacccgcgccgcctggccgagtcggcgccaatgcggcacctcctcgagtcgtcgccctccctgcggcgccgccgccgccccggcaagctgtcccacctctccaggagcctctcgcgccgcctcagcaggggcggcggcggcttctggaggcggagagacgtcgacgaggaggaggaggaggtcgccgacgccgcggtggcgacgacgacgacgacgacgggcccgcccgcttgctgcggctctagctccgaggagcaggagacgtcgtcgtcgtcggagtccagcgacaactcgtccgagaggaccagcaggaggtcacggtccgaatccgagtccgagtccgacttctcgtcggcgaccgaggagagcgcgcaccatcatccttcgcagcccgccgccgccgccgccgccgccggagacgagcacgaggtggcgatgaagagcgcgtccaaggaggggtccagctccgggtcggaggcgggcgacaaggagcagcagctcagcccggtgggcgtcatggacttccccttcgacgacgacgacgaggaggacgagtcgcgggacgccggcgtcgcgtgctccccttctttcagcctcgcgcgtctccagaggagaaagacgcacaagatccgacggctcgggagcggcggcggcgacgacgagctggcgcccctggatctcgaggcgctcctggccacgacgcaagactcggactcggaccccgaccgccccgccgacgagcagatgatccagtgccgtacgggaggcgcggcggcggccacgccgacatgcgcaagccgcggtcatggtcacggtcaccgccgcgtcgctggcgtttttggcgtgccagacgaggacgacgacgacgacggcctcgtctcgctgctcacgcgcacggtctcggctggcctggacggcgtgtcggaacggcttctgctcgacttcttcgtggaggtcacgaaacgccggcggtcggaagcgcacgccgagccgtgcaacaagctccctgggccggcggccggtctgctgcgacgggaggctgagcggctgctggtagacggcgaggctgtggcagcggccaggggctggctggagggaacggcgaatgggcggtggggcttgaaggacgtgctcagtggcggcggggcggacatcgtggcggagatggggcggggccgcaggtggatgcaggtcggcgaggaggagcgggaggtcgtcgcgttggtcacggggatgctggtggatcaactggtgggcgatgtggtgaggtgtttggctgtgtaggtttgttccttcagatatgaagttgatgtaagtaacgtgctaggaaatcgaacatattgcaaatgattagtaagaaaactagcttggc

SEQ ID NO: 87538 - DNA, 643 bp, Zea Mays
tccagacacacacttacacagttacacttgaagctctcattggtcctccctcctccgtcctcctctcctaccactctaccagcgacgatggccgcgcagcggcgttggtcgggggcggcggacgtggcgtcgtggtgcgccctgctggcgctcgtgatggttgtcggatcgctcgccgggtcggggaaggaggagccggagcagtacagcagagccgggctggtggtggtgcgcgggccgcggctggccgcgcggccgtgcgacgagctgtacgtggtggcggagggggagacgctgcacagcatcagcgccagttgcggcgacccctacatcctggagcggaacccgcacgtccacgaccccgacgacgtcttccccggcctcgtcatcaagatcacgccgcacgccggcggcagccccaactccggcgacgctaactagtaaaacagagatcgcgcgcgcaatcatacctgcatgtgtgtcgccccggaacctcctgccgggttgaacgcggcgccgacgtgagcggtcggggcgtcgggcacgggcaggagcgcagagcgctctctcgttgagttccagtcgtgtcgtcctgtacatactgcatgtgggaaagggctcgagactacgagcagaaataaga

SEQ ID NO: 87539 - DNA, 570 bp, Zea Mays
tacctgtccacgtggggcagaaagcttattagcccatgtatattgtggctgatacgctcccatcgcaatctcagtgtctcttattccttccatggatctctggttaatattagctgatccaatgataacatactcatcatccacaatcatgccttttgaatgtacatagaccatgaatctcctatttttcctagcttgttcctgaacctgaggattatttgctgtattcgaagcgtttgaagtgctagtgctgtcagcaacttcacggttgccaagacagaagaagtttaaataatcctgaggctcatacatatcatccaggccttcttctttcaaggtcctgtatattgtctcgtacatcatttgcatggttttattctgcagctaaagaattcgttgtgttgcagccccagttggattaccctcaggccacataggtaccactatgtatgcagaaaacctttcatttgccttaatcttatttgcaattttgagagcaatttcaattggaattaaattgttagcccctgacatgtaggaaaagttttcaagtgagatgtgtagtaaaaa

SEQ ID NO: 87540 - DNA, 3014 bp, Zea Mays
tatggtgtcccaaggacacagctttgtctccgttatttacagaacaaaatcgcagctgggaatgagatagatagcatagcacacgtcgagcgagaagaactccagttcatactccatagtttcgtagcctatacaaacatgcggtgtgcaagtgccgtagcctagagacgctatacagacatactctgtaccatggtcgcaaaattagccttcttcaaccccgaccccgagcagcacaaagagcgttgccgccaggccgctgctccgcgctactctcccttggctggaatcacgagggggctcctcacgatgtagtcgtcggagacccacttgaggttgccctcggcgccggcgacgttgggctggccggcccaccgcaccgtcaccgtgaagctctgcttctcgtccagcgccgtgaaccggagcgtcggcggctgcacggtcaccgacacgtccttgggcatgtccaccaccgcggtgtacacggagctcgccttccccacgttggtcaccgtgcggttcaccgcgatgggctgggccagcaggttgacgatgagggacgggtagttcagctcggcttcggtgacggccctgaggccgccgcaggcgacggggcggtgggcgatctccgtgacgccgtcgtcgcccagccccagcccgcagaggtaggggatgtagtcgtcggcgcggaggtcgtagaccaggcccgggtcgaatgcgagcgccgggttcacgtagcccgcgcccagggcgtagaaggtggcgtgccggtactgctcgtccttgatgggcagccccgtgcggtccaccgcgtcggacgtcgtcatcatcgccgacttgatcgccgcgggcgaccagtccgggtgcaggctcttgaggagcgcggcgacgccgctcaggtgcggcgtcgacatggacgtcccggactcgacgaagaaggacaggtcggccccgccgtcggagaactccgtgtgcgagtcgctcggcgcccacgccgcgaggatgttcattccgggccccgtgatgtccggcttcaggatccccgggctcgccttgctcggcccgcgggacgagaagaaggtgaccgccggcgacgggtacgagccgataatcgtccccttgaagtcgatgctcgccgtcccgttggccgtggagttcaagtaggccaggatcttggacccggactcgtagctgacgtgcgaagccgggaggacgtgcgcgtcggcgaaggtggtgtacccctccgcctccttgttcatgacgatcatgcccacgccgccgtacgccgccacggtctggcccgcctcgacgcggtcgctcaggcccctgctctcgcacagcaccaccttgccagccacctcggcgccgcgcagcacgctgcagtcgcggctcgcgtcgaagccgtccgcgccggggtacaccagcgggaccgggtccgcggcggagttgttcctcggctggaacagggactcgccgtggaactcctcgccgttgccgagcttgacattggtccgtatcgcgcggtccatggtgcccgccgcgacggtgagcatccacggcgcgccgttgccgaccgtgccgggctctggccccgcgttgcccgcggcgcagctgacgaagatgcctcgctccgtggccttgaacgccgcgatggcgatggggtcgtagttgaactgcgtgcccgagtaggcgccgatggagaaggacagcacgtcgacgccgtccttgacggcggcgtccagcccggcgatgatgtccatgatggagcagcggctgcgcgtgcacaccttgtagatggagaggtgcgcgtgcggcgccatcccggacgccgtgccgtccgcgttgcccctgatgttggcgttctccacgaagttgccggcggccgtgctggccgtgtgcgtgccgtggcccgcgtcgtcgacgggcggcgccgtcgagttcaccgccgcgctcccgaacgcgcgcgccccgatgatcttgttgttgcatccgcccccggcgatgctcttgaactcgcaggtccccttccaccccttgggcggcggctggagcccgtcgtcgccgaaggacgggtggctgggcaggatccccgtgtccaggatcccaatcaccaccccgcgcccgaatccggagcggctccagaagccctcgttccccaggtggaggccgaggaagcccggcgagcgggtggtggcgagcggcaggaacacctccgggtacagccgcacgcacccgtccgtggccctcagcgcctctgcctcctcgtccgtgagccgcgcggcgaagccggtgaagacgtcgctataggagtatatgatctgcgggccttcgtcggccgtggagtccagccctgccgccgcctgctgcaggaacgagcggtgccacccgtcgacggagccgtcggtggcttcccggggccggaggtgcacgatgtagttcttcctctcctgcaggaacgccgcgccgcggagagcaagggacaggagcagcagcagggtggcgcgacaccaccgtgacttgttcatccccatcagcggaggcggcgcggcgccacagatgctaggcggtcgccggtagcttgcggggcaatgtgtatgcgggcgaagggcagaaggggagtgagggtggggcgtggccgtgggtggcggcgacgaggcgatctgcgggagtttttatgaggctgctgcgaggtgtgtgtgtgtgtgtgtgggagtggagcgacgggcgcacagtggcactggcagtgagctggagggtagagggccctggttttaacttttaaatgatgggaaaaaccaaaaacgcatcggcgtgggggcgggcgtacccggtgtccgtccggcgttcctccggaccctcgccatggattgggattgcaccttgcggatgcgcctgcggttcgtgtcacggctgtgcgtgtctgtgccaggtctctccgggctcgtgatggctgctggctggatcgggtccggcggaagcggaataaaaatccggtgcccccacgttttggaact

SEQ ID NO: 87541 - DNA, 77 bp, Zea Mays
tatattttgcatgctagagtttatggttgttgcatctaaaacaaatttgaaattgaaacacaaacttgatttggaag

SEQ ID NO: 87542 - DNA, 297 bp, Zea Mays
atggaggagattgtagcacaaatgcgcggagattgctcaccgagggttgtcgttggtggggattatgggatgcgggagcctgggccattccccccagccagaccaaatgcgccgagcgcggtggagctgggaaagcggagggggagcggcgcggagggtgggggagctgggggagcgatgtgtggagattgggggagccgggggagcggtgctgagggtgggggagcggaggggaactgttacactctaggtctgcaatgcgcttggtctgccatgcgcgcgaattgcggtggctag

SEQ ID NO: 87543 - DNA, 555 bp, Zea Mays
atggatgtgtctgtcggatcaagagctcgacacttgactgatgtggatggtgacttgtgggatctggtcaggagggatctccaactaaaggccaccttcctgtacattgacctgaaccgttgcaggcaatcaaacattgattacacatcttcgcaggtgccatttaggataactgcaacaggatgggtccaagaattcaacaatactgccagaattgtgaagaagataaagctcacatgcacaccatgcaagatatttaagaagactacactaatcaagggaatgttcacatccgatttagaggttgctaggtttgaaggtgctgccattcggactataagtggaatccgaggacatgttaaaaaggtcaacgttgaagttcctacgtactctaaccctgtgaccactgctctgcaacctagagagcagacctggcaaggcatgagaacaactgctgagttgcggaaggcacacaatatccctaccccacacaacaaggattcagtttacaaggttctgagccttcaacagtttcctcataacattattgcatga

SEQ ID NO: 87544 - DNA, 360 bp, Zea Mays
atggaggtcgcgctccgcgacggcgtggtgccgttccgggtggatgggggaggcccggacacgatggaaggtcgcggggatcatcggcgtcgaccagtggacgcacctggcatgccagctccgcttcttctggcccaacggcactgtgctccccttcagatgcatctccaagtccaagttcttgttcttctgaccgccgtgccctctgtattgtctagtggctactcttctgacctcagttccatggccgagctcgtaaacggtgtgcacatggtaatattcgtttccgtgagtcaagagaggattgagaagttcttaagtgcagacaggaaggagcagggagaggaaaataagcagtaa

SEQ ID NO: 87545 - DNA, 831 bp, Zea Mays
cccattctctcaccagagtacgaactacgaagacccgacaggccgacacccgctcgtctcccctcgcacgtaggcggcgcaaccggaccccctccccctccagatcggtgctccgctgggagatctcctcgtgcaggcgccgaatctcttcgtcgtctcttccaagcacggttggcagcacaatagatctgtttgcaagcattctttggtactacttcaaggctttgatgattgctttacagcgccgatatggcctcccgcccaaagctgtctggtattcagaagcaggttttggcgctgtacaggggattccttcgaacagcacgtcttaaggcccctgaagagcgccacaggatcgagtccgttgtcttggcagagttccgtgacaaggcaaagagtgttgaccgtaggaactttatacatatcgagtacttgttgaggagtgggaagaagcagcttgagcagctcaagaatcctgatattactggacttgctacccttgtagtaaagaaatgaggtccattcattgccagaacaaagcatcatcatggtaccggtgtttctagtatgaacatttgggacctgccactgatggtgtccaaataaaacaaatatgaccatacattacagattttgatatccagggactttctggggttttctaattagcctattggaatcttaagataaatcttgtagcccctgtccagtgactcagagtaatattgttttactgtcttttggtgtaagcagaggttagcattaacaaaacaatgtgattggtctgaacttgtgcgatatgaagcaatggattcagctcaacttgacttc

SEQ ID NO: 87546 - DNA, 1034 bp, Zea Mays
gaagtattgccagctgacaaaaaaataaaattggttgccgccctgccggcatagaattaagccaacggaaaaaaaaagaagagagctactacagcaatggccggaggagatgacctgaagctgctgggcctgtgggcgagcccgtacgtgctgcgggtgaagctcgcgctcagcctcaagggcctgagctacgagaacgtggaggaggatctgagggacaagagcgagctcctgctcaagtccaaccccgtgcaccagaaggtccccgtgctgatccacggcggcaagcccatctgcgagtcgcaggtcatcctgcagtacatcgacgaggccttcgccggcaccggcccgtccctcctccccgccgacccctacgagcgcgccgtcgctcgcttctgggccgcctacatcgacgacaagatgctgcccgcctggaaccagtcgacgatgggcaagacggaggaggagagggccgaggggaagaagcagtcggtcgtgacggtggagacgctggagggcgcgctgagggactgcggcggccaagggaagcccttcttcggtggggacagcgtcgggtacgtcgacgtcgtgctcggcggcctgctcgggtgggtgcgcgcgtcggaggagctgcacggcgtcaggcccttcgaccccgagcggactccgctgctggcggcgtggtcggagcgcttcggcgcgctggatgccgtccagacggtgatgcccgacgtcggcaggctgctcgagttcggcaaggcgttgatggcacgtctggcggctgcggccgccgccggtgcaagcaataactgaaaagggcatggtgtatccgtcatgtgtttcaggttttcgtatagtgacaaaaaaaaaggaaaaaataatgctagctacgcatcggaacgcggctttgtgctttgccgtctcgccgttagttcagcttatgtgatgtgagtgttgccgtgcatgtgtgtgttacttcagatgtatcctgttcggttcagtgattatatggaacattttattttggttggata

SEQ ID NO: 87547 - DNA, 636 bp, Zea Mays
tgagtcgcgggtcatcgtggagtaccttacctcgacgaagtctacagcgccacgggcccccgcttcctccctgccgacccatacgagcgtgccatggcgcgcttctgggcctcattcatcgacgaaaagttcttggcgtcgtggctaaaggcaggaaggggcaagacggacgaggagaaggccgatgggttgaagctgacactcgctgctgttgaaaccttggaaggggcgttcatggagtgctccaaggggaagcccttctttggaggcgatagcgtcggctacctggacatcgcgctcggcgccctggtagcgtggatgcgcgccgccgaggcgcgtcatggtctcaggctcttcgacgcctccaggagtccgctgctggagaagtgggtggagcgcttcagcgagctggacgaggtcgtgttggtcatgccggacatcgaccggctagtagagctcggcaaggtgagggaggctgctgcggctgcagcagctgccgtaaacagctgaacggaacgcgtctcgcggtattgaggcggtcaataagatggaaaaagatcttgatacctgtgtgtaacaagcgaatggtgtaataaagaatacaattaagttctgaggtcttgttcgttttaatct

SEQ ID NO: 87548 - DNA, 891 bp, Zea Mays
aacaacgcagcacaaactagcccaataatggccggaggaggtgacgatgaactcaagctgctgggggcgtgggcgagcccattcgtcctgcgggtgaagctcgcgctcagcttcaagggcctgagctacgagaacgtggaggaggacctctccggcagcaagagcgagctgctcctcgagtccaacccggtgcacaagaaggtgcccgtgctcctccacaacggcaagcctgtgtgcgagtcgcagatcatcgtgcagtacatcgacgaggccttcgccggcactggtggcccgtcccttctccctgccgacccgcaccagcgcgccgtggctcgcttctggggtgcctacattgacgacaaggtcgtactactcatgctgctgatgactttgtcgttcatcttttatttgtattattcaacgtacgatctccggcggcacgagtacgatagatgtccgatgcatattgacggagttcggcgtcgtcggacggatgcgtccttccctttgcagctcctagcctcgtggctgcaatcggcaagggccaagacgcaggaggaaaaggccgacgcgctgaagcaggcgctcgccgcggccgagaacctggaggcggccttcacggagatctccgagggcaagcccttcttcggtggtgacagcgtcgggtacctggacgtcacgctgggagcgctggtcgcgtgggtgcacgccgccgagaagctaaacgggatgaggatcttcgacgccacgaggaccccgcggctgagcgcgttcgtggagcggttcggcgcgctcggagcggccaaggcggtgctgcccgacgtcgacggcctcgtcgaatacgccaaacagaggcaggccgacgcggcagctgcagcctcggacagctaa

SEQ ID NO: 87549 - DNA, 1039 bp, Zea Mays
aacaacgcagcacaaactagcccaataatggccggaggaggtgacgatgaactcaagctgctgggggcgtgggcgagcccattcgtcctgcgggtgaagctcgcgctcagcttcaagggcctgagctacgagaacgtggaggaggacctctccggcagcaagagcgagctgctcctcgagtccaacccggtgcacaagaaggtgcccgtgctcctccacaacggcaagcctgtgtgcgagtcgcagatcatcgtgcagtacatcgacgaggccttcgccggcactggtggcccgtcccttctccctgccgacccgcaccagcgcgccgtggctcgcttctggggtgcctacattgacgacaagctcctagcctcgtggctgcaatcggcaagggccaagacgcaggaggaaaaggccgacgcgctgaagcaggcgctcgccgcggccgagaacctggaggcggccttcacggagatctccgagggcaagcccttcttcggtggtgacagcgtcgggtacctggacgtcacgctgggagcgctggtcgcgtgggtgcacgccgccgagaagctaaacgggatgaggatcttcgacgccacgaggaccccgcggctgagcgcgttcgtggagcggttcggcgcgctcggagcggccaaggcggtgctgcccgacgtcgacggcctcgtcgaatacgccaaacagaggcaggccgacgcggcagctgcagcctcggacagctaaaaaaatggcaccgcgagtttaccgacgtacggcagtcagtgctggacgaagcaagatatgggtattctgcatatactattcagctgctgtcgtgtgtattagctggttgttactaggtgtgacaaagaaaataaaaatggatgcgccggctttcgttttgtattgtacgtctggtgtgtaccgtgtgtcttattaggtcggaaattgccgcatatcggcatgcctagtgtaaccagatcatgcagtctggtttgctttatattcaccaaagtaagtaatctgaataattttcttgaga

SEQ ID NO: 87550 - DNA, 972 bp, Zea Mays
acaagcaaaaaggagctaaaacctttcgtgaacaaagcagagacagagaatggctggaggaggaggacaggagctgaagctgctcggtacgtggacgagcccgtttgtgaccagggtgaagctcgcgctcagcttcaagggcctgagctacgagaacctggaggaggaggacctctaccacaacaagagcgagctgctcctcaggtccaacccggtgcacaggcaggtccccgttctcatccacaacggcaatcccatctgcgagtcccagctcatcgtgcagtacatcgacgaggccttcagcagcgcaaacggcccctccctcctcgccgccgagccctacgaacgtgccgtggctcgcttctggggcgcctacatagacgacaagctgttggcgtcggcgtttcaggccggcagggccaagacggaggaggaaaaggccgaggcgttgaagcggacgttcgcggcggtggagacgctggaggcggccttcgagggcatctccgacgggaagcctttcttcggcggcgacagcgtagggtacctggacatcgtgctggggggcctcgtaccgatggtttactacggcgaggcgcgtcatggcatcaagctgtttgacggcaccagaagcccgctcttggaggcgtgggtggagcggtttggggcgttggatgccgccaaagcagtcctgccggacgtccacgagctggtcgagcacagcaagatgaagcgcgcacgagctgcagccatggccgcggccacgggcagcgactaaaattggctcgatcattcactaatacaggaaacctctgtacaggcggtccggttagcctctacacagacggttccaggaaccgcttgtggtgtaccgactgtgatgtaaaacaacatcacaggcggtcaatcaaaaaccgcctgtgaagacagacatcacaggcggtccagttcaaaggaaccgcctgtgatagacag

SEQ ID NO: 87551 - DNA, 1466 bp, Zea Mays
ctgagggcgtcgagtccaaggcttgtcagaagtcatcgatctcaacagcgccagcttctaaaatgctggcaaaggtagtcagccgttgaatttgaagagaggattttatgctacttgtgccgcataggaaatcatcgacgggcggtagaggactcagaaggtgacgtatgtgcctcgttccaggtcctgataaagagcccgccgaaagcactccagagctccaactttcagaaccgccaaagaagcaaacatatattcttctagttccgtggtaggacatggcagagagcatggggaaagacggtggtgatggtgagctcaagctgctggggctgtgggcgagcccgttcgtcgcgagagcgaagctcgcgctccagatcaagggcctaagctacgagtacgtcgaggaggatctcggcaacaagagcgagctgctgctcagctccaacccggtgcacaagacggtgccggtgctgatccacaacgggacgcccgtctgcgagtcgacggtcatcgtccagtacatcgacgacgctttcgccggcactggcccgtccctcctccccgccgacccctaccagcgcgcccttgctcgcttctgggccgcctacctcgaagacaagattgtgacgccgtggcggcgggtgttcatggtcaagaccgacgaggagaaggccgaggcgatgaggcagacggtcgcagccatggacgcgctggagggaggcctgaaggaatgctcttctgggggtgggggacagagccccttcttcggcggcgacagcgtcggctacgtggacgtccttctgggtggcatggtttcatgggtcaaggcatccgagccgctctccggcgccaagatcatcgacgcagccaggacgccgctcctggccgcgtggatggagcgcttctgcgagctggacgcggccaaggcggtcctgcaggacgtccatgcggtggtcgagtacgccaggacggtgcaggcacgggttgccgccgcaaccgcaagcaatcagtagtggaaacaccgtgaaacccaaacccagtaggcaacgtactgatcccatcttctcagttggctcccgttcggctcagtgcgtcacctctgtcctgccctttgcacctgccctatccgcgtgttcgtaagccgtcgtccccaggaaacgtcgtgccatagacgatctcccggactgttgagactaccaacgtgtgtttttgaacaggaacatgtacctgcaattaccgacacgtgccatcctcgttgagtcaatggcaacgatgcaagggtctgcatcattttggaattacctgaatctatgaagtgggaatgataaggtgggccacatttgatcatttatgaagtgggaatgtcttttgaatcggagaaagaagcttatgagatgtacaatacttatgctggtaaagttggatttagtattagaaagagccacacaaagcatcgagctgat

SEQ ID NO: 87552 - DNA, 3038 bp, Zea Mays
agactactcacaggtcactgtctcactcacttgaagctctaacagcaagccatggcaggacgagaagcggacaaagacccagagctgaaggtgctcggcgtgtggtcgagcccgttcgttatcagggcccgcgtcgcgctaaacctcaagggcctcgcctaccgatacgtggaggacaacctggacagcaagagcgagctcctcctcgcctccaaccacgtgcacgggaaggtgccggtgctcctccacgacggcaggcccgtctgcgagtcccgggtcatcgtggagtatatcgacgaggccttcccggccagcggcccctgcctcctccccgccgacccgtaccgccgcgcggtcgaccgcttctgggcctcctacgtcgacgacaagctctttcccacctggatacccgtctacaacggcaggacgagcgaggacagggtcgcggcggcgaggcaggtagtggccgtgctggagaagtttgagcgggcgttcgatgagtgctccggaggcaaggcgttcttcggcggggacgctgctggcctcgtggacgtcgtgctaggcggcttcctcgggtggctgcgcgcgtctgaggtgatgtgtggcgtgagggtcatcgaccccgccaagacgccgctgctggcggcgtgggcggaccggttcgccgcgctcgacggcgtcagggaggtgatacctgacgtgcagaggctgctggagtataacaagattaggcgagctcgtcgtgggctgccgtaggtgctgggccttgggccatctatctgccagcatgtggtcagtcaactctaagcaggagactttgacaaggttaaagtttagttcatgaaggtgggcaatctaattaggatgctcatgctttagctaggagtgccattagttttcctgttgaaaggcatgtttggttcctctttcctactgaaagagtttgtaatatctttactactattaagaaggtaaggggtatgctgccattactagttctgtcattcccattcctaccgttctcattcctattcccattcccggttctgtctccacccccgatgcccctcccccgcgtaacccccgtggctcaccgcaccacacgaaacctctgatcccatgacctcgacggcggccatggccggcaagcaggtgcaataccgtgccccaactcgccccgcacgtcgcccatcctgtcacccccacgcgatggccgcaactccgcgagacaaccgctgtccgccccccaccaccctcccccgcgacgccccctcccacgacgctttgtgcgcgtgagtctgcgactgccgacagccgtcgccgtactggagcccgatctgctggctccccctcaacctcaccaccatgcccccatcggacctcgtcacgccgtgcgtggcggtgccggtgatggacgcggcgttgctagccgtcatcgtcccgcctcgacgttcgatccatgctcgccacggttggtgctcgcacgcgatgtggcgtggcgaggttaccgcgggcgccgcggaggtggagggggaaggggaggatgagggcacgggcaagagagtgcatcgcggtggacggtctcgtgagtgagtgctgctgcctgcccctctctctctgcctgcgttctcctggtgctgctctccctctcctcccctgcttcgacctcccgcctttccccaccgtttcttggatttctaggatccagacaaccgcccttgtgagcctgccttcctgcctactacctgcgtacatacaggagggaccttgggtgatccgggtgcttggtttcttggttctgcggctttcgctgctgttggatttgccgagccggagccgccggagatgaccgtcgacgagctgaagctgcaggcaagggccagcggcggccacgacctaaggaccagttccccgtcggcatgcgcgtgctcgccgtcgacgatgacccgacctgcctcaaggtccttgagaacctcttgttccgctgccagtaccatgtgacaacaatgggacaggcaaccacgaccttgagctgctgagggagaaaaaggaccagtttgaccttgtgatcagcaacgtccacatgctggacatggacggcttcaagctcctcaagcttgtgggtctcgagatggaccttccggggattagtgaagcggcagaagaagagcttttacaataaaccctaaacccttacaatgctgattttgatggagatgaaatgaatttgcatgtccctcagacggaggaagctcgcactgaagcgcttaattctcataggggttcaaaataatttatgtactcctaagaatgtgatggggggtacttcaatgcaataatgagcttcccacaaaattacccaaacagcccgccatcagtcagatttacctctgaaatgtggcatccaaatgtctatcctgatgggtgggtttgtatctctattcttcatccacccagtgaagatccaaacggttatgagctcgcaagtgagcgatggacacctgtgcacacagtatggcttcgtatactttgtttacatatcttttccccattgtaatgatactcatctcccttttatgtgtatactttttagagagaatattaccttgtagtctcattgtttcagtttatggtccaatttacaatggcttcactgtaaatgggaaaacaactcggtaggaatgcttttttgaattataaattatttatatttcatacaatgcttataggtatgtgatgagtcctccaatctgagaagtagagcatggtaaagcactccaagctgctctttcatcgggaaatttataggtgacacttgtgtcatacattgaactatggagtcaaacaaattacatattatccttcaacatttttcaccagtgggaactgtagttattgcatagaatagatggtatattaatcgttgagagccaatgtttacattaactgttatgcagaagaaaatttatgttttattttatatctaactgtactttgttgcagcttgtaggtactgatcacagcacattcaactccac

SEQ ID NO: 87553 - DNA, 2918 bp, Zea Mays
agactactcacaggtcactgtctcactcacttgaagctctaacagcaagccatggcaggacgagaagcggacaaagacccagagctgaaggtgctcggcgtgtggtcgagcccgttcgttatcagggcccgcgtcgcgctaaacctcaagggcctcgcctaccgatacgtggaggacaacctggacagcaagagcgagctcctcctcgcctccaaccacgtgcacgggaaggtgccggtgctcctccacgacggcaggcccgtctgcgagtcccgggtcatcgtggagtatatcgacgaggccttcccggccagcggcccctgcctcctccccgccgacccgtaccgccgcgcggtcgaccgcttctgggcctcctacgtcgacgacaagctctttcccacctggatacccgtctacaacggcaggacgagcgaggacagggtcgcggcggcgaggcaggtagtggccgtgctggagaagtttgagcgggcgttcgatgagtgctccggaggcaaggcgttcttcggcggggacgctgctggcctcgtggacgtcgtgctaggcggcttcctcgggtggctgcgcgcgtctgaggtgatgtgtggcgtgagggtcatcgaccccgccaagacgccgctgctggcggcgtgggcggaccggttcgccgcgctcgacggcgtcagggaggtgatacctgacgtgcagaggctgctggagtataacaagattaggcgagctcgtcgtgggctgccgtaggtgctgggccttgggccatctatctgccagcatgtggtcagtcaactctaagcaggagactttgacaaggttaaagtttagttcatgaaggtgggcaatctaattaggatgctcatgctttagctaggagtgccattagttttcctgttgaaaggcatgtttggttcctctttcctactgaaagagtttgtaatatctttactactattaagaaggtaaggggtatgctgccattactagttctgtcattcccattcctaccgttctcattcctattcccattcccggttctgtctccacccccgatgcccctcccccgcgtaacccccgtggctcaccgcaccacacgaaacctctgatcccatgacctcgacggcggccatggccggcaagcaggtgcaataccgtgccccaactcgccccgcacgtcgcccatcctgtcacccccacgcgatggccgcaactccgcgagacaaccgctgtccgccccccaccaccctcccccgcgacgccccctcccacgacgctttgtgcgcgtgagtctgcgactgccgacagccgtcgccgtactggagcccgatctgctggctccccctcaacctcaccaccatgcccccatcggacctcgtcacgccgtgcgtggcggtgccggtgatggacgcggcgttgctagccgtcatcgtcccgcctcgacgttcgatccatgctcgccacggttggtgctcgcacgcgatgtggcgtggcgaggttaccgcgggcgccgcggaggtggagggggaaggggaggatgagggcacgggcaagagagtgcatcgcggtggacggtctcgtgagtgagtgctgctgcctgcccctctctctctgcctgcgttctcctggtgctgctctccctctcctcccctgcttcgacctcccgcctttccccaccgtttcttggatttctaggatccagacaaccgcccttgtgagcctgccttcctgcctactacctgcgtacatacaggagggaccttgggtgatccgggtgcttggtttcttggttctgcggctttcgctgctgttggatttgccgagccggagccgccggagatgaccgtcgacgagctgaagctgcaggcaagggccagcggcggccacgacctaaggaccagttccccgtcggcatgcgcgtgctcgccgtcgacgatgacccgacctgcctcaaggtccttgagaacctcttgttccgctgccagtaccatgtgacaacaatgggacaggcaaccacgaccttgagctgctgagggagaaaaaggaccagtttgaccttgtgatcagcaacgtccacatgctggacatggacggcttcaagctcctcaagcttgtgggtctcgagatggaccttccggggattaacagctgaaaacctcgcccgatttgtaaagaagttttcttgttcaatgcggcattgaatttgggaggaatggcaagtctcatgaaaacttctatatgccctacacgtgaccactaaaagaaagagttagacaggacaaaaggctgcaggtgaagcggcagaagaagagcttttacaataaaccctaaacccttacaatgctgattttgatggagatgaaatgaatttgcatgtccctcagacggaggaagctcgcactgaagcgcttaattctcataggggttcaaaataatttatgtactcctaagaatgtgatggggggtacttcaatgcaataatgagcttcccacaaaattacccaaacagcccgccatcagtcagatttacctctgaaatgtggcatccaaatgtctatcctgatgggtgggtttgtatctctattcttcatccacccagtgaagatccaaacggttatgagctcgcaagtgagcgatggacacctgtgcacacacttgtaggtactgatcacagcacattcaactccacacagattgtccatgtttcttttagtcaccattgatttatcactaggtcattgtgtttgtggccaacgagtattgtttctaacagttatgttcccatagctagctggattcattgttgtgttttgttcagggtactttcaccacttctggtatggttctgtctgtaatgtgccagggattattatattgtttttggtttggatttggaatggtttggggtccac

SEQ ID NO: 87554 - DNA, 1144 bp, Zea Mays
atgcccccatcggacctcgtcacgccgtgcgtggcggtgccggtgatggacgcggcgttgctagccgtcatcgtcccgcctcgacgttcgatccatgctcgccacggttggtgctcgcacgcgatgtggcgtggcgaggttaccgcgggcgccgcggaggtggagggggaaggggaggatgagggcacgggcaagagagtgcatcgcggtggacggtctcgtgatgacaacaatgggacaggcaaccacgaccttgagctgctgagggagaaaaaggaccagtttgaccttgtgatcagcaacgtccacatgctggacatggacggcttcaagctcctcaagcttgtgggtctcgagatggaccttccggggattaacagctgaaaacctcgcccgatttgtaaagaagttttcttgttcaatgcggcattgaatttgggaggaatggcaagtctcatgaaaacttctatatgccctacacgtgaccactaaaagaaagagttagacaggacaaaaggctgcaggtgaagcggcagaagaagagcttttacaataaaccctaaacccttacaatgctgattttgatggagatgaaatgaatttgcatgtccctcagacggaggaagctcgcactgaagcgcttaattctcataggggttcaaaataatttatgtactcctaagaatgtgatggggggtacttcaatgcaataatgagcttcccacaaaattacccaaacagcccgccatcagtcagatttacctctgaaatgtggcatccaaatgtctatcctgatgggtgggtttgtatctctattcttcatccacccagtgaagatccaaacggttatgagctcgcaagtgagcgatggacacctgtgcacacacttgtaggtactgatcacagcacattcaactccacacagattgtccatgtttcttttagtcaccattgatttatcactaggtcattgtgtttgtggccaacgagtattgtttctaacagttatgttcccatagctagctggattcattgttgtgttttgttcagggtactttcaccacttctggtatggttctgtctgtaatgtgccagggattattatattgtttttggtttggatttggaatggtttggggtccac

SEQ ID NO: 87555 - DNA, 297 bp, Zea Mays
tctactgtggtgttgtagttgtagggagggagggcagcaaagaaagcaagcaagaaagaagccgattccactggtggttaaggttttggattaaaggagagaggtgcagagaaaaaaaaggcaatcttactcttaatctctgtgtccacatcacttccaatcatgctgtgatcgacagaagtacgagtgccatggataagtgcctcctccaactcaccaaagtaataaggagcagctgctgcaggttgcaactccctgggccaagtagtagcgcaacaagttcagcaccaatggcag

SEQ ID NO: 87556 - DNA, 504 bp, Zea Mays
cagatttttgttaaggaagcaaaagatacaaccaaaactctggtatagcaaaagaaagaaggttctggcttggcaagtgaaacagaaacagctagcacatgagaagtgtgaattttatactttgctttggcgatcacgccgtgttctaaatatggctcatgcgacacgccgttttctaaatatggctcatgcgacttttggccaaagaggtcacattaagcatgctgctatcaatgctcctgtacagggcactgcagctgatgttgctatgtgtgcaatgcttgagatagacagaaatactcgtcttaaggagcttggttgggcgctactcatgtgggtagtttatgcataaagttatgcctgttcgttgcttaaatgttgccatattttgtttttctctttgaaactgtgaagggcacaactttttaacgacttctgtaacttgtgtatctaacatctgtattcggtattctgagttaaaatgggcacatttaattatatttt

SEQ ID NO: 87557 - DNA, 1375 bp, Zea Mays
agtctgtgtctcccttggtagccaaccaaacaagagcttagagagagttaatgtatatggtggtccaaaacgatacggtgaaacatatggaatttgtatatcttggactcctgggcagctgggctcctggccacagcccacacaccacaggcataacagaacagaaccatcgatcgagcttggttgctcggcagcagctagcaatggccgccaatggaggtgatgagctgaagctgctgggcgtgtgggacagcccgtacgtcaacagggtccagatcgtgctcaacctcaagggcctcagctacgagtacgtggaggaggacctcctcagcaagagcgagctcctcctcaattccaacccggtgcacaagaaagtgcccgtgctcatccacgccggcaagccggtcgccgagtcgcaggccatcgttcagtacctcgacgaggctttccccagcggcacgttcccgtcggtcctcccagccgaaccctacgcacgcgccaccgcccgcttctgggccgccttcgtcgacgacaaggtcgggtctccatggcacacggtcctgttcgcgcgggagcacgggaagaaggcggacgcggcgtcgcggatcgtcgcggcgctggagacgctggagggtgcgttcgaggactgctccggcgggagggactacttcggcggcgacgccatcggcttcgtggacgtggtcctcggcagctacctgggctggttcaaggtgttcgagaagatggtcggcgtcagggtcctggacgtggcgaggacgccgctcctcgccgcgtggggggagcgtttcgcggcggcggaagcggccaaggacgtcctgccggatgacgttgacaaggtgctcgagttccttcagaagttcctggattagatgcgcgccaccatgtgctccggtgtccaactcccaatgtttgtttgctttggtcattttcggtgcgctgttaatgggcctcggatgtttgccagttgattaacttgattttatagaatcttaataatattctaaaacaagtagtcaggcggccacgtctacaggaaaacttctaccgtgtgatcaagacagcgagaaatatggtgcctcagattcccatcagtatccagagtcttccagtgacatacactgtgtccgattttcatcatgctctgcatcttcttcctacaatcctacctcggtgagttcgtccgtgaccacctcggcctcccctcctcattatctttgccctcatcggcggcggtggagcaaagcctgcccgtgagccgtgcccgtggtcaacttgctgccatggccggtggacgtggtccacgccgagctgctactgtgtgcagcgaagcattgagcggggctggtactgctag

SEQ ID NO: 87558 - DNA, 1306 bp, Zea Mays
agaacagaaccgaaacctcagacactctgcatatatcctctgcgcgtgtatctcgtcgaacagagccgaaagctggagcttccaatggcgggaggcaacgacctgaaggtgctcggcgtgtggacgagcccgttcgtgatccgggtccgcatcgtgctcaacctgaagggcctggcgtacgagtacgtggaggaggacctcggcaacaagagcgcgctcctcctgggatccaacccggtgcacaagagcgtgccggtgctcctccacgccggccgcgccataaacgagtcccaggtcatcctgcagtacatcgacgaggtgtgggcggggacggggccggccgtgcttccggccgacccctacgagcgcgcggtggcgcggttctggggcgcgtacatcgacgacaaggtggagtcggcgtggctggggatgctgttcaggtgcgcgaacgaggaggagagggcggcggcggtggcgcgcgcccgcgaggcgctcgacgcgctggagggcgcgttccgggactgctccagggggaggccgttcttcggcggcgacgacatcgggttcgtggacgccgttctcggcgggtacctcggctggttcggggccgtcggcaggatcatcgggagcaggctcatcgacccggcccggacgccgctgctggccgcgtgggaggaccggttccgcgccgccgacgtggccaagggcgtcgtgcccgacgacctcgacaagatgctcgcgttcctgcagaccctgcgcgctatgaactacgccaagtgagagtgtttcgtcgcatgaacgtgtgccgtgccgtgcacgacctatgatcagttcatgtcgatacgtctatcactcagttttgcttcttccgtcaataatcggtgtgctgaatacatgtacaacagctgcctataattttgcttctttcttctaatacctccgtttttaatttgatagttcaactttataataacaaatgtcaaatttaaaaaaaaaatcggaaggagtatttttttaatacatccaagtccatccaataaaagtgctcgtggggctttctattactcatctgtttcagctaaatcgctttcactacaggaaaacgaccagtttccgacggcctaaaccgtcggaaataagtcctgaaccgtcggaagtagttacttccgacggcttaagacgggtcccgtcggaagtaacgccgtaggggatacccagtcggaagtatcagcgtttccgacggcgccgtcggaagtaaacctatttccgacggccagggtggcgccgtcggaaataaagcgaggtg

SEQ ID NO: 87559 - DNA, 790 bp, Zea Mays
ggagcttccaatggcgggaggcaacgacctgaaggtgctcggcgtgtggacgagcccgttcgtgatccgggtccgcatcgtgctcaacctgaagggcctggcgtacgagtacgtggaggaggacctcggcaacaagagcgcgctcctcctgggatccaacccggtgcacaagagcgtgccggtgctcctccacgccggccgcgccataaacgagtcccaggtcatcctgcagtacatcgacgaggtgtgggcggggacggggccggccgtgcttccggccgacccctacgagcgcgcggtggcgcggttctggggcgcgtacatcgacgacaaggtggagtcggcgtggctggggatgctgttcaggtgcgcgaacgaggaggagagggcggcggcggtggcgcgcgcccgcgaggcgctcgacgcgctggagggcgcgttccgggactgctccagggggaggccgttcttcggcggcgacgacatcgggttcgtggacgccgttctcggcgggtacctcggctggttcggggccgtcggcaggatcatcgggagcaggctcatcgacccggcccggacgccgctgctggccgcgtgggaggaccggttccgcgccgccgacgtggccaagggcgtcgtgcccgacgacctcgacaagatgctcgcgttcctgcagaccctttcatgtcgatacgtctatcactcagttttgcttcttccgtcaataatcggtgtgctgaatacatgtacaacagctgcctataattttgcttctttcttctaatacctc

SEQ ID NO: 87560 - DNA, 308 bp, Zea Mays
cacgggttttgacgacggcacgtagggactgcgtagacctggcgaagcgagatgcggagacggtagaactgcgcagatcgacgacgcagcatggggctatccaagcaccaacgggacggcgtgggtcggggctgcgcagatctgcggtggagctcgctgcgcggcgatgtcgggactgctactgtagccaggaaccagattgaggggggctcgacgtgggagagcactctcgtgcagccaagggggggcagcaggggtgcgcggtggctgatgtcgagaaggtgttgcggaggttgaaggcaagcatg

SEQ ID NO: 87561 - DNA, 116 bp, Zea Mays
tcgtgtacaagaagacacagggtgttgcacttatcctttaaagagacctgctggtgcggccataggctagggatagcggcgcgctggacaccattggcctgctggttggtggctag

SEQ ID NO: 87562 - DNA, 1638 bp, Zea Mays
tgttttctttgttttgtacccatttaatggtactcaaaggatgctaaaaaatttgtaatcaataatattacaaataataatctaaaaactatggttcattactaatttcgaaatgtacaaaataaataacattgcattttatgttgtgtgtaattattgtggaaaaaacgtgacacaatatttgaattgtatgaaaaaatgtttacgaattcacatgcttccaccgtaagccacgacacttgttgaacaagccattgtctagcttcggctgcacgacaagagcatggcttctctccgaagcctttcccttctataaataatcactacttcaacacttcactcacacttcgcatacactcatccacaacaatggaccggttcgtagattccaatattttccttaggatggcacaagacatggaagatgaagaccatgagctcgaggttgcgacgtaccaacatcgtaggcgtcgtgcacttaacgagcgtcggtacgctggttccattcccggtcgtgttcgaatccatcgtgaccatatcagtggtgatgcaagaatccgagccgactacttttgcgcccaaccggtttacacggatgcacaatttcggaggaggtttcgcatgcgtcgccatgtgttcgagcgtctcgttcttgctgtgcaacaagtggatccgtacttcgttcaacgtccaaactgtgccggtgagctaggcctatctgcccttcagaaagttgttgctgccgtacgtatccttgcatacggtgttcctacggatgccgttgacgagtacgtacgaattggagaatctacagcacatgaggctttgaaacacttttgcactgccatccaaactgcttttggggggtactatcttaggaaacctactcctgctgatatcgctaggcttctccaagttggagaatcacgcggcttccctggtatgcttggtagtgtggattgcatgcattgggagtggcgtaactgcccaactgcatggaaggggatgtttaccggtcgcggtaaacaccctacaatgatcctcgaagttgttgcctcatatgacttatggatttggcatgcatacttcggcatgcccggtagctgtaacgacatcaatgttcttcagcgttcaaacctgttcgattcacatcttaatggtgatagtccaccagtgagtttctccgtcaatggacacacctacaacatgggatattacctagcagatggtatttatccggactggccagcgtttgtcaagacaatccgtcatccgtatgatgtgaggactcaacattttgccactgttcaagagtctgctagaaaagacattgaacgaacatttggagtactacagaagcgatgggccatagttcgtggtcctgcatatggttggtctccacaacacattggagatatcatgaaaacatgcatcatattgcacaatatgatcgtagaagatgaaggacctttcgttttttgaacacaagcttcgacaacatcggagtttttggcggatactagtcatggttccatttctgagcgcaatgagtacatcaacaacaggtacgaccaactacatgatccagtcaaatataatcagttgcaggttgatctaatccaccaccactgggcgcgg

SEQ ID NO: 87563 - DNA, 553 bp, Zea Mays
caaatacataagttcacaaattcacataattccaaatacaaaagttcacaaattcacacaagttcacatcgatagttcacatttttagttcacaagttcaaacacacaagttcaaacattagctccatcgctctcgatcaggacatcggattgttgttcgtagctccaccactagaattgagacatctgtccgcaaagtcaacgtgagggggaggagtcacttgatgagagccggaatcctacaaaataaaccaaaattctcataaataaacaactggcattaaatcacatgtacacaaagatataggaaagcatgataaacacaaaataataattgtgtgtccctaagtattaatattttcttgcacatatttggttaaaggtaaaagtatttgacctcttgggaaatgagaaggacacttattttgggacaaagggagtataatataaaggaaaaagagtcatccgtttgtgacttttggatggatcaactgattgcaggaataagaatgatagacttaaccaaatacatcagaatgtattctcagttccc

SEQ ID NO: 87564 - DNA, 579 bp, Zea Mays
atgggtcccggtatcctccgaaatctccttcatgaacatggacgtgtcttggcaagggttgagaggaggtccacagagcccgggattgttgctatagatcgatgggttcagaaaccggaggccttggagattggtgagctcgtcagggatgcaatgcgacagggagttgcccgacagatcgatgcccgtcatcagctcgagtatcctctggaacgtgagctcctgccccttccagatgatgtcgatccgatcctagtagatggacccatccagcgatcctgtgctggagttgttcttggggtgcttcatggaagccaggtctcccagctctctcaggatcagccctatcagtccgttgtgggccaagtccagcagctggagctgcgagagctgcgacggctccggagggatctggccgctgaacttgttcgagctgagcctaaggatcttcagcgccggaacgaaggtcccgatccagcgagggatgtcgccgtagaacctgttgttgccgatctctacggtgggcgcgggttggtggcggcgcggtggaggagcgggttggtggcggcgcgcgcatag

SEQ ID NO: 87565 - DNA, 829 bp, Zea Mays
gttgatgaggtaaactaaaattagttttaagctgcttccattcgcactagttgtccgctatatggcgcgtagtgattttatagttacctttcttgaactgagtttaaatgcttcggtcttataggtactgtttgtttctggtcttttatcgaagcacgtggagtgatacctctgcacctcagtggctttatcggcgaggctttgttgctgaggtaattagcattattttttatctactttccttcgtgatgattgttcactaatagactaatgtttgatgtcatgtttggccctaggattcttaccagtgcgtctatgtgttccaccaacaatctaattagcacatacttaaatctaccatctatccatgcattggatatactgcattatgcacgcttgctagtttaaagtgtgatttcatgcacagaacacggtatagagctttttatttaaaaatatttgtaactttaacaaatcaactcttagatatacaacctaatgaaatatattcaataggctcgatgcgttctagcatattccgatgtgccacacagtgcaaaggtaaattcactgtacttacatgcttaacttctatatatactaatgaagatagatatttgtatactattaatgcctctacaacaaatggtaaaaacatgtttttccaagttaagcacatacaaattcctcggtacaaaagtgctctcccactttggactaccatagtaagatagcaatgtttatcttatcgttcacaagtcgtccacaaagacatggatcagctgaccaatcttgaactaccatcgcctccagaaaaataagtgttaca

SEQ ID NO: 87566 - DNA, 6495 bp, Zea Mays
tccactcctccgccccctcgccgagcaagcacccctcgtcgtcggtgccgacctcgccgcgctgccgccgggttgggaccgataaataaaggggaggttaacgcgctaaccctcgcgacctcgggtagcgcgcgactcctctccatcgtcttcgccgtcgccctcgccctcgcgcgcccctcctacgccgcccccgtccctctctttcaccaccggcggccggcggctcccgctgccgctgcttcgaggccgtcctcccctaatcacagggaatcccccgccgccaaccccgctcaccgcactcctccagtccgcagctccggcggcgacctcgccgtctcgctgccccgccgggcctcggcccaccgccgagtcacggccacggctgccctgaaaccacagacttcgcctgcgacgagcatccgtcagctccaaagtgccaagggagatggatgataccttagctaccataaggatgaaattgaagaagcggaagaaaggcaaggatagtaatgattttgatgcagtggctgaatgtggacccgaggttccggcattggttcaacaggaaggtgaacgggctgttgttgatataggtgatggtgttgctgatgagaagagcaatttgaatgtcgtgaaactggagggtagtgatgtttctgggaattgtgcacagggtttggatgatttggggttgaaagactccttggcagtgctgtttacaagacctggtcggaagtcacggcaggtctcagaggaggcagaaggcatggaagtttcttgtccgcatgatgaggatggtcttaacaagggatctggtttggctccagacacagcttccaagggcattaaaaggagaaggcgacgcacaaaggaagagatgaagaatgcttctgtgcaggatcagaaagcctcattgcctcggaaagcaaagacaaatggtagcaagtctactaaactctataaggtcggtgctggtcctgggcaagctttgggaggattgtcttctgtttctcctcaactggaaaagtctgggaaagagaatgctgtagatgatggatcattttaccaatcattaggtgaagtgcttctacaagatgtggaagccagcaaagtactgaaggatggatcaattacctctttcaatggggtcactgatcactttgaaatctcagcttgggcaagcaatcaccctgggctggaatctcgttcaggaaatcttgatgaaaaaacacctcgcacagcagaacatacgaccaatcttggtgtttctgatgcacacacacgttcccaaacgctagggaaggaaagcagtgatgatgttgattgttctcaaggcaagtcaccaacatcaaccataaaaaggaaaattggtctaaaaccaaaacaggttcctgggaaatctgttcgacgaaaagaggaagtattatctgttgacgctgataataaaccaactgatacaacagaaattattgaagcaagtactactccggttattgaggaaaatttggatcagctgcctgttatggcccccaaggattcttgttcttcacatgacattgttggaaatagtcctatgtgtctaggtgcagacatggcagcacctgtgaaatatgtggatatagttgatgttgcaacaccattggattatgaagacaaggagaacacatcaaaggtgaaacgtgttacacgaggttccaaaaaacgcaaacatggtgacatggcatatgagggtgatgttgactgggaaactctaatgcaagagcaggggctgttctcaaacccctcagcaggttttccagatcagtcaataaaaacaaaaaataaaattaaaacttcagaagtttatgagggtggaggtgatactggtgttgctgcagtacgtgctggcctaaaggcaaagactattacaccgattgagaagataaagttcaaggaggttttgaagcgaaagggtggccttcaggagtacctagagtgcagaaatatgatactaagtcgctggagcaaggatgtcaagcatttattggatcttgcagactgtggtgtttcagacgttccgttgaaagatgagttgccacatcaagcacttactcgtgctgtgtttttattcttagaccaatatggctacataaatgctggaattgcatcagataaggtggcgaaggggcacaatgacactccatatgaggttattgaagtaccaaagctaaatgaatcacatcaaatggaatcagtcaacattcaaaatagcgttgtatctgtatcacaaaagaatgaggattttgagcatggaacgagcactgaatgctgcagaactgtaagtgttaaaaatactgaatgtgctttagtagaagcatcaaatgaaaaaaatcgttccacggttcactgtggtgtcctggagttgctgcctcacttgatgtctgaagaacatccaatggaaaaaaatattctagacgtgtcaactgaagttaggaatgcatcactgccatccagcaatttggatatccaatttacatcatatatgaatagttctgttggaaaagttgaggcccctcatcaacaagaagcacttgaaattgaaaatagtggaaacaactgtcaaagtgacagggctgagtttgctgtgcatggcaaaagaataatcattgtcggagcgggccctgctggtttaactgctgctcgccatttgcaacggcaaggttttttggtcactgttcttgaggcacgagaaaggattggtggccgtgtttatacggatcgcacatcactttcagttcctgtagatttgggtgctagcattattacaggggtggaggctgatatagctactgaaagacgggctgatccatcctctttgatctgttatcagcttggtcttgaacttactacgttgaatagtgcttgccctctgtatgatgtagtaactggtgacaaggttcctgattctctggatgaagatttagaagctgaatacaatggccttcttgatgagatggcactgctttttgcgcataatggtgacagtgcaatcggtttatccctggaggatggactggagtatgctcttaggaagcatcgcgcaactcaacctatggattctgtggaccaggatggccacttgagatttatgacaaattctagagctgtagacatttccgtaagtgcttcaataggaaaggagatagatcattgtggaaagaatgataagatagatgtcctcagccctctcgagagaagggttatgaactggcactttgcacatttagagtatggttgtgctgcaacgctgaaatctgtatcccttccatactggaaccaggacgatgtatacggaggattcggaggtgctcattgcatgatcaaaggtggctatgacactgttctacggagccttgctaaaggacttgatattaggttaaatcatgttgtcactgaagtactgtatggatctgaggagttaggtgatagctgtaaggatgggaaatatgtcaaggtttccacttcaactggaagtgaatttactggagatgctgtgttgataactatccctcttggttgcttgaaagcagataccatcaatttttcaccttcgttgccagactggaaagtatcttctataaaccggcttggatttggtgttctaaacaagatagtattggagttccctgaggtattttgggatgataatgtggattactttggtgcaactgcagaagaaacagatttaagaggacaatgctttatgttttggaatctcagaaagacagctggggctccagttctgatagctctacttgttgggaaggctgctatagatggacaaagcatcagttctggtgatcatgttaacaatgctatggtggttctccgaaagctttttaagaatgcttctgtaccagatccagttgcatctgttgtgacaaattggggacttgatccctttagtagaggtgcttactcttatgttgcagttggagcatcagggcgagattatgatattcttggaaggccagttgacaattgcttattctttgcgggtgaagcaacatgcaaagagcatccagatactgttggtggtgccattttgagtggtttgcgagaagctgttcgcatcgttgacttactgaacactggcagtgactatattgccgaggtagaaacgctacagacataccaaatgcagacagacagtgaaagaaatgaagtcaaggacatgtcaaatagacttgaagcatgtgaactttcgactgctctaagtaagaactcatctgatgcaatgtatccaattgttagcaaggaatctttgctgcaagaaatgttcttcagtgcaaagacaacatcagggcgcctacatttggctaaggagttattgaagcttcctacagatgttcttaaatcatttgctgggtgtaaagaaggactaagtacgctaaacttttggatacttgattcacttgggaaaaatgctactcaactactgcggcactgtgtgcgtttgcttgtgcttgtttccactgatctggtagctgtacgtttatcaggaattgggaagactgtaaaggaaaaggtttgtgtgcacacaagccgagatattcgtgctatagctcggcagttggtcagtgtgtggattgaagtttttcgtagagaaaaggatagcaacggcggactcaaattgctgcgtcgaatgccatcaattgaatcgagtaagaccaagagtaaggatctgcaatcaggaaagcctaccttacgtgtgccaaatggaactttggacaacaataaagtagtgtcccagcgccagcgtacaagattcgcaagtagtcaatcaccaccaaagataaacaagaagtatgataacaaggaaatgaaattggaaactgtgacagctgctatgtctgatggcaagttgctttcccaaaagcaacaacatggtattgaatctaaggtggaggaatgtggcattcctatgtctgaggaagaagctgctgcattcgctgctgctgaggctgctcgagctgctgctatagcagctgcacaggcatatgcatctgtagaggcagagataagtgtgcctcgtgagcttccaaagataccgtcgttccaatcttttgtgatgcgtgatcaccatttggacgaatctgatgcaagaaaaagaacattgaaggatgattttgggagacttgagtgcatatcagaaaatgattccaagaatggcgaagttaaggatttgcctgaaaacaccaagtacgctgatggtgatagcttgaaaatgtctcatgataattttactcagcagagccactcaaatgagacagcttgcctagcaaacgctcaggatcattcaacagatactgttgttgtagacggtcggtttacaagggcatgggtggatactgatacaatctgcattgatggtgtcaaggatcctctagccattgagaggtggcaggcacaggcgatggaggctgataaagaattctacagtcggatacgcatacctgatgaagatgattcaagtagtcagaagcacacatgccgtagttctgcttcacagggtgccgatagcaaacctgcatctgagcggcaatcaagaggtgtggagcatataaaacagggtctcgtgaactttatagcctcgctgctgatgccattatatagaggaaaaaagatcgaccgagaggggtacaaaacaatcatgcgcaaatctgttaacaagatcattgatacatgctcagaaggagagaaatcaatgactactcttgagtttcttgatgataaaaggaaaattaagattgaatcctttgtgggcaaaatggttgacaagcatttgcatgttgttagcaagtcggccaaaccttaagattcatatgtgtagtgaggtgttctctgcaaagagatctactctcttttaaaacacctatgaatcagtgattgttgatccaagtgaactaaaatctcacttcagaagccagcatgactcatcagtgttgccgcaagatcaacaagaacacatattacccagactatatgcgtggtccagaagagcattgaccagatcaataccatgtaattctgtacttatataggcatcatttccatcttcgtagctatagctcagtcaaaggtttagacctctgtgcactcgacaagcatgttgggcatgcagtaagcttggatgccaagttaagtttctgtggcttgatgaagtggcgtatgaagatccgggattcagtgtggtctcatatgcaatgagggtttttatgtctttcatggcggtagttcagtctagcctagcggattaatcctgttcattgttcagagttaactttaccaaagtagatcctcctctctctttgttgtacagttttgcagtttctaacaagcgtttaacttatagaaaggctggagtttggcagagatttgcagcccgttgtatatccttggctgcttataatgagcctcattgatgattctcgaatgcggaatgattgcccc

SEQ ID NO: 87567 - DNA, 1169 bp, Zea Mays
atgggggtattttttgaagggcttaaaaaagggtacccaaaaacaaaagagagatcactgcacctgccagatcctgtccattcaaaaaacgaagacactagtgtagccgtttcactcgctgatccggatgcaacgaacgtgcacatatatggccggtatctatggctcgctctttttaagctaggcctctctgttcctcgccccagcccacggcagccctttccttccgcaacatacatacccactgcacgagccaacgagcgcagccacactcctcgcccccgcccccgccagagcataagcccttccatgagggtgttgatgtcgcgccggcgcggtgccggtgccagcggcggcgggctgtgcatcaacaaaaaggcccgcctattcatgtgcggctgcggcggcaccaaggctgtctccatctccgatggctcctccgacaagtcaccaaccgccacgccgcagaccgccgcgtcaaccactccgctcaccggcacgtcgaccgccaccgtcacgaccgagtcgacgagaagaggagggagcaggccggcgacgacaacgtcgtcggctccctcctcgttctcggtctcgtcttcgtccgtcaccaccaccaccaccaccaccgccgacgacggccccagcagcatggaggagagcacgcccagcctgtcggcgctcctgcgccagctccacgagctggagcgcagcgtccgcttcctgcactccgccggcagcaccgacggcaagcagtggcaccgccggaccgtgagcgagggcggcggcgggtccgggcgggtggaggagagcgtggcggtggtgaaggagtcggcggacccgctgggcgacttccgccggtccatgctgcagatgatcgtggagaaggagatcgtgggcggcgcggagctccgggagctgctgcaccggttcctgtccctcaactcgccgcgccaccaccacctcatcctccgcgccttcgccgagatctgggaggaggtcttcgccgggcacgagcgcgcgccggacttcctcgcctcctcccgccgctgcaggaagaagcagcaccagcacctggcaacgcgtggtgcttgagcttgactagtctgttcctcgatcggtttgttacgtccaactgtccaaggtccaatcccatcccccggccgtcgatt

SEQ ID NO: 87568 - DNA, 2291 bp, Zea Mays
gacagctgacgggacacgtagtcaaccttctcccgcgagtggcgaaagggcccagaaaatgctgcacggcccggcccactctgcatcgccggcgatggccgccgccgccgccggcggcggcttgcagccgctggtggtgacgctcaactgcctcgaggacccgtcgctggagcaggacgcgctgtccggcgccgcggccgtcgagcacgcgccgctctcggcgctatccgcgggccgcgtcgaggccgccgccgccgtgctgctcccctcgctcgccttcctcccgcgcgccgcgcagcgcaggctccggccatggcagctgctgctctgcctcggctcaccggaccgcgccgcggacaccgccgcggccgccgagctcggcctccgcctcgtccacgtcgacgccaaccgcgccgatgaggtcgcggacaccgtcatggcgctcttcctgggcctcctccgccgcacccacctgctgtcccgccacgcctcctcgtcgtccccgactgctgggtggctcggctccgtgcagccgctgtgccggggcatgcgccgatgcagggggctcgtactgggcatcgtcggcgtcaacgccgccgcgcggtgcctggccacccgcagccttgccttccgcatgagcgtcctctacttcgatccgctctacgaggttactgggaaagtaaagcgtccttctattgtatttccttctgctgcaagaagaatggatactctcaatgatctattagcagcaagtgatctagtttcgcttcattgtgcattgacaaatgatacaacacatatacttaatgctgagcgccttcagcacataaaacctggagcgttcatagtcaacactggtagctgtcagctcatagatgactgtgcactcaaacaactcttgattgatggcactatcgctgggtgtgcattagatggcgctgaaggcccccagtggacggaagcatgggtgcgtgagatgccaaatgtattaattcttcctcgaagtgcagactacagtgaagaagtgtggatggagatcagagagaaagcaatcgcaatattgcagtcctttctctatgatggtgttgttccaaacaatgttatttctgatgaagatgaagagataagcgaaatgggatgtgacgatgatcaacttgataaacaaggaaaagaacatcctttacagatttgtgatggtgaacagcaaacagaagaaagccaattgactgcagaatatgacaagagaagagccatttcacaacctgaagagcctcaagcttctgcacaatctcaaagcattggctccagatctgaagggaggcgcagccgatctggaaagaaagggaaaaagagacctgctcgccgtagatcacaacagaaaatggatgaattgtcaactgtagaaggtggaagtaactattcttcacgcagagacgatgataaccaagtgttaagttctagttcacgatttgcatcgcctgaggactcaaaaaataaacagaagtcttctgttgagtctccaatggagataatttctgaaaataagttgcctgtagggcttggtagaaggcctcctgaaaagctaaaagaaggttttgttattgctctaaagacaagagacaattcaggtttttatgtttcaagagagagggtcactggcggtggatggtatcttgatgtgataccaaatgccacaaagagggatcctgctgctcagtttttagtcactttcagaaacaaggacactatgggattgcgatcttttgttgctggaggcaaactattacaggctaataataagatggagttcgtcttcgcaagtcattcttttgatgtttgtgagagctggatgctggaagggtgcctttcagaatactgcaaacttgttaatcgcaaaaatgctatggctgtacttggggtctatattgaggtccttggagctccgagtgaagatggtgtcgttcggtggcttgattaatacatcaaggctatgctatatttagagaacattttaaggctatgttgtttctatagaacaatttaggcttatgctgccaactgctatcctcgggttaggtcttctctgagtctctcttgccaagtctcagttttggctgttctactgcatctgcatggacatggactcgcaacgcagtcttttttagtttgtttgtttttttactgtctgtttgttgtaagctgtgtctattgtattttaattatacagtgtgacaagcaatcgctattatagtattctctattcaaaattcagtacttgtgtattactcagc

SEQ ID NO: 87569 - DNA, 3727 bp, Zea Mays
tttgctctgttatagagtagtaaaaacttcacctttggatcatttacctcactctctacaactacaagtctacaaggtaatgctcatgtaaaaaattctctttgaagggcttaacgaagagttttacagggataggcatgcaaatcctaaagctatatccgcttaaaaaaatctaggaatccgtaaacagtgtacaggtcaaaacaaaagaaagaaaaaaaactgcacacgacgtcaatcactctcactgcctctttccaccctgctgtagactgccctttctaccgttatatacccagcacaggatgtcgcgaccgatcggtttcccgagctgcagaggaattcttgcgtggatgctcgtctcttgcctagttgtttgtttcttgcagaggaattttttcctgaacttgtccccgccgtcttgaaggtttcttgtttgggagcagggcggaggcgctcctttccttcttggccgacgatggtatggactgggcagcggcgcgcgcgagcgatttttgcggcaaaccccctgcgagaaacatcgtccgcagaacacctcactttcactttttgtactcttccgtctctgccctcgcgttattgcctcgtctcgctcgcctggctggctcgtgccttgccttgctcagcgtacgcgaacgcagcgagaaggaggagcaaggaaatagagagagagagaaaaaaaaatcaagtcatccccctttcctctaagctcgttccatggagaactcttctcacaagcggacgcgggaggcggccgacctcgccgccggaggctgtggagaggagggctcgccgcaggccgacgccaagaggctgcggccgcaggacctgctcgacatgctggaggacgacaccgacacggccgcggtcggcgacctaccgtcggtcatgcggagcctgtaggaggagatagctagcttcgacgaggccgcggagacgccggcgccgacatcggggcagcagccagagctgggcttcctactcgaggcctcggacgatgagctggggttgccgccgacgggcgccgcctcctcttcgtcggaggaggctgggcgcgcgggggcaccggagcccgcgctcgacggccagatctggggcttggagggcggaggtgctcctttccttcttggccggcggcggcatggactgggcagcggctttcgggtctccgtcgtggagcgcggtggcgacggaccctggcccgaccatgctgtccttcgcaggcccgtcctcctccgccaccgacgccgaggtgcgactccaggatttcaccgtgggtcgcatggaagcggaggcgacggtcgcgagcatcacgcacggatgggggcaggcgatagcacggcatgcagacgcccaagtccagcaatgctggggcatcacgagcgggcgggggtaccgcggcgtgcgtcacggggacggggcgggcgcacgggcgggcatcgcgatgacgggtgcgggagcaggcgggggcacgcgaatcacgggagtggagccacggtggtggtggacgccctcgttagtgtcttatagagtagtagagatagagattgtaggcgtccacaattcccagtggcgcacggttctgctgtccctccatcctcccgcgctccctccgtgctacatcaacgcccgcaggttctgcctctccctgtcactacgccgcctgcccccgccgcacccctccccgttactaggtgcggcgccgcgccgcgccgcctcctcggcctcgcctccgcgctcgccgacgactcgtcctgctccgacctcctcccgctgttcccagtccccgccggctacgccgcctctgacgccgcggatccccgatgccgagagctgcccgtcgcccgctgccgtcagcagcgtcttcagtaagttccgcgacccggcgccatctcctgtgacccctgacgacgctgcggcggcgcctgacgagcccagggatcttggcttcgacgatgacgacagtttcgacgccgattctattctgtgcggcgtccaccagagcgcggccgagggcatcgatggcatcatgggtaagctctctatggaaaacaacggggcgtccggatcaggctcaagcgttgactccaacatgcccgaatccaagatgcacccctacctcaggaaccttatggtgctcgggctcagcttctggcaggatcagaatatcatcatcaatcaagcgctgaagcggcatagtgtcgatcctgaatggtggatgtgccctgccatacctgtgaaagacattaccccggcaccaccgccttcagtggcaatggcgaaggaagactaagaagaagtcactggggacaatatacgaggaggggactcctgagcctgccaatggcgacgacgatggagctttggcactgccagagacaggattggggcttagcttgaatactgatggggtgctcaaggcgtggtgtggcagaggctctgcgtttgctgatggcaatgggcctgacttgccattgtcccctgctcatgtggtagtaagtatttccagcttatctaaagatataaaagatcttacatttccagttaaaaattaaagatggctagagctcttggaaccctgagtagtacctgctattagttcatatcgtctggtaagtagaatctatttcacttcagtagaagtacagatcgtctgttgttttatatcagcagtgatcagaaaaatcttggcatgcattgctttgtttcagtcccttcgcatttcttgtcaatggaagatttctcccagaagaaaatctgtgtctgaaatttgctaatatgaaatagtacagtatgcccaccagtacttgactttactggctcaatgggccaggcagaaggaaattccaattggttgttttctttgagttgaatcattataacaaacttagccctcattatgttgtatctgcagtttttgaattcaattgaagtaaaaggaaatatcatagtttggtcctttcgcgaattttttttgtccaattttttgtccttgtaggtttttccgttgcattagaaaacactgtaggctgcttccttgcgttgcctctccgtttgcaggaacaagagaccagtttttatgtcatagacatgaactactttcctggtatgtggctgctttcttgcgttgtctctccgtttgcagggaagggtgctcccagcccccgtcatgccccttggcccctcccaaccctcgtcgtcataacggagggtgctgcgacaagccagcggatgagcgtggcgatcccgctggagcagtccatcacgccggtgctttaggactttatgaatctcaacatatgctatctaccagtgtattactgtggagcctcgtcgtcgactcccacgtccatgagaccacctaggagttgctcgtgtacagctagctctaccaattcgagggatacataagtgggaggcgtccacaattcccagtggcgcacggttctgccgtctctccgccctcccgcgctgcatcaaccgacaaagctaatttaaccaaacaattacaatagcagattttaaaaaatctatatattaagtaggtgtaggtgactcacacggtttgattatttgctggactctgtaccatggtttgtagtttgtactacatccgatgcaagaaagaataaaattatagttctggaattaaagttcagttttgttctcataatgcagagttctggaattaaagttcaataataca

SEQ ID NO: 87570 - DNA, 4050 bp, Zea Mays
tttgctctgttatagagtagtaaaaacttcacctttggatcatttacctcactctctacaactacaagtctacaaggtaatgctcatgtaaaaaattctctttgaagggcttaacgaagagttttacagggataggcatgcaaatcctaaagctatatccgcttaaaaaaatctaggaatccgtaaacagtgtacaggtcaaaacaaaagaaagaaaaaaaactgcacacgacgtcaatcactctcactgcctctttccaccctgctgtagactgccctttctaccgttatatacccagcacaggatgtcgcgaccgatcggtttcccgagctgcagaggaattcttgcgtggatgctcgtctcttgcctagttgtttgtttcttgcagaggaattttttcctgaacttgtccccgccgtcttgaaggtttcttgtttgggagcagggcggaggcgctcctttccttcttggccgacgatggtatggactgggcagcggcgcgcgcgagcgatttttgcggcaaaccccctgcgagaaacatcgtccgcagaacacctcactttcactttttgtactcttccgtctctgccctcgcgttattgcctcgtctcgctcgcctggctggctcgtgccttgccttgctcagcgtacgcgaacgcagcgagaaggaggagcaaggaaatagagagagagagaaaaaaaaatcaagtcatccccctttcctctaagctcgttccatggagaactcttctcacaagcggacgcgggaggcggccgacctcgccgccggaggctgtggagaggagggctcgccgcaggccgacgccaagaggctgcggccgcaggacctgctcgacatgctggaggacgacaccgacacggccgcggtcggcgacctaccgtcggtcatgcggagcctgtaggaggagatagctagcttcgacgaggccgcggagacgccggcgccgacatcggggcagcagccagagctgggcttcctactcgaggcctcggacgatgagctggggttgccgccgacgggcgccgcctcctcttcgtcggaggaggctgggcgcgcgggggcaccggagcccgcgctcgacggccagatctggggcttggagggcggaggtgctcctttccttcttggccggcggcggcatggactgggcagcggctttcgggtctccgtcgtggagcgcggtggcgacggaccctggcccgaccatgctgtccttcgcaggcccgtcctcctccgccaccgacgccgaggtgcgactccaggatttcaccgtgggtcgcatggaagcggaggcgacggtcgcgagcatcacgcacggatgggggcaggcgatagcacggcatgcagacgcccaagtccagcaatgctggggcatcacgagcgggcgggggtaccgcggcgtgcgtcacggggacggggcgggcgcacgggcgggcatcgcgatgacgggtgcgggagcaggcgggggcacgcgaatcacgggagtggagccacggtggtggtggacgccctcgttagtgtcttatagagtagtagagatagagattgtaggcgtccacaattcccagtggcgcacggttctgctgtccctccatcctcccgcgctccctccgtgctacatcaacgcccgcaggttctgcctctccctgtcactacgccgcctgcccccgccgcacccctccccgttactaggtgcggcgccgcgccgcgccgcctcctcggcctcgcctccgcgctcgccgacgactcgtcctgctccgacctcctcccgctgttcccagtccccgccggctacgccgcctctgacgccgcggatccccgatgccgagagctgcccgtcgcccgctgccgtcagcagcgtcttcagtaagttccgcgacccggcgccatctcctgtgacccctgacgacgctgcggcggcgcctgacgagcccagggatcttggcttcgacgatgacgacagtttcgacgccgattctattctgtgcggcgtccaccagagcgcggccgagggcatcgatggcatcatgggtaagctctctatggaaaacaacggggcgtccggatcaggctcaagcgttgactccaacatgcccgaatccaagatgcacccctacctcaggaaccttatggtgctcgggctcagcttctggcaggatcagaatatcatcatcaatcaagcgctgaagcggcatagtgtcgatcctgaatggtggatgtgccctgccatacctgtgaaagacattaccccggcaccaccgccttcagtggcaatggcgaaggaagactaagaagaagtcactggggacaatatacgaggaggggactcctgagcctgccaatggcgacgacgatggagctttggcactgccagagacaggattggggcttagcttgaatactgatggggtgctcaaggcgtggtgtggcagaggctctgcgtttgctgatggcaatgggcctgacttgccattgtcccctgctcatgtggtagtaagtatttccagcttatctaaagatataaaagatcttacatttccagttaaaaattaaagatggctagagctcttggaaccctgagtagtacctgctattagttcatatcgtctggtaagtagaatctatttcacttcagtagaagtacagatcgtctgttgttttatatcagcagtgatcagaaaaatcttggcatgcattgctttgtttcagtcccttcgcatttcttgtcaatggaagatttctcccagaagaaaatctgtgtctgaaatttgctaatatgaaatagtacagtatgcccaccagtacttgactttactggctcaatgggccaggcagaaggaaattccaattggttgttttctttgagttgaatcattataacaaacttagccctcattatgttgtatctgcagtttttgaattcaattgaagtaaaaggaaatatcatagtttggtcctttcgcgaattttttttgtccaattttttgtccttgtaggtttttccgttgcattagaaaacactgtaggctgcttccttgcgttgcctctccgtttgcaggaacaagagaccagtttttatgtcatagacatgaactactttcctggtatgtggctgctttcttgcgttgtctctccgtttgcagggaagggtgctcccagcccccgtcatgccccttggcccctcccaaccctcgtcgtcataacggagggtgctgcgacaagccagcggatgagcgtggcgatcccgctggagcagtccatcacgccggtgctttaggactttatgaatctcaacatatgctatctaccagtgtattactgtggagcctcgtcgtcgactcccacgtccatgagaccacctaggagttgctcgtgtacagctagctctaccaattcgagggatacataagtgggagtactgagggaggtgccgggggagaaaatttttctcagtttggtgctgatttatcaagacgaatgacttattgccacagagctaaggatgacagtagagaaagttggggcagatttccggcttcaatttatgtccttatcagcactacaacagcaacgacgagcacagtagcaaagcagtccgagccttgtggaggagagcctccacaagaagtgcctcgacgggttccctacctccgccgccggtatcgtgtcattgatgggccacttcatcgctatctagcacaaggtgcaacacccccttccctcgctccttcgctcttcctggctccaatctgatacaccctctacgttagggtatgagtgaccgagtgacacttgatctgtcgactttaaccggggcagtcgacaaagcacgcgcctggatgccctactatatgtattgagtacataggattattagtacacttcctttgcactgtcacagcgatctagatctccacgaactaaatgtggatcctctctcttggcgtgcacaccgatcttttcattcacactgcactcaccgtcatggcatccaccaaggacttctcgttcgtctctgccttcaggt

SEQ ID NO: 87571 - DNA, 4229 bp, Zea Mays
tttgctctgttatagagtagtaaaaacttcacctttggatcatttacctcactctctacaactacaagtctacaaggtaatgctcatgtaaaaaattctctttgaagggcttaacgaagagttttacagggataggcatgcaaatcctaaagctatatccgcttaaaaaaatctaggaatccgtaaacagtgtacaggtcaaaacaaaagaaagaaaaaaaactgcacacgacgtcaatcactctcactgcctctttccaccctgctgtagactgccctttctaccgttatatacccagcacaggatgtcgcgaccgatcggtttcccgagctgcagaggaattcttgcgtggatgctcgtctcttgcctagttgtttgtttcttgcagaggaattttttcctgaacttgtccccgccgtcttgaaggtttcttgtttgggagcagggcggaggcgctcctttccttcttggccgacgatggtatggactgggcagcggcgcgcgcgagcgatttttgcggcaaaccccctgcgagaaacatcgtccgcagaacacctcactttcactttttgtactcttccgtctctgccctcgcgttattgcctcgtctcgctcgcctggctggctcgtgccttgccttgctcagcgtacgcgaacgcagcgagaaggaggagcaaggaaatagagagagagagaaaaaaaaatcaagtcatccccctttcctctaagctcgttccatggagaactcttctcacaagcggacgcgggaggcggccgacctcgccgccggaggctgtggagaggagggctcgccgcaggccgacgccaagaggctgcggccgcaggacctgctcgacatgctggaggacgacaccgacacggccgcggtcggcgacctaccgtcggtcatgcggagcctgtaggaggagatagctagcttcgacgaggccgcggagacgccggcgccgacatcggggcagcagccagagctgggcttcctactcgaggcctcggacgatgagctggggttgccgccgacgggcgccgcctcctcttcgtcggaggaggctgggcgcgcgggggcaccggagcccgcgctcgacggccagatctggggcttggagggcggaggtgctcctttccttcttggccggcggcggcatggactgggcagcggctttcgggtctccgtcgtggagcgcggtggcgacggaccctggcccgaccatgctgtccttcgcaggcccgtcctcctccgccaccgacgccgaggtgcgactccaggatttcaccgtgggtcgcatggaagcggaggcgacggtcgcgagcatcacgcacggatgggggcaggcgatagcacggcatgcagacgcccaagtccagcaatgctggggcatcacgagcgggcgggggtaccgcggcgtgcgtcacggggacggggcgggcgcacgggcgggcatcgcgatgacgggtgcgggagcaggcgggggcacgcgaatcacgggagtggagccacggtggtggtggacgccctcgttagtgtcttatagagtagtagagatagagattgtaggcgtccacaattcccagtggcgcacggttctgctgtccctccatcctcccgcgctccctccgtgctacatcaacgcccgcaggttctgcctctccctgtcactacgccgcctgcccccgccgcacccctccccgttactaggtgcggcgccgcgccgcgccgcctcctcggcctcgcctccgcgctcgccgacgactcgtcctgctccgacctcctcccgctgttcccagtccccgccggctacgccgcctctgacgccgcggatccccgatgccgagagctgcccgtcgcccgctgccgtcagcagcgtcttcagtaagttccgcgacccggcgccatctcctgtgacccctgacgacgctgcggcggcgcctgacgagcccagggatcttggcttcgacgatgacgacagtttcgacgccgattctattctgtgcggcgtccaccagagcgcggccgagggcatcgatggcatcatgggtaagctctctatggaaaacaacggggcgtccggatcaggctcaagcgttgactccaacatgcccgaatccaagatgcacccctacctcaggaaccttatggtgctcgggctcagcttctggcaggatcagaatatcatcatcaatcaagcgctgaagcggcatagtgtcgatcctgaatggtggatgtgccctgccatacctgtgaaagacattaccccggcaccaccgccttcagtggcaatggcgaaggaagactaagaagaagtcactggggacaatatacgaggaggggactcctgagcctgccaatggcgacgacgatggagctttggcactgccagagacaggattggggcttagcttgaatactgatggggtgctcaaggcgtggtgtggcagaggctctgcgtttgctgatggcaatgggcctgacttgccattgtcccctgctcatgtggtagtaagtatttccagcttatctaaagatataaaagatcttacatttccagttaaaaattaaagatggctagagctcttggaaccctgagtagtacctgctattagttcatatcgtctggtaagtagaatctatttcacttcagtagaagtacagatcgtctgttgttttatatcagcagtgatcagaaaaatcttggcatgcattgctttgtttcagtcccttcgcatttcttgtcaatggaagatttctcccagaagaaaatctgtgtctgaaatttgctaatatgaaatagtacagtatgcccaccagtacttgactttactggctcaatgggccaggcagaaggaaattccaattggttgttttctttgagttgaatcattataacaaacttagccctcattatgttgtatctgcagtttttgaattcaattgaagtaaaaggaaatatcatagtttggtcctttcgcgaattttttttgtccaattttttgtccttgtaggtttttccgttgcattagaaaacactgtaggctgcttccttgcgttgcctctccgtttgcaggaacaagagaccagtttttatgtcatagacatgaactactttcctggtatgtggctgctttcttgcgttgtctctccgtttgcagggaagggtgctcccagcccccgtcatgccccttggcccctcccaaccctcgtcgtcataacggagggtgctgcgacaagccagcggatgagcgtggcgatcccgctggagcagtccatcacgccggtgctttaggactttatgaatctcaacatatgctatctaccagtgtattactgtggagcctcgtcgtcgactcccacgtccatgagaccacctaggagttgctcgtgtacagctagctctaccaattcgagggatacataagtgggagtactgagggaggtgccgggggagaaaatttttctcagtttggtgctgatttatcaagacgaatgacttattgccacagagctaaggatgacagtactggactgcagagagaaagttggggcagatttccggcttcaatttatgtccttatcagcactacaacagcaacgacgagcacagtagcaaagcagtccgagccttgtggaggagagcctccacaagaagtgcctcgacgggttccctacctccgccgccgatgtccaaggaagctgtgtttgctgtggaatttcaaggaagctgtgtttggtgtggagaaggagattgagataaccagattggaaggctgtaacacctgcgacggaagtggtgccaagccaggtacaaaggcaacggcatgtaaaacttgtggaggtcagggccaggagaggaggccctcctgggacctttatgtcttcattgatgttctctctgatcctattcttaagcgagatgggacaaacattctctacacatgcaaggtttcttacattgatgcaatccttgggaccaccgtcaaaatccccactgttgacggaacagttgaccttaagataccctcagggactcagccaggcacagctctggtgatgtccaagaaaggtgtcccgcttctcgagaagtcaaatgcccgtggagaccagctggtgtgtgtccaggttgatattctgaagcgtctgagcagcgacgagaagaagctaattgaggagcttgcaaacctgaacaaggctcaaacaaccaatagcaggagatga

SEQ ID NO: 87572 - DNA, 1421 bp, Zea Mays
gagaccggaaactttaagccatttttagtgatgttgaaggctgccctttgtgctcaagttcttccgagacgtcaagcgtgtgcgagaacaaggagctatagatgatcgtgacactttcctccatgcagtgcgagatctcctatgttttcactcaaatgtccaaggaagctgtgtttgctgtggaatttcaaggaagctgtgtttggtgtggagaaggagattgagataaccagattggaaggctgtaacacctgcgacggaagtggtgccaagccaggtacaaaggcaacggcatgtaaaacttgtggaggtcagggccaggtagtctcctccacaagaacactgcttggaatattccagcaagtctccacctgcaatacttgtggtggcatcggtgaattctccactccttgcaacacctgtgggggtgatggctgggtgcgaaggacaaagaggatcagcctaaaggttcctgctggagtggattctggaagcatgctgagggtctggtctgagggtaatgctggcaggagaggaggccctcctgggacctttatgtcttcattgatgttctctctgatcctattcttaagcgagatgggacaaacattctctacacatgcaaggtttcttacattgatgcaatccttgggaccaccgtcaaaatccccactgttgacggaacagttgaccttaagataccctcagggactcagccaggcacagctctggtgatgtccaagaaaggtgtcccgcttctcgagaagtcaaatgcccgtggagaccagctggtgtgtgtccaggttgatattctgaagcgtctgagcagcgacgagaagaagctaattgaggagcttgcaaacctgaacaaggctcaaacaaccaatagcaggagatgattgtcacacaaggcttcgtaggacaacgtgcttgtgtggtaggcaattttgatgcaaactgcagtgatgattggatggaaagagttggtagtgataaactcttctacgaactacatacagcaaggggtacactggagcaaaaatgtgtcgttccacatctgtaacctcgtttttaagctattaaagttgagtcagtgaactggacgtttttgcaatagcttagcatatgcactaggcaactttattagcctttttttgttgttatacgacttttgtattcttgaaagccttaggcaaaatatctgatggtggaatcaggtttagacttgacatttctttcacaaatgctgcaccatgcattcatggaatctgtaagctgtaccatggaaatgttaactgtagttttattgtttgtgatgcatttggggtttattggtttgctcttcaaatacgttatgcagacactacgtttttttctcccttcggcagctgttgatttgaagctgcctctcgtagagcagg

SEQ ID NO: 87573 - DNA, 1344 bp, Zea Mays
cactggatacgatccccccaaccaaaccgcatccgcgaaccgacgatccacatctacaggccacagcacagacggagagcggagcagagctggcatggcggccgcgccgtcgcacccgttcgtctacatcgacgcggcggctctccactcgctgctccccttcgcgtcgctgatcccacacctccgcgcgggcctcgcccatccggagctctccgccggcatccagtgcccgcagcgcgtctccatcccgctccccacggcgccgtccgccgcgctcctcctcatgccctcctggtgcgcgcacccgtcgctgccctacctcgcgcttaaggccgtcacctcgttcccgtccaactcgccgcgcctcccgtccgtccacgccgccgtctccctcttcagcgccgccacgggcgcgccgctcgcgtccatcgacggctccgcgctcacgctgctccgcacggccgccgtctcggcactcgccgcctcgctcctcgcctccccgtcccgcccgccctcggtcctcgcgctcgcgggggccggcgcgctcgcgccctacctcgcggaggcgcacctcgcggcgctcccctccgtctcccgggtcctcgtctggaaccgcaccagggccaagtccgcggcgctcgtcgccaagctccgcgaatcgcacccgggcctcaccgtcgaggaggtgggcagcatggacgaggccgtcgccgcggcggacgtcgttagctgcgccacggggtcgcgggagcccatcgtgcgcggggagctgctgcgccccggcgcgcacctggacctggtggggtcgttcacgccggcgatgcgggagtgcgacgacgacgcgctgcgccgcgggcgggtgttcatcgactttgaggcggcgatggaggaggccggggaattggtgggtgcggtccagcgaggcgtgcttcggagggaggacgtggccgggacgctgtcggagctggccgccgggactgtggtgggcccacggagagacgacgagatcaccgtgtttaagtccgttggcaccgccgtggtggatctcttggcggcgcagctggcctacgagactcaccttgccgcaaccaaggatgcttgagctccaccctccaccagcttctagatgatgcggtgtttctttttcttgtccaatcctccgacgagttacaacagaaataaatggatcagctcaatccttatgcattaataatagattccagtgatagtgtacgtactccacatttgttacttgttagtatatatttgtttatgcttactcatctgatgttgctagcaaggtgaaccgtaagtgttcacggttaaatggagctccattgctgg

SEQ ID NO: 87574 - DNA, 1457 bp, Zea Mays
acccccattgcccatttgcccccaaggccccaagcccccaacacggcaacaccgcaccacgaccacggactaccgtctcctctcctttcctctcctgcaactgcaagcgaccacccctccacccccatccacccacccgcccgccgacgcttggatcccctcccttgtttgccgtgtccccgcccaaaccccgtagccgccgccacagcaatcgctgccgccgccgctggaggccgggccgtgggggctgaaatgaaggaggtggtgctccacgtgtatgacgtgaccaacagtgactccgagaagacgaacaacaccatcctccagatcaaccgcatcttcaaggaccgcatcggcctcggcggcatcttccacagcgccgtccaggtctatggcgaggacgagtggtcgttcgggttctgcgagtccggcagcggcgtgtttagttgccccataggcaagaaccccatgtacacctaccgggagcgcatcgtcctcggggagaccgagtgcggcatcgccgccgttaaccggatcctgcgggagctcagccgcgagtggcctggccactcgtacgatctcctctccaggaattgtaaccatttctgcgacgtgctctgcgagaggctcggcgtccccaagctcccaggttgggtgaatcgctttgccaatgccggtgatactgctgtggttgttgctgagaacacagcagttaaggtaatttcagaatttgttgctgtgatacaatgtgttatctccaatttgcttaatcctagcataaaatttatgattgctccttgcttttttattatttttcctagtctatcactcatgttttagacctctgttttccccaccaatgcaaacatcccttatatttgtgtttgcatttttcttttgcacgtgttaggtttggagctttaaatatcgattatgtgcatagggatttctgttttatctatacctttctgttttatcgtcattgttttccttgtgaatttatgtattgcagttcaggcaggctaaaacagaaatcgtgaatgccagtagagtagcatacagatttatggcaggcctgacttccaaaaatcaagcctcacctgagtctccgggtaacaatcaaaacagaggcagccctagtttccagggagcttggttcaagaacatcgtctcagctggtgcaaagccttcatcgagtggatcgacacgcacacattttcaggacgctgatgatggaacccctttgcaacatcaaagttcaacagagcaatcaacacagttgtagttgcttcccagcatatcaaccaacaattgaattgaatctgtcaatctgttgtgtaacattagctaatatctgttcgaaacctgttgttaaattgtatcagtagtgtaacagttgctgagatttgttcaaaaactgctattttgcatttgtccgtgaatcagttttttgcagc

SEQ ID NO: 87575 - DNA, 1267 bp, Zea Mays
acccccattgcccatttgcccccaaggccccaagcccccaacacggcaacaccgcaccacgaccacggactaccgtctcctctcctttcctctcctgcaactgcaagcgaccacccctccacccccatccacccacccgcccgccgacgcttggatcccctcccttgtttgccgtgtccccgcccaaaccccgtagccgccgccacagcaatcgctgccgccgccgctggaggccgggccgtgggggctgaaatgaaggaggtggtgctccacgtgtatgacgtgaccaacagtgactccgagaagacgaacaacaccatcctccagatcaaccgcatcttcaaggaccgcatcggcctcggcggcatcttccacagcgccgtccaggtctatggcgaggacgagtggtcgttcgggttctgcgagtccggcagcggcgtgtttagttgccccataggcaagaaccccatgtacacctaccgggagcgcatcgtcctcggggagaccgagtgcggcatcgccgccgttaaccggatcctgcgggagctcagccgcgagtggcctggccactcgtacgatctcctctccaggaattgtaaccatttctgcgacgtgctctgcgagaggctcggcgtccccaagctcccaggttgggtgaatcgctttgccaatgccggtgatactgctgtggttgttgctgagaacacagcagttaagttcaggcaggctaaaacagaaatcgtgaatgccagtagagtagcatacagatttatggcaggcctgacttccaaaaatcaagcctcacctgagtctccgggtaacaatcaaaacagaggcagccctagtttccagggagcttggttcaagaacatcgtctcagctggtgcaaagccttcatcgagtggatcgacacgcacacattttcaggacgctgatgatggaacccctttgcaacatcaaagttcaacagagcaatcaacacagttgtagttgcttcccagcatatcaaccaacaattgaattgaatctgtcaatctgttgtgtaacattagctaatatctgttcgaaacctgttgttaaattgtatcagtagtgtaacagttgctgagatttgttcaaaaactgctattttgcatttgtccgtgaatcagttttttgcagcattgttgaagttgaacgctctgatgtcatgcgtagctgctaatctgttttcaaggttctgtttagcacattctcatggactgttttttttaaccaaacattgttt

SEQ ID NO: 87576 - DNA, 609 bp, Zea Mays
atggcgtcgcgcacggcgacgtcggcgttgccgtggcaccagtactccgcggcggcgggcggcgacggcgaggaggcgctggacgtcgaccggcgcgctggggtcgccgtggccagcgccctggtgcgtggcgcggggaagaacacccgccctgctggcaccggcagccgccgcagcgccctcgccttgcggcacaggggcacgaggaagcgcaggtacctgagcaggatcctccgcgtcgccagcagcggcttagcgccgccagctgggcgccgggccgagctggccacggacgccgccggcgtgctctgcgccgtgtggaacgccggcgaggagcacgccgacgcgtcgcaggggagaagaaggctgtcgtccgagaacacgaggccggcgctggcgggcagcagcggggagctgcacgcccccgcagcgcgcggcaggccgaagcggagcccgtctccctcggacgacgacgacgtccaccgcatcgagaacagctgctcctcggggtccatgtcgatgaaggagaaggacgcggtggagctgctgaaggactcgccgagggcggcgtcggcgtccaggcgctcgaacgatggccccggcttgtag

SEQ ID NO: 87577 - DNA, 1883 bp, Zea Mays
atgagcggctctctcgtcctcggtggcaccggaggcggcgagggcatgcaatacgtgcccttggtgaagagcgcagcgggtgacaagttgtcgtacgacatgtactactacctggcgttgaggggcatgacggtgggcgggaaggcggtgcagctcttggcgtgggagttcgcgaccaacgcagcagggtccggaggcgccatcatggactccggcaccacgttcacgtacctagacccgaccgtgttccagcctgtggcggacacagtggtgacggtggtgggcgggcggtacaaacggtccaaaaacacggaggtcgggctggggctgcacccctacttcgcgttgccgcagggcgccagtcaaccaactgataaaccattcaggactgaacacatgaggcgtcttgaatttgccttctggttcaaggtaaaactcttcaagtttttctacatttatgaatgcactctggctaatagttatgttgtgattgccattctcattggctttgttatagcatcaactggtagcgaggcttgctgttcagccatgttgacggcgcaagggaaagcgtcgaggtcggcgccgctgggcgcaggtcgttgggcccgacgtggccgccccgtggcggcgccgtaccgttcgggctggcaagcctacggtggcgtttccctcgagggcagcgaattccttggcggcatgcaccgcaccgaggagcgcgtcgttccgcgggcgccccacgcggcggcacgcgatgccgaggtggtgaggccgctctcaaagctcccgaacagcagcattgggctctacgattcctcgttcgagcgtgacgcgtgcggcgttgggtttgtcgctgagctatctggcgattacaaacgcgagactgttaatgatgctattgagatgcttgagagaatggctcaccgtggtgcctgcagctgcgagaagaatacaggagatggtgccggcatcatggtcgctctaccacatgacttcttcaaagaggtcgcaaaggatgctgggtttgagctacccccaccaggcgagtatgatgttggaatgttttttatgccaacagatgaaaagcgtcgtgagaaaggcaaagctgagtttaagaaggttgcagaatcactgggacatgtaatactcgggtggcgtctggttccgactgacaactcagacttgggtgaatctgcactcgagactgagccagtcattgagcaggttttcgttaccaagagctcaaggtcagaggctgagtttgaacaacagctatatatccttaggagactctcaatcatctctgttcaagcctctctgaacattaagcatggtggagagagggatttctacatgtgctctctatcttctaggtggttcctttttctcacttcaaaagtttttgttcatgcttttgatttcattaggtttcagggctgaaaaggatcagagagtctccacttagcacagttttcagaatggaattttggcatttttttgtttttctataggggatagcaacaaattgccttagatttgctcttaaaaattgtaaatatgtagccaaatgacattctggttggcttatgtttgtataaataattcttattcaaagttgtatatctttatattacaagactgttgtttacaagggccagcttaaaccgtcccagcttaaggggtactactatgcagacctaggtcatgaaaacttcatgagttatatggctctgttcaacatgacccatcagctcatactggattgcatctacctgagagatggacaaggagtgactgatggcttcgatgaaaacataggtatggatggtggtaaggttcttcctgatttgaacggtaggatgttgcatgatgttgatgcctga

SEQ ID NO: 87578 - DNA, 2703 bp, Zea Mays
ctagccagtagttgtccaattctccaagtggttcagaggagctagcagtacctcacgcggagtatatgagcgagtgttggcactggcgctgtctatccgcctatcatccctccccagcccgaaaagctatggccctgagctctcctccctcgccctggcgcaaaggtgcgtgcgtcgtcgctgccgacgctgctagcgtttgctgcgtccgtctccttcgcttccttttcccttccccctagctccctcggctctgctgctttgccttgcgcgcctttgtactattttactccgcctttcgattctgcgctgagcttttcatctccagtgtagtgtaacgtacgtcaagccatccatccatccatcggcagttcggcacccggccagccggcgggcgcgctgggctgcctgcggctacacgtacgtcgtaatcccgctctcccgcctcgcccgccccggtcgtcccgggctcccggccacaacaactacacatagacacatggcgcatgatgagccaggtttcgcgtacgcggactacttcgcggcggcggccggcgccgtggcgacgttcgtgccggaggtggacgtcggcggcggcggggaggagggtcttcacctctacggcctgcagccgcaccaccagcagcccggggtggagatgtacggggccaggggccacatgccgccggccgcgatgatggcggcgcacggcggcaaggccgcgctcggtctcgacgtcgcttctcccgtcgtcggcgggcacttcggggacgaccacctccggcaggctctccaggcgccgctgtcgctgtcgctccacgacgacgggaccgccgacgccgcgccgctggcgctgcaccaccaccaccaccatctcggcggcgtaccgcaggcgcagcagcaccagccgccgggggcgtggccacagccgcagcagcagggcgcgtggcacctgcgcggctccaggttcctgcgcccgacgcagcagctgctgcaggagttctgcaccctgcccgtggacaccgtcaccagcacgcccgcgaagccagcgagcgtggaggacggcgtcggctcctcgtcctcggcggcggccccgtcgcagcagataatccaggccatggatgcggccgagctgcagaggctcaaagccaagctctacgccatgctccaagaggtggagagaaggtaccggaggtaccgggagcagatgagggccgtggcggggtccttcgaggcggtggccggggagcgggcggcggcggcgtacacgaggctggcgcagcggacgatatccaggcacttccggagcgtgagggacggagtggcggcgcagatgcaggcggtgcgccgggcgctcggcgagaaggacgcggacgacggcggcgtcgtcccggcggcggccgggatgatggccaacaagggggagaccacgcccaggctgcgggtcatcgaccagtgcctgcggcagcaccgggcgtaccagaccggcgtcgtcctcgagagccagccgtggagaccgcagcgcggcctgccggagcgcgccgtctccatcctccgggcgtggatgttcgagcacttcttgcacccgtatccaagcgacgtggacaagcacatcctggcgcgccagaccggcctgtcacgcagccaagtctccaactggttcatcaacgcgagggttaggctgtggaagccgatggtggaggagatgtactcggaggagatgaaggaccccaaggagggcgcctgcagtaacgcgaacagcagcgtgaacactggcgccggctacgcctccgaggagctagggcagccgctggggcacgggggcgcctgtggtggcgtggacgagcagaagccgacgcgggcgcagctggtccacgacgccgggtcgctagcatcagccgtcagcatcggcagcagcagggaccagcagcagatcagcagcatcaacttccgcatgatggaccacctcgacttcgacgcgtacagcggcgaccccgccgcggccggcgggccagcagctgggttcggtggtgctggtgcttccggcggcgtgtcgctcacgctcgggctgcagcagcacgccgacggcgacccccacggcggcgtcaacatcgcgttcgccgcggctccgtcggccgcgcacgagttcctgttcatggcaggcggcggcgagcatcggatggtcgcggctggcgccgtgcacccgtcgtcgtcccacggccacggtcagttcgccgccagcatgcaaggcgacagcgccggtgtggcctcctcgcactaccaccggggcctcggcgccgccactgggttccagctcctccatgacctggccggctgatcgcattagcatggcaagggacggaccctgatgactaggccgatcgagcgctttaattggctttggaggttcacgcgcggccggttgacggggatgtgccaacggcagcagctagccggatggcattggcatgagcgcatggcgctcgcgcagcttgcgcgcttcggatttttgtagggtttagattcctctcgcttcaattcttggcacggtgtctctgtctacatgtgtatctgtatcgcttcggagaatgccattatctgccatggacatggacgtctcttgctccgcgcgaacactagcatctaagaatttttataaaatttactccctaaatcatcatataaaaagtcatatgagtaaaa

SEQ ID NO: 87579 - DNA, 2127 bp, Zea Mays
ctagccagtagttgtccaattctccaagtggttcagaggagctagcagtacctcacgcggagtatatgagcgagtgttggcactggcgctgtctatccgcctatcatccctccccagcccgaaaagctatggccctgagctctcctccctcgccctggcgcaaagtgtagtgtaacgtacgtcaagccatccatccatccatcggcagttcggcacccggccagccggcgggcgcgctgggctgcctgcggctacacgtacgtcgtaatcccgctctcccgcctcgcccgccccggtcgtcccgggctcccggccacaacaactacacatagacacatggcgcatgatgagccaggtttcgcgtacgcggactacttcgcggcggcggccggcgccgtggcgacgttcgtgccggaggtggacgtcggcggcggcggggaggagggtcttcacctctacggcctgcagccgcaccaccagcagcccggggtggagatgtacggggccaggggccacatgccgccggccgcgatgatggcggcgcacggcggcaaggccgcgctcggtctcgacgtcgcttctcccgtcgtcggcgggcacttcggggacgaccacctccggcaggctctccaggcgccgctgtcgctgtcgctccacgacgacgggaccgccgacgccgcgccgctggcgctgcaccaccaccaccaccatctcggcggcgtaccgcaggcgcagcagcaccagccgccgggggcgtggccacagccgcagcagcagggcgcgtggcacctgcgcggctccaggttcctgcgcccgacgcagcagctgctgcaggagttctgcaccctgcccgtggacaccgtcaccagcacgcccgcgaagccagcgagcgtggaggacggcgtcggctcctcgtcctcggcggcggccccgtcgcagcagataatccaggccatggatgcggccgagctgcagaggctcaaagccaagctctacgccatgctccaagaggtatccaagcgacgtggacaagcacatcctggcgcgccagaccggcctgtcacgcagccaagtctccaactggttcatcaacgcgagggttaggctgtggaagccgatggtggaggagatgtactcggaggagatgaaggaccccaaggagggcgcctgcagtaacgcgaacagcagcgtgaacactggcgccggctacgcctccgaggagctagggcagccgctggggcacgggggcgcctgtggtggcgtggacgagcagaagccgacgcgggcgcagctggtccacgacgccgggtcgctagcatcagccgtcagcatcggcagcagcagggaccagcagcagatcagcagcatcaacttccgcatgatggaccacctcgacttcgacgcgtacagcggcgaccccgccgcggccggcgggccagcagctgggttcggtggtgctggtgcttccggcggcgtgtcgctcacgctcgggctgcagcagcacgccgacggcgacccccacggcggcgtcaacatcgcgttcgccgcggctccgtcggccgcgcacgagttcctgttcatggcaggcggcggcgagcatcggatggtcgcggctggcgccgtgcacccgtcgtcgtcccacggccacggtcagttcgccgccagcatgcaaggcgacagcgccggtgtggcctcctcgcactaccaccggggcctcggcgccgccactgggttccagctcctccatgacctggccggctgatcgcattagcatggcaagggacggaccctgatgactaggccgatcgagcgctttaattggctttggaggttcacgcgcggccggttgacggggatgtgccaacggcagcagctagccggatggcattggcatgagcgcatggcgctcgcgcagcttgcgcgcttcggatttttgtagggtttagattcctctcgcttcaattcttggcacggtgtctctgtctacatgtgtatctgtatcgcttcggagaatgccattatctgccatggacatggacgtctcttgctccgcgcgaacactagcatctaagaatttttataaaatttactccctaaatcatcatataaaaagtcatatgagtaaaa

SEQ ID NO: 87580 - DNA, 128 bp, Zea Mays
actttcactaaggattaacaagggtaaaatggaagttttggatcaaggatttttgagctttagtaccaacaccaaccttctttttggatcccccttgatagtacgacgattcctatactcaagttaaa

SEQ ID NO: 87581 - DNA, 101 bp, Zea Mays
gctgataatgagctagcatacgaccgtttggtacttacagtatgttcacttgtggcagtgacagtagtttacacgagtaacaaatgtatcttagcgtacaa

SEQ ID NO: 87582 - DNA, 1307 bp, Zea Mays
acctacccccctagccgccaccctcttctttttctccctgtcttcttccacacggcgtgcaggagggagctcagctccacctccctgcctgctctctacctcccatggccgacggcctccacagcgcagcagccatggcccggcgtcctccccttcctccaaacgtgtaagagcagggcgccccttcttcctcccgcatcacggcagcaagcagtttctccatgccgatctcgccctgcagccaaggacgccccctgcctctgctccaaatggcgagctccatatttgcatggagccgagctctcccatctccaccagccggctcccccttcttcttcctccaccagcagctcctctctatttcctgtacgtgcgcagggagcagaagctttttcttccacggcgccatttctcccagccggctccactttcccctgcgccctacctttttccatggaagcagcaggagctccacctcccatggacgcccagaaaaatcccccaagcaagcgcccagaaatcccagcagcctctccatggctgagctccctgttccctctgctctagccgaccatcttccgcagcacacgccgacgccactccctctggttttacttgagcagggtgctgccactccatggcatttccccctcctcgttgtccaaatttcagagccacgtcgaggtgtcgtggtgcctctctagctcctccttaagcacccaacagcccctccatacaatccgtggtcaacccttgcagcagagtgtcactgcagtcccgtgccgtgcacgctctgcaagtgttcgatggaatgcccgtgggaaatttgtgttgtgcgcagcagccccgacatctccacgctctgtcggctcgctgttttgtgaagccagtggacagcacgccgtcgacgcccgccatgtgctcgctgttttgcgcagcccatccgcgacgccgtcgaaaaccgtgctagtggtcgacgtcgtgccttgcccgttcgacaaaatgccgagccatgtggatagcccatgcgtctagctacgactcgttcaggttgattgatttataataatacctatgctttggttgatgtcgggcagtgcatgtatatatgtgaatgtgtgtaatatgtttcggctatacacgatggtaggatcgcatttgcggttagagaacaagaggttgttcgatgcgtgagatttgtagtttgtctaattatgttttggtcgatgtggtgtacatggatgtttaattatgtgtgggtataaaatgtttgtttatacaccgtggcaaggtcgcattcatgtttt

SEQ ID NO: 87583 - DNA, 1304 bp, Zea Mays
acctacccccctagccgccaccctcttctttttctccctgtcttcttccacacggcgtgcaggagggagctcagctccacctccctgcctgctctctacctcccatggccgacggcctccacagcgcagcagccatggcccggcgtcctccccttcctccaaacgtgtaagagcagggcgccccttcttcctcccgcatcacggcagcaagcagtttctccatgccgatctcgccctgcagccaaggacgccccctgcctctgctccaaatggcgagctccatatttgcatggagccgagctctcccatctccaccagccggctcccccttcttcttcctccaccagcagctcctctctatttcctgtacgtgcgcagggagcagaagctttttcttccacggcgccatttctcccagccggctccactttcccctgcgccctacctttttccatggaagcagcaggagctccacctcccatggacgcccagaaaaatcccccaagcaagcgcccagaaatcccagcagcctctccatggctgagctccctgttccctctgctctagccgaccatcttccgcagcacacgccgacgccactccctctggttttacttgagcagggtgctgccactccatggcatttccccctcctcgttgtccaaatttcagagccacgtcgaggtgtcgtggtgcctctctagctcctccttaagcacccaacagcccctccatacaatccgtggtcaacccttgcagcagagtgtcactgcagtcccgtgccgtgcacgctctgcaagtgttcgatggaatgcccgtgggaaatttgtgttgtgcgcagcagccccgacatctccacgctctgtcggctcgctgttttgtgaagccagtggacagcacgccgtcgacgcccgccatgtgctcgctgttttgcgcagcccatccgcgacgccgtcgaaaaccctagtggtcgacgtcgtgccttgcccgttcgacaaaatgccgagccatgtggatagcccatgcgtctagctacgactcgttcaggttgattgatttataataatacctatgctttggttgatgtcgggcagtgcatgtatatatgtgaatgtgtgtaatatgtttcggctatacacgatggtaggatcgcatttgcggttagagaacaagaggttgttcgatgcgtgagatttgtagtttgtctaattatgttttggtcgatgtggtgtacatggatgtttaattatgtgtgggtataaaatgtttgtttatacaccgtggcaaggtcgcattcatgtttt

SEQ ID NO: 87584 - DNA, 460 bp, Zea Mays
tttttgggataaatggtgttggaagacagttgagattaatcatttggtctctcaaacgaatccacgcttttctatgcacatgttatgtattagtaatatataatgatagagagccaacagtctgtcttttccacacactagattttagggcatttatgtgaggttgtgaaaaaactctttatgtgaggaaaaaatatttcatgagtaagcatgccatgtcagctaaatcgagtggatattgtgaattgtgaactttgagtctgtaaacttgtgatttttatgaacttgttatactgtgaacttgttatattgtgaacttgttatctttgtaaactttttatattataaatttgtgatccttgtgaacttgttatattgtgaacttgttatatcataaattgtgaacatgtggtctttgtgatcttttgtcaactttgttgtattgtgaggtttgatatgt

SEQ ID NO: 87585 - DNA, 1035 bp, Zea Mays
gttcttctcaatccaatcaagattccacgctgcagaagccaaggggatatggaggtcacaatagcagagaagaagcctcgggctgccggtgacggcgacggcctggttgagaggctccccgaggcgctcctagtggaggtgctggcccgtgtcgatgtcgacggtgcctgctccgccgccgcgtcctgccgctcgctctactccgccgccaacgctgttctccccgccctcacctccatcgacctctcctatttttttccaatgttcaatacacactctttgggtgaagttccctctgctagatccactcaccacttttcgcagttacaaggctcttccctcgcccctccatcccaactcctgccatcaaagtgcacagcttcgctggccccaacgtggctctgtcggccctccgtcggctcaggcggcaacaacaatgagcattccagcggtatggcaggtttaaagaagtccttgctaaatgtcttccatgatggttcttgtcatcctggtatggcattagtaattgatgatcgtctgaaagtttgggatgagaaggatcaattacgagttcatgtggttcctgcatttactccatattatgctccacaggcagaggcaaattgttctatcccggttctttgtgtagccagaaacgttgcatgcaatgttaggggtggtttcttcaatgttcatttgtttgcattttgctgtcaacctaatacttctgctacgagactccctcatcagcttctaatctcaacgaacagccactgccatggacttgtacatctcgacacatcttgtctgaaatcgtctagaccaaacaccatagttctatctgggcttagtggtagtggcaaaaccactatttactaccagaaagacaaagtaaaacctgtgcatgttattgatgttcctggtcatgctaggctcaaacccaaacttgatgaagtcctgcctaaagttgctgcggttgtctttgttgttgatgctcaagatttcttgtctagcatgcaagctgctgcagagtaa

SEQ ID NO: 87586 - DNA, 95 bp, Zea Mays
acagcagagcacgtggacgtggatctgattggacttggttggtggtgcacccgaccgatgttgcgtcgacgagacatcctcgcacgacggggaat

SEQ ID NO: 87587 - DNA, 1617 bp, Zea Mays
ccggccgctataaagagcgcgcgacggcggcccctgggagagccatgcgagactggaggcggaaccgcgcacgacaccaagctgccgcgccggactgctgcacgcaagcgcagcgcaggaccgaccgacctccgtaggcacgcacggcgccggcggcatggcggagcacctcctgtcgacggccgtgcacgacacgctgccggggagctacgtgcggccggagccggagcgcccgcgcctcgcggaggtcgtgaccggcgcgcgcatccccgtcgtggacctgggcagccccgaccgcggcgcggtcgtggccgccgtcggcgacgcctgccgctcgcacggcttcttccaggtcgtcaaccacgggatacacgccgccctggtcgcggcggtgatggccgcggggcgcggcttcttccggctgccccccgaggagaaggccaagctctactccgacgaccccgccaggaagatccggctgtccaccagcttcaacgtgcgcaaggagacggtgcacaactggcgcgactacctccgcctgcactgccatcccctcgacgagttcctgcccgattggccgtccaacccgcccgatttcaaggagaccatgggcacctactgcaaggaggtccgggagctcgggttcaggctgtacgccgcgatctcggagagcctgggcctagaggcgagctacatgaaggaagcgctgggggagcaggagcagcacatggcggtcaacttctacccgccgtgcccggagccggagctcacctacggcctcccggcgcacaccgaccccaacgcgctcaccatcctgctcatggacccggacgtcgccggcctgcaggtgctccacgccggccagtgggtcgccgtcaacccgcagcccggcgcgctcatcatcaacatcggcgaccagctgcaggcgctgagcaacgggcagtaccggagcgtgtggcaccgcgcggtggtgaactcggaccgggagcgcatgtccgtggcgtcgttcctgtgcccgtgcaaccacgtcgtgctcggccccgcgcggaagctcgtcaccgaggacaccccggccgtgtacaggaactacacgtacgacaagtactacgccaagttctggagcaggaacctggaccaggagcactgcctcgagctcttcagaacctagcgaatcggatacggatggatggatacattacatacgcgccctctgtttttctccatgacgttagaagaacacgttctgcaatgtttgtccattcaaggtggtatcaatcaaggctgtggtcgttgcaattcttccgctccatatacatgattaaatgctttgaaagaaaaagaaaaaaaagaaacacaagtattatggcactactagtgtttttaggaacaaggaaagaggggttgcccctgctggctatatatattaaatataaataaaggtaaggctgtagacattggtgaataagagaaagtatttgagtttctctattgtcactccagaacagactcctttgcctcgataacactcggcaaacgctggtaaagaggactcggtgaactgtacatgggcaaccgtctttttgccaagttctttatgtcggacactcgacaaaaaaa

SEQ ID NO: 87588 - DNA, 417 bp, Zea Mays
atgggcaaaggacgttcagtataccgacactactccaccggcgctccacatgccaagcgtggcggcgacggcgagcgtggtcaccgcgtacttgtcctcgatcctgtcccactcctttttcaacgcgtcgacgaactcggtcagctcctcgttggcagcctgaggcgccgccggctcccccgcggccatggccaccacgtccctcgccagccgcttgtacaaggacgacgcggcccgggtctggccctgcgcggcgaggctgaggccgggcagcggcggcagcgcgggcagccccagcctgacggagcgtgctgcaaccttgccgccgcccttggtgacggcggggctcgccgcgcccgtggcagcaggggcggcaggtgccatggtgtggtgtcctgcacgacgcgcgcgcagtga

SEQ ID NO: 87589 - DNA, 114 bp, Zea Mays
atgcaccaaaagaaagttgacagtcgacaaggagttcgtgaagttcatttggggtcttattggacctttttctccttcttaatatatattcgcgtagttctcttgcgctttcga

SEQ ID NO: 87590 - DNA, 821 bp, Zea Mays
gaccgacacgaggagcccgcaagcacttgcatggacatgcagaaaggaagaactttgcagatgcagatgcagatgagatgacgcactggaggagggatgccatttcccagtgtccttcgattcgaccaagagcctgcataaaaccgcatgctcccccatgtttctggtatatgctcctccagccacacatgcatggcggcggacgtggtctccgacctggtcctgtccttcttctgctgctgcttctacgctcccggcgaccaccaccgcggcggcggaacgcgccactacggcggcggccacgcgcacccgaccggccgtgatgcggcgtatcaccaccgcggtgccggcagccgtacggcgagcggccggagcaggaggaccgtgtccctgcagacggtggagcttaaggtgaggatgtgctgcgagggctgcgagagagtcgtgcgacaagccctccagaacctccgaggagtggacagggtggatgtgaacgtgccaatggagaaggtgacggtgaccgggtacgtggacagggcgagagtgctgcaggaggtgcggcggagcgggaagaaggcggagttctggccgagcggcggcacgccgctgtggttcacgtcccccaggagctacttccgcgacgacggcggctcgtaccgccgcaacagctacaactaccgccggcacgggtacagcgacggcgaccggcacggccgcatgcgcgagcccgcacgcggcgccggccccgtcggtaacatgttcaacgacgacgacgtcaacgccgcctgccggatcatgtgacccatgcggatgtcttgcgg

SEQ ID NO: 87591 - DNA, 1327 bp, Zea Mays
aaatcctaaccttctctccttccttttgatcttcccctctacgcgatcgaaaccgaagctcgaatcaatcctccacccgtttccagcccctcgtcccggagccccgatccgcctcccgtctcctcctgggcaggtcccccttttccgcgtgtgcgttggccggccggttcccgatgagggggttgctggcggtggaggccgcgggcgcggcgtcggtcccggcctcggtactccacggcgccgtggactggtggcgcgacgtcaacgagtcgccgctgtggcaggaccgcatatttcacgcgctcgccgtgctctacggcatcgtctcggccgtcgcgctggtccaattaatcagaatcgagtgtagggtgccagagtatggatggacaacgcagaaggtgttccattttctaaacttccttgtgaacggcgtgcggtctgtcgtgtttgtgctgcggcgaaatgtgcaacttgtagagcctgagataatacaacatgtgcttctggatatgcccgggcttgcattcttcacgacatatgcacttttagtgctcttctgggctgagatttattatcaggcacgtgcaatgtcgactgatgggcttagaccaactttctattggatcaacggtgtggtctatgcaattcagataattctatggttggttttatggtggaaaccagttcgagttatggtcattttgccaaagatgttctttgcaggtgtatcactatttgctgcccttggatttgttctgtatggaggaaggttatttctgatgttgcagcgttttcctgtagattcgaaaggaaggagaaagaaattgcaggaggttggctatgtgactaccatctgtttttcttgtttcttgatcagatgtgtcatgctgtgcctcaattcatttgataaagaagcagatcttgatgtcctgaaccatccaatcctgaacttcctctattacctgctggttgagatagtgccttcggctctggtgctcttcattctacggaaactgcctccaaaacgtgggatcacacaatatcacccaatccattagagagcaggccttggtggacaggcaaatgttttctggtggattgtcttatatagcgtggtaaatacagaaggcagagtgaaaagtaccacctttgctctcgagcttgcccagcttttcatacgagggaaggctttagaatctcaggtttagaaaatgcgatctctttctctcagatttagaaaatgtaaaatgtaatttatataactttaatattctcagtgcatatcatttgttcacatctcagtaatcgtttgcatgtttcatttggt

SEQ ID NO: 87592 - DNA, 1347 bp, Zea Mays
aaatcctaaccttctctccttccttttgatcttcccctctacgcgatcgaaaccgaagctcgaatcaatcctccacccgtttccagcccctcgtcccggagccccgatccgcctcccgtctcctcctgggcaggtcccccttttccgcgtgtgcgttggccggccggttcccgatgagggggttgctggcggtggaggccgcgggcgcggcgtcggtcccggcctcggtactccacggcgccgtggactggtggcgcgacgtcaacgagtcgccgctgtggcaggaccgcatatttcacgcgctcgccgtgctctacggcatcgtctcggccgtcgcgctggtccaattaatcagaatcgagtgtagggtgccagagtatggatggacaacgcagaaggtgttccattttctaaacttccttgtgaacggcgtgcggtctgtcgtgtttgtgctgcggcgaaatgtgcaacttgtagagcctgagataatacaacatgtgcttctggatatgcccgggcttgcattcttcacgacatatgcacttttagtgctcttctgggctgagatttattatcaggcacgtgcaatgtcgactgatgggcttagaccaactttctattggatcaacggtgtggtctatgcaattcagttgacatcaatgtatttcagataattctatggttggttttatggtggaaaccagttcgagttatggtcattttgccaaagatgttctttgcaggtgtatcactatttgctgcccttggatttgttctgtatggaggaaggttatttctgatgttgcagcgttttcctgtagattcgaaaggaaggagaaagaaattgcaggaggttggctatgtgactaccatctgtttttcttgtttcttgatcagatgtgtcatgctgtgcctcaattcatttgataaagaagcagatcttgatgtcctgaaccatccaatcctgaacttcctctattacctgctggttgagatagtgccttcggctctggtgctcttcattctacggaaactgcctccaaaacgtgggatcacacaatatcacccaatccattagagagcaggccttggtggacaggcaaatgttttctggtggattgtcttatatagcgtggtaaatacagaaggcagagtgaaaagtaccacctttgctctcgagcttgcccagcttttcatacgagggaaggctttagaatctcaggtttagaaaatgcgatctctttctctcagatttagaaaatgtaaaatgtaatttatataactttaatattctcagtgcatatcatttgttcacatctcagtaatcgtttgcatgtttcatttggt

SEQ ID NO: 87593 - DNA, 819 bp, Zea Mays
aaccttctctccttccttttgatcttcccctctacgcgatcgaaaccgaagctcgaatcaatcctccacccgtttccagcccctcgtcccggagccccgatccgcctcccgtctcctcctgggcaggtcccccttttccgcgtgtgcgttggccggccggttcccgatgagggggttgctggcggtggaggccgcgggcgcggcgtcggtcccggcctcggtactccacggcgccgtggactggtggcgcgacgtcaacgagtcgccgctgtggcaggaccgcatatttcacgcgctcgccgtgctctacggcatcgtctcggccgtcgcgctggtccaattaatcagaatcgagtgtagggtgccagagtatggatggacaacgcagaaggtgttccattttctaaacttccttgtgaacggcgtgcggtctgtcgtgtttgtgctgcggcgaaatgtgcaacttgtagagcctgagataatacaacatgtgcttctggatatgcccgggcttgcattcttcacgacatatgcacttttagtgctcttctgggctgagatttattatcaggcacgtgcaatgtcgactgatgggcttagaccaactttctattggatcaacggtgtggtctatgcaattcagataattctatggttggttttatggtggaaaccagttcgagttatggtcattttgccaaagatgttctttgcaggtattccatgtttcattaattcatttctccatcaatctctttttatgtccctatgacagcatgagatcatgggcatcttgccatttataaagtgcgattaatt

SEQ ID NO: 87594 - DNA, 1288 bp, Zea Mays
aaccttctctccttccttttgatcttcccctctacgcgatcgaaaccgaagctcgaatcaatcctccacccgtttccagcccctcgtcccggagccccgatccgcctcccgtctcctcctgggcaggtcccccttttccgcgtgtgcgttggccggccggttcccgatgagggggttgctggcggtggaggccgcgggcgcggcgtcggtcccggcctcggtactccacggcgccgtggactggtggcgcgacgtcaacgagtcgccgctgtggcaggaccgcatatttcacgcgctcgccgtgctctacggcatcgtctcggccgtcgcgctggtccaattaatcagaatcgagtgtagggtgccagagtatggatggacaacgcagaaggtgttccattttctaaacttccttgtgaacggcgtgcggtctgtcgtgtttgtgctgcggcgaaatgtgcaacttgtagagcctgagataatacaacatgtgcttctggatatgcccgggcttgcattcttcacgacatatgcacttttagtgctcttctgggctgagatttattatcaggcacgtgcaatgtcgactgatgggcttagaccaactttctattggatcaacggtgtggtctatgcaattcagataattctatggttggttttatggtggaaaccagttcgagttatggtcattttgccaaagatgttctttgcaggtgtatcactatttgctgcccttggatttgttctgtatggaggaagattcgaaaggaaggagaaagaaattgcaggaggttggctatgtgactaccatctgtttttcttgtttcttgatcagatgtgtcatgctgtgcctcaattcatttgataaagaagcagatcttgatgtcctgaaccatccaatcctgaacttcctctattacctgctggttgagatagtgccttcggctctggtgctcttcattctacggaaactgcctccaaaacgtgggatcacacaatatcacccaatccattagagagcaggccttggtggacaggcaaatgttttctggtggattgtcttatatagcgtggtaaatacagaaggcagagtgaaaagtaccacctttgctctcgagcttgcccagcttttcatacgagggaaggctttagaatctcaggtttagaaaatgcgatctctttctctcagatttagaaaatgtaaaatgtaatttatataactttaatattctcagtgcatatcatttgttcacatctcagtaatcgtttgcatgtttcatttggt

SEQ ID NO: 87595 - DNA, 146 bp, Zea Mays
gatctcgagtatgtgatcttgacaatccacttgtagctctcttatggtcatattttcatcctaagccatacccttgttcggttggtgtaagctggtattcctattccagtttgcctctccttgaggatcacattgttgctttctta

SEQ ID NO: 87596 - DNA, 574 bp, Zea Mays
tttcagctgccgcgcgtccctgcggtcttccagctccagcgtcggctgctcctccctggccacccgcgccccttgcttctcccttctcacgctccccgtcgagctccctggtcgccgcgcagtcgagctccctcagctcgctcctcctgtgccgcgcgccagcccctggttcggctctactcctccctgcttgccgttcctatccccctgccatggagtccgtcgtcagtccgagctcgcccatcctctgctcggtttcaacttggtcgtgcctgcagcttctcccatagtgagctccctccactgccctaggttcccatgattatcctcatgcccgaccacggtacaacagcaacagccatgaaaccccttcgtgtcgcgccctcgatatgctcgatgaaataccgcagcgagctccgctccggatctgcgcagccccggccttgttgtcgacctcagtgagcacctgctgctgcctagctgtttttgcgctctatgtgtttgataaaatgaaagtcatgtgaattgattgtgtgcttgattatgaagtatattagtctatatatgtgattaa

SEQ ID NO: 87597 - DNA, 884 bp, Zea Mays
cttcctttcccaactcggtcgacgcgttcgccacggctgcgcagtcctcctcctcgcctccgatcccctcccttcgacgatgcgagcacacccgctcatcctcttcgtacctgcaccgccacctcatcctcttcctcgccgcgccgacacccaccgcgctctctccctcccgcggcgacgcccttcgccaacgagaaccgcacgccgtcgtctcccacgggcactgtcgcacgctgggccacgctgcagtcggtggcgccgccacaccttcttcctccatgtgccgtcgccgccctattcttcttcgagatgcagccgctagcgctgccctcctcccagctccccttcatggccgcgtgcaggtggaccgctccccaccccgtcgccttcctcctcgtactgcccccaagaacgccctaggttactttttcttagatttgccttttggtttcaagtatgtttctctgatgccctagctgtctggtggattaaatttaattattgagctgcaactttcaccaattggtttggagaaagacaatagaggcttgggttcttttagttaagaaaaattgcgtccgtgttcagttataacataagattgtttattgttctctgtaatctcacatttctttttctatatatgaatagggactatgtgccagtgttagtttttggtaccagtctacaggtctttcatttctacattcaaaggtgagaatcaatcatgttcggctccctttaaaaaagtaatgtttcccaatccttcatagtaaaactaaacacacattgtaaagacatttgtcgtacgagatcttttatagaggtgtgttttaacccaaaggcaggctgtggagatcaattccagatattgccttcttgtt

SEQ ID NO: 87598 - DNA, 487 bp, Zea Mays
ctttcccaactcggtcgacgcgttcgccacggctgcgcagtcctcctcctcgcctccgatcccctcccttcgacgatgcgagcacacccgctcatcctcttcgtacctgcaccgccacctcatcctcttcctcgccgcgccgacacccaccgcgctctctccctcccgcggcgacgcccttcgccaacgagaaccgcacgccgtcgtctcccacgggcactgtcgcacgctgggccacgctgcagtcggtggcgccgccacaccttcttcctccatgtgccgtcgccgccctattcttcttcgagatgcagccgctagcgctgccctcctcccagctccccttcatggccgcgtgcagggactatgtgccagtgttagtttttggtaccagtctacaggtctttcatttctacattcaaagagtagtgtactctgtactcttccagaaaactttacatggtaccggaaccgggaccagcggcgacgg

SEQ ID NO: 87599 - DNA, 1481 bp, Zea Mays
ctttcccaactcggtcgacgcgttcgccacggctgcgcagtcctcctcctcgcctccgatcccctcccttcgacgatgcgagcacacccgctcatcctcttcgtacctgcaccgccacctcatcctcttcctcgccgcgccgacacccaccgcgctctctccctcccgcggcgacgcccttcgccaacgagaaccgcacgccgtcgtctcccacgggcactgtcgcacgctgggccacgctgcagtcggtggcgccgccacaccttcttcctccatgtgccgtcgccgccctattcttcttcgagatgcagccgctagcgctgccctcctcccagctccccttcatggccgcgtgcaggtggaccgctccccaccccgtcgccttcctcctcgtactgcccccaagaacgccctagggactatgtgccagtgttagtttttggtaccagtctacaggtctttcatttctacattcaaaggtgagaatcaatcatgttcggctccctttaaaaaagtaatgtttcccaatccttcatagtaaaactaaacacacattgtaaagacatttgtcgtacgagatcttttatagaggtgtgttttaacccaaaggcaggctgtggagatcaattccagatattgccttcttgttgtgtctcagttgattttttttagcattgaacgtaacttacagtttgacataacaagcggtgaatgtaacactacagtttaactcaacaagccattggctgtagctcacaatcagcttggctgaactgccaaaaaaaatacaagcagtccattacagttcaacttaacaagagcagttctgttggtaaagccgatgcaaataagtaccaattgttagttaggaagggaaaagtgtcagcagtcaatggctgattaaaaaactaaatgtctttgaatttgttgggccgtgtgcctagtgcctggcctattaactggcttgttcgctgcggctttaatccgactgcgactgcggcttctacagtattttgtctctaggaattgcagctgcaatagtattttgcagctgcaacagtgctcccgcatgggcagccgaacaagctaaacatgtacatatatacttattataccagtgaggtgtgtgtagagtagtgtactctgtactcttccagaaaactttacatggtaccggaaccgggaccagcggcgacggtgtagtggtgaggaggcagaggagtgccttcggcctcgacggaagaaggccgccgatggagaagaagaccagctgggagcgtggcgcggcgtcgcggtcgtgcacgaggaggaggagcctgcacttgccggagggagaagaagcatgtagcacggtgcggtgctgcagtcgtgcgtgagtaggttcttattattgttttctatcctgctggatatgtagtcatgacagttaaattatgtacaactatgattacaaacgggaatacaagctaggagttgagacc

SEQ ID NO: 87600 - DNA, 1427 bp, Zea Mays
ctttcccaactcggtcgacgcgttcgccacggctgcgcagtcctcctcctcgcctccgatcccctcccttcgacgatgcgagcacacccgctcatcctcttcgtacctgcaccgccacctcatcctcttcctcgccgcgccgacacccaccgcgctctctccctcccgcggcgacgcccttcgccaacgagaaccgcacgccgtcgtctcccacgggcactgtcgcacgctgggccacgctgcagtcggtggcgccgccacaccttcttcctccatgtgccgtcgccgccctattcttcttcgagatgcagccgctagcgctgccctcctcccagctccccttcatggccgcgtgcagggactatgtgccagtgttagtttttggtaccagtctacaggtctttcatttctacattcaaaggtgagaatcaatcatgttcggctccctttaaaaaagtaatgtttcccaatccttcatagtaaaactaaacacacattgtaaagacatttgtcgtacgagatcttttatagaggtgtgttttaacccaaaggcaggctgtggagatcaattccagatattgccttcttgttgtgtctcagttgattttttttagcattgaacgtaacttacagtttgacataacaagcggtgaatgtaacactacagtttaactcaacaagccattggctgtagctcacaatcagcttggctgaactgccaaaaaaaatacaagcagtccattacagttcaacttaacaagagcagttctgttggtaaagccgatgcaaataagtaccaattgttagttaggaagggaaaagtgtcagcagtcaatggctgattaaaaaactaaatgtctttgaatttgttgggccgtgtgcctagtgcctggcctattaactggcttgttcgctgcggctttaatccgactgcgactgcggcttctacagtattttgtctctaggaattgcagctgcaatagtattttgcagctgcaacagtgctcccgcatgggcagccgaacaagctaaacatgtacatatatacttattataccagtgaggtgtgtgtagagtagtgtactctgtactcttccagaaaactttacatggtaccggaaccgggaccagcggcgacggtgtagtggtgaggaggcagaggagtgccttcggcctcgacggaagaaggccgccgatggagaagaagaccagctgggagcgtggcgcggcgtcgcggtcgtgcacgaggaggaggagcctgcacttgccggagggagaagaagcatgtagcacggtgcggtgctgcagtcgtgcgtgagtaggttcttattattgttttctatcctgctggatatgtagtcatgacagttaaattatgtacaactatgattacaaacgggaatacaagctaggagttgagaccacaa

SEQ ID NO: 87601 - DNA, 1529 bp, Zea Mays
cccaactcggtcgacgcgttcgccacggctgcgcagtcctcctcctcgcctccgatcccctcccttcgacgatgcgagcacacccgctcatcctcttcgtacctgcaccgccacctcatcctcttcctcgccgcgccgacacccaccgcgctctctccctcccgcggcgacgcccttcgccaacgagaaccgcacgccgtcgtctcccacgggcactgtcgcacgctgggccacgctgcagtcggtggcgccgccacaccttcttcctccatgtgccgtcgccgccctattcttcttcgagatgcagccgctagcgctgccctcctcccagctccccttcatggccgcgtgcagggactatgtgccagtgttagtttttggtaccagtctacaggtctttcatttctacattcaaagcggcgacggtgtagtggtgaggaggcagaggagtgccttcggcctcgacggaagaaggccgccgatggagaagaagaccagctgggagcgtggcgcggcgtcgcggtcgtgcacgaggaggaggagcctgcacttgccggagggagaagaagcatgtagcacggtgcggtgctgcagtcgtgcgtgagtgagccttcttcacatattgagcaacaataatcatcttcgtggtcatggtggtgatgaccatgatgcgcctagaaatgcatgtgtgaaatattcaatatatgtcaccatttctattttcagtaatacaagattagaccatccctgcacatctgcctatctgcctggcaaaatattatcgtcgcttccaagattgagaatatggctgcgtttggaaagccttagattctagcattggcagatggcggaggttctaataagtaaccttatgattggaaattgcagtgatcggttgtgtgtacgtgtctcccgtctgtgaaaaatttatgatcccgaggatgagtataagcttttccatgctcatatggtcctcatcgacgaggaggctggcagtgctcatgctcaaatataccctccactcactgacgttttcaaacctctgataaaggagggcaatgtctacaatgtctcctacattcagatcaagaaagctaataggatgtacaagcatgttgacaacgatatcatgatcggtttcacaaaatggatcctatgctgcctcaacaaacccgcggtttgaacacgtgacagatgacggcttagcttctgtggatggacatcttggtcgcttttgtagatggaatgtttggttggcttttgtagacagaattaggctgcacttgtgattgtgtaacgcttatgagcatggttgtgtggactgtgtcggccaaagtatacctcccaatgccttgtatatatcacatgcttagctgtctatccccaactaggtcgcctgataatagacttcgatcatgtcatgctattctataacaattttcgctgtaacttgcctaatcgtcatactatggtacacgcttaaatttggtgctgcaactttattgtggattataaaagagagaaaaata

SEQ ID NO: 87602 - DNA, 1410 bp, Zea Mays
cccaactcggtcgacgcgttcgccacggctgcgcagtcctcctcctcgcctccgatcccctcccttcgacgatgcgagcacacccgctcatcctcttcgtacctgcaccgccacctcatcctcttcctcgccgcgccgacacccaccgcgctctctccctcccgcggcgacgcccttcgccaacgagaaccgcacgccgtcgtctcccacgggcactgtcgcacgctgggccacgctgcagtcggtggcgccgccacaccttcttcctccatgtgccgtcgccgccctattcttcttcgagatgcagccgctagcgctgccctcctcccagctccccttcatggccgcgtgcagggactatgtgccagtgttagtttttggtaccagtctacaggtctttcatttctacattcaaagcggcgacggtgtagtggtgaggaggcagaggagtgccttcggcctcgacggaagaaggccgccgatggagaagaagaccagctgggagcgtggcgcggcgtcgcggtcgtgcacgaggaggaggagcctgcacttgccggagggagaagaagcatgtagcacggtgcggtgctgcagtcgtgcgtgagagttgagaccacaatccttatgaaaagttacactgtagaggacaacattaaggatgatcatagactaccaacattcttcttcagattaaatgttaaattcagtaatttaatttgtttcagatggcggaggttctaataagtaaccttatgattggaaattgcagtgatcggttgtgtgtacgtgtctcccgtctgtgaaaaatttatgatcccgaggatgagtataagcttttccatgctcatatggtcctcatcgacgaggaggctggcagtgctcatgctcaaatataccctccactcactgacgttttcaaacctctgataaaggagggcaatgtctacaatgtctcctacattcagatcaagaaagctaataggatgtacaagcatgttgacaacgatatcatgatcggtttcacaaaatggatcctatgctgcctcaacaaacccgcggtttgaacacgtgacagatgacggcttagcttctgtggatggacatcttggtcgcttttgtagatggaatgtttggttggcttttgtagacagaattaggctgcacttgtgattgtgtaacgcttatgagcatggttgtgtggactgtgtcggccaaagtatacctcccaatgccttgtatatatcacatgcttagctgtctatccccaactaggtcgcctgataatagacttcgatcatgtcatgctattctataacaattttcgctgtaacttgcctaatcgtcatactatggtacacgcttaaatttggtgctgcaactttattgtggattataaaagagagaaaaata

SEQ ID NO: 87603 - DNA, 1169 bp, Zea Mays
gaattatcgtatcctgctatacttatgcaacctaccaagaattagggcattgtagaaaccatataaagtattgagatcaatttgaatttgtctgcctcatgattttttgatacctgacctttatgaaggtagaggacaacattaaggatgatcatagactaccaacattcttcttcagattaaatgttaaattcagtaatttaatttgtttcaggtgagccttcttcacatattgagcaacaataatcatcttcgtggtcatggtggtgatgaccatgatgcgcctagaaatgcatgtgtgaaatattcaatatatgtcaccatttctattttcagtaatacaagattagaccatccctgcacatctgcctatctgcctggcaaaatattatcgtcgcttccaagattgagaatatggctgcgtttggaaagccttagattctagcattggcagatggcggaggttctaataagtaaccttatgattggaaattgcagtgatcggttgtgtgtacgtgtctcccgtctgtgaaaaatttatgatcccgaggatgagtataagcttttccatgctcatatggtcctcatcgacgaggaggctggcagtgctcatgctcaaatataccctccactcactgacgttttcaaacctctgataaaggagggcaatgtctacaatgtctcctacattcagatcaagaaagctaataggatgtacaagcatgttgacaacgatatcatgatcggtttcacaaaatggatcctatgctgcctcaacaaacccgcggtttgaacacgtgacagatgacggcttagcttctgtggatggacatcttggtcgcttttgtagatggaatgtttggttggcttttgtagacagaattaggctgcacttgtgattgtgtaacgcttatgagcatggttgtgtggactgtgtcggccaaagtatacctcccaatgccttgtatatatcacatgcttagctgtctatccccaactaggtcgcctgataatagacttcgatcatgtcatgctattctataacaattttcgctgtaacttgcctaatcgtcatactatggtacacgcttaaatttggtgctgcaactttattgtggattatgttcagtctatctgtgtttagtttggtgttttgttggtgattcgat

SEQ ID NO: 87604 - DNA, 1092 bp, Zea Mays
gaattatcgtatcctgctatacttatgcaacctaccaagaattagggcattgtagaaaccatataaagtattgagatcaatttgaatttgtctgcctcatgattttttgatacctgacctttatgaaggtagaggacaacattaaggatgatcatagactaccaacattcttcttcagattaaatgttaaattcagtaatttaatttgtttcaggtgagccttcttcacatattgagcaacaataatcatcttcgtggtcatggtggtgatgaccatgatgcgcctagaaatgcatgtgtgaaatattcaatatatgtcaccatttctattttcagtaatacaagattagaccatccctgcacatctgcctatctgcctggcaaaatattatcgtcgcttccaagattgagaatatggctgcgtttggaaagccttagattctagcattggtgatcggttgtgtgtacgtgtctcccgtctgtgaaaaatttatgatcccgaggatgagtataagcttttccatgctcatatggtcctcatcgacgaggaggctggcagtgctcatgctcaaatataccctccactcactgacgttttcaaacctctgataaaggagggcaatgtctacaatgtctcctacattcagatcaagaaagctaataggatgtacaagcatgttgacaacgatatcatgatcggtttcacaaaatggatcctatgctgcctcaacaaacccgcggtttgaacacgtgacagatgacggcttagcttctgtggatggacatcttggtcgcttttgtagatggaatgtttggttggcttttgtagacagaattaggctgcacttgtgattgtgtaacgcttatgagcatggttgtgtggactgtgtcggccaaagtatacctcccaatgccttgtatatatcacatgcttagctgtctatccccaactaggtcgcctgataatagacttcgatcatgtcatgctattctataacaattttcgctgtaacttgcctaatcgtcatactatggtacacgcttaaatttggtgctgcaactttattgtggattataaaagagagaaaaata

SEQ ID NO: 87605 - DNA, 1254 bp, Zea Mays
cttccccaagccgcgcccagcccgatctcctccctctcctcatctccatggccaccaaatttgctcctccattcaaggttcacgcaggtccgaccatggaagatggaactcgcctctgctcctccccgctctccccaccccgcgtgacagtttccctgctcccttctcctcaagttcgcccatgccgcgacccccagttccctctccttgtcgcgcagtttccttccgcgtcctcgttttctcctgctccagctctctgctcacagccgcaagctctattttcctccctgctgcagcgcccgaacgccctgcttgccctcgctcctctccgcgccctcgtcttcttcctcgccgcgtccggccaagcccccgtggcgcgcgtcctcccatggcgtctcccagtcctaggtcgccccttcggccgagctctccatggcgcccggatctccctgctccctgcgctcgcccagctcgatctcctccccatctgcttggctcagctcggcctgcgtgcccctgagctctcccctgcgcacccggcctccaaccttcctcccatggcgccctgctctgtttactgcttgtcgcgcgcttggaatccttgctggcgctcagccccgccgtgcgcagacgtggttccgtcgtcaagccaccgtctcgaccttgctgtgcaggccgctgtgctgtctctgtcgatctactcgccgtggcatggtcgtggaacttcctcggtgccgtgcgcgtcagatcattgggtcgcgtcctgctcggctcttgtgccgttgatttggagctccggcgcgggctcttttctgttgttgtcttgatcgcgagcgagtcctgttgtctccctacaccggtctctgcctgtgctcgtgccatgccactggaaccctcgtcgtggagctgttcgtcaccatgctcgacaagctctagtcgcgcgcctgtccacgtcgccgtcacgagactccatcttgcagcactcgttgtgtttggcgtccgtagtgctttggaacagcgtagttgacctccctgcttaatgcgctcacatcgccgactggagagaaaaatccaaggagattgatagagaggaaaacaaacacgcacgatgcttgttgtgtattcggtaaaaagctcgaacctggaagtcatcggcgtgcttgtgaagtttttaattgcttgatgctggtgagttacgtcactactcctgcttgttgatgaataagtagaacgattaaatatattagttgtgct

SEQ ID NO: 87606 - DNA, 2119 bp, Zea Mays
cccccacgggccccacccagtccaccacccagtataaaacaccctcctcctcctccggctgctgcgcagtgtgctccatctccatttttctcctcctctcgtttttgcgtttaggcccctggggaagcagggattctggcgacggtccctccccccggctctcccgcctcgcggctccgatcgaggccgcagcgtcagtgcagttgcattaatgggaaaccaatgccaaaatggaacctacgggtacgggagcaattacaacagctacaaccactttcagaaggagcctctggcttctaggcactgtgatggggacgatactgagggttgctacacagggccatctagaccgagcatagcagaccttatgcgacaaggactgaggcagactttaacgtccatctctgttcttggtcgagagactcctaatgtcacagagcattatacccttggccggcagcttggagagggtctcactgggaccacctacctctgcaccgagaccagcactgggtgtcagttcgcatgcaagtccatcctgaagacaaggttccggaacatgcaagatgttgaagacgtgcgccgtgaggtccagataatgcgctacctttcagggcaaaaggatgtagtcgccatcaaggacgcgtacgaggacgaggaggccgtgcacattgtcatggagctctgcgaaggcggcgagctgtatgaccggattaagaaggggaactacagcgagcagaaggctgcacatcttataaggactattgttggcgtcatagagaacttccattcacttggtgtcatgcaccgggatcttaagccagaaaacttcctcttacaggataaagacgatgatttgtcgataaaagtaatcgactttggtctctccgtgttcttcaaaccaggtgaggtctttactgaaacagtcggaagcccgtattatattgctccagaagtattgcagaaacattatggaccagaggctgatgtgtggacagctggagtgatactctatgtactgctaagtggcgtgccaccattttgggcagatacacatgaaggagtacttgacaaagtgcggaatgggcattttgattttgaatcagaccagtggcacatgatttcggacagcgcaaaggatcttataagaaaaatgctctgcccttgtccatcggagagattgaaagcccatgaagttctaaagcatccatggatatgtgataatggagtggctactcatcaaactctggatccaactgttctttctcgtaccaataaattatctgcagtgaataaatcaaagaaattggctctacaggttattgctaagcatctttcagaagaggagattgctaggttaagaggaatgttcaaggcaatggacaatggaaacaatgttgtgattactttgtctgagcttaaagaaggtttgagcaaatgcggctcagtgtttagaaacattgagattagtgatatcgtggaagcggatgattatgacggcaacaccaatatcaactgggaagagtttattgctgtaacagtgcccctaaataaaacagaacacaaagaacacttgatggcggccttaacatatttcgacaaagatggaggtgattacatcactgtcgacgagcttcaaaaggcttcagtggaacacgagatgaaaaatgctttccttgaggacaccatttatcaggttgatcagaacaatgacggccagaccaactatggcgagttcgtcacaatgatgcagagcgacagctctgggcttgggtggcaaacaatggaaagcagcatgaacgtacccctgagggaggcacctgaagtttactgatgtctctgtcggtgcaaagatactgttctatttggctgctttcgtggtggttcgtcagtcacaggtcacaaccatcgggcaaggtttgtgaaccggggagaggagaatgtagtctgattagtcgagggctagtagaaggctgcctacttcacatcatgcaggtagtgcaggtgtgctgtatgatctataagaacagagctgcggtcgccatatatgtatcagtgactggtttgttggttgctatgctaccttgcaatctaatagattaaatactagcagtagaag

SEQ ID NO: 87607 - DNA, 925 bp, Zea Mays
atggacaaagtggcaggagcaaatgggttggaaggggtctcgatagagtgtgctaatttgttgaataatggcattgatgttttcatgaagcagttaattggatcttgcattgaattagttagagcaaggtctcgacatggcaaactaaggcatgagacattgaagcagcagctgtgccgaaagctaataaatggtgtatcagtgcataaccatgttcctgggcagagttctgttatacctccagagacaaattccatctccatgcaggacttaaaggcagaggacgctgtcaagatattacttggtctgcgtgagaaatatgagacttaccataaatgcaaatacactttagaagggatcaatgcagcagtttacttgtcagcaagatacatccctgacaggcatcttcctgaagctggcagtagagctcggatggaatcatttaaaaggaagaaggaagaacaatgcttcattctctccaagtcaccagatgaatattggcaagagattagagttgttcagagtacacatgaagtggtaatgcaatgttcatggtagaacagttgcaacttgcaaatgtttcatatattggtggatgtttatatttcactgtacatcacatttcaggcgctggctaacagattgaagtattctcttgatgagaatgacaaagaggatggtgttaatactgaagtcataggggacaacaagattgcttcgccattgatgcctccaacttcaattaatatttggtggtcgcaaaagtgtggagacttgaatttatataaagttaggcttaacattagtgcaaacagttgtattttagtttagatttaaagtacacttatgtatgcgttgtttgacaatgcttatttatgatatattgaatggtatttatttatattatattaattataatgttgtt

SEQ ID NO: 87608 - DNA, 168 bp, Zea Mays
tgtcaagcaggatggggaacctataggcgatgttgctctccctccatgggcaaaggatgataactcaagtgatgagtttgacaaagattctattgagagtgatgatagatctcttgaagagctaagctgggagacactggaacttcttgtggtacctcatatattcag

SEQ ID NO: 87609 - DNA, 2646 bp, Zea Mays
ctcaacagacagagtacgtacaagcgactggtgaccgtgtgtgtttgtgtgatttgattggggtgttgccatggccggatcgggaagcgatggggctccagcgaccgccggcgccagcctaatgagcgactacctcgacggcccaaacgccatccaacggcgcgctgcgtcggtcgcaatcgtgcgctccggcgcgggggcaggggacggcccgcgcgtcgtcgacgggcccgggcgggaggaccggagggcgcagtcgtcccgacgagcctcgctgtcgttatggcgctctcgggcgccggccacgaagacggcggccgttgactcgatacccagctccgtcccgggcgctgccgcgccgcggggtgccaaggataaagggtcctcgacggcgtggaggagctggaagccggtgcgcgcgctcgcgcacctcgggaagcgccgcgcggggtgcctgttctcggtcgaggtcgacgccgcccgcggcgtgccggcgtccatggaagggttccgcctcgccgtcaccgtgcgcaaggcggagaccagggacggctcggtgcagaccctgccgtgccgggtgcgcggtggcgccgcggacttcgacgagacgctcttcgtcaggtgcaacctctacttcgccggcggagccggcacggggaagccgctccggctccagccgcggaggttcgtcgtaaccgtcgtcgccgtcgagggacgaggacggggcgcccttctgggcacgcacaccgtcgacgtcagctcgctcgtgctcgagtctctccgcaagatcagctccgagggacgccgcgtcaggtggttcgacgagacgttcgcgctctccggcactgcggccggcggagagctgcagctcaagctcgggtttcagctcatggaagacgcagggctcagcctgtacacgcaggccgaggagagggaccgcgggtctccggctccgggctcctctcgtgccagggctcacaacaggaactccttcagcatttcaagcacgcccaagctttcgccatctgacgcttccgtctcaccttccatgagggcctacaagcagcttgtcgataggcttcgtgtcgacgagaatggagatcctgatcatcatcctgcggtacgatctctgatgcctcggaagcccggcgacgacgagctttcggcatccaccaccgacgccggggacgtgaacagcctccccgagtacgaggtcgtggagaagggcgttgagacggttaaagaagtcgtccactaccaggctcaacgcgaggtgctgcgggagctcgactccattgccgagcagatcgaggccatcgaggcgctgatgaccaacggcgggaagaagtcgcccagggcggcgggtcagcagcagcgtctggacgcggatgaagagatggtgacggtggagtttcttaggaagctcgaggcggacggtgtcggcgacaagaagaagctcaggctgcccttgacgccgagatccgagccggcgtcgccagcaaggaaggcggtgacgactccgcccgtggtgccagacttggggcggggcattggccctgccgtgcaaacgcgtgacggcgggttcctggtgtccatgaacccgttcgacctgccgctggggaacagagatgggcccccaaagctcgccatgcaggtgtccaggcctttcgtgctgccgggcgccacggcggccacagggttcgacgtgctccagaagatggcggcggcaggcggcgccgacgaggtgcgcgacagggtggcgtcgctcggcggcatggatgacattacggggaagacgcccgagcaggtgggctttgagggcatcgcggcggctgtgatcggcgggcgacgcaccgagggcgcgagctcgagcgccgcgcggtccgtgcggctcgtccggaagctcgccgtggccttgtccgagggccggagcgagcgcgtctccacgggcatctggagcgccggtgacgacccggagacgctggacgaagttttcgccttctccctgcagaagctggagaccatggccgtggacgcgctggcggtccaggccgagatggccgacgaggacgcgccgttcgaggtctccgcggccgcgggggacacgggcgtgttcgactcgctggtgccctcggacgagtggtccgagtctggtgcctcggacgggcgcgtcaccctggtggcggccatccaggtgcgcgacccgtcgcggcggtacgaggcggtgggcgcgcccatggtcgccgtcgtgcagtcggcgaggctgttgggcgcggcgggctacagcgccgggaggttcaaggtacgaagcctgcacgtcggcggcgtgcagatgaggtgcacgccgtccggaggtggcgggagcgcgcgctggggcgcggagaggcagaagctgacggcgatgcagtggatgctcgcgcacgggccggcccgcgctggcaagagggcggcgacgacgacggcgcaggcgggggcgagagtgcagcggcccgacgtcgtgtggagcctgtcgtcgcgggtgctcgccgggatgtggcttaagacggtgcggaacccggacgtaaggattggcggcggcggcggcggcacgtgaggtcatctgcagtctgcttcttggctacgtgcagtatgactgcgtgagagcat

SEQ ID NO: 87610 - DNA, 2757 bp, Zea Mays
ctctctacacgcccacaagctggtgaccaggatccccccacccaaaactccgctctcatcccaccccccctccactccactaccacggcggcacggcctgcctctgcagctctgccctgctccgcacccctcgctctccaaccccaacgcgcggcgttgctaaaattcaccgcagcgcttactccagtttggccacctcaccacccgccgccgctgtttaagaaggccccgcgcccgatcggggatcacgaaccttggccgccgctgccggagtgggggtaagcgagagccctcctgcttggggtgcgttcttcgtaggctgcttggttctcttcgagcccgatttgctctttgtagcctggctctttccgagcgcagtctgttcttcgtctcgtctcctctgctggaggtttgcaggatctggtatgatatggtgatgtatgatgaactgacgacgcacgctgctgtcgcgtgcgtggtgtgtgtctgtgcaggcgtagatttccggcggccatggggggcgccgtgatggtcgccatcgcggcctctatcggcaacttgctgcagggctgggacaatgcgacaattgctggagccgtcctgtacataaagaaggaattcaacctgcagagcgagcctctgatcgagggcctcatcgtcgccatgtccctcattggggcaacagtcatcacgacgttctccggggcagcggccgactgcgttggtaggaggcccatgctggtcgcctcggctgtcctctacttcgtcagtgggctggtgatgctttgggcgccaagtgtgtacatcttgctcctcgcaaggctcattgatgggttcggtatcggtttggcggtcacacttgttcctctctacatctccgagactgcaccgacagacattcgtgggctgttgaacacgttgccgcagttcagtgggtcaggagggatgttcctctcctactgcatggtgtttgggatgtccctcatgcccaaacctgattggaggctcatgcttggagttctgtcgatcccgtcacttatttactttggactgactgtcttctacttgcctgaatcaccaaggtggcttgtgagcaaaggaaggatggcggaggcgaagagagtgttgcaaaggctgcggggaagagaagatgtctcaggggagatggctcttctagttgaaggtttgggggtcggtaaagatacacgtattgaagaatacataattggtcccgatgatgaacttgctgatgaagggctggctccagatccagagaagatcaaactatatggacctgaagaaggcctatcttgggttgcccgacctgttcggggacaaagtgctcttggaagcgcgttaggtctcatctctcgtcatgggagtatggcggctagtcagggtaagcccctcgtggatcctatggtcactcttttcggaagtgttcatgaaaagatgcctgagatcatggggagcatgaggagcacattgtttcccaactttggcagcatgtttagtgttgccgaccagcagcaggtgaaagctgactgggacgccgagagtcaaagggaaggtgaagattatgcttcggatcatggtggcgatgacatcgaggataacctccaaagcccacttatttctcgtcaggcaacaagtgtggaaggaaaggagatcgctgcacctcatggtagcatattgggtgctgtgggaaggagcagtagcttgcagggaggggaggcagtaagcagcatgggcattggcggaggatggcagttggcgtggaaatggaccgagagagagggcgaagatgggcaaaaggaaggtggcttccagcgtatttacttgcatgaggagggcgtacaaggcaacaggggttctatattgtcattaccaggcggggatgttcctcctggtggtgagttcatccaggctgcagctcttgtgagccaaccagctctttactctaaggaactgctggagcaacgtgctgctggtcctgcgatgatgcatccatctgaagcagttactaaaggtccaagatgggccgacctatttgagcctggggtgaagcatgcactgtttgttggcataggaatacagatcctgcaacagtttgctggcatcaacggcgttctctactacactcctcaaattcttgagcaagcaggcgttggtgttcttctgtcgaacctcggccttaacgcttcttcggcatcaatcctcattagcgccctgacgaccttactgatgctcccaagcatcggcattgcgatgaggctcatggatatgtccggaaggaggtttctcctcctcgcgacgatcccagtcctaatagtcgcgctactcgtcctggtggtgtccaacatcgtggacgtgggggacgtggcgcacgcggcgctctccacggccagcgtcatagtctacttctgcttcttcgtcatggggttcgggcccgtccccaacatcctctgcgcagagatcttccccaccacggtccgcggtgtctgcatcgccatctgcgccctggccttctggctcggtgacatcatcgtgacgtacactctccccgtgatgctgaacgtcgtcgggctcgccggcgtctttggggtgtacgccgtcgtgtgcgtcctagccctcgcgttcgtgttcgtcaaggtgcccgagacgaagggcatgcctctcgaggtcatcaccgagttcttctccgttggggcaaagcaagccaaggaagaggaggaggaggaggccagggaaggttga

SEQ ID NO: 87611 - DNA, 2893 bp, Zea Mays
ctctctacacgcccacaagctggtgaccaggatccccccacccaaaactccgctctcatcccaccccccctccactccactaccacggcggcacggcctgcctctgcagctctgccctgctccgcacccctcgctctccaaccccaacgcgcggcgttgctaaaattcaccgcagcgcttactccagtttggccacctcaccacccgccgccgctgtttaagaaggccccgcgcccgatcggggatcacgaaccttggccgccgctgccggagtgggggcgtagatttccggcggccatggggggcgccgtgatggtcgccatcgcggcctctatcggcaacttgctgcagggctgggacaatgcgacaattgctggagccgtcctgtacataaagaaggaattcaacctgcagagcgagcctctgatcgagggcctcatcgtcgccatgtccctcattggggcaacagtcatcacgacgttctccggggcagcggccgactgcgttggtaggaggcccatgctggtcgcctcggctgtcctctacttcgtcagtgggctggtgatgctttgggcgccaagtgtgtacatcttgctcctcgcaaggctcattgatgggttcggtatcggtttggcggtcacacttgttcctctctacatctccgagactgcaccgacagacattcgtgggctgttgaacacgttgccgcagttcagtgggtcaggagggatgttcctctcctactgcatggtgtttgggatgtccctcatgcccaaacctgattggaggctcatgcttggagttctgtcgatcccgtcacttatttactttggactgactgtcttctacttgcctgaatcaccaaggtggcttgtgagcaaaggaaggatggcggaggcgaagagagtgttgcaaaggctgcggggaagagaagatgtctcaggggagatggctcttctagttgaaggtttgggggtcggtaaagatacacgtattgaagaatacataattggtcccgatgatgaacttgctgatgaagggctggctccagatccagagaagatcaaactatatggacctgaagaaggcctatcttgggttgcccgacctgttcggggacaaagtgctcttggaagcgcgttaggtctcatctctcgtcatgggagtatggcggctagtcagggtaagcccctcgtggatcctatggtcactcttttcggaagtgttcatgaaaagatgcctgagatcatggggagcatgaggagcacattgtttcccaactttggcagcatgtttagtgttgccgaccagcagcaggtgaaagctgactgggacgccgagagtcaaagggaaggtgaagattatgcttcggatcatggtggcgatgacatcgaggataacctccaaagcccacttatttctcgtcaggcaacaagtgtggaaggaaaggagatcgctgcacctcatggtagcatattgggtgctgtgggaaggagcagtagcttgcagggaggggaggcagtaagcagcatgggcattggcggaggatggcagttggcgtggaaatggaccgagagagagggcgaagatgggcaaaaggaaggtggcttccagcgtatttacttgcatgaggagggcgtacaaggcaacaggggttctatattgtcattaccaggcggggatgttcctcctggtggtgagttcatccaggctgcagctcttgtgagccaaccagctctttactctaaggaactgctggagcaacgtgctgctggtcctgcgatgatgcatccatctgaagcagttactaaaggtccaagatgggccgacctatttgagcctggggtgaagcatgcactgtttgttggcataggaatacagatcctgcaacagtttgctggcatcaacggcgttctctactacactcctcaaattcttgagcaagcaggcgttggtgttcttctgtcgaacctcggccttaacgcttcttcggcatcaatcctcattagcgccctgacgaccttactgatgctcccaagcatcggcattgcgatgaggctcatggatatgtccggaaggaggtttctcctcctcgcgacgatcccagtcctaatagtcgcgctactcgtcctggtggtgtccaacatcgtggacgtgggggacgtggcgcacgcggcgctctccacggccagcgtcatagtctacttctgcttcttcgtcatggggttcgggcccgtccccaacatcctctgcgcagagatcttccccaccacggtccgcggtgtctgcatcgccatctgcgccctggccttctggctcggtgacatcatcgtgacgtacactctccccgtgatgctgaacgtcgtcgggctcgccggcgtctttggggtgtacgccgtcgtgtgcgtcctagccctcgcgttcgtgttcgtcaaggtgcccgagacgaagggcatgcctctcgaggtcatcaccgagttcttctccgttggggcaaagcaagccaaggaagaggaggaggaggaggccagggaaggttgatcacccggacggccggacccagttaccggcaccgcctgtggggatttttgtggtctgcacacttcactgtggttggtcctgtgatgatgtatttgtgaaaaaaaaaactttgggtagggggcagagatgatttggctgtacaatgtgaggcttgattctgccaaaggctggccttcagaactaggaagggtgtctgttatcttcttttgttgcttggagaccttgtgcttgtgttggttggaattttgttgcctatgtaactagtggtgtatgacagttatgctattggtttctttgtgttggtgccttcctccccatatgggcggccctgtatttgccgcagccgagtgcg

SEQ ID NO: 87612 - DNA, 2286 bp, Zea Mays
acccaaaactccgctctcatcccaccccccctccactccactaccacggcggcacggcctgcctctgcagctctgccctgctccgcacccctcgctctccaaccccaacgcgcggcgttgctaaaattcaccgcagcgcttactccagtttggccacctcaccacccgccgccgctgtttaagaaggccccgcgcccgatcggggatcacgaaccttggccgccgctgccggagtgggggcgtagatttccggcggccatggggggcgccgtgatggtcgccatcgcggcctctatcggcaacttgctgcagggctgggacaatgcgacaattgctggagccgtcctgtacataaagaaggtttgggggtcggtaaagatacacgtattgaagaatacataattggtcccgatgatgaacttgctgatgaagggctggctccagatccagagaagatcaaactatatggacctgaagaaggcctatcttgggttgcccgacctgttcggggacaaagtgctcttggaagcgcgttaggtctcatctctcgtcatgggagtatggcggctagtcagggtaagcccctcgtggatcctatggtcactcttttcggaagtgttcatgaaaagatgcctgagatcatggggagcatgaggagcacattgtttcccaactttggcagcatgtttagtgttgccgaccagcagcaggtgaaagctgactgggacgccgagagtcaaagggaaggtgaagattatgcttcggatcatggtggcgatgacatcgaggataacctccaaagcccacttatttctcgtcaggcaacaagtgtggaaggaaaggagatcgctgcacctcatggtagcatattgggtgctgtgggaaggagcagtagcttgcagggaggggaggcagtaagcagcatgggcattggcggaggatggcagttggcgtggaaatggaccgagagagagggcgaagatgggcaaaaggaaggtggcttccagcgtatttacttgcatgaggagggcgtacaaggcaacaggggttctatattgtcattaccaggcggggatgttcctcctggtggtgagttcatccaggctgcagctcttgtgagccaaccagctctttactctaaggaactgctggagcaacgtgctgctggtcctgcgatgatgcatccatctgaagcagttactaaaggtccaagatgggccgacctatttgagcctggggtgaagcatgcactgtttgttggcataggaatacagatcctgcaacagtttgctggcatcaacggcgttctctactacactcctcaaattcttgagcaagcaggcgttggtgttcttctgtcgaacctcggccttaacgcttcttcggcatcaatcctcattagcgccctgacgaccttactgatgctcccaagcatcggcattgcgatgaggctcatggatatgtccggaaggaggtttctcctcctcgcgacgatcccagtcctaatagtcgcgctactcgtcctggtggtgtccaacatcgtggacgtgggggacgtggcgcacgcggcgctctccacggccagcgtcatagtctacttctgcttcttcgtcatggggttcgggcccgtccccaacatcctctgcgcagagatcttccccaccacggtccgcggtgtctgcatcgccatctgcgccctggccttctggctcggtgacatcatcgtgacgtacactctccccgtgatgctgaacgtcgtcgggctcgccggcgtctttggggtgtacgccgtcgtgtgcgtcctagccctcgcgttcgtgttcgtcaaggtgcccgagacgaagggcatgcctctcgaggtcatcaccgagttcttctccgttggggcaaagcaagccaaggaagaggaggaggaggaggccagggaaggttgatcacccggacggccggacccagttaccggcaccgcctgtggggatttttgtggtctgcacacttcactgtggttggtcctgtgatgatgtatttgtgaaaaaaaaaactttgggtagggggcagagatgatttggctgtacaatgtgaggcttgattctgccaaaggctggccttcagaactaggaagggtgtctgttatcttcttttgttgcttggagaccttgtgcttgtgttggttggaattttgttgcctatgtaactagtggtgtatgacagttatgctattggtttctttgtgttggtgccttcctccccatatgggcggccctgtatttgccgcagccgagtgcg

SEQ ID NO: 87613 - DNA, 1707 bp, Zea Mays
ccaccccccctccactccactaccacggcggcacggcctgcctctgcagctctgccctgctccgcacccctcgctctccaaccccaacgcgcggcgttgctaaaattcaccgcagcgcttactccagtttggccacctcaccacccgccgccgagagtcaaagggaaggtgaagattatgcttcggatcatggtggcgatgacatcgaggataacctccaaagcccacttatttctcgtcaggcaacaagtgtggaaggaaaggagatcgctgcacctcatggtagcatattgggtgctgtgggaaggagcagtagcttgcagggaggggaggcagtaagcagcatgggcattggcggaggatggcagttggcgtggaaatggaccgagagagagggcgaagatgggcaaaaggaaggtggcttccagcgtatttacttgcatgaggagggcgtacaaggcaacaggggttctatattgtcattaccaggcggggatgttcctcctggtggtgagttcatccaggctgcagctcttgtgagccaaccagctctttactctaaggaactgctggagcaacgtgctgctggtcctgcgatgatgcatccatctgaagcagttactaaaggtccaagatgggccgacctatttgagcctggggtgaagcatgcactgtttgttggcataggaatacagatcctgcaacagtttgctggcatcaacggcgttctctactacactcctcaaattcttgagcaagcaggcgttggtgttcttctgtcgaacctcggccttaacgcttcttcggcatcaatcctcattagcgccctgacgaccttactgatgctcccaagcatcggcattgcgatgaggctcatggatatgtccggaaggaggtttctcctcctcgcgacgatcccagtcctaatagtcgcgctactcgtcctggtggtgtccaacatcgtggacgtgggggacgtggcgcacgcggcgctctccacggccagcgtcatagtctacttctgcttcttcgtcatggggttcgggcccgtccccaacatcctctgcgcagagatcttccccaccacggtccgcggtgtctgcatcgccatctgcgccctggccttctggctcggtgacatcatcgtgacgtacactctccccgtgatgctgaacgtcgtcgggctcgccggcgtctttggggtgtacgccgtcgtgtgcgtcctagccctcgcgttcgtgttcgtcaaggtgcccgagacgaagggcatgcctctcgaggtcatcaccgagttcttctccgttggggcaaagcaagccaaggaagaggaggaggaggaggccagggaaggttgatcacccggacggccggacccagttaccggcaccgcctgtggggatttttgtggtctgcacacttcactgtggttggtcctgtgatgatgtatttgtgaaaaaaaaaactttgggtagggggcagagatgatttggctgtacaatgtgaggcttgattctgccaaaggctggccttcagaactaggaagggtgtctgttatcttcttttgttgcttggagaccttgtgcttgtgttggttggaattttgttgcctatgtaactagtggtgtatgacagttatgctattggtttctttgtgttggtgccttcctccccatatgggcggccctgtatttgccgcagccgagtgcg

SEQ ID NO: 87614 - DNA, 909 bp, Zea Mays
atggtgtttgcggctccctccgggatgcagatgcgcgcgatgtaccttcccgtcacggtcagcagcagcgatatgaaccccagagtcatcagctctgtgaacacggaactcgaaaaaaaaacgcgtcaaattcgacttcgcctgcgaacgacagcagtgactgaactgaagttccgcagtagaaaagaaatgcagctcaatcttttacccgatttaaccttctccagagcgtcaaacagcgccttcttccgcttcttgttgagcaactggggcagacgcgcagagcagcagcacccaggaaaacaagtcagaaaacgcacatcagttgagtatttcaaaggctcaaggcagagtcgggccagacgattcaagaacggaaaacaaaccaagctgaaagatcgaaaaatgtcattggagtacttggagagaaggattggtggtggaaggggacgattcgagccggcgaacctgaccgaggtggtggaggaagccctcgaggagtatggacgccgcgacgatgacagcgcagacggcggccacggcccacgtcggcgtctggtccagcgccctcgtgccgtcgccgcccatttcccccccggtgctcgccgcagcggcgttaattggcctgccgccgtgcgcctaaacccccgccgcgaaggagtggagagtgcgttaaatggagatggagtggagcagatgagacaattgcttgccgcttgccggtgccgccgcgtccgcgtccctggctccctgcgcagacagacccaggtggaggtgcgcgtccattttaaagtagagcagctgtcccagctgggttcaaatggcaaggagctccgacagaaaaagaaccgtgttctgcggcgggtgattttcctcgccattttcatattgcttcaaactgggccctga

SEQ ID NO: 87615 - DNA, 1085 bp, Zea Mays
ctcctccatcccgattcctccgcccgcgattcccctccccacgcccgtagcccccgccgtcgtcctcgcggccagccgaggacagccgccgcgcccgcaaatcacgcgaccatgcccttccatgtcctcgcgttctccattgcagccacatccatggcgtcgcccccttccatcgatggcagcccgcgcaagattcttccctgcagccgcgcccgcaaatcacgcgactccccctttcatggcgtcgcccccttccatggcagtcgcgctccctctgcgcccttccatccatggccgcggatccctgcgcgccgcgattcttcccatacactccctctgcgcccttccatccatggccgcggatctctgcgcaccgcaattcttcccatacgctccctccgcgcggtttgcggatgccaatcctctccctccacaccgcgattcttcccatcctctcgcgactgccttccccccattagttttggcgtccacaatccctccctccgcacaccacatccgggcacatcatcggtgtgccgctgccggcgacgaagaaggagccccgctcccgccagccggtgtgccgccactccgcatccgtgcgtagcgccggtgttccacgttgcgaagggaatctcaaataacaaaatttgtcgatcttaagtttcttcatcaaccagtttgttgtttcggctagcgaccggtgcgcaagaaggaagggataaggtgcttggttgacccggaccggacgacaggacaccgtcggggattcgctgcaacgcagcgacggcttccgcatcttctcaggccaaggtttaatatcagctaccttgttctacaagctggctatgtgggggaatgacagatgactgaaatttgttggggatgcaaagattcttcgaaggaactttgtgattgatctgttaagttatgaggacaattcgtgccgatatgccattcctgcaaacatacaatagagacttatcgatatcgctaaaaaggattagctggttagtgtacagttgtcgacacatttttctgtaattaaaaattttaaattaactttttagaaataatttgtgtga

SEQ ID NO: 87616 - DNA, 228 bp, Zea Mays
atggcgtccgtcgaggcggatcatgactgctaccacctgagcggaaagttcaaggggtggtgcttgtatccggaccactgcgcagacgtgtgcttcactgagagcgacaacaaccttggcggcaagtgtcgcggcttcccgtctcgttgctactgcaagacatactgcgcgcaggggccaaaggccgctcctaggactactgttgctgctagccctgctctggtgtaa

SEQ ID NO: 87617 - DNA, 1242 bp, Zea Mays
ccaccgctccttgctctcacttcactcacggtcggaatgagcgttcaccgtcacaatcactgaatcacacaagcacgaccacgcacacgcggtaaacacgcgcgcgctcaaacagttcgaaatggcgctcgccgccgccatcatcgtcgtcttcctgcttcctggccttctcctcacggcgatggcggccacgccgtaccctcacggccgcggcgccgacgctctcgtgggcgcgtccaagaagtacgagggcagctccaacctggtggacctccgctaccacatgggccccgtcctctccgccgcgccgctccgcctctacgtgctctggtacggccgatgggaccccgcgcaccaggtccccgtccgcgacttcctcctctccctctccgacacgtccctgccgcgcccctccgtcgccgactggtgggccaccgccgcgctctacgccgaccagaccctcgccaacgtcacctgccgcgtcgacctggccggggaagccgccgacgagtcggcctcgctgggccgctcgctctcccggctcgacatccagcgcgtgctcgcctctgcggtcgccgcgggccggctccctgccgacacccgcggcggcgcctaccttgttctcacggcgcccggcgtcggcgtccaggacttctgccgcgccgtatgcggcttccactacttcaccttcccgtcgctcgtgggccacacgctgccctacgcgtgggtcgggcacagcggcggccgctgcgccgacgtctgcgcgtacccgttcgcgctgtcgtcgtacatggcccggagcggcatggcggcgctgcggccgcccaacggcgacgcgggcgtcgacggcatggtcagcgtcatcgcgcacgagctggccgagctcgccacgaacccgctcgtcaacgcgtggtacgccggggaggaccccacggcgcccaccgagatcgccgacctgtgcgagggggtgtacggtacgggcggcggcggcgggtacgccgggaaggtgtcggtggacgcgcaggggaggagctggaatgtgaatgggaggaaggggaggaaattcttggtgcagtggctgtggagcccagaggctaaggcgtgcgtggggcccaatgccagtgactaggcttattggccactgctagcatgtaactaccatgtagtagtagtttattattctcagctttactttatattatattatatataaaaaactattatatgataattagttgtttt

SEQ ID NO: 87618 - DNA, 731 bp, Zea Mays
atcatcccgcgccgcggccggggaccgcgtgtcccaccacctgtcgacgcggcgtgggagacgtgcgccgcgtgcgtgcgcgtcgccgcccggccgttctagacctgtagaccttggggctctggagctccattatatacagaggcaagtgggagccgtttgttcagcaccgctacttgtgctcccccaacgctactaccgccgctagctggttcaagtgcggcgagcggagccggagaccggtagaggaaattaagaggcgtcgatcgggcatggggtgcgacgacaagtgcgggtgcgccgtgccgtgccccggcggcaaagactgcaggtgcacgtcggggagcggcgggcagcgggagcacacgacttgcggctgcggggagcactgcgagtgcagcccgtgcacgtgtggccgggccacgatgccgtccggccgcgagaacaggagggctaactgctcctgcggggcgtcctgcaactgcgcatcctgcgcctcggcctgatccatgcgcctcgccctcgtgctaccgcgctgcctagtggagggagttgtctagtgaggctctggagacgaagcaactagcactacttctaataaaggggcttgtgtcatgctcgccagacgcatcacgcgctgcatctgcatcgtggtatcgtgtagtaagtttgtgtatgaataaacactaccactttatgtctcgcactaccagggcgcagcactccgtgca

SEQ ID NO: 87619 - DNA, 997 bp, Zea Mays
gccgcctcccaaacgcgtccaaaacattctgcggcctgttggagggcagcaccaagtatcacagtctagctactgcctggcaccagcaagcttctgccctgccccgccccgccgccagaatccgaaaccagtaaaccacagcggcaacaacctcgcggcgcccgcgtggaggcaggcggcgcataaagccagccggcgctgctcctgctgcttcttcgatcggtccatggctgtcgtcacgagggacgcggcgtgcctgcccctcgtcctcctgctcctagtcttctccgcggccccgtctccggctgacggctgcgaccgctgcgtgcgccggtccaaggccacctactaccaggcctcctcgctcgccctcaacggtacgcaccgctgccttgtgcgtttcaaacgattttcgtctgtttctgtggaatttgatccatctttcggttgctgctcaactgcgcagccgggtcgtgcgggtacggctccttggccgcgtccctcaacggcggcctgctcgccgcagccagccccgagctgtacaggggcggcgtcggctgcggcgcctgcttccaggtaggtagctagcttcttccctttccctccctttaggccggagcgcgtgcccagcggcggtttctctgttcccgtggttggcccgattcggattgtgtgtaagcaagggctggcattgtttgcaggtgcggtgcagggacagcgagctgtgcagcgccgccggcgccaaggtggtggtgacggaccaggcgcggacgtcgaaccgcacggcgctggtgctgagcgccgcggcgtacgcggccatggccagtgccggcaaggccgcgcgcctcagggaccggcgcgtcgtcgacgtcgagtacaagaggtacttgggcgcagcgacacaacactctgcttcggtcccgcgggccgatgctgcagagttctttactggtgggagaaagatcgagagattgattttgtgtataatactgcgctc

SEQ ID NO: 87620 - DNA, 1326 bp, Zea Mays
gccgcctcccaaacgcgtccaaaacattctgcggcctgttggagggcagcaccaagtatcacagtctagctactgcctggcaccagcaagcttctgccctgccccgccccgccgccagaatccgaaaccagtaaaccacagcggcaacaacctcgcggcgcccgcgtggaggcaggcggcgcataaagccagccggcgctgctcctgctgtgcgcaacggtcccctcctcctcctcctcctccgctctcctctccccaaagtaataactagtaaacagagctgcgtccaggcttcttcgatcggtccatggctgtcgtcacgagggacgcggcgtgcctgcccctcgtcctcctgctcctagtcttctccgcggccccgtctccggctgacggctgcgaccgctgcgtgcgccggtccaaggccacctactaccaggcctcctcgctcgccctcaacgccgggtcgtgcgggtacggctccttggccgcgtccctcaacggcggcctgctcgccgcagccagccccgagctgtacaggggcggcgtcggctgcggcgcctgcttccaggtgcggtgcagggacagcgagctgtgcagcgccgccggcgccaaggtggtggtgacggaccaggcgcggacgtcgaaccgcacggcgctggtgctgagcgccgcggcgtacgcggccatggccagtgccggcaaggccgcgcgcctcagggaccggcgcgtcgtcgacgtcgagtacaagagggtaccctgcgagtacgcgaaggaccgcaacctgttgatacgcgtggaggagaagagccggccgccaagcaacctgtccatcaggttcctgtaccagggcggccagaccgacatcgtcgccgtcgacgtcgccaccgtggggtcgtccaactggcggttcatggcgcgggaccacgggccggcgtggagcacggcgcaggcgccgccggggccgctgcagttccggctggtggtgaccggtggctacgacggcaagtgggtgtgggcggagtcggaggtgctgccgcgccggtgggaggccggccgcgtctacgacgccggggtgcaggtctccgacgtcgcgcaggaagggtgctacccctgcgacacgcgcgagtggcagtgacgtgacgcgcgcacgggctggattgtagtagattgtacagtttttttttttggtcgggaatgggacgaaagatatgaaatgatgatgagcggagccggagagccgaatcaaaccaaatcaaacaaacgtgccgttgcaagttggttcggccgcgttgctcgaccccatttagggcttgttcggttattttc

SEQ ID NO: 87621 - DNA, 1295 bp, Zea Mays
gccgcctcccaaacgcgtccaaaacattctgcggcctgttggagggcagcaccaagtatcacagtctagctactgcctggcaccagcaagcttctgccctgccccgccccgccgccagaatccgaaaccagtaaaccacagcggcaacaacctcgcggcgcccgcgtggaggcaggcggcgcataaagccagccggcgctgctcctgctgcttcttcgatcggtccatggctgtcgtcacgagggacgcggcgtgcctgcccctcgtcctcctgctcctagtcttctccgcggccccgtctccggctgacggctgcgaccgctgcgtgcgccggtccaaggccacctactaccaggcctcctcgctcgccctcaacgccgggtcgtgcgggtacggctccttggccgcgtccctcaacggcggcctgctcgccgcagccagccccgagctgtacaggggcggcgtcggctgcggcgcctgcttccaggtgcggtgcagggacagcgagctgtgcagcgccgccggcgccaaggtggtggtgacggaccaggcgcggacgtcgaaccgcacggcgctggtgctgagcgccgcggcgtacgcggccatggccagtgccggcaaggccgcgcgcctcagggaccggcgcgtcgtcgacgtcgagtacaagagggtaccctgcgagtacgcgaaggaccgcaacctgttgatacgcgtggaggagaagagccggccgccaagcaacctgtccatcaggttcctgtaccagggcggccagaccgacatcgtcgccgtcgacgtcgccaccgtggggtcgtccaactggcggttcatggcgcgggaccacgggccggcgtggagcacggcgcaggcgccgccggggccgctgcagttccggctggtggtgaccggtggctacgacggcaagtgggtgtgggcggagtcggaggtgctgccgcgccggtgggaggccggccgcgtctacgacgccggggtgcaggtctccgacgtcgcgcaggaagggtgctacccctgcgacacgcgcgagtggcagtgacgtgacgcgcgcacgggctggattgtagtagattgtacagtttttttttttggtcgggaatgggacgaaagatatgaaatgatgatgagcggagccggagagccgaatcaaaccaaatcaaacaaacgtgccgttgcaagttggttcggccgcgttgctcgaccccatttagggcttgttcggttattttcaatccatatggatcggaggggaatgatacggatcggaggggattttgact

SEQ ID NO: 87622 - DNA, 1266 bp, Zea Mays
gccgcctcccaaacgcgtccaaaacattctgcggcctgttggagggcagcaccaagtatcacagtctagctactgcctggcaccagcaagcttctgccctgccccgccccgccgccagaatccgaaaccagtaaaccacagcggcaacaacctcgcggcgcccgcgtggaggcaggcggcgcataaagccagccggcgctgctcctgctgtgcgcaacggtcccctcctcctcctcctcctccgctctcctctccccaaagtaataactagtaaacagagctgcgtccaggcttcttcgatcggtccatggctgtcgtcacgagggacgcggcgtgcctgcccctcgtcctcctgctcctagtcttctccgcggccccgtctccggctgacggctgcgaccgctgcgtgcgccggtccaaggccacctactaccaggcctcctcgctcgccctcaacggtgcggtgcagggacagcgagctgtgcagcgccgccggcgccaaggtggtggtgacggaccaggcgcggacgtcgaaccgcacggcgctggtgctgagcgccgcggcgtacgcggccatggccagtgccggcaaggccgcgcgcctcagggaccggcgcgtcgtcgacgtcgagtacaagagggtaccctgcgagtacgcgaaggaccgcaacctgttgatacgcgtggaggagaagagccggccgccaagcaacctgtccatcaggttcctgtaccagggcggccagaccgacatcgtcgccgtcgacgtcgccaccgtggggtcgtccaactggcggttcatggcgcgggaccacgggccggcgtggagcacggcgcaggcgccgccggggccgctgcagttccggctggtggtgaccggtggctacgacggcaagtgggtgtgggcggagtcggaggtgctgccgcgccggtgggaggccggccgcgtctacgacgccggggtgcaggtctccgacgtcgcgcaggaagggtgctacccctgcgacacgcgcgagtggcagtgacgtgacgcgcgcacgggctggattgtagtagattgtacagtttttttttttggtcgggaatgggacgaaagatatgaaatgatgatgagcggagccggagagccgaatcaaaccaaatcaaacaaacgtgccgttgcaagttggttcggccgcgttgctcgaccccatttagggcttgttcggttattttcaatccatatggatcggaggggaatgatacggatcggaggggattttgact

SEQ ID NO: 87623 - DNA, 1513 bp, Zea Mays
ccgcctcccaaacgcgtccaaaacattctgcggcctgttggagggcagcaccaagtatcacagtctagctactgcctggcaccagcaagcttctgccctgccccgccccgccgccagaatccgaaaccagtaaaccacagcggcaacaacctcgcggcgcccgcgtggaggcaggcggcgcataaagccagccggcgctgctcctgctgtgcgcaacggtcccctcctcctcctcctcctccgctctcctctccccaaagtaataactagtaaacagagctgcgtccaggcttcttcgatcggtccatggctgtcgtcacgagggacgcggcgtgcctgcccctcgtcctcctgctcctagtcttctccgcggccccgtctccggctgacggctgcgaccgctgcgtgcgccggtccaaggccacctactaccaggcctcctcgctcgccctcaacggtacgcaccgctgccttgtgcgtttcaaacgattttcgtctgtttctgtggaatttgatccatctttcggttgctgctcaactgcgcagccgggtcgtgcgggtacggctccttggccgcgtccctcaacggcggcctgctcgccgcagccagccccgagctgtacaggggcggcgtcggctgcggcgcctgcttccaggtaggtagctagcttcttccctttccctccctttaggccggagcgcgtgcccagcggcggtttctctgttcccgtggttggcccgattcggattgtgtgtaagcaagggctggcattgtttgcaggtgcggtgcagggacagcgagctgtgcagcgccgccggcgccaaggtggtggtgacggaccaggcgcggacgtcgaaccgcacggcgctggtgctgagcgccgcggcgtacgcggccatggccagtgccggcaaggccgcgcgcctcagggaccggcgcgtcgtcgacgtcgagtacaagagggtaccctgcgagtacgcgaaggaccgcaacctgttgatacgcgtggaggagaagagccggccgccaagcaacctgtccatcaggttcctgtaccagggcggccagaccgacatcgtcgccgtcgacgtcgccaccgtggggtcgtccaactggcggttcatggcgcgggaccacgggccggcgtggagcacggcgcaggcgccgccggggccgctgcagttccggctggtggtgaccggtggctacgacggcaagtgggtgtgggcggagtcggaggtgctgccgcgccggtgggaggccggccgcgtctacgacgccggggtgcaggtctccgacgtcgcgcaggaagggtgctacccctgcgacacgcgcgagtggcagtgacgtgacgcgcgcacgggctggattgtagtagattgtacagtttttttttttggtcgggaatgggacgaaagatatgaaatgatgatgagcggagccggagagccgaatcaaaccaaatcaaacaaacgtgccgttgcaagttggttcggccgcgttgctcgaccc

SEQ ID NO: 87624 - DNA, 1059 bp, Zea Mays
cgatgctcttataaaacacctcgcgcctccacctcccaccaccaccaccagcagcgcatccaagccaagcggcctcctcttcccgggcaaagcagagcaagcagaagcagtgcaacaatggccgtggggttccgtcggacgctgaccacgctggcgtcgcccaagtcgatggctccgtcgttcctgctggactgcgcgcggcccaagaagctgtcgtacgcgcgggtgcggtcgaccagcctccccgtgcggctgcacccgctggcggcggcgctgcacgagtcggcgcgcgcgctgctggcgtgggcggacgcgccggcgcagacggggcccgcgtgggtggcggacggcgccgggcgcgcggggcgcgtgctgtcggggctggcggacctgctccaccacccgcaggcccgcgacgcgctccggcggcacccctggacgacggagcagctgctggacgacctgctcctgctggccgacctccacgggtgcttccgcgagtcgctggtggcgctgacgcagctcctggccgagacgcacgcggcgctgcgcaggcgcgacggcgcccgcctcgccgccgcgctgcgggcgcagcggcggtcggcgcgggaggtgtcccgcctggcgtcctccgcgcgggacctctcccaccgcgcggcgcccgacgacgactccgacgaggccaccctcgccgacgccttcgcggccgcgacggctgccgtggccgccgcctcggccgcggtcttcgccggcgtgtccgccgcgtccgccgagtcggcggccagcgccgcgccgtccccgaggaccccgacgccctactcccccgcgcgcacccccggcagcccgatgtggctcgtgaccgacctgctccggcggcggcggaccgtgtcgttcgaggactcgtgcggcgaggaggaggaggagcggaaggcggccatgggacgggtgcgcgggctcgaggcgtgcgtcgacgccgccgagtcggggtgccaggaggtgtaccgcgcgctcgtgaacgccagagtctccctgctcaacctgctcacgcccacgttctga

SEQ ID NO: 87625 - DNA, 2730 bp, Zea Mays
atgaacgagaaccgcacggcgtgcaaactgcaaacccaaaaccccggaccgaacaaagcaggcccagagaatcagaatcaggggcaagttacaaaaactgtctcctctcgcacacgccacgcgcgtacacacgagcgccccgcggaaagggtagcaaacggcccggacagtgagccgcgcacctttcacacttgacttgatgggttgctggcgctcgtcgctgcgctcagggccccacgcggcggagaagccgccccgccaccgccaccgcccgccaccgccaccgacgaacggccccacctcctccctgaacgcgcagcaggccgcgcccccggcccgcgcctccggggaagtaccggcgctcgccgagttctcgctggcggagctccgcgcggccactgccgggttcgcgccggggaacatcgtctccgagagcggcgagaaggcgcccaacctcgtctacagaggccagctcaggggccccggcggcgccccgccgcgcgcagttgccgtgaagaagttcgccaagctcgcgtggcccgaccccaagcagttcgcggaggaggcgaagggggtcggaggcctgcggcaccggagcatggcgaaccttatcggttattgctgcgacggcgacgatcgcctgctcgtcgccgagttcatgcccaacgacaccctcgccaagcaccttttccactgggaaaaccagactattgagtgggctatgcgtctgagagttgcatactacatttcccaagcattggaatactgtagtaccaaggggtggcctttatatcatgacctaaatgcatacagggtcctctttgatgagaatggtgaccctcggctgtcatgctttggtctgatgaaaaacagcagggatggaaaaagctatagcacgaacctagcatatacacctccagaatatctgagaaatggtccctatctctttactttcatgcttttttttctctgcatgcagtttttagttttatgttaagtaatgaaatatttcaccatttttgtaggtatctcagtggtttctcttattaaacttagttatgtttataacactgtctttctgactttgatttttccactgcacttaccagtgaaaaatatgctgttctctatttgttcatgtcagtataactggtggttttcagcagacaatcattttttaatgttgctactacaaagacatgatttctgaaagctgagttccaaaattgtagtgttgatctttttattttaaaagaaaaaatgtacatctggaatttagttttttggaaggatcagtgactcagtttaagattttctgattcctttgtatgtgctatttaaattgagcatattgtgcccttggtaagtcagttaccaggtgctgtgagatggtctggttagtgtgtccttggtctctgtctgtcattgaaatcaataagtaatgcaaacaaaaaagcaagaaatgcttcatctgtattattttctgaggaaagttttattttcaggcagggttactccagaaagtgtcattttcagttttggcactgtacttcttgaccttctcagtgggaaacgcataccgccttcacatgcgcttgatatcatgagaggcagaaacatccaagcagttatggattcacatttggagggaaactactcaattgaggtggctactacattggtgaatcttgcttctcagtgtctacaatatgagccaagagatcgtcctgacataaaaaagttggtttccattctggagcctttgcagaaaaaaatagaggtaccgtcctatgtgatgcttggaattgcaaagccagtggaagaaccacaggcacctcctactccacagcgccctctttctcccatgggagaagcttgttccagaatggaccttactgccatctatcagatcctattcacaacgcattaccgagatgatgaagggagcaatgagctgtcttttcaagaatggacacagcagatgagggatatgctggatgcaaggaaacgtggcgactctgccttcaaagacaaagattttaaggcagcaatcgattgctatactcagtttgtcgatgtggggataatggtgtcaccgactgtattcgccagacgaagcttgtgctaccttatgtgtgaccaacctgatgcggccctccgtgatgcaatgcaagcgcagatcgtctaccctgattggccaacagcattctacatgcaggcagttgcactatccaagctaaacatgcagagtgacgccgtggacatgctgaacgaggcatcacagctagaagagaagaggcaaaagagcacaagagttccttgaatggcattgccagctcagagaagtggcacgtcttctatacatataacatagattgcacactatgtagtacagtagtatattctccaacctttcccaccctgtaaaaagcgcatagtatattgcgtggtctagaattagaagtaaggagaagtgaactgcagagaagatgctctttgctccctggactctggagccctgtgatggcacttgtgtgataggttcaattttttgggcccatgtatataacatccgttgcatgggagtttagagtataggttgccggttggtcaggagggccctgtcgccgaagataataaacatgttatgtttgtgaaaaactgtctgggtatcgcttccagcagggcatgttagtaagggcttgtttgtatctcagagctaaaacaaaa

SEQ ID NO: 87626 - DNA, 2098 bp, Zea Mays
aagttacaaaaactgtctcctctcgcacacgccacgcgcgtacacacgagcgccccgcggaaagggtagcaaacggcccggacagtgagccgcgcacctttcacacttgacttgatgggttgctggcgctcgtcgctgcgctcagggccccacgcggcggagaagccgccccgccaccgccaccgcccgccaccgccaccgacgaacggccccacctcctccctgaacgcgcagcaggccgcgcccccggcccgcgcctccggggaagtaccggcgctcgccgagttctcgctggcggagctccgcgcggccactgccgggttcgcgccggggaacatcgtctccgagagcggcgagaaggcgcccaacctcgtctacagaggccagctcaggggccccggcggcgccccgccgcgcgcagttgccgtgaagaagttcgccaagctcgcgtggcccgaccccaagcagttcgcggaggaggcgaagggggtcggaggcctgcggcaccggagcatggcgaaccttatcggttattgctgcgacggcgacgatcgcctgctcgtcgccgagttcatgcccaacgacaccctcgccaagcaccttttccactgggaaaaccagactattgagtgggctatgcgtctgagagttgcatactacatttcccaagcattggaatactgtagtaccaaggggtggcctttatatcatgacctaaatgcatacagggtcctctttgatgagaatggtgaccctcggctgtcatgctttggtctgatgaaaaacagcagggatggaaaaagctatagcacgaacctagcatatacacctccagaatatctgagaaatggcagggttactccagaaagtgtcattttcagttttggcactgtacttcttgaccttctcagtgggaaacgcataccgccttcacatgcgcttgatatcatgagaggcagaaacatccaagcagttatggattcacatttggagggaaactactcaattgaggtggctactacattggtgaatcttgcttctcagtgtctacaatatgagccaagagatcgtcctgacataaaaaagttggtttccattctggagcctttgcagaaaaaaatagaggtaccgtcctatgtgatgcttggaattgcaaagccagtggaagaaccacaggcacctcctactccacagcgccctctttctcccatgggagaagcttgttccagaatggaccttactgccatctatcagatcctattcacaacgcattaccgagatgatgaagggagcaatgagctgtcttttcaagaatggacacagcagatgagggatatgctggatgcaaggaaacgtggcgactctgccttcaaagacaaagattttaaggcagcaatcgattgctatactcagtttgtcgatgtggggataatggtgtcaccgactgtattcgccagacgaagcttgtgctaccttatgtgtgaccaacctgatgcggccctccgtgatgcaatgcaagcgcagatcgtctaccctgattggccaacagcattctacatgcaggcagttgcactatccaagctaaacatgcagagtgacgccgtggacatgctgaacgaggcatcacagctagaagagaagaggcaaaagagcacaagagttccttgaatggcattgccagctcagagaagtggcacgtcttctatacatataacatagattgcacactatgtagtacagtagtatattctccaacctttcccaccctgtaaaaagcgcatagtatattgcgtggtctagaattagaagtaaggagaagtgaactgcagagaagatgctctttgctccctggactctggagccctgtgatggcacttgtgtgataggttcaattttttgggcccatgtatataacatccgttgcatgggagtttagagtataggttgccggttggtcaggagggccctgtcgccgaagataataaacatgttatgtttgtgaaaaactgtctgggtatcgcttccagcagggcatgttagtaagggcttgtttgtatctcagagctaaaacaaaagtgactaaagttttagtcaggct

SEQ ID NO: 87627 - DNA, 293 bp, Zea Mays
aaggatacgtagttccacttacaccgtaaggctggtcccagcggcggtcggtaccaatcgctggcatggcggtcccatgggtaccgagtaccgactagggcgggtgcagcgggacacgattgatctggtcagtcggctgaactgttgaccggtcaagactgtgcggcggtaccgatcgacatgttggggccccagttgggtctactcggtaacgatgattgtcagttggtccgagttgttttatccgtttggatttggaaaaatctcagaaagcaaaaaaaaaaaaaaaaaaa

SEQ ID NO: 87628 - DNA, 102 bp, Zea Mays
gctttttcttcttaattatcattaaactatacaaatatatgatggtggttatccctatggtccaaacaaactacttggactcactgtcacatactcttttga

SEQ ID NO: 87629 - DNA, 110 bp, Zea Mays
ctattagttttaccagtcgtttgtcctacaaaatcttcatctgaatctgtggtatacttctatgaaattggaggaggctatgctaacagaattactttggctatttattc

SEQ ID NO: 87630 - DNA, 628 bp, Zea Mays
agagaacggttaccgattcaattagaattccaagcaaacgttgctgattcttgttcatgcctccagtcgagttcctggcaagcgccctacgagttccacttcttcactcaaacttctaaaattgcagcggtgatcggaggcgagcacgtagaggcagagttgtagtgaacacgacgacaacaagatcaccgaccagccgcagtgcggaggcaaatgatgacatcgacgtgtcggcatgacaattctatttgacgaaaataatggcgtggcgacgaggatccgaggagcgagcgcctcggtcacaggcatgggaaatcgacgacgagcaggacgcggatcagagattttgcttgggagtcgagcaaggaaggacggagtttgacgactcaacgacaaacgcgagcatgtcgaagcccgatggacgaggagcgagcgcgccacactgatgacgaacaggcgagcgagcgccaatgcgagccgagggcaaacacgagtgttgggcgagctgagaccagaggacggcgtcagacttcaccggcgaggctttataggtatcgttcagcactcgtaagtcgtaacagagctttggcgaactcgacggacgcgaccatggacgcaagctggcgtt

SEQ ID NO: 87631 - DNA, 201 bp, Zea Mays
aacaaaattttccagagttattcagtacttacaatcacatcagagcaactcagcagttgcatccacaccacaccagtagttacaattacaacacaccagcagttgcaatcattttgtttacatttttttaacagatatttgggtagaattatacatcagttgcaatcacacctaatgcggggttgcaatcacaccacacca

SEQ ID NO: 87632 - DNA, 360 bp, Zea Mays
atggaacctgcgaagagaacgcgcaaaacgcgacaaatgacattggagcgcatcgcgcagagcatgatgctaactagaacacgacaccggcgagctgagacgactgaacaagtgctggcgagcagggaaggcatcgagctgggcgacggcggcgacttgggcgagcacagtaaaggggcacgattgtgggcggtgatcggcgagcagctccatggacaacgcttggagttgggattggatctggacgccgagggaaaagacagccggaccggtggctacccggacgcgacaagagagagggaacgtccagtactagcgatggcgagcatcaagggaagaagcaaggcaacatgcgcatag

SEQ ID NO: 87633 - DNA, 944 bp, Zea Mays
tcgagacagcccacctagcccttccagcaacacgcgatcggagggttgagacttgagagctattggaagcaagtacgtgcatggcgaggggtttgcgctcgtggcgtgcgctgccgcggcggcggcgctgctgctgctcggcgtggcggcggcggacgtggcgtcgatcatcacgcaggacgtgtacaaccagatgctgcccaaccgcgacaacacgcagtgccccgccaacggcttctacacctacgatgccttcatccaggccgccaacttcttcccggggttcggcaccggctccagcaccgacgagctcaacaagcgcgagctcgccgccttcttcggccagacctcccacgagactaccggtggcacgagaggtgccgccgaccagttccagtggggttactgcttcaaggaggagatcaacaaggccacaagtcctccctactatggacgcggaccaattcaattgacagggcaggccaactaccagcaagccggggacgcgataggcgaggacctggtgaacgacccggacctggtgtcctcggacgcggtggtctccttcaagacggccatctggttctggatgacggcgcagtcgcccaagccgtcgtgccacgacgtgatcctcggcaactggacgccgtcgagcgccgacgcggcggcggggcgggttcccggctacggcgccatcaccaacatcatcaacggcgccaaagactgcggcgtggggcaaaacgccgccaacgtcgaccgcatcggctactacaagcgctactgcgacatgctcggcgtcgtcccagcagcacttctgatgaactgatgttcgacttgactgctagcactgttgctacagtataagatctgtgtccagacgtgttccatacatattttattattttaatataataaagactgatgatccggtgttatatatgaaa

SEQ ID NO: 87634 - DNA, 402 bp, Zea Mays
atgagtactataatagcaaataactcgcgaggggttcccataggcccaagcggtggcctcggtagatttggagtgaagagatggggaggaggtgcgggagcttacagcaatggagaactatgtggcagggatttgaatctaccgccgggaaaggactggtggctctggagaggacagcgtgtaggaggtggagccggagggggaggtagcgaccgacttggtggctcgggcgaggtcctctatggactgtggtggtgctctacctccgctcgagacgtcgcagattcggcggtggactgcatgcacatctccgccttgctggaggtgctcctcgcccacccgcattttgatggtgattggggagagtggggagaggaggaggctgcacgccacaaagggtga

SEQ ID NO: 87635 - DNA, 354 bp, Zea Mays
atgccgatgctttggatatcttccattcgacctagcgactccccagagccacaattccaggccccaatgacgcccttctacgagaatgagggcggcgcggtcaggggaccctccctgagcgagttcccagctcgtggtgctttccgtgatgaagatgtccaggatacttatatgcagggggagggacacggaggttgcgaggaccccgattcttcccgtgatccacggcacaagccctcccggccaccacgcgactctgttggcgaaaaactcggtcatctgttgctaccgacctgggggttggggatggacctgacgcctgggccccgcatggaagaggcagtaattccatag

SEQ ID NO: 87636 - DNA, 527 bp, Zea Mays
acctgaaacgtggatgagacggggaggaagcgggctgccacggtgccgccgacgaagccggcgctgcagacgccggagaagacgccgaaggccgccgcgcgcctcgtctccggcaccctgagtaccacgtaggcaagcgagagggtcatcatggtgccttcgcagaccatcgccgtcagcgtcttggtcacgtagtacgcgtagaagtaacccttgaaataaatgacagcggatttaccgagaggaacgatggacgccgtggcgggcagcgccagcagtgccttccggccgtacctgtcggacaggttgccgaccaccggcgtcaggaccagcgcccccagccctgttaccgcctgctggagcccggtgaggtagatggcgagggagcactcgtcgcggccggggcagagcgccgccatggtgacgtcggtcatcaccggtgcgaccatgaaggtggagaaccagaagaggaaggcgaacagcagcaggtgccccagaccctccatcactcgatcctctctctctct

SEQ ID NO: 87637 - DNA, 1797 bp, Zea Mays
ggtggccttgtcgagctcgacgacctcggaggcaccccagcggtccagccgcatccacaggcgcgcgccgggcttcttcttggtgatcttccccgacaaggcacccccggcgcccgcggtgactgagaggggagagggcggctgggcggtctgccccgccgctgcagagtccggggtcgcggacggcgaggcggcggtgggggaggcgagaagagccctcgtcgcgttgtcctgcttggagggggaagggaggcgacgcccggagcgattccgcttggaggaggacgaggaggatctggtgaagaacggaagcttccggccgccggatcgcttccccatggcgttgcggcggcggcgtgccgcggcaccggcacggtccacgggggtgaatgggtcggacggcgggttctgtcgtcgtggtcgaactccaaatctgtggtagacgagtgggccggtcagggccaaccgctcgtgagaggaagccctaggatgctggtcggacggttgaaattgcgtgcagcgtcaacgcgccaagttgccgcgctggcgcttgccgcgaaagagagaccactatccagaagcgaagataatatcttcgtcttcccccttctcgccgatggctgcaacacccactgccgccgttttgctcgcgcgcccgctcatcgcactctccagtgctttcacctcccctcatcgtgcgcgggtgccgagcgatccctcctccatctcggtgccgccactgaggagtcgatggtgccagtggcgcggcccgctccgatcgctgccccccgaaggagctccggccgagctgatggaagaggactccaagtttgtgccgttgaacgcggacgatcccatgtacggcccaccggcgctactgctcatcggatttgagaaaggcgaaactgtcacgattcaggccttcctgaaagagcttgaaggtgaattcctcaaggtgatccattgtacagaggagatgacaaagcaaaccttatgggatgccatgcacactgagcagcctgatttggaagctgtcaagattgcaggaccactgccaaggatatgcatattttctggtctaactggcgaggagatgatgatgttcatcaacgccttcccagaaaccgggctggaagcagctgcctttgctgcgcttgtccctaacagtgcagagaaggttctcggcgaagtgatcgaggaaataatgggagaccatgagatgctgacaggaaaggactccaaatgagaagaatttgaagcacggacatgcctatcaagaaaattgtcactttgcattctgatatatggcatctaaatctgattcaaattgccgcaacaggaagctgggtatggaaaaaactgttcaagatagtgttgcagaagaaacatcagtttaatttttcttctgataaatacgggtccttttccatctggtcacctccagaatttgagctcctacttactgtatgtcgtacatataatatagtttatagtgaccaacaagttgctcatgactggccagcttttggactttgggggctttctgtccgttgacttttttctattgatttttataatattttatttagcttttcagtacataacaatctagagaggcttctctcagcgtgttttatagcttttagtttatttgtttactcaaaagtcagttgtccagatttttaaacgccaggtcaacatcttatggcttctggctaccagaaactattgaaacaaagctgagataaatattttgagacattcccaatgatggtctcaaaatgttttttttctttc

SEQ ID NO: 87638 - DNA, 1626 bp, Zea Mays
ggcgcttgccgcgaaagagagaccactatccagaagcgaagataatatcttcgtcttcccccttctcgccgatggctgcaacacccactgccgccgttttgctcgcgcgcccgctcatcgcactctccagtgctttcacctcccctcatcgtgcgcgggtgccgagcgatccctcctccatctcggtgccgccactgaggagtcgatggtgccagtggcgcggcccgctccgatcgctgccccccgaaggagctccggccgagctgatggaagaggactccaagtttgtgccgttgaacgcggacgatcccatgtacggcccaccggcgctactgctcatcggatttgagaaaggcgaaactgtcacgattcaggccttcctgaaagagcttgaaggtgaattcctcaaggcaagtcatgcatcggctgtcactgacatatgcaagaatgctctatccatatacatgttgattagagtgatcaagtcacttgtttattttttattccatatactgtcagcaaactagagcaatcttttacaattttgccattgataagttattattctgcctaggttagctgtcagttttctatgatagagaaaattagttctactatatgtttttttctcgaacgagatgagcaaatgttggagaattctgctatacgttattgcagatggtacatgaactgaaaaaaaatatgtgcactctctaacaagaaaaaaagtgaaataaatttgagttcaatggacaaggctttactttattcgtgctgtgttgtaaaaaatgtcaacaacagtacactcactaagtcactagcaatataattcactttataccagtattctttatattgcctttctcttgtttttgtccttagtgtgattgcaatttttagttggtagaagcaaccctgaaagttcatcaaagtctgtttgattttgttcttacaacacttttagcttgactcaggtgatccattgtacagaggagatgacaaagcaaaccttatgggatgccatgcacactgagcagcctgatttggaagctgtcaagattgcaggaccactgccaaggatatgcatattttctggtctaactggcgaggagatgatgatgttcatcaacgccttcccagaaaccgggctggaagcagctgcctttgctgcgcttgtccctaacagtgcagagaaggttctcggcgaagtgatcgaggaaataatgggagaccatgagatgctgacaggaaaggactccaaatgagaagaatttgaagcacggacatgcctatcaagaaaattgtcactttgcattctgatatatggcatctaaatctgattcaaattgccgcaacaggaagctgggtatggaaaaaactgttcaagatagtgttgcagaagaaacatcagtttaatttttcttctgataaatacgggtccttttccatctggtcacctccagaatttgagctcctacttactgtatgtcgtacatataatatagtttatagtgaccaacaagttgctcatgactggccagcttttggactttgggggctttctgtccgttgacttttttctattgatttttataatattttatttagcttttcagtacataacaa

SEQ ID NO: 87639 - DNA, 1491 bp, Zea Mays
cccacgcgcgccccacgtgtgagactgagacgccagatccatccaacggttcgtgtcacaccacgccaaggccgcacgcaccgcggacgggtccacacgccagagactgaagctggcaggcataaactgtggggactggggagctcgttctctccgccggcccgctcactctccctggtctctcgtctcctccactccaagagaacaggcgccggcgaaaggcgggagcagcgcgctgcccattcaccgccccctgatttcttgggagttgcggatcggtctccggggcagcgtggaacggctgggcccctcggatcgccggagatgctgccctacgcgacggcggcggaggcggaggcggcgcttggccggcccatgacgcccgccgaggcgctgtggttccggtacaccgcgggggtgtccgactaccacctctactgctgcaacatcctcttcctcttcgtcgtcttcacggtggccccgcttcccatcgcgctcctcgagctccgggccccggccgcggtctcgccgtacaaactgcagccgcgggtgcggctctccagggccgagttcgtccggtgctacaaggacgtcctccgcatcttcttcctcgtcatcggcccgctccagctcgtctcctacccggcggtcaagtttgtgggaattcacacgaagttgcctttgccgtcccttgcggagttggcagcacagctactggtgtacttccttgttgaggactacctcaattactggatccacaggtttctccacggggagtgggggtaccagaatatccaccgtgttcaccatgagttcactgcgccaataggattcgcagctccatatgcacactgggctgaggtgctgatactcggcatcccctccttcgtcgggccagccattgttccaggccacatgatcacattctggctctggattatactccgtcaggtggaggctatcgagacacatagcggctttgatttcccattcaccccgacaaagtatattccattctatggaggagcagaataccatgactatcatcattatgtaggaggccagagccaaagcaattttgcttctgttttcacttactgtgattacttatatggcactgacaaaggttacagattccacaaaacatacctagcaaagctgaaggatctggggcataatgatggccagaaaggagacggcagcggacccagctatgtgaaactggattagattgcaagatatagtgcatcttgagtgtttctatggtcatcgacttcactgtggcatttcgaaatgggatattgctgagttgggctggtcacgtgtgttctcatttctgtagcaggcatacagctttcagctctgccttctttcttttttttttctagcgtttatgaaattctatggaacttgtacgctgacgaataacaacgcaactctcacgaataacaacgccaattcttaaagttcatcgagttcgctccgtgcttt

SEQ ID NO: 87640 - DNA, 376 bp, Zea Mays
tctggcatggtgtttttgacgatagagctgcctgacgccaagggtgtgaagcagaacttaaagcctaaaggccatttcaacttgtcagctaagggcttagatgactcgccctgtgagtttgatcttgagttgtttgatgttgtctatttaatacatgttgaatgtagcgtttcagattttgattgtattggccttcctatttgcaggagagcaaagcagttgttgtcccaagaaccatatgctaccagaacaagaaagatgagagcggttggtggccaaggctcctgaaaaaggacttgtgttcttgaaggttgagtggacaaatggtaggatgaggatggcgaagatgttggatgttagtatttcacttttggtt

SEQ ID NO: 87641 - DNA, 340 bp, Zea Mays
cagttttaactttaagttttgaattcaggtttccaaaaatacatgcacaagaaaaagaaatactaatatgagatgcaatattatatatatacattactaatttttttaagcaaacacttttattcatgccacacacatatggttctcttttaaaaaaatcttttgaagtttatttgaaagtcatttccgctattttatttcttatttatttattttattattttcctttatacaaattttgggctttacactagcctactaagaacaactccaaaggtctcaaactaagtcctatcttgaaaaataggactctagactataaaatagcttccaagatagg

SEQ ID NO: 87642 - DNA, 1033 bp, Zea Mays
tttactgttgcatttacttttggggccgaaaccatgtccactcttagtagctagtacacttcacttgctcatcctgggccccaagcctccaaagttcgtccccatcaacatgttcctactctgcaggaccaacacctcacaacaggcctgatggcattctcacctcctataaaacgtcttgcagaactggacacgttcaatatatcaacacggtcaccaagtcctctccggatggcaaggccttgtgaccttccgccggtgcggcaagcagcggctcttctcctggcatgcgcgcttgctctgctcgcggtgcagctgcggccgtgcagagcccagcagcagcagcagcctccgtcgccgggatactaccccagcggcatgttcaggccgctgggcttctccgaggcctaccgcaccctgtggggcgcgcagcaccagacgctgtcgccggacggcaagtccctgacgctctggatggacagcagctcgggcagcgggttcaagtctgcgcgggcgtaccggaacggctacttcggcgcgtccgtcagggtgcagccggggtacaccgccggcgtcaacaccgccttctacctgtcgaacagcgaggagtacccggggcaccacgacgagatcgacatggagctgctggggacggtgccgggggagccgtacacgctgcagaccaacgtgtacgtgcgcggcagcggcgacggcaccatcgtcggccgggagatgcggttccacctctggttcgaccccaccgccgacttccaccactacgccatcatctggaaccccgaccagatcctgtgagtctctccgtgtcccttcccccggccccctgcgcgccattagctgcctgcctgcccggtcgatcactcacatcacatggcatgagctgcgcctgcgtgcaggttcctggtggacgacgtgcccgtcaggcggtacgagaggaaggcggaggccacgttccctgaccgggagatgtgggcgtacggctccatctgggacgcctccgactgggccaccgacg

SEQ ID NO: 87643 - DNA, 1425 bp, Zea Mays
tttactgttgcatttacttttggggccgaaaccatgtccactcttagtagctagtacacttcacttgctcatcctgggccccaagcctccaaagttcgtccccatcaacatgttcctactctgcaggaccaacacctcacaacaggcctgatggcattctcacctcctataaaacgtcttgcagaactggacacgttcaatatatcaacacggtcaccaagtcctctccggatggcaaggccttgtgaccttccgccggtgcggcaagcagcggctcttctcctggcatgcgcgcttgctctgctcgcggtgcagctgcggccgtgcagagcccagcagcagcagcagcctccgtcgccgggatactaccccagcggcatgttcaggccgctgggcttctccgaggcctaccgcaccctgtggggcgcgcagcaccagacgctgtcgccggacggcaagtccctgacgctctggatggacagcagctcgggcagcgggttcaagtctgcgcgggcgtaccggaacggctacttcggcgcgtccgtcagggtgcagccggggtacaccgccggcgtcaacaccgccttctacgtgagtgcatgagagtatatatatattacctctatataagagaatgcagtagattcagtgcctggccgttgctgccgatgcagctgtcgaacagcgaggagtacccggggcaccacgacgagatcgacatggagctgctggggacggtgccgggggagccgtacacgctgcagaccaacgtgtacgtgcgcggcagcggcgacggcaccatcgtcggccgggagatgcggttccacctctggttcgaccccaccgccgacttccaccactacgccatcatctggaaccccgaccagatcctgttcctggtggacgacgtgcccgtcaggcggtacgagaggaaggcggaggccacgttccctgaccgggagatgtgggcgtacggctccatctgggacgcctccgactgggccaccgacggcggccgctaccgcgccgactaccggtaccagccgttcgtgtcgcggttcgccggcctcagggtcggcgggtgcgccgcggacgcgtccgcggactgccagccagtgccggcgtctccggcggcgccggggacggcggcgatcagcgcgcagcaggaggccgccatgcggtgggcgcagcggaactccatggtgtattactactgcctcgactcaaccagggaccgcgcgctctaccccgagtgctgagacgctgcgctgcgctatacctacagactacagtggcgagctgagggtgtcagagctatatggaaccgcgagcacctcgcattcgcaacacaaacgtatatttgaatattacaacttggaagatgaaagacgatccaatctgatatagaattatcattgtcaggtt

SEQ ID NO: 87644 - DNA, 1418 bp, Zea Mays
tttactgttgcatttacttttggggccgaaaccatgtccactcttagtagctagtacacttcacttgctcatcctgggccccaagcctccaaagttcgtccccatcaacatgttcctactctgcaggaccaacacctcacaacaggcctgatggcattctcacctcctataaaacgtcttgcagaactggacacgttcaatatatcaacacggtcaccaagtcctctccggatggcaaggccttgtgaccttccgccggtgcggcaagcagcggctcttctcctggcatgcgcgcttgctctgctcgcggtgcagctgcggccgtgcagagcccagcagcagcagcagcctccgtcgccgggatactaccccagcggcatgttcaggccgctgggcttctccgaggcctaccgcaccctgtggggcgcgcagcaccagacgctgtcgccggacggcaagtccctgacgctctggatggacagcagctcgggcagcgggttcaagtctgcgcgggcgtaccggaacggctacttcggcgcgtccgtcagggtgcagccggggtacaccgccggcgtcaacaccgccttctacctgtcgaacagcgaggagtacccggggcaccacgacgagatcgacatggagctgctggggacggtgccgggggagccgtacacgctgcagaccaacgtgtacgtgcgcggcagcggcgacggcaccatcgtcggccgggagatgcggttccacctctggttcgaccccaccgccgacttccaccactacgccatcatctggaaccccgaccagatcctgttcctggtggacgacgtgcccgtcaggcggtacgagaggaaggcggaggccacgttccctgaccgggagatgtgggcgtacggctccatctgggacgcctccgactgggccaccgacggcggccgctaccgcgccgactaccggtaccagccgttcgtgtcgcggttcgccggcctcagggtcggcgggtgcgccgcggacgcgtccgcggactgccagccagtgccggcgtctccggcggcgccggggacggcggcgatcagcgcgcagcaggaggccgccatgcggtgggcgcagcggaactccatggtgtattactactgcctcgactcaaccagggaccgcgcgctctaccccgagtgctgagacgctgcgctgcgctatacctacagactacagtggcgagctgagggtgtcagagctatatggaaccgcgagcacctcgcattcgcaacacaaacgtatatttgaatattacaacttggaagatgaaagacgatccaatctgatatagaattatcattgtcaggttgtgttctgaaaacaaaaatgaaattataattccatcgagagaatatcgaggtacagggagaacgggtgaatgtctg

SEQ ID NO: 87645 - DNA, 1204 bp, Zea Mays
gccaacgccggagtgcgccatgccgcgcgcaacaagccgaccggcagtcgaccgccgcgcccaggcctttccccttccggcacaagtccaaccggatccgaccccatggccttctcgcgcctcatcccctctagaagtcgcctcctctccagcctcctccacgcaacgggacccatccccaccccgcgcacggcggcggccgccgccacccccaccccgctcggccccttcctccgcaacttcgcctccgccacgcggcgggcggggccctcctcccgtccccgcaccgcggacatcggcgcccgcgcgcggcagttgcagactcgccgcctctggtcctacggactcgccttcgcctgcacggccggcttcgtagtcaccgtgctcgccacgttccaggaccagctcgtcttctacgtcacgcccaccgacgcgctgtccaaattcaccgccgacccctccaagtcccgcgtccgcctaggcggcctcgtcctcgagggctccgttgcgcacccctcgtcgtcctcccccgagatcgagttcgtcgtcacggacctcattaccgacgtgctcgtccggtacgagggcgcgctgcctgacctcttccgcgagggtcactccgtcgtcgtcgagggcctcctcaagccctacaccgacgacctccgacgcgacgacgggaggaaggtgaccgagaaggcgcgggagtgcgcgtgcttcttgcgcggcaccgaggtgctcgccaagcacgacgagaagtacatgcccaaggaggtcggcgaggcgctcgagcgaaacaagaagcgcctcgaggctgaggctgaggcggccgccgctcaagggtccaatgtggctgcagcggcggagggagcaaaggcaagctcgtaagattttgcccgccttctggtttgagatctactggatcgtgagtacgaggcatcaggcataggtggattggatttgatttcattctgcgctgggggatatccgcagcgtgattgactttaactctaggctgatgtgattgatgagctggggatcgggtaatttttgttaggggaatgctgacaaatgttggttgaacacagtatacatacttgttttcaagtaatactattggtatactccttccactgagtgatactataggtttactagattataagcttgagctctaggtggatttgaatttgttttcacaccagaa

SEQ ID NO: 87646 - DNA, 903 bp, Zea Mays
agtccgctgtggtcttccggagcgcgcgtgtgttggcacatacgccaggctacgtgcgcgcgtgcgaaaggttgtcggaggcgagcgcgcgcgacaggcggtacaagtacaatggcgcgcaccaggggcatgcccgcgctcgcgctggtggtggtggccgccgtggccgtcgcgtgcgccgaggcgcggctgccggactaccacccgtcgacgttcacggtgacgggcaaagtgcagtgccaggactgcaccaagaactggaacgcctacgcctacaacgccaagccgatccccggcagcaaggtgagcatcacgtgccgggacgacaggagccgggtggtgtaccacggctcggactacacggacggccagggcatcttcaacatcgaggtgcccagcaaggcgaccaacggctgcgacctcgcgccgtcccgctgcctcgtccgcctcgcctcctcgggcgacgctgcctgcgccgccttcaccgacttcaaccgcggccagactggccaggtcccgtcccgcctcacgcacgcctcccccaccaaggtcacctacgccgtcggcccgtactactgcaccctgcgccagtgcgacgacgacgtcaagggcgacgacgaagacgacgcctgctactgatgatgatcccggcagctcggcgctggccaccagtcaaccggcgttcgcaatcgcgttattgtgttcctggtggtttatgcgagcgttttgcgttcgcgtaatttttcattctttccttttttttccttctccgatttcgaagtctctttggaaggtggatcgatgcgttgcgtacgttactgctctgctctgttcatctgtgtaacgcgcgatcagcatgccggcatggttttagttgaactctgtgaactattcttttgcctc

SEQ ID NO: 87647 - DNA, 2787 bp, Zea Mays
tcattacacatccccgcgaaatcccggacccgacgcgaccaaccaccttgttcagtgaccccctcccccgcgcgatccaccgccggcgcgcgtgtaccctaaccaccgtgcggatctgggagcagctggcggcgctccctcaaatggtccccggcggcgaggggccccccggaaggcagaacagctgagatgcgacgcgacgcggtgccgccacccaccgccccctcagcctcctcctcgtcatccctcttcagcggcggcggcggcgagcggctgttcgagtctgggcccagcccgctcgtcttccttcccctgctcctgatccagggcggtggcatggacctctctcgcgtcggcgagaaactcctcagctctgttcgctcggcccgctccctcggcctcccaccgatccccacggcgccccctccccgccctgaggttccagaacgagctgcggcggcagcagctgctgcacgtgcgatcgccgggttgccacctcacgagaggatcaacctgccatccaattcggaggacttggtctccatctatgggagcaacccccagggccaaccggtggaggagctcgaggaggtgttctatgaggaggagtttgatccaataaagtatattctgcaaagtattccggaggaaggaggtggcgatgccacctatttcgataagcagtctacattgagattagagcagcttgacaagattgcagaaagattagcacaccatgttatgggtcatcatgaagaaatggtgaaggggatgcagttagtgatggaattagaacatgacttaaaggttgcaaatgtaatctgcatgaatggacgaaggcatataacctcttcgaagaatgaggtgtcgagggatctggttgtcaatgtaaaatcaaaaaagaaacaagctttgctggatgttcttcctatccttacagagcttcgtcatgctctagacatgcagatggaacttgaaacttttgttgagaaagaaaattactttcaggcattccaattattgcctgaatatttgcaaattttggagaattattcaggcctttctgctgtacaagaaatgggacgtggtatagaggcatggttagttcggacaatccaaaaattggacacccatttacttggtgtttgtcatatctttgatgcagaaaactatctaactgttgttgatgcatatgcactaatgggtgatgtcagtggcatggctgaaaagatgcagagtttcttcttgcaggaagtgctgtctcgaacacactatgtcctgaaagaaatgttggaagaggaggttggaaataatacacagaaaaataggtttacatatagtgatctttgtgttcaaattcctgaacccaaacttcgcctctgcttgttgagaaccctagagtttttattttcattgatgtgctcatactatactattatgagcttttcttcaggagataagaatattgactccaagggccaagatgaagcatataaggatggcacatctcagaatagcagcgaaactttagttaatttaggaagaggtcattcaagtgcagcagtcactcaggatggttctgcagctgaaaaaattgacagagcatcatcatctgaggtcagcaaccctgatactagtacatcagaaacaggttctccattctatcagcttagaacagatgctacgaaacttgttgcacaaacatttcaaagagggcgaagaaatctttggcagctggcaacaagtcgcttatctgttctattatctagttcggctgtttgttcaactagcacataccaattcctgaagaattatgaagatcttgccatcttcattttggctggcgaagcattttgtggatttgaagctagtgagttccgccagaagttgaagactgtctgtttgaactacatggtgtcctttcaccggcaaaatgtatatgcacttaagatggtactggaaaaggagtcttggacaataatgtccgctgaagcttcacaaataattagtttagcaggtctaactggtgatggtgctgcactgtgctctcctaccagtagaagtcctaagttgccaataaattgttaccatgggacaactacagccaactcaggaaaggaaaagctcggatttgcttcttggcttgtgattgaaaatccattttcttttaagctagaaaatggctctgccgaatccccaaagtccaatatgcttgttgactcatcagctagcaataatcatggcaatggaaacaattcatctttagatgaagagaatgaagaccttttagcggatttcattgatgaagatagtcagttgcctagtaggacaccaaaagcgaaaatggtaaaaggcaattctttacattggaaagatggagacatttcatcacagacaggctcatcactttctctattaaggatgatggacaaatacgccaggctgatgcaaaagctggaaattgtcaatgttgagctttttaagggtatctcccaactatttggcatcttttaccactacatatatgagacatttgggaaccaagacaagagtcaaagcagcaagcctttgcctgatcatcaatcatctcggcttaaagccgctttatcaaaaataacacaagactctgatcagtggacaaagccaaatactgtttcatattcaccttcatcccctttgtcaaaaaattcaacttttggtcaaatggatgtgatgcctactgcacctcccagttcaatgttcacctcctatgggttaaaggatttctgtattgttgctgccttactg

SEQ ID NO: 87648 - DNA, 2759 bp, Zea Mays
cccgcgcgatccaccgccggcgcgcgtgtaccctaaccaccgtgcggatctgggagcagctggcggcgctccctcaaatggtccccggcggcgaggggccccccggaaggcagaacagctgagatgcgacgcgacgcggtgccgccacccaccgccccctcagcctcctcctcgtcatccctcttcagcggcggcggcggcgagcggctgttcgagtctgggcccagcccgctcgtcttccttcccctgctcctgatccagggcggtggcatggacctctctcgcgtcggcgagaaactcctcagctctgttcgctcggcccgctccctcggcctcccaccgatccccacggcgccccctccccgccctgaggttccagaacgagctgcggcggcagcagctgctgcacgtgcgatcgccgggttgccacctcacgagaggatcaacctgccatccaattcggaggacttggtctccatctatgggagcaacccccagggccaaccggtggaggagctcgaggaggtgttctatgaggaggagtttgatccaataaagtatattctgcaaagtattccggaggaaggaggtggcgatgccacctatttcgataagcagtctacattgagattagagcagcttgacaagattgcagaaagattagcacaccatgttatgggtcatcatgaagaaatggtgaaggggatgcagttagtgatggaattagaacatgacttaaaggttgcaaatgtaatctgcatgaatggacgaaggcatataacctcttcgaagaatgaggtgtcgagggatctggttgtcaatgtaaaatcaaaaaagaaacaagctttgctggatgttcttcctatccttacagagcttcgtcatgctctagacatgcagatggaacttgaaacttttgttgagaaagaaaattactttcaggcattccaattattgcctgaatatttgcaaattttggagaattattcaggcctttctgctgtacaagaaatgggacgtggtatagaggcatggttagttcggacaatccaaaaattggacacccatttacttggtgtttgtcatatctttgatgcagaaaactatctaactgttgttgatgcatatgcactaatgggtgatgtcagtggcatggctgaaaagatgcagagtttcttcttgcaggaagtgctgtctcgaacacactatgtcctgaaagaaatgttggaagaggaggttggaaataatacacagaaaaataggtttacatatagtgatctttgtgttcaaattcctgaacccaaacttcgcctctgcttgttgagaaccctagagtttttattttcattgatgtgctcatactatactattatgagcttttcttcaggagataagaatattgactccaagggccaagatgaagcatataaggatggcacatctcagaatagcagcgaaactttagttaatttaggaagaggtcattcaagtgcagcagtcactcaggatggttctgcagctgaaaaaattgacagagcatcatcatctgaggtcagcaaccctgatactagtacatcagaaacaggttctccattctatcagcttagaacagatgctacgaaacttgttgcacaaacatttcaaagagggcgaagaaatctttggcagctggcaacaagtcgcttatctgttctattatctagttcggctgtttgttcaactagcacataccaattcctgaagaattatgaagatcttgccatcttcattttggctggcgaagcattttgtggatttgaagctagtgagttccgccagaagttgaagactgtctgtttgaactacatggtgtcctttcaccggcaaaatgtatatgcacttaagatggtactggaaaaggagtcttggacaataatgtccgctgaagcttcacaaataattagtttagcaggtctaactggtgatggtgctgcactgtgctctcctaccagtagaagtcctaagttgccaataaattgttaccatgggacaactacagccaactcaggaaaggaaaagctcggatttgcttcttggcttgtgattgaaaatccattttcttttaagctagaaaatggctctgccgaatccccaaagtccaatatgcttgttgactcatcagctagcaataatcatggcaatggaaacaattcatctttagatgaagagaatgaagaccttttagcggatttcattgatgaagatagtcagttgcctagtaggacaccaaaagcgaaaatggtaaaaggcaattctttacattggaaagatggagacatttcatcacagacaggctcatcactttctctattaaggatgatggacaaatacgccaggctgatgcaaaagctggaaattgtcaatgttgagctttttaagggtatctcccaactatttggcatcttttaccactacatatatgagacatttgggaaccaagacaagagtcaaagcagcaagcctttgcctgatcatcaatcatctcggcttaaagccgctttatcaaaaataacacaagactctgatcagtggacaaagccaaatactgtttcatattcaccttcatcccctttgtcaaaaaattcaacttttggtcaaatggatgtgatgcctactgcacctcccagttcaatgttcacctcctatgggttaaaggtaactgctggtttcatgtgggcatgcttacataatcctatgtaatcccatctcatttgcagact

SEQ ID NO: 87649 - DNA, 1163 bp, Zea Mays
tatgtccctgactcagtttcagtgtcctcattctaaaaagtgcatttcaacttgtttttccttcaggagagatgtgcagctgctgaaacattatcattggttgctcgaattttgaaccgatctagagcccatctacactcagtattgtctaaaaataacagttctgttgttgaggagttctttaggacactggtggactctgttccagatttgacagagcacattcacagaacgagtgcgcgtatgcttttgcatattgatgggtatccagataagattgcgaatgctaaatgggaggtaaaggagcttggaatagagcacaatggatatgttgatttgttactgggcgagttcaaacactacaaaacaagattggaccatggaggaatttctagggagctccaacaccttctgctagagtacggcgtagagagcatatcggaagttctagtcgaaggtctctctagagtgaagaggtgcaccgatgaagggcgtgctctgatgtcactcgacctccaggtactaattaatgggctgcagcacatcgtggcatcaaatgtgaggccgaagctgcagaccgtggacactttcataaaggcttactatctaccggagaccgagtacgtccactgggcgcggtctcatccagaattcagtacaagtcaggtagtcgggttggttaacctggtggccaccatgaaagggtggagacggaagacgagactagaaaccgtggagaagatcgaggcggggccatagactcggtgacaggtttttttttttttttttttgctgtgttgtttgcttcagctgcacatagagctgtaatttcccccctcattttcttttggtttgatgacccaggaataggagggaatccataggagaggaaaccccttcctattcaattttgaatagcaaggtgttttctcccccatagatctactccatttccctgatcatcaaatcagccattagaaccatttttttgttgaacccgtcgcccgctcacccatattgtatatttttaagcgttgaccctgtattatatcaagcgagttgacactcccaagaaggaaaagaactgtgcaccaccctacatggaacattggctcaataaatatggctcgttcaaaaaaataataataatatagcagcattag

SEQ ID NO: 87650 - DNA, 2051 bp, Zea Mays
ctctcacaccaatccccactctccctccttccgtaattgcgtctctcaccacctcggcaactccaatcccaaacggccacaccctagctggtctggtggcatcggccggcacacggcgatgcctgccacggtcttcgcctccccctccatcgccgcgtcgccgtcgccgtcgctgtctccgtggtccccacgtccgcctcctcgtcgcgtccacgtccgtgtccgcgtccgcccgcccccgccgagaagcggaagcagcgggggcgacgagccctctactgccaccccgtgggcgagccccgactggctcacgtctctctcgcgcgcggtcggccggagcggcggcgacgactcggggatccccgtcgcgtccgccaagctcgatgatgtgcgggacctcctcggcggcgcgctcttcctgccgctcttcaagtggttccgcgaggaagggcccgtgtaccgccttgccgcggggccacaggactttgtcatcgtcagcgaccccgccgtcgccaggcacgtgctgcgtgggtacggctcgcgctacgctaagggactagtcgctgaagtctccgagttcctcttcggctccggcttcgccatcgcagaaggcgacttatggacggtgagacgcagagctgttgtgccttccctgcacaaaagatttctgtccattatcgtggacaaggtattttgtaaatgtgctgagagactaatagacaaacttgagccatatgctttgagtggggaacctgtcaatatggaagcgaggttttctcagttgacattggatgtgattggtttatcattgttcaactacaattttgattccctcacaacagatagtcctgtcattgatgctgtttatactgcactcaaagaagcagagcttcgttctacagatcttttgccatactggaaggttggtttcttgtgcaagataatcccaagacagataaaagcagagaatgcggttatgattataaggaacactgttgaagagctgattatgaagtgtaaagaaatagtggaagctgaaaatgaacagattgagggtgaggaatatgtaaacgaaggggatcctagcattctacgcttcctacttgctagccgagatgaggtaagcagtgtacaattacgtgatgatctcttgtcaatgttagttgctggtcatgaaacaacaggctctgtactgacgtggacaatctatcttctcagtaaggatccgactgcactgaggagagctcaagatgaagtagatcgtgttctacaaggtagactacccaaatatgaggatgtaaaggagctgaagtacttgatgcgctgtataaatgagtctatgcggctgtatccacaccctcctgtacatttcttgtgctagtgacatgcaactttataattggttttgttgactcatggactaattactgataggtgctgttacggcgtgcaatagttgatgatgttcttcctggaaactataaggttaaggctggtcaagatattatgatatctgtgtacaatatacacaggtccccagaggtttgggatagagcagatgagttcattccagagaggtttgatttagagggacctgttccaaatgagtcaaacacagatttcaggtttattccattcagtgggggtcctcggaaatgtgttggagatcaatttgctctcctagaagcaatagtggcacttgcagttgtgttgcagaagatggatatgcagcttgtgccagatcaaaagattaacatgactactggagctacaattcatacaaccagtggactatatatgaatgtaagcctgcgtaaagttcagcaagaagctgagttagcgctgagcgaatcgaaatagatggaaacgacttcagacaagaatagagctcctgaactggatacaatcatacaaatatgaaatatgcttctccagtttctcgttgaaagctctactgtactatactagatgtcaatgcgtcggcatacagattacagattcgcttctcttgaaacatgaaaggatccttcgctggctgattcgtttggcta

SEQ ID NO: 87651 - DNA, 816 bp, Zea Mays
gcgacgcgacacgacgcgagccggcatattgctccagctacaggcctacaaacgctacaaacatatacgagtacgcgacgcatgacccaggcaaaactgtccctgccctcgccacgccgcccgcccacacagagcagccggtcacggctgtgcatggccacggcgcgaccgagtaggcgtctggccacgggcgacgcgcacgccacgccggcggtcggccccgtgtccggcggcggcgggcgggcgcagttcaacctgtcgtcgggcgcggccacggccgtggtgttcgtgtccatcctgctctgcttcgtcctcctctgcacctactgccgctgcgcccggcagcgggccatcgcgggggcgcgccgccgcgtcatgcgcgacctggtcgtcccgggcgtgtcgctcttcctccgcccctccgcggccgcgctgccgcccgtgctgccgtacgcggccgcggccgccaggaagaagggcctgccagaggactgccccatctgcctcgacgccttcggcgaagacgacggcgtcagggtcgtccccgcgtgcggccacctctaccacgcgccctgcatcgaccgctggctcgacgtccgcaactcctgccccgtgtgccgctgcgccgtggccagcctctacgccgccgaccgcgacaggggcgccgatgcgttgaccgccttcgacgacgacaacgacgatcaggaggccgtcctgcagcgcgtggtcgcgatgatcgaggccataagagacgagcagcagagagaagacgcggtggcgcggcgcgcgccggccggtggaggcggagggtcatga

SEQ ID NO: 87652 - DNA, 716 bp, Zea Mays
ttacatgtgcatcaggctttgatgattgctgtacaaggatgatatggcctcccgcccaaagctgtctggtattcagaagcaggttttggcgctgtacaggggattccttcggacagcacgccttaaggcccctgaagaacgccgcaggatcgagtctgttgtctttgcagagttccgtgacaacgcaaggagtgttgaccgtaggaactttgtacacatagagtacttgttgaggagagggaagaagcagcttgagcagctcaagaatcctgatattactggactcgctacccttgtagtaaagaaatgagcaacagttgtcgaaatttacaggtccattcattgccagaacaaagtatcatcatgataccggtgtttctaatgtgaagatttggaacctgccactgatggtgtccaaataaaataaatatgaccacagattacagatttgatatccagggactttctaatcagcctattagaatctgaagataaatcttgtagcacctgtccggtgacccatagtaatattattttactcttgctgtaagcagaggttaacactaaaaaaagtattgtgattggtctgaactttttgtgcggtataaagcatgtgattcagctcaacttgacttttccaactttaccgagcatatacaattgtgattaatatagaggctcttaaggtgtttaaatgtgctatttacaaaaaaaaa

SEQ ID NO: 87653 - DNA, 694 bp, Zea Mays
ttacatgtgcatcaggctttgatgattgctgtacaaggatgatatggcctcccgcccaaagctgtctggtattcagaagcaggttttggcgctgtacaggggattccttcggacagcacgccttaaggcccctgaagaacgccgcaggatcgagtctgttgtctttgcagagttccgtgacaacgcaaggagtgttgaccgtaggaactttgtacacatagagtacttgttgaggagagggaagaagcagcttgagcagctcaagaatcctgatattactggactcgctacccttgtagtaaagaaatgaggtccattcattgccagaacaaagtatcatcatgataccggtgtttctaatgtgaagatttggaacctgccactgatggtgtccaaataaaataaatatgaccacagattacagatttgatatccagggactttctaatcagcctattagaatctgaagataaatcttgtagcacctgtccggtgacccatagtaatattattttactcttgctgtaagcagaggttaacactaaaaaaagtattgtgattggtctgaactttttgtgcggtataaagcatgtgattcagctcaacttgacttttccaactttaccgagcatatacaattgtgattaatatagaggctcttaaggtgtttaaatgtgctatttacaaaaaaaaa

SEQ ID NO: 87654 - DNA, 1983 bp, Zea Mays
atgatgctgagccagaagagtctttttagaggcagagtatttgttgcagttcctgaggaaccgagggatgggaaatccatactgtcttgggttattgaccgtgtatctgacagcgcagagatcatcatcgtccacatagtaacatcgccagactttgaaagccggcagcaaattttggactgctacctggatcaatgctcaaggaaaaaggttagagctgagaaacgggtgtttctattcaccgatatcgatgagggccttattcatctgataaatttatatggggtcactgaacttgttattggtgcagctgcagacagacattacaggaggaaaatgaaagcaccacagtctaagacagcactgagcgtgatgcagaaagctcactcacactgcaatatgtggtttatttgcaaaggaaagctaatgtttttcagggaggcaaattactgcctgttaaccaagtcaagatcagcacggccaacttgtggtgttggcaatcgcaaaatggatcttcggagtttgcttcaacctaatttagaggctaaaagactggaatatatgtatactaaggatattgaaataaggaaagaaatagaggcagaaatctcgcaacagagagaagagacagaaactctgaagaaagcaactctgatgctccagaatgagctcgattggtacagataccaatggaataagaacgccaatgcattgcaacaggcaagcaagcagaagcgccttttggagcatcgcatatcagagttagactctgttgccagccacttaggagagagcatgagagcgtccgattccctcgtgctctcgctgaagttggagtacagtaaagtgaagcgggaacgggacgatgcggtcaaagaggccagggacatgcgcatggagaaagagctcacagaacctcgtgcctatggagcaatgagctctgagttctccttggcggagttggagcaggctacccaggcattcagcagctcgcttaacattggtgaaggcggatttggatctgtctacaagggtctcctccggagcaccacggtagctatcaagatcctcaacactgaaagcttgcgtgcccaatcacagttcaagcaagaggtggcaatactcagtagagtgaggcatccaaacctagtcaccctcatcggagcaagccctgaagcttcagccctcgtttacgagttcttacccaacgggagcctggaagaccgtctgaactgtgtcaacagcaccctgccactcagctggcaggtgcgcatccaaatcatagcggaggtttgctccgcgctgatcttcctccacaagcacaagcctcacccggttgtacacggagacctcaagccgggcaacatcctcctggatgcgaacttggtgagcaagctcagcgacttcggaatctcccgcctcttgctggagtccagtgccaccggcagcgaggcacacttcaccactcagccgatgggcacgccggcatacatggacccggagttcttcggcacgggggagctgacaccgcagtctgacacgtactcctttggcattacgatcctgcgcctcctgaccggaagggcgcctctacgcctcgcgagggtggtgcaacaggcggtgagtgacaacgaccttcgctcggtgttggatcactcggcagcggaagcagaggaggaggagcgcagactcgaggactttaatgaggctgaggatgctaggttcttcattggtctcgtggtcggcccggttgtcatgagagatcctcacatggcagcagatggcttcacctacgaagctgacgctcttagatactggctcgacagcgggcatgcaacatctccagtaacaaacagaagtctttcgaatcgtgataccatccccaatcacgcactgcgttcggccatccaagaatacctccggcagaacgagctgcaagagccattttcacagtggcaggaggattttggagttgtcaattga

SEQ ID NO: 87655 - DNA, 821 bp, Zea Mays
ttacctaaatttattaggttcctctttatttgtaactgttctatacttaggcgggtggaatttctctattccctatatatccttttttggatttttccaaatgaataaaataattgaaattttggaaatggtaataggtatctttattacattaactaaagcttatttatttctcttcatttctatcacaataagatggactttacctaggatgagaatggatcagttattaaatcttggatggaaatttcttttacctatttctctggacaatctcttattaacaacttcttcccaactagtttcactataaataagaatacaataacaataagaatattttcaacacaaaagttctctcaaacaagagaaagaaacatacctttttcatatatagatttagaatatgttccctatgctaactgggttcattagttatggtcaacaaacaatacgcgctgcaagatacattggtcaaagaaagactatttcaaaaactagttaattcaatgatgaccttccatggattcacctatataggctgcggctaacgttgcaaaaataagagcttgaataccacttgtaaataatccaagaaacatgaccggtatagggactactgcctatgagtcaccggctcattcttcaataggcacgtgatcagagatcactttcccctcccactgcttgggagctcagcatggacttcccctttcaaggaaagtttttggattctcgtcaaagagcagagctgagcctaaagaaaatcacatcaagctaagtgcaaacaggcgcaatcaagatcacaagaagaagagaag

SEQ ID NO: 87656 - DNA, 1390 bp, Zea Mays
atggatccgccggcatggcgtcgttcgcccttcaccgacgacccggtagtgaaccacagggagagggagagggagaaggagaggaagagggtagtcctcaccggtgatgagcgtggcggcggaggaagatggagcggacacaacacggtgcgggatcaccaggaggagaggaacaccaggaggagcggacacagcgcggtgcggcgaggactggctccgggatcaccaggaggagcggacacacagcttttgctccgagaggcgagagccgcggcggaggctgcgactacaatcagcagttggccagttaccgaccgcttccagcatccagccaagcccgcgagccgcacgccgctcctgctcccgctcccgctccgagcgcctcaggccatgtcaggcggcgtcggcccgacggcggggggcggcatcacgctgccatccatgggcgcgcccccgccgccgctgcacccgacgcccacgtcgccgacgacgcgcccgcaccaccactactacctcttctccatcaagcagctcaacacgctgggcgcggcggccgtgcttgccttctccaccacggtcccgctctcggagatcgccttcgcggtgctcctccccccctacctcctcgtcctcgcctggctcgccttcccgcagcgcccggggaagcccaacccggccgcgcccgtcttcccgggcgtcggcgggcggctccgcctcgccttgcacaccgcggtggggttcgtcgtcggcgccgcgctcccggcgctctacatcctcgacggcctccgggccggggacacggccggcgtcgccgccgcggccccgcacgcgttcctcctctccgcgcaggtgttcaccgagggcatcgcggcggcgtggcccggcaccttctcgctccccgtcagggccgccgtgcccgtgatgtacagcgcgcgcaggatgttcgcggcgtccgagtggctgcgccaggagctgcaggagcgggacgacctcgggcgcggcccgcccgtgccgccgcggcgggtggtggccggcagggcgctcgcggcagccaacctcgccttctgggggctcaacctcttcgccttcctgctgcccttctacctgcccagggcactcaggagatactatctcggcaacgaccatgaggatgacggcggcgcacgcgcgcactcgaagcagcagcagcagcagcaacagggtgaagcgaagaaggattcgtagatcagggtaaaatagacgtggaacaagctgtactactgcctctgtgcctgcattatgtatgccagtagcttatcttgtttgatgcatacaaaactttccatgttattaccagcagagaaacgcttacaaactgctaatatcttctagtactaccaacaattttatt

SEQ ID NO: 87657 - DNA, 213 bp, Zea Mays
atggggccaccgttcctcaccgtcatcgtcatcgtcgccttcctggccaccactgcgcaggccgccgaccccttcgccttcttcgactgggtcgtctcctacatcaccgcctcccctctcggtgtcccgcagcaggtattggctgtgatcgaatatctcctggctaatggaaatgaacatattatcaacaaaattattgacgatagctcatga

SEQ ID NO: 87658 - DNA, 80 bp, Zea Mays
ctttctaatccattcaggggtgacatcattccttcctacacggcccgtgtacatccactcacggtcctccatcgtctaac

SEQ ID NO: 87659 - DNA, 195 bp, Zea Mays
aggggaccgtgaattccttgcagggctgcggcgattcggctgcgctgctgtatgaattgtttcgtgaacctgggactcaactcgaactcgaaccactacgtcgcctgcctcctcatcttcctgctgcatttcaccccctagttgttaaattcatccaattctaattcaaatagtaattgtgaaggagaacaacag

SEQ ID NO: 87660 - DNA, 1755 bp, Zea Mays
atcgatcattatccgtgcaaccagccaatgagccaaccacccattccaccaccctgcaattccagtccgatttggacattgtcttcgtctccttcatcccctgcccacctgttctgctctgccgccgccgccgctgccgctcccgctgccgcaggaaccctagaccacgctgagcaacccccggcctacacggcgtagctttgcaggaaatggaatacggcgccgtcctcgccgccgcgccgctcgtcgcacggccgaactggctcctcctctcgccgccgccactggcgccgtctattcagattcagaatcgtctttattcgatctcgtcattcccactaaaggctggacctgtaagggcatgcagagctttagcaagcaactacacgcaaacatctgaaacagttgatttggactgggagaacctgggttttgggattgtgcaaactgattatatgtatattgctaagtgcgggacagacgggaatttttctgagggtgaaatggtgccttttggacctatagcgctgagtccatcttctggagtcctaaattatggacagggattgtttgagggcctaaaggcgtataagaaaactgatggatccatcctattatttcgcccagaggaaaatgctgagaggatgcggacaggtgctgagaggatgtgcatgcctgcaccctctgtcgagcagtttattgatgcagtaaaacaaaccgttcttgcaaataagagatggattcctcctactggtaaaggttctctgtatattaggcccttacttatgggaagtggggctgttcttggtcttgcacctgctcctgagtatacattcattatatttgtctctcctgttggaaactactttaaggaaggtttagcaccaataaatttgatagttgaagacaagttccatcgtgctactcctggtggtactgggggtgtgaagaccataggaaattatgcttcggtgttgatggcacagaaaattgcaaaggaaaagggttattctgatgtcctctacttggacgctgttcacaagaagtaccttgaagaagtttcttcatgcaatgtttttgttgtcaaggacaatgttatttctaccccagcaataaaaggaacaatattacctggtatcacaaggaaaagtataattgacgttgctttgagtaaaggcttccaggttgaggagcggcttgtttcagtggatgaactgcttgatgctgatgaggtattctgcacaggaactgctgttgtggtgtctcctgttgggagcattacatatcaagggaaaagagtggaatacggccaccaaggtgttggcgttgtgtcccagcagctgtacacttcactgacgagtcttcagatgggtcaaaccgaggattggatgggctggactgtgcaactgaattagttggccgtggttcgtggatcattcccaacagatgatgggttcgcaagatccaaatctggaggatcacaaccatgtgtacctcttcggttacagttttgtagtgtcttatgcgatggcgtcctgctgtatatttcttagacggtatttaaaccataaaacagtattcgtctgtacgactgtacccttcagttctgtagcatctgccggagacgagtactagttttgttattttctttcttttacaaaccaagaacagttctatagttttattgtagacactggaccatcatatgatctcaatgggtagctttttcctttttatatttaaaaataaacagaa

SEQ ID NO: 87661 - DNA, 1116 bp, Zea Mays
gtatatcattaagcgaatgaaattggaccttggtggtgatgttgacccagttgaagatggcaagacaatgttctgaaatcatgaccaaaagtcaatgcataagttaaaatgtttgttgtaatattaattaatgtttgtttctattgcaaggttgaggagcggcttgtttcagtggatgaactgcttgatgctgatgaggtattctgcacaggaactgctgttgtggtgtctcctgttgggagcattacatatcaagggaaaaggttaaacattatctttgcttgagaactcagtttttaattgaaataataaacatgcaattaaatcaactttcttttgtttcatgcataaggtaactaacagtcattatcatgcaaacatgtggcaagccatgaaccatttgaagcgctacttgcttaatgtctctcttgatcatttgtgttagtggcatttgtcgaccttgtttttctgtgcactttctgccttcattgcaaaatgtcagtttttttatctgcattgtcgtcgatgactggtaaacatggtagtgttgggggcacgctttagcacctaggcaacaaggtgtgactaagacctcttggcatcatgcggtgtcatacattttttgtacataatatggctcttacaacttattctttcaaacaaatgttattctttttggagacttatttagcaatgatatcattacatgtaagggagttcactttgcagagtggaatacggccaccaaggtgttggcgttgtgtcccagcagctgtacacttcactgacgagtcttcagatgggtcaaaccgaggattggatgggctggactgtgcaactgaattagttggccgtggttcgtggatcattcccaacagatgatgggttcgcaagatccaaatctggaggatcacaaccatgtgtacctcttcggttacagttttgtagtgtcttatgcgatggcgtcctgctgtatatttcttagacggtatttaaaccataaaacagtattcgtctgtacgactgtacccttcagttctgtagcatctgccggagacgagtactagttttgttattttctttcttttacaaaccaagaacagttctatagtttta

SEQ ID NO: 87662 - DNA, 3654 bp, Zea Mays
ggatggacagctcagggctgcgggctccggcgccggttcacatggtcgggggatgctgcgaggactgaagactttggatgggtgttgcgtgtgctcatcccaccgagcgagagggagagacgagtcagaaaggcccgcccgtgaagctccatcccgttcttgcccagtgttcatcaggtgcagcttgcgcggatccccctcatgaactgagcaatcgatagaagaaacaaaaagggccatttccgctacagaaaataaatcatcaggaatgggaaaacgaggccacaggcggtctgcatcacaagacgacgacaatgtgggctgtgtgtggggcctcatgcgcatgctttacttccgccgagaccccaaacttttgctggatgcgaagcagttgagtgggaggcatgcgttccgggaggtcagcgggagggggcattcagcaaagaggccaaatgattttgacgggatagaagaagatggtgacattattatgcctcagggacttcattctcagaattagctcaatgtccaatcaatatacaatttcttcaacatacacatgcatctgagcattttttaccgtttctcattcagaacatagaagatcgcactttgcagaaaccgacagtaaaaaaccttatggaggatgaattggaaaaattaatgctgctgaagaaatttccaaatgatgaggttcagagaagaaaagccgacctgggaattgatgtctctcttgatacgatttcagagcatacaaataaatcaacagataactcatatcaccaggcaggaatctctacgccttcaactccatcaatggattatggggttttgaattatactgaagaatataatcttgaatctgtgctggtgaattttctaggtgaaatatatagttgtcacaatgaatgcccacacagtgattgcaagaacaagaatgaattgtgtccttcactgaagtccctaatccataaaaaggtcaatgaattgaataatcttccccacaatattggccgtgggcaatctcaagagggcagtgatgctaagccatctgaccaaaataatctttataacaccatggcagcccaatccaaacaattcaaggatgcattggaaatactgggttcgaacagtgaactttttgtgaagctgcttcagaagccaaatcaacatatagctgatagtatccaacagcatgaaaacagtaaggtgtctgctggattagagcctgacaaaattcatggacagaccaattttgttggaggaagaggaagctcaaaacagcatcctttggctacaaaagagcaggctaaagagagaaaatatatgttcttctggaggaagagtaaatcaaatagaaggcagatgcttgacgcaacagatggagctcagactgttagcaaaattgttattctgaagccaaatccagaaagagggattaatcagaaagcagctactgcaagaactttacatcaacagccatgtacatcgaatgctcctggatgcagtggaagggaaaactcaaagttttcaattaaggaagtcaagaaaagattcagatttgtgactggtgagagaagtgaaagaaatttgtcacctgcagaggaccttcaaggagacccacgtaagatcaaagattctgttgttgcaattaataaatattttagacatctccctgaagggagcttggcaaacaagtctgcatcagacattgagaatggcatcaaaccttttatcagcagtaagcaaaagaatcaaaatgggagcataactgaaatcagtggccatatagtagcaccaaaaggtgcatctgtattttatgaagaggccaggaggcatttatcagagatgctaaaaggtaatgactgttccataaactatccagaagttcaaatatcaaaatccttggaaggcatactttctcttcctcatggcaatgtgtcaaccactgggagtagcctgaggggaaaggattaccttgacccctcacctggagaaacagatgtttacgatgcatgtgaggttgagagagaagaatgcacacaagagagaagccaatcacaagaggattttggaagcattgctcactgtacttgcacaacagttgatgatcaggtgacagttcgagaaggatattacacgaatgaagcacaagaaggaccaagacatgctcatgatgagccagacactctgtatattgaaggacttgataaattcatttgccgcgaaaacattcgcaacgaagagtccagtccagcagaacaaagcagagacgatatacgtcaagagatactagaagaaataaatcagggaaaagagcatgttaaaatgtccctagcttctgttgagggcatagatgaaaagttggggcagcaagagccagaaacaccggaaccaagagcatcagccaaattaatctcagacggttctcctaatcaaagcgatgaaaagcaagagaggcccagtccagtatctgttcttgagtcatccttcgaagatattggcagtccagactgcataaacaagaaagagtgtaagtccaagcggaaaaacttaattaacattattcagttatactgatacagaataaaattgctctacatatcggtatagttaatcttttcatgacgtacaggtgagctgcatggtctccaaaggaccctgtattttccagataatgaaccagacgttaatgtcctttgggaggacaagaatgtcaggttggactacataaagctggtgctagaactctcagaactgtgcgcagaacaaaatctagaggtatggtacctagaagacgagttgatcagcccctgcttgtttgaagaactacagagccagggtgatcagacggatgatcgaatgcttctgtttgactgtatctgtgaagctctaacagagatccaagagagatattttagactctcctcttggctaacttttctaaaacacgacatacggacacctccgacaggagagaacctaatcacagaagttgataggtacgttaacgggtatattatccagtacagtcttccaagtactctagagcagacaattaaaagggatctggaagttcagacgtggatgaacattagatcgaaaaccgaagggattattatggagatgtgggagtttgtattggatgagttgatagatgagactgtctccgatttgtggatttgaagttctgattaggcttcgtccatggtgcctctgtggcgagcatagtgagtaggatacaggagttctttcgtgctgaaaaataaccagttctatgcggcagaatagcatgggctaccgctagccaagtgtgtaactgcagtggagatcgttctcgtgtagtcgtgtggaggagaacagaagtctaggttcagcagatctccagagctgtgaagtttgcgtggatgaagttgggcacggtttgtctcacagccatgcctctgcacggcgaagtgtacagcagtctgaagcgcattgcgattttcctctttgcccgttgagatttgggagcttgtgtgtgcatgtgtgatgcgtgcacttttcagcgtgatcagatcgcgcttgtttttttataggtttgttttgtgtgtaaatgtgaaaaaaagagagaaagcaaacatacatgattaatcaaatgacatgttttatgta

SEQ ID NO: 87663 - DNA, 1382 bp, Zea Mays
cctcgatgccggcagagccagccagccgccgccgcgacccgccaagagaccggcccggagaatcgcgccgtatcgtgttcgatgtggacgcactcctggccttcgcgcggcacggcgatggcggcgccaacctacccagagaggcatcgggttcgtcggcacctccagcccgggcgaccaaatcgtcgccgcgctggcccccttccttggctttgccgatcacctcgtccatcgcatcgtctgccgcgcctggcgccgctcctgccgcatcctcggccgggcaccgccgcccttcccgtggctcatgctccctccgccgctgccacctgcgggtggacctggcccggcccccggcaccgcgcagcgccgagtcttctacgacatccccggcgggagatcatacgcgtacccgatccccgcgtcctaccgccacgtcacgagccgcagcggttggctcgtcctgatcgcctcggactcaccgcgacggctcctggtgcttaaccctatcaccggtgggcaggtggttgtgtcgtggccgttcaaggaggacaccgacggcttcctcgctgtgctgacggcaccgctcggcgacccggggtgcttcctcgcggtcgccacggataggctcatcaagtactgccaccccgccggcggtggggagtgggccacgctgcgcgccctggggttccgctacgacgcggccctcagcgacctcgtgtccgtcggcgacacggtgtacctcgtggacgagcggaggaagatctggcgcgcagacctcgccgccgcgcagcccaaggtggagcgcaaggacacggcgttcgcgctcccgcaaggggagtggtggcgccactacctcgtggagtcgctcggccatatcctcctcgtggtctcggacccgcaccacaagcgcctcgggctctacagactcagatgggacgtcaatctatgggtgtcgatgcccgcgagcggtctcggcgacagcgtgctgctgctgggccgcggttgttcggcggccgtgccagcgtcggccgccgcgggccgcttgcctggcacagttctggtggcgcaccagccgttcagatgtagcttcctgcatgtgggcattgggtggttaaactttcccggcggcggtggtgaccaaccttggttctggacggagtcgcggttgggcgcggggctgggtgatgatcagctggtggtgaggaagtcggtgccgcattggccgctttggtcggacgggttcacaatcggtgattcattctggttcttccccggcattgatgaaagtgattgcccataggcgtgtcaacatgcataacttcggactcctttggaacaaagaacggtaaaggaactttaaagaattaaaatcctatagaaaa

SEQ ID NO: 87664 - DNA, 800 bp, Zea Mays
agagctcgagtgatctccttggctcttgtagcctatgtttcccccggagttcatcccctccctgtatcttggtccatctgcccggagcttgatgtaccattccctaggggtgaccaaacccacccgttcttcacctccccgtggacaaggtttcccacaagtattcttggccgtgtattacttgttccatgctcggcaaagagctcccaaaacaaagagtgaagattcaagatgaagtggttgctaaagaggagtctactcaagtgtcttatcatcaagaggatggagctatctaattgatggttgggtagagggatctagaacctcttcactgcaaaaaggcaagccccggtgcatgcaaccccttccttgtgtttttaaatacttttcgcacacttaagtctagtgaaatgtgcattaggtttataggagttgcttgaaaccctttgatgcattgccttccttgatatccatacctttatagatacttctggtgaagtatcaaaatttgatttacaaaaatgcttagccctgcttagatcttgtggatagaggttgtcttttgcaatactgcctagctcaggggttatcctgaggaaagatggcttctacctgcaagaatactttcattgagagcgtggtgggatcttactgcaaagctccctgtgatgctcttttcatcctaaggaacaaaaacaatcctaaggatggaagtacttaaatcgagacttgggttaggaacaggtgatgttctacccaggttgattaaggattggatgcgtatgtaggcctgctagcgc

SEQ ID NO: 87665 - DNA, 3046 bp, Zea Mays
ctcgatacttccggcaaatcttgaactccagtccctcgagcttatgctattttgtactcggatcgaaagacgcggatttgagatttcagagcactctccagacttcaggccacagaccactagcttccctacttcagtcattcagccggacagccgccaagggagtagagtagagtagagtaggtcagcaagctcacccacccactcgcccccaactctctcaggtccccacaccaatgcgttttggttttgcgcccgcgcgggagatagggagcgaggaggcgcgaggaatccacttcctccacagctctgctgcgttgatctggttctcaccgtgaccgagttgcctctatagggagccgttctcggctaagagctggtaaggaaagcatgaaatcaatcggtgaagaaactgagagcaccagcagagaaacagaaggaagcaagtttcacagattgaaatgcacagatgagggagaaccgtgccttgacaggatccctaatttccactgcaaaagtttgccttcaagatatcgagacacaaacccagaagatggcatcatgcacaagcgcggttctatgtaccagagttccagagaggttagcagactcaggaatctccaagggaggagcaaactaaattattcgagcaataaagacacatttatgtcctttgaggttgccaatttgtcctctcggcctagcacaagtggtgcttgctcctttccactgcggagcaattcatgcaacacaaggtcttctatggggacaaaccatagaattcatcaagcttccagggaggttatgaggttttcactccatgagattcctgaggatgatttgacactcgagagaccacgcagggactgcaatttgttgaaaattgatgcagtagacagtttcctggagaaagcgcttgaagaagataccaccaatggttcatgcacaaatgcaacccctcattggccagaagacagttgtagcaaagttggaggatcatattgccaacagccagttggtttttgtcctgatgaaagagatgtagttaatttgcccaagtccttgtcaacgaaggtgggtgtttttgatgctacctgcccatcagagtgtgttggcaacaaaaagattcgttctagtccattcaagaaaattcttgatcctatcatgaagtcgaagtctcaacggaacccttctctgctggaaacagaagattcaaaatctagtagtattccatttggaggaaaaggcagggtattacgcaaatctttattaagtgatatctcaagggctgagcaaagacttgcacctgattgccagacagatggggaagcccagaaattgaccgttacttcatcgccaactcatcttcatgctgttattaaattggacccaaataatggtgctttcggtttcgcgtttagtacaaaaggtccagaagagttaatatatgttaatacatggaaagctggggatgaactgaattggatttacacttttcatagcagtggcaagcaaacaagcactgtgggaagaacctcaaaggacaggcatgggtgtctacctccaattgtaggccagatgcatgtgtcttcctttttgtactctagcgttggagaagatggtattttaaagacctcagccaccactgaatttgttttgtatgacattgctcatgcaagacggagttctgctgttgagagaattcaatgtacagatgccattcgaccatcattctgcaatgctgtcaataattcaatgtctggacataccagaaatgatctggtgcaaagacaaaatactacaaggattgactcagatctatcaacatcttgtctctggtctcgagaagatcttcatcctcatttggaggttgctgccattgtaatccaggcaccacttcataaaacgaagtccaaagaattgaaagctggatcgtcacctggtactatcaaagcggttacagcaggtggtgcacatgggttaccaagggatgatgaggcaagcccatcaccattacttgaccgtctaaagtctggtggagcctgtgattgtggtggatgggacatgtcatgcccaattgttgttcttgacaatgcatatgatggttactgggctgattccgtaatgaatgaaagcaaagctcctatggagttatttgctcagggtaacaaagaagttctccctgccctttcgatgaaggcggatgggaatggacatttctcagtggatttccatgcaggattatcagcattgcaggccttttctatctgcgtctctttgcttcactgttctgaagcttcttcagacattggtatcgagaagtttaagaacaagctatactccagctcgctgaagattctcctgaaggaggaagtgaggcagttaattaattcagtcacgcccaaggagaagaaaccaaagagcaggaatgaaaagacacctccatctattgtcatcgaccctcccttttctcccatgggtagagtatagcatgtggataagcagagaaatagctcttgggagtggaaagataagaagaccagaatcttcccatcatgtacaacattgtttgttttgaccatcttcattttttgtgagatagaaaggggaagtaacgctgttcataaggatagatggagctggtagtttatagtagtagagcttttagcaaccaagggagggcttgaattgttgttgcaatccaccagaggatgcagaaatgtgtcgccagttctgaaagaacatgagcataataaaaaaaaaaactagtgtagccatttccccttgtaacaacattctgaatctctgacatgttttggttgcaagtgcctcttttctcattctcatccagcttcgtggagttaagctacttgtttaaatctttatgcagctggcgcttgctccagaagtttggactgaatgtgaattgaaacggttaaaaatgcaccgcgatgaaatcaagccttttggcatcatatccatttcaattcctgcattggttgccagactggtgggtcttctagttgcaattgcccttgtaggtctg

SEQ ID NO: 87666 - DNA, 78 bp, Zea Mays
ccggcgtacgaacggcgagacgttgttggcggcgggagagagaagcgtgcaggggctgaaagccaagcgtgtgatgga

SEQ ID NO: 87667 - DNA, 1940 bp, Zea Mays
cttggactccgcttcctcgaggaccttcacgaaaacagccgccctctactttccgttgcccttttcctggttatataagtcgccgcgccggggctgagttccattccattccatctcatcgcaacgttacgcaagcatcctccacctcctgccttgcctgcctgcctgcgtcgtagtttgcacaccgcaaccgtgttcttctctctctctctctctctccctctcgtccctgagaaagcgccgccgctctacgttcccctcgcttgcgctcggtccggcaaaggcccgtccttccatggccatcgcctcccgtgcaacgaagcgcgcgctgtccaccttcgccgccgccaagctcccggaggaggcggtcgcggccgcggccgccggcgaggcgatcgccgcccgctcccaccaggcggtgccgctgccaccggcgcccgcgtcgtccgtgaggccgctgcagttcgaggacaccggccgcctgttcgcgggggagccgacgtcggcgctgctgcgcacgctcgccgcgctgcaggcgctgtccgtgggcccgctcgtggacgccgccaccgcggcgctgcggtcgccggcggtggccggcagcgcgctgggccgcgccgcggccagggccacggcgtaccgccacttctgcgcgggcgagaccgccgacgaggccgcggccgtcgtgcgccgcctctggcgcgggggcatgggcgggatcctcgactacgggatcgaggacgcggaggacggccacgcctgcgaccgcaacgccgccgggttcgtctccgccgtcgacgtcgccgcctcgctgcctccgggctcggcgagcgtgtgcatcaagatcacggcgctctgcccgatcgcgctgctggagaaggcgagcgacctgctgcgttggcagaagaagcacccgtcgttcagcctgccgtggaagacgcactccttcccggtgctgtctgactcgagcccgctccacctgaccgcgtcggagccggcggcgctgacggcggaggaggagagggagctgcagctggcgcactcgcggctgctggcggtgtgcgcgcggtgcgcggagcacggcatcccgctgctggtggacgcggagtacgcgacggtgcagccggccatcgactacttcacgctggtgggcgcgctggcgttcaacgacgccggcgcggcggacggcgggcgacccatcgtgcacggcaccatccaggcgtacctccgcgacgcgcgggaccggctggaggccatggtgcgcggcgcggagcgggagcgcgtgcgcctggggctcaaggtcgtgcgcggcgcgtacctgacccgcgaggcccggctcgcggccgcgctcggcgtgccgtcgcccgtgcacggcagcatccaggagacccacgactgctacaacggctgcgccgccttcctcctcgaccgcgtgcgccgcgggtccgcctccgtcatgctcgccacccacaacgtggagtcaggccaactcgcggcggcgcgtgcccaggagctggggatccccaagggagaccgcaacctgcaattcgcgcagctgatgggcatggcggacgggctgtcgctgagcctccgcaacgccgggttccaggtcagcaagtacctgccgtacgggccggtggagcagatcatcccctacctcatcaggcgcgccgaggagaacaggggcctcctctccgcctcctccttcgacaggcagctgctccggaaggagttggtgaggagggtcaaggccatggtggcgggacgtgagtgaagtgcttgtcgagcctgtgtgtgtggaggtcgaccgtgaagctgggactgggacaaggacgagctaaaggctagaagctgtaaatacacccttcaacggtcttcacattgatgtatccggggctttcttgaataataatcgaatgaatgaaatagtgttcgcggta

SEQ ID NO: 87668 - DNA, 1228 bp, Zea Mays
gcccgtttttagttttttatatgaacgcaaaaaaggagttagaggttatgtgttactttactccttagataaatacagagtaaatttgtgattgtgtgggtcgttgctgtgcaggcgagcgtgtgcatcaagatcacggcgctctgcccgatcgcgctgctggagaaggcgagcgacctgctgcgttggcagaagaagcacccgtcgttcagcctgccgtggaagacgcactccttcccggtgctgtctgactcgagcccgctccacctgaccgcgtcggagccggcggcgctgacggcggaggaggagagggagctgcagctggcgcactcgcggctgctggcggtgtgcgcgcggtgcgcggagcacggcatcccgctgctggtggacgcggagtacgcgacggtgcagccggccatcgactacttcacgctggtgggcgcgctggcgttcaacgacgccggcgcggcggacggcgggcgacccatcgtgcacggcaccatccaggcgtacctccgcgacgcgcgggaccggctggaggccatggtgcgcggcgcggagcgggagcgcgtgcgcctggggctcaaggtcgtgcgcggcgcgtacctgacccgcgaggcccggctcgcggccgcgctcggcgtgccgtcgcccgtgcacggcagcatccaggagacccacgactgctacaacggctgcgccgccttcctcctcgaccgcgtgcgccgcgggtccgcctccgtcatgctcgccacccacaacgtggagtcaggccaactcgcggcggcgcgtgcccaggagctggggatccccaagggagaccgcaacctgcaattcgcgcagctgatgggcatggcggacgggctgtcgctgagcctccgcaacgccgggttccaggtcagcaagtacctgccgtacgggccggtggagcagatcatcccctacctcatcaggcgcgccgaggagaacaggggcctcctctccgcctcctccttcgacaggcagctgctccggaaggagttggtgaggagggtcaaggccatggtggcgggacgtgagtgaagtgcttgtcgagcctgtgtgtgtggaggtcgaccgtgaagctgggactgggacaaggacgagctaaaggctagaagctgtaaatacacccttcaacggtcttcacattgatgtatccggggctttcttgaataataatcgaatgaatgaaatagtgttcgcggta

SEQ ID NO: 87669 - DNA, 1268 bp, Zea Mays
gagttattctgcgaagtatgtggtactgacacccatatcaagctgaaatgtccggtgttcaacgctcctaaggtgcatgctatcccagctggttttgccataaaaaatggcggtttctttcacatcccctccaacaagaagctcactaagggtagcaatgagaacaggttggcaataatacaagtggtggaggggtgtattagcctggacaatgtgattcgagagctggaaaggctgctacccggacttggtccatggtacgtggatcaaatcaccccaaaggtgtttcggacttcctttcctgcagcagcggaattgcaaaggatgatcgaatggggtccggtccagactaagtctcagaaggcaattcttgagttcaaggctagttcatccgggggtcgagtgaaggccactcttactgacgtttggatacagtttgatggtctaccgtcggcactatgcacttatccacatatttggggagttgggtctacgcttggcaccactgtggaggttgacatggtattcttccggaagcacgacatctgtcggatgatggtgggtgtaattgatccagaagcagtcccctctgctggtgaggtggagatcaacagagttatttatgaagtgcattactgggtggagaggcacctggtggatggggtcccggtgccgcttgcttttgatcaggacggagaagaaggcagcaggaaagataaggataatttgggtgatcccaaagggaaggccgatcgaaacaagaatgggccagagaacagttcggaggagaaaaatgagaatggcagcaaggccgatggcggtcaggtccagaaggaggatgttaacggtggggctgatggtggtaaccacaacctggttgtcagccatgagacacacacggccagtgagctacaggcgttcgcacctactgagctcatggatgagcatcaggggatggccgtggatgctgtgctagagccgatggtggataatttcatggtttcaggtacaccggaaatggagactagggccgccagggttgagcgccttgcggcgatcccggagactgagctgccatctggtcgcaagaggagatcttgtacaacggatgagcattcgcttgcccgggcggagcgcctgaaaactgaaaggaatggaggtatgtgtaatgtttttaatgttccaatttttgataaagtttttaacattcccatagatacggcagtagcaaaccttagtagcattggaatctcattagggggcaatgg

SEQ ID NO: 87670 - DNA, 259 bp, Zea Mays
ttccatctccgtccaagaaccgattcgcggtgtcttgtgtggtacactgaacgctcctcacggtgacttgaacttcatcgagggtgcatgggattggcgacaaaaaaaaaaaaaaaaaacgaaagctgttctgtcctgttttgttttttgtgatacggttgtcttagactctatgaagtaggtcctagaaagcctcttctacctcgaattgtagaggagattcacatagtttacgtctccagcagcgttctcttaatac

SEQ ID NO: 87671 - DNA, 98 bp, Zea Mays
atgagtttattactcagcatatttcgcatatatctacagctagattacgctacactaccaaacgcccgagtaaacatatacatagcacctaagcaaag

SEQ ID NO: 87672 - DNA, 1213 bp, Zea Mays
atgcctatcccagtggactccacaaggcccaaatatacatgccaaatccgcttccagttttctcccccactggatacagcacacgaggcccgaacaaagcccacccagcttccttctgtctccaccgccgccgacgacgagccgcgcaacccaactcaccgcacgacgactcgcactgatcggagagccagcgagcgagcgagcgagatggccgggaggttaaccgcagcagggttccgcgtccttggcggcggcggcgcacgcgccgcggccgcggccgctgccctccggcaccgcgccggcatgggcctccccgtcggccgccacatcgtcccagacaaacccgtaagtctcccgcaccccgagtccagatccaaatccgaccctcgctcgtgcgtcctctcctcatctgcgcgccagtgagttgccgtctcaaaccgattggattctggggattttttctgttttgggtcgcagctgcccgtgaacgacgagctggtgtgggacaacggcacgcccttcccggagccctgcatcgaccgccttgccccgcacatcggcaagtacgaggcgttggcgtggctgtgcggagggctggggttcttcgctgccctcggtgtggctgcggtggtgaacgataaggcctccaagataccatatactcccaaagtctacccgtacgacagcttgagagctgaacttggtgatagaccatagaagattgtttctctgtttgacaagccacttcgatgaattgaacatatcttctaccagacaaaagcagggaaagctgttgtttaccatgtttttttttgttgtaactaccttcatgtaatttcctggatcttgcgaagcatggattttccctacaataatgcaaccggttgcactggcaactattcctgatgctacggattcaagcattaccatttaacaatctggtgccagaactagaaacattatgcacgactcaaaacctgtctagcagtaatctggtagcaaattcgagtgcaatgattacgttggttcgccgcgatgttttttcacgtttccgtcggagaggacatttgactggatgtttttgctgtggtttgtggaccgtgcacacgaattatttcaaaatttcagccgtgacctgacacgcgtgatgtttcgctcgtgtacctgtcgattggcaagttgcgatgcttgctacaagcacaaaaaaaaaaaa

SEQ ID NO: 87673 - DNA, 1083 bp, Zea Mays
gcctatcccagtggactccacaaggcccaaatatacatgccaaatccgcttccagttttctcccccactggatacagcacacgaggcccgaacaaagcccacccagcttccttctgtctccaccgccgccgacgacgagccgcgcaacccaactcaccgcacgacgactcgcactgatcggagagccagcgagcgagcgagcgagatggccgggaggttaaccgcagcagggttccgcgtccttggcggcggcggcgcacgcgccgcggccgcggccgctgccctccggcaccgcgccggcatgggcctccccgtcggccgccacatcgtcccagacaaacccctgcccgtgaacgacgagctggtgtgggacaacggcacgcccttcccggagccctgcatcgaccgccttgccccgcacatcggcaagtacgaggcgttggcgtggctgtgcggagggctggggttcttcgctgccctcggtgtggctgcggtggtgaacgataaggcctccaagataccatatactcccaaagtctacccgtacgacagcttgagagctgaacttggtgatagaccatagaagattgtttctctgtttgacaagccacttcgatgaattgaacatatcttctaccagacaaaagcagggaaagctgttgtttaccatgtttttttttgttgtaactaccttcatgtaatttcctggatcttgcgaagcatggattttccctacaataatgcaaccggttgcactggcaactattcctgatgctacggattcaagcattaccatttaacaatctggtgccagaactagaaacattatgcacgactcaaaacctgtctagcagtaatctggtagcaaattcgagtgcaatgattacgttggttcgccgcgatgttttttcacgtttccgtcggagaggacatttgactggatgtttttgctgtggtttgtggaccgtgcacacgaattatttcaaaatttcagccgtgacctgacacgcgtgatgtttcgctcgtgtacctgtcgattggcaagttgcgatgcttgctacaagcacaaaaaaaaaaaactca

SEQ ID NO: 87674 - DNA, 843 bp, Zea Mays
aaaaccaccacgaaaaatgtacgcctagctagctcggagcttgtccaagcagagctctgcacgtactgaacctgaacacacagtagagtagcgcaacggatctcgaaatggctgcgaggcttgcgctcctcatccttgccacgaccttcctcctctccgccgccgcggacgggggcagcaccaactgcccgtcgccgccaatgaccccgaccccgacgacgccacagcctcctccgtccgacgggggcgggggcgggggtggtaacggctccgccggcagctgcccgatcgacgcgctgaagctcgaggtgtgcgcgaacgtgctgaacctgctgaggctgaacatcggcgtgccagacgacgagcagtgctgcccgttgctgcaggggctcgccgacctcgacgccgccgtctgcctctgcctcgccatcagggccaacattctcggcatcgtgctcaacgtccccatcgacctcaccctcctgctcaactactgccacaaggaccgcgtcgccagcttcacctgcccggcgtgatgctgtgcatgcatgcaggcgtgcatgacagtacgtgtcatgcatgtacggagtacatgcgtatttctacacacagatcgggacctctatatatatactccatctggacaccgccgtaacgacccatcgataaaatcgcgtgtgctgcatgcgtattatttgttataaataaaatactgtttccaatttgcgcgtatgccggatgtattgcaatatttggattaggtatgtaattaagtaaacttccgtatgcgtgtgtaatggcggatctgtattaaaaaaaagaaaatggcatattatttgccaa

SEQ ID NO: 87675 - DNA, 342 bp, Zea Mays
atgaaggatgacaatcaagatgatatacgcaatataaagacatgtacggcaacaatctctccaacgcctctggcgagtttggtggatgttggctgtgacagtgagggtgccatggtgcagagtccagtggtggtggacatgaatccatgtgtggaggatgctgggaatgctgccccgcgtgctgcggcagagcacacaccaagatggagcggacactggactggtggcaatatgtgttggcagcctcgggtcaggccaggggttcgaggtgtgacgactgacgatggtggcagattgtgcaagctaagtgtgggggtggcaaagggccaaaggcatgactag

SEQ ID NO: 87676 - DNA, 1421 bp, Zea Mays
atgaaggatgacaatcaagatgatatacgcaatataaagacatgtacggcaacaatctctccaacgcctctggcgagtttggtggatgttggctgtgacagtgagggtgccatggtgcagagtccagtggtggtggacatgaatccatgtgtggaggatgctgggaatgctgccccgcgtgctgcggcagagcacacaccaagatggagcggacactggactggtggcaatatgtgttggcagcctcgggtcaggccaggggttcgaggtgtgacgactgacgatggtggcagattgtgcaagctaagtgtgggggtggcaaagggccaaaggcatgactaggatcagagggggcggaccagcctgctcgctgacagacagctattatcgtacctatccactgctccgggctatccgtgtgctcgtgtacaccgtgatgtggtcggcagtgaaggacctggatgccagcatcagtgtttttaaggcgtaaggcaaggcaaggcgttggaccgccgcctggacgcctaggcgagcaaggcgcccaggatttctgggcgttggcccaccacctcgacgcctaggcgacaccttaaaaacattggccaccatgatggtggcagtggctttcaccacgaactgaaactctcatcttgcagttggtctgaaccagattccacaccatcacctgttatctcaaattattagcccgtgctttagtttatttttattttttttttttctcgaaaacgcaggaaaactacgccccattatatattaagcagaaaaaggggtggtcttaagaagaccaatacaagaggcctccctacggaggccagtagcaagcatacataagaaaatccatcaaaataggacagctaccaaaggaaaccaaaaaggcctccttaattctcagctaatggtgctgccaaatgggaaaggcccttggcaccagcaatctcccattttttttctttcctcatcagcagctctaagactcatgataacattagggctgtagccatcaaagacgcatttatttctatggttccacaaaatccaggctcccaggatgataagggagcaagtccttttttggtgagtccattaacaacagcccccacctcttcccaccaaaccagatatgagccaacattcggttgtggagcaagagaatgcagaccaaatttccttagtagcagataccagaattccctcgagaaagaacaggtaacaaggagatggtctaaagtttcatcctcttgatcacaaagggggcacttctcaggatggttcagccctcttttagcaagcctatctactgtccagactcttttgagcagccaaccaaatgaaaaaacgacattttggcaaggcccaagttttccaaattctcttgtaatgaggaaaagccacagacccca

SEQ ID NO: 87677 - DNA, 1682 bp, Zea Mays
cgcattacggttacacggacacccgtactctccctcccgaggtcagtcccaacccaaaatggtgaatcccctcctcatcttcctccccttcctcagcgtcgccgccttgcccggcaacgccgacgccgcagggccggacccatgcgcaggacggcggatccacatccgcggcctgcccccgcgcttcaacaccgacctcctccgccactgcggcgccaacgccttcccgctcgccgacccgtccgccgcggccacctcggtcccgccctgcgagtcgctcgccaaccacgggctcggccctcgcactcaccctcgcagccggtcctggtaccgcaccgacgcgaggctcctggaggccttcttccaccgccgcatcctggagcgggactgcctcgccgacgacccagccgatgccgatgccgtgttcctgccctactacgcggctctcgacgcgctgccgtacgtgatcgatccggccctgctcgacgaatccgcgaggcacggcgtggcgctggcggagttcctgtcgcgggaccaggcgcatatcctgtctcgccggcacgggcatgaccatttcctggtggtcgcggggtccgcgtgggactacgcgcagtcgccggtcgcggagccgaggctatggggctcgacgtcgctgctgcgactgccggagctggccaacttcacgttcctgactctcgagtcccgcacgtggccgtggcaggagcacgcgatcccgcacccgacgtccttccacccgtcgtctctcggccacctccgcgcctggctcgcccgcgcgcgccgttcgcgtcgcgccacgctgatgctcttcgcgggcggcgcctcccgcccgtcccggcccaacatccggggctccatcctctccgagtgcgcgaaccgcaccgacgcatgcgtggtcgtcgactgctccggcggcaaatgcgcgcacgaaccggtccggtacatgcgccccatgctgcggtccaagttctgcctgcagccgccgggggacacgccgacgcggcgctcgacgttcgacgccatcctcgccggctgcgtgcccgtgttcttcgaggacctcgcggcgcggaggcagtacgggtggcacctgcccccggtgcggtacgatgagttctcggtgcacatgcccaaggaggccgtggtgttcggcggggtccgaatcgtcgagacgctcgaggccgtgccggaggaagaggtgcggaggatgcggcagcgcgtgctggaggtggcgccgagggtggtgtaccggcggcacgggagcacgcccgagctgagagaggccgtgaaggatgccgtcgacctcgctgtggatggcgtgctgcagaggattcggtggcggacgcgtgcactggaggacggaccgccggagaggatttacgcgcaagaggaggacagcgtcgacagatagaggatgaggaccattcccttcggctgcaacaggacatccacatccaatagtgaaatacagtgtgtacatgttgctgttgtagtggagaaatgagatttgtgttcagtgtaactgcagtagtttagtatggtgcgaacttgttggcttcttcgtggtgaatccgtgaatggcatttcgaacagtccatacctcacccaaggagccatgacacgaaatcatttttgaaccatgaatggaacgaagtcactttggaact

SEQ ID NO: 87678 - DNA, 547 bp, Zea Mays
aaaactttgcttatgtcaaaggaactctgaggtgcgagcaaagccttgggtacacctatcgcaattcatctactccctttcaaagtgaagaaaccaattacatataccttgagtgcttcaaatattgaaaacataacgggaaaatatttcaaagttattgctcggttatgatacttcaggaggagcttggggcgtttgtgtggctctggccttgtctaatggcataatcaatctctctgctactgtttttggagaactctggaagctggaaccattgtgtgaagataaaaggttgtggtggagaaaagaaatggactggttgatgtctcctacaacttatatggtggagctggttccaatgaagcaaagagggtcagatggatgcacatttcagatgattaacctccaaatagaatgtttcttacttgctcttgtatctttattataaagtaaaaagtttcagaatcttacataattatttttgaactgaaccatgcagattatgattccaaaggcctgctcagatgctcatgtgaaccttcctgca

SEQ ID NO: 87679 - DNA, 1238 bp, Zea Mays
atggcgacggcgtgggtgcgctcgctcagctgcaggtcctcctacgccgtcacggacgccgccatcgcgccgtcaccggccaagaagccgccgccgcagccgctccccttctcctgcgccagcgccactgcggcggcggcggacgtgatggacgccgtggcgtacgcccatcatcaggccaggcggaagaagctggggagggagagggagaggcggaaggaaacgcgagagccgcggccacggcccaagaagaagcccaagcccatggcgacgaaggacgcggccgccgccgccggggcgccgctgtcgttcatgccgtcgccggcgccgggcccgcccgtgagctcggcgttcctcacgatggcggagctgcccgagggccactcctcgcggcgtgtcgtggagctcatcttcgcgtccgggtgggccgacgcggcggggcgcccgtcgccgtcgccgtcgccggcggtggaggcgctgttccgcgtgcacagcgcgccgcgcgcggtggcgcggttcgaagaggcgcgccaggcggcccgcgcgcgcggcgccgcggcgcggtgcggcgccgacggcaacgagatgatgcggttccagtgccgcgcgcccggcggcggggtgttcggcgcgggcgtcgctacctgccgcctcggcgcgtcggtctctgcagtgcgcacgttcgcctgcagcggcgccgcgcacgccagcgccgccgccgccaccgccaccgccggccggcgggcgatgctggtgtgccgcgtcatcgccggccgcgtctgccccgccaaccacccgtcctcgcgccacgcccacggatccgctgcgaccgcctatgactccgtggacatgggcaacggcgagctggtggtcctggacagccgcgccgtgctcccctgcttcctcatcatctacaaggtctagccgccgccgccgacgacgacccgggaccaccggactagagcactaaccgaccaccgaccgtgaccgttaacccctcccccgtcgtcgttaatcgccacgctgatcgctaggcttctctagcattgttttgggactctgcttttccggagtgtcaggtgcgtgtggatggtatttggtatgctatggtagcagcagcggcagcaatggagcccctggccctgccgtgcccgtgccccgtgcgtgtaaaaatcagtacaaaaaccgctgcctattttggtatagaaacattttgcttttggctgtccattcaaaca

SEQ ID NO: 87680 - DNA, 2220 bp, Zea Mays
ccctggtgtcttggcgcctccgttttgtgtcgcattggcattttggaagtgcatgggttagtgggaatgtgaggagatatcatcatttagtgaaagtaaatcagatgataaacggttttatataattactccgaccaaaacacttcaactgaggactggttgtgctaatgaccgggcgacttggattgaagcgcttgtcactgcaagaagcgaatattcttttaatggggatttatcaggtgatcagaatgatgcatcattttccacagaaaagctcagaaatcgcttgaatgctgaaggcgttggcgaggccgttattaaagactgtgagcagattattcattcagaattttcgcagtaccaaacacagatgaagcaacgttgtgaagagtatttaagctttattggcactcttccacaggatgttgaggtagttaattcagtagattcaactgtccctgagaagccacggctagagctgttcaagcatgactgctccagctctggaaaatgtagtgaatatagcaacacagaatcttctgatgatgttggcaagcaagagattagtgaactatcagacggagatgaatttcatttctatgacacaaggcaaagtttcagtgaatttgcttctagtcctgctgacccgagaaagggatgtttaaacaacggaaatgaagatcataaatctgttgaatcattgacggttgacaaggctgagaaatatatgctatcacattcaaaaaggcgcttacagttgcctgaaccaatagaaaaggagaaaggagttagcctttggtcaatgatcaaagacaatgttggaaaggatctaacaagagtttgtcttcctgtttactttaatgagcctttatcttctctccagaagtgctttgaagagttggagtattcttatttgttggatcgtgcatatgaatgtggtttaagggggaatggtctgatgagaattctttatgttgctgcatttgcggtctctggatatgcatccacagattcccggccttgcaaacctttcaatccattgcttggggaaacctatgaagctgattaccctgaaaaggggatccgttttttctctgaaaaggtcagtcatcatcctatggtcatggcatgtcactgtgaggggaaaggttggaaattttggggagacagcaatctgaagagcaaattctggggacaatccattcaattggatcctaatggtgtgctaactttagagtttgatgatggagaaattttccaatggagcaaggttacaacaacaattaacaaccttatccttggtcgagtatattgccatcaccatggcacaatgaacataagtgggaatagacgatattcatgcaagctgacttttaaggagcagtctttccttgatcggaatcctcgccaggttcaaggagtcgtcaaggatgctggtggaagcaaggttgcaacattgacggggaagtgggatgaaagtgtgcattgtgtcatcaacaatgatgcctctaaggtgaactctcatggtccacatcagagttctggttccactttgctatgggagaaaaatgagcctccagtcaatcctacccgctacaacttgtccgcatttgcaataacactaaatgagttaacaccagagctcgaggagaagctgccaccgacggattcaaggctgagaccagatcaacggcacctggagaatggggagtacgagaaggccaatgctgaaaaactgcgcctcgagacacagcaacggatggcaaggaagatgcaggagagtggctggaaaccaagatggttccaaagggacagcgaggatggaacgtaccgctacgtcggaggttactgggaggcaagggagcagagaacatgggtcggctgcaatgacatatttggtaacttgtctagcagccagaagctcccaccatccgctctctacacgagctgaagtatataggggtgggtaaggccggaagggcatgttcagtagttgttgacatcgcattaaccagagggtttttctctcgtttctgttgtgttaagctgtgagctaacatgtttttcttgtcaattgtcacattgaagccaaggacatccaagcataacccaaccttttgtcgatactaggatacttatgagagatcttgtggacattattgcgaaaagaattgtcgatgatactattttcttctttgcattccgcaaggacgtgtctgc

SEQ ID NO: 87681 - DNA, 615 bp, Zea Mays
gattcttttcttatccatctccgcgtagcaaagaaactaacctagaatcagaccaaagagattgcacgtaggagggagcatcggagtagcgacaatagtagagagatcgccagggctgctcgcctgtctggagagaggaaggaaacaagagatggacaagaccatgaaaaggtgggtgcttactggctggagccgccggccaacaaggagatcttctcggctggcgacgaccttgaattgctctcgaccagcattggggatggagtgaaatggttggtgaacaagttgaagggcaagatgcagaagccattggcggacctgcttagcacaacctccctgtgggcctgttcccaagcaaaaaaaccaactatacaagttcgcgtcggctctgagcagtggtttgacgccacggtgtcaggtatgctgggcgagggctgcctcatgcagaggtggacgggatcaagaccaaggtgctcgtctgagctagggtcaccattgttaaggctgccgctgccaaggtcgagatcaagtggtcgtgcaaccaggattcctacgaggtcgtcaggggcggcatcaccgtcgacgagttcgctgcacaccgagatggatagatgg

SEQ ID NO: 87682 - DNA, 1338 bp, Zea Mays
attcatcacctcctctcctcacacggcttcctcgcaccggctccggtcctcctcccatcaccatcaccaccgtcgttcctctcacgagtcccgacacacgcaaaccgcacgaaccctggctggcggcgggatgacgcggcggtgctcgcactgcagccacaacgggcacaactcgcggacgtgccccaaccgcggggtcaagatcttcggggtgcgcctcaccgatggctcggccatccgcaagagcgcaagcatggggaacctctccctcctctccgcggggtcaaccagcggcggcgcgtcgcccgccgacgggcccgacctcgccgacggcggcgggggctacgcctccgacgacttcgtccaggggtcgtcctccgccagccgcgagcgtaagaaaggtgttccttggactgaagaagaacaccggaggtttttgctgggattacaaaagcttgggaaaggtgattggcgagggatttctcgtaatttcgtggtctcaagaacacctactcaagtagcaagtcatgctcaaaaatattttatacgtcaatcaaatatgagcagaaggaagagaaggtctagcctttttgacatggtgcctgatgagtccatggaccttccaccccttcctggaagtcaagagccagagacctcagtgttaaatcaaccaccactgcctccccctgtggaggaggaggaggaggtggaatcgatggagtcagatacttctgctgttgcggagagttctgcagcttcagctcttatgcccgagagtttacagcctacctatccgatgattgttccagcttatttctcaccgttcttgcaattctcagttcctttctggccaaatcaggaagatggaggtgatctgcctcaagaaacgcacgagattgtcaagcctgttgcagttcattccaagaatccaattaatgttgatgaacttgtgagcatgtcaaagctaagcataggggagcctggtcaggaaacggtgtctacttctctgtcgttaaatctgctggtgggtcaaaataggcagtcggccttccatgcaaatcctcaaacgagggctcaagcttgatcccgcttccgcacagaaactgcattaagaaggattccctctcttttttttttctatatgtaagattgaccgtgctctgtagcttgtatcatgttgtaagttatgctatgtatgaatgtacctgttgtttgtctggcacgcatgacatgccactcatgataacaaactcataatgttagtgctgatctttatggttgtaatgttgtaaacttttctgagagaaaaaaacgtactagccagttgttttcacgtgc

SEQ ID NO: 87683 - DNA, 1914 bp, Zea Mays
atgggcctacccattcggcccttatggaactggatctctaggtgtcattggctgggcggctgggccatggtccatggagtcgttggtaccacgggcgctgccgtcagatactcagatctcgtctccaaggtgtcggagatggacttgccggcgaaccgcggccggtggcgcaggcggagcgcccgatcgcacctgcctctcgtcgtggccgtcctcgtgctccttcttccggcctatcttctcttctcatcggcctactccaccacgctccgcgctctcttcgctttccccttcgcccccggcggtggcgaggcgccccggtgcgggggctcagtggagctcgagggtcagaggttcctgtggtacgcaccgcacagcgggttcagcaaccaggtgggcgagttgcggaacgcggcagtggcagccgctctgctaaaccgcactctcgttgtgccccccgtgctcgaccaccacgccgtcgtcctcgggagctgccccaagttcagggtcaccgacccttcctcgctgcgcgccgctgtttgggaccacaccatgcaactcctgctggatcgaaggtatgtttcaatgggtgacatagttgatctatccccaatcgaaccaatggttaggactatcgacttcagggtttttgtctccctgtggtgcggtgtagacatgcggaagacttgcttttctcggctgtgctgtgctgtttctggtggtagctctaggccagatgactacaataaatgccgatctttgctgtctggtctaggaggcagtgaaaaaggctgtgtgtatcatgtacatgacgattgtagaacaacggtctggacataccaacagaatgatgatggggcgttcgatcagtttcaaccagatgaagaattgaaacggaggaagaagatctcatatgtccggagacgcagagatatgtacaaggctttagggcctggttcacaagctgaggatgctactttgctggcatttgggacactcttctcaggaccatacaggggatctgagtcttattttgatatccatgaatcgcctaaggaccaaagagtacaaagggtactagagaaggttgagtttcttccctttgcaccggagatcatggctgcagggaaggaatttgctaagaacaacattaaggagccatttctttgtgcgcaacttaggttgctggatgggcaattcaaaaatcactggaaagcaacattctctgccctcaaggagaagttggaagctattgaactagaaattaggagaaacatgactagtggccttattcacatgttcgtcatgactgatcttccaccaacaaactggaccaacaccttccttggagatgttgcaacagatgagcgatataaactgtacacactgaaggaaagtgacgacttagtgctgcaaactgcagaaaggcttatggctgcagaacatggtattcggtctggattccttcagaaaatcatagagagcacaaagaaggactgcgaccctgttcaactgccagaaattttgttgtatattgaagaatctgtttgtagttgtgcatcactaggatttgttgggactgcaggatcaaccatagcaggaagcatagaaacaatgaggaaaaacaaagtgtgcaaattgtagggaagaacatctttgagttaggtaccagaaaccatgctgattgacgtgttatagcaaaacaagagttagtttttttctgacgggttcaattgactgtagagtgttgagcttcacatgggaaaattctagtatattatgaagagaagttgcaccattttcccctacgtgtacagaaagatcatgttcatgcttgtgttatctgaatcgttttgagaagctatgtgctttttcctcagttttgtactcctacatttattttccagtgagacc

SEQ ID NO: 87684 - DNA, 1157 bp, Zea Mays
gctcttcctccccttgtctagctagtgacttgtccggcatcgaggtggtcccgtgcgctgtggcgttgttgtttgcagagcagggagctctggcgacaatcaccatggccagcctgaccaccgtggagaagttgatcctgttccacaagctcgagcgtgacctgttccaccgtctagtccacgacctcgcccaggacccagtgcccatgcgatgggtgatcgcgttctggctctggctcgagtccgatggccaccatgacttcatccgccgcgtctccgcgctgccaggacccgttgtgctgcggttcgtcgaggaggccatcgagtgcctccgcggcctcgcctgccggggccacgggcctgcggccggcaccggcgacggcgacggcgacggccgcgagaggcggtgcctaccctgcacgaacgcgctcctgaccaagcccatagacgatgcgggctacttcgaagggcaacgcgagattttggatggcgtcaggtatcagtacaggaccgtatgcctcgccgtttgtgatgtcgacagcaacatcaccgcttgtgtgcccactaacactagcggcggcgtgcttgttgctccgccgatggtcggctcccctgtcctcgccgtcccgacggcggcatcctttccactaaatccgatggcatcgccgtggatccctttgaagagccccccgccagatgactaccgctccctatttatcaccttctccagaggctaccccattagcagggacgacatcgtggagttcttcaactcggcgtacgggccatgcgtggagacggtgatgatagagaaggtggcgccggggcagctgccggtgtacggccgcatggtgctgcgcagcgcggcgatgatcccagcggtgctgaacgggcggcagacggccaagttcttgatcaaaggcaggcacctctgggcccggatctacgtccccagctccaggctctcctacgcgtgatgattcccagccacctacagaccacaagccggccggccggccggggtaagagcagagctggagctcttacactaatgttacccacttacgtgccatgcctaggccagttggccagggtaagctgtggctagagctttactgaactttctcgtcgaataaattaccggagtgttaaagctt

SEQ ID NO: 87685 - DNA, 260 bp, Zea Mays
ttttttaagtagtgacaagttgtttgctgtagattgggagctcggatttgtttaggctcctccaccgggagaactaattgtgcgctcgatttgatgcggccaaaattttttaccccatttaactcggaagcggatggaaagaagattcagatccagctgacagggttcatggaaaagaacacagtgaagttcatgaaggagctctggagccttctcctcagtgcgcagctgaaagtcgcctagagggggggtgaataggt

SEQ ID NO: 87686 - DNA, 445 bp, Zea Mays
accacattggcgcaatggactccatggtgtttgaggttgctaaattggatggagcaacaatgatttgtcacactaacagtaaaatgaaactaacagtaaaatgaaaggttacttgttggttttaagcgttagtaattgctacgaagtagcataatttatatggagcgcatccagtttttattgatgcctgactttagcaaccactccatattttgatctatcttttttataagtttgagttcatgtgacttattttaaaaacttgagctcacaaactttctcttatttggtctctgtatggtggaattatgtcattctataatctatgttcgttcagtcagtcgttgtgaactctcttctaatcgctcacttcatttggtcgtgttgtaccaagatatattagatggagtaaacaataacatcagttagccaaatcaagaaaata

SEQ ID NO: 87687 - DNA, 895 bp, Zea Mays
ctcttctcctccacacaccaagcctgccccgccgatcgagcacgtcatcattcgctcgcccagctcgcgggaggagcaggagctaggaagaagcaaacaagcaggccgggggccggggggagagacagagttcacaaaccacacagggaagagtggtggaaggaggaggaagaggggtacgtcaagagagcgagttcattattcatacgtgcggcggcgacatcgtcgcgcgcacgcaggatgtcggcagcgtcgagcgccacgtgccgcgtatgcggtggcgcaggggagtgcgcgtgccgccacggccacgggatcggcggcgcgcggtgcggcggggtcgtcgctgtcgccgacctcaaccgcgggtttcctgcgttgtggcaccagccggaggaggaacccagtggcgctggcgcggcgccggggctgcacgagttccagttcttcggccacgacgaggaccacgacagcgtcacgtggctgttcaccgacccgtctccccacctgcaccgcgggccggcggccgccgaggtcgggaacggggtggccgaggctgagcagcggaggccgccgccggtgttcgacggcgggtacgcgcacgcacagtacggggagctgccgggtcacggcctcacgttcgacgtgccgctgagcggccgacgcggcggcgaggtggcctccgtggcgccggttctggaggcagggctggggctaggcggtggcggtggcggcgatctggccacgtcctccagcgccacaatcgtgagtgcttgcgcttcggttccaaaatctctttcctgaatcatgatcgcccctggacaagtctaataatttcaagatgatgtgcatgcggtttgtgttcgtatgtgcacgctgaattaaccgctgacga

SEQ ID NO: 87688 - DNA, 283 bp, Zea Mays
aaccgaggatgataaatggtgaccatgcgacctccacttcgccccgttcacttcgctccctacctctgtgttcgagttcgcgtggacgccggagccacccgaagagagaggaggaagcagcgcgcggacgccagatccgaaggacggctcgccgctaggacgttccttttctgcctctatgttagagcgcacgcggacaccggagccggaagacgcatcgccgccaggacgcgcgggatagcgaggtccacgaggttccactacacgccgctaggtccggtga

SEQ ID NO: 87689 - DNA, 474 bp, Zea Mays
atgacccactacaagcctcgcacactgcggcacagaagcgaggcacgccgcgtgaagaagaaaaacataaggaggaatggagatgtaccgagagggattcgctcgcccttctaccaccctccatccgtgagcggagtcgtcggaaccctagatcctgcagtgcggcagctgctgcacataccccggttgcccacgccggaaaccctagctcctgcagcagcgacggaggcgaaccccaaacggcgggggagaggggttgcggccggcgacgaactgcaactagcgggagcaagagcggagcagggtggagactggaggggtgtggttgtccgtggtggcctggtggggcggggttttgtggtccggctgtgcaggatccacgcggcctgcgtgccaggcacaccagtaaggcttggctgtttggttcatactagtactaaaactcagtacatatcatatcaaacgtttatttga

SEQ ID NO: 87690 - DNA, 1188 bp, Zea Mays
cgcgacaactaggccggcctgcaacgggaataaccgcccgccccgcgcatagcctaacggggcagcttgcttggctctgatgctgccatgtcgcgcgcgcctcgtatcgtatcggtgctgttcctgttgcttggccccctccccgtctccttggtccacgtgaccgccgacgggcccgtgacggcgacggttcaccggcaggacggcaccgcgtggcgctcgttcaagcagctgctggacgcgcggcgaggcagccacgttgagggcctcggcgagctcaagcgctacctggcgaggttcgggtacatgcctggggcgggggcggagcacgagccgacgacggacgcgttcgacgcgcacatggaggccgccgtacggcggtaccagtccatgcttagcctgccggtcacggggcagctcgactccaccacgctggaccggatcatggccccgcgctgcggcgtcggcgacggcggccacgctgtgccggtatccctctcggggtcggcggcggcgagcccggacggcgccgtcagccggttcacgttcttcaagggtgagccgcggtggacgcagccggacccgctcgtgctcacgtacgccatctcgccgaccgccaccgtcgactacctgcctgccgggaccgtgcgcgcggtgttccggcgcgcgttcgcgcggtgggcgcgggtcatccccgtgggcttcgtcgagaccgaagactacgaggcggccgacatcagggtgggcttctacgtgggcagccacggtgatgggatccccttcgacggaccgctcggcgtgctcggccatgccttctccccgaagaacgggcgcctccacctcgacgccgcagagaggtgggcggttgacatggacacggaaacggtgcactcggccgtcgacttggagtccgtggccacgcacgagattgggcacgtcctcgggctggggcactcgtcgtcacccaaggcggtcatgtacccgagcctcagcccgcgggaaaagaaggcggagctcaccgtcgacgacatcgaaggcgtccagtggctgtatgggtccaacccgggattcagcctcagctcgctttaccagcaggactcctccatggcgtcgggagggagcagttggcttcctgcctcggctagattagtttgtgcagttctggtcatgctagtgacgcacttgtag

SEQ ID NO: 87691 - DNA, 608 bp, Zea Mays
cccagcactaccggccctcgggtgattttctgctgcgcagctgaaagtgctcttatatcctcatcggctaattgcccagcataggcatgcaatgggaagcgacagacagagaacacgcactgttcatccaagactgtatcacctcttcacccactaaaattagtgtacatttatcatctccacgtagcagctttataaaaagtaaaaatgctgattagtaatttcgtaaaacagctccagttataaacctgtggttcagtacaattggtcgcttgcggtaatccggattaagcattgcctgtcgaaacataagtcagaccgaacaggccctaaatctaaaaaaacttactgcttctggcagctggtcacctgccagacagtactctcttgcagcataaacaatgtcaagccggaaggtgctctctaaaagtctctgcacaatcaatcagaactatgttaggtgccagagtggaaaattagaaaacaatattcctcttacattgaacacgaagttaaaatatcctcaatcacctgcaaggaaataccatccattacgcctgctttaatttgcagaatggaataaatgccacgtatgcaaggaaatacct

SEQ ID NO: 87692 - DNA, 1441 bp, Zea Mays
tgagaacatcgcctcctatcctagagccctagccctatcctccatctgaccatcctctctctcccaccccagccgtcgccgccaccgtcatctcctgcccttcggtgaccccgcccttcggtgaccccgcccttccaccgcggaccctacagcctacatccactatccgcaggacccccacgccatgacccgcccagttgtctccttccccatgccaaacccaaacctcaaccccaacccgaacgctaaccccaacgccgtcgccccgggccccaaccccggcgcgcgcctcatgcagctgctcgggaactccgggccgacacagttcgagaccgccgtctccaagccgccgcccacatcagagttcgcacaactgcaatcgctcccagcgatgccatccgtgccgccggccaggatgctgagcagcaaggtgcccagggggcggttacttggcaccagggaacgagcggtgcacgatgttgactcgaggctgcccggggaagggcagccaccacagctggaggtgacaccgattaccaagtacacatcggatcccgggctcgtgctaggcagacagatcgctgtgaaccggtcgtgtatgggctcaagctcggtaacatccgtgtgctgaacatcaacaccgcactccgttcactcctccgtggtcacacacagggaggctcgattcatttaacaggaaggtctgcgcattcacctccttccgcgccgtcaatggaagccagatctccaaacacgcggtcctcgcaacgtcgatcgaatccaatccaatccacagcaaacaatggcgtccaacggcagcgacgtggtgatgatgtacgggacacggcgctgttggagccgtccaagcagcccaagtcagcgactttctccgtcaaggtatcataattcatggattccaaatctgagacggatgttgatgttgactataacagcttgtactcaaagcagggctttctacagggcagggcggtacatggcgatgcttatggcgtcgatgtcagacatcgagacaacaaaacggggcagcatgtgggaactggatcagaaccttgatcagcccaaggacaaggatgaatatttttcagattcttacagcttcttctattttaggtacatcgccatttatgtttttgttgtcttgcaagctaatgataatggtcaagttatgaagagtgcatacagaagcgtaatgttctacattggacaaaaggaactggagatgcagtacaagatgaacagaattgttggtcaatgtaggaaaaaatctgaacttatgcaggcgaaatttactgagaaactggaagaagtacatactgcataccagaagatggcgaaaagatgtcagttgttggagcaagagaatgaaaacttgaacagagataagcacgagctgcaagaaaaatttgctgagaccatctga

SEQ ID NO: 87693 - DNA, 782 bp, Zea Mays
gcctaacatgtttaagtagcactattatgcaatgcaaccaatcttagaacataaatgggaaacttgttaaagcataacagtggcattacttttgtgacctgtgtccaaatttaatgcttaaggagttcggtagatatcttgctttttcttaaatatgatgaaaatcagttatgaagagtgcatacagaagcgtaatgttctacattggacaaaaggaactggagatgcagtacaagatgaacagaattgttggtcaatgtaggaaaaaatctgaacttatgcaggcgaaatttactgagaaactggaagaagtacatactgcataccagaagatggcgaaaagatgtcagttgttggagcaagagaatgaaaacttgaacagagataagcacgagctgcaagaaaaatttgctgagaccatctgagacaagggcagagagatgagggctggggtccaccgctaaggcaacgtcactgcacctctggtccctttgatctgtccaccgggtctcctgcccatgccgtggctcctccggctgatatcaggcccagacagcagacacagtcagtcttctgagctagactgaacaatccatcaagcaccctgcgaaacctcataatctcacctgtcaagccgtggctattgtgttgttgcagcggcagccgaagcagtagccagctgaacatgctgacatgttattgcgagtggtcaaggctcaggattcagagcagaagatgcacataaatactggtgaatgatgccatcgacgatgatgaattga

SEQ ID NO: 87694 - DNA, 1574 bp, Zea Mays
ccagtccataccctccaactctctctccccctcctcagtcctctctcacacacacactcactctcgtcaccgaagactagcaaggctagctactagctcgtactggaactagctcgtttcaaggaacttgccgcgtgccaattgcataagtacgtcgtacggttaggcctccctcagttatctcttgtacgttgtgttcgcgatggcgtcggagtgggaaatggccatgggggtggagctcggcatgggaatgggcacgtaccactaccaccacaacgcctccagcatcaccaccgcgccgatgagcagccaccacagcggcggcgccagctactccacgccgcaccaccaccactactatgggatgccgcccacgggcggcgccggcgacgccatgcgcgtggacgaccttctcgacctctccaccggcgccggcgccggcgcccacgagttcttccccaccgcgcctgcgcccgcgaccactgacaaggggcaccaccacccgggagccatgggtgagccgtcacccaccgccgccaactcgtcggatcaccagacgtcgctcctctccttcgccgatgagttctacatacccagcgaggaagctgccgagctggagtggctatccaagttcgtggacgactcctactcggacatgcccaattactcgtcggcggccgcgcacgccgcaatggcggcggcggcagcaggcaacggaggaggcggcacctcggccggccaagacagctgcgtcaccgcggcgccagctggccgcggcgcgcgtagcaagcggtcctcccgcgcgcccgcggcggcggcgtggcactccctcgtgtcgcgcccaccgtcgcagccgtcgccatcctcgtcgtcctgctcgtcttcggacttcccgtcgtcgtccaacaggccagcgcgcggcaggaagagcccggggcccggcggggacgcggtggcgggctcggacggcggcgtgcggcggtgcacgcactgcgcgtcggagaagacgccgcagtggaggacggggccgctgggccccaagaccctgtgcaacgcgtgcggcgtgcgcttcaagtccgggcggctcgtgcccgagtaccgccctgcggccagccccaccttcgtgctcacgcagcactccaactcgcaccgcaaggtcatggagctgcgccgccagaaggagctcatcctcatccgcggaagccaccgcgacgccgccgcggctgcaggagcaggatccgccgggccgaggccggagctcatgttccgcgactacggcgtgtgttagttagctgcggcactgaggaagctcgatcgcgtcgtgcttgtgcattgcatgcgtgggagcttctttagatccgcctcttgcgaaattctgccgcgtttcttttcctcctttctttcccttccgatccctgcgtattccagacattttcgttttttcttttgttaattattacattgttggtacgacctacctcctccctgcttcttctaagttctaatgagagagcaatgaattctgttggtacaaattgtggtcgttttgtgagtaatcatgctcctaaacccat

SEQ ID NO: 87695 - DNA, 283 bp, Zea Mays
ctgtgctacgaggatgttgtcagcaatcgcacggtgaggcgctgttgttccgtatcgttctgttgaggctaaaacacactcctcattttcctgaccagcttgttgttcctgtcttcggatgctcatggatgttctggattttctcagattgccaaagaggaagctgttcagtcgacatgtgaaaatccacacaaaacaattgtgcgatcatatagataactgggcagatgttactgattttttgaagggcacaccgttcgagagctttttgaatggctcaaga

SEQ ID NO: 87696 - DNA, 822 bp, Zea Mays
atgaaccagtgcgtgccgagctgggatctggtggacgacccgacggcggcggtagctggcggcggaggcggcctaaaccatcaggtctcgacgaccgggggcgcgcaccggggcctgctcctgcaggcgtcagctggaggagcaggcggcgggggcgcgttcgctcccgtcgtcgtgcccatgtcgaaccagtactacgaggtggcggagctgacgtgggagaagggcaacatctcctcccacggcctgctcaaccgcccggcgcacaataagtacccgcccgccgcggcgccgtcgtcggctcagctgcatgccatagcaggaggaggcggccgcggcggcgggtcgccatccggggaccgcgagacgctcgaggcggtggtcggcgaggcggccgcgcggtcgcacttcctctcgcagccggcgccgccgtggctgatcggcgccgacgccgtggcgcgggccgcggcggacgcgctagtgccgtgcgccgcaagggcgggcgagtccgctgcagacggcggagaagcgggcgcctcgaggaggaagcggccgcgcgtggtcggcgacgacagtctggtggtgtgcgccagccaggggagcaccgcgcctcgccgccgcggcgagagcgcgctgctcacgcagctggacgcctgcggcaccgaggccgacgacgtgtgcggcttcagaacgaccacaaccaacaactccacgtccatggaccgtgacgacaaaggctccccggatactgagaacaccagcatcggcggaggggccagtgattcgcgctgtttcagccgtcgctcacaggcaagcagctaa

SEQ ID NO: 87697 - DNA, 676 bp, Zea Mays
atgctggacgaggtgatcgactacctgaagcagctgcaggcgcaggtgcagctgatgagccggatgggaagcatgatgatgcccatggcgatgccgcagctccagatgtcgatgatggcccagatggcacagatggcgcagatggcgcagatggcccagatgaacatgggctccctcggccagccgggctacgcaggcctcacgccgcccatgatgcacccgccccccttcgtccccgtgtcctgggacaccaccgccaccgccaccacctccctcgccccgcaggccggcagcggcacggtgccagcggacgccttctccgccttcctagcttgccaagcgcagcagaacgggcagcaaccgggtagcatggaggcgtacaatagaatggtggcgctgtaccagaagatgaaccaaacgcagcagagcgcgcccagcaacccgtccaagcagtgagcatgacattctttcctctcaattgatgaggcctggaactgtgtaacagaggtgtgaaacccgtcgacgcggtacctgtagcatcatgtatttgttttggttcttgaccactctatccttgtatataaggagaccagacgttgcgcaaccgttgagcggagaccaactccagcagactctctctccgtatccgtatttaggacggccaacagtttctctc

SEQ ID NO: 87698 - DNA, 552 bp, Zea Mays
atgctggacgaggtgatcgactacctgaagcagctgcaggcgcaggtgcagctgatgagccggatgggaagcatgatgatgcccatggcgatgccgcagctccagatgtcgatgatggcccagatggcacagatggcgcagatggcgcagatggcccagatgaacatgggctccctcggccagccgggctacgcaggcctcacgccgcccatgatgcacccgccccccttcgtccccgtgtcctgggacaccaccgccaccgccaccacctccctcgccccgcaggccggcagcggcacggtgccagcggacgccttctccgccttcctagcttgccaagcgcagcagaacgggcagttttgtttagatttttttggctcattttatcgcatttgttcagattctttcctctcaattgatgaggcctggaactgtgtaacagagtctatgacagctggggcccgcgagcaggaggtggcgcatgcagtcttctgcagagaggagagagaaatcgtggaaaaagggagtgcagggaaccgtttgtctgcctag

SEQ ID NO: 87699 - DNA, 1520 bp, Zea Mays
agaaaggttaaatgaatattaatatcacaaataaataacataattaatatacggcatatggagtttcctccccatatggcaccggacatgggatgggagatgtgggggtgtggtgtgcctatgggagttttctccccgtcagctcagcgatgctgaatgctcaagccaaccgtcgacattccatgtcattgtcacagaagaaaacattagtgacgaaagaacaattaacatgcagaagcctcaaccctgcacaggggtgtgaacagggtagctcagctccgggaaacaggaaatggtgtttatacattacaatatacttttcgattaatcaccgatcggaatggagaagaagaagatgatgatgatatagagattataaagcaacagtgggcgggagagcgtacattgtacgcctgcctcctccattttcccacacggctttgttggttttttcccccttgccggcttgcaatcagggttgcaacgactcaaaggaccatgacaacggtaacgatacggatgaccaagagacgcctcaacctttccaaggacgacggcggcggcggcaaccagccgttccgttccgccgtagtatttggtagcagaagcagtagtctagtgggtggtggtggtagtagtggtgggtggtggtgaccgagcggcccgagggcgcaaaccagctagctagctgtactggacgaaggagcggtagaaggtgttgggcctccagttggccgggatgacgttcctggcgacgagcgtcttgccggactcgttgcggatgcggatggagaagggcggctgcatgcggtggttggtgtccatgcgccagatggagccccaggactcgcgcatcggcgcccaccgccccgtcggcggcccgcgcgccgtcttggactccatcaggtccacctgcaccacgtcgccgtcgccgtcctcgtactccaccagcaccgcgaagtagacggggctcgagtactcctccacgtggaacccgatcttgaggccagggaactcgcacggcaccctgcaaacgaaatttatttttttagtagtagtagcggtagcacagaaccgaatcgatgcaaagaaagagctttgctgcgtctatctaatctgcaagtgttgctcagccagcctctaaatctactgccgaaggagggctggtactatacaagagaaagcggaaggagggctggcgttcggtcaccgccggtggcgtgttgcgttgcaaccgtggatgcacgcagcagatacgttgggggctgcaaaaggggttgcgcccactagtagccaaaaatgagcatgttcgggggccggccgctgtgcaataaaagtggcctttggcaggtgcgccactttgccgcacatgcagtgtccggcgagcggagcggttgggcagatgatgccgcctccgctctctctactacctccaaattcaacagtaggtattgaagaaactagtactgtactgctgtcatacggtacggaaactgaacacacaaaacaaatgaaatcga

SEQ ID NO: 87700 - DNA, 1416 bp, Zea Mays
ccggctgtgcacgaatctcccgttactaacactgcatatactaccttcacaatgcaaagtgaaggtcctagcaactcttgataatgcacaccgtgcgatatataactgccaagcggccgttaccccctttttttattaattagttctccgtttctcgcatgatttgctccgtagccatgtgacccctacctaaggccaaagcaccacgtcggcgggcgcaagcgcaacggccgttgatggcgaccgcggcgggcgcgctcgctgccatccttggagattcgtttccggtctataaatacccgggcaaggtggtctttccagatcatcgaaacacacacaactcctcttgtcggccaaagtagctctactagcagctagcaactatggcgtcctcctccttctccaaggtgctcgcacttggtgcgctcatcttctccctccttgtcacgtatggctcgtgcgctagaccggccaacttcaccgcctccgacttcaccgccgatcccaactgggaggctgccagagccacctggtacggcgcgcccaccggcgctggccctgacgacgacggtggtgcctgcgggttcaagaacgtgaacctgccgcccttctccgcgatgacgtcgtgcggcaaccagcccctgttcaaagacggcaagggatgcggctcctgctaccagatacggtgccagaaccaccctgcctgctccggcaacccagagacggtgatcatcactgacatgaactactacccggtcgccaagtaccacttcgacctcagcggcacggcttttggcgccatggccaagcccggacgcaacgacgagctccgccacgccggcatcattgacatccagttcaagagagtgccctgcaactaccccgggcagaaggtgacgttccacgtcgaggagggctccaacgccgtctacttggcggtgctggtcgagttcgaggacggcgacggcgacgtggtgcgggtggacctcatggaggccaactccggctactggacgccgatgcgcgagtcctggggatccatctggaggctggacgccaaccataggctgcaggcgcccttctcgctgcgcatcaccaacgagtccggcaggacgctggtggccaatcgggtcatcccggccaactgggcgcccaacacctattaccgctccatcattcaatattaagctctgctactgcgctctgattccctgtccattgccttattcgttggaactgtatgtaattgtatcttctcggtgcatatgattgcggcgtgcctcaactaggtagtcagtgagacggacgtcaaggttgacatagtaggagatgcattcccgctcattttgtcaatgtatgaatcagtgtgaccaaggctatatataaattataagcagcttctcaatggcattcagt

SEQ ID NO: 87701 - DNA, 1228 bp, Zea Mays
cggccgactataaatacacaggcaatctcgtccctttcgaccatctaaattaacacaagcagtcaaacgcatgcacacacaaggttgttgttagcaattttctgctgctgctatacatacacgagctgcgcgcgatggccgccctggcagctgcacttgttgcgctcctcgccgtgcttgctgtcgcgcatcctgtcgccgtcgcacaatcggtggcgaaccgcacctccgccgtccgccagctccgcggtagctccagcgaaggcggttggctggcggccaaggccacctggtatggcgcgcccaacggcgccggccccgacgacaacggcggcgcgtgcgggttcaagaacaccaaccggtacccgttcatgtccatgacgtcgtgcggcaaccagcccctgttccaggacggccagggctgcggcgcatgctaccaggtaaggtgcaccgccaagaacaacccggcctgctccggcgaggtcaggacggtgatgatcacggacaagaactactacccggtggccaagtaccacttcgacctcagcggcacggcgttcggctccatggcgaggcccggtctcaacgacaggctccgccacgccggcatcatcgacatccagttcaggagggtggcctgcaaccacccggggctgaccctcaacttccacgtggaggcgggctccaaccctaactacctggcggtgctggtggagtacgccaacaaggccggcaccgtggcgcagatggacgcgatggagtccagctcgggccactggatgcctatgcgccgctcgtgggggtccgtttggcggctggactctgcccgcccgctcaagggccccttctccatgcgcgtccgcagcgagtccggcgggacgctggtggccaacaatattattccggcaaactggaggcccaacaccgactaccgctccaacgtccagttcacttgaccgcgtaatttaatctcaggacatgtttagaagcaacttagtttttaaaaaatcagtttttatttttcttagctaagagagatcagcttcttagtttttaagaaactgtgaatccaatttttataaactgagacataaactgatatgtttggaacatttctataaattagtttcttaaaaattggatggtttcaaataagcccttaatcagtcactgctatagttctcatatgtaacgtgattacgcctatttataaggggttttttgtgtg

SEQ ID NO: 87702 - DNA, 4837 bp, Zea Mays
gggatagcttagtgaagtttgagatgtaattcacagcaattttttcgatcaaaaggctgggaaaaactgttgggccaaacaaaacccgcccaaaacctgtatttttattgtaaaaagaaaaaaaacaaacaaagaaaccctcacgattcactaggaattcttccagatccagcccttggctcgcagtacaccacaccacgcccagatctcaacgtgccccttctctcagatctcaattcccaaatgccctcgccgtcgtagctgcaccccgaccccgcgcgctcgctcggatccatgggcggggtcagggcagcatcgccatcaggcgcaggatccggagccgtcgcgggggcgggatccgatcacggggcgccgcgactggctatggcgtgtgtgctagcgtcagaggccgccacggtgctcgctgtcatgcgccgcaacgtccgctgggctggcgtccgctacggcggcggcgacggtggcgcgggcgacgacgagcaccttgaccacccgctcgttgcggggctcaaggttctccgccgccgcgctgccgcttggggccagggtagttgggcgggcgttgagccgctcctctacctccgacccttcctcgatatcgtctgctccgacgagactggggcgcccatcacgggtgctgcgctctcgtcgttgcacaagatcctcacccttgatgtcgtcgggcccggcgcaccaggcgccgccggggccatggccgccgtcgtcgacgccgtcacggcttgccgctttgaagtcaccgacccggcgtccgaggaggccgtcctggcaagggtcctgcaagtgctgctagcctgcgtgcgcagccgtgcagcaccggcgcttgccaaccgccacgtctgcacgatcgtcaacacatgtttccgcgtcgtgcagcaggctggaaccaagggggagctactgcagcgtgtctcccgccagacaatgcaggaggttatacgaactgtctttgcccgcctgccggacatcaatgtcaccttgttgtccgacgagcaggttgctggttgcaagaacccatgtttgggtgctgaggagactgagaacgggaagagtgactacgtatgtttgaacagctctggcgatgaagtgggagacggttctggtgttatgcaagacaaagacttgatggagccctttggggttccttgtatggtagagatattgcaattcttgtgctccctcttgaacatagcagaagacattgagttgaacccaaggatgagtccaattgactttgatgaggatgtgccgctctttgctctggggttgattaattcggctattgagttttcggcttcgtctatacacagacatcaaaaacttttagcatttgtacaggatgaattgttccgcaatctaatgcattttggcttgtcaatgagccctctgatcctgtcgactgtgtgcagcattgtttttactctcttttaccatctgcgccatgaacttaagctgcaaatagaggctttcttctcatgtgttatcctaagattagcacagagtagatatggagcaagttatcagcagcaagaagttgccctagaggctctaattgatttttgctggcagaaagagtttatggctgagatgtatgcaaatatggactgtgatctacagtgctcaaatatttttgaagagttagctaaccttctgtctaagagcgcatttcctgtgaatagtcctttgtcagctttaaatgtgcttgctttggatggtttggttgctgtcattcaggcaatggcacagcggactgataatgcacctcaacatcatgatcaaacagttccagaaataagtgaatattttcctttctggcagttgaaatgtgagagcagtaatgatcctgaccagtgggttaaatttgttcaccagcaaaaaagcatcaagacaaagctaatgattggcgttgaacattttaatagggacaaaaagaagggttttgagtacctacaagctgttcatcttttgcctgaaaaacttgatccacacaatgttgctctgttcttcaggtacacacctggattggacaagaatcttcttggggactacctgggtaatcatgatgagttctctatccaggtccttcatgaatttgctagaacctttgacttcaaggatatgaatttggatgctgccttaaggctcttcttggaaactttccggttacctggtgagtcacagaagatacagagaattcttgaggccttttctgagcgatattatgaacagtcaccacaaatgtttgttaatagagatgcagctctggtgttatcatattctgtaatcatgctcaatactgatcagcacaatgtaagggttaagaagaagatgactgaggaagactttattaggaacaatcgccgtataaatggaggaaatgatctgccaagagaatttttgtcagagctttattattctatttgccggaatgagatcagaactattcctgagcaaggagctgggtgttctgagatgtctttcagtcgctgggttgatctaatgtggaggtcaaagagaacatcattgtacattgcttgtgactcctacccttttcttgatcatgacatgttttcccttatggccggaccaacagttgctgccgtgtctgtggtttttgacaatgttgagcatgaagaggttcttacaggatgcattgatggttttctatcggtggcgaaactggctgcattctatcatcttgatgatgttctgaatgatcttgttgtggcactatctaaattcactactttgttgaacacttcctacattgatgatcctgtaatagctttcggggaggataccaaagctaggatggcaacagaagctgttttcactatagcaactgcttatggtgatcacatacgcagtggatggaggaacataatagattgtattttaagattgcataagataggacttcttcctggtcgcctcactggcgatacaactgatgatcaggaatcctcttcagattcattacctggcaaacatacttcatcagctcctcaagttttgccaattagcactcctcggaaaacttatggactgatggggaggttcagccaactactgtacttagatgctgacgaaccaaggtcccgaccaactgaggagcaacttgctgctcagaggaatgcttcagagactgtaaagaagtgccaaataggtatcatcttcactgagagcaaattcttgcaagctgattcactctcaaatctggcaagagctctcattcaggcagcaggcagacctcagaaaatcaccagctcacttgatgatgaaggcgtagctgccttgtgcttagagcttctaattactgtcacattaaacaacagagacaggattgttcttttgtggcaggatgtttttgagcacataacccatattgtccagtgcacggtgatgccctgcaacctagtggagaaggctgtttttgggctcctgcacatatgtcagaggttgcttccctataaggcgaacttggtagatgatttgctgaggtcattgcagctgattctaaaacttgatgcccgtgtagctgatgcttactgtgagaacattaccttggaggtcacacgtcttgtcaaggccaatgcgacccatatcaaatcccagatgggctggcggactatcatttccttgctctgcatcaccgcacgccatcctgatgcttctgatgcaggatttgaagccctggtttttatcatgtcagaaggtgtgcacctctcacctgccaacttcatcctttcagtggaggcatcaaggcagtttgcagaatctcggcttgggtctgcagaaagatctatccatgctttgaacctaatggcagactcagttaattgtcttgtgcgatggtcacaagaggttagagaagctggtggagaggcagatagaatattggaaggaattgcagagatgtggctgcggctggtgcaggctctacgcaaggtgtgcatggatcaaagagaagaagtgaggaaccatgcattgttatcgttgcatagatgcttggtagttgatggaatatcagttaagtcttcaacatggttgatggcatttgacattattttccagttgcttgacgaactgttggagattgctcagagctactcaccaaaggatttcagaaacatggaggtatctctcttgcatgctgtaaaactgttatgcaaggtgttcttgcagtcacttaaagacctctcaggacagcacagttttgataagctgtggttggaggttcttgacatgatagagaagttcatgaaagtcaaattgagaggcaggaggacagagaagctacaagaggctattccggagttagtcaagaacatactaatgatgatgaaagctagtgggatcctgtcaaaaacaggtgccagtgaaaacagtttctgggaagcaacatggcttcaagttaacaagattgcaccctctctacaattagaaatttttcctgacaatgaggatggcagcacaactcaagttgaagaaaacaaattggatacacaagtgcaatctgaccagaacaatgatcgataggacattatactttctcccatcctatcaagttagttgcagctggaacctttcaactttttgttccaaaaccatacacagatgcttggcagttctgtatgtgccattaggaagagtaagatggtatattgtaattttcttagtttacatatataattttgttgttgacaaggttgttgctttgtgctttactgttgcaacaccgaagttgtatgatatatatactgtgttactggcctgggagaatcaaagcttttggctgttt

SEQ ID NO: 87703 - DNA, 636 bp, Zea Mays
ttagagaaacaatccggctagaaatagtttcgaccctccaatctgatacaaacgaacaaggactcagtgtcctaaactaagggtctatttcgcagagctccagctcctcataaaaaggctccatctccggctcctctacggaagtaacttctttataggacaaactgtttagcaaaacaactccttcccctttagacatttccacgatcaccttatgcacgtatcccgcgacgcgcctgcaatgagccatgaccgccgccctgtcccaggcctccgcgttccttgacagcgcctttgcgacaacatcaccttcatgcagcacggctacgcgcgggagctagaatgcgcgtcttcttaatggccacactcctactgcctccctcacgtacaaggccagtcttgtgcaccatcgggatggagctgcctatgtccgtggcttcttgctacccttctccacgccgcccccgttgctgtcggcgtcgagatgtgacccgccgctgccgccgagatcttcacgaagcacagcccccatccgcatgtagctgtcagtggcaaaaagcacgagagcgatgcggagccgttgggagccggttttccttagctccggctctcaacactcaaaacagctctagagcc

SEQ ID NO: 87704 - DNA, 525 bp, Zea Mays
aaagggccctgcggcgacgaagtgctccgttctccgttcagtaatcgacatcccaattccctacctacgaatcccccgctccacaccgtcgccgccgtcgaaatgtcggcgatgggatacgaccagggcctgtctacccacggcgcctcctggccgcagcgatccgactacgatccatactcctacgcttactcccaccacatcgtcgctgccgccgcctcctaccaccagccgcccccaccgggaacagagcatgctgctcccacatccgccgcctcgtcatggtcgtccgcagcaggagcatcgaacaacgtcgtagtgggcgggccaggcgcgaaccctctaaccgtttccgcactgtcacagccgaccatcttcgccgcctcgatcgggtggtccgggcacggtgtaggacaccttccgtactacgacccgcagtacccgccggcgcagcatcccacagcggtattcacacacctcgctggcgtctttgtatttaatgctgtgtacaaatgtcatcagtag

SEQ ID NO: 87705 - DNA, 264 bp, Zea Mays
aaatatatctttcttggcgcggctacaacctgttggtctctttggttacacaggaatgatatcgtattggaaaagaaaaataattattctccattgcagatcatttattccattgcacattagcttggaacatgtgctattttacagaagacggagttgcggtctatggttgttaaggctaagcagtatttgatgccggtggccatggactttttccccgatctcatgggtggtggtctaatctacggattgattaccattaga

SEQ ID NO: 87706 - DNA, 1962 bp, Zea Mays
attggagcaggcccgtcgaccgtcggtcgcacttcccagtgctccgagccgtcacgccaccaatccccgaccagagtccaaattacttcccgctccgaattccgatgccgcgcacggtggccgtggtcggcgcgggcgctgcagggctggtggccgcgcgccagctgctccgcgagggcctcgacgtcgcggtcttcgagaagtcggggcgcgcggggggcacctgggcgtacgaccctcgcgcagacgccgacccgctgagccgcgacccgggctcccccagcgctgtgcacggaagcctctacgcgtcgctgcgcacaaacctgacgcgcgacctcatgggcttctcggacttcccgatggccggctgggtgttcgcgggcgacgcgcgcgcgttcccgggccaccaggaggtgctcgcgttcctcgacgccttcgcggaagagtgcggcgtcgccgcccgcgtcaggctccgctccgaggtgctgcgcgtggcgggggcgcccctcggccagcgggggcgcccctcggccagcgggagcggtgggcggtctcgtggcgccgcgaggacggcgaggtggcggaggaggtgttcgacgccgtcgtggtctgcaacggccactgtacggtgcccagggtgcccggcattcgaggtgcctgccatctcctagtttccctcttttgtttctcatccaatacaatggagtttcgaggtgcccggcatccaatgcttgtgtcacaggaattgacaattggagcgggaagcagattcacagccacaattatcgcacccctgaaccgtttcgggatcaggtatttctctcctctgcctattcgattccagcactccaaaagattcctcatcagtaacgttgtgccacccactcacaaattttccacaagagccacagaacgttgtcgttgtaggattctcgaccagtggaatcgacattgcttcagagatctcacgtctcgccaaggaagtgcacgtagcagacaggtactccagggacaggctgggaaagatggcgctgtaccagaatgtctggattcacgcagaggtggactgcatccaggatgacggcaaagtccgctttgctgaaggttccgtggtggatgcggacgttattctttactgcacagggtatcgctaccatttcccgtttctcgacctggatgggctcaccgtcgacgacaaccgtgtcgggccactgtacaagcacgtcttccccccaaagtacgcgccgaacctgtcattcgttggtctaccagtcaagaccatcgtcttccaggagctggagcaggaagccaagtgggtcgcggccgtgctgtcggggcgggccacgctgccaagcgaggaggacatgatggcgtccgtgaggagccattaccagctgatggaggaggccgggaggccgaagcgccacacgcacgcactggcagctcagtgggcagagcacatgaactggctcgcggaccaggtcggcgagcctccagtggagccgtggaagtgcgaggtgttcgataaggtacttgcgagcatcttggcgctcgacgaggcctaccgagatcgctgggaacaagaggaggacggtggctccagtgggcatcaggaaggcattaggatcagagcgagctccatcatgtaacggaacctgaacggttgcggcaacctgacgccgtcgtatcctgattttactctcgtgatacttcacttcgttgtgatcttcactgaaacaatttgccaccatacaacgggaataaaaaaactatttagggcttgttcggttagctctcaatccatatgaattgagtgggattggatgtgtttgaatcccgaataagtcaaacttattcttaattttttccaatctcatccaatccatgtgtatagggaataaccaaacaagaccttattatttttgtttaggagtgaataaaaccgtgtttgcaatggcctta

SEQ ID NO: 87707 - DNA, 1827 bp, Zea Mays
agtgctccgagccgtcacgccaccaatccccgaccagagtccaaattacttcccgctccgaattccgatgccgcgcacggtggccgtggtcggcgcgggcgctgcagggctggtggccgcgcgccagctgctccgcgagggcctcgacgtcgcggtcttcgagaagtcggggcgcgcggggggcacctgggcgtacgaccctcgcgcagacgccgacccgctgagccgcgacccgggctcccccagcgctgtgcacggaagcctctacgcgtcgctgcgcacaaacctgacgcgcgacctcatgggcttctcggacttcccgatggccggctgggtgttcgcgggcgacgcgcgcgcgttcccgggccaccaggaggtgctcgcgttcctcgacgccttcgcggaagagtgcggcgtcgccgcccgcgtcaggctccgctccgaggtgctgcgcgtggcgggggcgcccctcggccagcgggggcgcccctcggccagcgggagcggtgggcggtctcgtggcgccgcgaggacggcgaggtggcggaggaggtgttcgacgccgtcgtggtctgcaacggccactgtacggtgcccagggtgcccggcattcgaggtgcctgccatctcctagtttccctcttttgtttctcatccaatacaatggagtttcgaggtgcccggcatccaatgcttgtgtcacaggaattgacaattggagcgggaagcagattcacagccacaattatcgcacccctgaaccgtttcgggatcagaacgttgtcgttgtaggattctcgaccagtggaatcgacattgcttcagagatctcacgtctcgccaaggaagtgcacgtagcagacaggtactccagggacaggctgggaaagatggcgctgtaccagaatgtctggattcacgcagaggtggactgcatccaggatgacggcaaagtccgctttgctgaaggttccgtggtggatgcggacgttattctttactgcacagggtatcgctaccatttcccgtttctcgacctggatgggctcaccgtcgacgacaaccgtgtcgggccactgtacaagcacgtcttccccccaaagtacgcgccgaacctgtcattcgttggtctaccagtcaagaccatcgtcttccaggagctggagcaggaagccaagtgggtcgcggccgtgctgtcggggcgggccacgctgccaagcgaggaggacatgatggcgtccgtgaggagccattaccagctgatggaggaggccgggaggccgaagcgccacacgcacgcactggcagctcagtgggcagagcacatgaactggctcgcggaccaggtcggcgagcctccagtggagccgtggaagtgcgaggtgttcgataaggtacttgcgagcatcttggcgctcgacgaggcctaccgagatcgctgggaacaagaggaggacggtggctccagtgggcatcaggaaggcattaggatcagagcgagctccatcatgtaacggaacctgaacggttgcggcaacctgacgccgtcgtatcctgattttactctcgtgatacttcacttcgttgtgatcttcactgaaacaatttgccaccatacaacgggaataaaaaaactatttagggcttgttcggttagctctcaatccatatgaattgagtgggattggatgtgtttgaatcccgaataagtcaaacttattcttaattttttccaatctcatccaatccatgtgtatagggaataaccaaacaagaccttattatttttgtttaggagtgaataaaaccgtgtttgcaatggcctta

SEQ ID NO: 87708 - DNA, 1526 bp, Zea Mays
cgtcacgccaccaatccccgaccagagtccaaattacttcccgctccgaattccgatgccgcgcacggtggccgtggtcggcgcgggcgctgcagggctggtggccgcgcgccagctgctccgcgagggcctcgacgtcgcggtcttcgagaagtcggggcgcgcggggggcacctgggcgtacgaccctcgcgcagacgccgacccgctgagccgcgacccgggctcccccagcgctgtgcacggaagcctctacgcgtcgctgcgcacaaacctgacgcgcgacctcatgggcttctcggacttcccgatggccggctgggtgttcgcgggcgacgcgcgcgcgttcccgggccaccaggaggtgctcgcgttcctcgacgccttcgcggaagagtgcggcgtcgccgcccgcgtcaggctccgctccgaggtgctgcgcgtggcgggggcgcccctcggccagcgggggcgcccctcggccagcgggagcggtgggcggtctcgtggcgccgcgaggacggcgaggtggcggaggaggtgttcgacgccgtcgtggtctgcaacggccactgtacggtgcccagggtgcccggcattcgaggaattgacaattggagcgggaagcagattcacagccacaattatcgcacccctgaaccgtttcgggatcagaacgttgtcgttgtaggattctcgaccagtggaatcgacattgcttcagagatctcacgtctcgccaaggaagtgcacgtagcagacaggtactccagggacaggctgggaaagatggcgctgtaccagaatgtctggattcacgcagaggtggactgcatccaggatgacggcaaagtccgctttgctgaaggttccgtggtggatgcggacgttattctttactgcacagggtatcgctaccatttcccgtttctcgacctggatgggctcaccgtcgacgacaaccgtgtcgggccactgtacaagcacgtcttccccccaaagtacgcgccgaacctgtcattcgttggtctaccagtcaagaccatcgtcttccaggagctggagcaggaagccaagtgggtcgcggccgtgctgtcggggcgggccacgctgccaagcgaggaggacatgatggcgtccgtgaggagccattaccagctgatggaggaggccgggaggccgaagcgccacacgcacgcactggcagctcagtgggcagagcacatgaactggctcgcggaccaggtcggcgagcctccagtggagccgtggaagtgcgaggtgttcgataaggtacttgcgagcatcttggcgctcgacgaggcctaccgagatcgctgggaacaagaggaggacggtggctccagtgggcatcaggaaggcattaggatcagagcgagctccatcatgtaacggaacctgaacggttgcggcaacctgacgccgtcgtatcctgattttactctcgtgatacttcacttcgttgtgatcttcactgaaacaatttgccaccatacaacgggaat

SEQ ID NO: 87709 - DNA, 1497 bp, Zea Mays
atgccgcgcacggtggccgtggtcggcgcgggcgctgcagggctggtggccgcgcgccagctgctccgcgagggcctcgacgtcgcggtcttcgagaagtcggggcgcgcggggggcacctgggcgtacgaccctcgcgcagacgccgacccgctgagccgcgacccgggctcccccagcgctgtgcacggaagcctctacgcgtcgctgcgcacaaacctgacgcgcgacctcatgggcttctcggacttcccgatggccggctgggtgttcgcgggcgacgcgcgcgcgttcccgggccaccaggaggtgctcgcgttcctcgacgccttcgcggaagagtgcggcgtcgccgcccgcgtcaggctccgctccgaggtgctgcgcgtgcgggagcggtgggcggtctcgtggcgccgcgaggacggcgaggtggcggaggaggtgttcgacgccgtcgtggtctgcaacggccactgtacggtgcccagggtgcccggcattcgaggaattgacaattggagcgggaagcagattcacagccacaattatcgcacccctgaaccgtttcgggatcagcactccaaaagattcctcatcagtaacgttgtgccacccactcacaaattttccacaagagccacagaacgttgtcgttgtaggattctcgaccagtggaatcgacattgcttcagagatctcacgtctcgccaaggaagtgcacgtagcagacaggtactccagggacaggctgggaaagatggcgctgtaccagaatgtctggattcacgcagaggtggactgcatccaggatgacggcaaagtccgctttgctgaaggttccgtggtggatgcggacgttattctttactgcacagggtatcgctaccatttcccgtttctcgacctggatgggctcaccgtcgacgacaaccgtgtcgggccactgtacaagcacgtcttccccccaaagtacgcgccgaacctgtcattcgttggtctaccagtcaagaccatcgtcttccaggagctggagcaggaagccaagtgggtcgcggccgtgctgtcggggcgggccacgctgccaagcgaggaggacatgatggcgtccgtgaggagccattaccagctgatggaggaggccgggaggccgaagcgccacacgcacgcactggcagctcagtgggcagagcacatgaactggctcgcggaccaggtcggcgagcctccagtggagccgtggaagtgcgaggtgttcgataaggtacttgcgagcatcttggcgctcgacgaggcctaccgagatcgctgggaacaagaggaggacggtggctccagtgggcatcaggaaggcattaggatcagagcgagctccatcatgtaacggaacctgaacggttgcggcaacctgacgccgtcgtatcctgattttactctcgtgatacttcacttcgttgtgatcttcactgaaacaatttgccaccatacaacgggaat

SEQ ID NO: 87710 - DNA, 1011 bp, Zea Mays
gttattttcagccttatccagccaccatccgtggcttatcctcacgtacgtagctcctggaattctcaagaagccaccgtaggtctctggtgcctatctcacatcgtgcttgactccccacgttcgaaccccatgaccagcgcagctcggccagggcgctggatcccgctggccatggcgctcatccctccctgctgttagatgcacagaacgtctctagctctccatagatggcagccagctgcgccctcacctcctcccatggtgacctcgcccatggcggctccccctgctcggcgtactcccctctgcaggagctcgcccagcccctctctgctggtgaccgagccatctccctggacacaccccttcccttgctacttcctatggttgccctagccgacctctcccatggcgtaggaaacagcagcacctccctccatggacgtcctaggtcctcgccatactctccgtcgacctcgtcatcaccacggccacaacctctcttccgtcgttgtggagaccccgtcagcctcgcgtgctgtccgatccttgcgtcgcgcccagggaggttacatggaagaagaagaaaagcccagagcgatgctccccatgtgctcgacgaaaagccagaacgggagatcatctgttttttttgtggaattcgcgtcgaatttattaacgaaatattaggatgtttgggtgaagaagaaggttacgccccctgttcctcctttccatggttccccacggcagcggcaggaaacatccccacaccagacgccgagatccatgccagtggctcgatcttcctcaacgttggctgcctctccgacctcgctgtggacctgctgctcaccgccgcgtgtgcactttttcctccgagcagcagccccggatctgcgcagccccggccttattatcgacctcagtggttttagccataatcaatgatattgtgttaaagttttgtaagtatcaagaacatgataatgggagaagctaaatagg

SEQ ID NO: 87711 - DNA, 522 bp, Zea Mays
tgactagaacgtcatgtctaatgtagagttaaatatatctagttgttacacctaagaattgtgatgtcttgctttaagtctgtatcctccttagtataacttatctatcttgtgctatttatgctcctattcactcatatgcattatgcatatcatctaggtacgttaattaatcacgtgatgtgaaggacaagagctggattaatcacaagacgatgttgatggacgaagctaaagtggacggatcaaccaagtgccagaatgggagatactcaccaagtgattatcatttaacaacactaacgtagtgttatcccagggttttattccctgttgttttcaggttataattttgttctgttgtggatggtgctaagtgtcggtgggctcggccttcttatataagtatatcccatctttagcttctttattgaggattgtcacttaagctagcatgtattttaaaacttataaatgttttatacattcaaattgtaatcttttgaatcaatttctcttgta

SEQ ID NO: 87712 - DNA, 1149 bp, Zea Mays
gcaccttgctttgctttgctgatcgctgattttgcccgacctaccctacgctagtactttgaagtagtaggagctagcgagatctccatatatataaagcgaccttctttgcactcagctcgtagatccacacctgcagctgccacagcgggtggtgcttagcttaggctagcctagctgcgcctgcgcatgctcgtgaccaatggcgtccagcaaggtgccactgttcctcgtcctcaacctcctgctcttcgcggcggccaacgcctgcccttactgcccgggcaacaatggccacggtagcagcgggcaccatggcggcagtgggcatggcggcggtggcaccggcggttccggtggcggcagcgggccaggtgggggcagcagcggcggagggtacggtccgatcggtggtggtggtggcagcggcggcggaggagggtacggtccgatcggtgatggtggcagcggcggtgggatcggacccatcggaggcggcagcggggggatcggacccataggaggtggcagcggtggtgggtacggccccatcggtggcggtggcggtggaggtgggagcggtggcggtggcggtggcaacgatggcacgagcggctggtacggccattgcccgacaaacgcgctgaagctcggcgtgtgcgccaacgtgctggatctgatcaaggccaaggtcggcgtgccggtgaacgagccgtgctgcccgctgctgaacgggctcgtggagctcgaagccgccgtgtgcctctgcacggccatcaaggccaacgtgctggggctcaacctcaacatccccgtcaacctcagcctcgtcctcaacttctgcggcaagggcgtccccacgggcttcaagtgcctttaaccatgcatgcacatcatgtgtgcgtgcgtgccgtacgtacgtagtatccaagaccacgcgatgcgtgagtatgacgaagaatacgcgcgtgcgccatgcttgccggccggggatacggtgtttgtggtaatgctgttagtttcgtttcttcagtgtagtatgtagccagggcatgcatgtgtccaagtccaagttcgactttgggttgcttgtacttctccatttcataattgaaatcatatttcagatttgagttaaaaggtaattaa

SEQ ID NO: 87713 - DNA, 2025 bp, Zea Mays
gtcgaggcgggattataagccaatgtaaccgaaggatgccttaacgaataacacgattcaaaatctttccccccttgttgcctgttgtgttcttccacgttctttgccaaattccggcttccttttccatgcccaagcatctcgttatccaagaccgtgacaagcaccacggcaccagtccgcgacaagtcaaccaaacgaaccaaaggcagagctgaacgcgaaagggagggagctcggatcggatgcggcggcgcgcggaggtggccgtggtgggcgcgggcgcggcggggctggtggccgcgcgcgagctgctccgcgagggccacaccgtgtccgtcttcgagaagtcaggccgcgtggggggcacctgggcgtacagtccgcgcgcggacgcggacccgctgggcagcgacccgggcgcccccggcgccgtgcacagcagcctgtatgcgtcgctgcgcaccaacctgccgcgcgagctcatgggcttctcgggcttcccgctggccgggcgggcgttcgccggcgatccgcgcacgttcccgggccaccgggaggtcctcgcctacctcgacgccttcgccgcggattccggcgtcgccccgcacgtcaggctccgagcccaagtgctgcgggtgaggccgctctgtccgggtcggggacagggggagaagtgggcggtggcgtggcgcggggaagacggcgacgtcgcggaggaggcattcgacgccgtcgtcgtctgcaatggccactgctcggtgcctctagtgcccaagatccgaggaattaacaagtggcggggaaagcaaatgcacagccacaattaccgcaccccggaaccattccaagatcagagtgttgtagtcgtaggattgggagccagcggaatcgacatcgctagagaaatctcacacgtggccaaggaggtgcacatctcagctagatactcggagggcaggctcggaaagattgaactctatcataacgcctggatgcacagcgagatagagtgcatccaagacgacggccaggtgcgctttgccgaaggctcatctgtggctgcagacaccattctttactgcacagggtaccgctaccattttccgttcctggacctggatgggttcaccgtcgacgacaaccgcgtcgggccactgtacaagcacgtcttcccacccaagcatgcacccaatctctgtttcgttgggctgccatacaagagcatcatcttccaggcactagagctggaatccaagtgggtcgccgccgtcctgtcggggcgtgccgagctgccggtggaggaggacatgacggccgacgtggaagaggagtaccagcgcatggaggacgccgggaagccgaagcgccacacccacacgctgtggcctcggtgggtggagtacctgaactgggtggcggaccaggtcggcgaggcgcacctggagcctaggaagtgcgagatgtatgagaaggcgctcaagtgcgtctggtccctggacgagggctaccgtgatcgatgggaagaagaaagcattggcagtggctgaggctcccgaattttttgtttttgagtcctttttgtgtcaaaaatttccaattagacccccagaaaacttaaatgcaattttggacccatttctcggcgccatgagctatggcgccgagtttacacatctcggcgccatagatcttggcgccgagctacctgccgcgctgtcgtccacgagctcgaatatataaccacaaagcttgtctagctcagttggcaaagtgcaaggctcttaaccttaaggtcgtgggttcgagccccaccgtgaacatatttttttgtctttgtcactgatttgttttttattgtccagatttttttgtttatgccgctgatttgtccgtgcgttcaatattttttgtctttgttactgatttattttttattgtccagattttttttgtttatgccgctgatttgttcgtgctttttaattcgatgcttcccgcctcagactccactaattggtgcac

SEQ ID NO: 87714 - DNA, 900 bp, Zea Mays
aagcttacactaaattatgtaaacaatggttcaagtggtatcaccaatcttgaaagcacccgcttgaattcctccaattgttgcaggtccgatgataacctacaaacaatatttaaactatttactaaaaataagggacaatatgcagatgacatggagtgtgccaataacattgtcttcgatgaaccaaaagttttttataaacttgtatacatggatataatcctatatatggaaatgtattgttcggatgacaacttgtaaatgaaccatctatttttttcttaaaacagttggttaagtagtccttaccttgttattagcagacacataacaaattagttactcggcatctgattcagaaacacactaacgataatggccacaacccttattgttggacacatcaaagctgacattgaagacatagcaacactacagaaggatgcaaagttgataaatacatcagctgttgggtgtgcactgacctatagaatttacgtgggatgaactggaatagcaatttccacttgtccaaagaaaagtttctaaaaatcataagaaccaggattggttattcaagcacaggagagtcgatgtgtaccacaaaggaagtctaaatcaagcatctgttggatgggaagttgcttgtaattgtagaataatgcttgggtagttttagagaaaagttggccagttgccatgattcattgcacctgtaaaagaaatgaattatataatacactaaacaaaaaagttagtgggcagagataatacaatacaaaatcctaattaatattacttccaacagtccatgaacataactctagtgagctaccaaaatcaaactaatagtggacaatcatgcatccatcccattgcaatgaacaactataggag

SEQ ID NO: 87715 - DNA, 402 bp, Zea Mays
atgaagattgtttcttttggaactgatagtggtgctaacaaggtgcagcttgcggacaatctcaagatattcaagaccgaccactttgactccgacacctacttgcagtccaagtgctgcgccatggatgagaaggaagtaaggcacctatgttcctacctgcaagatctaaagaaggcttttgttgaagagatgtgcagaagtgttcatgcaaattatgttgtattcatcaaaacatcaaaggatatattagaccttgaaggggagctactatcagttagaaatttgccaagtacacagtcagcattaatccatggtctattcgaaggggttcagatagattcattggccacagggcctgaaggttctactgaacaagacatatccggtgctaaagattag

SEQ ID NO: 87716 - DNA, 198 bp, Zea Mays
atgaaggaagccccgatgaagttggtgacggtgttggcggcggaggcattgccgaggtgcatggtgccggtcatgtacggcaccaggttcaccgcgatgcccagcgtcgtcatccgctcgaacagctccgcgccttcaatcatggcggcgcacgcccagccgccggtggtggcgcggctagcggggcggcccttgtag

SEQ ID NO: 87717 - DNA, 169 bp, Zea Mays
gcattgtcaattaaacatatgaatcacatttatcaatttaatttgcctttatatatggtacatggatagaagtagtgtcgtttatatttacaaatcaaactccactttatatgtgtgtataagttttactccatctttcacgcctttttttagttccgaagcaccacag

SEQ ID NO: 87718 - DNA, 1108 bp, Zea Mays
gacagctccatcgattcatccaccgctatctctctctctctctctctctctctctctctctctctctttcaactgtaagggaaaccgagctcaaagtggcaaccatcaatggatattatggcgcttaatgcgagagacgaggagcagtacgggaacaaccatctcgggctcgggctgagcctcagcctcggcctcggcgtcgccaccgcggctccggtcgaggtcgagcccccgccaccgccgcggcagcagcagcagcgagctatcagcgtcgcgcccatcacctccctccccgcgccgcagtggtggaagtggaacggccccggtctcttcttcgggacgacaatggatcagcagcagcagccggcggccgcgcgccacggccacgagatgccgttcctgcggggggtggacgtgaaccgggcccctgccggggataccaggaggggtagctgcagcgaggacgacgaggagcctggcggcgcgtcgtcgtcgccaaacagcacgctctccagcagcctcagcgggaagcgcgcagctccggcgaggagcggcggagaggtggccgaccacaccccgagagccggaggcggcagcgacgacgaggactccggcggtgggtcgcgcaagaagctccgcctgtccaaggaccaggccgccgtcctcgaggagagcttcaaggagcataacacactcaaccccgtacgtgtataattacttatatcctccaaaaagaaacatcgatcaaccttcaactcgatctaataataataagaaccgttggctgatcagaagcagaaggcggcgctggcgaagcagctgaacctgaagccgcgtcaggtggaggtgtggttccagaaccgcagagccaggtgaacaaagcagcgcccttgaagcagcacacgcatgccatttatactgactcatcctccgtggctaatactagtctaataataatattatcgttcaggacgaagctgaagcagacggaggtggactgcgagttcctgaagcgctgctgcgagacgctgacggaggagaaccggcggctgcagcgggaggtggcggagctgcgcgtgctcaagctcgtggcgccgcaccactacgc

SEQ ID NO: 87719 - DNA, 1359 bp, Zea Mays
gacagctccatcgattcatccaccgctatctctctctctctctctctctctctctctctctctctctttcaactgtaagggaaaccgagctcaaagtggcaaccatcaatggatattatggcgcttaatgcgagagacgaggagcagtacgggaacaaccatctcgggctcgggctgagcctcagcctcggcctcggcgtcgccaccgcggctccggtcgaggtcgagcccccgccaccgccgcggcagcagcagcagcgagctatcagcgtcgcgcccatcacctccctccccgcgccgcagtggtggaagtggaacggccccggtctcttcttcgggacgacaatggatcagcagcagcagccggcggccgcgcgccacggccacgagatgccgttcctgcggggggtggacgtgaaccgggcccctgccggggataccaggaggggtagctgcagcgaggacgacgaggagcctggcggcgcgtcgtcgtcgccaaacagcacgctctccagcagcctcagcgggaagcgcgcagctccggcgaggagcggcggagaggtggccgaccacaccccgagagccggaggcggcagcgacgacgaggactccggcggtgggtcgcgcaagaagctccgcctgtccaaggaccaggccgccgtcctcgaggagagcttcaaggagcataacacactcaaccccaagcagaaggcggcgctggcgaagcagctgaacctgaagccgcgtcaggtggaggtgtggttccagaaccgcagagccaggacgaagctgaagcagacggaggtggactgcgagttcctgaagcgctgctgcgagacgctgacggaggagaaccggcggctgcagcgggaggtggcggagctgcgcgtgctcaagctcgtggcgccgcaccactacgcgcgcatgccgccgcccaccacgctcaccatgtgcccctcctgcgagcgcctcgcctccgcgtccgcgtccgccgaccaggcgggccgtgcagggccctgctggggccctctccccgtgttcgtcgacggcccagcccggaggccgtgatccacgaccacgatatggcatgagatggatgcgcttgctaatcgctaccgctagctaagtagctagtgctaattagggctggatcttctttttttctttgtttggttcttattatactcgcaggctattacagcttagtagtgtttattagtccgatatgataaaaatcttcgttgtttggcagtgttttatttgctgaaaaatagataacgatgtcttatgtctttgtactcataagtgatgcaaaattgtcttactactactttgcatatataaggtttcagttgttaa

SEQ ID NO: 87720 - DNA, 345 bp, Zea Mays
atgcagctggacgcctcgctacctgcgggcgatgacccgtccgatgagaccgcctcgcaccgcccctccatcattctcaatgccgtcgcgctcgacaatatcggtgctggcaagtcggctgtgtggaacagcctcatcggccaccctgtgctgcccacggagggaaaaccacgcgtcgcggaccgccgggaacccgggcgcggtggaatcttgcgcggtggtctgctggtgaagtcggaatcgctcaccagtgccaacttgtcgccttgcgcccgccatatatcgtggccagcaactcctgctctacaatcgctggaaataccgccttcagcaggttcgtcgtag

SEQ ID NO: 87721 - DNA, 315 bp, Zea Mays
atgacccgtccgatgagaccgcctcgtgccgccccctccatcattctcaacgccatcgcgctcgagaatatcggtgctggcaagttggctgtgtggaacagcctcatcggccaccctgtgctgcccgcggagggaaaaccacgcgtcgcggaccgccgggaacccgtgcgcggcggaatcttgcgcggtggtctgctggtgaggccagaatcgctcaccagtgccaactcgtcgccttgcacccgccgtatatcgtggccagcaactcctgctctacaatcgctggaaataccgccttcagcaggttcgtcgtag

SEQ ID NO: 87722 - DNA, 1729 bp, Zea Mays
cgcgtcacgttgggcgcctctctttgctccccctttttttccttcttggcttgatcgatggcagcgcagcagaaggccgcctccgtgctgcagagcttcccgttcaaggcggccgtgctcgcgctctgcgtcgcgctgctgccgctcctccccacgcaggcgccggacgtcggggccgggggacccggccaggagttcctcgccaaagtgtgggagctgctgcacctgctgttcgtcggcatcgccgtctcgtacggcctcttcagccgcaagaacagcgccgacgatggacgcgccggggccgtcgcagtcgcagcagagaagcacgctgccacggggccggaacctgccaaggccgacgcgaggtacgcgtggcggatgttcagggactcgatcccgccgttcgatgacgaagacgaaaacgacgtactggtgccgggcagccctcctggcggcggcgggggtggcagggcgcgctcgtggagagcgccgcactggcccgttgatcccgttgtcgtcgtctccaccggaggcggcggggatcggatcgggcaggccgcggacgcgcaggcgccgctgtctctgcccgtccggacgctgaaagcgcagccggcacaggacgccagcgcgggggctgtcgagacgccgcgtgcgcggcggcgtcggaactctcaggacatggcggccggctgcgcccgcgacgagaccgtgctcgcttcaccgatcccgtggcggtcgcggtccgggaagctcgacgcgcgccgacccgcgtcgccgagctccacgccgtcacccaagacgctgtccccggcatcgtccttgtccggggagacgctggccgatgccagcgaggaggagtactacgccaaggccaagcggagcagcccgtacaggtcatcttccatctcctcaccgccgcctccgcctccacctccgcctccgttccttgtccacggttaccacccggcgaccgagcgccgtgcggcggcagcgaaaagctttaaggaggagctgcagcaccacagcatgagaggccgaggagaagatcactactcgctgaagacgagcagcatcagcatctccgcttacaacagcagcaactcctccccagcgaagccaagaagctcttttgacggcggcttctcctcgtcggtttcggttggcaagtcagtgagaacgttcagggcaagggaggcagcagtttttcaagaccaaaaccaagaactccccgacggcgccggtgatgatcgtgacgtgctggatgtgcacgggtcagaggagccgtacggctacagagcttatcagtccattcacaggttccagtacgagagatcagggagcgaccctatcctaggcggtgtggtagtctcctcggatgagaccgagagcagtgacgacgacgacgatagcggtggcggcgggtattcgacgagggagtcgacgccggaggtggacgaaaacgaggtggacaagaaggcggaggagttcatcgccaggttcagggagcagatcaggcggcagagaatcgagtccattaagaagtccgcggggtcgcgcggcgtcaagcaccacggcaagtagatcgccggacggctggtatgttttgggtcgtttggttcacataacgggctaaatcatgtgtttttaagttcaacactacaaatggatattggtctattcaaacttgttatcgtcggtacttaaatgtcaatcgttactattaacattt

SEQ ID NO: 87723 - DNA, 3647 bp, Zea Mays
cttagcaggaggtgaggaaaggggacggaagcacgcagaccgggtcggatccaccggcccgcggaacggatcgaggccaccggcatcctcggctcgcgtcgcgtcgcggcgccgagctcgaaatccccggatcggtgcagctgccccctgccgccgcccgataacgcggcgggagggtggtggcctgtcgatctcgcggcgggagctggttaactacctgccaatttgtggatttgtgtgcgtgcttgattttggtgcgtgtgtggtggtgttgagtcgccggcgtggggtgtcggagctagggtttgggcgttcaggatgacgcgccgggtgcggcggcggacatgcagggaacgggagggtaaggtggtgcggggcgcatcgcgtgttgtttcggctgggccggaaggcgaggaggatgcggcggcggtggaggtggactggagggcgctgccggacgacacggtgctgcagctctttgcgcggctgaactaccgcgaccgcgccagcatggcgtcagcgtgccgggcttggcgagcgctgggctcgtcaccctgcttgtggaggacgctcgacctccgcgcacatcgctatgacagggaggtggcgtcgtcgcttgcctcgcggtgcgggagcctgcgtcggatacgcttgcgcggccacgaggcggcagaggccgtcctgggcctccgtgcgcgtggtcttcgcgaggtggtggccgatggctgccgcggcctcacagatgccacgctcgctgtcctcgccgcgcggcacgaggacctccagagcctccagatcgggcccgatcctctcgagcgcatctctagcgacgccctccgccacgtcgcgctttgttgctcgcagctctgccgccttcgcctctcgggtctccgtgaagttgacgcggaggccgtcggagcgctcgcccggtgctgccccctcctcgaggatgtggctttcctcgattgtggcaccgtggatgaggccgcccttgctggtatccactctgtccgattcctctctgtagcaggatgccggaacctgaaatgggctactgcatccacctgctggacccagcttccctccctcattgcccttgacgtctcccgcactgatgttccgccaagtgctgtttcacgcctcatttcccatgccaaaaccctcaagctaatatgcacgctgaactgcatttctgttgaggaggaacagcttcacaatcctgctgtatttagtaactctaagggcaaggtcgtgctaacgattaacagcgatatcttcaaatcttttgagaccatgtttccagttgtggatgtgaaagagcatgagtttttcaatcaatgtaactggagtcacaaagacaagatacctggtgatacgatgacatggctcgaatggatcctgtcacagtcacttctccgaattgcagagtccaacccacaaggcatggatggtttctggctgcagaagggcactacactgctgcttagactgttgaagagtttacaggaggatgtgcaggagcgggcagctacgtcgcttgctacgtttgtagttatggatgatgagagtgcaaatgtggatcctgcaaggtcggaggcagtgatgcagaatgggggcattcgaatgttgctggaccttgcaaggtgctcaagggagagcgcacaatctgaagcagcaaaagctattgccaacttgtcagtgaataccaaggttgccaaggcagttgcagatgaaggcggcattacaatactcattaatttagccaagtcgatgaataggcttgttgccgaagaagctgctggtggcctttggaatctctctgtaggcgaggaccacaaggcggctattgcagtatctggtggcattaaggccctggtcgatctaatatttcgttggcctgctggaactgatggagttcttgaacgtgctgctggcgcgcttgcaaacctggctgctgatgacaagtgtagcttggaagttgcaaaggctggtggtgtccatgctttggttacacttgctagatcatgtaaacttgatggtgtcctagaacaggctgcaagaggtctggctaacttagctgcacatggggacaacaatgacaacaatgctgctgtaggtcaggaagcaggggctctggaggcactggtgcaactaacaagttctcaaaacgagggtgtaagacaagaagctgctggtgctttgtggaacctgtcatttgatgacagaaaccgtgaagccattgctgcagtgggtggcgttgaagctttggttgccctagtgcaacaatgtttgaatgcttcagaaggtcttcaggagagagctgctggtgcattgtggggattatctgtttcagaagctaatagcattgcaattgggcagggtggtggggttgcaccattgctcacattggcacgctcagaggttgaagatgttcacgagacagctgcaggggcactatggaatcttgcattttattctgaatggatgaagttgctttggttggagcatcctcagatagcagttccaagagtgttaatgttgagggagctagaagaatagcatttaagcatatagaaacctttgtgctcactttctcagatccacaaatgttctctatggctgctgcctcctcagccccagcagcgctgtctcatgttgctgaagcagtgtttatacacgaagctggacacctgagatgcagtcgctctgagattggtagatttgtttccatgcttcggaatccttcaccaattcttcgtgcttgtgctgcctttgcccttcttcagttcacaatcccaggaggtcggcatgcagtgcatcacgcaggtctcttgcaggaagcaggggcaggtcgggtgttgcgcgcagcagcggcagcgacaacagcttctattgaagctaaaatctttgccaggattgtactcaggaacttggagcaccatcagttagggatgtcaacatgaacacccagcagaggttcatcctccaataaacaaaggcctctgcatcgatgggctgcttggccaatgcagaatcaaacagtttggccttcggagccttttgacatcacaacagttttggtctgtgcagacagtgactgaaggagctccaccgaaggtataacccacaactgtgaagtgactgaatgaaaacataagtggcgacccttcgcgtattggacgtttaaggttgagtgtgcaattttctagagttcattttgcgtgtacaagtaaaacttttttagagtcgatgagaattataaactggcatatagcttaacttatggatatttattccttattcgttagcgttgaggtgtgtggcggcgtcatgtagaaagttaggttattcctcctaggatacatgtaactttataaatgtactgttatgtattttcttccttatgattgattctgtgcatttatggatcgagttgtagattaccacttaacgaaacaaaggtttaatttgttcatcaacatgcgcatcagtaagcttattgagtatgaatcctcgtttatttttttttctaaaaataaacttacaaaatttttagtaatgctcttagaaaaaagcttactcagagaattctcatattttttagattttagaaaagattcttaaatctccatttaaaaaataaaaaa

SEQ ID NO: 87724 - DNA, 3746 bp, Zea Mays
cggaagcacgcagaccgggtcggatccaccggcccgcggaacggatcgaggccaccggcatcctcggctcgcgtcgcgtcgcggcgccgagctcgaaatccccggatcggtgcagctgccccctgccgccgcccgataacgcggcgggagggtggtggcctgtcgatctcgcggcgggagctggttaactacctgccaatttgtggatttgtgtgcgtgcttgattttggtgcgtgtgtggtggtgttgagtcgccggcgtggggtgtcggagctagggtttgggcgttcaggatgacgcgccgggtgcggcggcggacatgcagggaacgggagggtaaggtggtgcggggcgcatcgcgtgttgtttcggctgggccggaaggcgaggaggatgcggcggcggtggaggtggactggagggcgctgccggacgacacggtgctgcagctctttgcgcggctgaactaccgcgaccgcgccagcatggcgtcagcgtgccgggcttggcgagcgctgggctcgtcaccctgcttgtggaggacgctcgacctccgcgcacatcgctatgacagggaggtggcgtcgtcgcttgcctcgcggtgcgggagcctgcgtcggatacgcttgcgcggccacgaggcggcagaggccgtcctgggcctccgtgcgcgtggtcttcgcgaggtggtggccgatggctgccgcggcctcacagatgccacgctcgctgtcctcgccgcgcggcacgaggacctccagagcctccagatcgggcccgatcctctcgagcgcatctctagcgacgccctccgccacgtcgcgctttgttgctcgcagctctgccgccttcgcctctcgggtctccgtgaagttgacgcggaggccgtcggagcgctcgcccggtgctgccccctcctcgaggatgtggctttcctcgattgtggcaccgtggatgaggccgcccttgctggtatccactctgtccgattcctctctgtagcaggatgccggaacctgaaatgggctactgcatccacctgctggacccagcttccctccctcattgcccttgacgtctcccgcactgatgttccgccaagtgctgtttcacgcctcatttcccatgccaaaaccctcaagctaatatgcacgctgaactgcatttctgttgaggaggaacagcttcacaatcctgctgtatttagtaactctaagggcaaggtcgtgctaacgattaacagcgatatcttcaaatcttttgagaccatgtttccagttgtggatgtgaaagagcatgagtttttcaatcaatgtaactggagtcacaaagacaagatacctggtgatacgatgacatggctcgaatggatcctgtcacagtcacttctccgaattgcagagtccaacccacaaggcatggatggtttctggctgcagaagggcactacactgctgcttagactgttgaagagtttacaggaggatgtgcaggagcgggcagctacgtcgcttgctacgtttgtagttatggatgatgagagtgcaaatgtggatcctgcaaggtcggaggcagtgatgcagaatgggggcattcgaatgttgctggaccttgcaaggtgctcaagggagagcgcacaatctgaagcagcaaaagctattgccaacttgtcagtgaataccaaggttgccaaggcagttgcagatgaaggcggcattacaatactcattaatttagccaagtcgatgaataggcttgttgccgaagaagctgctggtggcctttggaatctctctgtaggcgaggaccacaaggcggctattgcagtatctggtggcattaaggccctggtcgatctaatatttcgttggcctgctggaactgatggagttcttgaacgtgctgctggcgcgcttgcaaacctggctgctgatgacaagtgtagcttggaagttgcaaaggctggtggtgtccatgctttggttacacttgctagatcatgtaaacttgatggtgtcctagaacaggctgcaagaggtctggctaacttagctgcacatggggacaacaatgacaacaatgctgctgtaggtcaggaagcaggggctctggaggcactggtgcaactaacaagttctcaaaacgagggtgtaagacaagaagctgctggtgctttgtggaacctgtcatttgatgacagaaaccgtgaagccattgctgcagtgggtggcgttgaagctttggttgccctagtgcaacaatgtttgaatgcttcagaaggtcttcaggagagagctgctggtgcattgtggggattatctgtttcagaagctaatagcattgcaattgggcagggtggtggggttgcaccattgctcacattggcacgctcagaggttgaagatgttcacgagacagctgcaggggcactatggaatcttgcattttattctggtaatgctctccgcatagtcgaagaaggcggggttcctgttcttgtaaaaatttgctcatcatcacggtccaagatggcacgtttcatgtctgcactagcactagcatatatgtttgacggaagaatggatgaagttgctttggttggagcatcctcagatagcagttccaagagtgttaatgttgagggagctagaagaatagcatttaagcatatagaaacctttgtgctcactttctcagatccacaaatgttctctatggctgctgcctcctcagccccagcagcgctgtctcatgttgctgaagcagtgtttatacacgaagctggacacctgagatgcagtcgctctgagattggtagatttgtttccatgcttcggaatccttcaccaattcttcgtgcttgtgctgcctttgcccttcttcagttcacaatcccaggaggtcggcatgcagtgcatcacgcaggtctcttgcaggaagcaggggcaggtcgggtgttgcgcgcagcagcggcagcgacaacagcttctattgaagctaaaatctttgccaggattgtactcaggaacttggagcaccatcagttagggatgtcaacatgaacacccagcagaggttcatcctccaataaacaaaggcctctgcatcgatgggctgcttggccaatgcagaatcaaacagtttggccttcggagccttttgacatcacaacagttttggtctgtgcagacagtgactgaaggagctccaccgaaggtataacccacaactgtgaagtgactgaatgaaaacataagtggcgacccttcgcgtattggacgtttaaggttgagtgtgcaattttctagagttcattttgcgtgtacaagtaaaacttttttagagtcgatgagaattataaactggcatatagcttaacttatggatatttattccttattcgttagcgttgaggtgtgtggcggcgtcatgtagaaagttaggttattcctcctaggatacatgtaactttataaatgtactgttatgtattttcttccttatgattgattctgtgcatttatggatcgagttgtagattaccacttaacgaaacaaaggtttaatttgttcatcaacatgcgcatcagtaagcttattgagtatgaatcctcgtttatttttttttctaaaaataaacttacaaaatttttagtaatgctcttagaaaaaagcttactcagagaattctcatattttttagattttagaaaagattcttaaatctccatttaaaaaataaaaaa

SEQ ID NO: 87725 - DNA, 3733 bp, Zea Mays
cggaagcacgcagaccgggtcggatccaccggcccgcggaacggatcgaggccaccggcatcctcggctcgcgtcgcgtcgcggcgccgagctcgaaatccccggatcggtgcagctgccccctgccgccgcccgataacgcggcgggagggtggtggcctgtcgatctcgcggcgggagctggttaactacctgccaatttgtggatttgtgtgcgtgcttgattttggtgcgtgtgtggtggtgttgagtcgccggcgtggggtgtcggagctagggtttgggcgttcaggatgacgcgccgggtgcggcggcggacatgcagggaacgggagggtaaggtggtgcggggcgcatcgcgtgttgtttcggctgggccggaaggcgaggaggatgcggcggcggtggaggtggactggagggcgctgccggacgacacggtgctgcagctctttgcgcggctgaactaccgcgaccgcgccagcatggcgtcagcgtgccgggcttggcgagcgctgggctcgtcaccctgcttgtggaggacgctcgacctccgcgcacatcgctatgacagggaggtggcgtcgtcgcttgcctcgcggtgcgggagcctgcgtcggatacgcttgcgcggccacgaggcggcagaggccgtcctgggcctccgtgcgcgtggtcttcgcgaggtggtggccgatggctgccgcggcctcacagatgccacgctcgctgtcctcgccgcgcggcacgaggacctccagagcctccagatcgggcccgatcctctcgagcgcatctctagcgacgccctccgccacgtcgcgctttgttgctcgcagctctgccgccttcgcctctcgggtctccgtgaagttgacgcggaggccgtcggagcgctcgcccggtgctgccccctcctcgaggatgtggctttcctcgattgtggcaccgtggatgaggccgcccttgctggtatccactctgtccgattcctctctgtagcaggatgccggaacctgaaatgggctactgcatccacctgctggacccagcttccctccctcattgcccttgacgtctcccgcactgatgttccgccaagtgctgtttcacgcctcatttcccatgccaaaaccctcaagctaatatgcacgctgaactgcatttctgttgaggaggaacagcttcacaatcctgctgtatttagtaactctaagggcaaggtcgtgctaacgattaacagcgatatcttcaaatcttttgagaccatgtttccagttgtggatgtgaaagagcatgagtttttcaatcaatgtaactggagtcacaaagacaagatacctggtgatacgatgacatggctcgaatggatcctgtcacagtcacttctccgaattgcagagtccaacccacaaggcatggatggtttctggctgcagaagggcactacactgctgcttagactgttgaagagtttacaggaggatgtgcaggagcgggcagctacgtcgcttgctacgtttgtagttatggatgatgagagtgcaaatgtggatcctgcaaggtcggaggcagtgatgcagaatgggggcattcgaatgttgctggaccttgcaaggtgctcaagggagagcgcacaatctgaagcagcaaaagctattgccaacttgtcagtgaataccaaggttgccaaggcagttgcagatgaaggcggcattacaatactcattaatttagccaagtcgatgaataggcttgttgccgaagaagctgctggtggcctttggaatctctctgtaggcgaggaccacaaggcggctattgcagtatctggtggcattaaggccctggtcgatctaatatttcgttggcctgctggaactgatggagttcttgaacgtgctgctggcgcgcttgcaaacctggctgctgatgacaagtgtagcttggaagttgcaaaggctggtggtgtccatgctttggttacacttgctagatcatgtaaacttgatggtgtcctagaacaggctgcaagaggtctggctaacttagctgcacatggggacaacaatgacaacaatgctgctgtaggtcaggaagcaggggctctggaggcactggtgcaactaacaagttctcaaaacgagggtgtaagacaagaagctgctggtgctttgtggaacctgtcatttgatgacagaaaccgtgaagccattgctgcagtgggtggcgttgaagctttggttgccctagtgcaacaatgtttgaatgcttcagaaggtcttcaggagagagctgctggtgcattgtggggattatctgtttcagaagctaatagcattgcaattgggcagggtggtggggttgcaccattgctcacattggcacgctcagaggttgaagatgttcacgagacagctgcaggggcactatggaatcttgcattttattctggtaatgctctccgcatagtcgaagaaggcggggttcctgttcttgtaaaaatttgctcatcatcacggtccaagatggcacgtttcatgtctgcactagcactagcatatatgtttgacggaagaatggatgaagttgctttggttggagcatcctcagatagcagttccaagagtgttaatgttgagggagctagaagaatagcatttaagcatatagaaacctttgtgctcactttctcagatccacaaatgttctctatggctgctgcctcctcagccccagcagcgctgtctcatgttgctgaagcagtgtttatacacgaagctggacacctgagatgcagtcgctctgagattggtagatttgtttccatgcttcggaatccttcaccaattcttcgtgcttgtgctgcctttgcccttcttcaggaggtcggcatgcagtgcatcacgcaggtctcttgcaggaagcaggggcaggtcgggtgttgcgcgcagcagcggcagcgacaacagcttctattgaagctaaaatctttgccaggattgtactcaggaacttggagcaccatcagttagggatgtcaacatgaacacccagcagaggttcatcctccaataaacaaaggcctctgcatcgatgggctgcttggccaatgcagaatcaaacagtttggccttcggagccttttgacatcacaacagttttggtctgtgcagacagtgactgaaggagctccaccgaaggtataacccacaactgtgaagtgactgaatgaaaacataagtggcgacccttcgcgtattggacgtttaaggttgagtgtgcaattttctagagttcattttgcgtgtacaagtaaaacttttttagagtcgatgagaattataaactggcatatagcttaacttatggatatttattccttattcgttagcgttgaggtgtgtggcggcgtcatgtagaaagttaggttattcctcctaggatacatgtaactttataaatgtactgttatgtattttcttccttatgattgattctgtgcatttatggatcgagttgtagattaccacttaacgaaacaaaggtttaatttgttcatcaacatgcgcatcagtaagcttattgagtatgaatcctcgtttatttttttttctaaaaataaacttacaaaatttttagtaatgctcttagaaaaaagcttactcagagaattctcatattttttagattttagaaaagattcttaaatctccatttaaaaaataaaaaa

SEQ ID NO: 87726 - DNA, 710 bp, Zea Mays
gtcactaattttttgtttccttattagctcaggacacaaactaaatgtgcgtgccatgggatgcaactccaaaaatctatccttgctttgttttgtttactgaaccacaacaattcactgtctgatttccttctttttctttaggctgcaggcctttatttccgaggtcagcgcatttggcaggccgctatggatgacctaatggcccaaggaatgcgttatgctaatcaggcccttctttctggatgctctgccggtggtgtttctaccatacttcactgtgatgaattccatggattgtttatttccttttttgttttttgactgattttggactctaaaactccaataatctaatgcattcgaaattagacttttaatattaattaaattttatcattgtacatcactagtaatgtaagattaacatagtcatttgtttatgatataaatatttttaacattttatatgatgtacttcagtttttagtatattatttaatgtttaatcacttgtaattagtgagatgacagaatgattgacattgtagacaacttttgtttcgtgtgagaggagtttgtttttcctacatgaatatttgactggatcaaaccctagctatatataaagggagctgtttccccgcagctttcattcgcgcatggatttagcgatgatccctattgtgttcagctgattttacaagaaa

SEQ ID NO: 87727 - DNA, 630 bp, Zea Mays
atggcgaagctgcccgtcggagcaccactgcccgagaccacgagcccaactcccacatgggcaattccgcaggcattcaacgaagcatcccgagcatccatgcgccaaggcaacagcacaacgagctgcaccgcggcggagctttcttcccggctgtcgtgctgcggcgaggaggcccggtccaccaaacggcacaagcacaggaaagttcccgggcgcctatggtgctgcgaataccctaggactccgcaccataatcaatcgcgggggaaaccgagacaagcacggcggtggccatctactctctcctggcggtctctcttcgctctctcccataatggcgcttgcatgaggatgcagaaaacaacgttttttggaagaactggggattgggagggatggctcggctggtcgtataaatacaccaaaggtgtcgagtcccggccgaggcggatgtcagttaggtggttacaactactcgggttgttacgatctctggagcttctgttgatgtccgtttcgctgcacgagatgaacgatgacgtgagcaacaggagccccacgcgcactcgccaacatgctgacctgaatttgcatgatgacgtcactacttgcatcagcatgacataa

SEQ ID NO: 87728 - DNA, 2875 bp, Zea Mays
cactcacactcgctctctcactgaagtgaggaagaacagagagaaggggagggagatcgtagcagcggcgctgttcgagagctcgccgatctgctgcgggaatggggtgcacggcgtccaaggtggagcaggaggacacggtccggcgctgcaaggagcgccgccgccacatgaaggacgcggtagcggcgcgccagctgctggcatccgcgcacgccgactacctccgctctctccgcgtcaccgccgccgcgctctcgcgcttcgcgaagggccacccctcgctcgccgtttcgcaccacactacccccgtcctcctctccgctgccgcaccgccgcctgcccccagcgccgcccgtgcgctccccacaccggcgccgtccaccgccgcgtcgtcatcgctcccgcctccgacgccgctcgcccagcacccacacccgccgccgcagccgccggcggcgatggcggcgccgcaaccggcgccggcgagggcaccgcgtccgcggcggctcagggtgccccacatcctgtcggactccagcgtggccagccccgcgcggtcgtcgttccgcaagcagccgccggtgggcacgccgtcctcctcgtccgcgtgggactgggagaacttctacccgccgtcgccgccagactccgagttcttcgaccgccgcaaggccgaggtcgagcatgccagccgtctccgggagctcgaggaggaggagaaggcccgggcctacctccagcaccacacccagtacaacctcaaggaagaagacgaggccgccgaagacgacgacggcgaggtggaccatgaaccggaggggatgcattgcggcggatgggaggacgacgagcactacgcgtccacgaccacatcggagaccagatcggaggatgagggcgagatgggggacagatcagaatgcgggttcgcggccagatcggagtgcgggttcgtggccagatcggagtacggcgggacggcaccgtcagagtacgccgccgtcccattgcccctgaggagggatgagaggtcggaggctggcgactcctccacggtcacggcggcgacagagatgcggatggtggtgcgccatcgcactctcgaggaaatcgtggcggccattgaggagtactttgtcaaggcagccgactccggcaacgatgtgtccgagctcctggaggccagccgcgcacaactcgaccgcaacttccggcagctcaaaaagacggtgtaccattccaacagcgtgctatcagcattgtcgtcgacatggacatcaaaaccgccattggctgtacgatacaagttggacactaatgcactggagatggagtcgacggaagggaagagtcatggatccactctagagcggcttttggcttgggagaagaagctctacgaggaggtcaaggctagagagagtgtgaagattgagcatgagaaaaagctttctactctgcagagcctggagtacagaaggagggatagcgcaaagctggacaagaccaaggcctccataaacaggctgcaatccctgatcgtagttacgtcgcaggctgccacaaccacatcatcagccattgttagagtccgtgacaatgagcttgcaccacagcttgtccagctctgttttgcgtaagcgtcttatgtccactcctacatccctaattccagatcatgtgctcttgctctccaagcacttaactgatttatgaatattaacatacaggctactgggcatgtggaggtcaatgaaccatttccacgagatacaaaacgagatcgttcagcaagtccgcggcctggtggacaactccatggccgagtcaacatccgacctccataggcttgcgactcgtgatctcgaggccgctgtcgcggcatggcactcgaacttcaaccgtctcatcaagtaccaacgcgactacatccgctctctgtacggctggttgaagctcacgctctgccaggtggacagcagcgtgccccaggaagtccatgcctcgatgatctcgcgcgagctcaccagcttctgcgacgagtggaagcaggcgctggaccgcctcccggacgccgtcgcctcggaggcgatcaagagcttcgtgaacgtggtccacgtcatctacaccaagcaggccgaggagatgaagatcaagaagcgggcggagacgtactccaaggagctggagaagaaggccaactcgctcaggtccatcgagaagaagtactaccagtcctactccatggtcggcctcggcctccccggcagcgggcgcgatggcatcgaaagccacgctgcgtacgatgcccgcgaccctctcgcggagaagaagaccgagatcgcccagtgccgccggaaggtggaggacgagatgacgaggcacgccaaggccgtcgaggtcacgcggtccatgacgctgaacaacatacagaccggcctgccgggtatattccaagccatagctgggttctcggggacagtggtcgaagctcttgatgtggtctgccgccgagctgggtctgtgcggtagaagaagctctttcccatcaggattaccaagagaccatttgctgcctctctctctctctctctctttctgggtgattcagtagtttatttatatagggaaactgcaatatattatatatatagctcaaagtagagtggtcaagtatagaagatggttccccggatgttttgccctgtcacaggatggtttcagttgtagttgtagataatgtgattttgcccaggatttgttggtctcctttttctggggcgagtgcgaggggagagatttataatgtacagacattaaggttgccttgcactctagcctcatcatgatcaagcctgtgtttctgtttagc

SEQ ID NO: 87729 - DNA, 2830 bp, Zea Mays
cactcacactcgctctctcactgaagtgaggaagaacagagagaaggggagggagatcgtagcagcggcgctgttcgagagctcgccgatctgctgcgggaatggggtgcacggcgtccaaggtggagcaggaggacacggtccggcgctgcaaggagcgccgccgccacatgaaggacgcggtagcggcgcgccagctgctggcatccgcgcacgccgactacctccgctctctccgcgtcaccgccgccgcgctctcgcgcttcgcgaagggccacccctcgctcgccgtttcgcaccacactacccccgtcctcctctccgctgccgcaccgccgcctgcccccagcgccgcccgtgcgctccccacaccggcgccgtccaccgccgcgtcgtcatcgctcccgcctccgacgccgctcgcccagcacccacacccgccgccgcagccgccggcggcgatggcggcgccgcaaccggcgccggcgagggcaccgcgtccgcggcggctcagggtgccccacatcctgtcggactccagcgtggccagccccgcgcggtcgtcgttccgcaagcagccgccggtgggcacgccgtcctcctcgtccgcgtgggactgggagaacttctacccgccgtcgccgccagactccgagttcttcgaccgccgcaaggccgaggtcgagcatgccagccgtctccgggagctcgaggaggaggagaaggcccgggcctacctccagcaccacacccagtacaacctcaaggaagaagacgaggccgccgaagacgacgacggcgaggtggaccatgaaccggaggggatgcattgcggcggatgggaggacgacgagcactacgcgtccacgaccacatcggagaccagatcggaggatgagggcgagatgggggacagatcagaatgcgggttcgcggccagatcggagtgcgggttcgtggccagatcggagtacggcgggacggcaccgtcagagtacgccgccgtcccattgcccctgaggagggatgagaggtcggaggctggcgactcctccacggtcacggcggcgacagagatgcggatggtggtgcgccatcgcactctcgaggaaatcgtggcggccattgaggagtactttgtcaaggcagccgactccggcaacgatgtgtccgagctcctggaggccagccgcgcacaactcgaccgcaacttccggcagctcaaaaagacggtgtaccattccaacagcgtgctatcagcattgtcgtcgacatggacatcaaaaccgccattggctgtacgatacaagttggacactaatgcactggagatggagtcgacggaagggaagagtcatggatccactctagagcggcttttggcttgggagaagaagctctacgaggaggtcaaggctagagagagtgtgaagattgagcatgagaaaaagctttctactctgcagagcctggagtacagaaggagggatagcgcaaagctggacaagaccaaggcctccataaacaggctgcaatccctgatcgtagttacgtcgcaggctgccacaaccacatcatcagccattgttagagtccgtgacaatgagcttgcaccacagcttgtccagctctgttttgcgctactgggcatgtggaggtcaatgaaccatttccacgagatacaaaacgagatcgttcagcaagtccgcggcctggtggacaactccatggccgagtcaacatccgacctccataggcttgcgactcgtgatctcgaggccgctgtcgcggcatggcactcgaacttcaaccgtctcatcaagtaccaacgcgactacatccgctctctgtacggctggttgaagctcacgctctgccaggtggacagcagcgtgccccaggaagtccatgcctcgatgatctcgcgcgagctcaccagcttctgcgacgagtggaagcaggcgctggaccgcctcccggacgccgtcgcctcggaggcgatcaagagcttcgtgaacgtggtccacgtcatctacaccaagcaggccgaggagatgaagatcaagaagcgggcggagacgtactccaaggagctggagaagaaggccaactcgctcaggtccatcgagaagaagtactaccagtcctactccatggtcggcctcggcctccccggcagcgggcgcgatggcatcgaaagccacgctgcgtacgatgcccgcgaccctctcgcggagaagaagaccgagatcgcccagtgccgccggaaggtggaggacgagatgacgaggcacgccaaggccgtcgaggtcacgcggtccatgacgctgaacaacatacagaccggcctgccgggtatattccaagccatagctgggttctcggggacagtggtcgaagctcttgatgtggtctgccgccgagctgggtctgtgcggtagaagaagctctttcccatcaggattaccaagagaccatttgctgcctctctctctctctctctctttctgggtgattcagtagtttatttatatagggaaactgcaatatattatatatatagctcaaagtagagtggtcaagtatagaagatggttccccggatgttttgccctgtcacaggatggtttcagttgtagttgtagataatgtgattttgcccaggatttgttggtctcctttttctggggcgagtgcgaggggagagatttataatgtacagacattaaggttgccttgcactctagcctcatcatgatcaagcctgtgtttctgtttagcaaaagcgctggtgtcctactttctttatatatatatatatatatatata

SEQ ID NO: 87730 - DNA, 1032 bp, Zea Mays
atggcgtcggtgcaagtggaggccaatcatggccacggtgctgccggctctccaccttggaagctttatcacaacccccactacaccccgcggggcaggggcacccatctctcctcatcctgctgctcgccctctccttgccaagtccgcaggagtcccgagccccctcctatgatcattgcgctggacgacgaggaggtcgaccaagggtacgggtacggcgccatgtcgtcggagctggagctctgcgtggcacgcatcagggacctgagggcggagctggagttcgagcggcgcatgcggcgcaaggcggaggcgctgagcgaggcgctggccgcggagctggccgacgagcggcggcggagcgaggccgcggaggccgagtgccgggcgctgcgggaggaggccggcgccgcgcgcgcggaggcggagcgcgccctggagggcgtcgaggaggagcggcggatgctgcgcgtcgccgagctgtggcgcgaggagcgggtgcagatgaagctcgccgacgccagggccgcgctggacgagaagctgcgggagatcgacgacgccgtggcacagctccaggccactgccgacgccaacaagagcagctgctgcagcagccccaacggcagcaagtcggcgagccagcacggcgggcaacagagcccgcagcacggtaagccgcaccggcgagagcccggcggcggcggcgagaacccgcacatccggagggggatcaaggggttcgtggagttccccagggccgcgcgcctgcgcctgcgcccgcgcccgcgcgaggagcgggtggatctggtgtccaacctcgagtgccagcgggcgcagctgcgcgtgctcatgcggcacaggagccccgccgccggcatgggcctcatcggcgcagcagaaaacctggtcgtgtagtgcaccgtatactaacgtatagcgtatgtttattgaggtggtcggtaactctgtatcttcctctgttccacttcatattatgggacattcacattttggtacagtacagaa

SEQ ID NO: 87731 - DNA, 1519 bp, Zea Mays
atagcacacccggccccaaggccctctgtaggtgttcaattcctgccactccccgcttccactttggcatcttgctcgcaccggggcaaggcaatggcgccgccgcgtcgctacctggccgcgttgctcgctctgctatgcgcgtgcaccaccacgatgccgccggcgggctccgtcgtcgcggccgcgaacgtaccgatcactacgtgccggtcgttctgcggcaacatcacggtggactacccgttcgcgctgcaccccggatgcggccacgcggggctgcgggacctgctcttctgcatcaacggcgcgctgatgctccacctcccctcgggctcctaccgcgtggtcgacgtcgactacgcgtaccggggcctgaccctgcacgacccggccatgtccgactgccgcgcgctggacctcgccccggctgggcggggcaacggcttcgtcctcgagccgtggcgggagccgtacctgtcgccggacccggacaacgtgttcctcctcctaggctgccgagccacctcgccgctgttccagggcttccccgaccgccacctcccctgccggaacgtgtctgggatggggtgcggagactacctcggctgcctcgcctgggacgactactacgccggcggcggcgggcggcggggcccgtcgtcgggcgacgccgcggggcaaccgcccgagtgctgcgcgctgccctggggtgccatccgggcggtgaacgtcagccggctcgagtgcgaggggtacagcagcgcgtacagcctcgcgcccgtgcgcgccgagggcgccgccgcgggctgggcgtacgggatccgggtgtcgtggacgctgcccgagtccaaccgcggattctgcggcgcgtgccgcgccacgggcggggcgtgtggccatgacacggagagccacgccgacctgtgcctctgcggggactggaactccacctccaactgcgactcctcggccgacgcagcacggtcggtcgccgccacgctgcccgctgtcgccgcgcttcgctgggccatcctcgcctcaggattgacgtcactatggtactacgcgtcgacgacatcaaatatgtgatggacggtggattcatgctgtgatcgacaactgcccttcaaacaacagtacacaccacctagagaaagacgatgcgtttcaggagcttgaaacgatcgaatttcagaacccacgatcactatccatactggtttatgtttacaatcactcgtaatggacaaaaggccaaagacgatcatgtttgttgtagcaaggatatttttcccgtttggatgtatccctttatgtcaacagactcgtttggatgtgagttttgtcgcacattagtagctgcacgatgttgtacgggtcagtcggctgtatactgacgatggtttgatggttgatggacatatggttaaacgtagcgtccgagctgtttttgcttttttacaaagttttcattaatataacaacgagagctaattcatttgtcgaaacataaggc

SEQ ID NO: 87732 - DNA, 2537 bp, Zea Mays
ggccaagatcttgggaaaatctaagttaatgattaataagataaagaatttaggaaggatattctcatattgacgcaatacaaagataagtatatgcaaaatcgatccctttttagttaaaggaatttaattggttagcataaaataatatctaataaatagaaaatcgaatagcggataatccgttatgaaagaaacggaatacattctttgaagaatcaagattcgtaatcaatccttgtcttgtttgttggattaggtctaattttcttgaccaaacaacaagcatggaactttacaagaagaacttaaaagaaaaggataattgaagtaactttgaatccacttttgttggggttcaaaaaacgaataaaaataaataaataaaagtaaatttaaggaatagttccctttttgagggggcccctcgggggtcgtggaatgcttttcttctcctcttattccatatggaatacaatgagttaaaatttgctccaaaaagaggatgaaatccatcctattaaaaaagaaataatccgaatccgaaatagaaagattttttttttcaaattcaattctttatttatcttttattccaaaattctcccgaaaatccaatttcatttttcaatggggttagatgatctagttcttaatattattagtttacttaactgacagattccacaacaaatctcttgattcggaattagggactcatgttccgtctgatgaatcgattttctctttttttacacttctgtatctcactctatcttgttttttagtattatctaaaataaccgatgaattatgaattttccataacttaaacttaggtaagtgctttaccaacatatgtagtgtagtaaaaaaatggaattgaaccccttcatgcttactataactagttatttcggttttctactggctgctttaactataaccccagctctatttattagcttgaacaagatacgtcttatttgaaatgaattgaatagaagaatctttcttttggattcttggtattctagactcttttccacactaattaccaattcttttcttggtcattgagattcgtgggtagtttagactattatttagagatagatcgtacctctttttttatcccctcgaacaaatcgaaatgattgaagtttttctatttggaatcgtcttaggcctaattcctattactttagcgggattattcgtgactgcgtatttgcaatacaggcgtggggatcagttggatctttgattgagtaatatttcttttttgattgacctcctctctggtctggaggaggtcaaattggagttgcaattctactttgttttttttaagttattttagtttcgacataagatatatggaatcacgctctgtaggatttgaacctacgacatcgggttttggagacccgcgttctaccaaactgaactaagagcgctttcaaaacaaaaaaaagaaaatccttttctattcctaacgtgtctcacgtccgtatagtatccacaaattcaagttatacccactttaatcgatctccccactactgcccataacgaagagagaattaataggtagggatgacaggatttgaacctgtgacattttgtacccaacaaacgcgctaccaagctgcgctacatcccttttccaaattgttgtacaatgccattgtacacaattcctttcttgttttccacatcgtaattttcttctatttctttatccatatagaactttcttgtcatttcttgtttttggtctcatataatcaaggaaggggtataaactaaaatccagtcaaatttcacctataaaagaaagactactattccttagtaatgtataggaagaaggggtcatcttttttagggataggaaattctcgtctatacggttcattctatatatatataatatttcttttgtttttttagttaggaatttcgcctaaacaaaagaaatacaaaggatcttgggcaagagtatctgatcatatatgtattccaatacggaaggaggattttcaatgcgggatataaaaacatatctctctgtagcacccgtgctaagtactctatggtttggggctttagcaggtttattgatagaaataaatcgtttattcccagatgctttgtcattcctttttttttaattctagttattcctatgcgagagatagaattcttcgtgacatgacgaaaatttcccctttttgaattcttttttagtatatgaagcaaaaagaaagaaaagatggataaggattgtattctttaattatttctctatgttttattacttaatttacgaatttcaaaaattttgtattctattggattggatttgttcgagaattcgaagaattacaacaaaatctttagaaatcacatttttagttaggaacttctatggattttattcttcttcttttctttggatccaaaatagaagaataaaagaatagctataagaattaagttaagtcgatccaaaaaggaaaggaggttcatag

SEQ ID NO: 87733 - DNA, 1556 bp, Zea Mays
gggcgaagcctgctcgaacccgagcatccgcgcgcgctccacgtacgcaagcttcacgttgggccgctggtatgtcagcagcctcgccacgctgcggctcgcgtctgggcggaacggccgcccggagccggcgaacccgtccagaaggtgtaggtacgcctccaagtcgtggcagcacgctggccccgcgtcgggacgcaggcacggcgagtcgctgctgtgcagtctcagctcagcgccacccgcgtgcacatacccttcccgcgcgatcggcgccggtacgcgcgtcacgacgtcgcccgcgttcaccacccgcaggacgttcacgcctcgctcgcgctgcagccgctccgcgaacgcgcggtttccggtcttggggccaccgaaggagaccaccgcgatcggcggcgggcggtgatctgtggtgccgtctgtgtcggcagccaggcaagtgctgagctcgtcagcagcgaggagggccagcgacgcgccaaggctgtggccgacgatggtgatgctgagctcctcccccttgtacacctccatgagacgcttcacctcctccactatggcggccgagagactgggcgcatggtctcccggcgtcttgtataggctcaggaaccccttcgccaccttgggcgcggacgcgtcgtcgtccgccgtgagcggcacgaggctggcgcggagattctcggcccactcggggcacgtggcggtgccacgtagcacgatcgctacgtcgcgtcggcccatgcgacggacctcctgctcgttgtcgcagacggcgacgtagccgacgaagctggtgcgctgcgtgagccagttgggcgccgaccgccgctgcgcccacggcgggatggacagcgacgacgaggcgaacaggctgcgcgtcgggtggtaggtgcggtccggcagcacgagggtgcgttgctgaccgctgctggaggatgcctccgccgccgccggcatggagtggaacgccgtgtaggcggcctgcacgaagtcgccgtagcgaaggagctcgcggcgcaggttctggtcgagcgggtcgaggaggccctcccagccgccctcgccgtggtacctccgccactcgcccgcgatggagcccttgggcgacagccgcggggagagcgtgaggaggcgctgcatgtacgccaggctgcgcggggacagctcgtccacggctgccttccgcgtgaagggcagaaacgtggataggttcagcgcgttgaggagcccaccgtggccgctgcggttgtcggggctggcctccccgtcgcctggtacgggtaccccggttggctgtttcctgggctgagccgggagcgggagcggtggcggcttgacgaggaggcggtcgaggttggcgaggtgcctccgtgtcgtggagaccgcgttgggcttgccgccgttgctgctcggcgacggcgtggccctcgagctggggttgagaggagacggccggctgtggcagggcggcgccgtcaccgcggcggacattggctcgtcgtcgttgtgtgaggaaactaagagaaagatctggagagagc

SEQ ID NO: 87734 - DNA, 1415 bp, Zea Mays
gtaagcaagaccaacggagcaaggcccccccaggggggcggggcaccacaggtactcttctcctgcttggcctcttgtgccgcaaccgcgagtgcggcctacggtagcctccaaagcagcacatccaaagcagggaccgaatggacatggaccggccggaggaggaggggcagcagcggagggagacgatgacgccggtgctcctcaggctgttcggcgtggacgtccaccggggtggcggcagcggggagccggaggagtcgccgatggacctgaggaagagctccagcatgcccgacctcaccatcaacccgctgctgtcgccggaggagaaagagggctgcaaggggtacgcctccgacgacgcggagctggcgtccggccagcagaagcgccgccgtcgcaaggcacaggacaggaagaaaggaattccatggaccgaggaggagcacaggaagttcctggacgggctaaggcagctgggcaagggggactggaggggcatctccaagggcttcgtcaccaccaggacggcgacgcaggtggccagccacgcccagaagtacttcctccggcagaccaaccccggtatgaagaagcgccgggcgagcctcttcgacgtcggtatcgcggactacaaggacaaccaggtgccaggccctcagagcatcgtcgctgccaaaccggcgcctacgcaggagataatccacaccgaccgcggcgacgtccccgtaatttatatactccttccgctgtgttttctccttgtcctggtggtaactgagaacccaagatctgaacagtgaattttttatcctccctctcctcagataccaagatatagaggcctcggagagattttaggcagtaacatgcaggtaaggtaaccttatgccctctattgcactggtagtaagggcggaaggacgttttcatgtactatataatagtctgagcaaaactgacaagcgaactgaatgatcctttggacaggttaatcaactgactgactactactatttcaacaagaactcccatgttcccgcggggacttcgctctccatggcctccggcctggaaacggcctcgaccgtcgacagcctggagctcagcatcgccgtcaacggcctggagctcagcatcgcgcccccttcccggtgcgtctgcggcggcgcggcgggggccatcaaggttctgtgactcggccgggacgccgagggagctactcgcatttggcttcccctgcgagcatgcgtttcatcaagtattatcagcctcgtcaggctgccgcgcgcagccgggtttcggtcttgctggttgtgttggtgtgttctgttctgttttgttgtgcgcaaggaatgtttgtgaagtgcattgcgttgtaatacactaatactagcagtgttgtggaatgg

SEQ ID NO: 87735 - DNA, 1440 bp, Zea Mays
gtaagcaagaccaacggagcaaggcccccccaggggggcggggcaccacaggtactcttctcctgcttggcctcttgtgccgcaaccgcgagtgcggcctacggtagcctccaaagcagcacatccaaagcagggaccgaatggacatggaccggccggaggaggaggggcagcagcggagggagacgatgacgccggtgctcctcaggctgttcggcgtggacgtccaccggggtggcggcagcggggagccggaggagtcgccgatggacctgaggaagagctccagcatgcccgacctcaccatcaacccgctgctgtcgccggaggagaaagagggctgcaaggggtacgcctccgacgacgcggagctggcgtccggccagcagaagcgccgccgtcgcaaggcacaggacaggaagaaaggaattccatggaccgaggaggagcacaggaagttcctggacgggctaaggcagctgggcaagggggactggaggggcatctccaagggcttcgtcaccaccaggacggcgacgcaggtggccagccacgcccagaagtacttcctccggcagaccaaccccggtatgaagaagcgccgggcgagcctcttcgacgtcggtatcgcggactacaaggacaaccaggtgccaggccctcagagcatcgtcgctgccaaaccggcgcctacgcaggagataatccacaccgaccgcggcgacgtccccataccaagatatagaggcctcggagagattttaggcagtaacatgcaggttaatcaactgactgactactactatttcaacaagaactcccatgttcccgcggggacttcgctctccatggcctccggcctggaaacggcctcgaccgtcgacagcctggagctcagcatcgccgtcaacggcctggagctcagcatcgcgcccccttcccggtgcgtctgcggcggcgcggcgggggccatcaaggttctgtgactcggccgggacgccgagggagctactcgcatttggcttcccctgcgagcatgcgtttcatcaagtattatcagcctcgtcaggctgccgcgcgcagccgggtttcggtcttgctggttgtgttggtgtgttctgttctgttttgttgtgcgcaaggaatgtttgtgaagtgcattgcgttgtaatacactaatactagcagtgttgtggaatggaattaggggagagggatcagctgggatttgggggttgatgggtccctgtctcgacttcgagtgggttcgtttcgtgttccaatccgaggaggcggcgacgggcgcaaggcgtcgtgtgggtgtggctctgagctccccgatcccgcccaataattggaccgtgccgtccaaaacgcatacgccaactaatcttcggaagaaagtcgcagctttacgttatgtgacatttagttaaagtg

SEQ ID NO: 87736 - DNA, 1187 bp, Zea Mays
ccaagcaaccaaccaagattcgagccgtggagtcgaagcatatgggccacggccgccacaaaaaggaaacgagaaagacaaggcctccgcggctccgcccccgatgcctccgctcctcacctcacccgcctccctcccctccgcctcccctctcctcgtctcctgtatcggcgctctccaccgccccggccccttcctccaccagcgcgccgccgcctcggtccacttcctcgcgccgcacaggaagacccgaccgccccccgcgatgagctggcttgggaagctgggcctgagcgggcttggaggcagcccgcgcgcgtcggaggcgtcggcagcgctggcgcaggggcccgacgaggaccagcccgcgccggggaacgagttcgcgcaattcggcgccggctgcttctggggcgtggagctcgcgttccagcgcgtgccgggagtcacccgcacggaggtcggctacagccagggcaacatccacgatccgacctacgaggacgtctgcaccggcaccacaaaccacaacgaggtcgtccgcgtgcagtacgacccggccgcctgcaagtacgacgacctcctcgacaccttctgggcgcgccacgaccccactactcccaaccgacagggcaatgatgttggaacacagtataggtcagggatatactactataacccagagcaggagaaggcggcaagagagtccctggagaagcagcagaagcttctgaaccggaagatcgtcaccgagatcgttccagcgaagaggttctatagagcagaagagtaccatcagcagtacctggagaagggcggccgcttcggcttcgggcaatctgcagccaagggctgcaatgaccccatccgatgctacggatgagccaaatggacctctacgtgcatggtgtgaatcgtaactgaataagggatgcatcaaagccagattttatactgctttcctaggtttgttttgccactattgaacggctgtaagagtttagctatatactaccatggtactccaatcatcgtgtacaaaaccatattgtattacatgcaagtgcgagtgagatttaagcgtaaacagattgttgtagaattcgtacgaattttacagagcagaaacaatgggatgcagggattgccagtgatgatggtggcatattttttttaaaatagtatat

SEQ ID NO: 87737 - DNA, 1940 bp, Zea Mays
caagtagttcccaaggcaggcagcaccaccaacataaaagaagaagaaggagaactgaagcgaccaataagaattctctccactcaggccactcgctcggcccattccccggaccccgatcgacccacccatccatccatcatccatgacgacgggggagggggcagaggcggcggccgtgccgcgggtggtctccatcctgtcggcgctgctgcagcgcgtggcggaacgcaacgacgccgcggcggcggcgccgccgccggctgctgctgctggccccccggtactgtcggcgttccaggggctcaccaagccggccatctccatcggcggctacctggagcgcatcttccgcttcgccggctgcagcccgtcctgctacgtcgtcgcctacatctacctcgaccgcttcctgcgccgccgccccgcgctcgccgtcgactccttcaacgtccaccgcctcctcatcacctccgtcctcaccgccgtcaagttcgtcgacgacatgtgcgtgctatatagctgctctgccctccctgcttccatcattcaccttttaataaatggaaaattttacaggcaaaaaaaaaacacagtagattttcaagtcgaattccgctcaccttttcactctaaaatacggaaatggaaaataaaaacatacagtatctcagcacaactacggttcatcaagttgaattccgcgcaagtgctggcttccgaattcaaaaaacaaattgttctgaaaacattttttttcacatgtaatactagtaactactccgtttctttttatttgtcgctggatacagcgacaaataaaaagaaacggaaggagtatattaaaacgtgatttagtactggaggtgcgtaatacatgtggtgatcccaagaactgttcagtacaggctgacgttaaaaatcgacactagaagttcagcgtcatggtagtcgtatagatgagatgggcttcgaaaatacatgattcggtaactggagttttcgtttgcttttggcgtgatcatcggcagcacactcccatgcatgactgtcacacatgggatttggaattggaatacacacatgggccccagatcggtctcggtaaccttttccctgtcacagtttccaactggcattgcatcaaagacaagccactgggttggtcacaaggacagttgtggaacccgaggctgatgacgcgcccacagcacactcacacagtcacacacagcctgcctgctggctgctgccgatccaccaccactcttaccaaagcacattcaccttgtcctacccaaccccctgtctgtcttcatcgccttcgaaaaacaagctacgtacagctggacgaatgcgtgaaccatccattttttttggttgttaaaaaagaattcatactctccttcctatgtcagggtgtgtggtctgctgttttgttttgtactatagcttcattcacctgctgtggtgtgggcgctgcagatgctacaacaacgcctacttcgcgcgggtgggcggcatcagcctggtggagatgaactacctcgaggtggacttcttgttcggcatcgccttcgacctcaacgtcacgcccgccgccttcgcctcctactgcgccgtgctccagagcgagatggcctacctggacgacgcgcccgcgcccgtcgtcgaggcgcccccaaggctgcactactgctacggcgccgccggcacgtctgaccgccacgacgaccccgccgcggtcgcagcagccgccgcagcctgccaccgtcacagcagccagccgcagctcactgtctgatcgaccggccgtgcaagcgtgcccgaccggtggatgcagccgtttcttttcttttcttttctttgttgtcctggcggggcgcgctggctggtggtgtcgactcgtcttcttccttggtgatggtctgtcttggtac

SEQ ID NO: 87738 - DNA, 1145 bp, Zea Mays
caagtagttcccaaggcaggcagcaccaccaacataaaagaagaagaaggagaactgaagcgaccaataagaattctctccactcaggccactcgctcggcccattccccggaccccgatcgacccacccatccatccatcatccatgacgacgggggagggggcagaggcggcggccgtgccgcgggtggtctccatcctgtcggcgctgctgcagcgcgtggcggaacgcaacgacgccgcggcggcggcgccgccgccggctgctgctgctggccccccggtactgtcggcgttccaggggctcaccaagccggccatctccatcggcggctacctggagcgcatcttccgcttcgccggctgcagcccgtcctgctacgtcgtcgcctacatctacctcgaccgcttcctgcgccgccgccccgcgctcgccgtcgactccttcaacgtccaccgcctcctcatcacctccgtcctcaccgccgtcaagttcgtcgacgacatatgctacaacaacgcctacttcgcgcgggtgggcggcatcagcctggtggagatgaactacctcgaggtggacttcttgttcggcatcgccttcgacctcaacgtcacgcccgccgccttcgcctcctactgcgccgtgctccagagcgagatggcctacctggacgacgcgcccgcgcccgtcgtcgaggcgcccccaaggctgcactactgctacggcgccgccggcacgtctgaccgccacgacgaccccgccgcggtcgcagcagccgccgcagcctgccaccgtcacagcagccagccgcagctcactgtctgatcgaccggccgtgcaagcgtgcccgaccggtggatgcagccgtttcttttcttttcttttctttgttgtcctggcggggcgcgctggctggtggtgtcgactcgtcttcttccttggtgatggtctgtcttggtacatatgtgttggtcgttcgttgctagtgagctctcggggtacgtagttctgcggccttaggtggattggatcgtacgtgggtggggtcaggattcttcttgggaaatttttgttttcaccattgttcgacggatcatgcatgcatggatcaatgagaaaatggatggatcggcttgggattctc

SEQ ID NO: 87739 - DNA, 1119 bp, Zea Mays
atggcctttaactactaccgaagcacttggtgtgggtctgctgcagctaataagaacaatgaagaaattgaagcatgtgctgttttggttgcaacattgaggaagaagcggcgttggggagggtctgttgttggccataagatgaaaaaacgcgaccgtattggtggcgacattcaactgaataatgactactttattgagaggtcgttgttcaaccctgagcaattccgcagaaggttccgtatgcaacaatcccttttcttggagattgaagataaattggcagctgcaaataagttctttagacaaaaaagaaatgcagctggtgtgttgggattctccagtagacaaaagtgtactgtggctttgcagatgttggcttatggaggtccagcagattttctagatgaaggtctgcgtatgggagaaagcacagtccttcaaactatcaaggagtttgctaaaacaataattgaagtttttggacctgaatatcttaggcctccttcagaatccgagttgcaacacattttatcagaaaatgaggcatgtggcttccctggaatgattggtagtatcgattgtatgcattgggaatgggcgaactgtcctaccgcttgggctgggatgtacatgggtcataagggaaagcctactcttattttagaggcagttgcgacaaaggatgtgcgatgttggcatgcattttttggtcttccaggatctcacaatgatattaatgtgttgcgttgctctcctgttttcgatgatttggcaaatggcaatacagcaccagttaactttactgtcaatggaaacccttatgcccttggatattaccttgctgacgggatttatcctgattgggtgactttggtgaaaagcataagtcgcccaatcagtaacaaacaatcggtgtttgctaaacagcaggaaaaatgccgcaaggatgtagagagattttttggagtatttcaagccaagtggaagattatgcatcaccctgctcgtctttggaatcagcatgatctcaataacattgtgcatgcatgtgtcattctacacaatatggtggtccagaatgaacgtggagttgaccttccaagagtgcacgtgtcg

SEQ ID NO: 87740 - DNA, 1767 bp, Zea Mays
aagttgagcccgtgagaagccaaatcgcgaacccacccgggccaggggcaaacctcgtgctcccctccacttgccgaggaggctcgcgacccgcgacgccttccgcagccccgacccaaaccctagccccctccaccgtactgccaccgtcatggccgaatcatctgccgctgccgaggtcgggtcgccagcttcgttgccaccactggtcgccgaggaggccgatgccgccgcgatggaggaggccgcggcggtcgcgaagaggtggcccgggtggcccggggacagcgtgttccggctggtggtgccagtgctcaaggtcggaagcataatcgggcggaagggcgagctcattaagcgcctcgtcgaggagaccaaggccagggtccgcatcctcgagggacctgtcggcgccaccgagcgtatcgttttggtttctggaaaagaagatccagacttggagctacctccagccatggatgctctcatgagagtttttaagcgtgtcactgggataacagatggagctgctgagggcactcaggccgctgctactcctgatgtatgtgctgcccgattgttggttcctggagctcaggcaattaatctaattgggaagcaaggtgcaactatcaaagcaatccaggagagcacgagtgcaacaatacgggtaatatcagtagatgaacatgaacgaccattctatgtaactgacgatgaaaggatagttgagatacaaggcgatacagagaaagttctaaaagcactgcaagcagtttcaaatcatcttcggaagtttttggttgatcatagtgtacttccattatttgaaaagactaatactacagtgagccaagatcgcaatggtgatggttggagcgatatgtcacgtccttcaattggttctgcacaagtgaatcaactaccttcagtgttagatgactatattcttcaagtgaagagggatcctctgtaccttgaacgagaatctttggtagatcataacattcatcgctcaggcgtatcactttatgggcgtgatccagccttgtcaacactacgaccctctgcagtacatggtgctggctcactacttacacagataacccaaaccatgcaaatcccacttacctatgctgaagacattataggagttaaaggagcaaatattgcgtacatacgagctaatagtggggctgttgttacaattcaggagagtttgggtagtcctgatgatattactgttgaaataaaggggacatcttcacaggtgcaagctgcacagcagctcatccaggactcgttggctgcacaccgagaacctgtcaggagcagttatgtgggggcaggattagattcagtatataggtccagctactcacaatatggcagctcaatctatccctcgtcatcactgccgtcttattctagcatcgatgatgttagtagatacccgtcttcaggccttggtggctatggttcgagttaccggtactaatagcagtttgtcctcgggcttgaatgcttgatggcaccagtgatcattgtatcccagtacccagacttcagggtctgctttgttttgacaaacaattaattggttttatagattttcgccactcatggattcagaaattgtacatgtttgctggtgccttttttttttccttagcgctacaatttaggagctgtttggttggtctttttcagaccaccaatgatttccggcgtggatgtggatgtatgtatagtgctattttttgtttg

SEQ ID NO: 87741 - DNA, 1592 bp, Zea Mays
gtgccctcaggccaggcctcgtccatcggccgcgagtacgcggctctgcgacaaaccccgcaaaaccaccgcaccgctccgcccgcccacgcggccgcaccggtgggcgatgccctccgtagccggtcatttcaccgcgggcgcggcccatgcccgcggcccaccaccgcaccgcctcgcctcctgctccttatatgaccggttccccacctccgcctccgttccccatctccaccaccaccaccaccaccaaaccctagccgcctcccttcgccgccgcagctgatcggccatgtcttcctcgacctccgatgcggccagggacgacgtcgtctcatctcccgacctgccccccctgtccgcgcacgtcgccgcggcggctgctgcggccgcggcagcggcctcctcggggggaggaatagggctcgggggcgggggctccggccggaggctgccgccgccgtgctggacgcacgaggagaccctcgcgctcatcgaggcgtaccgcgacaggtgggaggcgctgaggaagggcaacctgcgcgcggctgactgggacgacgtggccaacgccgtcaccgctcgctgcggtcggttccccaccgccacgcataagtccggcgtgcagtgccgccacaagatcgagaagcttcgaaagcgataccgcgctgagcggtcgcgatccgcggggcggtccaaggggcccaagtggccgttcttcccgctcctccacgacctcgccggcggcggcgtgccggaccctagccctaacgccatcgtcaagatcaagaccaagggccctgccccgccggcatccccgccttcccctgtgtcctccccttcctcctccgaggaggctgtgcggagcaggagcctgcacgggctcatctccaacggcggggccgggagcgggctgcgcttcaccatccctaaggcctgccgcacgaagcccgccgcggcggcagctgtgaagccggagaggagcggcggcgaggacgacgccgagtcagaggcgatggccgaggtggctgccgcactgcggtccgtcggggaggggttccttcgtatggaggagcgcaggctcgagctgtcgcttcagatggagaaggaacgaatggagtcagagatgaagcgcacccagacgatgctcgacgcccaacagctcttcctcgaggccttcctgggtaagcagcagcagcagcagcagcacaagaaggccagggtctccccttcctctgccgcaatggaagaggactgatcaatccatgtagcccggttgctctagttctgctctgtcaaccttgtgtgcatccttcctcgctctgcgttgactgctgttcatgctagtattgttaactttgtgtcagtagcaatataatcttactattgtgtatggatggtgatgtaggtgtagggatatggatatggataaggggggaagggcgaggtttgaattagaaattaggtggtctcagttttaatcagtgaacgacttgtgttatgagcttatgatgagctgctgctgttacgttgaaacacttcagcttgttcaaatggcatctactcgttgtcaattttattgttgagtttga

SEQ ID NO: 87742 - DNA, 1640 bp, Zea Mays
ggctgacccgaccccaaggccgaacgggggaagggcggcagccccagcctccgggtagcgcagcggggccaggagctcagctccccgcctcgtctgggtcggttcggccccgctccgacgcgtggtgggcgcgagcgcgaccagtctgcgacccccggcttcaggtccgttccgcaccccgcttcgtccaaccaatcgccgccgcgtctcgtcgcatcgcctccttttcccccgcccgcgcccggacggcggcctcgcctcgccagaagaacccaggctgcagccgaaacccccggtctccgtcatccgaccccgcctcgacggcccagatccacttgccgccgctgccctcgtgctcctcactccctcgcctcctccggggccgcggctccgcggcgaagacagctgcgagcggggcggccatttctaggcggaagcgcgggcggctgggctagcagattgattggtttgagtggttgggtcggctctaggaaacgccccgccgcggcgatggggtgcttccattccacggcgaagcggcaacaccctggctacgaggaccccgtgcacctcgcctcccagaccgccttcagcgttagtgaggttgaggctctattcgagctgttcaagagcataagtggttcggtgattgatgatggcctgatcaacaaggaagaattccagctagcactatttaagaatcagaggaaagaaaatcttttcgccaatcggatatttgaccttttcgatgtcaagaaaaggggtgtcattgattttggtgactttgtccgagctctaaatgtgtttcatccaaatatcccaatggaagaaaaagtcgatttctcgttcaagctatacgatatggatggcacagggtttattgaacgaaaggaggttaagcagatgttaattgctctcctaggagaatcagaaatgaggctatctgatgagatcattgagacaatcctggataagacattttcagatgctgatgcaaatcaggatggaaaaatagatagaacagagtgggagaattttgtcacaagaaatccttccttgatgaagataatgactctgccatacctcaaggacataacaacaacattccctagctttgtgtttaactcggaagtcgacgatctcgtcacgtgaccaccactctctccgatgtatagttaataaggagttttttctcccctcaaccgcaaaaaggagaacctgtcgagggttacgagtggagatttccagctttctctggcaatgaatggagggtgcgtcaaattggctgccacaaatgtacgagacgacctgtagttttcactcagggcttgtttgggagcaagtggaatgaagggtattgataggactataatcccttgctatctaaaattgaatagtggaggattatatgccctccaattcactccattacctttactcccaaacaagccctcaatggtaatgatgatgcttttgtgttggtgatgattgagactgagttagtatgcagatgtgaacagtttccatttttaccagtgggaaggctgttttgtttgtgaaactgcgatgtgcttgtttgcacactgtactgatcaaacctgattcttgtcaaagtagtactgcattcttcttcaagtccc

SEQ ID NO: 87743 - DNA, 1542 bp, Zea Mays
cgaccccaaggccgaacgggggaagggcggcagccccagcctccgggtagcgcagcggggccaggagctcagctccccgcctcgtctgggtcggttcggccccgctccgacgcgtggtgggcgcgagcgcgaccagtctgcgacccccggcttcaggtccgttccgcaccccgcttcgtccaaccaatcgccgccgcgtctcgtcgcatcgcctccttttcccccgcccgcgcccggacggcggcctcgcctcgccagaagaacccaggctgcagccgaaacccccggtctccgtcatccgaccccgcctcgacggcccagatccacttgccgccgctgccctcgtgctcctcactccctcgcctcctccggggccgcggctccgcggcgaagacagctgcgagcggggcggccatttctaggcggaagcgcgggcggctgggctagcagattgattggtttgagtggttgggtcggctctaggaaacgccccgccgcggcgatggggtgcttccattccacggcgaagcggcaacaccctggctacgaggaccccgtgcacctcgcctcccagaccgcctgaagaattccagctagcactatttaagaatcagaggaaagaaaatcttttcgccaatcggatatttgaccttttcgatgtcaagaaaaggggtgtcattgattttggtgactttgtccgagctctaaatgtgtttcatccaaatatcccaatggaagaaaaagtcgatttctcgttcaagctatacgatatggatggcacagggtttattgaacgaaaggaggttaagcagatgttaattgctctcctaggagaatcagaaatgaggctatctgatgagatcattgagacaatcctggataagacattttcagatgctgatgcaaatcaggatggaaaaatagatagaacagagtgggagaattttgtcacaagaaatccttccttgatgaagataatgactctgccatacctcaaggacataacaacaacattccctagctttgtgtttaactcggaagtcgacgatctcgtcacgtgaccaccactctctccgatgtatagttaataaggagttttttctcccctcaaccgcaaaaaggagaacctgtcgagggttacgagtggagatttccagctttctctggcaatgaatggagggtgcgtcaaattggctgccacaaatgtacgagacgacctgtagttttcactcagggcttgtttgggagcaagtggaatgaagggtattgataggactataatcccttgctatctaaaattgaatagtggaggattatatgccctccaattcactccattacctttactcccaaacaagccctcaatggtaatgatgatgcttttgtgttggtgatgattgagactgagttagtatgcagatgtgaacagtttccatttttaccagtgggaaggctgttttgtttgtgaaactgcgatgtgcttgtttgcacactgtactgatcaaacctgattcttgtcaaagtagtactgcattcttcttc

SEQ ID NO: 87744 - DNA, 726 bp, Zea Mays
aaacccccggcacctgtccgaattccagccgcccacctcacgcaagcggcaagcccacgggcgctctctctccccctgcgcctcgtcgcctctccaatccctctcgtcctctcgctttctctctccatctcgtttcccccgcctgcgcagccagcgcaaaccctagccaacaagcgccgttctgcgaggctctcggcagcggataacttaacctgtcgcgcaaggatcgggggagagaaaccagcggcaacttacgtggatcggggttgtttggtgctgctgcggcggcgcagggatggaccggaagcgcatcaaggacgcgctcgagaagcacctggagaggtcgtcgccgtctacttccaggggcgtcgtgtccaaggagagggagcgcctcgctgccgggaagctgccgtcatcgcttggcaaggcggaggtgtctgatggtgaggaatttgaaactgacagtgaagattctgatgtgagtggttccgagggagaggacacgtcctggatttcatggttctgtacattgcgaggcaatgaattcttttgtgagatcgatgatgactatatacaggatgattttaacctgtgtggtctgagtaatcaggtgccatattatgattatgcacttgatctcatcttagacattgagtcttctaatggtgagattgtttttcctcaaggaagttaatgcatattggtttgcctttccggaatttatgg

SEQ ID NO: 87745 - DNA, 1509 bp, Zea Mays
aaacccccggcacctgtccgaattccagccgcccacctcacgcaagcggcaagcccacgggcgctctctctccccctgcgcctcgtcgcctctccaatccctctcgtcctctcgctttctctctccatctcgtttcccccgcctgcgcagccagcgcaaaccctagccaacaagcgccgttctgcgaggctctcggcagcggataacttaacctgtcgcgcaaggatcgggggagagaaaccagcggcaacttacgtggatcggggttgtttggtgctgctgcggcggcgcagggatggaccggaagcgcatcaaggacgcgctcgagaagcacctggagaggtcgtcgccgtctacttccaggggcgtcgtgtccaaggagagggagcgcctcgctgccgggaagctgccgtcatcgcttggcaaggcggaggtgtctgatggtgaggaatttgaaactgacagtgaagattctgatgtgagtggttccgagggagaggacacgtcctggatttcatggttctgtacattgcgaggcaatgaattcttttgtgagatcgatgatgactatatacaggatgattttaacctgtgtggtctgagtaatcaggtgccatattatgattatgcacttgatctcatcttagacattgagtcttctaatgatgacgggtttaccgaggagcaaaatgaattaatcgagtcatctgcagagatgctgtacggtttaattcatgcacgatacattttaaccagcaagggtctagctgcaatgttggagaagttcaagaactacgactttggtagatgccccagggtgtactgctgtggccagccctgccttccagcagggcaatcagatgttcctagatcgagcactgtgaagatatattgtccgaaatgcgaagaacttaactatccaagatccaagtaccaaggcagtatccttttgatataatctccatacttccatttacatgtactggccgttttatgctatatccttcttaagcgatttatattttgaccaccctttggaactattgatttttttttgcaacatcgttttatgtgttctctggtctccatgccaacaccctggtgaaccacattgaacattccgtcagtcctgcttttctgtcgttgaactcttcctcggtaaataatggatatttgcaagctgccattacatgcccttaactttacccagacatcgatggatcatactttgggacgacattccctcatcttttcctgatgacttactcgcacttgaagccgcagaagccgtcacagcaatacactccaagggttttcggcttcaaacttcacaagccgtcatgacagagttgtagcttccgccagaagcacccctgtcacctaggttttagggagagcatcgtggccttcaaatactgttgtattattgatgtacgaattcgcgagcctgggcctcgctgtaaactattgtgaaattgtatctgttttccgatattattactgttgtgt

SEQ ID NO: 87746 - DNA, 1328 bp, Zea Mays
aaacccccggcacctgtccgaattccagccgcccacctcacgcaagcggcaagcccacgggcgctctctctccccctgcgcctcgtcgcctctccaatccctctcgtcctctcgctttctctctccatctcgtttcccccgcctgcgcagccagcgcaaaccctagccaacaagcgccgttctgcgaggctctcggcagcggataacttaacctgtcgcgcaaggatcgggggagagaaaccagcggcaacttacgtggatcggggttgtttggtgctgctgcggcggcgcagggatggaccggaagcgcatcaaggacgcgctcgagaagcacctggagaggtcgtcgccgtctacttccaggggcgtcgtgtccaaggagagggagcgcctcgctgccgggaagctgccgtcatcgcttggcaaggcggaggtgtctgatggtgaggaatttgaaactgacagtgaagattctgatgtgagtggttccgagggagaggacacgtcctggatttcatggttctgtacattgcgaggcaatgaattcttttgtgagatcgatgatgactatatacaggatgattttaacctgtgtggtctgagtaatcaggtgccatattatgattatgcacttgatctcatcttagacattgagtcttctaatgatgacgggtttaccgaggagcaaaatgaattaatcgagtcatctgcagagatgctgtacggtttaattcatgcacgatacattttaaccagcaagggtctagctgcaatgttggagaagttcaagaactacgactttggtagatgccccagggtgtactgctgtggccagccctgccttccagcagggcaatcagatgttcctagatcgagcactgtgaagatatattgtccgaaatgcgaagaacttaactatccaagatccaagtaccaaggcaacatcgatggatcatactttgggacgacattccctcatcttttcctgatgacttactcgcacttgaagccgcagaagccgtcacagcaatacactccaagggttttcggcttcaaacttcacaagccgtcatgacagagttgtagcttccgccagaagcacccctgtcacctaggttttagggagagcatcgtggccttcaaatactgttgtattattgatgtacgaattcgcgagcctgggcctcgctgtaaactattgtgaaattgtatctgttttccgatattattactgttgtgtaaccttggttctctctcactcgcttgatcgaagtgtgtcgtcaacatgcatggtttcagggcatttcacacgaaatattttccgccct

SEQ ID NO: 87747 - DNA, 1556 bp, Zea Mays
acctcacgcaagcggcaagcccacgggcgctctctctccccctgcgcctcgtcgcctctccaatccctctcgtcctctcgctttctctctccatctcgtttcccccgcctgcgcagccagcgcaaaccctagccaacaagcgccgttctgcgaggctctcggcagcggataacttaacctgtcgcgcaaggatcgggggagagaaaccagcggcaacttacgtggatcggggttgtttggtgctgctgcggcggcgcagggatggaccggaagcgcatcaaggacgcgctcgagaagcacctggagaggtcgtcgccgtctacttccaggggcgtcgtgtccaaggagagggagcgcctcgctgccgggaagctgccgtcatcgcttggcaaggcggaggtgtctgatggtgaggaatttgaaactgacagtgaagattctgatgtgagtggttccgagggagaggacacgtcctggatttcatggttctgtacattgcgaggcaatgaattcttttgtgagatcgatgatgactatatacaggatgattttaacctgtgtggtctgagtaatcaggtgccatattatgattatgcacttgatctcatcttagacattgagtcttctaatgatgacgggtttaccgaggagcaaaatgaattaatcgagtcatctgcagagatgctgtacggtttaattcatgcacgatacattttaaccagcaagggtctagctgcaatggtaatccatatcacgatctaagtaggatcagggcatgttttgctcctcttatctccctttgatattgaactattctgctttcgttcgccgcagttggagaagttcaagaactacgactttggtagatgccccagggtgtactgctgtggccagccctgccttccagcagggcaatcagatgttcctagatcgagcactgtgaagatatattgtccgaaatgcgaagaacttaactatccaagatccaagtaccaaggcagtatccttttgatataatctccatacttccatttacatgtactggccgttttatgctatatccttcttaagcgatttatattttgaccaccctttggaactattgatttttttttgcaacatcgttttatgtgttctctggtctccatgccaacaccctggtgaaccacattgaacattccgtcagtcctgcttttctgtcgttgaactcttcctcggtaaataatggatatttgcaagctgccattacatgcccttaactttacccagacatcgatggatcatactttgggacgacattccctcatcttttcctgatgacttactcgcacttgaagccgcagaagccgtcacagcaatacactccaagggttttcggcttcaaacttcacaagccgtcatgacagagttgtagcttccgccagaagcacccctgtcacctaggttttagggagagcatcgtggccttcaaatactgttgtattattgatgtacgaattcgcgagcctgggcctcgctgtaaactattgtgaaattgtatctgttttccgatatta

SEQ ID NO: 87748 - DNA, 2166 bp, Zea Mays
atcgatgcaggaaaaagggagcgaaaaagcgtaaggcggccgccttcgccatttctccgctcctccgcctcgcctcgcctcgcccatcgttccatgtctttctcctccggcggtcaccacccctcccggccggaccaaccccggatcccatttccagttagatgcttccccttcaccaccaccccgccgccgcgccggagtcggcggccccggcgacagaccctccgcccccgccggtcctcgatccgtcctccctccgcatccacatcccgtcaagcccgcaccacgcactgccctccaccccgcacaagcgccccgtcgtcatgacctcgtcgtcctcctcgtccacccccacccgcccctcaccgttgcccttcaccccgcctcggaggcgcaaggtccccgcgcccgctgctcccgcggggacagcggcggccaggcatctccttcgctgcctgcacctccgcctgcgtgtcctcctcctcatctcgcttccctccctctactttctctccccgacccctgccatttttccgcgctccctcctcgccgacttcctttccgcggcggccttctcctgcgcgctcctccttctcctctgcctctccctgccgcggcttcccttcgcgctgacgctgccgctccccctccgccgcgcgcgccgatcccccatcctttggtccatcggttcctcgccatccgcatctgcgaccacccccacaaccggccatttcgtccaggtttatagcaacggtgacgtctacgagggccagttccaccgcggccgctgcactggcagcggcgtctactactactacatgagcgggaggtacgagggagattgggtcgacggcaagtacagcggcttcggcgtcgagacatgggccagaggtagccggtaccggggccagtaccggcagggactcaggcatggctacggcgtgtacaggttctacactggggatgtgtatgccggggagtggtcaaacggccagagccatgggtatggtgtgcacacctgtgaggacggtagccggtatataggggagtttaagaggggcgtcaagcatggtctcggccactaccatttcaggaatggtgacacctacgctggagagtactttgctgataggatgcacggctttggaatctacagctttgccaatggccatagatatgagggagcatggcatgagggtagaaggcagggtttaggcatgtatagtttcaggaatggagagacacaagctgggcactggcaaaatggagttcttgatactttaagcacccagaacttcatccctggatcacctattgctgtgaaccattccaaggtcctcaatgcagtgcaggaagcgagaagagctgcagagaaggcctatgacatcccaagagttgatgataaggtgaacagggcggttgcagcagctaataaagcagccaatgcagccagggtggctgccgtgaaggctgcacaaaagcgcatccccagtaatggtgacgatctaccactgtcagtagtgtgacaatgaagccaatatggcaatatatgttggcatggagctgcttcgcgatgccatcgcatcaccaattgcccgacataaccttcaacttcccagtaggtgaagccactgctcgtccatcaggccatggcgtgttggcgacacctgagtcattgccagcagcattcaagcttgcgggagaagaccaagttttcagccatcccttccatacatctttgtgatgtcttttgcgatgcagcagaaccactgctctgaggactttccattgtccaaggcagccggtcgaggtcagcagtaggttttatcctgccttttctgcagtgtaatactcacccgatgttagtagagatatgatgaatgtacaccccaacatcagtcgataaaaaactgtgtttattttctctcttggactatgtacagaacctacaaatttagcggttgttggccgtgctggttggagaaacgacaggtgccttcgggttcggccattttcgtactttgtacttcatacgagaacaagataccatgatcatgagcgtctcctgttgttttgtggtcggcgtgttgctgcaaattgtttagtaatggtgtagtacaggagtgccgtatcagattccccatgccggtcaaaggcgatcgcgcg

SEQ ID NO: 87749 - DNA, 1664 bp, Zea Mays
ttaactccaactagacgaggtcagccacgcgcaacggcgcaagccgaatccaccaacgccaaacgaccgcaccagccagtccacttcgccagtgatctgtctcagctcgtcgcgtctccggcgccgacagacacgggcgagtgggcaacgcggctccgagatcggcgggcaggatgatgatgctgatcgactgctcgaggtgccgtaccccgctgcagctgccgcacggggctccctgtatccgatgcgccatctgtggggctatcacgcacgtcgcccccgcccctcctgtcgagcccaaccgcggtgccgtacagccgccgccggggtggggtccaccgccgccgccggtgcacgggcgaaagcgagccgtggtgtgcgggatatcgtatcggcactcgcggtatgagctgaagggctgcatcaacgacgtcaagtgcatgcgccacctcctcatgacgcgcttcaacttccccgacgactccatcattatgctcaacgaagaacaaaccgacccctacaaaatcccaacaaagcataacatagggatggccatgtattggcttgtgcaaggttgtcaacctggagactcattggtgttccattattctgggcatggagcacagcaaagaaactacaatggagatgaggttgatgggtttgatgaaaccctctgcccattggattttgagacacaaggaatgattgtggatgatgacataaatacagcactagttcgaccacttcctcgtggagttaaacttcatgcattcattgatgcttgtcatagtggaactgcacttgatttgccttacctctgcagaatgaacaggagtgggcaatatgtatgggaagatcaccgaccaccatctggtgtctggaaaggcactagtggtggggaggctatttcatttagtggttgtgatgatgatcagacctctgcagatacctctgctttatcaaaggtcacttcgactggtgcaatgacatttggcttcatccaagctattgaacgtggacagggcaccacctacggtagtatcctgaactccatgcgttcgacaatacgcaacacagatgactcagcaggtgtaggtggcggtgctgttacatcactaattacaatgcttcttactggagggagcctatctgctggtggtctgagacaggagccacaactgacggcatgcgagccatttgatgtctatgcgaagcccttctccctatgacgcgttcatggtgctgctgctgcccacccatttcacgttatcaacttatcatcgtgtacatttcaccatcccgattgttaacagcgcgtggaattacaatccgtataaggaagctatgcatatatatcgtttgtttcacaggtacaatccgtatatgcatgaataattttttgtgcacgctggcccgacaaggctaatctcagtcctataattggctagaatgtagagatggtaatgggacctgatacccgattcttcgtttggaatttttcttttaggggatgaggaagtttcttcctctacaggggatgtaaatgggaaaaatcctctcccgatgggtaaatgaggatggggaagcattttcattcccgttctccgcgcgaggacctgttaaacttatatttgacaatgttttcatttaataattaattatag

SEQ ID NO: 87750 - DNA, 157 bp, Zea Mays
gctttttgcaattttggatcaaaactagtgtatttatgaattttaattatactttgatgattttatgtagaaagaaattaataatatataaatagcctcagaaatctatgaaattatacgaaggtacaacatatggccacatatagtcataaaaaat

SEQ ID NO: 87751 - DNA, 1003 bp, Zea Mays
taaatacagaaaaatagaatacactttattacctgatttagcaccgcataagatacatgcaaagattcaagtacatgtatctagaaagtgtcttttccgaggtgctactgacagtggaccactacaacatgttgatatggttttgtctgatcgagagggtaatgttatttatgctgaaatccctggaaatttagctgaacaaaaagcaacaaacattgaaaaaggaggagtttatgacatcaacagatttagagtgtgcgcaacaaaaactgtgttcaaaatagtggatggggacaaaatgatccagttcacatttcataccatagtaaaacgtgccacaagccctccaacaacatttccattatatgtttatcggctaacatcgttttatcaaattgagcctcatgttcaaaccacgaatatctttgttgatgttcttggtgtcataactgaaattcatgaactgacacatgtgcatgtccggagtcaactaacaccaacagtgacaaggaccattatcataaaagatctcaccaacaaaacaatgaagatcactttatgggcagatcaggcaataatgttcactcttcatgacgtctacgatgcaaatacaaataaaccaattcttgtgctcttcgtcgagtgcttaccaaaattttacaaaggtgtctacctaagtggtggtcctgcctgtagatggtacttcaatccagcaattccagaggcagaaccttatcttaccagtgcaaacaagagtaatatcaatagcccagaaaaagatgatggcgataaggataccgcacagacattacctattttcgacttctttacaaagaacttcgatatgtgcagcttgacacagtacctaataacaaaggaaaaggtccaacagatacaattgaatcgccatctaaaaggttacgctccgtatcataccctcctacatgaattattttccttcctgttacgatatcgtagttccattaccaatcttagttactaa

SEQ ID NO: 87752 - DNA, 1809 bp, Zea Mays
aaaaccacacttacaagccacggaccacggaccagtctgcaacagcgcgacgctctcctccttccacgccagcaggagtcaggaggagagcgcgcggccgggtgccgggtgggacaagcacacttgatggcatctaccgccatcccgtccccgccgcctccggcggtgccagagcggagagtgccactggtgccgcggctggcggacgatggcggcgggggcgttatgggtgacgcgcgggggagtagtgcgggaggaagcgggagcgggagcgtggcgggcatttcgccgagcatcctcatcatcgcagtcatcgtggtggtgatgctgcttgcgtcgctgtgcatccactacttcatccgccacctctgccgccacgcgggcccagcggtgtcctcctccccttcgtcccgacaggctccgccgctcccgctcgtggcgcaccccgcggcggtggcgtccgtggcggccgccgacggccagggggcaggaggagggaaggcggcggaggcggagcggctcatcgcgcgcctgccgctgttcacgctgtcctcgtcgctggcctcggtgcccaagtcgtcgcgcgactgcgccgtgtgccagagcgcgttccgcgacgacgacgagctccgcctcctgcccgcctgccgccacgccttccactcccgctgcgtggacccgtggctccggggcaacccatcctgcccgctgtgccgcgcctccatcgcgctgccctgcccgccgctcacggacctcctccgtgtggagctcggcagcgtcagcagccgccgctccaacccggacgctgcggccgccgccgttcgcgcgtacccgctccccggtggcctccccaactcggagtcgtcggaatacctcgtggaggaggagctccaggtcgtgctcaaacggagcccgcgcgccgccgccgggtccagcgacccgccaagccagcagcagcagaatcagcttgccgcggtggagcgcgggcagccgtcgtcgtcgtcgtccgtcggcctaacccctacggcatcgttcagatcgacggcggagcggtggagcagccgctggagcaaccggtggagcagccggtggagcagcgggcgctggagcagccggtacgacgccgggaccgtgacggccgcggccacggcggagtggtggtgggacatggacggcggcgtggcccccgcgacgcggcggagggacgcggacgacggcagcgcgtcgttctacgggttcgtgcggtggctcaccggtgcatactagtaaatacgatcgtacggtgctgttagcatagcatggtaccatcgatccatgaaagcggtgaaagctagcttcgcccctgcggcagcgtcttcgtgaaacgaatcgaaatgaactgggggtgtctgtctgtctggctggctctccttttcggcatgcgagcgtcgaaattgttttgctttattagtattaattttttttgtttcggtttcggggcgggcgggtggattccgaggacggagatgcatgcagtgcagatgcggtgcctcccgatcgcggatttcaaaactgcttccgaattggagaatgtcggcgggaagaatgaggaatggatttgtggacttccaggcaggttggcacagcgcagcgcagcagtctcggccaaacaaaaaacaaaattggtagttttttttttcctttttgctgcattttttatttgctcttggttttgtgctactcagcatttctgtatacaccttcgatttgtatgcatgttagttgcatagcaaataaattaagcaaaggcaggaggagtttattcatcga

SEQ ID NO: 87753 - DNA, 2014 bp, Zea Mays
atacagaccatttcgagatgaaggcccaacaagaaactatagaagcatcgagaagaaatccatccccgtgcaaaaacagataagggacggcacgcgacgcaactatcctctagagagagagaggaagcccgtcgttctggaagtttccacgctccgcgcctccgccccctggtctccgctccaatggcgccctcactcctcgccgccatgtccacctcgcccttcctagccagcagcggcagcagccgcaggccgctaggcgctgcccacacccgacgggctggactgcgcgtggccgcgcttaagtacgaccctgccaaggtgggtgggttcgctgctgtgtgaatccatgcgctctggtttcgagtcttcaaggtttgctgggtggaatttatgatctaagtctaacggtgtggttcttggtttttttttggggggggcaggtggcgccgcagaacgaccgggttctcgtccgtcttgagcagatccctgaggtctctccgctatcaatcgtgtctccactccaatacgcatggattgagacggatacgagtgtagccgtataaagcctaagtgctgtagttactctgactttgagagcaactacgaccacttgggttttgaaatgtcttatggaatctgagtttatttatatagcagtataattgattcactcaagctaacactcccccaactataattacagtattctgtttactgcaccgattagagatattgcagtactatcaataagtgtggttagtttgacatgttagcagggctctgtaattttaaaattttagaatcaactgttgcacccgtccttttctatacctgaattactgtacaatcctgtttcctgtgaaactgtattacaggaatgcacatgtgtctgctgaagtttttagaagttgatagtttgatataattgattgttctgagttctgagtttctgacaaaactgttttattcatgcagaaatctgctggcggtgtattgctaccaaaatctgctgttaagtttgagagatatctgatgggtgagattctatcgatcggtgctgaagtcagtgaagttgaggctgggaagaaggtaaggaacattttatgacttaactcttattgatgcatgctcaaatgctcacttgtgcaaacaagtagcatttttgtgctttgcgtgtgaagtttgtttatactttagagaacaatctatcatatatttcacacttttgtttatactttggagaacaatctatcatattatgtcacactttgctttgtggtttgtcttctaatcttactattcaaatttattgtttatcttggacaaaggaactaagtgaatggactatgtttacttgagtagattgaagagtggttatgtttctaaaacaaatatagtgtgctaatttgcaagatgctaccattatgacattgtctgctactgaaatctgcttgtcacgccagaaatagacatgctttatttttgttttctatccttgtcaatttttccggcaattgaaattgttactgtgtcaattcttacagtttgcatagtttgttgaatgtacttttacttttaccgtagtacaatgctcataatgtagaatactgtaaccagtttgcacttgcaggttctcttctcagacatcaatgcttatgaggtaactggcttattttctcttaacaattttttttggccttgccgtgagccctacattttccgattcaatcaacctagctgacttagctcattgtgttgtaggtggagcttggtactgatgaagagaagcactgcttctgccgtgagtcagacttgttagctgtagttgaatgaattttaccatgaaaatttcggacttacctgggaatgctccaacggcatgaacttatcttgcccccactttgttgtatgccatttgaacgttcgttaattcagcttctagatgattgttagttaccgttgatttttggtcgccataaactggaattatgttaatgcccattttctttac

SEQ ID NO: 87754 - DNA, 1375 bp, Zea Mays
catccccgtgcaaaaacagataagggacggcacgcgacgcaactatcctctagagagagagaggaagcccgtcgttctggaagtttccacgctccgcgcctccgccccctggtctccgctccaatggcgccctcactcctcgccgccatgtccacctcgcccttcctagccagcagcggcagcagccgcaggccgctaggcgctgcccacacccgacgggctggactgcgcgtggccgcgcttaagtacgaccctgccaaggtggcgccgcagaacgaccgggttctcgtccgtcttgagcagatccctgagaaatctgctggcggtgtattgctaccaaaatctgctgttaagtttgagagatatctgatgggtgagattctatcgatcggtgctgaagtcagtgaagttgaggctgggaagaaggtaaggaacattttatgacttaactcttattgatgcatgctcaaatgctcacttgtgcaaacaagtagcatttttgtgctttgcgtgtgaagtttgtttatactttagagaacaatctatcatatatttcacacttttgtttatactttggagaacaatctatcatattatgtcacactttgctttgtggtttgtcttctaatcttactattcaaatttattgtttatcttggacaaaggaactaagtgaatggactatgtttacttgagtagattgaagagtggttatgtttctaaaacaaatatagtgtgctaatttgcaagatgctaccattatgacattgtctgctactgaaatctgcttgtcacgccagaaatagacatgctttatttttgttttctatccttgtcaatttttccggcaattgaaattgttactgtgtcaattcttacagtttgcatagtttgttgaatgtacttttacttttaccgtagtacaatgctcataatgtagaatactgtaaccagtttgcacttgcaggttctcttctcagacatcaatgcttatgaggtggagcttggtactgatgaagagaagcactgcttctgccgtgagtcagacttgttagctgtagttgaatgaattttaccatgaaaatttcggacttacctgggaatgctccaacggcatgaacttatcttgcccccactttgttgtatgccatttgaacgttcgttaattcagcttctagatgattgttagttaccgttgatttttggtcgccataaactggaattatgttaatgcccattttctttacagaggctcttgctcacgtttggaatacgaaactgtgctgaaccgaacttgaaatgtttacattgcccatctgatgtttctgcttctgaacattctttaggcaacatcctaattatttctatcagggtc

SEQ ID NO: 87755 - DNA, 847 bp, Zea Mays
catccccgtgcaaaaacagataagggacggcacgcgacgcaactatcctctagagagagagaggaagcccgtcgttctggaagtttccacgctccgcgcctccgccccctggtctccgctccaatggcgccctcactcctcgccgccatgtccacctcgcccttcctagccagcagcggcagcagccgcaggccgctaggcgctgcccacacccgacgggctggactgcgcgtggccgcgcttaagtacgaccctgccaaggtggcgccgcagaacgaccgggttctcgtccgtcttgagcagatccctgagaaatctgctggcggtgtattgctaccaaaatctgctgttaagtttgagagatatctgatgggtgagattctatcgatcggtgctgaagtcagtgaagttgaggctgggaagaagtttgcacttgcaggttctcttctcagacatcaatgcttatgaggtggagcttggtactgatgaagagaagcactgcttctgccgtgagtcagacttgttagctgtagttgaatgaattttaccatgaaaatttcggacttacctgggaatgctccaacggcatgaacttatcttgcccccactttgttgtatgccatttgaacgttcgttaattcagcttctagatgattgttagttaccgttgatttttggtcgccataaactggaattatgttaatgcccattttctttacagaggctcttgctcacgtttggaatacgaaactgtgctgaaccgaacttgaaatgtttacattgcccatctgatgtttctgcttctgaacattctttaggcaacatcctaattatttctatcagggtc

SEQ ID NO: 87756 - DNA, 783 bp, Zea Mays
catccccgtgcaaaaacagataagggacggcacgcgacgcaactatcctctagagagagagaggaagcccgtcgttctggaagtttccacgctccgcgcctccgccccctggtctccgctccaatggcgccctcactcctcgccgccatgtccacctcgcccttcctagccagcagcggcagcagccgcaggccgctaggcgctgcccacacccgacgggctggactgcgcgtggccgcgcttaagtacgaccctgccaagaaatctgctggcggtgtattgctaccaaaatctgctgttaagtttgagagatatctgatgggtgagattctatcgatcggtgctgaagtcagtgaagttgaggctgggaagaaggttctcttctcagacatcaatgcttatgaggtggagcttggtactgatgaagagaagcactgcttctgccgtgagtcagacttgttagctgtagttgaatgaattttaccatgaaaatttcggacttacctgggaatgctccaacggcatgaacttatcttgcccccactttgttgtatgccatttgaacgttcgttaattcagcttctagatgattgttagttaccgttgatttttggtcgccataaactggaattatgttaatgcccattttctttacagaggctcttgctcacgtttggaatacgaaactgtgctgaaccgaacttgaaatgtttacattgcccatctgatgtttctgcttctgaacattctttaggcaacatcctaattatttctatcagggtc

SEQ ID NO: 87757 - DNA, 267 bp, Zea Mays
atttctttggtgtcaaatcatgtctaggaccattgctagaaattttgttttccgggtattaaataagaatttgagtcttctctataattgttctaaaattctaaaattcaagatttagacatatctaatcccaatttagctccaccgaaaccctttataaataccccatccatctgcctttttctatctagtagccaagcacgaattccaacctccaaactactcccgtgagaacaggacctccatgatcgctactgccataactcg

SEQ ID NO: 87758 - DNA, 1233 bp, Zea Mays
gtacctcgcccaccaccaccaatctccctggtcgaacaggcgagagcagtgtggctgctgcacatgcactgtgctgtgctgtgctggtcatcaatcaccaagtactccagcagcagcggcggcggccgtattatagccaccaccaccgaccgaccgatcggtcgcccggagatgcagccggcctgctccgccgcgctgctcgccgccttcctcgtcgtgctggcttgttcagccgtgagctgccgcggtcagctggccgacaacttctacgccggcaagtgcggcaacttcagcgtggaggccatcatccacgacgccgtcaaggcgcggctcgcgtgggacaagaggatggtcgccggcctcctccacctgcagttccacgactgcttcgtcgctgggtgcgacgcgtcgatcctgctggacgggcccaacacggagaagacggcggtggagaacagtggcatcttcggctacgacttcatcgacgacgtcaagacggcgctcgagagggcgtgccccggcgtcgtctcttgcgcagacatcatcatcgccgcaacaagggacgccgttggcatgtgcggagggccgagctaccaagtgcaactgggcaggagggacggcatggtgtcgcaagcgtcaatggcgagcattcttccgggccccggcgtcgacatccccaccgctatcaacctattcgcgcggaagggcctcaacagcttcgagatggtcagcctcatgggcgcgcacacggtgggggtgacacactgctccgtgatccacgaccggctgttcaacttcaacggcaccggcttgccggacccggccatggacccggtgtacgtgtggatcctgtcgacgttcgcgtgccccaagggccaggccttcgacaacatcgtctacctggacgacccctccagcatcctcctcgtcgacaagagctactactcgcagatcatgaagcgccacggcgtgctgtccgtggaccaggccctcggcgaccacagcgccaccgcgtggatggtgaggttcctcgccaccaccgacttcttcccctccatgttcagctacgcgctcaacaagctcgccgcgctcgacgtcctcaccggcaccgccggcgagatccggagtaactgccggaggaccaactgacggatatatggatcgatgtggcaattaattgatacacaaaactaggttaattattactaccagctgctgcggtaaacagatcag

SEQ ID NO: 87759 - DNA, 1499 bp, Zea Mays
atggagcatttcaggcgaggggtggagttcgggatggcctccttccagagatgccatccgctgtcatgtcaaatggcagagagcgcgccggtcgatgcgcagaaggcggataatacccgctgtaaagagaagtcgcggcattccaagcgctgccactgccacctcgaagagatgcccgtcatccctgagcaggccatggagttcctctctcggacgtggagcccctcctccacggatctcttccaaatactctcccccagtagcctggggtcgtcgctggaggacccagagcaagatgaagcgagaggagacggaggcgacgacgacgacaaggagaaacatcttggcacggttcgtctcaatggggggacgaaccagttgtttaatcagacatgtagacttgtagccggcggcaggcctaactgcggacagcgccggcacaagctagtccagcctgcctggctcagagttggaaacatgaaggcgatgctgcgtggtttcctgttggacagcgtgccagtcacggggagccggaggaggcggcggagggacgagctccggctgcactcggcacaggcgcacgccgccgtgtcggtggcgcagctcgctgcggcggtcgcgggcatcgtgtcggcgtgcgacctgaggcccgcggcctcggccggcgctggcggcgacaggaggctgggcacggtgctcgcgtccgccgccgcgctggtggccaccgtgtgcgccgaggccgcggagaccaccggcgccaaccgcggccgcgtcacttccgccgtgaggaccgggctcgagagccgcacctccgccgacctgctcaccctcactgctaccgctgccacatgtttgaggggagccgcggcgctgaagcaaaggacagctgacctcaggggaatcagcaccagcagcagcgacgccatggccatgagcgtcagcgccggcatccacaagggcacgactctcgcagtctgcctgccttgtggaagagtgcgggtgaggacggtgtccgtcttcccgcggcgcggcgatggcggcgcggcggtgctgcggctgggaaagaagcgtctgcgcggcgcgttcgccaccttcaacgactatgtggtcacggcggtcggagacggcggcggcgaggcggtggtggaggggcggcccgtgttcccagtgtcggtggtcacgtcagaggggtcgacggtgcagctgctgttcgagcaccagacgcactgcaaggtctggaaggccgccatcgagggcatgctggccgagcagaagctcaggcgcgggacgacgaactgaactgatggtcagtcagattgggcacacgcgcacgtacaatcttcctgcagttctacttcatcgagtagaatggagaaaagtgtttttttttccatcttggtgtgtaatcacgcctgtacgtgttttgtaacatgtttgtttgtatgtacgtgggtgaatcgaaattcgtaaaaagtgctatgaaaacctgctttaggaat

SEQ ID NO: 87760 - DNA, 1675 bp, Zea Mays
cacagcccatgaagcgagcaaccccatccgcaagaaaatatcgcgatttcccctcgcagtctctcgcacgcgccggcatggcgacgctcgcgcggtggcatctacaacctcctactgcccgccccctcgctcaccggcggaggatcccgcgtcgggctgcgaccgtggtttccccgcgcgcgttcagccgcgcggacttcgatggcttcgtgcggcgcgcgtggcagggcgccaacgcgggggccgagcgcttcgccttcgaggcacggcaggccgcgcagcggctggacagcaggttctcgatctcccggaggctcgcggacgcttcccgtgccgcccgcgcccgcgccgttgagatcgacgccgagttcggcatcgggcggcggtggcgctccttctctgtcgacttctcccgcaattggcccaggtatcggagggacatcaatgacttcatgggaactcccatcgggagagcattagctacaatatttttcctgtggttagcactgtcagggtggttgttcagaattttcatttttggcacgtttgtgctgccatttgctgcccctcttctccttgggacctttgctaacagggttgccattgaggtaagagtgcatctgtcttaactttaatctgttattgtacacttctttactcacttcaaaggagtcatcagctctcattgcagaatgttgcgtgagtgatcgtgctttatatacttagggaagaagtgttagtgaaattctcagatcatcttgcattttggttttcactttgcttgttttaaacttccattggcctgatggctaatggggcaagaccgcaagagttttgtcatacatcccagcttccctggtatgtaaagagtgacatcatcctcttagtttaggtacgttttgtagtgttctcgatagttattcggtttggctaactatgactagctaacgggtgcccgtagagctgttttgtagtatcactcgcgcaattgcagcatggctactcttcaatcttcaatcttcaatcctcggtcctcatatccttgtggtcaactagaagccaagtatgctttgaacatactagttgttcttagttactgatggagcaggtttcatctgcagggaacatgcccagcatgcaaaaggcgtttcgtgggctaccgcaaccaagtgattcggtgcatgagctgccaaaacattgtatggcagccaaataacagcccatctggtggtgctagaagttcacgaagctcggaacctgatgtgattgatgtagaatatgaagagaagtaagaacattctgccccaccctacaccgaaaagcaaaaatcacgtgggcggaagaagaggcaaggcttgagacacaggctgcaccccatgagcaatttgtagatttggttgtttgtgtttttctggtgtacatacattacgtgctcctttcgaaataaaatggaaattctggtgttgtgcacagcgagacgatgtgtggcacctttcgatgttaggttctggtgtatccatagcttattgtactgttgcatctggatactaggaaacatcttgtaaagcaagcagcttagggaagactttgtacaaccactcacttcatacgacgccaattgcaaaatgttaatgacaattaaaataaccagtaaatctatatgccagatcatata

SEQ ID NO: 87761 - DNA, 1162 bp, Zea Mays
cacagcccatgaagcgagcaaccccatccgcaagaaaatatcgcgatttcccctcgcagtctctcgcacgcgccggcatggcgacgctcgcgcggtggcatctacaacctcctactgcccgccccctcgctcaccggcggaggatcccgcgtcgggctgcgaccgtggtttccccgcgcgcgttcagccgcgcggacttcgatggcttcgtgcggcgcgcgtggcagggcgccaacgcgggggccgagcgcttcgccttcgaggcacggcaggccgcgcagcggctggacagcaggttctcgatctcccggaggctcgcggacgcttcccgtgccgcccgcgcccgcgccgttgagatcgacgccgagttcggcatcgggcggcggtggcgctccttctctgtcgacttctcccgcaattggcccaggtatcggagggacatcaatgacttcatgggaactcccatcgggagagcattagctacaatatttttcctgtggttagcactgtcagggtggttgttcagaattttcatttttggcacgtttgtgctgccatttgctgcccctcttctccttgggacctttgctaacagggttgccattgagggaacatgcccagcatgcaaaaggcgtttcgtgggctaccgcaaccaagtgattcggtgcatgagctgccaaaacattgtatggcagccaaataacagcccatctggtggtgctagaagttcacgaagctcggaacctgatgtgattgatgtagaatatgaagagaagtaagaacattctgccccaccctacaccgaaaagcaaaaatcacgtgggcggaagaagaggcaaggcttgagacacaggctgcaccccatgagcaatttgtagatttggttgtttgtgtttttctggtgtacatacattacgtgctcctttcgaaataaaatggaaattctggtgttgtgcacagcgagacgatgtgtggcacctttcgatgttaggttctggtgtatccatagcttattgtactgttgcatctggatactaggaaacatcttgtaaagcaagcagcttagggaagactttgtacaaccactcacttcatacgacgccaattgcaaaatgttaatgacaattaaaataaccagtaaatctatatgccagatcatata

SEQ ID NO: 87762 - DNA, 1535 bp, Zea Mays
ccgtcagcatggccgccgatgcgataaaaaaataactccagctcaaattcctaatgcagccagcccaaccgatctgctccgtccactgcctcaggcaacggcactcctcgcgccacctggtgggtccctcgtccactccaactccaccgcctcctttgccccaatccagccgagtgatttttagtttattcacgcgcaaaaaactaaaaaagaattataaacggaagaagaacggcaggcgaagcatcgccagattggtatatcgatcgattgatcggtggcggagggaggggaggagggcggcagatggcggcgtgccggggcttcttcgagtgcctgctcaggctgctcaacttcatcctcaccgtcgccggcctcgccatggtcggctacgggatctacctgctcgtcgagtggatgaagatatctgaggacggcagcagcggggggttgacggcggaggtgctggtctccggccggccgttgttgggggctgtcgctctcggtgacagcttcctcgacatgctacccaaagcatggtttatttatttgttcattggtgttggtgctactgttttcctcgtgtctctgtttggctgcattggagcagggacaagaaacacctgctgtttgtgtttctatgccttcttggtcatattgttgatccttgctgaagctggagctgctgcattcattttctttgaccatagctggaaagatgtaattccagtggacaagacacataactttgatgttatgtatggctttctgaagaaaaactgggagattgcaagatgggttgctcttggcgttgttgtttttgaggcagtgctctttctattagctctggttgtcagggcaatgaacaaacctgcggagtatgacagtgatgatgaaattattgcaattggccgaagccctaccatgcggcagccattgatccatgcccaaaatgtgccggccaccggtgttcctgtcccaacactcgatcagcgttcaagtagaaatgatgcctggagccaaaggatgcgagagaagtatggtctggacacgagccagttcacgtacaacccctcagacccaagcaggtaccagcagaatggcgctccacaggctgaagaaaggagtcgatgcactataatgtgaagaattcttcatgacgtcctacgtcataatggttttcttgaacgggctacctcagcttgtgtagtttggtgttgttcagacttcatagctgtgtgtgtggaatgcaaaaatcccgaccatattgtttgtcacgcttgatgtcttctctgcaaatgttctatgcacttgtaattttaccgtgaatgacgaactgttagccattgacatcatctattttgtattttaggggggttgtttcttcttgccagtcctaccattttcatgtagctctgtttaatcatgatgctttactcaaatatatgtaagatttggttgtgccgtgaagtgaggtgagactgataggatccgttttgctttgtgtatattggaataaagttaggttatggatt

SEQ ID NO: 87763 - DNA, 1809 bp, Zea Mays
ccgtcagcatggccgccgatgcgataaaaaaataactccagctcaaattcctaatgcagccagcccaaccgatctgctccgtccactgcctcaggcaacggcactcctcgcgccacctggtgggtccctcgtccactccaactccaccgcctcctttgccccaatccagccgagtgatttttagtttattcacgcgcaaaaaactaaaaaagaattataaacggaagaagaacggcaggcgaagcatcgccaggtaatcaacccgtcctcctgtccttcttcccctcacccaccgcgggaaattcggcgcgattcgggcggtattagttggaattcccctgagaatcggagcgtttttttggacttggtagattggtatatcgatcgattgatcggtggcggagggaggggaggagggcggcagatggcggcgtgccggggcttcttcgagtgcctgctcaggctgctcaacttcatcctcaccgtcgccggcctcgccatggtcggctacgggatctacctgctcgtcgagtggatgaagatatctgaggacggcagcagcggggggttgacggcggaggtgctggtctccggccggccgttgttgggggctgtcgctctcggtgacagcttcctcgacatgctacccaaagcatggtttatttatttgttcattggtgttggtgctactgttttcctcgtgtctctgtttggctgcattggagcagggacaagaaacacctgctgtttgtgtttctatgccttcttggtcatattgttgatccttgctgaagctggagctgctgcattcattttctttgaccatagctggaaagatgtaattccagtggacaagacacataactttgatgttatgtatggctttctgaagaaaaactgggagattgcaagatgggttgctcttggcgttgttgtttttgaggcagtgctctttctattagctctggttgtcagggcaatgaacaaacctgcggagtatgacagtgatgatgaaattattgcaattggccgaagccctaccatgcggcagccattgatccatgcccaaaatgtgccggccaccggtgttcctgtcccaacactcgatcagcgttcaagtagaaatgatgcctggagccaaaggatgcgagagaagtatggtctggacacgagccagttcacgtacaacccctcagacccaagcaggtaccagcagaatggcgctccacaggctgaagaaaggagtcgatgcactataatgtgaagaattcttcatgacgtcctacgtcataatggttttcttgaacgggctacctcagcttgtgtagtttggtgttgttcagacttcatagctgtgtgtgtggaatgcaaaaatcccgaccatattgtttgtcacgcttgatgtcttctctgcaaatgttctatgcacttgtaattttaccgtgaatgacgaactgttagccattgacatcatctattttgtattttaggggggttgtttcttcttgccagtcctaccattttcatgtagctctgtttaatcatgatgctttactcaaatatatgtaagatttggttgtgccgtgaagtgaggtgagactgataggatccgttttgctttgtgtatattggaataaagttaggttatggatttgttaggagggtaaatgtttctattgggttttcagccaatgtgaaaagactagtctcgacgaaggatctgtcgactacacgctcaaggctcatttgcgatctgtaacataatcttcaagatgctagaaccccatgctggaagatgccaatttcgtg

SEQ ID NO: 87764 - DNA, 425 bp, Zea Mays
aatttaataatctcagtgatacttatctactactacacattgtgcaagggtagcaggtgggcttcgggagagatgtattatatgtttttactataatagatgtagacataaacacacatgtggtgtagtggtagctacaaacacatttatttgagaggtcgcgggttcgaatccccttggagcctgttttttaatttaattttagctaggcgtgggatgcacgtgggaatgggaataggctttgtgggagggagaatgagaaagacacatgatagccgggaatggaaatgtgaatgggctttgcagggagggggaatgagaaagacaagcagctgggaatgagaatgggctttgcagtgaggacggaatgggaatgacagaacacagaatggggcagcctaccccttaccgttttaataggtagt

SEQ ID NO: 87765 - DNA, 594 bp, Zea Mays
tacagtttataggaagctctagtgcaggaatctctcgcctgaccgccatagcagcaaaatcaaccaaggacctccctacacggaccactcccctactgcccttgcccctttcgggtaaggtagaaacctaggagaactacacatgaaatcatagagtttcaatgtagttctcctaggtttctacacatagtgtcccacaactttctccaaacattctaaaatttttatcgcagcctgtacatatgatatcatgacaagtggacaagtttcaggattttctgactttgtttgtgttttatacaatttttaaacatgtgtatggcaagttcacggtcatgtttagtgagcatgttgctcgaagtttccggtccgctcctggaatcggtcgtaacttatgctaagtaacatgaatatcatttttgcatgcacggttttccaagtttcgagtgacctacagttcaaatctaaattttccgaagaaattcaaataaacgaactaaatctactaacgattgaaaactctgttaaaattgtccacaaatgatacatgtaggtctacatagtgtaggaacacaccacaaaaagtttggttgc

SEQ ID NO: 87766 - DNA, 3230 bp, Zea Mays
gccaacagttcaatggcagagggtgttgttggcatccttattctgaagcttggttcagccttgtttttagaggcttgcaggcttggcacaaaacagctctaccatgaagcttcagcccttggcaggctctttggtgagatccgtgatatcaaggaggaattggagagcatgcaatcttttctacaaggagctgagagattcaaagatactgacaacaacactgccaactttatcaagaagattcgtggccttgctttcgacattgaagatgttatcgatgagtttatctacaagatggaggacaagcatggcagttttgctacaaagatgaatcgtcggattaatcgtatttggacatggcgacgtctcacgtccaaattgcaaaagatcaaactgaaactagagaatgttgataagagaaatgttcgatatgacatgagaggaattgctagagaagatggaagcagtgatgctcatcatagatctaccgaccagatttcttacttccccaaagaggaaaatcttgtgggcattgatgaaaacaaggagttattgatgaattggctaaggggtgatctacatcagcaaagtgtaattacaacagtatgggggatggggggagttggcaagaccactttggttgcacatgtttacaacactgtgaaggtagactttgacagtgctgcatggataactgtttcaaaagcttaccaagtggaggacttgctgaagcagatcatcaggggatttcagaaaagtgatttgaagggtgaacttcgtgttgacataattgacatggaaaagagaagcctagttgagatcatccgtgattattttgcatggcaaaagctatgttttagtgctagatgacgtctggggtgttgacatctggttcaagataagagatgcttttcctaccaatagcactagcaggtttattattacatcgaggatacatgaagtagcattgctggctaatggaaattgcataattgagttgaagccactagaggcacaccattcatgggagttattttgtaaagaggccttctggaaaaatgaaaacaaaatgtgcctgctggaacttaataatttggcacaaagatttgttgacaagtgtaacgggctgcccattgccattgcatgtgtaggccgtcttttgtcttgcagaagcccaacctactctgattgggaaagctttttcaaggaactagagttgcagatgacaaataatgtgattcttaatgttaatgttcttctaaaggttagtttagaggatcttccatatattttaaagaactgctttttgcactgtacaatatttcccgaggatcatttgatcaaaaggaaaaggttaattaggcactgggtagcagagggattcatcagagaaacagagcacaaaacaatggaggaagtggcagagggctatttgtatgaacttgtcaatcgtagcctattacaagtagtggagagaaatgaaagtggacgagtgcagagttgccgaatgcatgatattattcgacttcttgctctgacaaaagcaaatgaggaaggcttctgtaaagtttatgatggcatggggagttattcagcagaaaagacacgtcgtttatcgattcacagtgcaaatattaagttgtcgactcaaccaacaaagcttacagtccgctcaatatatgtttttagtaatggtttgactattgaatcacttaggtctttcttgaaacatttctacttgctgtcaactctagatctccagggtgcccagattgtggagctgccagatgaggttttcaacttgtttaatctacggtttctcagccttcgaaatactgaggttacgaatatccccagcacagttggaagattacaaaaacttgaagtcttggatgtttataatgctaaactgttggctttgccagagagtgtttcgaagcttagaaaattgagatatctacatgtagctactgttccaaagataaatactaaaggggttgtgacctggattggaatccaggtgcctaaaagcatcaaatacctgacaggcttgcaaaccttgaggcttgttgaggcgagctcagagactttatttcaccttggtgctttgacacagttgagaacttttgccatcacaaatgtgcagagggatcagtgtgccgatttgtgcactgttataatgagcatgaagcatcttgttagcttagcaattatggctataagtgaggaggaaatacttcaacttgaagaactttgtttacccccaactctttcaaagcttgaattaggagggcagctggacaagaaagcaatgccccagattgtatcatccttttcagatcttggtaacctcaccttattggccttggcattctccaaacttgatgaggactcattttcatgcctcttgacgttgcatggtctacgtgggctttgggttgataaggcttatgaagggaagaggcttcactttaatgctatgtcttttccaaatcttcgacagcttgcaatatcagatgcaccgcagctcaacagcgttgtaatcgaacgaagcgcactgcaaagccttgttcagctgacacttgtagattgtccagaactgaaggccctgcctgatggcattgagcatcttagaacacttgagaaattatatctgcgaggagcatccaaagagctcacaaagctatttcagtgcaatgaagaaacacatgagtccaatgggaatcttgagaagatcggtcatatccgaagggttactgtttatccataagggtttgattgggagtaagggtaatggggaggattgaaggggctagaatctctcactattctattttaaatagtgaggaattctagccccctcgatctccttcattccatttactcccaaacgagccctaaaaggatgcgaagacttggtgtcataaacccatacacttgcgtgcaagtgttggccttgtcaccgattgcatactactggccaactggtgtaatagctcaagacagtcaagagtaaaataaagttggtgaaaatatagttgggtctgaaccgctgaagtgagtggagactaataatttgtttttgtttccggtacttgattttactgttttgaccttatttttgtgtcactaatactcatcatgtatttgtagtcatacaggtatagattaaacgaaactcttcatcaaacgcgaattgagcaaaagttgagcggtagataaattgtata

SEQ ID NO: 87767 - DNA, 109 bp, Zea Mays
caaaaaccattttcagagtcaaactacatgtccgtctctgataagtggtcattgttcctctgttaatgattttcagttgggttcaaactcgatacctttcagcatgtac

SEQ ID NO: 87768 - DNA, 412 bp, Zea Mays
tttcaccttcaaaggcaaaaccgcaaaagtaatccataaaaaatcctaacctcattgtctctaaagagtaaagaaagacatcgtgaacgaattacagcataagtttagttaatttcgcacaaatttggggaagagttgattcttgtgatcagcaaacggctgtaaaatcatgaatacaatcggaacaccctaaaccaaccaagacgagatgggaacaggaggcgggagacctgagcgggggaggactgctccatgagctggaggagattggaggtggaccgcactgcctgtgctatctgctctgccaccgccgcgttagcccctccaccaccgccgacgccggccgtcgcagccatccccgccacgtcgacttgggagctcagctcgccctacgcccagtcgcccagtacga

SEQ ID NO: 87769 - DNA, 956 bp, Zea Mays
cttttcgagttcccgttacaattcacaaggtcttcaatgcaaaattccccgacccctctagattctggaacgaccgccccagccgaggagccgaccggccggcgaagtgggatgggggcgatggcggcggctcgggggcagaaggcgctggtggctctgccgcagctggtgaagtcgctgcggagtgatcccgtttccggaagcgcacgactcagacaccttccgtctctcaggaggaccttctcgttgtacgaccagatcaacctcatcgacagcgtccccgaagacgagctccgattccagtcgtatgatgatactggattcaaaattaacaatataaaatatgaaggcagcttgttgattgtagagaacaagataatgacatgggcacccaaaacgttctcagagataactgctgaaagtttatcaatcttcaaagttgtgcaccctatcccagagatcttgattcttggttgtggaagacacatccagccggtcagtcctgagctacgaaagttcattcgttcaactggaatgaagctagaagcagtcgattcaaggaatgcggcttcaacatataatatcctgaacgaggagggcaggccggtggcagctgcagttcttccttatggagtcgcttgttagtgttttttgccttttataccagtttggcaggcgttttcttgttggaatcgatagctaactgagctgaaatgtcggcatccgtctggaccatcgacaatgctgttttggtgtctaggaaaggccaccctaggttttgtagcatattgttccctttgtaatcgcgggctaacagaagtcacgcagtgtacactacatggaatcgaaataagaatgatggtccctgtcatagtactttgtttcgtttgcgctgttcttggaaatcctgtatcatgcccaaactgaagttgtctttcttccagcttttctactac

SEQ ID NO: 87770 - DNA, 1521 bp, Zea Mays
cttttcgagttcccgttacaattcacaaggtcttcaatgcaaaattccccgacccctctagattctggaacgaccgccccagccgaggagccgaccggccggcgaagtgggatgggggcgatggcggcggctcgggggcagaaggcgctggtggctctgccgcagctggtgaagtcgctgcggagtgatcccgtttccggaagcgcacgactcagacaccttccgtctctcaggaggaccttctcgttgtacgaccagatcaacctcatcgacagcgtccccgaagacgagctccgattccagtcgtatgatgatactggattcaaaattaacaatataaaatatgaaggcagcttgttgattgtagagaacaagataatgacatgggcacccaaaacgttctcagagataactgctgaaaggtaggactcacccttgaagctagattttggtgcaagttttgtatactccattatatatgataatatgactattgatgctttgatacttaaatgctcttgcagtatgcaattagagtttggtgcagtatccctgttaccttttgtttgccattgtgtcgatggtaatattcctgtttgtaagatattttgtgacacttttccttgcttaaataatgcagtttatcaatcttcaaagttgtgcaccctatcccaggtaattttgtctcggccaatgctctgctaccttcacgcatattgttgtgctaatgtcacaatccaatgctttgtatggcccttattccttggtttttatgtggcccactggagttttctgctccattagaaagctatagggcatacatggattttattgtgacagatttcatctttatgtttattaattaattgaatggacagtccttggttgtggttgattcgcaagcattttgtgatggtgggggttcaagatctagtttcctattcctttctgtacatttgatcgtcctcataggtagaaatatcaaagtgatctgcaacatttgatatgccattcttgtccagagatcttgattcttggttgtggaagacacatccagccggtcagtcctgagctacgaaagttcattcgttcaactggaatgaagctagaagcagtcgattcaaggaatgcggcttcaacatataatatcctgaacgaggagggcaggccggtggcagctgcagttcttccttatggagtcgcttgttagtgttttttgccttttataccagtttggcaggcgttttcttgttggaatcgatagctaactgagctgaaatgtcggcatccgtctggaccatcgacaatgctgttttggtgtctaggaaaggccaccctaggttttgtagcatattgttccctttgtaatcgcgggctaacagaagtcacgcagtgtacactacatggaatcgaaataagaatgatggtccctgtcatagtactttgtttcgtttgcgctgttcttggaaatcctgtatcatgcccaaactgaagttgtctttcttccagcttttctactac

SEQ ID NO: 87771 - DNA, 2643 bp, Zea Mays
tccggttctctcgggcgttggaaccgaggattggaggcatcgtgtggaccgcgccgtgcacacctggcgcgtgggcccgcctcctccatctccccctgcggcgtaataagaagcggcccacggccaccgccacgccttgtcggaatatcatacgaaaaccctcgcggcgaggagcgctctccgtcccacacacgcgcgccgcagcctccgcagtccgcacctgcctccacgacttgtcgtgctcgtgcgctactctcctcgagcgcggcgcggagcacggggacatcaaatggcggcagcggcggagatcggtggtttcgcggcggcgagagtggcggtggcgacgctcaggccggctgcgcacccagccccggcggcggcaccgcagcagcctaggagggcggtggcggcgcagtcgctgcggacgaccgccaccgaggcgctgacggcggatctcgccggcacgaccaacggcgctgtgcatgctcggatgaatagtaaggctacaagtgaaatcacttcacaggcagttactgcaaattctaggagaaagacaaagatagtctgcaccataggtccctcaaccaacactcgtgagatgatttggaagcttgcagagactggaatgaatgtagcacgccttaatatgtcccatggtgaccaccagtcgcaccagaaggttattgatttggtcaaggagtacaatgcacagaacactgatggcaatgttattgccattatgctggacacaaagggtcctgaagttagaagtggggatgttccagagccaatcatgctcaaggaaggtcaagagttcaacttcacgattaaaagaggggtgagcactgaagacactgtcagcgtgaactatgatgacttcataaatgatgttgaagctggcgacatactattagtggatggaggaatgatgtcgcttgctgtgaagtctaaaacaaccgatacagtcaagtgtaaagtagttgatggtggggaattgaaatcacggcgccacctaaatgtccgtggaaagagtgctactttgccatctatcactgagaaggattgggaagacataaaatttggtgtcgaaaacggtgttgatttctatgcagtttcctttgtgaaggatgccaaagttatccatgaattaaaagactaccttaaaagtgctaatgccgatatacatgtcattccaaaaattgaaagtgcagattcaataccaaacctgcagtccattattgctgcttcagatggggcaatggtggcgcgtggagaccttggtgctgaacttccgattgaggatgttcctttgctacaggcagagattgtccaaacatgtcgaagtatggagaaaccagtcattgtcgctacaaatatgttggaaagcatgattgaccatcctactcccactagggcagaagtttctgacatagctattgcagttcgggaaggtgctgatgccatcatgttatctggcgaaactgctcatggaaagtatccactaaaggcagtcaaggtgatgcacactgtggcactcagaacagaatccagcctttataacccaactacttctcctagtcttgttgcatctgcacagggtctacagaatgaggacttctccccaagccagctaagtaaaatgttcggatctcatgcaacgatgatggccaacacccttcgcacaccaatcattgtatttacacagacaggctccatggctgtcctcctgagccattatcgtccctcgtctacactatttgcatttacaaacgaggaacgagtgaagcaacggctagcactctaccagggcgtcatccctattcacatgcagttctctgacgacgcagaagaaactttctccagagcaattagcagcttgctgaaagcacaatatgtgaagaagggagactacgtcactcttgttcagagcggagtgacttcaatctggagagaggaatccactcaccacatccaagtgaggaaagttcaggtctgatgtgccggtgggaattggtcgtctgagaaattttgatagcgccgcctgatgtgttatcatcattatatgtgtaattttactgttttaccaggagattgctacgtcgagttatatgttgtgtcgaattcacgtgtaggctctgaatcttgactgtgtccgttcattttcgcttgtttcacactgaagtgttataagctcaactttactgcttttgttttcttgtgaaacttgagtttagtttcttgttacaaaaggagctagcactaacagggtggtgagttttgtaaaaacggggcgaggactgttgagttaaaactgttgtaataatgatatcgttcctgcaagacgacacatgcatggccagaaggccaaagtctgaactcttttctgccgggacaagacaggatgacatggtcattgtcgtggtggcatgatgcttgctagccttttctctgcttctgcgcatcatgtcaaggtgataaccttggcagcggatgtggtgacccagcagattgggcacggaacacacctgctgtacctcgtatcacgaccatccgcgaaaagtgcacgaaccacgataacgtaccagctgctagcttcggattccctgcaaggctgcaaactcgagcctcgccgcctcggttttg

SEQ ID NO: 87772 - DNA, 2634 bp, Zea Mays
tccggttctctcgggcgttggaaccgaggattggaggcatcgtgtggaccgcgccgtgcacacctggcgcgtgggcccgcctcctccatctccccctgcggcgtaataagaagcggcccacggccaccgccacgccttgtcggaatatcatacgaaaaccctcgcggcgaggagcgctctccgtcccacacacgcgcgccgcagcctccgcagtccgcacctgcctccacgacttgtcgtgctcgtgcgctactctcctcgagcgcggcgcggagcacggggacatcaaatggcggcagcggcggagatcggtggtttcgcggcggcgagagtggcggtggcgacgctcaggccggctgcgcacccagccccggcggcggcaccgcagcagcctaggagggcggtggcggcgcagtcgctgcggacgaccgccaccgaggcgctgacggcggatctcgccggcacgaccaacggcgctgtgcatgctcggatgaatagtaaggctacaagtgaaatcacttcacaggcagttactgcaaattctaggagaaagacaaagatagtctgcaccataggtccctcaaccaacactcgtgagatgatttggaagcttgcagagactggaatgaatgtagcacgccttaatatgtcccatggtgaccaccagtcgcaccagaaggttattgatttggtcaaggagtacaatgcacagaacactgatggcaatgttattgccattatgctggacacaaagggtcctgaagttagaagtggggatgttccagagccaatcatgctcaaggaaggtcaagagttcaacttcacgattaaaagaggggtgagcactgaagacactgtcagcgtgaactatgatgacttcataaatgatgttgaagctggcgacatactattagtggatggaggaatgatgtcgcttgctgtgaagtctaaaacaaccgatacagtcaagtgtaaagtagttgatggtggggaattgaaatcacggcgccacctaaatgtccgtggaaagagtgctactttgccatctatcactgagaaggattgggaagacataaaatttggtgtcgaaaacggtgttgatttctatgcagtttcctttgtgaaggatgccaaagttatccatgaattaaaagactaccttaaaagtgctaatgccgatatacatgtcattccaaaaattgaaagtgcagattcaataccaaacctgcagtccattattgctgcttcagatggggcaatggtggcgcgtggagaccttggtgctgaacttccgattgaggatgttcctttgctacaggcagagattgtccaaacatgtcgaagtatggagaaaccagtcattgtcgctacaaatatgttggaaagcatgattgaccatcctactcccactagggcagaagtttctgacatagctattgcagttcgggaaggtgctgatgccatcatgttatctggcgaaactgctcatggaaagtatccactaaaggcagtcaaggtgatgcacactgtggcactcagaacagaatccagcctttataacccaactacttctcctagtcttgttgcatctgcacagaatgaggacttctccccaagccagctaagtaaaatgttcggatctcatgcaacgatgatggccaacacccttcgcacaccaatcattgtatttacacagacaggctccatggctgtcctcctgagccattatcgtccctcgtctacactatttgcatttacaaacgaggaacgagtgaagcaacggctagcactctaccagggcgtcatccctattcacatgcagttctctgacgacgcagaagaaactttctccagagcaattagcagcttgctgaaagcacaatatgtgaagaagggagactacgtcactcttgttcagagcggagtgacttcaatctggagagaggaatccactcaccacatccaagtgaggaaagttcaggtctgatgtgccggtgggaattggtcgtctgagaaattttgatagcgccgcctgatgtgttatcatcattatatgtgtaattttactgttttaccaggagattgctacgtcgagttatatgttgtgtcgaattcacgtgtaggctctgaatcttgactgtgtccgttcattttcgcttgtttcacactgaagtgttataagctcaactttactgcttttgttttcttgtgaaacttgagtttagtttcttgttacaaaaggagctagcactaacagggtggtgagttttgtaaaaacggggcgaggactgttgagttaaaactgttgtaataatgatatcgttcctgcaagacgacacatgcatggccagaaggccaaagtctgaactcttttctgccgggacaagacaggatgacatggtcattgtcgtggtggcatgatgcttgctagccttttctctgcttctgcgcatcatgtcaaggtgataaccttggcagcggatgtggtgacccagcagattgggcacggaacacacctgctgtacctcgtatcacgaccatccgcgaaaagtgcacgaaccacgataacgtaccagctgctagcttcggattccctgcaaggctgcaaactcgagcctcgccgcctcggttttg

SEQ ID NO: 87773 - DNA, 1312 bp, Zea Mays
tccggttctctcgggcgttggaaccgaggattggaggcatcgtgtggaccgcgccgtgcacacctggcgcgtgggcccgcctcctccatctccccctgcggcgtaataagaagcggcccacggccaccgccacgccttgtcggaatatcatacgaaaaccctcgcggcgaggagcgctctccgtcccacacacgcgcgccgcagcctccgcagtccgcacctgcctccacgacttgtcgtgctcgtgcgctactctcctcgagcgcggcgcggagcacggggacatcaaatggcggcagcggcggagatcggtggtttcgcggcggcgagagtggcggtggcgacgctcaggccggctgcgcacccagccccggcggcggcaccgcagcagcctaggagggcggtggcggcgcagtcgctgcggacgaccgccaccgaggcgctgacggcggatctcgccggcacgaccaacggcgctgtgcatgctcggatgaatagtaaggctacaagtgaaatcacttcacaggcagttactgcaaattctaggagaaagacaaagatagtctgcaccataggtccctcaaccaacactcgtgagatgatttggaagcttgcagagactggaatgaatgtagcacgccttaatatgtcccatggtgaccaccagtcgcaccagaaggttattgatttggtcaaggagtacaatgcacagaacactgatggcaatgttattgccattatgctggacacaaagggtcctgaagttagaagtggggatgttccagagccaatcatgctcaaggaaggtcaagagttcaacttcacgattaaaagaggggtgagcactgaagtgttataagctcaactttactgcttttgttttcttgtgaaacttgagtttagtttcttgttacaaaaggagctagcactaacagggtggtgagttttgtaaaaacggggcgaggactgttgagttaaaactgttgtaataatgatatcgttcctgcaagacgacacatgcatggccagaaggccaaagtctgaactcttttctgccgggacaagacaggatgacatggtcattgtcgtggtggcatgatgcttgctagccttttctctgcttctgcgcatcatgtcaaggtgataaccttggcagcggatgtggtgacccagcagattgggcacggaacacacctgctgtacctcgtatcacgaccatccgcgaaaagtgcacgaaccacgataacgtaccagctgctagcttcggattccctgcaaggctgcaaactcgagcctcgccgcctcggttttg

SEQ ID NO: 87774 - DNA, 2483 bp, Zea Mays
ctgctccattccacaatccacactcccccgcgctggactggagtcgagttgagcgcacgctctcgcactcccatattcccaccgaccatatcgctcttgcttcgctaagcatcctagatctccattcgcgcccatggggtgcttccagtccaaggtggcggggcccctgccgcccaacgacgccgccgcgctccccgccgacaagcctgcagatcccgaggcggcgaacggcgccgccgacgggggaggcgacggcgacgacaaggaggccgtgaagcgcgcggtgccggtgttcagggagttcgcgctggccgagctgcgcgccgccaccaagggcttcagcgccgacctcatcgtctcggagagcggcgagaaggcgcccaacgccgtctaccgcggccgcctcgatggcggacggctcatcgccgtcaaacgcttctcgcgcctctcttggcctgacccgcagcagttcctcgcggatgcggtgggcgtggggaaggtgcggcacaagcgcctcgtcaacctcattggctgctgcgccgagggtgacgagaggctgctcgtcgctgagtacatgcccaacgacaccctgtcgaagcatctcttccactgggataaacagcctttaccatgggaaatgaggctgagggttgcatattttattgcacaagctctcgaccattgcaatttggagaacaggaaaatctatcatgatttgaatgcttatagagtactttttgatgaggaaggtgatccccgcctgtcaagttttggattaatgaagaacagccgtgatggaaaaagctatagtactaacctggcttacactccaccagagtttctacgaacaggcagagtaattcccgagagtgtgatatatagctatggaactgtcctgttggatcttttgagcggaaaacacattcctcctagtcatgccctagatttaataaggggaaagaatatactgttgctgatggattcctccttagaagggcagtatgctaatgaagatgcttcaaaattggttgaccttgcatcaaagtgtctgcaatttgaatctagggatagaccaaacataaagtatcttttgtcttcagttggtcctcttcaaaatcaaaaggaggttgcatcacatgtgttcatgggtattacaaaagccacatcagtactgccagccatttattctccacttgggaaggcctgcgctggtatggatctttcagcggtgcatgatattttactcaaaacaggttataaagatgacgagggtgcagaaaacgagttatcctttcaagaatggacccagcaagtgcaagagatgctgaacacaaagaagtttggtgacattgcatttagagacaaggattttaagactgcaattgactactattccaagctagtcgcaatgatgtcgacgccttcggctaccgtttttgctaggcgcagtttttcctacttgatgaatgagcaagcagagcttgctctacgggacgcaatgcaggcccaggtctgcatgcccgagtggcctacagccttctacctccaagcccttgctctttcaaagctcggcatggaaaccgacgcgcaggacatgctcaacgacggagcaacatttgaggccaagaagcaaaacggctggcgcagttaggaaataaaagtctcctaactactccgtgtcgttgcccttcgaggaaaaaaaaggcgcaatcgctagtgtcctccaaatcagttcattgggacgtctgttgcacgaccaaggagtgggattgaaatgcactgttttatcgtgcaatctctgccctaatgccggcaacgagcggtggtgttatgatcaggagtggaagaacaggtcagggggctttgagtgcacaggcatagcttgctctcccgtgagttgcgctttgttttgcgagtggtggtggcaggatctgctgattgttgcaactgcagttgtaattaaagggatgctttctaacaatttctccttttggttcacgtcgaatctttgggctgcagaggacaagagtggtgtgcaaaaagccgggttcattgtgattagctacggagaataaactagaggcatcggaattccattcgattctaccatgtttgtatggagtttgtatgcggtcttattttttccccctttctatgaacaattctgtcttttttgatcgatcgaatcgtttcagatagtcagttgcgcatccaccgatttggtttcaaagcagcagatacgtgcttgtatatcatctggttgactggttgtcataaagaacttgcacaactatcggttgggaggcgcgtaattttattttaagtacacgagcaacttatcacttgctgttatttgttttcagattttttaaaattgattttaaatccttaaacttgtccctgtatttataaaattcatgtttaatctttaaacttatcatagagtgtcacccgacttcctgaaattcttaaaatatcatctc

SEQ ID NO: 87775 - DNA, 2304 bp, Zea Mays
ctctcctcctcctccctcctgccgctgctctctctctctccgttcctgatcggcaaggcaacttattgaagcagcctctctccctcgacggctggacctcaacaattgtttgttcttgaggcccgccagaccttaataatcttgctggctggctggctggtaacttactaatctagctagctataggcggctctgaccctctgataatggtcttggactccatcggcttcttcttcgtcgtcgtcatagtcatcccccgcgcgctgcttaggaagagcttctatttctggatcttccacgtcttcaacagatatcccctcctcaacctcctcctcttccattgccagccgcgcactgatctatctactaaccgccgctctagctagcacacagcctacacatacgcatctgctgcctgaaatatttgcttggcagagttgacatttacattcgatctctcggttactagtgtagtagtagtgttggatcggcagcatttatttgcttccccctgccgctgccggccatgggcaccatgaccctgccgcccgggttccgcttccaccccaccgacgacgagctggtgagctactacctcaagaggaaggtggacaacctcaagatcgagctcgaggtcatccccgtcgtcgacctctacaagtccgagccatgggaactaccagacaagtcgttcctgccgaagcgcgacctggagtggttcttcttctgcccccgcgatcgcaagtaccccaacgggtcgcgcaccaaccgcgccacggcgacgggctactggaaggcgacgggcaaggaccggcgcgtggcgtgcgacggcggcgtctacggcctccgcaagacgctcgtcttctaccgcggccgcgcgccaggcggcgagcgcaccgactgggtcatgcacgagtaccgcctctgccaggacctcgtccacggcgcgtgcaacttcatcggcgcctacgcgctgtgccgcgtgatcaagcggcacgaggccgggctgctgctgccgccgcctgcgagcagggccaaagcggccggcagcgcgagagggcacatgatgagcgaggtctccagcggcgagcagctaagcgcgtcgtcgtcgccgtcgccgttcacgcccgccaactccagccccactcgtcccacgctggacgcggcgggagctgtaacgtgcgccatggctcctgaacccggcaacgcgttccagctggcgcacgacgcgagcgcggcccttccctccctcgcgctgcctccgccgcccctgctcctgccgtctccccacgaggacgacacgtttttcgtcagcgaaggcctccccgccgcggcggcggactggttcggcggagacatgggcggcgtctcggagtcggagcaggagctgaaatgggacgccttgttcccctgcacaggcacgttcccgagcgtaggtgtcgacacgtggaacgcggcggccgcgagcccgacgaccatgctgtgccggcaggcgagcgacggcatcgacgacctggccgccttcttcttctcggaggacaacaggatcgtcttctgaatccttttaataacagaacagagcacagcacagcacatattgggaactattgctacagagggtgatggcgtcttttttattacagtcttctctgtagcactcggtcggtgtgctgtgtacggccgtgtcactttctaatactacttagtactactactacttgcgtgcttgaccagtactgtactgtgatgtgtacgacaacgcaaaatattgcactgctttgtagccccttgttaaccattctcaattcaatgccattattgtattgtaccccggcaattacatgttgcgtgcagtgctgcgatcacgattggggtttctgttcatcatcatcagcagcagaagaagaagaagctactccaagcaaggtagggaagtaggcacagtataacgttgaaggtggtgtggtggcagccagctgaaatagcttcatgagatgagaagatggcgcgcggaaagcaagggatggcttagcagccaaggacgaaccaagcagctagcagaccagttacgtgaccattcacctcagggaaacgaaacggtggacacgaacattccccaggaacctggacgacggcacgcaattcagagccaggaaagcgctactagtattattcaggacagaaaggggacgggagaatatatagcatgggccatgggggaaacaggtcgccgtcgttccacgaatctgacggcgaaaggaggtgagggcggcgagcagccatcgtcagcaagtgataatcatg

SEQ ID NO: 87776 - DNA, 1146 bp, Zea Mays
atggactttgccagccgccacgccgcagcggaggcggccacatcggcatccgccgctgcccccgcgggcgtcgccgaggagcccgagtacctcgcccggtacctcgtcgtcaagcactcttggaggggaaggtaccgccgggtcctttgcatcgcctcttccggcgtcgtcacgctcgaccccaccacgctcaacctcaccaactcctacgatgcccgctccgagttcgaccacgctgaggctctcaccgccaccgacgagttcacgctcgcagtccgcaccgatgcccgcagcaagttcaagcccatgcgcttctcgtcgccgctccgcccggggatcctcaccgaactccaccgcctccgcccggtccaggcctccttcgacttccccgttctccacctccgccgacgcacccacgaatggtcctccttcaaatttaaggtcactcctgtgggtgttgagctccttgaggcttctggtgatatacgctggtgcttggacttcagagatatgaattctccggcaattgtactcttgggggatagctatgggaggaagacttctgaaggtggagggtttgtgctatgccctctttatggtaggaagtcaaaagcttttatggctgcttcaggaactacaaacactgcaattatatcgcatatgacgaaaactgccaaattaaagattggattatcactatctgtggataactcacaatcaatgaaagcggatgacttcatagcaaaaagagctatggaggcagttggagctgctgaaacacggcatggagagtggtcggtaacaagattacgttctgctgcgcgtggcactgctaatattgagagcttaagtttgggtgttggaccaaggggtgggcttggagaacagggtgattctgtctctcgtctgcttgttcttacaagtacttcacttgttgaaagacgtccagagaactatgaggctgccattgtacgaccactctcagcagtaagtgcttttgttcgatttgctgaagagccacagatgtttgcatttgaattcaatgatggctgcccaattcatgtatatgcaagcacttcccgtgataatctacttgcaacagttcttgacattttacaaacccagcgggaacgtcatacatcctag

SEQ ID NO: 87777 - DNA, 394 bp, Zea Mays
atggaaagcgggcggtgcttggtccggttgaaggaggctgcacagtggttttggctgccgcgtctacagttgccctctgctccaccggaggaagcaccggatggtggcgagcaggtagctgaggggcgtggccatcggtgccagggaggagcagaggcacgatccggtggaggaaagatcgagctggggaagaagacatcagagatgggcgcgcagcgagccagggatgaagctcacgccggcgaggaagaagacgcagggtgccgtgggagctcgtagggagcgagaggagcagaacacggtgggatatttgaagaatcccagggcggcgcggtgaggattctgagcggcggatgaaaaaaaatccggtagagggcggctgggcggcgtagcg

SEQ ID NO: 87778 - DNA, 2124 bp, Zea Mays
tgtcgtcaccatgttgtcggacgtgtgctagacttagatgtcaatgctattgacgtcggcccgtgttagttaggcgtcaatagtgttggcgtcgacctatatgtcatttttgaaatgaaactgaaaagagtatatttctgaaaataaaaccgaaaatggctaaattgtaaaaaaaaaaaatttggccggtatgtgtatgtctaggctctgccgctctggggtctagacgacaacgcacgcaaaggctgatgcgtatcaacgtatgcggatgcaggggcagcaccgtccacctccaccatctttcctcttcctcctcgcctccaccccttcccttccatctcctcccacccggcgactcctcttcctctctgccgcgccgatcgattggcccacccatcgatcgagcacggggaagaagattccagtccggagtggtttcaattcggtcgggttcgttgcccgtgtgggtgggcgctatggcggcgatggatgcctcggcagataagaacgccgtcttccgcaagcttcgcgccaaatcggacaacaagatgtgcttcgattgcaacgccaagaacccgacgtgggcgtccgtcacctacggcgtcttcctctgcatcgactgctcggcggcgcaccgcagcctcggcgtccacgtctccttcgtcaggtcaacaaatttggattcatggactccagaacaactgaaaatgatggtctatggcggaaataaccgtgcgcaagctttctttaagcagcatggttggacagatggtggaaaaattgaagcaaagtatacttcaagagctgctgacttgtaccgacagttgcttgctaaagacgttgctaaaagctctacagaagatggaaacaatagttggccatcttccccagttgcagcatcccaggctccaaatcaagctgctgcatttccagatctcaagctgacagaggtgtcaaaagaaaatgtaagtgaaaagaaagattctgagattgttcgttcgcctagagctccaacccattctttcaagaagccgattggtgctaaaaagcctggaaataagactggtggacttggtgcacggaagcttacatcaaagccaaatgaaagcctctatgagcagaagcccgaggaaccagctcccgtcctgccatcatcggtgattgagagtactacaactaggagcaaatcacatacttcccgatttgattacgttgaaaatgcacctgctcttaagaatgggaatagctcagaaggcaaccacatgagtggacatgttgcacccccaatgtcgtcaaacttctttgctgaatttgggatggacagtggatatcagaaaaaatctacgtccagttcatccaaagtgcagattgaggaaagcagggaagcaagacagaaattctcaaaagcgaaatcaatttcttcctctcagttttttggtgatcaggccagttttgaaaaggacgctcaagtctctctccaaaagttttctggttcctctgcgatatcaagtgctgacctatttggccatccggcaaacaattctagcgtggatctcagtgcttcagatttgatcaacagaatctcgttccaggccactcaggatctgtcttctctcaagaacatggcaggggaaaccgggaaaaagttgacatcgatggcatccaacatcatcactgatcttcaggaccgcatcctctgagctttaaactcacagtaaacttctgcgttgtttcagtggctggcttctcccgtcgacccgggtgacaaactggcctggcctggcctgcagatctgtctaggagttcgtaggcgtctgagaacttcctggcaatctggcatatctgtctaggagttcggaagcatctgaaaagtggcatatctgcctaggagttcgggagcagctaaaatcttgaagttagagagagagagagagaaagagagagagagggtgaaagaagagaacttatgaccaatactgtaattggctaaagtcatgtatgcttctagagctgtaacgcaaatgtcttttgccattggttttatctcgggtttgagatatatacttttgctttgtaatgatacatacatgttttctaattatgcgtagatatttcttgccccaa

SEQ ID NO: 87779 - DNA, 1217 bp, Zea Mays
gagggtgcgatggcgatcgaccacgagtccccgttcaaggagctccgcctcaagaaccgcaggatcatgggcggcggcggccctgaccctgagccggaggaggaggaggaggtcgccacggcggcgtacgcggggcagtggccgcgctggctgcagccgctgctttcggcgcgcttcttcgcgcactgcaggacgcacggcgactcgcaccgcagcggcgagtgcaacatgttctgcctggactgctccgccgcgggcgcgggcgcgggcgcgcgcgccctgtgctcgctgtgcctggcgcaggcccaccgcgaccaccacaccatccagatccggcgctcctcctaccacgacgtcatccgggtgtccgacatccagcgcttcatggacatcgccggggtgcagacctacgtcatcaacagcgcccgcgtcgtcttcctcaacgagcggccccagcagcagaggcctggatgcaaggccgcgtcggcgtccgccaacctctgcgaggtgtgcgcccgcagcctcctcgacaacttccgcttctgctccctcggatgcaaggtcgtgggctgctcccccgacgccgccaaggccaggagctggctcctccggcccgccgtcggcggcagcggcgacggcgactccacgtcctcctcgccgctgcgcgacgcccagaagaggcagagcttcaccccgcccacgccgcagccggcgaagcgccgcaagggcatcccgcaccgcgcgccgttcggcagcttcatcgtcgagtactagctccctctctctccgtctccacggcggcggcggcggctgcattggcagtggcactacacagcacacgcgcgggcaatgggactgggacggccaccacttccttttgccgtgacacactctggctggctggctggtggtgcttctcgaggtggatgccattcggtcgctgctggctttgctttccacaaagggaggggaggaaagaaaggttgaggaagaatcaaaacactggcttttcatcactgttgctaggctctctgatatagaaatatatatgtacatttttagccttgtcctgtttcaaatcatcatagtggagcattatagctagctagctttttttactagattattcgtctgaagaaaagaaaccatggttcaggagatgaccagctagtgcaaggtacttactttatactagtaataagctatggtggtgggtg

SEQ ID NO: 87780 - DNA, 1727 bp, Zea Mays
tttttttttttttttgctcctttccgttactgttggcgacgaacgcttacttacgtgcagcaatggcggcggccatgccttagattcaacgactgtttttgtccaccgcctccctcgaccctttctttgggatctccgcattgccttggcgtctcgttctgattgtctcccgtgccgccgttccccgagcaataattttttaaaacttttttttttttgagcgcaagcaaccgaatctctctctcttgcagactactattccatcttgtttgtttgccgatctatctgtgtgacggagcttttcttggcaaacagccaattcaaatgcttcgccatcgagcaaagcgagtcaactgacggaaacatggttgtccgtgcagggcggcggcggccctgaccctgagccggaggaggaggaggaggtcgccacggcggcgtacgcggggcagtggccgcgctggctgcagccgctgctttcggcgcgcttcttcgcgcactgcaggacgcacggcgactcgcaccgcagcggcgagtgcaacatgttctgcctggactgctccgccgcgggcgcgggcgcgggcgcgcgcgccctgtgctcgctgtgcctggcgcaggcccaccgcgaccaccacaccatccagatccggcgctcctcctaccacgacgtcatccgggtgtccgacatccagcgcttcatggacatcgccggggtgcagacctacgtcatcaacagcgcccgcgtcgtcttcctcaacgagcggccccagcagcagaggcctggatgcaaggccgcgtcggcgtccgccaacctctgcgaggtgtgcgcccgcagcctcctcgacaacttccgcttctgctccctcggatgcaaggtcgtgggctgctcccccgacgccgccaaggccaggagctggctcctccggcccgccgtcggcggcagcggcgacggcgactccacgtcctcctcgccgctgcgcgacgcccagaagaggcagagcttcaccccgcccacgccgcagccggcgaagcgccgcaagggcatcccgcaccgcgcgccgttcggcagcttcatcgtcgagtactagctccctctctctccgtctccacggcggcggcggcggctgcattggcagtggcactacacagcacacgcgcggtaaagcagggaaaaaatatatatactcttgaatgaaccaacggaattgagcagcacagagtgagtcagtgaattcaggtcatgtctgaatcaatccgccattacagggcaatgggactgggacggccaccacttccttttgccgtgacacactctggctggctggctggtggtgcttctcgaggtggatgccattcggtcgctgctggctttgctttccacaaagggaggggaggaaagaaaggttgaggaagaatcaaaacactggcttttcatcactgttgctaggctctctgatatagaaatatatatgtacatttttagccttgtcctgtttcaaatcatcatagtggagcattatagctagctagctttttttactagattattcgtctgaagaaaagaaaccatggttcaggagatgaccagctagtgcaaggtacttactttatactagtaataagctatggtggtgggtgatgatggctgatggatgccgaaccacattgttggcacttgatgattagtgtgccaagaagaggaagcaaggaaatgccgtcacgttactgcc

SEQ ID NO: 87781 - DNA, 1974 bp, Zea Mays
cgatctgaccggtgcatatgcaaaaaaaaatgcagaagagaagagaacaattctggaatgattcccaacgtcctgcagaaatctgagtggctccagtccccgtcccagcggagcagagcactcgatcgcgttgcgttgcctcccgctctctggctcccaagttacatcaccacggacatggaaaccccctcgccgggcgccacgctctccgcggtgatcgccgaggaccgccgccgggaggctcgccgccgccaggggggcttcgggcagggcggtctcctcccgtacctcgtcccggcttgcgggcgtccggccggccagaggggcggcaggccgctgcactctgagctcatggtaaaactgcaccgctggggcgccactttcctgcccaagggcggcggcgccgtcgcgcgcgaactcgaggagccgtgccgcgcgccaagcccgccgccacggcctagaccatcattcacaccggctgcatcggcggcggagccggaggtggtgccgcgccacgaggcgcccgccgtgagtgtcgtccccacgacggggccttcgagggagagagaggagccggcggcgggatccgaagccattgccgaagcggacatgtccgccggcgagagcgcggggagcagcgaccaccaggcgacgccggtcgttaccgtcgcgggaggaagtgggggaacctggctcagagcttcgcccaagacgagagcgaggtctccgtcactgcagacggacagcgacgagtcccctcggcccctcgccgactccgccgcattgcccgtggtggccgacgacaagtacgtgtgggcggacaagtaccggcccaatgtcctcaacgagttcatctgcaacaagaccgtcgccgccgagctctaccagctggttgttgcacaccagtgcagacatttcatctttgaaggcccgccggcggttgggaagagaagcatggtactggcacttataagggatgcttttggcccccatgatctcaagatagaggaacagacaaagagatttgagctgaagggagaaattagaaagcacatcgatgtcagagtgaagacctctgagcatcatgtggaggtgagcttggctgatttacatggctacgagaagtacatcataaccactctgttgagtgaatccatcccatcaccaagctcagtttgtgaccatactaactgcagagtgattgttatccatgatgctgataagctctcgtttgatcttcaacattatattggttggtttttggggaggtatgccgggtgcaacaaaatcattttctgctgttctgatgcttctaatcttgaagccattaagcatctctgtaaggttgtgactcttcaaccaccttcatttgacgagataataaatgttctagagtacattgcaacgcaagagagcattgatttgcctcgtgatcttgctagaagaattacagtcggcgcaaacaataatctccgacagacaatacgctcttttgaagctacttggaaggcaaactacccgttcatagacggtcaagttattttgacaggatgggaagaagaaatctctaatgtggccagcaatatcatggaggagccaagtccaaagcaactgtttcttgtccggggaaagatcagaaaaatgattgaacatgatgtgtcacctcatttcattttctctcacctggtcgcggaactgaaaagggacaaggatgaagacttccagcacagcgttgatgaattggcctcggacttgaaccattttcaagattccaaagggcagtgcaaaggaaacaaatcacgggaggcaaactttaaaacgaggtatatgaacatagaaggttttaccgctgaggctcatgaccatggtgaaaccatccaatgcttcataaaaattgaagaattcaccgtaaggttcctgagcttctacagatctctagtggcaaaaaactcgaatagaggcagtgctcaatga

SEQ ID NO: 87782 - DNA, 905 bp, Zea Mays
atggtcggtgtccgccaccgccgcgctgccgtctccctgatcgtctaccaggatcgcgatgcgtccaccgccgccgtagcggggcgtggcagccggcgcgtccagttcggagcggcacacggggcacgtggtgtgtgcgccgagccacgagtcgatgcacgccgtgtggaacgcgtggcggcagacggtgagcaggcggaccgcgtcgcccgcggcgaactccgacaggcagaccgcgcactcggcctgccccgacgcgggccgatgcgtctcctcgaaccaccgcaccgtggggaacgtggcgaggaccgcggggtccagaccggccggcttgtgcgacgcgtgcgtgtccggcgtggcgtcggacgcggcgtccgcatcggcgcggaggcggcgccggcggcgcagccagagggagaggaagtggaggaggtcgcgcaggaggaagatggagaggaagcagaggaggagcacgaagaggatgaacacgggcagcagcatagggaacggctcccgcggcggcggccgcaccggggcgctcgccgcgcctggccttggggacgacgcggctccgccgtggtgggcgcgatggtcgtgggtggcattgccgaggaggcgacgcgcggccgtgaccacgaccgtgtccatgggcgcatggggcggggcgatcggggccaaggcttttaggcgtgcgtgtgtggctcgtggtgctcgcgggcgggagttggttgggcgtcgtcggtgtgcagcgggtggagccgtgggttttacggtgaggcgaaggcgacgccgggacggcacgacaccgacatgtaccgcgcgtgcacgggcaccgccgcatggaccccgccggccggtggagacgtgatgcgacgtgtagggaaaggggaaggcaaggcgggcga

SEQ ID NO: 87783 - DNA, 2181 bp, Zea Mays
atgattacatagcaaacttaatttcacaacattttttgtcagttaatttaaaattggtttatttgttagcagatctgttctattccacttccaccgctgtggtgactacaaagaggagggtagcatagcatagacttcacggcccatgagccgacatggtctaaaagcccatataggatcaggattcaggaggcctcgcaatccttaaccgtcccacgcgaccgtggactccgtcatcgcattcgtcaccacctctgccgcctcgcggccgccgcattcatcccctgcgattacaaaaccctacgatagttctccaccaattcctctaatccctggtcgctaggtagttcctgcgcctccatcccgatcccctgtctgatccaatcgtaatcaggatgctgccaggatcagagccggcggccggcggcaccggtatgttcgtgccggcggcgacggcgggcacggtgctctgctgcatgtgtggtgtgtccatgcagcccaacccggccaacatgtgcgcgcgctgcctgcgcgctcgcgtcgacatcaccgaaggcgtcccgcgccacgccgccgtggtctactgccccgactgttcctcctacctccagccgccgcggtcctggctccgcgccacacccgagtcgcccgagctcatgcagatcctgctccgccgagtcaaccgcccactcgcgcggctacgcgtctccctctccggcgccgagttcgtcttctccgagccccactctaagcgcctccgcctcaacctccgcctccgccgcgaggtgctccacggcatcgtcctcgagcagacgcaccccgtcgagttcgtcgtccacgaccgactctgcgactcctgctcccgcgcgcaggccaaccccgatcagtgggtcgccgtcgtccagctccgccagcacgtgccccaccgccgcaccttcctctacctcgagcagctcctcctaaaacacggccaggcttccctagcgatccgagtcgcggcggcccccggcggcctcgacttcttcttcggctcgcgttcccatgccgcccgcctggtcgacttccttgccaccgtcgctcctatccaaactcagacagcgaagcagctcgtctcgcacgacaccaagagcagcgtctacaactacaagtacaccttttcggtcgatatctgccctatctgccgtgaggacctcatcgcgctcagtccccaggcgtcccgggacatgggtggccttggcccgctcgtgctctgtgtcaaggtcacaaatgccattgctcttcttgatcccctcacgctgcgagtgcaccacctggaggagaaaaaatacagggtctataatttcaaggcaactctcaccagcaagcagcttgtggagtacattgtgctcgacatagaacaagaatcgcctgaaatttctattgatgggtctcgataccaattggcttatgctcaggttgcccgggtgtcagatttcgggaagaatgacaccatctttactgtgaggacgcatcttgggcacctgctgaaccctggtgatcatgcccttgggtatgatctctatggtgccaacctaaatgatgatgacatgaacacagctatgactcggtacagcttacctgaggcggttcttgtcaagaagagctacgagaagaggcctcgcacacggcgatggaagcttaagaggttgccggtggaggaagatgctgcaaataaggccaagggtgaggaagagaagacgctagatgagtacgaggctttcctcagggatttggagctggacccagggatgcggttcggggtgaatctgtacaagaatgaggactataggtctgagatggcatcaacagttggtgatgatatccctacggtgccaatcgaggagctgattgaggacttgacccttggtgacaatgaggatgatgaaggggaagaagctgtggaaggcaacactcatgctggaatggtggaatgagcctcatgctggaatggtagaatgatcatatatgttttttttcgttgttactggtacaagttagaattttggtggtactgcttaagtttataattctgctgtttctccaaatcaactttatttcaacccttatcatgcattggaggtgttacaatcatgcccgactttacattgagatttttgtatatataaaaaactttacatgtcc

SEQ ID NO: 87784 - DNA, 2235 bp, Zea Mays
atgattacatagcaaacttaatttcacaacattttttgtcagttaatttaaaattggtttatttgttagcagatctgttctattccacttccaccgctgtggtgactacaaagaggagggtagcatagcatagacttcacggcccatgagccgacatggtctaaaagcccatataggatcaggattcaggaggcctcgcaatccttaaccgtcccacgcgaccgtggactccgtcatcgcattcgtcaccacctctgccgcctcgcggccgccgcattcatcccctgcgattacaaaaccctacgatagttctccaccaattcctctaatccctggtcgctaggtagttcctgcgcctccatcccgatcccctgtctgatccaatcgtaatcaggatgctgccaggatcagagccggcggccggcggcaccggtatgttcgtgccggcggcgacggcgggcacggtgctctgctgcatgtgtggtgtgtccatgcagcccaacccggccaacatgtgcgcgcgctgcctgcgcgctcgcgtcgacatcaccgaaggcgtcccgcgccacgccgccgtggtctactgccccgactgttcctcctacctccagccgccgcggtcctggctccgcgccacacccgagtcgcccgagctcatgcagatcctgctccgccgagtcaaccgcccactcgcgcggctacgcgtctccctctccggcgccgagttcgtcttctccgagccccactctaagcgcctccgcctcaacctccgcctccgccgcgaggtgctccacggcatcgtcctcgagcagacgcaccccgtcgagttcgtcgtccacgaccgactctgcgactcctgctcccgcgcgcaggccaaccccgatcagtgggtcgccgtcgtccagctccgccagcacgtgccccaccgccgcaccttcctctacctcgagcagctcctcctaaaacacggccaggcttccctagcgatccgagtcgcggcggcccccggcggcctcgacttcttcttcggctcgcgttcccatgccgcccgcctggtcgacttccttgccaccgtcgctcctatccaaactcagacagcgaagcagctcgtctcgcacgacaccaagagcagcgtctacaactacaagtacaccttttcggtcgatatctgccctatctgccgtgaggacctcatcgcgctcagtccccaggcgtcccgggacatgggtggccttggcccgctcgtgctctgtgtcaaggtcacaaatgccattgctcttcttgatcccctcacgctgcgagtgcaccacctggaggagaaaaaatacagggtctataatttcaaggcaactctcaccagcaagcagcttgtggagtacattgtgctcgacatagaacaagaatcgcctgaaatttctattgatgggtctcgataccaattggcttatgctcaggttgcccgggtgtcagatttcgggaagaatgacaccatctttactgtgaggacgcatcttgggcacctgctgaaccctggtgatcatgcccttgggtatgatctctatggtgccaacctaaatgatgatgacatgaacacagctatgactcggtacagcttacctgaggcggttcttgtcaagaagagctacgagaagaggcctcgcacacggcgatggaagcttaagaggttgccggtggaggaagatgctgcaaataaggccaagggtgaggaagagaagacgctagatgagtacgaggctttcctcagggatttggagctggacccagggatgcggttcggggtgaatctgtacaagaatgaggactataggtctgagatggcatcaacagttggtgatgatatccctacggtgccaatcgaggagctgattgaggacttgacccttggtgacaatgaggatgatgaaggggaagaagctgtggaaggcaacactcatgctggaatggtggaatgagcctcatgctggaatgattgagagctacagggagaagcatggccagaaaaagctcaatgcgttgtttggcctctagtttcagtttattctaggtttgtaagctatgtttccactgggatcgacagcaccgaattgttggtaggaaccgtgttttttgtcagttttactctattggtagccaaattttcagtttcatttttttttgtgataggcatggtgattgctttcaagtaattatatcgattcttatgtgtgttcttct

SEQ ID NO: 87785 - DNA, 174 bp, Zea Mays
gtcatcaacagctcgggtccatttagcttcggtgaccagatagatccatcatcttcgaggaggaggaaacataagtccaatacgcgttatggaagactagggattactaatccccccacgcgggaagccttctccctctcaggctcaagagtcaagatagcccgccctaaacaa

SEQ ID NO: 87786 - DNA, 1593 bp, Zea Mays
ccgcggaacagcccccgtgaccgtgaaccaaccagttgtccagttccgctccggcactccacccacccacccagccaccccacgcccgcgagcgaccaactcccctctcgaacggttcgggcctttgcagtcgacagatcgatcaatcagcaccgaccactcgcgacccgattcgaatcgagccagagtcccaggcagcggcggcggcggcgcccgcctccaagaccacctccacccggaccccagccccaaccccaaggtctccctctcgtaccgttccccgctctgcgcgcgctcgtgcgtcatatctggcctgcgattcatttcacggcgccgtgtgcctctaatatggctggcgtctgtgcctctttggtgaggttttcgactccgtggctttgccttccctctagagacagcgggtggtgtcttcagccctgatggcaccatgtcatgtgcgcgattggatcatggggattctgatggttcacagcgcttcttcaccttctccgtcaagggttctgtatgttgcaaaccacgttaacagatgggggacgttgcgaaggacttgacggctgggaccgtgggaggggctgccaacctcatcgtcgggcacccgttcgacaccatcaaggtcaagctccagagccagcccacccctgctcccggacagctccccaagtacgccggcgccatcgatgctgtgaagcagacggtcgcggctgaaggtccgaggggcctatacaaggggatgggggcacctctggccaccgtagcggccttcaacgctgtcttgttcagtgtcagggggcagatggaggcgtttctcaggtcagagcctggtgtgccgctgacagtgaagcagcaggttgttgcgggcgccggtgctggaatcgcagtctccttcttggcttgtccaacagaactgatcaagtgcaggttgcaagcccagagttccttagccgaggcagccaccgcttctggtgtggctcttcccaaaggtccgatcgacgtggcgaagcatgttgtccgggacgccggcgccaaaggtctcttcaagggcctggtcccgacgatgggacgcgaggtccctggcaacgcactgatgttcggcgtgtacgaagccacgaagcagtacctggccggcggcccggacacgtcgggcctcggcaggggctcccaggtcctggcgggcggcctcgccggcgccgccttctggctgtccgtgtacccgacggacgtggtgaagagcgtgatccaggtggacgattacaagaagcccaagtactccgggtccctcgacgcgctgaggaagatcgtggcggctgatggggtgaagggcctgtacaaggggttcggacccgccatggcacgcagcgttccagccaatgccgcgacattcgtggcctacgagatcacgagatcggcgcttggttgatttgattggtgctggcctttgccatggccctttgcagtttattcattctccttgcgcggctggagcaacgcgaacaatgcgagacaattttagggaggaaagagagagagaaacttttcacttcaatgatgagattctttaatgaagcaaagcttact

SEQ ID NO: 87787 - DNA, 1611 bp, Zea Mays
ccgcggaacagcccccgtgaccgtgaaccaaccagttgtccagttccgctccggcactccacccacccacccagccaccccacgcccgcgagcgaccaactcccctctcgaacggttcgggcctttgcagtcgacagatcgatcaatcagcaccgaccactcgcgacccgattcgaatcgagccagagtcccaggcagcggcggcggcggcgcccgcctccaagaccacctccacccggaccccagccccaaccccaagttaacagatgggggacgttgcgaaggacttgacggctgggaccgtgggaggggctgccaacctcatcgtcgggcacccgttcgacaccatcaaggtcaagctccagagccagcccacccctgctcccggacagctccccaagtacgccggcgccatcgatgctgtgaagcagacggtcgcggctgaaggtccgaggggcctatacaaggggatgggggcacctctggccaccgtagcggccttcaacgctgtcttgttcagtgtcagggggcagatggaggcgtttctcaggtcagagcctggtgtgccgctgacagtgaagcagcaggttgttgcgggcgccggtgctggaatcgcagtctccttcttggcttgtccaacagaactgatcaagtgcaggttgcaagcccagagttccttagccgaggcagccaccgcttctggtgtggctcttcccaaaggtccgatcgacgtggcgaagcatgttgtccgggacgccggcgccaaaggtctcttcaagggcctggtcccgacgatgggacgcgaggtccctggcaacgcactgatgttcggcgtgtacgaagccacgaagcagtacctggccggcggcccggacacgtcgggcctcggcaggggctcccaggtcctggcgggcggcctcgccggcgccgccttctggctgtccgtgtacccgacggacgtggtgaagagcgtgatccaggtggacgattacaagaagcccaagtactccgggtccctcgacgcgctgaggaagatcgtggcggctgatggggtgaagggcctgtacaaggggttcggacccgccatggcacgcagcgttccagccaatgccgcgacattcgtggcctacgagatcacgagatcggcgcttggttgatttgattggtgctggcctttgccatggccctttgcagtttattcattctccttgcgcggctggagcaacgcgaacaatgcgagacaattttagggaggaaagagagagagaaacttttcacttcaatgatgagattctttaatgaagcaaagcttactaaaagtttgttcatgtggagccacagagtgagtggttggtgacagataagtaatactggccttgtcgtaatggttggttggcctggactagagtgggcatccgacggtgatccgatggcgcgcgagtccgactggtggtgcttgtgatggtgagctgtgtggcccatggttttgttggcgtctggtggtgggtggccctcgtcagctcgcattcggcattcccttttgcccccacaatcccacgttcgccttgcctcctttttcttcttggcctaaattttattctttttctctct

SEQ ID NO: 87788 - DNA, 1604 bp, Zea Mays
ccgcggaacagcccccgtgaccgtgaaccaaccagttgtccagttccgctccggcactccacccacccacccagccaccccacgcccgcgagcgaccaactcccctctcgaacggttcgggcctttgcagtcgacagatcgatcaatcagcaccgaccactcgcgacccgattcgaatcgagccagagtcccaggcagcggcggcggcggcgcccgcctccaagaccacctccacccggaccccagccccaaccccaagatgggggacgttgcgaaggacttgacggctgggaccgtgggaggggctgccaacctcatcgtcgggcacccgttcgacaccatcaaggtcaagctccagagccagcccacccctgctcccggacagctccccaagtacgccggcgccatcgatgctgtgaagcagacggtcgcggctgaaggtccgaggggcctatacaaggggatgggggcacctctggccaccgtagcggccttcaacgctgtcttgttcagtgtcagggggcagatggaggcgtttctcaggtcagagcctggtgtgccgctgacagtgaagcagcaggttgttgcgggcgccggtgctggaatcgcagtctccttcttggcttgtccaacagaactgatcaagtgcaggttgcaagcccagagttccttagccgaggcagccaccgcttctggtgtggctcttcccaaaggtccgatcgacgtggcgaagcatgttgtccgggacgccggcgccaaaggtctcttcaagggcctggtcccgacgatgggacgcgaggtccctggcaacgcactgatgttcggcgtgtacgaagccacgaagcagtacctggccggcggcccggacacgtcgggcctcggcaggggctcccaggtcctggcgggcggcctcgccggcgccgccttctggctgtccgtgtacccgacggacgtggtgaagagcgtgatccaggtggacgattacaagaagcccaagtactccgggtccctcgacgcgctgaggaagatcgtggcggctgatggggtgaagggcctgtacaaggggttcggacccgccatggcacgcagcgttccagccaatgccgcgacattcgtggcctacgagatcacgagatcggcgcttggttgatttgattggtgctggcctttgccatggccctttgcagtttattcattctccttgcgcggctggagcaacgcgaacaatgcgagacaattttagggaggaaagagagagagaaacttttcacttcaatgatgagattctttaatgaagcaaagcttactaaaagtttgttcatgtggagccacagagtgagtggttggtgacagataagtaatactggccttgtcgtaatggttggttggcctggactagagtgggcatccgacggtgatccgatggcgcgcgagtccgactggtggtgcttgtgatggtgagctgtgtggcccatggttttgttggcgtctggtggtgggtggccctcgtcagctcgcattcggcattcccttttgcccccacaatcccacgttcgccttgcctcctttttcttcttggcctaaattttattctttttctctct

SEQ ID NO: 87789 - DNA, 398 bp, Zea Mays
cttctcccagttcttgatcactcctacacgcccggtgttcctcccgccggtcaccatgaccacgttgccgacgtcaaactgaagataacaccaatgggaacaaatatgaccccgacgataaagaaacacgatcaccagaatgttatagcaaacctacaggcagagaaggatttccatttaatcagaacactcatgaaccagaatcacaaattaccagtcacttacccaggtgaccacatcggtctgccagtttgaagatgtagtgtactgtaatcctccaaggaagataacaatgatcttttctttatgtctgtgtaaccaactaccttcgcaagtgctttggcaagcaagtcagctgcagacagactgtaagagcttagcaactgctctgcttgctg

SEQ ID NO: 87790 - DNA, 378 bp, Zea Mays
aacgtcgtcgccgcacaggcacagaagctcccctcgcctgcggtcactgcatggtcgaatttgccccttgtgctttcctctccttcctgcaaggagtcgagacgagacatcatcccttctctctccacatctctcgaccccgacctcgctcgccgtctcttccctgcccctgcccctgccccctcagctgcgatctccctccctcccccgaatcgctgaatttttctcactcctcctccttcccatctcggatcgactccaagacgccgagcccactttggtgacccagccccgaaatccccaatcgagctcgaccggaacccgtcgattccgccggattcgacctcccgccggtgaggcggttcgcctgaatcggcc

SEQ ID NO: 87791 - DNA, 4308 bp, Zea Mays
aggggccttcccgtgttggacagttggcttcaagaggcccacaaagggaagtctggtgatgggagtagtcctaaagaagcagataagcctattgatgaacttctcttggccctgcttcgtgcactagctaaattgcctattaatctcagtgcattacaaagttgtagcattgggaaatctgtcaatcatctgcgcagccataaaaatctggagattcaaaagaaagctaagtgtcttgttgagaactggaagaagcgtgttgatgctgagatgaagtcaaatgatgtgaagcctttagtttcaggtcaatctgtttcctggtcaggaaaagcaggttttcaagaaatttcaaatgttggaaccaaacgaggtggctcaagtgagaacagtccaaaaaattcagtgcccactctttcatcatcaaaagttttgactgataaacctgggggcacagatgctgcagcgaagttgaatcctggggtatctgcattgtcaaatttacaacatgtgcaatcaacacatgttactaccaacttgaaggagcagccctgcaaatcaactggtgggactggctgtcctgagctgcctactgtaaaagaggagaaaagcagcagttcaagccaatcgccgaacaacagccagtcaatatctagtgagccatcgaaggatgcaagaagttcaactgctgcttctggtggtgctagtaaaacttctggaagctcttcacggagccatcgaagggcaaacaatggtcttgtttcagggaacctgaaggaaccttctgtaggaagatctgtctcccttgatcgatcattgctgcaggataagtcatcccaaactggtacagcttctgaaaaaggaattgatatgccatctgatcatggaaataatcatagattgattgttcgctttccaaatcctggtcgtagtcctgctagaagtgcaagtgctggatcttttgatgacccatctgttactgggggtagagcttcatctcctgtggttgcagataggcatgatcagactgagcgcagggtgaaagtgaagactgaaaattctcggcctcatttagcatctgatgctaatgcagagtcctggcacagcaacgacattaaaggagctactggttcggaggaaggtgataaatcaccatgtgctatattagatgatgacaacagcaggacacctgatcattctgttaaggatgcacatgcatcgcgagctgcgtgctcgtcatatatgaatgaaaaaggtgtcagtgaaactaaggtgggaacctcattcagcccaatgaatgctcttattgaaatcaagtactctgaagctagtcattcactgcaagctggagatgacacagctatgaatcttcttgctagtgtggcaggagaaatatctaaatctgaattggcttcttcaccaagtacttctgtaaagaaattggtctgtgagggtgtcaatactggaaaggttaaagtagaaagtgacatgggcccatcacatccagggcaagcagatgctaagaaagttgccatggggaatgaagtgaaaaatgatgcttgtttggttccgaaggaggaacaacatcaaactgcgccatctcctgagctagcagattcaaaagcagttaaatcttcagcaaagattgaaatccatgaagggcatgcaaacaaatgcaactcccagcatgcttcaattgattccaaaggcgaaaatcgggatggctgtactgcccatgggaaagttgaagatggcagtacaaacaaggatggtgccatggaatctgcattcggcagccagcgtagcttggttgtttccagtaaaaattcaagattggttcttgctggggaatcttcattgtctgctgctgataaacaaacacagggtctgttaaaatcaactaatcataagcatcttctgagtgtatcggacaacccaggagcctttgatagacatgacagtatggctggaaaattagatttgatggctgcagaggtgaaaaaagctgatgtcgtgggcaatagtagtgtattgcagaatgacactgaaaagaaggaacatgtttctccctcttcggctgatgttccaaaactagtaccagcagcgtccccagttggtgtggcaaatgggaataatgagatgaaagaatcaaacggcagttcaagtgaatccaatagccatgtaaaatctgaaggtgtcaattctcagcaaagcgagcaaagtgcaaagcagagttcaaagaaatccagtgatggtgtgtgcggaaaagaagaccatgtcttatcagacgaagaaggttcttctctagccgctcacaccaagtcaaatgctacagccaagcttgattttgacttgaatgaaggaatacctggggatgatgggcatcagtctgagacaactgcctcacctgttgtatgttcctcagcaatccatttaactgggcttttgccattcacttcgcctactacaagtgggttgccgccagctccaataacagtagctgctccagctaaaggaccctttgttcctcctgaaaacctactaagagcaaagccagagatcgggtggaaaggttcagcagctacgagtgcatttcgccctgctgaaccaaggaagattttggagatgcctgctgccacacgtgacattccagtatctcatgctgctgggaagcagtctcgtcccacgcttggtttcgatttgaatgttgcagatgaccaagctctcgaggaagattttccacagagttctgcacagactacctgttcagaatctggaaatacgagaagtcgagatggctcgtcacgaagtgctggtattgaacttgatctgaacagagctgatgaagttgcagacaatggccaatttgtaccaaatgcttcacacagagttgaagtcccattgttttcgacgagatcgttacctagagttttatctaatgctggcgcaaatagctcaagggactttgatcttaatagtggacccgacctttatgatgttggcactgaacctgcaccaaggagcctaccttctaaaaatacaagcagtattcaattcctaccacaagttcctgttaggatgaatagtgatgccatgagtaataatatatcaccatggcttgtctctaccagtccttgtggtccagtagctatacagtcttttttaccatctagagaacagccttacccattggaggcagcacctggagcccagcggattattgcgcctacagctgatggtggccaatttggaggtgatccctgcaggcctccagttatttcaacgtctccagcgatggtttttcatccgcctgcatatcagtatgcaggattctctttccctccaagtgttcaccttcaaacaccagcattttcaattggatcagcaacatttaataattctgcatctgcaggagttccatattttccaactctttcctcctctcttgttgggccagccggagcgttgccttcccaacattcaaggcagtatgccataaatcttgctgagggtagcagcagtagtgtacgtgacggtaatcggaaatgggaaagtcagggccttgatcttaactcaggccctggaagtatagatttagaaggaaaggatgaacggatgcctttaccagtcagacaaaatttgatcccacccctacatggctttgtggaggatcaaggaagaatttaccaaatgccagttgtaggaacaaagagaaaggaacctgatggcagttgggactcagaaaggtctacatacaagcagttaccatggcaatgagggctctgaaggagatcattttgcaccgactggtctgcgaatgagcatatcacctgcatgtagagcttggccggtgtgttcttcagtcactggactacactcaggggattcagccccatgacgatggcgtgggattgaggaaagcgaaaacttcctgtaattgttgtagattttttcttagctgttaggcttttggttctaatttactcaggagggtatggctgcggtggaggaatctttgtgatcctgagctctgtggccgctgtaattagaccgtccgctctgtttgttggtgataaactgttgagcacatgctggagctttacataagaatttagatgtggccttgttccttgttggggaagcgttacgtcagctgaccatatatatacactggtgcaacgtacagctctagttgctacaccatgtatcttgggttgcagtgcagctgtatgtataagaattctagtagatgagcagctataactttttttctctctttgacaccgaatccatctgcatctggtttactcc

SEQ ID NO: 87792 - DNA, 2451 bp, Zea Mays
gcagtgtcgcctcttcatgatcagatggatcgacgatttgggtagggacgtcacatagcaagggttgcagctgggacatgatattcgtggtggcggcggcaggatcgctgtactcttccatggatgcaatcgtccctctagggctgtgtgtttgcggtacgcaaggaatggcggcgctcgtttgtgtagggcatgaaaaaaagtagatggcttatttgcttgtacggctggcagctggctccaaacgttggctccttttaacattaaattagtgtggccagccgatccgaaagattgctttgagattaataaatgaacacgtggcatcaatccggtaagtgctgcacagatatcgctctgcagcacgcatgtatggaattttttccctcgaggtcgagctactaccatccatctctccccattgcatgcgaaacaagaaagcaagaggccaagaggagcagagtgagtgagtggcgtttggtgtgaaatgtggacttggacctggaaggaggacgaagcgggtcatggaatggtgatggacctgctgcttgctcccctccctgccgatctctaatcactttgcccctagtgctgggaggagaaggacaaggtctctgatcagctcagcttgtctggtcaaagctgagagcctcgttgtgctgtgagtgcaagctcgaccgacaggacccctgccactgtgaagcacagcgtcagcggcgacaagacgaaggggcggaagctgccaagccgatagatctacgcaaatggagaccaaggacgtgtcgccgctcgccgccgccaccaccaccaccgcggcgcccgtgcctgcaccgacctctcaaccgcctccgccggccccttcttctatggcgccgccgcagcaccagcaccagcaccatccgccgccgccgttcgcgcagcaggcggccccggttccgtcgcctgccgcgtccatgcccggcggcatgcggctctcgttcgaccagatgtccgggaaggcgcccggggagcagcaccaccactccgcgcccatgctgtacacggtgccaccaccgcagtccgccgcgggcgcgggcgcaccgggggccaatgtgctgggcatgggcgagctgatgcgcaagaagcgcggccggccgcgcaagtacgcgcccgacgggagcatggctctggcgctggcccccatctcctccgcctcagccggcggcgccgcagcccccggacagcagcagcacggcggcgggttctccatcagcagccccccgtccgaccccaacgccaagcgccgcggccggcctcccggctctggcaagaagaagcagttcgaagccttgggctcctggggcatcgccttcacccctcacatcctcaccgtcaaggccggcgaggatgttgcttcaaaaataatgacattctcacagcaaggccctcgcacagtctgcatcctttccgcgaatggtgcaattagtaatgttacacttcggcagccagccacatctggtggactagttacttatgaggggcgctttgagataatctcgctatctggttctttcctgcttgcggaggatggtgatactcgcagcaggactggtggcttgagtgtcgcacttgcaggatctgatggccgagttcttggagggtgtgttgctggaatgcttatggctgcaactcctgttcaggttgtggtggctagctttatcgcagagggaaagaaatcaaagccagcggaagcacggaaggttgaaccgatggctgctcctccaccgcagatggctacctttgttccacctccgctggccaccagccctccatcggagggaacatccagcgcatcatctgatgactctggcagcccaatccaccacagtgcgatgccgttcagcaactccagccagcatcaacaccctcaccagcaccagcaccagcacatgccgcctgcctacgcatccgggggttggtccctctcagtgcaccagcagaataggcatgattctgacatgaagatgatgtcgaactaacagtgctcaacctaggcgtcccatttgttggttgggctggagaggaaggaagctgctgatggttggtactgccgctatgaaatggtcttcttgcgccgtctgtcctgatcagtgaccccgtgttgctctggtcaatgacggtgtgtctgctatagctaagatagctaggaaggattagagtttatgggctcacttgctgttgttcccctgggtaagattaatttaatttgaattagccgctgttgtaatgctgtagccagtgtcctgaagtcgcttatcagtcagtccctgacgcgagctgtgatggttgcctgatgagatcttcacctcctagtcctaggctagttaaaatatcatttctctagtactatgaatcatgaatttacttggatgcttcggtttgattcaggaatttgatcgtattatgtttcgt

SEQ ID NO: 87793 - DNA, 2261 bp, Zea Mays
gtgagtggcgtttggtgtgaaatgtggacttggacctggaaggaggacgaagcgggtcatggaatggtgatggacctgctgcttgctcccctccctgccgatctctaatcactttgcccctaggtaccgtacaggcgtgcgcgcggggcatcagacacacctccccttcctaacttccaccaaatctccctccctaccgtgctttccgctttcctcccttgattttttttatccgtctcctagctccagattttaaaaattatctcttgtgagcaactcatagctaactactactagtagctgagactaaaagggtgtgctctctcgcttttaatctccatgttaccgctagtgctctagtcttacctagccttgctgagccccttgcagtgctgggaggagaaggacaaggtctctgatcagctcagcttgtctggtcaaagctgagagcctcgttgtgctgtgagtgcaagctcgaccgacaggacccctgccactgtgaagcacagcgtcagcggcgacaagacgaaggggcggaagctgccaagccgatagatctacgcaaatggagaccaaggacgtgtcgccgctcgccgccgccaccaccaccaccgcggcgcccgtgcctgcaccgacctctcaaccgcctccgccggccccttcttctatggcgccgccgcagcaccagcaccagcaccatccgccgccgccgttcgcgcagcaggcggccccggttccgtcgcctgccgcgtccatgcccggcggcatgcggctctcgttcgaccagatgtccgggaaggcgcccggggagcagcaccaccactccgcgcccatgctgtacacggtgccaccaccgcagtccgccgcgggcgcgggcgcaccgggggccaatgtgctgggcatgggcgagctgatgcgcaagaagcgcggccggccgcgcaagtacgcgcccgacgggagcatggctctggcgctggcccccatctcctccgcctcagccggcggcgccgcagcccccggacagcagcagcacggcggcgggttctccatcagcagccccccgtccgaccccaacgccaagcgccgcggccggcctcccggctctggcaagaagaagcagttcgaagccttgggctcctggggcatcgccttcacccctcacatcctcaccgtcaaggccggcgaggatgttgcttcaaaaataatgacattctcacagcaaggccctcgcacagtctgcatcctttccgcgaatggtgcaattagtaatgttacacttcggcagccagccacatctggtggactagttacttatgaggggcgctttgagataatctcgctatctggttctttcctgcttgcggaggatggtgatactcgcagcaggactggtggcttgagtgtcgcacttgcaggatctgatggccgagttcttggagggtgtgttgctggaatgcttatggctgcaactcctgttcaggttgtggtggctagctttatcgcagagggaaagaaatcaaagccagcggaagcacggaaggttgaaccgatggctgctcctccaccgcagatggctacctttgttccacctccgctggccaccagccctccatcggagggaacatccagcgcatcatctgatgactctggcagcccaatccaccacagtgcgatgccgttcagcaactccagccagcatcaacaccctcaccagcaccagcaccagcacatgccgcctgcctacgcatccgggggttggtccctctcagtgcaccagcagaataggcatgattctgacatgaagatgatgtcgaactaacagtgctcaacctaggcgtcccatttgttggttgggctggagaggaaggaagctgctgatggttggtactgccgctatgaaatggtcttcttgcgccgtctgtcctgatcagtgaccccgtgttgctctggtcaatgacggtgtgtctgctatagctaagatagctaggaaggattagagtttatgggctcacttgctgttgttcccctgggtaagattaatttaatttgaattagccgctgttgtaatgctgtagccagtgtcctgaagtcgcttatcagtcagtccctgacgcgagctgtgatggttgcctgatgagatcttcacctcctagtcctaggctagttaaaatatcatttctctagtactatgaatcatgaatttacttggatgcttcggtttgattcaggaatttgatcgtattatgtttcgttttgttctc

SEQ ID NO: 87794 - DNA, 226 bp, Zea Mays
atgcttgcatgtggtctgacaactcattttgtccagtcaaatagtctgctattacttgaagaatcgcttaaaaaggtggacacttcaaattattttgcactgtgtggtatcatcgatcaatatgctcaacaaccatcactgaaagaaagcagccctttgaataggttggaaatcatcaacaaatgcttttccaaaaggacatttgaagaaattatatccgctcttg

SEQ ID NO: 87795 - DNA, 594 bp, Zea Mays
cccacagttctaaagccttgtgatctatattctccatttcatacagaattacttactaattccttggttattttcaataggatgggagagtgtcgaatgcttcttcagatgctattttttggtccgtcaaatatgctagacccaaatgcaagttttgctcaaatgtggcaaaaatgattgtctcaccaattgtcatcacgcctacttccaggaaagttttagagaaggaaaagatggaatgtaactcaaattttggtggccacacaagtgtggagacttaaattcatatatagttaggctcaacattagtgcaaacagttgataaccaagtttttcaattagtattttagtttggctttagagtacacttagtatgagttatttgacaatgtttatttatgagatattgaattgtacttatctatattatattaattataatgttattaaatatatgtgtatgtatatttctctttcaaattattataatgtggtatctcaaaaattagtataaattgaagaatgtactgccatttaagtcatttcgtttaaatcttaataagacagttcccaaaacgtctaatatcagtcttc

SEQ ID NO: 87796 - DNA, 5008 bp, Zea Mays
atggacgaaggcctctcggcaagtgaaggcaagatcctagtagaggcgtcttcgacggtcaccacaaggatgtaccaggatggaagaagagccgagtctgctcgctgcccacgctgggagttagggccggaggcctggccgatcggcgggggcggagggagggtaatgagggctccgcaggagcgtagcatgagggatctctacgatcgcacgcggcacaaagatatggcagctccagaggaatcagtggaagggtgcggtggaggatgcgcggagggatgggagcaacgggcactggcctctaagatggaggacaagactgtggtaaggaaaagattgatatcaagcaacaacactcgtgtcaaggcagagtctggcacctgtaatgtctgttatgctccctgctcctcttgtttacacccacgtagtcgatttgaggattcaaatgttgaatgtgcatcctctcagacatgctccacaaggtcggaagtaaagaacaatttacttgttcatagggagaaagggctctgtagtaaaggagataacgatgatgagtttagtgcaacctcagatcatgctttgtactctgtaactggtagaaacaaacttgttgcaacatcatccattgccgatgatttgtcagaggttgacatgccatcaaaacgcaggaggctgttgaatcaagacacaagactatctagagcagaataccttgatgacaacaactcatgtgttactggtatatcagcagaaggcaaacttcttgtggataagaaaaaactgtcaatttctgcatccagtcgagatttgaccgctaaagccaacagcatggctaaccacaacaaactaagaaatcaatgtgttgatgaatcaaagaaaggatctgatggttgtgaaatgcatcctagctcatctggtagattttcccctgtagattctcttgttatgacaaaaaagttgctgcgaacccagtcttctgtcagtgcattgagcagattatctcctaacaggcaggttcatgaatttgggaaagcagtggataatttatctcatcaaccttgtgagaaggcttctcttttgaagaataatgaagaaccacgagctgggcaattgaacccttgtatagctggtgaaaacaaccatggcacgctggcaggttacagtaatagacatgcggacaaaaatgatttctcattgaatgatctagacaatggcaccttgtgctcaaaagatgaaatccaagaacatggggacatcacatctaatgataatgataagaagaatgtgtgtgtcaaacaagattcggatcaagattgttcaatggatatatccaatgacagaaagttgaatacacaacatgatgtgatgacagactgtggcaattcagaaggtttgatagatgttaatgtttgtgatatatgtggagatgtcggtagggagtatcttctagctacatgcaccagatgccttgagggagcagagcatacttactgcatgcgagtgaagatggaaaaagttccagttggtgaatggttttgtgaagaatgccagcttaaggaagatcagaacaatacaagaagtaactatggtaacacagcggttaatgtgacagaaggaaagaatcaaaggacagaaagtcaaagcaagcttaaagcattgcaaattgttgtgcctgatttggatgctccgcaagtcacacacagcgcactgacagctgatcagtgtgatggtagtaaaagtttgcatttaacttcagctgatacacaaacacggctaaaggataccacaacagctgctgaaagattggatatgaagaacaaaaaaacattaagtgttgcaagatgtaacaaactgcaagttcttacatctgatttggacacacgaccacacagttatggaaaaccaacatctggagtctataacaagaagagtcgaagttcagattttttgttgaaccacaaaaagttgcaagtttctactgacatggagtcgccactgtcaagtgaaggcctacaaagtccacccatatcatccaagagacatgtagagagcatgtcgtcccctaagcctaggctcttcaagacgggtagccttggaaagcatgatgtcatctctcgtgataactcatttaaaaaatctaacaagggaggtttaacttcagttgataatgttccggtgagaactacccaggcggctaaaagttctgagaccttgtcacgatcatattccatggggaacatggtgaatgctaaagctcccattccttcagcaagaggccttttatccaagcagctatccttcaatagcaccaacaacggaccaaaagtcaagcagttggctgataaaatgtctagcaagttaagacctgcagaacattccccaagagatcctagagataaggaaccaataaaaaagattgtacaatcaggatctttcaaacgcgagggttcagattccgtagatgttggatcatcaaaacaaaagcaaacatttcatttgtctcgagatgaaaaaccaggagtactgaagccaataaaggaaaagaatttaacagaaagaagggcttcttttagtttgaaaaaaccaaacattccttcatctccaaggtctgacagctgtatgaagtcaggggaaagaaaaaatgatcagcatatttctggaacaaacatacttaaaagtagcaaaagacctggatatgctgaaaagaatctgaggtacgatttgtccagaactgacaatggcaatcaagatgttaccgtgcatccaaaaccaatggaagtttctggtaaagatgcttacggagtaaagacatctaatccactatttcgatcccaatgtgccaaaaagtatagatcaaatgatgttgaagatgatgatttacccatttcagtgaataatgttaacattgcgccaaatgagcatgctgaggtggttcccacaatgtctactgccatgactcgtgaatcaaatttacaagatgttccaagagaaagcacctctgatgatttagctccgaaagtggtttgttgccaacaaaagcttttggaaaacacaggagatgattcctgtaaaactttagaggtggttcaagattcaggcgatatattgtctgcgactccacgtggtcttcagatggcacacaatctatacccctatgacaacaaattggataaaccagatttgaagaaggaagcttttgctgatcaatcttcagctcttgggaatcctttaaaagattttgttattccagagcaatcttacatctggcagggtagctttgaggtatcaggacatggaaactcccctgaaatgttcaatgggtttcaagcttacttgtctacttgtgcctcgtccaaagttcgtgaagtaggtgaacaattacctgacaaaattcagctagcagaagtcccacggcattcctcatggccgctgcaatttaatgaagtaaatccaactgaagataatattgctctttttttctttgctaaagatgttgaaagttacgaaagggcatatgggaaactcttggataacatgcttcttggtgatttgtccctcaaagcaaatattgataacatggaacttcttatttttccatctgataagttgcctgagaggattcaacgttggaatggtttacttttcttttggggcattttttatgcccggaaagcaagtagtccactagagcttcctacaaataattgtccattagaacaaaccaatggacctgttatccagcatgatatgggttcatctaaggcacttcagcctttgggtatagatttgaatgagtgccctaatgatgatatatctgatccagctctttcacttggatcagagagtgagaaatttggtgcatctgtagattataatgttttatcagagtccaaacacgaggatagaaatctgaatgcaagtgaagtacatcatgaagaaactgctggcacaagacaaattatatgggggcaaccttctgtagctcccactgtaactaatcttcccactatctcaacaggagttcatgacatcgttccggattattcggctgctgcaaaagatagcacaggaacagcaggtggaaacaaaatggagaaagcagatcagaatgaagctctcttttgtttttcacagcaaccaggtgcaattggatcgatctcacatgagataaaacttaagaaacatggtcttctgccttcacattgtcattttagtggatcaaagatatgtgatgatcaaaccaaatcgactccaagttcagatatgggttctttggattctcacctcaccaacaaaaggcagaagacttatgggaaacactctacttgcatttttggagatgaaatgccacctattaaatgcttgtcgaagatacatcccttaccggctggacaggataatccagtcgatgttttacattgtcacaggtgtccttcagatcctgtctctcttaaaaaaacagtacctgatcatatcatcaacgtgctttcatctgacgatgaagattccccagaacctagtactagcttaaataaggcatcactgaaggcagatgagggctcctccgctttattgttactttccctatccatggtggcaacgaagcataatctttctggttcagatattgtagatgatgaaccactgtctctatctcttggattccccagtgttgtcgacgggagtgaagatcaggagatgaagcaatttctgccggagaagccaggcataaacacttaatgccccctttagatttgcgagtgtacagttttgtgctatgtttagctgtaaggagtttagacagggtagaagtatatggtataaccgttaaattatgaataattttcctttcttttctctcactgttatatgcatctgctgctgttgttagtgatactggtctgatgatgttattgcctgctgtatttatgtgatatatggtgttagtttctttaagacattattggtatgacataaaaggatagatcaaaacgtgaatgtttataaa

SEQ ID NO: 87797 - DNA, 264 bp, Zea Mays
ataccctttttttatgcacaagtagggcctgtgagatagacaaatttgttcatattctagttatataggacatgtgagaatcatttaatgtatcggacgaattggttctgacaggccctaaacacattgtaagtggtgaactagaacatgaacaaatttgtctacctcacaggtcctaattgcacatattgctgtttgttgtgtggtgtaagagcccaagttgtgttcatggcttaactaatgcaacaaggtagcttgcaatcc

SEQ ID NO: 87798 - DNA, 113 bp, Zea Mays
atgttcagtatagctccgacatgtcaacaaaatgttaaggggctgtttggatctcttaattttgatagaattgtaatttatttaatagagtaggttatttgatttggattttg

SEQ ID NO: 87799 - DNA, 965 bp, Zea Mays
gcttcttcgcgcgtcctccctgcctataaaaacagtcaatgccccgcttcgctcgatccgtttcccagacccacacacgcaagaagccagcgcgcacaacagaacgaacgccacagcgcgagtggagtcggtggacgagacagagagggggaggaacgacggcgacggccatggagacggtggcggacacagaggggtggacaactgggcgacagcaccgcagcggcggcttctggttgagaacggagatcgagacggaccggggggtccccattcccaggggccccgggttcgggtttgccgccgccgtgcgggagccgctggtgaagctccggcggccccggtatgacttcgagaggtgggactggggctacttcgtctggcctcacgaccgtctcgacgccaatcttgagatgagggacagtgacccggaggcgacgcttgaagccgacttgaaggcgggcgagagcttcgtgaaccagagaacgctgcagctggagagctacgagacgtcccagcgcaggcagcagcaatacgctgcaatctggccctgcgaccatctcgctgccaatctggagatgagggacgacggtgacccggaggcgacccttgaggcagatcggaaggcgagcgagagcttcctgaaccacggcccactgcagctggagagaagtttgatgtgccaggacgacgccaatctgggaccgggagtggggaggaacagcgaaaacaaggcgaagcttgggactgacgcccggaagaccaaggagcggaggagcacgcggcggctgaagaggtctgagatggatcgacgcacgaaggcgaagcagcaggagaaggagaacgaaggagccgcactgttccggacacccatgcctgccattgtcaacaagaaggccgtaggacccagatcggcgcggcgtcgccgtgttttcgcagaagctaaccggatcctggatggctga

SEQ ID NO: 87800 - DNA, 201 bp, Zea Mays
atgtcctggatgatgcaaccggaggggcgcctacagcaccttacaacagatggggtttgcagtgcctccagctggaacccctcggccgggaagtcgacgagggaccaggtcccctcgtcgccgttgtgcacgcagtacctgaagaacaccacctctcgcgcaggcaccaaaggagacgggaactgcaactccgcttgcatc

SEQ ID NO: 87801 - DNA, 831 bp, Zea Mays
atgggcgcacaccatgctaacaaccagacgaatcacttggagtttggtgctcctttccgagagaagggcatccgcccggtgccccgcagcaacggcattttcgcgagcaagcaagagcttgcatgtattctccgtggctgtagccttcgcttcatcctccgcgaccttcgtatcccgcgcttgagtgagaattttgcggacctctgcgagaataagagcgtgaggcagtcagaggtggcaaatggtgaagaggtatggaatcacgtcagcccaaagcggggtcgactcaagtcgtcgccactcctccgcctctgctttgtcgcccttcacaaaccccacaggcaacatggatccgccggcgaccatggtcggcgttatttgctcctaaagatggacggacccaggggctggcagcccacctctaggctgcaagcgacccctgtgacaatgatcggcggaggggcaagggcaggaagaggcaaggtcagagcagatgattgctctgtgaggacacaccaggggcaactgcgcgcggtctccaggtgcttccctaggacagatgaggatgacgatgagtcgataagaaccatctccgggatggccacgctcgtctcccttggaacgacctgggacgacaatgccaccatggggatggggacgacgtaccacccagtagaaaaacccgacagccagagggggcgtacctcacggcggtggcgacacgaaggcctagggagacagatgcaccgctctagccaccaaggttgtgtccctcacggacttatgcgacacatatgcgctggtcagcaagaaaaaggaaaaggacattaa

SEQ ID NO: 87802 - DNA, 1450 bp, Zea Mays
gagttactttacctcccttgagcgaccactcttcccaagttcccatcccagtccgtcagtcaagcgagcgaaatcgaatggctcccctcttcgccgcggcgtcccacgcgtccctcctccccctctcctccctcgaccgccccgccgccggccacctagtccgtggcaccctcaggccccacacctcgagcctccgcctgcgccgccccccgggggcaaccgggcgcggccgcgggcgtggccgagggggcatcccagacgagtggggcgagcgctcgccgccggacaaccccgagccccccgcgcagcccgatcctcccatcgacgaagacgagtggggccgcgacgactctgccgagggcaactcacgccctatcgtcgtcgacgagtggggcgagcccggggtgcctgagcccgagccgccctccgccgcggacccgcctagcccctccgcagacgacgactggggaaaggagccggaggcgccggcgccggcccctgctccggcggcggaggaggacgagcaggaggtgaagagggaggagctcaagcggtgcctggtggacacggtgtacggctccgacctcggcttccgggcgtccacggaggtcagaggtgaggtcgtcgagctagtcacccagctcgaggcggttaaccctactactgctcccgtcgagtcgccggatctcctcgacggcaactggatcctcatatatacagcatattctgagcttctgcctattctagctgctggggcaacacctttggtcaaagtaaagcagatatcccaagaaattgactccaaaatcatgacgatagtcaatgcttcgacccttacgactccattcgcttcattttcattcagcgcaaccgcctctttcgaggttcaaagcccatcaaggatagaggtccaatttaaggaggggagctttcagcctccgacaatatcatcatccgtggatctacctcaacaagttgatatatttgggcagaagatcagcctggggccagtccagcaggcactgaatccattgcagcaagcatttgctagcattgctgggtccatttctgggcagccacccctcaaggtaccaattcccggcaacaacagagctcgatcctggctcttgactacctacctggacaaagacttaaggatctcgagaggcgatggaggcttgtttattcttgccaaagaggggagccctttgctagatcaattgtaaatctgtaattggttgctaccggaaaggatatccagaactccacaggtaacctaacagaggacgcctcacattgtatttatcaatcaatattgttgttggcggcactgttacatgtatggggccatgaaatcttataaatgaatatttagtcgataagaatcgagagctgaactgagactgatacaaacaaaacacttcaatgttcatctgatgtctgtcctttt

SEQ ID NO: 87803 - DNA, 1413 bp, Zea Mays
tcccaagttcccatcccagtccgtcagtcaagcgagcgaaatcgaatggctcccctcttcgccgcggcgtcccacgcgtccctcctccccctctcctccctcgaccgccccgccgccggccacctagtccgtggcaccctcaggccccacacctcgagcctccgcctgcgccgccccccgggggcaaccgggcgcggccgcgggcgtggccgagggggcatcccagacgagtggggcgagcgctcgccgccggacaaccccgagccccccgcgcagcccgatcctcccatcgacgaagacgagtggggccgcgacgactctgccgagggcaactcacgccctatcgtcgtcgacgagtggggcgagcccggggtgcctgagcccgagccgccctccgccgcggacccgcctagcccctccgcagacgacgactggggaaaggagccggaggcgccggcgccggcccctgctccggcggcggaggaggacgagcaggaggtgaagagggaggagctcaagcggtgcctggtggacacggtgtacggctccgacctcggcttccgggcgtccacggaggtcagaggtgaggtcgtcgagctagtcacccagctcgaggcggttaaccctactactgctcccgtcgagtcgccggatctcctcgacggcaactggatcctcatatatacagcatattctgagcttctgcctattctagctgctggggcaacacctttggtcaaagtaaagcagatatcccaagaaattgactccaaaatcatgacgatagtcaatgcttcgacccttacgactccattcgcttcattttcattcagcgcaaccgcctctttcgaggttcaaagcccatcaaggatagaggtccaatttaaggaggggagctttcagcctccgacaatatcatcatccgtggatctacctcaacaagttgatatatttgggcagaagatcagcctggggccagtccagcaggcactgaatccattgcagcaagcatttgctagcattgctgggtccatttctgggcagccacccctcaaggtaccaattcccggcaacaacagagctcgatcctggctcttgactacctacctggacaaagacttaaggatctcgagaggcgatggaggcttgtttattcttgccaaagaggggagccctttgctagatcaattgtaaatctgtaattggttgctaccggaaaggatatccagaactccacagcctttttgacagcttctactcaccgaggtggcagaaacactccagatcgcgggaaatgaagactgcaagggagactgtgctgctaacaatgccgcgtttacagtttatgttgcaacaaaaactttaaaccaatgtagctccaaaattgcagacttttcagtttatgttgcatga

SEQ ID NO: 87804 - DNA, 327 bp, Zea Mays
taaagtttaattatttatcaagggtactttgctcagatttcttctaccaatcccaaattcagaatttgggtgttacatgtaatcagttgacgatatcacttcatcatcagttccaacactcttgtacccatactataagtactacattcccagtatcatatagacttaatatgagtttaataacatcatttttaatgtatagttcatatatatgctagacatgacatcgtcattcaatactaattcacatagtacaattcattttgttatgtatttgcccttaaaccaccaaagtgtctgaaactgttacaagattgaatatttcag

SEQ ID NO: 87805 - DNA, 129 bp, Zea Mays
ggtttttttagttggctatgtgcattaggcagaggccggaagttctgtaccaaggatttgtatcctcttgatgtaatgacttggtattttcaatataagcttcatttatctaaaaacttggaatcgtga

SEQ ID NO: 87806 - DNA, 396 bp, Zea Mays
atgggaagagagaggaaggaagtcgagcaagcaagaagcttgtgcgcgcgagaagaagcgagcagggacaagtgcgcagcggccatggaagcagggaaggagctcgggcgagctggagggagcttcgtgtgggcgccggaggagatgggcgccgagcgagcagagggaaggggacacgacgctgggagctccgcatgggcacaggagcgcgcgcagggagagaaatccagcgctagggaagagctcgcaacagggacatggcgagcagggaggggcaccgcggccatggcgagggagctcagcagggcacggctcgagcagagggatgagcgcacaggagctctagagcgaccggtgagcgctgcaagtgacagagagaaggatccagcggtttga

SEQ ID NO: 87807 - DNA, 396 bp, Zea Mays
atgggaagagagaggaaggaagccgagcaagcaagaagcctgcgcgcgcgagaagaagcgagcaggggcaagtgcgcagcggccagggaagcagggaaggagctcgggcgagctggagggagctccgtgtgggcgctagaggacatgggcgccgagcgagcagagggaaggggacgcgacgctgggagctccgcatgggcacaggagcgcgcgcagggagagaaatccagcgccagggaagagctcgcaacagggacacggcgagcagggaggggcaccgtggccatggcgagggagcttggcagggcacgacccgagcagtgggatgagcgcacaggagctctggagcgaccggtgagcgctgcaagtgacagagagaaggatccagcagtttga

SEQ ID NO: 87808 - DNA, 207 bp, Zea Mays
atggctgctactaaggaggcagatcactgcatcaaatatctggactgttttgtgttgcaaggtcaggtcataattgttgagaagtgcatttctgttttcactgatgaaaccaccatttctgttttcaatgaatctgttgaactgaactgcaaaaatagaaattgttctattttgtttgagtgcacaaacagaactcaacggaactag

SEQ ID NO: 87809 - DNA, 315 bp, Zea Mays
atggtgcgcaaggcaaaggttgagttcgatgagcagccaccggataacttcgacccgaagaacccatatgcggacccggtggctatgctggagtaccgggaacacctggtgcgggagaagtggatccagatcgagaccgccaagatcatccgggagcgcctccgctggtgctaccgcatcgaggggatcaaccaccaccagaagtgccgccacctcgtggaccagtacctagaggctacacgcggcgtgggttggggcaaagatgcccgaccgcccgagttacacgagcccaagaagatcatcgaggcggagtag

SEQ ID NO: 87810 - DNA, 471 bp, Zea Mays
atggaggccacctccggcgacgggttcgaggccgcgggcccggagaggagcgagtacaggacgccgacgaaggaaagagctgggcgcaggacggcgtgccccgaaggatctaaagcagaacctgaacaaggaagccgatccaccccaccaccgcccgccacacctgcgacgccgccttctcccgctgctgctgcgccgccgccgccgcggtcggcgagtacacctctaccgggaggacggagggaagtcgaggacagagggatggcgaggccggaggcaaccagaggaggaggtggtgtcgtggtggtcggtctccgcgcccgcgcccgtgtgcgtggtgtttttgcgggcggtgggagcggcagcggtgtggggaggagagtcggggggaggttggacggcggtgtgggaaggccggagctgttgccgacgacgacgcgaatgaagactgatggaggatctagctgttga

SEQ ID NO: 87811 - DNA, 1533 bp, Zea Mays
ggattcgataacagaaactacctgaattcaatgagttgcatgaagagatacagcgtttgccattcatccattgctcaagaacaaaaggattgcagatagagagctcgtttttcattagaattccgtttgggtcatgtcccactcttttgttcagacagactaaactagatgaagctgacttacccagaaaagatacctaaacaactggtttggaaagagctaggaggtcctcggcatgctatgggttgaaatccaactaaatcccctcatcaaattctgcatccagaaccagcagcattcgccagatactacaaccaactaaatcccctcatcgaattctgcatccagaatcagcagcattcgccagatatccagtgccatcaatcatcatcttatttcacgacaacatggttggcccctttctcctcctgttggttgcccacgccgtccttatggaccatctcccagaagaaatccgtgaggacagtctcgtatcctggcatcttggcgtagcccgggaagtagttgatgtcaatgacgagatagcggtcgccggcgcggacgtcgcggatcatgtcgaagttgaagagttgcaggcccagcgcgcggcggaggccgcccgcgatctggttgatgaatgcggcgggcggcacgacggcgtcctcgagactcttttcgccgtagtactcctccgccgtgcgctcagtggggaggttggagacctgggagaaggagacggatccctgggccgatgcgtcatcctcgggggacacgtcgggcaggctacggcgcttgacgcaagtgacgtggccgccgacgacgtagaccttgaagatgacgccgccatggttgacgaactcctggagcacaagcggcgggcggagcttgccgaggccctcgcggtggtagacgagcgacatcttgtgggacttggcggtgccgtcggcgacgaggggcttggcgatgagcgggaagcggagcgcggcaaggagtccgaagtcggcgagcgcggcagcgtcgtagacgacgacctggctggggataccgaaagtgctgtcctggtcggcggcgtggtcgagctcggagacgacctggagcatggagatgcggttgtggaggcggtcgatggcgtggggcgggtcgacgatggggacggccgggtggcgcgcggcgaaggccacgagctgggcgcgccagtcgtctccgtagagcttgtggatgaggaggtggaagggcccttgctctgccaggggctgcgacgcatccacggggacgaggtccatgccccgcgacgccgcctgggccaccagcgacggctggatgaagctctgctgcttcttcggcgcgagcgcgtaaccgatgacgtagcgcggggggtgggtgacgccggaggagggctcggcggcggcgtcggaggccatcgggtcgggttcgggaggaatcgatcgatggagattgaaatttgttgggaaattaggtggtgatggataaagggtgaacgaatgattatataaagccagaaaagccaaaggt

SEQ ID NO: 87812 - DNA, 384 bp, Zea Mays
atggcgaccgcgctttccaaatcccccatcaaatcccaccctagctcgcccaccacagcgcatccaccaccgaaccccggctccaacgccgcgtcggctggcggaggggcggcgcctccgctgccgttgtcggccgccgccagtgccacgccgtcgaagaacatcgtgatggtggagctcaagtcgcgcgtgctcgtagcgctcgccaagctctcggacagcgacacgcatcacatcgccatcgaggagctggaaatccgagcgtcgccgttgaccgacgtaacctccgttcgcgacgcgtgcgagacgtcgcgggccagctcgcggctgtgtacctccctctgcccgcttccggtgttgacgaggcgggcaatgccaccgtga

SEQ ID NO: 87813 - DNA, 1744 bp, Zea Mays
gcacggcacggcaccgcaccgggagtccatccgtccgtccggcacgcacgcacgccctttgaatgccccctcccgcctgcctgctgcctctgacccggccccgtatcgtatgattcattgattcgtatctcctctcctctcccggctcggaataacccgtctctctcgcccgccctgtccttgccggccggccccggccccggtctcttctcttcttcttctttttcttcccgctatatatactgcgcgcctcaccttcccctctttgcaatccgtatcatcatcttggcctcgtcaatccaccaccaccgtcgtcgctgagctcctcctccggcttcgcttcgctgtcttgcctcctcctcggtcgaagaagaaaacatgtgtccgggatccgtggagtcgtcgtcggcggcggcggcgggcaagagcgtgtgcgtgatggacgccgcggggccgctgggccacgcgctcgtggaccgcctcctccggcgcgggtacaccgtccacgccgccacgtacgcccgcgacggggaggagggcgcggctgccgccgcgctgctcggccacctgtcgtgcgccgccgacgcgtgcaggcaccggctgaagctgttccgcgccgacccgttcgactaccacgccatcgccgacgccgtgcggggctgcgccggcgtcttctgcatgttcaacacgcccgacgaccaggcccaatgcgatgagtcgacggtggagacggaggtgcgcgcggcgcacaacgtgctggaggcgtgcgcgcagacggacgccatggagcgggtcgtcttcacctcctccgtcaccgccgtcgtctggagcggcgccggcgccggcgtcggcgcccacagggaggaggtcgccgacgagaggagctggagcgacctcgccttctgcaggaagttcaagctgtggcacgccctggccaagacgctgtcggagaagacggcgtgggcgctggccatggacaggggcgtcgacatggtggccatcaacgccggcctgctgctggccgcccccgggctcgggctcaccgccgcgcacccctacctaaagggcgcccccgacatgtacgacggcggcgtcctcgctaccgtcgacgtcggcttcctggccgacgcgcacgtcgccgcctacgagtcccccaccgcctacggccgctacctctgcttcagcaacgccgtctgccgtcccgaggacgccgtcaagctcgcccagatgctctcgccggccgcgccacgctcgccgccgccaagcgacgaactgaaggtgataccacagaggatccagggcaagaagctcaacaagctcatgctggagttcgccagcggggtatacggggagctggactaggaaggaactgccgtgccaggccacagatgatgcgatgcgactagggctgttgtattcttttgtacgtagtactatttgtagttttcgcccccctcacaaaaaaaaaggagggaaatctgtttggttggccaaaatgtgccatacgctcgctgtacatggccaaacacgccacgtgtgttgttgatacagcccctgccagcagcaggggtgggtggggatggggagagcatttcagtgatcgggttgccaacgaaatacaatatcatatctaggttcgtgagttacatcccatgcatgcgttacgtgacgcttatattgaactctgacaaacttgtagcgcacaattacaaacatgattacggaagaatcgtttcagggcaaa

SEQ ID NO: 87814 - DNA, 2373 bp, Zea Mays
gcaatccgtatcatcatcttggcctcgtcaatccaccaccaccgtcgtcgctgagctcctcctccggcttcgcttcgctgtcttgcctcctcctcggtcgaagaagaaaacatgtgtccgggatccgtggagtcgtcgtcggcggcggcggcgggcaagagcgtgtgcgtgatggacgccgcggggccgctgggccacgcgctcgtggaccgcctcctccggcgcgggtacaccgtccacgccgccacgtacgcccgcgacggggaggagggcgcggctgccgccgcgctgctcggccacctgtcgtgcgccgccgacgcgtgcaggcaccggctgaagctgttccgcgccgacccgttcgactaccacgccatcgccgacgccgtgcggggctgcgccggcgtcttctgcatgttcaacacgcccgacgaccaggcccaatgcgatgtgagtacaagacggcagcttgcttgatttctttcgcctctctctctctcctctgcatattagtattaatccgggttttcccctcgaagaaacgaaagctcgtttgtaggagtgacttgtaggtagtagcgctcactgcataaaattggattggattggattatgctctcctatactagtagacccagccagagcttatactagcactgtagcatgaacagggaccgggacagctggacagtggcagaggagaggagatgagccgatcctgtgctaccttttcctcccttttccatgaatctccatctccctcctccctggtctaggctgtttggttcgttccagaggagggctgggacccggacctcttcatactcctctgatgatgatgacccattaatgacacagctcatgtgtggtgtggctgtgacttgtgacttgtgatgagtgagcgtgccccttcttcctcctccagcctccaggctccagctccaggtgcggtgtgaagtcccgctcctgctcctgtcctaccagcgtactactccagtagtacagtggagtagccgagcgcatttaatagctggacaaggtgagaggaggaagctcacacacagcacagcacagagggaccgcaacggagcagagaactgggccaccaaactgaaccaaccgcgggaaggggaaagggaactcgaacccttttcctccgcgtgcattaaaacccttcacatgggcatgggcatgtcagctgctgccccttcgtcctcgcccctgcttgctggctggctggtctgctctgtcccgtccgtcctactcctacgagcagggaggccagcaggcagctagcacgcaacgactgcacgagctggttgacgagcgagcagggaggccagcaggagtcgacggtggagacggaggtgcgcgcggcgcacaacgtgctggaggcgtgcgcgcagacggacgccatggagcgggtcgtcttcacctcctccgtcaccgccgtcgtctggagcggcgccggcgccggcgtcggcgcccacagggaggaggtcgccgacgagaggagctggagcgacctcgccttctgcaggaagttcaagctgtggcacgccctggccaagacgctgtcggagaagacggcgtgggcgctggccatggacaggggcgtcgacatggtggccatcaacgccggcctgctgctggccgcccccgggctcgggctcaccgccgcgcacccctacctaaagggcgcccccgacatgtacgacggcggcgtcctcgctaccgtcgacgtcggcttcctggccgacgcgcacgtcgccgcctacgagtcccccaccgcctacggccgctacctctgcttcagcaacgccgtctgccgtcccgaggacgccgtcaagctcgcccagatgctctcgccggccgcgccacgctcgccgccgccaagcgacgaactgaaggtgataccacagaggatccagggcaagaagctcaacaagctcatgctggagttcgccagcggggtatacggggagctggactaggaaggaactgccgtgccaggccacagatgatgcgatgcgactagggctgttgtattcttttgtacgtagtactatttgtagttttcgcccccctcacaaaaaaaaaggagggaaatctgtttggttggccaaaatgtgccatacgctcgctgtacatggccaaacacgccacgtgtgttgttgatacagcccctgccagcagcaggggtgggtggggatggggagagcatttcagtgatcgggttgccaacgaaatacaatatcatatctaggttcgtgagttacatcccatgcatgcgttacgtgacgcttatattgaactctgacaaacttgtagcgcacaattacaaacatgattacggaagaatcgtttcagggcaaa

SEQ ID NO: 87815 - DNA, 1898 bp, Zea Mays
gcaatccgtatcatcatcttggcctcgtcaatccaccaccaccgtcgtcgctgagctcctcctccggcttcgcttcgctgtcttgcctcctcctcggtcgaagaagaaaacatgtgtccgggatccgtggagtcgtcgtcggcggcggcggcgggcaagagcgtgtgcgtgatggacgccgcggggccgctgggccacgcgctcgtggaccgcctcctccggcgcgggtacaccgtccacgccgccacgtacgcccgcgacggggaggagggcgcggctgccgccgcgctgctcggccacctgtcgtgcgccgccgacgcgtgcaggcaccggctgaagctgttccgcgccgacccgttcgactaccacgccatcgccgacgccgtgcggggctgcgccggcgtcttctgcatgttcaacacgcccgacgaccaggcccaatgcgatcctccaggctccagctccaggtgcggtgtgaagtcccgctcctgctcctgtcctaccagcgtactactccagtagtacagtggagtagccgagcgcatttaatagctggacaaggtgagaggaggaagctcacacacagcacagcacagagggaccgcaacggagcagagaactgggccaccaaactgaaccaaccgcgggaaggggaaagggaactcgaacccttttcctccgcgtgcattaaaacccttcacatgggcatgggcatgtcagctgctgccccttcgtcctcgcccctgcttgctggctggctggtctgctctgtcccgtccgtcctactcctacgagcagggaggccagcaggcagctagcacgcaacgactgcacgagctggttgacgagcgagcagggaggccagcaggagtcgacggtggagacggaggtgcgcgcggcgcacaacgtgctggaggcgtgcgcgcagacggacgccatggagcgggtcgtcttcacctcctccgtcaccgccgtcgtctggagcggcgccggcgccggcgtcggcgcccacagggaggaggtcgccgacgagaggagctggagcgacctcgccttctgcaggaagttcaagctgtggcacgccctggccaagacgctgtcggagaagacggcgtgggcgctggccatggacaggggcgtcgacatggtggccatcaacgccggcctgctgctggccgcccccgggctcgggctcaccgccgcgcacccctacctaaagggcgcccccgacatgtacgacggcggcgtcctcgctaccgtcgacgtcggcttcctggccgacgcgcacgtcgccgcctacgagtcccccaccgcctacggccgctacctctgcttcagcaacgccgtctgccgtcccgaggacgccgtcaagctcgcccagatgctctcgccggccgcgccacgctcgccgccgccaagcgacgaactgaaggtgataccacagaggatccagggcaagaagctcaacaagctcatgctggagttcgccagcggggtatacggggagctggactaggaaggaactgccgtgccaggccacagatgatgcgatgcgactagggctgttgtattcttttgtacgtagtactatttgtagttttcgcccccctcacaaaaaaaaaggagggaaatctgtttggttggccaaaatgtgccatacgctcgctgtacatggccaaacacgccacgtgtgttgttgatacagcccctgccagcagcaggggtgggtggggatggggagagcatttcagtgatcgggttgccaacgaaatacaatatcatatctaggttcgtgagttacatcccatgcatgcgttacgtgacgcttatattgaactctgacaaacttgtagcgcacaattacaaacatgattacggaagaatcgtttcagggcaaa

SEQ ID NO: 87816 - DNA, 1114 bp, Zea Mays
agctgctgccccttcgtcctcgcccctgcttgctggctggctggtctgctctgtcccgtccgtcctactcctacgagcagggaggccagcaggcagctagcacgcaacgactgcacgagctggttgacgagcgagcagggaggccagcaggcagctagcacgcaccgactgcacgagctgttttttctgacgagcaggttttattaatttggttgtgctgcatcgtgcgtgtgcaggagtcgacggtggagacggaggtgcgcgcggcgcacaacgtgctggaggcgtgcgcgcagacggacgccatggagcgggtcgtcttcacctcctccgtcaccgccgtcgtctggagcggcgccggcgccggcgtcggcgcccacagggaggaggtcgccgacgagaggagctggagcgacctcgccttctgcaggaagttcaagctgtggcacgccctggccaagacgctgtcggagaagacggcgtgggcgctggccatggacaggggcgtcgacatggtggccatcaacgccggcctgctgctggccgcccccgggctcgggctcaccgccgcgcacccctacctaaagggcgcccccgacatgtacgacggcggcgtcctcgctaccgtcgacgtcggcttcctggccgacgcgcacgtcgccgcctacgagtcccccaccgcctacggccgctacctctgcttcagcaacgccgtctgccgtcccgaggacgccgtcaagctcgcccagatgctctcgccggccgcgccacgctcgccgccgccaaggtaactaacggccatggaaccgtgattgtgtttgtgctagctggcagagacgacaggcggttgtttctgttgctgacaaggcgttgcgcgcatgggtttttgttttgcagcgacgaactgaaggtgataccacagaggatccagggcaagaagctcaacaagctcatgctggagttcgccagcggggtatacggggagctggactaggaaggaactgccgtgccaggccacagatgatgcgatgcgactagggctgttgtattcttttgtacgtagtactatttgtagttttcgcccccctcacaaaaaaaaaggagggaaatctgt

SEQ ID NO: 87817 - DNA, 1111 bp, Zea Mays
accaactaacaaacacgtacacgtcatcatcagacgcactaccacacaaccaacaccaagagtggttgctggttgcatgcatcttcttcgttttcgtcctccatgcatgtgcgtgaaacactgcatgcaggctccgatggacaaaaacgacaaacactgcatgccaactgctgtccgtgcgtgaaacacgattggggttgccgaccgaccggcacacgcacggacgcagccagcagacgacctgacctgacctgacctgtgctgtctgcctctgcgcgcatgcagctgtggcacgccctggccaagacgctgtcggagaagacggcgtgggcgctggccatggacaggggcgtcgacatggtggccatcaacgccggcctgctgctggccgcccccgggctcgggctcaccgccgcgcacccctacctaaagggcgcccccgacatgtacgacggcggcgtcctcgctaccgtcgacgtcggcttcctggccgacgcgcacgtcgccgcctacgagtcccccaccgcctacggccgctacctctgcttcagcaacgccgtctgccgtcccgaggacgccgtcaagctcgcccagatgctctcgccggccgcgccacgctcgccgccgccaagcgacgaactgaaggtgataccacagaggatccagggcaagaagctcaacaagctcatgctggagttcgccagcggggtatacggggagctggactaggaaggaactgccgtgccaggccacagatgatgcgatgcgactagggctgttgtattcttttgtacgtagtactatttgtagttttcgcccccctcacaaaaaaaaaggagggaaatctgtttggttggccaaaatgtgccatacgctcgctgtacatggccaaacacgccacgtgtgttgttgatacagcccctgccagcagcaggggtgggtggggatggggagagcatttcagtgatcgggttgccaacgaaatacaatatcatatctaggttcgtgagttacatcccatgcatgcgttacgtgacgcttatattgaactctgacaaacttgtagcgcacaattacaaacatgattacggaagaatcgtttcagggcaaa

SEQ ID NO: 87818 - DNA, 372 bp, Zea Mays
atgcgctgctgcccgtctatcgctggtgccatgcaaatggaaaccgccgccacgatctcgcctagcccctgttcatcttccccgaagagagcccatggagcagttttctcgcccactcgtgcccagctcagccagaaccgcccgcgtcccgacctctgcccgcgcgctcgtctggctctgcctgcgcgcttgtctggctctgcctctgcccgcgcgtcacagcctgcctgcgcggcggcgcagattgtggtcctgttcgaccggcgagtcgccatcgtgctcggctgttcccaggcaccgatgaagaagaaccgacgtagcgcgtccatcgacgtcgcgccgcgcgtccgcgccgtccatgtccgcacctag

SEQ ID NO: 87819 - DNA, 3244 bp, Zea Mays
cctacccttcctccccctccgcctcccaccggcccacccccactctcttcttctccactcggccgggcactctccttgccccggcctcacaccatcacatgtccacaatgctgccgtcctccagatcgagatctgggccgaacgagtcccccgtcagcaggggcaggccgagcacgccatcctccaaccaccgcccctccacgccgtcctccaaccaccgcccctccaccccgggcggcaccaggaggagcagcgtcggcacgccatccacgccgcgctcccgcagcaacggcgcgggccccttcaagtccgagcccaactcgccgccgtcggccgccgcgcagaagccccgcctctcgttcgaccgctccccgagatccggggacaccaagcccgtcgtcgagcgccgggtgcccaagatcggcacgactcctgaaaagcatctccggagggaggccgaactgcaggcgcggcttgagtccgcccaggaggacctgaagaaggcgaaggatcaactggcattcatcctcggagagagggaccgtcttgtcggggagctcaacgaggccaagagagtcgctgatgagactcacgagaagctccaggatgccctcatggccaagaggtgggccgaggaggccactgagatcgagaagttccgggcggatgagctcgagcaggcaggcatcgacgaggcgcagaggcgggaggacgagtggcagagggagattgagtgtgtgcgtggccagcatgccgctgacttggagagtctggtcaacacaacggaggaggtggagaggctcaggcgtgatctttccatggcgaacgaggccaagaaggctgcacttggccacgccgatgatgcaatgaagattgctgaagtcaatgcagagaaggtggagattctctcaaatgaagttgttcgcttgaaaggcttgcttgattcgagtgctgccagcgaagagagtaagagccgtgaagctgagcttcttgttaagaatctggagtctgaagtttcatctctgaaaggcaaacttgaggaggcaaaagtccttgaagacaggttagccgacgcagaaaaaatgattgaggagcttaaatcagagatagctaatgcgcagaaggtcgaggaagacatccgtcagcagttagaagaatggaagcagaagtcagtatcacttgagatgaaattggaggaagttactctatctgagaagttcaaaagtgactcacttgtttccacgactgaagagctgtacaagatccagtcgatattgcaagatcgagaatcggaaattgaagttcttaaaggaaagacaactgccttggaaatcgaggtgacaaggcttttagcagatgtgactgattcaaatgagcatcttgatgcatcacagcaagaggtgtttgggctgcagacaacaatagatgttctgaagaacaagcttgaggctgcagagctagctgcctcagaggctttggacaatgagaggactgctaccacaaagattgaagtcctgactgaggagaaaaccaaccttattagtgagctggatgacgctagagacagagaggagagagagaaaagggcaattgaggatcttactgctgcattggataaggtaactggtgaagcacaggaagcacatgataggtgtcagaagaaagaagatgattatgaacatgcccttgcgcagataggtgatctgaagatggccctgaagagtatggaagagacttatgaggtaatgcttgatgagtcagaacaggacataactggcctaagggaaactgtggagaagctggaagctgaggtgagcaagtacagagaagaatgtgaatctaaggagcttgaccttatcacggctactaaacagtctgaacaagaaattgctgctcttaaagaagaagcggagcatgtatgtgcatccctgcgaggtgcagagcaggagcttgaagcagtcaatgaagagaaagagaggcttgaggggaaattggcacgcacagaatcagccgttgctgaagccaacgatgctgtgcaggaggcaaaagctgaaaatgagaggcttcaagagaaacttgcacacgtggaatcagaggttgctgaggccaacatggctgcagaggaatctaagaatgagatcgagaggcttcaagagaaactgacatacacagagtcggcggttgctgaagccaacaagactgtgcaagaggcaaaggctgagagttcacagctgaaggagcgattacttgacaaagagaatgcattgcagagcataacccaggagaatgatgagttcaggatgcgagaagctgacgccatgaagaaaatagaggagctatctgccctgcttgccgaagccatgacaaagaagcatcccgaggaggaagagaagctggtggttgttgatgaggcacacaattctggacgtgaagctatccgttctgtggcagaaaatgaagatacagaagaaactgaccataagaaaccaaagcttgaagctgatgcagtcgatacgaactccaacggagaaccgaagcacgacgagaaagacgacagcaaggtggaagaagaggagctgaagactgagctcagcctacaggagagcgacagagctagctctgagaaggaagcacagtccgaaaacaggagacaagaaacagaaccatccaacgacgagttagacccgaagaaggacagcagcaccgagagcgccaacggaacggccgtgccagaggatacggcagcgacgacgactaaagcggcaacgtctcctacgaaaccgcagcagccgcagcagaaaaagaacaagcctctgctgaagaagtttgggagcttactgaaaaagaaaaacagcaagtagccgaacggtgggctgtactactactagtgttgttttgattttcttctttcctctccctttttcttttttttttctttttggggtctgtttgacgaggtgttgtgcttgctatgcgtcgtttaccgccaatgcctgtatttgtgggtgattggagaagtttgtgggtgtcgtgaattttttaacttggggacctatatggtgttggctgctgctgtctacacgtttgtggcagatcctcccatgtgtgtaaatggagttactcttcctgatcagaatgcatggctattcgtttctggaactgtgcagctccctgattgattgcaaggtcatgtgatgtaaacctcctagcagagaatgtgatctggcatgcagttggtatcata

SEQ ID NO: 87820 - DNA, 2901 bp, Zea Mays
atgagagttactgtatgcagtcgaagcgaaggttccaattccaaccagaaacaaccgtccaacggcagggctacgtcggcacatcgtgtcagcaggccctcaaaacctgcaagcaagccagcggatcgcgcgccttctggcccttctccattgcagcaccatgctgccagcaggacccatctcaacaggtcctcggcgtccatcgacctgacgccgacgacgaagccatcgcctggaggagcggcaggacgccgatccttcaaggcgccgccggcgtcccggagcagtagcactaccgatagacaacagccgagggctgcgaggacgtccgagctgcagccgcagcagctgaccctcctgcaggaggacctcaagaacgcgagggaccacctggcctccctcgagaatgacagggctcagatcctcgaggagctggccgtctccaagtgcctcgccgccgacgcctacggcaagctggaggacttgctggtcgcgcagcggcgggccgaggaggcgctggagctcgagaggttcaagtccacggagcgcgagcaggctgccatcgacctggcgcagaggacggaagacgagtggcagaggaagtacgacagcgtcaggacgcgccacgccgaggacgtcgcctccctcgtcgccacgaccagggagctcgaggccgtcagggacgagctggccgccaccgcgcaggccaaagaatcggctctaaaccaggcggacgagctgcaggagatcgccaacggcaaagcggagaaggtggaggtcctgacggctgaactggcccgcctcaagtcccggctcgacaccgagctggagaacaaagccaaagaagccgcgaaagtcgtcgagaggctggagtctgaagcttccgcgttgaggggcgagctccgcaaggccaaggagttcgaggagaagctcgccaaagcggaacgggcggtggacgggctcaagagggcggaagcggacgccagccggtcggcgcaggagtggaagagcaaggcggggtcgttggagactcgcctcgaagccgcctcgcagctgaacaaacgcaacgaggagtcgctggcgtcactgaccaacagctttgaggactgcacgtccatgctccaggacaaacagtcacagctcctccagctcgtgagcaaggtggcaaccctggagaaggaagctagcgagtacaaggaacgtttcctcgagaccagcaggcgcctcgaggtcgcagcagaggaagcgtgcgagctacgtgcggccactgatggactgaggtctgaacaacagctgctgcacgaggcgcatcgacaagccgtcggcgccgagaagacagcgagcgcgcgggttggccacctcaccgaaggcaataacaagctgctcatggagcttgccaacaccagagaagagagggacaaggcgaagaaggccatcgaggatttggcggccgcgctacgtgaagtgtcgtcagaggcaagcgaggccaaggaaagggtccttgcgaagcaggcagagctagacagtgcccagcttcagatgtcagaactgaaggcggcgatgaagaacgcagaggaaatgtaccagttaaggataggcgaaccgaactacgagactgaatgcctcaggaagacgatcgagaggatgggttcggaggccaagatttcgaaggatgattgggtatcgaaagaggccgggtttgttgatatgctcaagagatctgatgatggaattagctctgtccagctggaaatgaacaggcttacagagtctctgagagctgcagagaaccaagtgcaggagctcggggcacataagacccagctgctcagtaagctgcaggaattcgaagtccaggcaacgaatactgaagaagaagcgaaggcagagagcgcgcacctcaaagaccttctgtcctccaaggacaaggagctgcttgctctgaatcatgaactcgccgagctgcgactaagagagagcgccgcactagagaaagccagcgaggtctccaagttgctcagagagataacagcgagaaaggccgtggtggaagaaagcactgacaagtccaaggccctgctcaccaagctggaaatggacagtgtgctcgaatcactgaaagccacggagggcgaagcgaaggctgccaaggaggagaaggcgcagctgcagaacaggctgaggctgctcgagtccaagatcaccgaggccaacctgacctcggaggaggcaaaggtcagcagcctgaggttgaaggagacgctggaagacagggagcgccagctggcgagcattgtacaggagaacagagaggtgcgggcaagagaagcggctgctcaggccaagatcgacgagctcgccacgctgctggcacaagccaccacctggaaaggaggagagccattgaacggggcggtcacgaggagcccggagaagcagccgagcgtgctcctgaagctcatctgctcgccggcccatcataatgtccgagacgacgacgggaacaatgccgagatcacccaaaaccaaaaggaggacatcaagcacgttgagatggagacggtcaggcaagcgaagcatgagaaggaaggcgatgtatcactatcagcatcagcagtggacgccaaccctttggagaacagcatgatcgtagaggacgacctgtctaaagagagggacgagggttccgagtcgagtgacgatgacgatgctgagtcagcgggggacgatgcgctcgtggatcagatgaacggactgctgatccatggccccacatcgtcgttcagccgggatcagcagcacgtccagaagaagaagaagagggctctcctgaagaaatttgggagcctactgaagaagaaagctcacttcactaagctgagcagtcaatctcactcctag

SEQ ID NO: 87821 - DNA, 733 bp, Zea Mays
gcagctagacgcacagccacataggccacgtcgttcgaatttttgtaagccatccgatacaagatcgttggttaccaggcgtgggagcaaaggtagccaaccacacgacgggactcttccagatggagacgaaacaccacacggcggggaagaaaaagagggatcagatctcagacgccggcgtccgtctccgccaagctgcatcgcctcaaacgctttgtcccggccatcgcgccggccatggccgccatgtcgaagaaggcgactctccatccctttcgagttccgagctcattctcccctccgcccctagcctcacgccacgtcccgcggaccgtactatagcctccacagccgtggtcgctcggccacacgtatcggtcgcttcgcatgccatcgctgcggcgacagtcgtgatacctgccttcgtcagcaacacgtcccaacccgactaagcgtcccgggccaccgcgatacttcatttccgaaatcgctgcggcggcagcagttatgcatgccttgctccaaatatataacactgtgagactgagtagcaaatcaagttgaagtcatcggaagttgtcaaacctcttttttttctcttttttgtatgttttttagagtccaatttggctggacctaaaaataatggctacgacttggtccaccctggcttccaacatatgaaacttcttgcgtcttcattaaattgtgctaataaaatgtgtgtttc

SEQ ID NO: 87822 - DNA, 1917 bp, Zea Mays
gcagctagacgcacagccacataggccacgtcgttcgaatttttgtaagccatccgatacaagatcgttggttaccaggcgtgggagcaaaggtagccaaccacacgacgggactcttccagatggagacgaaacaccacacggcggggaagaaaaagagggatcagatctcagacgccggcgtccgtctccgccaagctgcatcgcctcaaacgctttgtcccggccatcgcgccggccatggccgccatgtcgaagaaggcgactctccatccctttcgagttccgagctcattctcccctccgcccctagcctgggtgaactatatgtgggaacactgaacctgcaaccgagactgtagcgattcgacaatatcacaagaggatcatacttctactccatgacaactgtaacctactagagctgaaagaaatacagagcctataagaaggaaatgtatgagatgcaaccaatgtacagtaagcaacttaccatatttatttatgacaattgttccaagaattaataagtattccagtgagcgtctcaaaaatggaatcaagaggtgaggaaagacatcgccccagttctgtagaggatgccttcgttttcctcgggttttgttgtgtgtcctgcttaccaagcattgatatcaattcgccgatttgatagatgagatggtaactagctgaaaacagtaataattagaaacccaagagcgattttgcgacgccctgctgtgagccgaccctagcagtcaaggcttcgtaaatcagatttatctgtcaggtacaatcacaggaaatgttgtggcaaaggtatggcttaagagaaatcatgtacctagatgatttgttgtctatacgattagatggtgctgttcaccttcaattttttcaaatttggcaccactccagtcaccaaccatacatagaaaagttttagtgaagtcaatgaagcaaacattttaatatttcattctatcaataaaagtgtagttttgcttacgataagacctccataaacaataaacacgggtaaatgagagtattgatggttggaatgagtggtggtagcagaatgatatctacatacattggttttaggtaccagcaccttattttttttaataaaaatatgtgtgaacttggaactttttaatatgtgaggaagatgggtagatactgttgttgtgggcagggcagggcacccgagcaaaagcatagatgcgaatggggatgaatatgggttagctctcttcccctatttattggagttggagggatacactgctgctatggtttggtctgtgatgtcgtctcattagaaaaacatttgcttggcttgtatctcatttcctttctcattagaggacttaaactgagcacatgtttggcttatgcgcaatgtatgtggcaagcaaaagcaaatattatcctattaatgtgctcctactaacctgctctgcccacaatttattatgggtagatattgttccaatttattatgcatgttggcttcttgcagggaatgaatacatcttccgtttatatcaattgtgacttagatgtatgtcagtcttagtatgactattaagttgtgacatgaatgtgaattcgataatgtatttcataacttcatctacactacagatgtattgtgttattgttcccattcaccattgaaagtagttgttagatccaaattgatttcacttttaccaagtgatgttgttgctgcttccttataagtgttgctcccatttgattcgtcagattactggcttctgctactttcgagtagtgctgctactttcgagtagtgctgctgctttcgagtggtgttgttgctttcaagttgaagtgagttgttgttgacttccacaacaagctgctacttttagcgaaagtgagtac

SEQ ID NO: 87823 - DNA, 478 bp, Zea Mays
atggacgggcgggggccgggcgacgggggttgcgatggggggcgggcggatcctctggaggcgcatggagggtgtcttgggctgcggctgcggcgggcggtgggcgagctggtggtggtgctgcggcggcggtggggacggggtaccggcggtgagctgctggacgatgtcgcggaactggttcttgctgatgttgtagacctgcggctggggctggggagggcggtttgcggcgggctgtggctgcgggggcggcggcggcgtggccttgcggatggagcggccgagcttgttgacgccgaggtgcgggttctggctgccggcggaggtggtgctactggcactgctgctgttgttggaggtggtgcgatccatgggaacgggtcgggggtgaggactaggagccgattgattgggtggtcaattttgggaggagcagggagatgagggcatgggcgcggtccgcggcgagttgatt

SEQ ID NO: 87824 - DNA, 508 bp, Zea Mays
gtaggagatttttgcgattatggaaagcggtaaaacaggcttcgctcgtatagacagagaggcgagtgcttcacctaaatggagacaagacacgcttaaagtcatccaaatagacaagctcacacgtcttgtcatcttcaactcggatttaataagccagagacgtcaccattagcggccgtcaccgcagacattttcaggtgagttcttagcctcgaagttcctcttcccatcgtttgttcatcttgtccccggcgcccatgaagggtagcagctccgcgtggcgtatcagggcatcccgggcgcctacagctatgccaaggactacccgctgcgacgctatcccctgcgatccatttgagctctggatcgccgtgctctggatcgttttatttgcttcattctaactatttcgttgcggtttttagcttaattatttaagacttgtcatgttattaatgcacaaggttttattcgaagtggaatttatatgattttactgaatcat

SEQ ID NO: 87825 - DNA, 1298 bp, Zea Mays
cgagcccctctctcaccagcgcgttcctgcccagcgcgccgccccgccgaacgctacaccgcccaaggtcggtcgccgccgccagcccgccaaatcccgtcccggctcgccgccccgcaggcccggatgcgggacgagatgccgcgcctagcgctgcgcttgccactcccgccgggcgacgacgcgcgcgaggcgaacgaggtcgccgccgcggaggcccacgcggaggaggaggccgcacggagggacgctgacctagccgcgcggaccacgcccaagagggatcgaggctcgcaccgggggcgggccggacccagctggacgtggaggcggcagctctggatggtcatccttgcggatctcctcctcctcacaatcctcttcgccgcctggctcgcagtctgccggggattcagctgcattggtcggtaaatagctacacaacctccaaggtggctcccttgtgatatcttggcgttgtctccttagatgctagcatggtgctctgttgagttgtttcttcagccttttcattcatgggccatcgatttcttcagcgggttcttcatttagcacttcaagagcaagcgcagctctggtaggaagtgcagctccagcagccaggagaatacaagtcatgatgcgttcatcacaaaatcagtgttcgttcaaatgtatagtgctcagatgggatctcaaatgggaccccagttcacccgtccgtcacaatctggacagacaccaaacaccaatgaaacacaggtatagttttgtagtatatttactttcatttacaattataatcatgcatcgttttatttgataatagggttctgagaccggacaaggaaacccacagatggacatatattggtcgatgccccctagaggacagattcttcctcctccacaaccaggcatgggatattggccgccaccaccatggggatatcctacacatccaatggggccttggggacgcccccatggccaacacagccactttcgtcaccagcggattccacaactcatcaagtgactcctccccctcacgataactttgtggacagatgtctcaattctagtggtggagctacaaacaacaatccgatgtcctgatcgagagcgatggagctaatgtttgaacttgtgtatttgaacttgtgaactataaatgtgaactatggatgtgaactatggatgtgaacttatgtatttggacttaattatgtgaatttgtgaacttatgtatttggacttgtgtgaatttgtgatatgaacatatatccatgtgtttg

SEQ ID NO: 87826 - DNA, 752 bp, Zea Mays
gcagttttctcattgaagaactgcaaatgagtaaatcagatgtggctgcattcaaaaggaatcttggttttgataaaaatagcagagggaagaaaccaatgagtcaattagatgaggaagaagagtttgaagatgactatgagtcagaatctccacatggtagtccattgtatgatgagccatgggatatttgttctgatgatgaaggaaacaactcaggcggggttgattgcttggaagataaatcaggtagtgatgtcggcaagaacaaatcagattgtactgaaggcggaggtagtggtagtagagggggcgcccttggtgccagtgcgtctgctcctactagggcagtgcctagtcttccacaatcgacccatattcgtccaagatcaactagaaaaagaaagccaacacacaagagcgtttatgatctataaaaggatgtggaagagaaatgaccaccggaacatgacacacttttggataacattatcacttttgttggagattcttattttggaaagcatgaattgattttcaagtgcttttgttgatgacatgtgcttgaaaatgtactattttgaatttctattattttgataaactatgctatatgcacttatcatatttggacactaggtggtttgtggtttgatgccaatgtgccatgaatgttgtaagttgtgatacttagtcatatttttatcttatatatgtgcaattgtgatgtcagatgtattagacataagtta

SEQ ID NO: 87827 - DNA, 720 bp, Zea Mays
agccaaatcattcacgtattcatcttcaagccagccgtctccttatcctgcgatgccgctcacctgggctcatcttccagccgccctctccgcccagcagcagagcacaccatcctctcaactcggatccccaagccctcgcctccagctcttgccacggcatccatcccctgctcggacctccacccggccgcgtcctcgccggtggccagcgccgctgcatcgcccttcctagcgtcggccttggcaccgcttccccgagcgccccagtcgagctcgcccatcctctgctctagccctttctccacgccgtcgctgagctcgcccctcccctcagccatggacacgacgacctgcagcccttcttggtggccaagcccatcttcctgctcgcgccccctcttttccacctctgcgcgtatcagctcgtccaacccccatggtgtttcctccctctcggctcccttgctccctccccatggcgttccccctggatgttggtgatctgttccccacggtgcaggcaaatgttctttccctccctgcagcagcaccttggtggttgtcgagcagcacgtcgcgcttgcgcagcctcggtcacgacgttgttcaccccgctaaccattggtgtcatacctcacgtgtcatgtgttcgccgaaatgcctaaacatgtagtctgtcgtcgtcgtatccacagtcaattttagtcatggtgagcc

SEQ ID NO: 87828 - DNA, 1970 bp, Zea Mays
gccctgcttcaaacccgtgacatggtgacttgagacctctctcgctattgtaccaggccagtcctttacgaaccataatactatgttaatataatattcagatacttctaatttaatctgcagttgtagaaggtaatgagcatgttttaacttcggagattcaaccagagatagctagaactacaacactacaactttcatttaatcaagcttgtttctgctttatcttgctatgctctgaccaaagctttaattcttgtgctactggtatttctgtgttctgcagatcatttagctcaagtaattggtagttcaattgtgataagtaggctgagcaaattgtactgctagtgtagtttgttttgtttgatttgtgtgggcacacttgaaattggcgtgagtctagtaacataagttgtgtcattttgctcagaagccttacatatgagttctttctggttcatctgatgtccacactgagtttatctgatgtccacactctgagtttatctgatgtccacacactgagttttggcaattaatttgcctgtttagaagcagagttctagaacctaaactgtctgtctgaagcagagctctagatcctgaactgtctgtctgattggttgctgcttactttgtgctgcactgaaattggtagtggtgtctgtctagcccattggaagttttcttctcatctctgtttcgttactgcacaggggaacttggtacagccatccatggtatcagaatatgacctgggaggagaaggggacctgttcaaagctccagaagccatcatcgaggaaccgctgctcctgaactgtctgtctgattctgttcatttgttgttgtgtaggctgggcttgtgccaagcttgaatcctcttgtgaaggagtttctcaatgctgctgatgacaagcggaaggaagtcctctctaaaatagaagaggatgttgctaagctcagcggttctgcagccaactaagaagctacaagtgaatgccgaggagagcagcgatgacttggctaacccaccgaaggtagaggagaagcttggtgctgtccctcatggcctgtccaccgactctgaggttgcccagagggaagccgagtctatctctaggaagactctcaggagctcagccgagaagtttgagttccaagctgaggtttccagactcatggacatcatcatcaactcactctacagcaacaaggatatcttcctgagggagctcatatctaatgcctctgatgctggataagattaggttcctttcccttactgataaggaagttctgggtgaaggggacactgcaaagcttgagattcagattaagttggacaaagagaagaaaatcctctccattcgggataggggtattggtatgaccaaggaagatcttattaagaaccttggaacgattgctaaatctggcacttcaggaacaggagctgctcgagtctcttgtcgaagctgatacgagaaggcaggaaagagctaaaaagatggaagaaaagaaagtgtatctgcaactatacgaagcaatggaggcgttggtcaagatcaatctggagacgaacaagatcatggacttcatcaagtttgacgtcggcaacgtggtcatggtgactggcgggaggaacaccgggcgtgtaggagtcatcaagaacagggagaagcacaagggcagctttgagaccatccacgtgctgcttggagctttttgctatgtctagttttctcctatttgttgtacaggaaaacatagaatagaattcaaatttggtggtcgcaaaagtgtggagactttaattcatataaagttaggcttaacattagtgcaaacagttgtattttagtttagatttagagtacacttatgtatgcattgtttgacaatgtttatttatgatatattaaatggtacttatttatattatattaattataatgttgttcaat

SEQ ID NO: 87829 - DNA, 3403 bp, Zea Mays
ccacccctcatctctccttccgcctcctcccccttccccccgcgggtggtcgccggccaccgccggtggggcccactgcccggtgctcccattgctggcctggccctccccaccgcctctgtccggccggcgtcgcgcgcgaaaccaaccgaccccaaggagagagagggagagtgagaggaacaggaggagaccgcctgcctcggatccccggcctctcccgcgcgccggggggacctccggaggtgaatgtgggacctgtgccgccggggatttctctagaggcttctccgacccaccgccctgcgacgcgaacgcgacatggtggagggtaggagctatctccctgcagaggtcaggaacggcctcgagaccctgaagcggaggaggctcgagagagtgcgtttgagtgctcagaacgaagctggcgacaatcctgctgtggctgcgagaagtggcggtgatgccttgcggagccccgctaactgtggagtcagattgcattccaacaacagtacaggtttacctggaaatgtccatgacaagagtccttttgcaaagcgcaaggtggagaagtttgatatgtccaaccttgagtggatagacaagattccagagtgccctgtgtattgtcccaccaaggaggaatttgaggatcccattgcatatatacagaagatttcacctgaggctgctaaatatggtatttgtaaaatcgtctctcctgtatgtgcgtctgttcctgccggtgttgtgctgatgaaggaacatcccaattttaagttcatgactagagttcagccccttcgactcgctgaatgggctgaggatgatacagtcactttcttcatgagtggaagaaagtacaccttccgggactatgagaaaatggcgaacaaagtgttctctaagaaatattccagctctagttgtctcccagctaggtatgtggaggaggagttctggcgtgaaattgcttttggcaaaatggatttcgtagaatatgcttgtgacgttgatgggagtgccttctcttcatctcctcatgatcaacttgggaaaagcaactggaacctcaagaatttttcatggctccccaattctgttctaagacttcttcagacgccaattccaggagtgacagatccaatgctttatattgggatgctcttcagcatgtttgcgtggcacgtggaagaccattacttgtacagcatcaattaccatcactgtggggcatttaaaacatggtatgggataccaggcgatgcggctcctgggtttgaaagggttgctagccagtacgtatataacaaggacattttgattggtgatggagaggatgcagcatttgatgtcctactagggaaaacaacaatgttccctccaaatgtcttgctagatcacaatgttcctgtctataaagctgtacaaagacctggagaatttgttattacttttcctcgttcttaccatgcaggcttcagtcatggcttcaattgtggagaggctgttaattttgctattggcgattggtttcctcttggttctctggctagcaagcgctatgcacttctgaacagaactccattgcttgcacatgaggagctactttgtcgttctgctgtgcttctatcccaaaagctgttgaactgtgatccaagatccttggacaagttggaacatccatattcccagaattgtgtgaaatcctgctttgtgcggttgatacgattccagcgacgtgctcgtggccttcttgctaaaatgggttctgaaatatgctataagccaaagacatttccaaaatctgtcctgtagcatttgtcggcgtgattgctatatcacacacgtgttgtgtagatgtaactttgatcctgtctgcctacatcatgaacaagaactgcggagctgcccttgtaagtccaatcgcgttgtctatgttagagaggacatactggagctagaggctctatcaagaaaatttgagcaggatgtcagctcgtataaggaaggaagttgcattagcccatgtaaggaggttgagatctctgatactactgatgaacaacttccaaatcttgggattactctggatttcgttaatagtaaagctggtagctcaggctttatgactgttgatggaggaaacagttcttctgcagtatcaattttgacatcttctgtgcatcatgaggcatataagcatacagaagcaagggcaataaatacatcaatgaccaaaggaacttacactatggatgagagttcatccggcatagatggtgcttgtaatgaacacggttcatgtaatgcttcagccatggaatgcagtgataattcggattcggagtgtgaaatcttccgagtcaagcgcaggtccacctcatttgacaaacctacttctgaagctaagacatcaaccttgtctgaacagcaggttctgaggcggctgaagaaggtacatcctgaagtacagcaagtcatcagtaagcgtcaagaagaatctggtaatggttcagttcgcgctgcccacatgagccagaaaagctcaaatcctgcccctgctgatgacgaaacagaggacatggctcccataatgtggagaataaagcggcgacagtcagaaacccaagatgctacatgtcctggtacgagaccgcagtcatatccgccttccagtggtggttctggagaagagtttgtggaaagaactagagatgctgcagtagaactccgtccaaaacgagtgaaaatccggctaccttctaatgccagtaggcagattgagcagcagcgcagttcagggcagagatttgctagggaggacaggttgccgcttggttttccacgtacattttagggaatcacaggtgctactaacctctacttgagcagacgaattctttgtttaggtacactgttaactacaaaacgtggtgacagaagggaggagtgggagggatcagttgcagactgactttagaattggcaggaaaggaagcggctatctaatcgattcttttgtgcagcagggcctccaatttgaggccactgggggcacgcttagaagatacacgtgataatattcttgttgctggaggttccgtgtcactgccgatagctctttgatgcctggctatcagtgacacagattaaagagaacctcgctaccttgatatgtccgctagtgtttagagcatgtagctagcttagctgttatctctctcactgtaccaacggcctttcccttgtaatttcctgtaaacaggcttagctgctacactatggctaactctattcttttgttggtttagccttaacgttaaattcaatgcatttcttttttggttagttggtacttgttatggtgttgctgctctcaactgtgggtggaatattc

SEQ ID NO: 87830 - DNA, 909 bp, Zea Mays
ttgatggataaattgatctagttagtaactaactactgccacaataagtatgtaacatagcttagccttggccttggggagttcagactttagggcctgcagtacttctgcctgtccaatctagccatgtgccatgctgccatgtggaacatgaagcaacaagagaggcaaggcgttgatgcctgacagcctagcctgctaatgctaatggcctggtgtaaagcaggagagtttaggatctgtgtggataagcaaaccggagttcaaaggaaaagcgggtgctgggaattcaccaggcgtggcacgacggtgttgtggtggtcggcagcagtcctcggtttggttgcttggcgctccagtgtggcagcgcctgccacctggtcaccctgttggctaggaatgggtcagagattcgcggacaggagtgctatgtctttgttacaaaggaattgttgggctgggcttagggtattaaggtataccaccatctctgggtggcctactggggtctgcacctcatcataggacatactctcattttcccaccttacaggaccactgtgaaacatggttctcaattgcatattactatattagagcttgcagtctctccctgaagcgactatcaaatatgttatatgtcttagtatgattttgaggtgcaagtatgcaacctttactcaagtatggcttgatattgccaaactgacagtgcttctgtaatttagctgctagtcaattcatgtaaactacaatactgcacatgttacttgtcactatttgtctacaaacacttgaacgcttacattgagcacaaattgagttttttgaactcagtattgagtattgacatttcattgcccagttgcccttaagtggtttccatttatgttttctctagtaaatatg

SEQ ID NO: 87831 - DNA, 1337 bp, Zea Mays
tcttaacttgttcagggagttccactccactctcccataatgaggataggggcaggggcgaacatggctgcgtgctcctccgttccctgctccttccccgcgaagcctgaccctcaccgccgaagccccagcggcatcttaagctctcatctccctcggctccctgctacccagtttcgtcggcttcgatcactctctgccgccgcctcgccgccggcgagtcgcctccgcccacgagcctccgtgtccacgtcgcccgccccgtctaaggactacgagttcactgacgggaacggagaggtggagctgagactggacatccaaaagctcggcatagcgagttcaaaagatgttttcgttgatgtcgatgacacatccctactcatcagagccaagtctgacgggacactgaggactttgatgaacgtccaaacactgtttgataggattaagtcttccgagaccatatggttcatcgatgaggaccagttggtggtgaatctgaagaaagtagagcaagagttgaaatggcctgatgtagatgaatcctgggaatccctcacttctgggatcacccagctactgacagggatcagtgtgcacatcgttggtgattccacgcacattaatgaggcagttgctaaagagatagccgagggcatcgggtaccttccggtttgcactagtgagctgctagagagcgccactgagaagtcgattgatacatgggtggcttctgaaggagtggactcggtagctgaagcagaatctgttgtcctggaaagccttagcagccatgtccgcactgtagttgcaactctggggggcaagcaaggagcagctagcagattcgacaagtggcagtaccttcactctgggttcacggtttggctatcggtgtccgacgcaagtgacgaggctagtgcgagagaggaagcccgaaggagcgtgagcagtggaagcgtttcttacgcgaaggcggacgtggtggtgaagctcggcggatgggacccggagtacacgcgggctgttgcgcagggctgcctcgtcgcactcaagcagctcaccttagcagacaagaagctagcagggaagaagagcctctacatcaggcttggttgcagaggcgattggcccaacatcgagcctccaggctgggaccctgaatccgacgccccaccgaccaatatctgaaacaatcctccgcccagttgtattctaggagaattctctgcatcaccattccggactagttttttcagtgtaataaataagagaggaacttgtcatctgtctgttgatgcataaaatgaactcgactaacgtttagtggggta

SEQ ID NO: 87832 - DNA, 219 bp, Zea Mays
atagagaaaggcatccaaggtgagcttggagcctttgccatcgaatctcctagcatgggggctgcacatccacctcccaatgctggaggtgcctccaggttcatctcctgttttatgcataaaaggaagttgttaactggttctttaaccaactccaacatgactaaaacagcatggtttcacaaggaaacttatcatatttggaggtttctatcatag

SEQ ID NO: 87833 - DNA, 1742 bp, Zea Mays
gtatacccgttgtcctcttgtcgtcgcaagctccccccccggcctccgccccgccggccaaaccaattctgaaatctgaaaacaaagcttttccgctgccgaccgagcactccgttccatggcgtcgccttcctcgtgggactagcaagcctcgcctcgctggagaccatcaagaagcaagtggcaatcatgtatttgtggccgaaggcgctagaagtacctataatggacccctcaaaagcatcaaaaaagcctgttggaattctacttgtgaaggtcgtaagagcccaaaatttgcgaaagaaggatctgctgggtaaatcagacccatatgtgaaacttaaaatgtcagatgataaacttccatccaagaagactactgtaaagcgcagcaatctcaatccagagtgggatgaagaatttaagtttgttgtgactgatccagaaagccagtctcttgaagttaatgtcttcgactgggaacaggttgggaaacatgaaaagatgggaatgaacatggtcccactgaaagacctcccgccagaggagactaaatttactacccttaacttgctcaagaccatggatccaaatgatgtacaaaatgagaagtctcgtggccagcttactctagaggtcacatacaagcctttcaaggaagcagatgtggagacagaagatacagagggtaccaatgtgatagaaaaagctccagatggtactccagccggtggtggattgctttatgttattgttcatgaagccaaagatcttgaggggaagcaccatacaaacccctatgcaaaaataattttcaaaggcgaagagaagaaaacgagggtattgtgtaaactaattatgctttatgatttcatggaatgactacaattgagctatctctttactcaccctcttgctaggtcatcaagaagaatagggatccacgatgggaggatggattcgagtttgtgtgtgaggagcctcctgtaaatgataaactacatgttgaagtcctaagtaaagccccgaagaaagggctgatatatggcaaggaaactttgggctacattgatgtcaaccttgcagacgtgatcagtaacaagagaattaatgagaagtaccatctcatagactcaaaaaatggtcagatccaaattgagttgcagtggagaacttcctagacagaaagaacacgaatacctgaatgtggtatacatatgaatattcttgtgctgagtttgcggatacctgtaattgagctcatgtagatattccctttgtttcaagacatctgctgagtttttcagcttttaattgctcagatttactagaaacactatgggctagttttggagtccaaaaaccgaagaggattagagggactaaaattcccttattcaaaagtgaataatgagaggattttaggtaccgtttggttcaaatatttgtaacgtaatgggtaaatgattacgttaaatcatgtttgttttagtctaaccgtaattagataccgtactaaaatttgataccggactatttaaacttgttaccgcccgtaatcaagtgtaaactattaccattaccctttacgttacatttcgtgaaccaaacagcaccttagttccttcaatcccctccgattttgtggttcccaaaactggactgagccctatgttacccctgaaaactggactgagctcattttgtggctaatgagggacaatacaaacacagaattttgg

SEQ ID NO: 87834 - DNA, 1662 bp, Zea Mays
gtatacccgttgtcctcttgtcgtcgcaagctccccccccggcctccgccccgccggccaaaccaattctgaaatctgaaaacaaagcttttccgctgccgaccgagcactccgttccatggcgtcgccttcctcgtgggactagcaagcctcgcctcgctggagaccatcaagaagcaagtggcaatcatgtatttgtggccgaaggcgctagaagtacctataatggacccctcaaaagcatcaaaaaagcctgttggaattctacttgtgaaggtcgtaagagcccaaaatttgcgaaagaaggatctgctgggtaaatcagacccatatgtgaaacttaaaatgtcagatgataaacttccatccaagaagactactgtaaagcgcagcaatctcaatccagagtgggatgaagaatttaagtttgttgtgactgatccagaaagccagtctcttgaagttaatgtcttcgactgggaacaggttgggaaacatgaaaagatgggaatgaacatggtcccactgaaagacctcccgccagaggagactaaatttactacccttaacttgctcaagaccatggatccaaatgatgtacaaaatgagaagtctcgtggccagcttactctagaggtcacatacaagcctttcaaggaagcagatgtggagacagaagatacagagggtaccaatgtgatagaaaaagctccagatggtactccagccggtggtggattgctttatgttattgttcatgaagccaaagatcttgaggggaagcaccatacaaacccctatgcaaaaataattttcaaaggcgaagagaagaaaacgagggtcatcaagaagaatagggatccacgatgggaggatggattcgagtttgtgtgtgaggagcctcctgtaaatgataaactacatgttgaagtcctaagtaaagccccgaagaaagggctgatatatggcaaggaaactttgggctacattgatgtcaaccttgcagacgtgatcagtaacaagagaattaatgagaagtaccatctcatagactcaaaaaatggtcagatccaaattgagttgcagtggagaacttcctagacagaaagaacacgaatacctgaatgtggtatacatatgaatattcttgtgctgagtttgcggatacctgtaattgagctcatgtagatattccctttgtttcaagacatctgctgagtttttcagcttttaattgctcagatttactagaaacactatgggctagttttggagtccaaaaaccgaagaggattagagggactaaaattcccttattcaaaagtgaataatgagaggattttaggtaccgtttggttcaaatatttgtaacgtaatgggtaaatgattacgttaaatcatgtttgttttagtctaaccgtaattagataccgtactaaaatttgataccggactatttaaacttgttaccgcccgtaatcaagtgtaaactattaccattaccctttacgttacatttcgtgaaccaaacagcaccttagttccttcaatcccctccgattttgtggttcccaaaactggactgagccctatgttacccctgaaaactggactgagctcattttgtggctaatgagggacaatacaaacacagaattttgg

SEQ ID NO: 87835 - DNA, 1150 bp, Zea Mays
cctacatttatttaaacatgagaccatcaagaagcaagtggcaatcatgtatttgtggccgaaggcgctagaagtacctataatggacccctcaaaagcatcaaaaaagcctgttggaattctacttgtgaaggtcgtaagagcccaaaatttgcgaaagaaggatctgctgggtaaatcagacccatatgtgaaacttaaaatgtcagatgataaacttccatccaagaagactactgtaaagcgcagcaatctcaatccagagtgggatgaagaatttaagtttgttgtgactgatccagaaagccagtctcttgaagttaatgtcttcgactgggaacaggttgggaaacatgaaaagatgggaatgaacatggtcccactgaaagacctcccgccagaggagactaaatttactacccttaacttgctcaagaccatggatccaaatgatgtacaaaatgagaagtctcgtggccagcttactctagaggtcacatacaagcctttcaaggaagcagatgtggagacagaagatacagagggtaccaatgtgatagaaaaagctccagatggtactccagccggtggtggattgctttatgttattgttcatgaagccaaagatcttgaggggaagcaccatacaaacccctatgcaaaaataattttcaaaggcgaagagaagaaaacgagggtcatcaagaagaatagggatccacgatgggaggatggattcgagtttgtgtgtgaggagcctcctgtaaatgataaactacatgttgaagtcctaagtaaagccccgaagaaagggctgatatatggcaaggaaactttgggctacattgatgtcaaccttgcagacgtgatcagtaacaagagaattaatgagaagtaccatctcatagactcaaaaaatggtcagatccaaattgagttgcagtggagaacttcctagacagaaagaacacgaatacctgaatgtggtatacatatgaatattcttgtgctgagtttgcggatacctgtaattgagctcatgtagatattccctttgtttcaagacatctgctgagtttttcagcttttaattgctcagatttactagaaacactatgggctagttttggagtccaaaaaccgaagagga

SEQ ID NO: 87836 - DNA, 159 bp, Zea Mays
cttatctgtatatgttttctctatgaccatggatgttgtcatctaacacttcatgttgttgcccaggttgatcattgataattaatcacatttgagagctaaactggagatatctggcatacaccaaatcaatagttcaaccaaatataagctgtcaag

SEQ ID NO: 87837 - DNA, 210 bp, Zea Mays
ccatgggcgccatccccccaggtccattttgcttcttccgttccgctttcatcctcctcttggacttggcctctctcgacctgctactaaacactccggattagtcgtcgttgtctgcagcgaggaacaaaaggtgatggatcgatcgattgatcatatcactcaccatttcattctctctgtgtctcttttattttatctgtttattat

SEQ ID NO: 87838 - DNA, 3866 bp, Zea Mays
caaggaccagcaggggcagggcaattaattaaacgagcactgacgccagccagccatggcgtccaaggggatccttaaaaacagcggctcccgccgcatgccgccgcagggcgccggcagcaggccgcccacggcgcccacgtcggcgcccacggtcgtcttcgggcgccggaccgactctgggcgcttcatcagctactctcgcgacgacctggactcggagatcagcagcgtcgacttccaggactaccacgtccacatccccatgacgcccgacaaccagcccatggacgaggacgacagcggcacagccagggccgaggaccagcgctacgtctccggctcgctcttcaccggcggcttcaacaccgtcacccgcgcgcatgtcatggacaagcccgacggcgacgccgccgggcgccgcggcggcggcggtgccaagggacccagcgcgtgcatggtcgaggggtgcgacgccagggccatgcgcgacgcccgcggcgatgacgtcctcccctgcgagtgcgatttcagggtctgcgtcgactgcttcaccgacgccgtcaaggccggcgccggcgtctgcccggggtgcaaggagccttacaagaacaccgagtgggagggccttggcgccggcgcggccgaggaggtcacgcgggcgctctcgctgccccgcgggcctgcgggcgccaacggccacaggatggagaggcgcctgtcgctggtcaagcaggccaacgtcaaccagtccggcgagttcgatcataacctctggctcttccagaccaagggcacctatggctatggcaacgccatctggccccaggatgaagcagacgacgacaccgacggcggtgccccggctgggcatcccaaggagctcttaaccaaaccgtggcgcccgctcacccgcaagctcaggattccagcagccgtcatcagtccttacaggctcctcgtcctcatccgcttggtcgcactggccttcttcctcatgtggcgcatcaagcaccaaaacgaggacgccatctggctctggggaatgtccattgtctgcgagctctggttcgccttctcatgggtactggaccagctcccgaagctgtgccccatcaaccgcgcgacagacctctctgtgctcaaggagaagtttgagacgcccacgcctaacaatccaacaggcaagtcggatctccctggagtcgacatcttcgtgtcaaccgctgatccagagaaggagccggtcctggtcacagcgaacacaattctctccatcctcgcggcggactaccccgtcgagaagcttgcgtgctacctatcggacgatggaggggcgctgctcaccttcgaggcgatggctgaagcggcgagcttcgccaacctctgggtgccattctgcaggaagcatgacatcgaacccaggaacccggacagctacttcaacctgaggagagatcccttcaagaacaaggtgaagccagacttcgtcaaggacaggaggcgcgtcaagcgtgagtacgacgagttcaaggtccgtgtgaatggcttgccagatgccatccgccgccgctccgacgcgtaccacgcccgcgaagagatccaggccatgaatcttcagagggaaaaactgaagggcggcggtgacgagccgccgttcgaaccggtgaagattcccaaggcgacatggatggctgacggcactcactggcccggcacctggctccaaccttcgcaggatcatgctcgaggtgatcacgcaggaatcatacaggtcatgctgaaaccaccaagcgacatgcccaccaccatgtacgacgcggcttccaagacacctcttgacttggcaggagtggacactcggctcccaatgctggtgtacatgtcgagggagaagcgcccaggatacgaccacaacaagaaagcaggcgcgatgaacgcactggtccgcgcatcggcgatcatgtccaacggcccgttcatcctcaacctggactgcgaccactacatctacaactccaaggccttgagggagggcatgtgcttcatgatggaccgcggcggcgaccgcctctgctacgtgcagttcccgcagaggttcgaaggcatcgacccttccgatcgctatgccaaccacaacacggttttcttcgacgtcaacatgcgcgcgctcgatggtcttcaagggccggtgtacgttggcactgggtgcctcttccgtcgaatcgcgctctatggcttcgacccaccccgttccaaggaccacagcccagggttctgtagctgctgtctcccacgccgccgcaagccgtcagcagcttcccgcgaggagaccatggctcttcgcatgggcggttttgatggagacagcatggaccttgcgacgttcccaaagaagtttgggaactcaagctttctcatcgactccatcccggtagcagagttccagggcaggcccctggctgaccacccatctgtgaagaacggccgcccacctggcgctctcacaatccctcgtgaaatgctggatgcgtccattgtggcagaagcgatcagtgtggtctcgtgctggtacgaggagaagacggagtgggggataagggtggggtggatctatggctccgtcaccgaggatgtcgtcacagggtaccgcatgcacaaccgtggatggaagtcggtgtactgtgtcacgcagcgtgatgccttccgcggcactgctccgatcaaccttaccgatcggcttcaccaggtgcttcgatgggccactggctcggttgagatcttcttctcccgcaacaatgcgttgtttgccagctccaagatgaaggtgctccaaaggatcgcataccttaatgttggtatctatcccttcacgtccatcttcctcattgtctactgcttccttccagcactctccctcttctcaggacagttcattgtgcaaacgctcaacgtcaccttcctgacatacctactcatcatcaccgtcaccctttgcctcctggccatgctggagatcaagtggtctggcattgctctcgaggagtggtggcggaacgagcagttctggctcatcggtggaaccagcgcccacctggctgctgtgctgcagggccttctaaaagtggttgcagggattgagatctcatttacgctcacttcaaaacaagtgggtgatgatgtagaggatgaatttgcggaactgtacatagtgaaatggacatcgctaatgataccgccgctcaccatcatcatgatcaaccttgtggccattgctgttggcttcagccggacgatctacagcacaatcccgcaatggagcaagctgcttgggggagtgttcttcagcttctgggtgcttgctcatctgtatccatttgccaaggggctcatgggaaggagaggaaggacgcccactattgtgtatgtctggtctggactcgtctccatcaccatatcactgctctggattgcaatcaagcctccatcacaagctgccaactcacaattcggtgggtcattttctttcccttgatccagtatcttcaaaccaatatgtcttactggatggatcaggaagttacaagaggcaacaagaaattcaggttttgcagcatatcaaaaaaaatgccctgtggtttagacaacaggtcactgtgcagctcagtttcattacaaagtggaggacataggatgtatctattctagcaccttaaaaggtggaaccactgttttgattctttctttatttgttcttttatttctttagagttcgctctcatttgaatcatatgtgccttaaaaaaggtgtaatacgttgttagcatctaaaaggttttctcaagagcttattgtcggcgtttagt

SEQ ID NO: 87839 - DNA, 98 bp, Zea Mays
gcgcagtctgtactagttgactggtatcttttgtttcgtctggtttacatctcgcgcagacttaatctgagaactaaattatatgtgtagtcttttgt

SEQ ID NO: 87840 - DNA, 474 bp, Zea Mays
atggctgaccggcggctcccctgcgccgccgttctctgcgcccaggcgtggagcttcctccctcgctgcgctctctccagatcctggttggcgagcgcgcagccgcctttcctctccctgctcggctccttcctccctactccctgttcgccgtccgtgctctgtcggtctccagctcgtcgccatggcgcgtctctcttcctgcgcaagctcctggatgccgcgtcctcccggccatggagtttgccggtagccgccccgtcttgctcgtttctggtgctcgctctggccacggacgctgtcgagcccatcgtttttcctgtccagtgctcgcgcggtttcctgctcgccagcgtgccctctcggatcgctgatcgctcagccttaatctccgtcgcgcccttcctgcccggtcacgcaaacgccaagttcgccctggtcgcaagcctatgtgtcctcgccgcgcccgtatag

SEQ ID NO: 87841 - DNA, 201 bp, Zea Mays
aatacaaagcaaaatcaggatttagttgtatgtacactccatgggcttgtcaagtactcactctatcctgaaatacaaggtacctaagaaattttaggaccaaataagaagtctgacaaaagaataaaatcattaattagttaatttggttgtcaacttggttaattttctagtaacaaatagtgtaaagatccatacaag

SEQ ID NO: 87842 - DNA, 1327 bp, Zea Mays
gtaatgcttatgtactgttttagttgactagtgataaaagttttaactgatattaacattgacaatacatgggcaatagatgaggctatcatcagttcgaattctttctgtcttaggacatccaacatgatatactgggaagaaaaagatttttacacccttgtgaattccgccactttttacattctctgcaaattctgctagaagcattacttttgcactctccgtcttgtttgcagtttggtgttttcttctttggtatgtatacaagacagcctcaaatcatctcctaacaaaaaagggggttaatatcaggtgcatcttagcagatatgaaatatagtactatataagagagccacatgttacaagacaattgggttatagctacaagttagttatatgttctgccagcttcgttatatgttctgacatgagttacttttgtgttatgcagaaaaacaagaatcgtgagtgcaatggcaaatggaaggtgaaggcccttttgattgacaacttaggtatatttactgtttcattacacaccttgcgcaggtaactataagcctgcttccttcctatgacgcttagccatttttagtctggatagctgccttcctagcaatacctatttattgaaaaattatagcaccctttcatattcacatgataataacaaagtagtatcaaggaactgaataatgtgtccacctgtaagcaaaatatgcctggtcgctggagcacttgtctcgggatatagtgaggcaaagtttggatcatgatattggtctagctattgctcatttcttgagctgtttcattgggaacatttcttggatagtttggatcatgatattggtccaactattgcttgatgagatagcaaatgttcgagaacagttgctcgacttcttcatgaatgaggtgatagacattgttggattatggagggtttaggatgcttcacataactaaatctagcattcatatgacctttttgatatgccataatataaggtgttcaactgtgtctaactactcactattgtcttctcttatttgtcgtataggaaaagatggaatggaactcaaattttggtggtcggtcaagtgtgtagagttgaaatcatatatacttagttaggctcaaatttagcgcaaactgttggtgaccatgtttttcggttagtattttagtttttaaattggatttaaagtacacttatgtatgagttatttagcaatgcttatttatgagatattgaatgatacttatctacattatattaactatagtgttattaaatatatgtgtgtatgtatattat

SEQ ID NO: 87843 - DNA, 354 bp, Zea Mays
atgaagggtagtaacgaaggtgaccgatcttcgaagggcaaagaaattttacctaaagaagtggagatcccgagaattctgggtcttggaggtgttggcttcatggattcatcatcctccgaagaagaggacgacaagaagactaccgaaggtggtggatcctcggggcacgagagggtagaaggagagccgaaagagacaaatcttacgctcgagacagatgcagctgagcctactcaaactactggtgaagaaatagatgagctctatttctttatgagacatcttggtgggggtgagcagagtgagaaggaagctttggaactagatcaaaagggcgaggccatggggtaa

SEQ ID NO: 87844 - DNA, 243 bp, Zea Mays
atgaaaccgtcaaattcagatcatctcttaaccagctatgaatatcaggctttgcctgactgccggaaccgagcagatcagcgtgccgaaaatccccgtgaaactataagcgatggcgcagaaagggagcgcttcaggttccttggccgccagtgctgctgttcccagtccttgagcgctggaagctgtccctactcctctggagatggggtcgttcagaccaagtttctccatggctgctag

SEQ ID NO: 87845 - DNA, 363 bp, Zea Mays
atgaagccggtgtcggcggcagggatgcgcttcagtgctgctgttggtcggacccgggcccggcacggagagacggaggaggaaggggagcagcaagaagaatggcggcggcatcgaggaggaagcagcgtacaggaccgggcggccgacgacgtagcccggggaagggaggagagcgggtcgtggcggcaacgtaggttggtaatcccaatcatggcggtggcggccatggagctcgtgggggtgcagagggaggaggaagagacggcagagttcggtctctgctcctccctcgtcttgagcagacggaggaggctagcaggcgaggtggtgacggagactccattcgtcgggatgggatag

SEQ ID NO: 87846 - DNA, 156 bp, Zea Mays
atgcgtgaacggacggcgagatcggccgtgctacccagggccctgcagcactacactctacacggggtcgccgccgggaacatgaactcctcgtcctcctccgcgcccaacaccctgagctcaaagcccatagacacccgccggcaggtcacctga

SEQ ID NO: 87847 - DNA, 555 bp, Zea Mays
gtgacggcggccagcgaccgggtcgcacaaccgaccctctcgcggctcttcctttttgttttcttagctttctcctcctcttcttctacgcggttgctccatggaggtcctaggagccagctcctctcttctcctcgccggatctggtcatctattggccggatcttgcggttttggtggctgttgtcactccccacgagttctgctcgggttggggagggtgagaagaggagcggccatggagggctggtctgcccgcgacggtggtgcgaggggcggcagatctagcgccaggcagcttgcttcgtggagtggagcaaaggtggggtcgcgcccggccctgtaagagtgtggacgtcgcgcgtcagcggtgcttccgttcgcatcccgtgcgcagtcgcgtcccaggcggggctcaagttcgcgccgcccgcgtggcagtgcagccggcgcggctccgcggcgcacgcacgcaggaccgcgcgcccatgccccagttccccagcgccggcttctgctccgtcgcgtccatgtcagcaggtactctccctgtct

SEQ ID NO: 87848 - DNA, 1159 bp, Zea Mays
tgcaccaagcccatttttcgtccgttcaatactgctccaggctcgatgagccggcccacatgaagatgaacaagtgaagagcatcagagcccagacttctttagagcccagcccacgtatagcacggagcccgcgacgagccgacccggcgagcctggccggccgggcggaccgaaccgaatagcgaaggcataagccatcagtttccaccgcacgtccgcaccccctctccggcgtgccgacggtatccatggcggcggtggtgcgcggcgtcttgaggggcatcaaggagaagggactcaccaacttcatccgcgacgtccgcgacgaaggatacttcaaatgccttctggacgggaaccttttgcaaacgaaaatccacaatattggcgcaacacttgtaggagttgacaagtttggtaacaaatattatgagaaactacatgacactcagtatggaaggcataggtgggtagaatatgcagagaaaggtcgttacaatgcatcccaagtgcctgctgaatggcatggatggctgcaccacatcacagatagcaccggggataagctgctgaaccagaagactgctaggtaccttgtagagcacaagcagaactactccggtgagggtgaagagcttatctaccactccaaggggcatgctttgaatccgggacaaagggactggacgaggtatcagccctgggagccaaagaaagagcaagcctagctcgtgagtacattgtggggaagctgctgaatgttttgcgttttcttgcattgcgctgggtcaggtatcaccgagctgaatagcctctgggttattgcctggacgggacccaaataatgttgttctgaataccaatatattgtatatttgatcatcttttgacattgaaatgttgttgctgttgtaaaagcagctttgaggaatatctcatgcaggtgttactgacttcggttacgagacattgggtctatttgtttcagttttttttttgctgattctgaccgtcagaagttgttgtagaccaaacactaagcttttcagtcagcttttatatgaatcactttagtattacggggcgtttggatcccttcattttagaggaattggaattcactcaataaagtaacttatttagtttggaatttgaca

SEQ ID NO: 87849 - DNA, 1323 bp, Zea Mays
atgtgcgacttcttttggctgtcgccggccgatctaggcgacctctcggacgtcgtccgggagagcctgcagcctccaccgccacaccaccaccgactgccggcggccactcctgcttcctcggccatctgctcgtcgggctcccatcatctgccggaggaagaggcgttgctgctgctgcaagctcgactcaacttcggtggcgacgatcacgatgaagcgcgctcgcagctgcagtcgcagcagcagctggtgcatagcagtagcggcatggtggagctcatgctgggcagcaacggcagtggcggctgcgcttgcgatcatgcagctgcgctgtgtccacatcaccatccagaggcagaggaactgattcctcggcccacgtccgggccgcagcaacagctgtgcgcttccactcgttccagcttcgtcgagaggagggacgatgatgctcccgtgctacaggagcacgtcctggacatggccatggcccctcatcgccctcattcctcggcagtcaagagaaggaagagccagacgaagaaggtggtgtgcatccccgcgccggtggcggcgccaccgggggtgggcgggaggccgagcacgagcggcgaggtggtgccgtcggacctgtgggcgtggaggaagtacgggcagaagccgatcaaggggtcgccgtacccgagggggtactaccgctgcagcagctccaaggcctgctccgcgcgcaagcaggtggagcgcagccgcactgacccttccatgctcgtcgtcacctacacctccgaccacaaccacccctggcctacgcagcgcaacgcgctcgccggctcgaccaggccggcctcctcgtcctcctcgtcggccaggggccatcatggtcacaaccatcgacatcatccctccgcggctgccgttccagatacggcaccggccgcccaccgtcacgccagcaacgtcgccgtcgccgacaatgcaacgacgccaggttccatcattagcgccagtgtccatcgccagctgctcaagcaggaggtggtcgacatggataattccaagcccgcggaggacgctgctgctgaccatgacttgggcttcggcatgtttgcggacatggacggcgccctcgacgttctgtgcgcccccgatttccatccaaaaaagcagcaacagcaggccactgctcagcagttggagaagctgccggaggaagaaggcacgcagttgctgctgggtcccgatcccttcagcttcggcttcttggactgggttggcgcttcatttggagtcggagagagagcagcagatgacggtggtcaataa

SEQ ID NO: 87850 - DNA, 3851 bp, Zea Mays
tgaaaaggaaacgaaactggccaggcgctacgccacaacgcagccgcggccgaggccacgcctcgccgcgcgctgcctcgccgccgctgcggctccatgccctctcgaaccacaacctcccgtgcccctgcctcctgctccacatgccttgtcacctttccaccccctcgcaacccacccgcacccggccatcgcagcgttctcgcactccggcttctcccacctcgccgaccacccgcttctcgcgcgctccgtccacgctctctctatccgccgcgcgctcccgctcagcgccttccactgcaacaccctcatcgctttctatttccgtcaaggctcctcccctgccggggccctccacctgttcggtgagatgccgcaccggacgtcttcctcctggtacaccgccgtctccggctgcgcgcgctgcggcctcgagtctacggctttcaccctgctgcgggtcatgcgggagcgtgacgtcccgctcagtggcttcgcgctcgccagcctcgtcacggcctgcgagcaccggggctggcaggagggcgcggcgtgcggcgccgccatccacgcgctcactcacagggcggggctcatgggaaacgtctacattgggactgcgctcctgcacctatatggctcccgcggcctcgtcttgaatgcccagagattgttctgggagatgccccagcggaacgtcgtttcttggacagcgatcatggtggcattgtcgtcaaacgggtgcatggaagaggcattggtagcctatcgtcggatgaggaaggaaggggtcatgtgcaatgcgaatgcactggccacagtggtcagcttgtgtggagcacttgaggatgaggtggctgggcttcaggtcacagcccacgtcgtcgtgtctggccttctaacccatgtttcagtagcaaattcgctcatcaccatgtttgggaacctcaggagggtgcaggatgcagagaggctctttgatcggatggaggagcgcgaccgtatctcgtggaacgccatgatatccatgtactcgcatgaagaagtctacagcaaatgctttatagtactttcagatatgcgtcatggtgaggtgaagcctgatgtgacgactctgtgcagcttggtatctgtctgtgcctcatcggatcttgttgccctgggaagtgggattcactccctgtgtgtcagcagtgggctgcattgttctgttccacttattaatgcgctagttaatatgtattctacagctgggaaattggatgaggcagagtctctattccgaaatatgagcagacgggatgtaatatcatggaacactatgatttcgtcatatgtgcagagtaatagttgtgttgaagcattggaaacattgggtcagttactccaaactgatgaaggtccaccaaactccatgacattttccagcgctctaggagcatgttcaagtccagaagccttgatgaatggcagaacaattcatgccatgatattgcagcgaagtcttcaaaacgtcctactgattggtaattctcttctaacaatgtacagtaaatgcaactctatggaagacacagagagagtatttgagtcaatgccatgttatgatgttgttagttgcaatgtgcttactgggggctatgcagcacttgaggatgttgcaaatgcaatgcgtgtgttttcttggatgaggggtactgggataaaaccaaattatatcacaatgataaatctccagggcacatgcaaatctttaggtgatttgcatagttatggaatgccactgcatgcatatgtaacacagactggattattatcagatgagtacattacaaactcattgatcacaatgtatgcaacctgtggtgatttggaatctagtactggtatattcagcagaatcaacaataaaagtgtcatttcgtggaatgccatcatagctgccaatgtgcggcatggccgtggagaggaagctataaagctcttcatggactcacagcatgctggaaataaacttgatcgtttttgtctagctgaatgtttgtcatccagtgcaaacttggcatcattagaagaaggcatgcagctacatggtcttagtgtgaaaaacgggctggattgtgatagtcatgttgttaatgccacaatggatatgtatgggaaatgtggaaagatggactgtatgttgaaaacgctgcctgatcctgcccatcggcctacgcagtgctggaacacattgatatcaggttatgcaagatatggctatttcaaggaagctgaggatacattcaagcacatggtctcagtggggcaaaagccagactatgtgacatttgttgctctcctctcagcttgtagtcatgctggtctaatagacaagggcatggattactataactctatggcacctacatttggtgtttctcctggaattaaacattgtgtttgcatagtggatctccttgggcgtttggggaaatttgcagaggcagagaaatttattgatgaaatgccagtcttgccaaatgatctaatatggaggagtttgctgtcatcaagtagaacccacaaaaatctggatattgggaggaaagcggcaaagaatctccttgaactggacccatttgatgactcggcctatgttcttttgtcaaacttatatgctacaaatgcaagatgggtagatgttgacaaattaagaagtcacatgaagactattaagttaaacaaaagacctgcctgcagctggcttaagttgaagaatgaggtgagcacctttggtataggtgaccggagtcatatgcacgcagaaaagatctatgtgaagttggatgaaatcttgctaaagctcagagaagtaggttacgtcgctgatacctcatctgcactacatgatacggatgaagagcaaaaagagcataacctttggaaccacagcgagaagcttgcgttggcatacgggcttcttgtcgtgccagaaggatctacaataaggatattcaagaatctcagggtctgtgcagactgccatttggtatttaagctggttagcatggtttttcatagggagattgttctgagagatccttacaggttccaccaattcaaacacgggtcatgctcgtgttcagatttttggtgagatagtcataaaaccaaatatgaatcggtccctgcctgtcaatttctctacttgttcttctgatgtatcatgtgcgacctgtcgctggccaagcaaggcaaactcttggacgttgtccaggcgagcactggagcagcagcacctcacccaacggtgagggaggtggttgccaactactactcccccaaccgtcatcgccgatggctcccatcatcggtcagaggaagaggagttgctgctgcaaggcagattgtacttcggtcttacgatcatgatgaagcgcactgcgtggcagcggtagctggtgcacggcaatggtagcatggggctcatgcttgacaccgactgtccatgatgcaaagggacgactaatcgaccttccttgacatggctttggctccgcagcctcatgacaggtggagggcatgctcgttatcacttaaacggctacacaacatggtcacctgcttatgcaggatactaaacgggtggcaactctccgttttgtttggtttaaggttaaagtaggatgatacggggtgacactgtccccttgattttttagaatatgctgtcacaaaatttacttcggtatttatctcgttttcacgtgactgtctcaacactatacaaactgtttatgttccctttcatcttttttgtacatccaatcaaacagatgacagatcggagaaatatggttctc

SEQ ID NO: 87851 - DNA, 429 bp, Zea Mays
atgggaaacggcggccgagcaggagatggagctgagacggcgcgctgggcgaacgcgccaaggagcttcggctggcgagcagagagggacgcgatggccaggagggagatggcggaacgtgcgcgatgcagggaaaaccgagcagaggagcaccgagcgccatgggagagagaggaggagcggcttgaggatgagcagagagagctccgggcaaatcccagggcgcggccatgggaggagcgagctgagggaagctcccaggaagagcgtcggcaggaagagatccgagctaggcgagctgggacaagctggaggaatcgccggccaatagagcaccgggagagagaacgacgcaggggaagagagaagcaagggggcgcgtggctaccagggctggagtggaaaaaattctatacagaccggatgtaa

SEQ ID NO: 87852 - DNA, 321 bp, Zea Mays
atggccagcagggagatggcggaacgtgcacgacgcagggaaaaccgagcagaggaggaccgagcgccatgggagagagaggaggagcggcttggggatgagcagagggagctccgagcaaatcccagggcgcggccatgggaggagcaagctgagggaagctcccaggaagagcaccggcaggaagagattcgagctgggcgagctgggacaagctggaggaatcgacggccaacaaagcaccgggagagagaacgacgccggggaagagagaagcaagggggcgtgcggctaccagggctcgaggaagcctccggctga

SEQ ID NO: 87853 - DNA, 2386 bp, Zea Mays
ctgctctcgggctctcggccttttcttttcctcattacggcctcggtccaccacctcctcttctcgcctgtgccttttgcccctgtgctcgccacacgcggcgcaaccgcccacccacccagccaggagaagaagatctccgtcgcctgctcttcgcttcgcttcgaatcggaggtgtcgagtagccagtggtgtccctatggattcagcttttagaagagctctcaatgagcctatgtgcttggaagaaaccgtcgtccaacaaggaattgaaaggtgcccattcctgaggaacatcaatgagcctacaagtttttccttctcgtccgtcaacttccctattcccgcaagaggagccaagggaccgattttcgaagatgggcctaattttgacatggcatttcgagttttccatggtagagatggggttgttccactttcagaagggtcattggcccagattgagaagccactgccaaagcccaatcctgagttcaacccattggcagccaaagcagcaaccatcagtctatctgcatttggagggtttttcagctttggtgacttctcaaataagcgcaataagaaaaactccaacaagaagaaccccaacaacctcccccagaataaaggccagcctaacaataacaaccatgaagcactgagcaacgagtggctggagatgggccaatgtccacttgcgaaatcttatagggcattaagtggaattgtgccacttgtcgcaaagatgatgacacccccagctggtatgaaacttaagtgcccacctgccgtggttgctgcccgcgcagcactatcccgcacagcctttgctaaggggcttcgccctcagcccctgccaacaaaaatactggtgattgcattgcttggtatggcagcaaatgttcctctgggcatctggagggagcacacacagaagttttcattgcagtggtttgccgcagtacatgctgcagtgccgttcatagggatgctcaggaaatctgtgctgatgcctaagacagccatggcccttactatagccgcctcgatattgggtcagacaatcgggtcaagagctgaacgtatcagactgaagagggccgcggcagcaaaattagcaagagagagccatggtgacgctgctgactacatcaaagcaccaatgagtctgaaaacagggaaccacactgttcagttttgggatccgctttccctcagagctgaaagcacagtggctgcaggtaccacagcagttcttgtccctgccatttctgctttcaactgatgacaggaatggattcattacgattgtaccagcatcgctggttggtgtattcttttttttctcctattctaaataatctgattgttgtatccattactgtacttttgagcttaagaaagaaatacttcacggcaaactcttcatcctgttttggtggccacatgacagcgaataaattagagaacacgttgagctgagaactttttactctcctttgaaatctgtctctggaaacacggatttccagccaatcgtcaatcgagcagtcacaattgcatgccatactgactttacagttatgtattctttgtattttataagacttatcatgataaagaaaatgttttgaaatgggatgtagaagcttttgctggtggtcaaaaaaaaaaaaacgaacagttaactgatctcaacgtaccacacctgaaatggtcaggactcaaaacgaaacagccggaccattctaacaccacaatgtaacaccagaaacacaaccaacaggttctagttgcctgctcgaatcaccatccagtcagtaaacaagatcaataagctactagtgctatggttggtttgacagctacaagcgacgaaaaacatctgcttgctgaagaacagacttaacattcgcacaaaatacaacttttcgactagtatatctcatcatctgggacatctggtgtaagaaacttctgtggatccttgtacagctcttcgtagttgtacttaggcttcaccctctccgggacaggctcaagtgggataatactgtctccatcgatcacgccatcaatgagtccataatcgacagcctcgagagggcccatgtaacgatctctgtcaatgtctttctctacctgctcaggagtgcggcctgtgaagcctgatacgatccgaatgacattcctcttgttggtcaatatctccttcgcttggacctctacatctagggcctgcccgcttgcacctccgacaggctgatggatcataatcctggtgttgggcatggcaaatcgcttgcccttcgtgccaccaccaaggattatagaagctgttgatccagctatgcccattccaatagtggacacgtctgccctc

SEQ ID NO: 87854 - DNA, 431 bp, Zea Mays
tcttaccgcggagatgacgaggacgaagttgacgatgtcgccgtgcagtccgacgcaagacgcaaagcccggtgatgcacagtctatcgtcggagatcgcgatgcgcccttcggccacgaatggcttcgccgagtacagggattgtccttgaccacctttcgactcaagcacgacgcggacgaggtgacggcagcgcccgcgatttacctttctctctcttggtccttcaactcatgccggcggtgatctacagcgcgatcctaggggcagttgcaaacggagggaggagaggcgcgcgtgtccttatgtagcccccaccaagctgggtcccgaatgtcgagctcgagagaaagacgggaaggcggttgtgaccacccccgtggcgatcgcacggtcatgggacgcctgaggcggggaaggagaagtccat

SEQ ID NO: 87855 - DNA, 2819 bp, Zea Mays
atagaaacagccggcctcgagcggtcgcctccctgcctcgtccggtcctctcggctctcggtgtgggaagggaaccaaaccgagacggaggcggagtacgacgcctgccttccctcttccgccgagcgcccgctgcgtcattctcgtccctcctcttcatcttcatcggccaaccgattgccgctgaccccggccatcggcgactgtcccccggtttttctttaacgatttccgattcgattccatggccggctggaccgattccaccggcagcggcggccgaggatcaggaggaagaggcttcacgacaccccgctatactactaattccaccaatgacatgatccatggaggtaccagcggcggaggcggaggtagcggcaggtggagaggaggcaggtcaagggggtggccgcccccgcagcctcaccatcgctaccgccgtgtggatgccgttcatcgtgactccgcgcctgtctctctatcggagctacaggcggcctcctccacatccagccgccaccggtaccttactcgttccatctcagcggacaagtcttccgcctcgggaaccgcgggttcaacagataccagggagcctgacgacaaggctaaccgcagcgctgccaactttgagtgcaacgtctgctttgacatggccgctgaacctgtggtcaccaggtgcggccatctcttctgctgggagtgcctctatcagtggctccatgtccattctcaccaccgtgagtgccctgtctgcaagggtcaggtagctgatgatgctatcatacccatctatgggcgtggtggatccgcagcctctgtggacaacgctcccccaaggcccactggagccagagtagagagcacaaggcagcaacaacaacagctgccaattttccatcctcccaatgtttttgaattcataggccttggcttggccgctgcagccagaggagagcactccaccgagcagctgctgctgccaactttctcccaccccacggtgtttgatgatgacgacgggcatgaatgggacatggatcttgtgaacaacggcattgatcctttggacctcataactcccggcacccaagacttggacatggatgattatgatggcactattgatttcgatgatgatgattatgaatatgactaccatttggcgggtgctacgttgtttgcttctgctgggactgaggccagcaatcccagctcttcacaagcacatgctggtatgatcaatattagggacaacattcttggcactgccaccagcatctatcatcagcaagagtttggctactctggcgtgagacctcataataacaggggacggcgccggcaccgtaatcgcgcaagggcatcagcaaatcactcaggcgctgatgaaatggtgatcgaggataccagtcatttctaccttcagaacggtggcagttctaacattagtgcaggcgctgcttttcggcccaacggtggctggactgggagaagaggaagaagcaacctgaactcgaattcaggtggtggaagcaacctgaactcaaactcaggtggtggaagcaacatgaactcgaattcaggtggtggaagaggagggattcagggtaccagaagacagaggacaaattacaactgatagtgatgttgggacatgcttcgaaataggagcgataactgatgagataaacaaacttaatcctttgtcttccattttttttctttgtttctctcgtattattaatccttttgtagcctgtggctattggcaccttgtcaaacatcttctctccgtttcccctgaattgttatgcctggttaatgttacttatttttagtaccatcatccacaaagtatctgttaaatatagtattctggttaagttgctgaactccgcgggtgcaggcaaaaaaattgatgctggcggcagtgctgaaactgtctaagcaattgtatcaagaagcatgagtattcaaatatttgtagtatgctataatgttggaattaagaaacagtttatttctcttgcacgcgtatcatagccaatttagaagtttggaggaactaataagttatataataaaattcgcaaacattggaatgattggtttatttcggtgcctgactacgccacaccaatacattacagaggaacattacaacgcatgcattgccggtagatggatactctagggtctaggcaaagctgcttgaaatgcagatgtactaactagttgtcgtctccgtaggcgagaaaccggtagcgctcctcgtacgggccgtcgaagtagaggtcggcctcgaaccagcgcgggtacctgaccagatccccggccacgaagtgcatgtagtcgtcgccgtggacagcgccggcggggatgaccttcacctccccggacacgatgtacacgagctggtcgacctgccagtcccacggcatccggcaccggccacccgtgcgccacgacgaccacgtctccatgacccgcagcgcctccatccgtgcccgcgccacctcgcctcgctccacgcgcaccttgtacacgtcctccatgggacgccccagcagcgcgccgccaccgcctgctgccgccgccgctcgtatccttacacctcttcggctactgatgctaggaagactaggaggcagcctgtgcgccgcggggagcacgagatggaacccgccggtactggcggcggcgggcctcatcgcgggtaccctatccgtctcctatcctttcctcttcggcttgggctttgggttgggtttggcctccgtccctgtcctgtctgtttcccgagtagagaacaa

SEQ ID NO: 87856 - DNA, 3249 bp, Zea Mays
atagaaacagccggcctcgagcggtcgcctccctgcctcgtccggtcctctcggctctcggtgtgggaagggaaccaaaccgagacggaggcggagtacgacgcctgccttccctcttccgccgagcgcccgctgcgtcattctcgtccctcctcttcatcttcatcggccaaccgattgccgctgaccccggccatcggcgactgtcccccggttcgtaccttctcctccttgatccccttttcttttattgctcctcgattccaaaaatctaatttagtacccccaatctccgaaccctaatcccccgcatccctcctcctcgatcaccacgtaagcaggcagatggatggaggatacgtatacgcgcagattacaccacaacataatttcctttttaggcttagatgtttcgtgttcacctcagctcagctctaacgaatcttgtttctcttccctaggtttttctttaacgatttccgattcgattccatggccggctggaccgattccaccggcagcggcggccgaggatcaggaggaagaggcttcacgacaccccgctatactactaattccaccaatgacatgatccatggaggtaccagcggcggaggcggaggtagcggcaggtggagaggaggcaggtcaagggggtggccgcccccgcagcctcaccatcgctaccgccgtgtggatgccgttcatcgtgactccgcgcctgtctctctatcggagctacaggcggcctcctccacatccagccgccaccggtaccttactcgttccatctcagcggacaagtcttccgcctcgggaaccgcgggttcaacagataccagggagcctgacgacaaggctaaccgcagcgctgccaactttgagtgcaacgtctgctttgacatggccgctgaacctgtggtcaccaggtgcggccatctcttctgctgggagtgcctctatcagtggctccatgtccattctcaccaccgtgagtgccctgtctgcaagggtcaggtagctgatgatgctatcatacccatctatgggcgtggtggatccgcagcctctgtggacaacgctcccccaaggcccactggagccagagtagagagcacaaggcagcaacaacaacagctgccaattttccatcctcccaatgtttttgaattcataggccttggcttggccgctgcagccagaggagagcactccaccgagcagctgctgctgccaactttctcccaccccacggtgtttgatgatgacgacgggcatgaatgggacatggatcttgtgaacaacggcattgatcctttggacctcataactcccggcacccaagacttggacatggatgattatgatggcactattgatttcgatgatgatgattatgaatatgactaccatttggcgggtgctacgttgtttgcttctgctgggactgaggccagcaatcccagctcttcacaagcacatgctggtatgatcaatattagggacaacattcttggcactgccaccagcatctatcatcagcaagagtttggctactctggcgtgagacctcataataacaggggacggcgccggcaccgtaatcgcgcaagggcatcagcaaatcactcaggcgctgatgaaatggtgatcgaggataccagtcatttctaccttcagaacggtggcagttctaacattagtgcaggcgctgcttttcggcccaacggtggctggactgggagaagaggaagaagcaacctgaactcgaattcaggtggtggaagcaacctgaactcaaactcaggtggtggaagcaacatgaactcgaattcaggtggtggaagaggagggattcagggtaccagaagacagaggacaaattacaactgatagtgatgttgggacatgcttcgaaataggagcgataactgatgagataaacaaacttaatcctttgtcttccattttttttctttgtttctctcgtattattaatccttttgtagcctgtggctattggcaccttgtcaaacatcttctctccgtttcccctgaattgttatgcctggttaatgttacttatttttagtaccatcatccacaaagtatctgttaaatatagtattctggttaagttgctgaactccgcgggtgcaggcaaaaaaattgatgctggcggcagtgctgaaactgtctaagcaattgtatcaagaagcatgagtattcaaatatttgtagtatgctataatgttggaattaagaaacagtttatttctcttgcacgcgtatcatagccaatttagaagtttggaggaactaataagttatataataaaattcgcaaacattggaatgattggtttatttcggtgcctgactacgccacaccaatacattacagaggaacattacaacgcatgcattgccggtagatggatactctagggtctaggcaaagctgcttgaaatgcagatgtactaactagttgtcgtctccgtaggcgagaaaccggtagcgctcctcgtacgggccgtcgaagtagaggtcggcctcgaaccagcgcgggtacctgaccagatccccggccacgaagtgcatgtagtcgtcgccgtggacagcgccggcggggatgaccttcacctccccggacacgatgtacacgagctggtcgacctgccagtcccacggcatccggcaccggccacccgtgcgccacgacgaccacgtctccatgacccgcagcgcctccatccgtgcccgcgccacctcgcctcgctccacgcgcaccttgtacacgtcctccatgggacgccccagcagcgcgccgccaccgcctgctgccgccgccgctcgtatccttacacctcttcggctactgatgctaggaagactaggaggcagcctgtgcgccgcggggagcacgagatggaacccgccggtactggcggcggcgggcctcatcgcgggtaccctatccgtctcctatcctttcctcttcggcttgggctttgggttgggtttggcctccgtccctgtcctgtctgtttcccgagtagagaacaagaaatacgtaggccaccggcggccctgcttgtcagtgaagtattttctctttttttatagaatattatagtattgaagatactgtagtatttttttcttatacagtgtttggtagtttttttaaaaaaactctgttttcaaaactgtagttttgactaaaatgcagtactttcacaattttg

SEQ ID NO: 87857 - DNA, 147 bp, Zea Mays
ttttttttgcagaaaatgtctcgtcgtcattgtaatgtgccagattcattgactgacgacaatgattttattgatatgccaacatcaagtgcgaagaggaatgcaggctgtactgggaaatgaaatgttgcagatgtgcaaaatgtg

SEQ ID NO: 87858 - DNA, 945 bp, Zea Mays
gcctcattccgtatctcaaaatctcacgcgggtttttaaaaaaggaaagaaaaagagaaaaggaaaaaacctcagagaaaaatatcctatccaccgccaccttccatatggatattttccccactgtcctggccttatctcactgccgctcaaggacccagcctcatcttctccagaccatcgcgctcctctccatctctcctcaccgcacacctcctctgctctcatttcgttccccgacgccaccctcttctgatggcacgctcctagtacctcctccctaagctcagttcggcgtggaggccagccaccagacttcgcacaccaatctcgccggctgctgcccttcttggtgcactcgccctcacctctactccagcggcgctcggcgcacgtgctcggccatggcgtcgggatcccgcactctgtccatgtcgagctccctctacgtcacgccctcagcgcctcgctgtccttaggcgtgtgttcctcagccccatggccacacccctgctcctctccatccatggctgcgctctcccctccgtgctcaagcttgccctcagctcctggccatggagcttgccctggcccctgcgcgctcattgtgggcgctcgcctgccttgttcctctccccaactagagctcgacgtcggcacctaggtaggccgtccctgtttcccctcgtttctccctagtggatggtcctcggcgctgtcggcctcctctttagggccactcctgccagctcccttagcccacaagccctacccctctcagctctggtgttgtcaactccggctgtgcgccgtcggccatgcctccccatgtcgtgcactcgccggacctctgcctcatcgtcgtcctcgtctctagccgcgcctctcagctctagtgtgatctatcgatgttatgctttaaaacttaagatctgtgtttaatta

SEQ ID NO: 87859 - DNA, 288 bp, Zea Mays
atggcgttggacatcagcatccagaattctccgcctgcatgtcgaaagagagggggccgcactgtcgtcattgtgtcggagttgccgaccggcagcgctgcgaacaccgccgccgtgccgtgggcagagcaagcctgcatgatgcatgctggactgctggaggaaccacttgttgaagccgaacctggtgctagcgtcgctaaagtagaccgtgccatcgaaggcctcgattgccgtgtccgcgaacctggcggcggaacggtcggcgtgctggcgtcgctaaagtag

SEQ ID NO: 87860 - DNA, 179 bp, Zea Mays
gttttcaaaattctattttaatgcacaatgaaatctccatcatgcaaaattttaagtttattcatatttaattatttaattcctttaattaagtgctccaaaacaaataataaagagtagctcctattttaaacttcaaatttgtttctagttccaagttcaaatccaaattcaaattc

SEQ ID NO: 87861 - DNA, 1737 bp, Zea Mays
gggaagacgacgacggaacgagagattgagagccagccggtccctttttttgtcagcgttattacgatccgcgtttggttgcgacctcattgtcttactgttagatatatagtgacggaatcgatggttgcccagcaggcaagatcggaaccaaactcggtcgcatgcgcatcgcagcccttccacatgcgggtgggtgaggtggacgacttacgatagacggggtcgggcatggattgattggtggaggccgtgcccccgtgctcatgctcggcgaggacagttgttatattatatcctccttcccttcttgtgcccttgcttggaccatatacctgaagtagcagcttcccttctccgtggaagaacaacagaagaaaagggggtaggtaatcttcggcgccggcggccgccggtccccgcgatggacgcggagaccggagatacccggtctcccctgctgccgcatccccctcccagccagacgcaggtttcctcagcgaatcagcactataacaaacccttcagctggaaggccccagccattattttggccttcgaattcttggagagcattgcttactctggtatagcactcaacctggtcgtgtaccttggaaccgtcctccatggaaccaccgcctccaatgcagcgaacgtcgatgcgtggaacggcgccacgtttcttacgccggtccttggagcctttcttgctgatacatactgggggaagtacaagaccgcagctatctccataatattctacgttgttggcctgctcataattaccacctctgccgtcataccgtccctacggcctgcctcgtgtgaaggcggttcatgcccacctgcaacagggtttcagtattttgtgctctttggttcattgtacctcatctccattggtacggggggcgtcaagtcagctttacttccattgggagcagatcagtacaatgatgcgaacgccgaagagagtaaaagcaagcaactgttcttcagttggttcttcatggctgtcaaccttggagtgttcatctccggcactgttcttgtctggatacagcaaaatgtcgcttggtctcttggattcggcatctcctcgatatgccttgttatcgccgcagttgcctttttggttggaacaccgctttacagggttcaacttccaactgggagcccactcaagagtatagtcatggtgtttgttgcctcttataagaagagaggagtggcggttcctgctgatagcacactgttgtttgaagggaatgaatcaagcagcattgtgccgaacaaaattgaacacactgacgaattcaggtaaatctatcactttgtcccaataaggctgtgttcggttgcacttgcactcggatcagaggggattgaggtggattaaatcccatcctattcaattttgactagtaagggatttaatcccctccaatccactcctagccgaacaagccctaatggacttcagagctaacatagcagggaaagttgtcttaagtttacattttagtttaattgcttcattacatagaaagagtgaagaggcatttgaaagatagacagggtctaatatcgctactgctcaccagaacctgcaatcacgcaggactgaaactttgtgtgatgaaagaaagcatgtcttgggccaaaaataagtacaaaattattggaaaaagacaacaactctgaattatgtgatttgagcaataaatgactatt

SEQ ID NO: 87862 - DNA, 2600 bp, Zea Mays
gggaagacgacgacggaacgagagattgagagccagccggtccctttttttgtcagcgttattacgatccgcgtttggttgcgacctcattgtcttactgttagatatatagtgacggaatcgatggttgcccagcaggcaagatcggaaccaaactcggtcgcatgcgcatcgcagcccttccacatgcgggtgggtgaggtggacgacttacgatagacggggtcgggcatggattgattggtggaggccgtgcccccgtgctcatgctcggcgaggacagttgttatattatatcctccttcccttcttgtgcccttgcttggaccatatacctgaagtagcagcttcccttctccgtggaagaacaacagaagaaaagggggtaggtaatcttcggcgccggcggccgccggtccccgcgatggacgcggagaccggagatacccggtctcccctgctgccgcatccccctcccagccagacgcaggtaaccgaatccccaatcccctgcgccctcctcctcctgcttcgcatctctcgattcgatctatatccaaccctcgctacagttctcgtgttctgctgctgctttgcttggccgaacgaagaaagaaagctcgagacttgttgttttctttcaccaatacatgctttttctcctcgtttcagtcccacagcagtcagcatgatgattttctttttgtccctgcaggtttcctcagcgaatcagcactataacaaacccttcagctggaaggccccagccattattttggccttcgaattcttggagagcattgcttactctggtatagcactcaacctggtcgtgtaccttggaaccgtcctccatggaaccaccgcctccaatgcagcgaacgtcgatgcgtggaacggcgccacgtttcttacgccggtccttggagcctttcttgctgatacatactgggggaagtacaagaccgcagctatctccataatattctacgttgttggcctgctcataattaccacctctgccgtcataccgtccctacggcctgcctcgtgtgaaggcggttcatgcccacctgcaacagggtttcagtattttgtgctctttggttcattgtacctcatctccattggtacggggggcgtcaagtcagctttacttccattgggagcagatcagtacaatgatgcgaacgccgaagagagtaaaagcaagcaactgttcttcagttggttcttcatggctgtcaaccttggagtgttcatctccggcactgttcttgtctggatacagcaaaatgtcgcttggtctcttggattcggcatctcctcgatatgccttgttatcgccgcagttgcctttttggttggaacaccgctttacagggttcaacttccaactgggagcccactcaagagtatagtcatggtgtttgttgcctcttataagaagagaggagtggcggttcctgctgatagcacactgttgtttgaagggaatgaatcaagcagcattgtgccgaacaaaattgaacacactgacgaattcaggtgcttagataaggctgctgtcgttgtagaggaccaagagatgaaggacagccatcgcccatggctattatgtacggtaacccaggtggaggaagtgaagattctgatccggatgcttccgatatggttcacctgtgtcttctattcggctgcaatgagccagactgctaccactttcgtccagcaggggaacgcgatgaacactaagatcgggtccttctcggtgccggcggcctccatgaactccgccgaggtgatcttcatgctcgtctgggttgtgttccaggacagcgtcgtcatcccgatagccaggaggtacacggggaacccgatggggctgacgctgctgcagcggatgggcgtcgggcggttgctggcgatcccatctctggcggccgccgcactggtggagacgtggaggctgcgcagcgtgaaggccgggcataacctgagcatcgggtggcagctcccgcagttcgtgatcctggcctgctccgacgtgttctgcggcatcgcgcagctggagttcttctacgcggaggcgcctgcgtccatgcgcagcctgtgctcggcattccagttcctggccatgtcgctggcgtactacgtgaacacgctggtggtcgcattggtggcgtccgtgaccacggcctggggcggcaagggctggctccccgctgacctcaacgacggccacctggactactacttctggctgtggacggggatcagtgtggtgaactacgtcgtgtacacggcatttgcaaggcgttatacggtcaagaaggttgtcggtcagtaaggatccagactatctgtatgatcaattactgtatcttattgtattttgcagtgtacactactccggaaccgagacttttggtgttcatttgaatgcatggtcctctgtacaagcctactagcgtactgtcttgtcttacgatttgtataacattggaagaggatttgtatgcatgtgtagattgggatgttgtgttagtgcctggagattggatgtttatttggctggtgcacaatctcccaatccatga

SEQ ID NO: 87863 - DNA, 2392 bp, Zea Mays
gggaagacgacgacggaacgagagattgagagccagccggtccctttttttgtcagcgttattacgatccgcgtttggttgcgacctcattgtcttactgttagatatatagtgacggaatcgatggttgcccagcaggcaagatcggaaccaaactcggtcgcatgcgcatcgcagcccttccacatgcgggtgggtgaggtggacgacttacgatagacggggtcgggcatggattgattggtggaggccgtgcccccgtgctcatgctcggcgaggacagttgttatattatatcctccttcccttcttgtgcccttgcttggaccatatacctgaagtagcagcttcccttctccgtggaagaacaacagaagaaaagggggtaggtaatcttcggcgccggcggccgccggtccccgcgatggacgcggagaccggagatacccggtctcccctgctgccgcatccccctcccagccagacgcaggtttcctcagcgaatcagcactataacaaacccttcagctggaaggccccagccattattttggccttcgaattcttggagagcattgcttactctggtatagcactcaacctggtcgtgtaccttggaaccgtcctccatggaaccaccgcctccaatgcagcgaacgtcgatgcgtggaacggcgccacgtttcttacgccggtccttggagcctttcttgctgatacatactgggggaagtacaagaccgcagctatctccataatattctacgttgttggcctgctcataattaccacctctgccgtcataccgtccctacggcctgcctcgtgtgaaggcggttcatgcccacctgcaacagggtttcagtattttgtgctctttggttcattgtacctcatctccattggtacggggggcgtcaagtcagctttacttccattgggagcagatcagtacaatgatgcgaacgccgaagagagtaaaagcaagcaactgttcttcagttggttcttcatggctgtcaaccttggagtgttcatctccggcactgttcttgtctggatacagcaaaatgtcgcttggtctcttggattcggcatctcctcgatatgccttgttatcgccgcagttgcctttttggttggaacaccgctttacagggttcaacttccaactgggagcccactcaagagtatagtcatggtgtttgttgcctcttataagaagagaggagtggcggttcctgctgatagcacactgttgtttgaagggaatgaatcaagcagcattgtgccgaacaaaattgaacacactgacgaattcaggtgcttagataaggctgctgtcgttgtagaggaccaagagatgaaggacagccatcgcccatggctattatgtacggtaacccaggtggaggaagtgaagattctgatccggatgcttccgatatggttcacctgtgtcttctattcggctgcaatgagccagactgctaccactttcgtccagcaggggaacgcgatgaacactaagatcgggtccttctcggtgccggcggcctccatgaactccgccgaggtgatcttcatgctcgtctgggttgtgttccaggacagcgtcgtcatcccgatagccaggaggtacacggggaacccgatggggctgacgctgctgcagcggatgggcgtcgggcggttgctggcgatcccatctctggcggccgccgcactggtggagacgtggaggctgcgcagcgtgaaggccgggcataacctgagcatcgggtggcagctcccgcagttcgtgatcctggcctgctccgacgtgttctgcggcatcgcgcagctggagttcttctacgcggaggcgcctgcgtccatgcgcagcctgtgctcggcattccagttcctggccatgtcgctggcgtactacgtgaacacgctggtggtcgcattggtggcgtccgtgaccacggcctggggcggcaagggctggctccccgctgacctcaacgacggccacctggactactacttctggctgtggacggggatcagtgtggtgaactacgtcgtgtacacggcatttgcaaggcgttatacggtcaagaaggttgtcggtcagtaaggatccagactatctgtatgatcaattactgtatcttattgtattttgcagtgtacactactccggaaccgagacttttggtgttcatttgaatgcatggtcctctgtacaagcctactagcgtactgtcttgtcttacgatttgtataacattggaagaggatttgtatgcatgtgtagattgggatgttgtgttagtgcctggagattggatgtttatttggctggtgcacaatctcccaatccatgatttttgataagattgac

SEQ ID NO: 87864 - DNA, 2296 bp, Zea Mays
gatccgtattcctccctcctcgttgactgccgcggccagcgatctggtcgtcaccttcctggaccgaccccaggccacggtgcagcagcctgcactctagtccgtgcgtgtcgcgtcgcgtctgcgggcggcattgcgtatcgtttctgtaggagcagaggagcagctgcctgaggcaattgttcccgtccccgcagagcggcatgtctccgcctccccctggcggctccaatggccgccgccaccagcagcagcggcaggaggcggtttcgtccatggaatccggcggcggcgcgtcgggggcggcgaccaagcgcttcacctggaagggcccggtaatcgtcctagtcttcgagctgctggagagcatcgcgttctcgggcgtggctctcaacctggtggtgtacctggccacggtgctgcacgggagcaccgccttcaacgccgcccacgtcgacacctggaacggcaccaccttcatcgtccctgtcatcggcgccttcctcgccgacagctactggggcaagtacaggaccatcctcgcctccatcgtcttctacctcgtgggcctggtgctcctcaccgtgtccgccgcgatcccgtcgctgcggcctgccacggcgtgccagatgggggagtcgtgcgcgccggcgaccaagacgcagttctccgtcttcttcgccgcgctctacctcacctccatcggcacgggaggggtcaagtccgcgctgctccccttcggcgccgagcagtacgacgacgacgcgggccggccggagcggaagcaggcctttttcagctggttcttcgccgccatcaacctgggcatcttcgtcgccggcacgctcgtgtcgtggctggagcagaacgtgtcgtgggcgctcggcttcggcatcggcacggcctgcctgttcgtggccgcgctcgccttcgcggcgggtacgccctgctacagggtgcagatgccgacgggcagcccactcaaggacatcatcagggtgttcgtcgccgccttcaggaagcgcgacgtcaggatggaacgggacgagggcgcggcggtgctgctgcacgaagacgaagccgaagacgaagacgaagacggcgatagcgctggacagcagcagcgactggcgcgcaccaagggtctgcggtgccttgacaaggccgcggcgatcatcgtcatggacggagacaaggagcgggagagcgaatggtctctgtgcacggtgagcgaggtggagggcgtcaagatcctggtgcggatgcttcccatctggatgacgtgcgtgctgtacgcggcgtcgctggggcagatgaccaccaccttcatccagcaggggatggccatggacacgcggctgggcggccggttcaaggtgcccgtggcatcgttggtgtccgtggaggtggtgttcatgctcctgtgggtggcgctgcacgacgccgccatcatcccggcggcccggcggctgacggggcgccccggtgggctgacgcagctgcagcgcatgggcgtggggcggttcctggtggtgctggccctggggacggccgcgcttgtcgagaggcgccggctccgcgccatccacggcgggagcggcccgatgagcatcgtgtggcaggtgccgcagttcgtgctggtggcgggctccgacgttttctgcggcatcgcgcagctggagttcttctacggggaggcccccgccgcgatgcgcagcatctgctcggccttctccttcctggcgctgtcgctggggttctacgtcaactcgctggtggtgacgctggtggcggccgtgacgaagcggcccgggtggctggcgacggacctcgacaccggccacctggactactacttctggctctggaccatcatcagcgtcgccaacctgctgctctacatggtgctcgccgcccggtacacgcccaagcaggtcgccgctgccgtggtggagccgatgcgtcccagcaacagtggcggcagcgacgaatgattaatttggcacatcgatcgactgcaacttgatccgcttactatacagtaaaaaaacgagatatggtcgagtaggatacactacactgtacacctaacactagtagtaaaatggatgctccccagtcaacatttctttcagatcgacctgttattttgtgtttagttcagctcctcatgtaaagtgctattgttggtaaaaaaaaatagagcgtcaaccaaacgaataaaaattagaagatgttaattttatgctgtataattttcggtataaaatagataaaatgaaataaaatagagaga

SEQ ID NO: 87865 - DNA, 1439 bp, Zea Mays
gaaagttgccaatttggcaagcagaaattaggccggcggtgcgcgcgcacgctttgcgaacacagacaggacggtccagatcgctcgatgcggcatcgcatcgcatccagtggacctcgccgctctggggtccaggcaggtgaggccagcgcgaatccgccgtcctggtttccacggccgcaccgcaccctacctctcgtcgtcttgccgccgatcctttttccgaaacctagctcgcccgcccgacctccgaccttctagaaccttgcctccgaggtgccgccctccccgccccgcctgcgccgcttgctcatcgcttctctccccgcggcggcctcccagatccggttggatcgaggggcaaggtcaagagatggggcaggccttccgaaagctgtttgatgccttcttcggcaacaaggagatgcgggtggtgatgcttgggttggatgcagctgggaaaaccaccatactctataagcttcacattggtgaagttctctccactgtccctaccataggtccgattgtaccacctatctgcttgtgcatttcataacttttggtttcaaccattgctaattacagttgtccaactctgcacctgccatgcaattgattcgtccgttcatatgtttagtgacagcatgcactttatcacattgtaggtttcaatgttgagaaggttcaatacaagaatgtagtgttcaccgtgtgggatgttggtggccaggagaagctcaggcccctgtggaggcactacttcaacaacactgatgctctgatttacgtggttgattcactggatagagagagaatcgggagagccagggcggagtttcaggctataatcaatgacccttttatgcttaacagtgtgttattggtgtttgctaacaagcaagacatgaggggagcaatgactccgatggaagtgtgtgagggccttgggctgtatgacctgacgaaccgcatctggcacatccagggcacctgtgctctaaaaggcgatggcctgtatgaagggttggactggctagcgactactctggacgaaatgcgtgcctctggacggttaacctcagcatcatcatcggcatcctgaatcacgtgtaacaggagggacaaacgatttgatcctcgtgatacgcccattgaaggatcatcttgtgattcaggctttgcgcgctttgttttcttttgtgtttccccaattgctgttggctatacatgtgtgctatgaactgggtggtgcatctggcaaggctaggtagtcagagttacagacgccggttccgtggtgacgatgtcagtacggtggtggtgtcgtactcgtctgctagtcggaagcaggcatcatcatccatctcgtcgcttgtgtgtgggagtgactgtaaatactaccactgatgacatggctctcgtggtttcttcgtctg

SEQ ID NO: 87866 - DNA, 1319 bp, Zea Mays
gaaagttgccaatttggcaagcagaaattaggccggcggtgcgcgcgcacgctttgcgaacacagacaggacggtccagatcgctcgatgcggcatcgcatcgcatccagtggacctcgccgctctggggtccaggcaggtgaggccagcgcgaatccgccgtcctggtttccacggccgcaccgcaccctacctctcgtcgtcttgccgccgatcctttttccgaaacctagctcgcccgcccgacctccgaccttctagaaccttgcctccgaggtgccgccctccccgccccgcctgcgccgcttgctcatcgcttctctccccgcggcggcctcccagatccggttggatcgaggggcaaggtcaagagatggggcaggccttccgaaagctgtttgatgccttcttcggcaacaaggagatgcgggtggtgatgcttgggttggatgcagctgggaaaaccaccatactctataagcttcacattggtgaagttctctccactgtccctaccataggtttcaatgttgagaaggttcaatacaagaatgtagtgttcaccgtgtgggatgttggtggccaggagaagctcaggcccctgtggaggcactacttcaacaacactgatgctctgatttacgtggttgattcactggatagagagagaatcgggagagccagggcggagtttcaggctataatcaatgacccttttatgcttaacagtgtgttattggtgtttgctaacaagcaagacatgaggggagcaatgactccgatggaagtgtgtgagggccttgggctgtatgacctgacgaaccgcatctggcacatccagggcacctgtgctctaaaaggcgatggcctgtatgaagggttggactggctagcgactactctggacgaaatgcgtgcctctggacggttaacctcagcatcatcatcggcatcctgaatcacgtgtaacaggagggacaaacgatttgatcctcgtgatacgcccattgaaggatcatcttgtgattcaggctttgcgcgctttgttttcttttgtgtttccccaattgctgttggctatacatgtgtgctatgaactgggtggtgcatctggcaaggctaggtagtcagagttacagacgccggttccgtggtgacgatgtcagtacggtggtggtgtcgtactcgtctgctagtcggaagcaggcatcatcatccatctcgtcgcttgtgtgtgggagtgactgtaaatactaccactgatgacatggctctcgtggtttcttcgtctgaaactaaagaaacggaatcacatacgt

SEQ ID NO: 87867 - DNA, 1680 bp, Zea Mays
cggtgcgcgcgcacgctttgcgaacacagacaggacggtccagatcgctcgatgcggcatcgcatcgcatccagtggacctcgccgctctggggtccaggcaggtgaggccagcgcgaatccgccgtcctggtttccacggccgcaccgcaccctacctctcgtcgtcttgccgccgatcctttttccgaaacctagctcgcccgcccgacctccgaccttctagaaccttgcctccgaggtgccgccctccccgccccgcctgcgccgcttgctcatcgcttctctccccgcggcggcctcccagatccggttggatcgaggggcaaggtcaagagatggggcaggccttccgaaagctgtttgatgccttcttcggcaacaaggagatgcgggtggtgatgcttgggttggatgcagctgggaaaaccaccatactctataagcttcacattggtgaagttctctccactgtccctaccataggtttcaatgttgagaaggttcaatacaagaatgtagtgttcaccgtgtgggatgttggtggccaggagaagctcaggcccctgtggaggcactacttcaacaacactgatgctctggtcattactctcgtttctgtttcacaagtgaagcggcataaattctattcaaagttgaaattttacatagaagtgtttatgctgtaatgtttcttccacttagttgtgtccatttgaatttagtattagtagctcagagcgcgaccaataccactcccaagcatatagatccaatggcttctttgtggatgctggagcccattttaacagggcatcttttattacactttatagcttagggaatatagatacccgaaaacataatatcattgtaggaaatagctcaattcttcgtagctgctgatttatatatcctaggtcttgatttatttacattgatttgtagtaaactctgtttccttgaaatgtaagatgttccccattatttgctgaacttgcagatttacgtggttgattcactggatagagagagaatcgggagagccagggcggagtttcaggctataatcaatgacccttttatgcttaacagtgtgttattggtgtttgctaacaagcaagacatgaggggagcaatgactccgatggaagtgtgtgagggccttgggctgtatgacctgacgaaccgcatctggcacatccagggcacctgtgctctaaaaggcgatggcctgtatgaagggttggactggctagcgactactctggacgaaatgcgtgcctctggacggttaacctcagcatcatcatcggcatcctgaatcacgtgtaacaggagggacaaacgatttgatcctcgtgatacgcccattgaaggatcatcttgtgattcaggctttgcgcgctttgttttcttttgtgtttccccaattgctgttggctatacatgtgtgctatgaactgggtggtgcatctggcaaggctaggtagtcagagttacagacgccggttccgtggtgacgatgtcagtacggtggtggtgtcgtactcgtctgctagtcggaagcaggcatcatcatccatctcgtcgcttgtgtgtgggagtgactgtaaatactaccactgatgacatggctctcgtggtttcttcgtctgaaactaaagaaacggaatcacat

SEQ ID NO: 87868 - DNA, 2005 bp, Zea Mays
cggtgcgcgcgcacgctttgcgaacacagacaggacggtccagatcgctcgatgcggcatcgcatcgcatccagtggacctcgccgctctggggtccaggcaggtgaggccagcgcgaatccgccgtcctggtttccacggccgcaccgcaccctacctctcgtcgtcttgccgccgatcctttttccgaaacctagctcgcccgcccgacctccgaccttctagaaccttgcctccgaggtgccgccctccccgccccgcctgcgccgcttgctcatcgcttctctccccgcggcggcctcccagatccggttggatcgaggggcaaggtcaagagatggggcaggccttccgaaagctgtttgatgccttcttcggcaacaaggagatgcgggtggtgatgcttgggttggatgcagctgggaaaaccaccatactctataagcttcacattggtgaagttctctccactgtccctaccataggtttcaatgttgagaaggttcaatacaagaatgtagtgttcaccgtgtgggatgttggtggccaggagaagctcaggcccctgtggaggcactacttcaacaacactgatgctctgatttacgtggttgattcactggatagagagagaatcgggagagccagggcggagtttcaggctataatcaatgacccttttatgcttaacagtgtgttattggtgtttgctaacaagcaagacatggtatgttcagccacattttctctggagcatttattttgtgttgtgattcattttagtgggtgatttagaagggctggcttggtgaagtggttctatctttttttgttcaaatgtaatgttaacgattatgttttgttcataaatgtaaacatgcaaattatggtttcttgctgaagtctggccattccaatgcgtgtactggaaatagctggctgctccatcctttagttgtgtaagcagttctgtttctttgtcgacagaatatgtcaatatgttggttttccataaatgtcatgctgctggcgttatgagttctgtattgttggcatgttgtgtgattacactagatgtttgtactacactaacgaagctctaatttagttgtacttaaatgcccagcctccttttttttaccatactgatgttcttcatgctaatgcagaggggagcaatgactccgatggaagtgtgtgagggccttgggctgtatgacctgacgaaccgcatctggcacatccagggcacctgtgctctaaaaggcgatggcctgtatgaagggttggactggctagcgactactctggacgaaatgcgtgcctctggacggttaacctcagcatcatcatcggcatcctgaatcacgtgtaacaggagggacaaacgatttgatcctcgtgatacgcccattgaaggatcatcttgtgattcaggctttgcgcgctttgttttcttttgtgtttccccaattgctgttggctatacatgtgtgctatgaactgggtggtgcatctggcaaggctaggtagtcagagttacagacgccggttccgtggtgacgatgtcagtacggtggtggtgtcgtactcgtctgctagtcggaagcaggcatcatcatccatctcgtcgcttgtgtgtgggagtgactgtaaatactaccactgatgacatggctctcgtggtttcttcgtctgaaactaaagaaacggaatcacatacgtacttgtgtgtgcgtcgtcgcctggagtcctgactcctgagtggtgacataaccatgcactagttgaactgcaagagacctagtactcgtatgctctgtgtagtgaaacgcaagtgatttgactggagactgaacgctgaaatgcaagtgatttcggtggaggctacggtttgcttgcttgtaagcgggcatgcgcggcggcccttttcctgccgctttggttttgcggccgtttggtatctgtcgagattttgtaaagaaacccaataagataacatgat

SEQ ID NO: 87869 - DNA, 105 bp, Zea Mays
ttcaagctttcataactttttttctcaaacgtgcagaagagctgcacatcattatattaagagaaggaagagtccaaaatagaccaattataatggccaaacaag

SEQ ID NO: 87870 - DNA, 716 bp, Zea Mays
gcctcctctgtgcttggatctatgtttccccacccccaatgctgatccttctcgcctcgatgtccaagagctccgatatgtcgtccaccgagccccggtgctcagatcacaacacatgccaaaggatttggcgggcgtagcagggtgtcgttcccacgggcatccctggatcaggattgtggaagtgagtgccatggggcaggagctagacgtgaaggtgccattgctgcatgatgagggtgtggattccatgaaagcatatgactgaattgagcttcttctaagcatttttttatgatggggcattcaaagctggtgaattggactagatattgagtttacaggagcagtcagggataatatgcatggttctgtaattagtgtggaaacctgagcaagacgtaaggcgtgtttctaaaaatgttcttaggaccagtaaatctacggacaacaaggaagattgtgcaacagaaggtgaaggaggatagaaggcagaagggggatggacgggcgacaacgacattggtgcggcgataaagttggtgagcacagaaggggagctaggtgtgccagtgacactggggcaacacagaagggggcaggcgacaaagtcagggtgagtacaataagggtacggcgacgacggagtcgagcgcttctaccttgtgtcgatccgatacaacgataatagaacagaagtggaattggattgtttt

SEQ ID NO: 87871 - DNA, 2630 bp, Zea Mays
gggtcactacttccttcggttttactatcccttcgtttccgctagccttctccttccagagcaaccgcgccattcgtctcctccgtctcgttcgtagtgcaacacatacagcctcgtctggtgaagtgaaagaacgacaagatctgtggtacggcggtgccggccgacatccacccactgtgctaccccttgcggttccagccagcgcagcgatcgattcccgctggccgctgccgtcggtgcctgcccggtcctccactcctcccgctactagtactagtaccagcacactccactgtccactccactgccagtgccatcccattcccatccgagctgcagcgctcgacgacggggagaatagcgtggcgtgggcggcgccatgaagtacagcaaggaagataagcccgagagggcgggcggcgccggcgcagggtccagggcggtgccggtggcgctcgtcgtcgtcgtgctctgcgccttctccttctacctgggcggcatctacagcacgggacggagcctgctggactccatccagccggcgccgacggctctcctcgccctcggcgccgccacgacgacccgccgtccctccgacgacggccaggctcggccggcactggcgtccacggccgccgtggcgttccccgagtgccccgccgactaccaggactacaccccctgcaccgaccccaagcgctggcggaggtacggcaactaccgcctcagcttcatggagcggcactgcccgccgccgcccgaccggcagcagtgcctggtgccgccgcccaaggggtacaagccgcccatccggtggcccaagagcaaggaccagtgctggtaccggaacgtcccctacgactggatcaacagccagaagtccaaccagcactggctcgtcaaggagggcgaccgcttccggttccccggcggcggcaccatgttccccaacggcgtcggcgcgtacgtggacctgatgcagggcctggtcccgggcatgcgcgacggcaccgtccgcaccgcgctcgacaccggctgcggcgtcgccagctggggcggcgacctgctggggcggggcatcctcaccgtgtcgctggcgcccagggacaaccacgaggcccaggtgcagttcgcgctggagcgcggcatcccggccatcctcggcatcatctccacgcagcgcctgccgttcccgtccgccgccttcgacatggcgcactgctcgcgctgcctcatcccctggaccgagttcggcggcctctacctcctggagatccaccgcgtcctccgcccgggcggcttctgggtgctctccggcccgcccgtcaactacgagaaccgctggcacggctggaacaccaccgcgcaggcgcagaaggccgacctggacaggctcaagaagatgctggccagcatgtgcttcaagctctacagcatgaagggggacatcgccgtgtggcagaagtccgccgacgcctgctacgacaagctcaccccggtcaccacgcccgccaagtgcgacgacagcgtcgaccccgacgccgcctggtacgtgcccatgcgctcctgcgtcacggctcccagccccaagtacaggaagctggggctcaacgccacgcccaagtggccccagaggctcagcgtcgccccggagcgcatcagcgtcgtcccgggcagcagcgccgccgccttcaagcaggacgacgcccggtggaagctcagggtcaagcactacaagacgctgctgccggcgctggggagcgacaagatcaggaacgtcatggacatgaacaccgtgtacggaggattcgcaggcagcctcatcaaggaccccgtctgggtcatgaacgtcgtctcctcctacggcccaaactccctcggcgtcgtctacgacagagggctcatcggcgtcaaccacgactggtgtgaggcgttctcgacatatccacgcacctatgacctgttgcatcttgatggcctgttcacagcagagtctcacaggtgcgagatgaagtacgtgctccttgagatggaccgtatccttcgtcccacgggctacgccataatccgggagagcacctacttcctcgattctgtggcacccattgccaaagggatgcgatggagctgcgagaagcacagcagcgagaacaaggccgacaaggacaagatcctcgtctgccagaaaaagctttgggcaggaaagcagtgacgagagaggatcatccttcttccttccgagtataaaaaagtaggcatccagatcggccaacaaggcaagaggcgcttcaatacacatggaagatgagcgagtacttctgatacaaagagtgttcggcagttattatcaaaataaataagccgagtaaaactccatataggatccaacagttaccatttttcattaatcacagtttaattctttttctgtaccgacagtttgtaggcaaggagtgggtcaattcatataccatatggtgagcaaatgtaagtttactccacactagatgtgtatagcttggttggtgctactgctatcgatgtaatagcgggccacgtatttacttcacatgttttgtggatcaatatactatgactgtgatgtcctaaagcgacggattttgttg

SEQ ID NO: 87872 - DNA, 2124 bp, Zea Mays
ctgcagcgctcgacgacggggagaatagcgtggcgtgggcggcgccatgaagtacagcaaggaagataagcccgagagggcgggcggcgccggcgcagggtccagggcggtgccggtggcgctcgtcgtcgtcgtgctctgcgccttctccttctacctgggcggcatctacagcacgggacggagcctgctggactccatccagccggcgccgacggctctcctcgccctcggcgccgccacgacgacccgccgtccctccgacgacggccaggctcggccggcactggcgtccacggccgccgtggcgttccccgagtgccccgccgactaccaggactacaccccctgcaccgaccccaagcgctggcggaggtacggcaactaccgcctcagcttcatggagcggcactgcccgccgccgcccgaccggcaccatgttccccaacggcgtcggcgcgtacgtggacctgatgcagggcctggtcccgggcatgcgcgacggcaccgtccgcaccgcgctcgacaccggctgcggcgtcgccagctggggcggcgacctgctggggcggggcatcctcaccgtgtcgctggcgcccagggacaaccacgaggcccaggtgcagttcgcgctggagcgcggcatcccggccatcctcggcatcatctccacgcagcgcctgccgttcccgtccgccgccttcgacatggcgcactgctcgcgctgcctcatcccctggaccgagttcggcggcctctacctcctggagatccaccgcgtcctccgcccgggcggcttctgggtgctctccggcccgcccgtcaactacgagaaccgctggcacggctggaacaccaccgcgcaggcgcagaaggccgacctggacaggctcaagaagatgctggccagcatgtgcttcaagctctacagcatgaagggggacatcgccgtgtggcagaagtccgccgacgcctgctacgacaagctcaccccggtcaccacgcccgccaagtgcgacgacagcgtcgaccccgacgccgcctggtacgtgcccatgcgctcctgcgtcacggctcccagccccaagtacaggaagctggggctcaacgccacgcccaagtggccccagaggctcagcgtcgccccggagcgcatcagcgtcgtcccgggcagcagcgccgccgccttcaagcaggacgacgcccggtggaagctcagggtcaagcactacaagacgctgctgccggcgctggggagcgacaagatcaggaacgtcatggacatgaacaccgtgtacggaggattcgcaggcagcctcatcaaggaccccgtctgggtcatgaacgtcgtctcctcctacggcccaaactccctcggcgtcgtctacgacagagggctcatcggcgtcaaccacgactggtgtgaggcgttctcgacatatccacgcacctatgacctgttgcatcttgatggcctgttcacagcagagtctcacaggtgcgagatgaagtacgtgctccttgagatggaccgtatccttcgtcccacgggctacgccataatccgggagagcacctacttcctcgattctgtggcacccattgccaaagggatgcgatggagctgcgagaagcacagcagcgagaacaaggccgacaaggacaagatcctcgtctgccagaaaaagctttgggcaggaaagcagtgacgagagaggatcatccttcttccttccgagtataaaaaagtaggcatccagatcggccaacaaggcaagaggcgcttcaatacacatggaagatgagcgagtacttctgatacaaagagtgttcggcagttattatcaaaataaataagccgagtaaaactccatataggatccaacagttaccatttttcattaatcacagtttaattctttttctgtaccgacagtttgtaggcaaggagtgggtcaattcatataccatatggtgagcaaatgtaagtttactccacactagatgtgtatagcttggttggtgctactgctatcgatgtaatagcgggccacgtatttacttcacatgttttgtggatcaatatactatgactgtgatgtcctaaagcgacggattttgttg

SEQ ID NO: 87873 - DNA, 867 bp, Zea Mays
atggaggcagcggcggcgctgccgccggagagggatacgtcagcggactggggagatggcgtggtaccgctaggtttccgggtgaaggcatcctctcgcgagtcgccgtcacagaaggcggggaacgtgctggaggccgacctgcgctcccactgggccaccgccaccaacaccaaggaatggatcctccttgagctccaggaaccgtgcctcctctcccacatccgcatctacaacaaatccgtcctcgagtgggagctcactgccggactgcgatacaagcccgatgcattcgtcaagttgcgcccccgctgcgaggcccccaagcgcgacgtcgtctaccccgccaaccacaccccttgccgctaccttcgcatttcctgcctgcgcggcaaccccatcgccatcttcttcatccaactctttggcatccccgtgcctggcctcgaacctgagctccagccactgctcagctatttactcccgcaaatcacatcctccaaacaacccctttctcacaacatgcacctccagttgcttaaagatatctccaccaggctacctccatttcttccccaaattgaggctgctgtctgtttagttcaggctgaccttaatagtgtcgtggacaccccagaaagcagcgtgcggttcttggctctacttgctggtccattttatcctatccttcaccttataaatgaaagagatcctaccaaatctttgtttggttctgctgattcagatgccctcagaactagtccagcttctactccaacagtttcttcaaactttgaggcatgtaacttcagattatgtcctttttcccttcctgagcgaactttggataatgttagtgccgattga

SEQ ID NO: 87874 - DNA, 4935 bp, Zea Mays
gaagctggccaatctcttgctcgttcacgtgcagcactgaagtatgttgtattggcaatttctgggcatatggatgatgtgctcacagaatataaagaagccatgcataagttacttttcgttctggagatgctagatccttttattgatccatctacaagtgccatggaagacacagtaatatttgatggtatctctgctatatatttggaaaagcaatcaagtgtatatgatattgccttaaatattatccatacagcagtaaagagagctgctgttctcccttctttagaacttgaatggcgacgaggagccattgccccaagtgtaattctctctatcttggatccgcacatgcctcttcctcctgacatagacctctgcaaaagttcagtgcatgagattgataaagtgcctttggctgttttggataatcatgcaccacagccatgcaacccagaaaatattgctgggcgagatgcatctgaaacaactattcgtcctgaaaattttgaacagtgcagctttctgtttgctcctgaagaattaaaccaatctgagttgactagtctttataccttgaaaggaaaaggccatgatgtaataactcaaacaagtctgaaccatgacattcctgaaggcagaagtaaagagaaactatcatctgaccctttcctgctagataatgttgttgcagctgattattttgattcacaggctgattatcaacagctggaaaactaccaggactgtgagttaagagctcaagaatttcatcgcatagcactcaacctatgcatgcaacaagaaccaacattagaagggcataatgctggaattgatgctttgctattagccgcagaatgttatgttaatccattttttctattgggattccagtctaatttagagcctctggacaagattgaacgtattcattcagagttgatgcaagggaatgcttcctctgtatcaaaaaatttgcacttgaaagatttcaacaaaaaaacaatctacaatttggagaacaagcgtgatagatctgttatagatttactcctacaagccgccagatttgactttgaatatcatggaaagatacctgaaggggaactatatccaaatattgctgaagatggcaagcgatctgtagaaatctcacctgaagctcttcagtttgctgatgctgtaactttggtccgaaagaaccaggctatgctgtgccactttattatgaagcaattccaaaggaaaggacacttgggtagtgaaattcttctccagagcttgttgttcctgttgcactcagcaactgatctattttgtccaccagagaatgtagttgatataattttgaagtctgctgaaagcctcaatgatcagcttacatgtctttacagtttttttagtgcagggaataagaaattggataggataaaaatacatggtctaagaagacgttggatgcttctccagaaactggttctggcttcatcaggcagtgatagtactagagaacttgccagaaataaaagagatggtttccattttagaagtttagtccctccatcaacatggatacaaaagatatctgatttctccatgttttctagcccactccctcgatttttcggatggatggcagtgtcttgctatgccaaggaatatttaaatgagaagctgtttcttgcttctgatttctcacagcttacatctttgctatcaatttacatggatgaactttgtttgatggatggagttgcaatcccgaaagtcaggtctgcaaaaggtgaacaatttagttgtacggacttgtttcttaaaaaggaaactactctgtcagaccaaccaagcatgaccgaacagtttaaaatcttacttccggagctacatttcttctttccaagcatgggtaaattgtttaatgcatttggggagagcatcttggaggctgttgggctacagttaaaatgtctgcccaatagtgcaataccagacgtcctttgttggttttctgagttgtgcttatggccttatctcgaacacattaaggagcatcttgtagttgcaaacggagttagttatataagaggaagtattgctgctaatgcaaaatcagttgtcttctacctacttgagtctattgttactgagcacttggaggctgttattcctgaaatgcccaggatagtgcacattcttgtgtctctctgtagagcttcttatactgatgtggccttcctaaaatctgtgctatgtctaatcaagccactcatctcctacttcttaaggaagggaactaatgaaacaaaaagaaggattgaaatgttaggctccttgttagtatggattgattgcatcagttccgatccaccatcgttattatgcaactatcttcaaggtttccagacacttctagatggttttgaagctgtgctaattcaaaatattgaactacttggtgtcggcatcctttctgcgacaaactcgtctatagaatcttctgattccttgggcattgatggcactatgctactagagaagaaggcacaagataatgaagaacaaacactaatgaaatccgtaacatactgtgagaacgatggaaatcataagggtcttcgtaatctgcatcctaatagtatcatagagttttgtggcaccctggagaagtttattttgcaccttacttcatatattgaggatagttggaaatggcaccatcagttggcctctaggatctctttgtctatggcaaagtgtttgttgtttgcaaaatttttgaagtccatagcgcaagaagacacaatatctagtagcagtgagcaagatgtcgctgtgaaaatttcctgtgagcttgcacaaaagcattggcaaagtgctcttgaaggtctaggagataccattttgataaatcaggaaacacagttctggcaggtggcatcagctatgcttgattatataatggggataccaaacgtccttgcttggggtaatgttcttaatactacatgctctgcggtcaagcacttctgctcccatgcacctaggctatcttggaggctgcagacagataagtggttgtcattattagtttcaggtggaattgagggcttcaaaaacagtgagatctgtttgattgatcttttctgtacaatgttgaatcattctgaaccagagcagcgttttgttgctgtacaacagcttgggaggattattaactcaacaagttctactgaagctgatttgaaatatccaaactatgaccaaaatttcctcatatctgtttcgacagtaacatcccttttggtaactcatacatgggacagagtagcagcattggctctccatgactcttctatgctattaaggaatcatgcaatggcattgcttactgaatatgtgccttttgttgataggaagcacctgcagtccttcctttcatccagtaacggtatcctgactggtttgggacaactttctggtgtaattgaagagggctattttacacgaatgtctttgctgttgttttctaaggcatgtctttattctaatcctgaagatatcgctttgatacctgaatgtgtttggcagaagttggaaaacatgcaaacatcaactggaggttttggatatatggagaaagatctctgcctagctctgtgccaactaaaaagtgaatcagatgctacaactgttgcaaaagttctttctggatgtaatagtcaaccagtcagccctgatttcaagagcatccgtgaatcaatccttcaggtgatgtcctctttgagttctattgaagcatactttgagttcttcgcagccagatctgcacaagaacatgaggaacttgaagaagctgagattgaattggagcttattgaaaaagagaagtcagttcctaactttgttgagcataccaatgatacgatggtgcttgccatgccatcatatgaccgtgatggtagtgaggttaataaacggctccagcaaatccgggaaaatattcggtccctggaaaggtctaggctgaaagaggaaattacagcgcgcagacaaaagaagctgcttctaagacatgcccgtgaaaagtacctagaagagacacgctccagggaaacggagcttatgcaagagctcgacagggaaagagctctcgagatggaacgtgaagtagaaaggcagcgtcaactggatattgagcgtgcaaagtctagggaactgcaattcaacattgatttggaaaaagagaaacaaactcagagagagcttcaacgcgaactggagcaagtcgagttggggcggtcatcaaggcgtgagttctctgccaatcccaacagccgctccagggagaggtaccgcgaaagggatggtggaggcagagcacagcaggaggcggggagcctgaggtcttcgagcagccgaggccaggaggggggctctgcccaggcgcccgcaccggccgggccgggccctaccgtcatgctcgccgggtcaaggacgttctcgggggccaaccttccaacgattctgcagcctcgcgagcgcgctgccgacgaggacagcgcttgggccgaggacgctagcagcaacggagatcctgaactggacggcgtgaggccgcatgggccgcgaggcagcaggtcatcctcctctaggcaggttgcggagaggagggagcgggatggcactgctgccggcacgggcaggagagaagggaaatgggagaggaagcagcacccgtgactattccctgcttgtgttgtgcctaagcctaacggaggcttcctcaatcgcgttgtaattgtactcgtatgggcattggatcaggtggctgcttagtcaacggtaccgtgcattgataaaaaggttggatcatcgtatgggaacactaccaatcagctgcctgctcagtcaacagcaccattaccatca

SEQ ID NO: 87875 - DNA, 1525 bp, Zea Mays
gttcccaagtcccggcccaacccatctgtagcactaggcaacagcgaagctgagctgagagctgtcactgcatctgcctcatctaccagtacgatggtgatgatgtcgggacttgctgcctacggttcactaagtatgacaacgaccgggaacgcgccgttatcatggaatacacgggcaccgccggcgcgactcgctttccagaggcggcggcgcatgagtacgatcacggccacggtcacgtgcaggcgcgaggcggcgatgacggccccggagaaggcggacgtgctgcggtcgctagacgggtgggcggagtcgaacctgctgccgctgctgaagccggtggagcgggcatggcagccgcacgacctgctgccggactcggcgtcgccggggttccgcgaggcggtggacgagctgcgggcgcgggcgcgagagatccccgacgactactacgtgtgcctggtgggcaacatggtgacggaggaggccctccccacgtaccacgccgccctcaacagcttcgtgggctacgacagcccctccagcgccgacgcctgggcgcggtggtcccgcggctggaccgccgaggagaaccgccacggcgacctgctgaaccgctatctctacctgtgcggccgcgtcgacgtccggcgcgtggagcagaccatccaccacctcatcaacgccgggatgcgcctcgcctccgacaagtgcccctacaggggcttcatctacacggcgttccaggagcgcgccaccgccgtctcgcacggcaacacggcgcggcgcgccatggcgctgggcgacgccagcctggccaggatctgcggcgccatcgcgagcgacgagaagcggcacgaggcggcctacacccgggtggtggaccagctgttcgcgctcacgcccgacgccgccgtgcgcgcgctcgagtacatgatgagggagaggatcctcatgccggcctactacatgttcgacggccgggacccggacctgttccgccactacgccgccgtcgcgcagaggctcggcgtctacaccaccgccgactacgccgacctcgtccagttcttcgtcgacaggtggggcgtggcggacctaggccccggcctcaccggcgaggggaggcaggcgcaggactacgtctgccggttgcctgagagggtgcgcaggatggaccagctggacgcgcgacgaaggctgcagccccagactcgtcaggtccccttctcttggctgttcgacaggcacgtggagctgctgacctgacttgattggtcggcagtctgcagcccagctagcggtccttttgccccctttggcagagcccagagctatcaattctgttactgcgtctcctcctctacttctacttcctcctcgttggccactccgtagttccgtatgtgtctaccgtcaagtgactgactggaaccatgtactgtgtgtcagtcatcattcaatccatttggtgccgcagcgtgtcagaaaaattaaaagcaagcagcccaatgtcagcgag

SEQ ID NO: 87876 - DNA, 2765 bp, Zea Mays
cacgcgacaccagcagcaaagtcctcctcgtcgtcgtcttggccgcagcagccagcaggtcgcggccatggcctccgtctccctcctactctgcctcctcctccttgtgccacctctcgccgccgcccagcagcagatgtcctctttctccgcaaacaactcgacctggagccccacgaacagcaaccgcatcctcgtgtcgatcaatcgggaattcgccgccgggttcgtggcgtcgacctctgctcgggatcgctaccacttcgccgtctgggtcgtcggctccaactccaccgacaaggctttcatatggtacgcccacgacacagccagctactccccctacgagggcaacgacacctccaagctcgccatcgacgcggcgggccggctcacctggactgccggcgggaacaacaacgccaccatctggtcgctcccgccccccgccaacaccaccaccaccccggcggtgctgcagctcaacgatacggggagcctggtctacggcgcagcctggtcgagcttcgccgagcccaccaacacgctcatgccggggcaggccatgcccaagggaggcaacgacaccacgctccagtccgtcaacggccactacagggtcgtcaactccgccacgctgcagttcaacaattccatgatgtacgccaacatcagcggcggcagcgctctgctcaatctcaccgccgacggcaagctccagttcagcggctcgcagctcatcgcctccgaccaaggcaccaccaatcgggtgcggcggctcacgcttgacgacgacggcaacctgcgcctctacagcctggtgcccaagacccggaagtggctcgtggtgtggcaggtcgtgcaggagctctgcaccatccggggcacctgcgccaacggcagaatctgcgtccccgtcggcgttgacagcaccacttgcgtctgcccgccgggctaccgcaacgccaccccgacggacccctgcacacccaagaaaaggtacagcggcaggggcgacgacgacacgttcgtgcggatggacttcgtctccttctccggggccgccaactcctcggcgtcggaccccgggccgctgatgaccaagctgacgccgcagaacctggcggactgcgagagactctgccggagtaactccacctgcgtggcgttcgggtacaagttcggcggcgaccggacgtgcctccagttcaccgggctggtggacgggtactggtccccggcgacggagatgtcgacgtatctgcgggtggtggcgtcggacaatgacagcaacccgttcacggggatgacgaccatgatcgagacggtgtgccccgtgcagctggcactgccggtgccgccgaaggagtcgcagacgacgatccagaacgtggccatcatcacggcgctgttcgtggtggagctgctggccggggtgctgtcgttctgggcgtttctgcgcaagtactcccagtaccgggagatggcgcgcacgctgggactggagtacctccccgccggcgggccccggcggttctcgcacgcggagctgaagcaggcgaccaaggacttctccaacgtggtggggcgcggcgcgtacgggacggtgtaccgcggcgagctgcccgaccggcgcgccgtggcggtgaagcagctgcaaggcgtgggcggcggcgaggcagagttctgggcggaggtgaccatcatcgcgcgaatgcaccacctcaacctggtgcgcatgtgggggttctgcgccgaaaaggagcagcggatgttggtgtacgagtacgtacccaacgggtcgctggacaagtacctgttcgccggcggaggcggaggcggtgggagcggcgaggaggattcgtccgctgagcagcagcagcagcagccgctgctggaccttcacacccgttaccgcatcgccctgggtgttgcccgcgccatcgcctacctccacgaggagtgcctggagtgggttctccactgcgacatcaagcccgagaacatcctgctggaggacgacttctgccccaaggtgtccgacttcggtctgtccaagctgacgagcaagaaggagaaggtgaccatgtcgcgcatccgcggcacccgcgggtacatggcgcccgagtgggtgatccaccgcgagcccatcacggccaaggccgacgtgtacagcttcggcatggtcctgctggagatcgtgtccggccgccgcaactacgggttccggcaggagtcggtgggcagtgaggactggtacttccccaagtgggcgtacgagaaggtgtacgtggagcgccgcatcgacgacatcctggacccccgcatcgccgccacctacgacgacgccgccagcgtcgccaccgtggagcgcatggtgaagacggccatgtggtgcctgcaggaccgcgccgagatgcggccgtctatggggaaagtgtccaagatgctggaggggtccgtcgagatcacggagcccgtcaagccaacaatcttctgcgttcaggacgactgatgactacacaagtttttttctttcatttccagatgtgaattcccagtgccgtctgccgtccaccgtcaatagaattttagtagctgttcacttccactctttgttttttttttggtttgcatagcaaaagctctactaatccttaattaatccttaagtattgtgaatccaccgtccaggaatccgctaaattattgttcacatagtccaccttgcacccattaccaaatttgtttctagcccatagata

SEQ ID NO: 87877 - DNA, 4605 bp, Zea Mays
tgtcttccaatacaaacaatttcccttcgtatattatttcagaccgtttgcagtaatgtatgcgggtacatccatcagaataccatatcaacagaatcaagaaatgcgagaactccaaaatatacattctccatagagggagtgcactgcaaactgagacaagaaagcacaaactgatggcggtgttatcgcactgtacatttcttcaggtcacatcttccaagaaacatagatgatcaggtgtttatccaatgggcacaaatacttcgcatgcttagagggtgtttgatttctaggaacttatttttagtctatccattttattccattcaagtctctaaattaccaaatactaaaactaaaataaagttttgatttccgtgtttggtaatttagggacttaaatagaataaaatggaagaactaaaatttaatccctataaaaccaaacacccccttagtccccttggtccagggaaagtcttgagaaacagggaaatgttttccatgatcttcacaccttcctaacactctttccgtactctttccttatctcccacagctgctccccaacttccttcatggtcggccggtcgtcccgtgtcggagcagcgcattggaaagccaggctaaggagcttttcaagcacctcgtcgtccacgtgatcttccagcaatgggtccagtatctctctcgtgttgccttcgttgaattttttgaaagtccatctgattgtgatcctctcttcaggggttcgcttcagctctacgggtctgcgagcagaaagaatttctacaagcaatatgccaaatgagaagacatcactctttggagttagctggtatgtcctcaagtattcggggtccaggtacccagctgtgcctttcactttcgttgatatgtgtgtcttctccgtgtcactagggccacttcttgcaaacccaaagtcagacaccttggcccgatagctatctgtcagcaggatgtttgatgacttcacatcacgatgaattatagtcttctctgtgaacagtacaaaagttctcagtccctttccagaacatcgccaaatgaaatatatttgaaaaaaatggttagtattgggtaccatcaatgcaaaaaattacccaactatgattatattttaggccctgtgtggaagtatttttgttgttttaaaaaaatttaccatgattttgtgaactgctttggttttgaaaattggaggcttagttagcatataacaaaacccaatgactgaatacaggactccaaaaactaagaatagggaaaaacacaggattggagtgcatgtcccatgcaattctaatttcatttagatgcagcatactcccttagtcccaaaatagttgttattctcgcttttcgaggagtcaaccatttttaactttgatcaaatatacacaaaaaatattactccctccgttcttttttatttgtcacattttagctcaaaaatgaactagcgggcgacaaatattcgaaaacggaggtagtaatgtttatagtacattattagtatcattagataatctttgaatcaattttcataaaacttaatgttgctaatttttttacaaatccagtcaaactagagaaagtttggctggcatgaataccataccgacaagtcgacaactattttgggacggagagcaaaaaaaagatgggaactagaggagagagaggcacacattaaagtctctaacgccccatttggatctttggaattaaattccattctaataatattaatttaggcaaagatcaattaagctagtatggtttaagtgaaatatattttgtatactattattaccatacgtgggagatattcatgtactacatttttactatagaggagtgagccgaagaacgtcttataagttgcagagtagaaacataattccgttgatacataaaatcattttccatacgccaccccattaatttgagaattgagataggcttatatttgagctttagaaagtggtggaatgtcaagttccaagccaaatagactactttattaagtaaattccaattcctccaaaatgaatagatccaaacagcctataagacaatattcatatgttacatctcctaaaatgctacattttggattgagctaaacaataggaattttgttggatttaaggatggtcaatcctttgttccaaatgggctgcataggaaaagcccttataggactcctgtcctacaaaattccttcacaaaccctatgttctaaagggggcctcaatggaatcaatatttctcctaaattaaatgttttacatctgtaaagaacaggtcattttactcatattgggagaaggtccccgactgaaggcccctagataataacaatttctagttgtttcatgacaaaaaaaattgaaatggttcgaagggcaacattcgccccctgacctccgtcagtctaattcatctagtctgattcgtctagccgggggagagttaaaaagcaaataatgttaaagatgctgagaagtgaagcttcgacgacaattgtgttgcatgcaccgaccaattcaacttaaaagcttaagctgacaaaaagaggtggacaattcacttgtattctaacactcactctcacgtcgtggctctcccacggcttagacataggataggaacaaacaataattattttataaggtgtcctgctcgccttgcccgcggacgtaaggcgcggcggcagaggtcgcaggtgcgcacggcggcgaggtcgcaggagcgcggcaggatggggagccgcaactgagcttgcgtgctgagcgcaagtgggggaggcaacggtgcaccgaagctatgagcctagaaggcatagaatcgacggcggctgctagagcagggaaaaagttaggatttgggtgtggctgtggtggaacctgggtttgtgctgagttaatgggcttctagatgggccaccaaataaaagtccataccatccttttttttcttcttttccacttctttttttctttctaacatcttttgacagagtataattcaaaggaaatactggattctttgagttatgtatgttagagacccattagagtgtttcaagaccaaattttgtgtgcaaatatatacattatattatatatttctatgaacacctcgccttaactctctatattttcctatatttatatatgggtaaggcgtcgtctcaccttacgtctttccacttataagttgaaaagggagtcgctcaccttaactcgccttaataactacgtctttgatagcatattgagttgcatgtcccaaccaattcaacccaaaaaactaaagctgataaagagaggtgggcaatttacttgtattctaacagcgtcgccagaatatacaaatacctttaaaagtggcgcctaaaagaagcttcgaccgagagaaatcgtgtgtgacatgtctatatagtggaaggtcggaaatatacaccttcgaatgtaaagcgttactatgtaaaagggagggtgaagatgttatttcatatagggttgtacaggaactcgatccctgtaaatagtgaacagtgtaaccgtcagaacagttggcaattcactttcaaaagtataatcctatttctaaagctcctatctttatgcgtgtgtacctttcgttaccctttcatatccgaagcttatacagccttatgccatatacttttttcttggttcattgcttgctttacagattaaagcttctgtataaaaataatcatgagattacattcaaaagttgacaaaaccctttcactaccttctccccctcccccaaaagcatgaaggggagcaggaattaacaaactaatcgtgttgccctgttgttattctttcagaattgcgacatgtcccccaaccaatggtttcaagtcactcgactagctagtcgagacacctaggcgaccaggcgactaatcgcgattagtcgaccagtcgacgattaggtcgactaatcgggtcctagtcgacctgatcgtccctactggtcctcctgcatatttacaggtacaggacctatatatataattatatatatgtgtaataatgtaatattatatatatatgcgtagcatatagcaatatagcatataggacgcaatatcaaagtaaccaaattaccaaacaaaacaaatatgaatactagaactggacagtggagagtggacaattcaaatttcagaacatcatagaaattatgaatactagaattgtcaggcactcagatcatatttcagaattaagaattcaaatttcagaacatgaactgaatatcactcatactcactacataacatatgatgtagagttgcagacttactagacgtccagcccaaagcaaaaacaggccagctgccagccgaccaaacctaactaatcgtccacacattaactggacgactaatcgcacttggtcgacgactaaccgaacgactggacgattagtcggcctaatcgggtcggataccctggtcgctccactaaaaccgactagcccgactaatcgcgattaatcgcgattagtcggacgacttgaaatcattgcccc

SEQ ID NO: 87878 - DNA, 2891 bp, Zea Mays
atgcgtgttgatattaggataaaggattggcgaaaagtgcctaaagtggtaaaatcaaacctatgggaggatgtgtcaaagaaatttgtcatgccaagggatgaaacccatacccttaatgtgaagaaggtcgctttgaaatctatgagccatgcatggaagtatttcaagtggaaactaaatataaattatgtcaagaaggacaaaactccatttgaggactatacagaactcaagaaagagtggttgccagactttgtggagtgggttacctttgatgagtatattgctctaggagaaaagggcaagaaaagccaaagcatgaacaagttccgtcaaaaactaggttggcgaagctatactgtacaaaagagaaaatgggcaaaggaagatgcacaagcattaattgagggcaaatctattccatttcaagacatgctagatggtcgtcataaggattgggcaagggcgaggaatccttctggcgatgtgaacataacagagtcgcatccaatcataaagaaaattgtagatctaaatgaaaagtcagtagctggtacctttacaccattcgataatatggacatacttgcaacaacaatagggagtaatcatccagggaggacaacaggggtgagtgcttatgtgggtttagggatgggtcttgctcaaggtgatggccctcgtaagaataaacgtacatcaacgaaaggatatgtcaagaggattgtggatgagtatgaggccaagtttgagaaactaacagccctgtgtcagagtatggagcgtcaattaaacaattctgagagttgctcatcatcaaaatttgttgatacaccagaccatgcaacacatcatttagttgactcattacaagaggtgatgaaatgcaagttggtggtgcagataggtccgcaatctgttgtggtcgctagagggcaggcttaccctccaaaggatgttgtaaccgtccatgggattgagcggcgagatgaccacacaaaagtgcaggttgattttgtgtttcgcaacttcttggatttttcgctccctataacaatcgctggtggaaacaacagttcatgcaaagcctcaacaagtcccacacacatcgcctcagtagaattcagtgatgtatttcacatctacaatgatcttgcccttgacatatccttacatcggagttggatgctatgcatgaggaagatagacaaatacagaggcatagttggctttttggatctaaagatgatcattttaaagagaatcaatgaagaggctgatgaagtcgaagcatacattgtgaaagcattgcttgctcagcaggacaaggagtgcatatttgttgtttgccaggaaggggcttttggtgcttatgtcgacaaaaaggttgccataacaagaattttggtcgcacagttatatggaaacattttcagacaatatgtgatgtaccacatgttatcctttgcggataatcttagtttggaccgtgatcgatatcctcagggtcatgctggttttgcaacctgtccattattgcctgatgagatagcaaatgtccgagaacggttgctcgacttcttcatgaatgaggtgatagacattggtggatcatgcagggaggacgctgtcaagatattacttggtctgcatgagaaatatgagacttaccataaatgcaaatacactttagaagggatcaatgcagtagtttacttgtcagcaagatacatccctgacagacatcttcctgataaggttattgatctgattgatgaagctggcagtagagctcagatggaatcatttaaaaggaagaaggaagaacaatgctccattctctccaagtcaccagacgaatattggcaagagattagagctgttcagagtacacatgaagtggcgctggctaacaggttgaagcattctcttgatgagaatgacaaagaggatggtgttaatattgaagtcataggggacaacaagattgcttcgccatcaatgcctccaacttcagtcgatgaacttattctggttggttcagagaaaattgcaagagttacatcattgtggtcagggatacttttggctctactacctttacctggcgatgctaaaagccaaccagcactaacaacaacgactcaagttgctgccacacaaacagctgcactagcagtggacgctaccacagaagccaccacagaatcagatcctgcaacgccaacacctctttcaccttatacaaattacccagatctcaaaccgccatcaacccctatgccaccgttagtggagtctgaagtcgagacgaaggctggcagcaccgtgactgaagaaccagcagtggtcaattctgcacctatagcagacgctagcactgggtcatctcctgtcactactaggcccagacctcagtcaccataccctaatgttagtgtaaacctgaaacttcttagccatctgcataaaaacaccgtttgcatcaggttatgctcatcattctttgatctgtatgcagtatccagatttcaagccaccatcctcgccttcgccgtcagcaccttaatttggcaagagtacaagaaaccgggtctagaggatattaaagaagttgagttgttcatatggagccggcatctcaccagaggtttcaagctctgcaaggtgaggtctgttcagtttggccagaaaggcatcccctacctgaacacctacgacggccgcaccatccgctaccccgacccgctcatcaaggccaatgacaccatcaagatcgatctggagaccaacaagatcatggacttcttcaagtttgatgtcggcaacatggtcatggtgaccgcgggaggaacaccaggcgtgtaggagtgatcgagaactgggag

SEQ ID NO: 87879 - DNA, 245 bp, Zea Mays
gcgatctcagccgaccattctaccgttctacaatctcagccgtccaatcccgcacaccagttttccgcgcgcagaaaaaaaaatcaaactatggctgcccagggatcgaaccttggatctattgagcagaatgcctagccttccaccctctagccaacatgactcctgttgaaatgtgtacaacttcaactaaaacgtcttttgtgtttaacccaccgtccactctgtatgctcactgagtctag

SEQ ID NO: 87880 - DNA, 1686 bp, Zea Mays
agatcggacttggttcctacaactttttcggcctggccaaccgtgctgtgcaggagagcagtgcagaggagagcgaggaggcgtgcgattgcttgctttgcttccgagtttcgacacgcgtgcccaggaatcggtcggattccccaatcccgtcaccatggccgcgccgccttctccttcgtcccgctccccgtcgagcgaggttgccgtccacagattcagcggcaccttggatgtatcatcatcgccctcaaggaccgagttgttgagcatggtgaagaagcactcacatttgattgggtggacgattattggtgccgaggatgatgcatcagatgtgggaatggatgataaattctggcatgaaatgcttgacctattctttgtgcgtggcaggcaatcaaaaagaagtgaagaggatgaccttgtcttctttgttaataacatgaaattgcatggttatggtttcaatgataacatggaagatccacctcccttttttgtacggagatgggctcccacgcttgaaaagatcagtattaatacagtggaggttgattgggagcgttcattctatttgaatttaatcgctcacacgtcgtacactgtcactgttgcaatatttggaattgaagatcttcgcaaccgtgcagtgaaaaacaaacagttgcctccagtttataaggttacaaaaaatgtatacgcgtctcctagccgtgtaaattttcatcttgacagaagaaaggctgtagaaacactaccggcatatcccaacatctttttctctgtagacgacttcgatgatacttttgatgctgtggtaaggttctgtgcaattatatcaaagttgtagttgtacaacattctgtccaggttttgtcagatcctgaacactgctattgtgtgattcttaacgcacatgatggggcagcatttcccgaagaaagtgagtgcaagaatcctgtttcaaatacacagcctggaatgagctgtggtagtgcccaagaaaaaccaccaaagagaactctcttctcagcttatgtgggctaccaaaatgttcgtggggcttatgatgcttgcagatcaaaatttgggagtttcctctcacttgggcatgaccacaataagctcgacagactttttatgaagggcccagaaggacgtggagaggtggaagtagctgtctctggcattgcagagcagtgggaagtcgaagaaagatccaggagatagctttcgagtccttgttcacagagcagcttctgctgcatcaaagctagtgaagcatgcttatgagtcttcatctgctaacagacaaatggatgatgagcttgtccctctgaagtgttgcttgatgtctgtgtctcttccttgggactacattgcccacgatcttttgcacaaggacacacctccgatggatctgtgatagcaattccagatcttcactgccagtcatgggaggaatccaggcgtgatgagatgcaaggtaaagaatcgaagtggaattaggatgtagatgcttttagaccaaatatgtgaagtgtagggtttgtaatgtgcttgtgcacaggttaccatacaatgtaaatacaatgtacatatcatgcatgccttacagaacttgattgtatttcttgaacttgctgttttttccttagcaaataattcttcaatttgcattga

SEQ ID NO: 87881 - DNA, 1638 bp, Zea Mays
agatcggacttggttcctacaactttttcggcctggccaaccgtgctgtgcaggagagcagtgcagaggagagcgaggaggcgtgcgattgcttgctttgcttccgagtttcgacacgcgtgcccaggaatcggtcggattccccaatcccgtcaccatggccgcgccgccttctccttcgtcccgctccccgtcgagcgaggttgccgtccacagattcagcggcaccttggatgtatcatcatcgccctcaaggaccgagttgttgagcatggtgaagaagcactcacatttgattgggtggacgattattggtgccgaggatgatgcatcagatgtgggaatggatgataaattctggcatgaaatgcttgacctattctttgtgcgtggcaggcaatcaaaaagaagtgaagaggatgaccttgtcttctttgttaataacatgaaattgcatggttatggtttcaatgataacatggaagatccacctcccttttttgtacggagatgggctcccacgcttgaaaagatcagtattaatacagtggaggttgattgggagcgttcattctatttgaatttaatcgctcacacgtcgtacactgtcactgttgcaatatttggaattgaagatcttcgcaaccgtgcagtgaaaaacaaacagttgcctccagtttataaggttacaaaaaatgtatacgcgtctcctagccgtgtaaattttcatcttgacagaagaaaggctgtagaaacactaccggcatatcccaacatctttttctctgtagacgacttcgatgatacttttgatgctgtggttttgtcagatcctgaacactgctattgtgtgattcttaacgcacatgatggggcagcatttcccgaagaaagtgagtgcaagaatcctgtttcaaatacacagcctggaatgagctgtggtagtgcccaagaaaaaccaccaaagagaactctcttctcagcttatgtgggctaccaaaatgttcgtggggcttatgatgcttgcagatcaaaatttgggagtttcctctcacttgggcatgaccacaataagctcgacagactttttatgaagggcccagaaggacgtggagaggtggaagtagctgtctctggcattgcagatcagagcagtgggaagtcgaagaaagatccaggagatagctttcgagtccttgttcacagagcagcttctgctgcatcaaagctagtgaagcatgcttatgagtcttcatctgctaacagacaaatggatgatgagcttgtccctctgaagtgttgcttgatgtctgtgtctcttccttgggactacattgcccacgatcttttgcacaaggacacacctccgatggatctgtgatagcaattccagatcttcactgccagtcatgggaggaatccaggcgtgatgagatgcaaggtaaagaatcgaagtggaattaggatgtagatgcttttagaccaaatatgtgaagtgtagggtttgtaatgtgcttgtgcacaggttaccatacaatgtaaatacaatgtacatatcatgcatgccttacagaacttgattgtatttcttgaacttgctgttttttccttagcaaataattcttcaatttgcattga

SEQ ID NO: 87882 - DNA, 1250 bp, Zea Mays
catgctgtccaatatcctattcattgcgcctattacatttttgttaatatattgttaggtgagaaatctctgataataagtcacattcttttgggttgatgtggtcagttaacatcatctgttttatgtgagcagcttgaaaagatcagtattaatacagtggaggttgattgggagcgttcattctatttgaatttaatcgctcacacgtcgtacactgtcactgttgcaatatttggaattgaagatcttcgcaaccgtgcagtgaaaaacaaacagttgcctccagtttataaggttacaaaaaatgtatacgcgtctcctagccgtgtaaattttcatcttgacagaagaaaggctgtagaaacactaccggcatatcccaacatctttttctctgtagacgacttcgatgatacttttgatgctgtggttttgtcagatcctgaacactgctattgtgtgattcttaacgcacatgatggggcagcatttcccgaagaaagtgagtgcaagaatcctgtttcaaatacacagcctggaatgagctgtggtagtgcccaagaaaaaccaccaaagagaactctcttctcagcttatgtgggctaccaaaatgttcgtggggcttatgatgcttgcagatcaaaatttgggagtttcctctcacttgggcatgaccacaataagctcgacagactttttatgaagggcccagaaggacgtggagaggtggaagtagctgtctctggcattgcagatcagagcagtgggaagtcgaagaaagatccaggagatagctttcgagtccttgttcacagagcagcttctgctgcatcaaagctagtgaagcatgcttatgagtcttcatctgctaacagacaaatggatgatgagcttgtccctctgaagtgttgcttgatgtctgtgtctcttccttgggactacattgcccacgatcttttgcacaaggacacacctccgatggatctgtgatagcaattccagatcttcactgccagtcatgggaggaatccaggcgtgatgagatgcaaggtaaagaatcgaagtggaattaggatgtagatgcttttagaccaaatatgtgaagtgtagggtttgtaatgtgcttgtgcacaggttaccatacaatgtaaatacaatgtacatatcatgcatgccttacagaacttgattgtatttcttgaacttgctgttttttccttagcaaataattcttcaatttgcattga

SEQ ID NO: 87883 - DNA, 534 bp, Zea Mays
atgaatgatagagcgtggctagcgctaaagaaaaatacgtatatatgtatgtgtgcgcatgcatgtatatacatatgtatgcgtgttcagcaggcggcagaattggtgaaagggctgaacacgtgtggcgctcggccgccggggccgcccgccttaggcttattatctgcaccggcggtggttgcggcggcggcagatgctccggtggcaacaaggcgctggcaggaggggcagatggagagcgcagcggcagcggcggtgggcatgaaaaaggcagccgggtgggggtgcgggtggctgagggcgcggagctgctggagctcgcggtggagacgccggttctcctctgttaacgtctcgcagcagcgcttgagaatctcgcagtccacttctgtctgcttcagcttggttctggctcttctgttttggaaccaaacctccacttgccttgggctcaggttcagttgtctggccaaagcagccttctgcttctgctcagatgcgttatgcacaagcacaacacgagccaaaaaa

SEQ ID NO: 87884 - DNA, 293 bp, Zea Mays
ttatatgaccaggtgttggaaggtcttgtttatctgcatgaacaaggtgtcattcatagagatatcaagggcgcaaatatactgagtaccaaagagggaatgtaccatgaatcacatgaatttggtggtcatatgttcaacactctcctagaggttagaccattgcatcatttgattttgtatgcgtcttacaactgggctggttaattttataatttgtgaataccgtgattagaccatttaaattcccatctttaaatggtacatgtctgaagaattcgcacagatcttgt

SEQ ID NO: 87885 - DNA, 222 bp, Zea Mays
aaccggaagcacgatgacgaagctctcgccgagctggtcacgacgatgttctgggttgccccagaagatgaacggacgaagagaaactcctcgctagagttgtcgctagagtttgggcgggagtcaaactttgacgagatcgtcattgcggcttatggctacgagcctagctagtggcgggctgttgtggcttggattgcagcggtgctcccacgaggctat

SEQ ID NO: 87886 - DNA, 502 bp, Zea Mays
ttataaacaaatatatttattattcagaaatatattcttgaattacaatagtatccacatacaacgtcatttttcttgttctgtacaaagattgtaaagggaaacaatagtatcaaagccatattgaaatataccacctatccatcctccatctctagtgcaacgaactcttcactgatttgtgctcatatgttcttagtcaacaaatgaacttgattcacattactgcttggtgataggaagacaccaatccaaaggattcatccagcttctttgtcaatcatgccagtttcaagatgcagagtttctataagattgtctgcgttctttactaccttcaattcatccatacattgctggttgtagtgctacctgagttattatatgtatacattcacatagagaaacagttagattaagtataaatcaaatgtctacctcagtcaccaagcttatggtaatagattaattttcaatagcaaaattacctgctgctaagcag

SEQ ID NO: 87887 - DNA, 274 bp, Zea Mays
ttacattatgcaaactagttcaattatgcactcccatatttgctttggtttgtgttggcatcaatcaccaaaaagggggagattgaaagggaattaggcttacacctattttcctaattgattttggtggttgaattgcccaacacaaataattggactaactagttttgctctagtcactactacaaatcgtgttatatgagacggttaatttttagttattaagacgcttatgatgtgtccaaatttgatggagtcgcaaaagatgttccgt

SEQ ID NO: 87888 - DNA, 1562 bp, Zea Mays
tcggtcgcatcgtacgtcgtgtcctgcagtggctcacattcgacgagacacagtagagggtagctagcagtggtgctcctggcctgtgacgatggtttcctcgtcgtcgtctccttccgccaccgccgccgccgtggtcctggcggtggccctgatgacgacgacgtgcttccatggcgcgacggcgcagctgtgcgaggactactatgacagcacctgcccggacgcctacgacatcgtgaagcaggtgctcgtcgacgcagtgcagtcggacacccgcatcttcgccagcctcatccgcctgcacttccacgactgcttcgtccagggctgcgacgcctcgcttctgctggacagcgtcccggggatgccgtcggagaagacgtcggcgcccaacaacggctcagcgcgcgggttcggggtggtggacgccgccaaggctgccctggagagcgcctgccctggtgttgtctcctgcgctgacatcctcgccatcgccgcagagatctcagtcgagctgtcgggaggccccagctggggtgtgcttctgggcaggctggacagcaagacctccgacttcaacggatccctggacctcccagagcccaccgacaacctcaccatacttcagcagaagttcagcaacctcagtctcaacgatgtcgacctggtcgccctttcaggggggcacacgttcggccgggtccaatgcaagttcatcacggaccggctctacaacttcagcgggacgaacatgcccgacccgacgctggacgcctcctaccgagccttcctgacacagagatgccccaggaacggcgaccccacagccctgaacgacctggacccgacgaccccggacaccttcgacaacaactactacaccaacatcgaggtgaaccgaggcatcctcaactccgaccaggagctcaagtcgtcgcccctagcgcagggcaccacggcgcccatcgtcgaccagttcgcggccagccaagacgacttcttcgcgagcttcgcgcagtccatgatcaacatggggaacatcaagccgctcacggacccgtccagaggagaagtccgcaccaactgcagaagggtcaactgatccaattaagtcgatcggtcgtaattaatgtgtgcagagaaaacgacatgttcatcattggctggtcgatgtcatttggctagctgctcatcagggtgtgaagtttctgtatacacatgcagcatgcatgtatgtttcatgttttccaatccaactcaataaaatttgccaaagattaaatatagtttgttctcaaagtccgccagaaatgtgcaataaaatggaactttattttgcatgtgctagactactgctaagagcatgtacaatgagtgtcttgagttgtttattcgagtgtgtccaggggctaaatgtaaaaaaaactcaagacatgtatcttgacgaagacacagtgttttatctatatgttcgagacaggagactagctgattggtcactttaatttattgaatgctctgattggtataatgaatatggtaggacacatgttttagac

SEQ ID NO: 87889 - DNA, 2314 bp, Zea Mays
cctgctgtaccacctcatcctgtgctctcccacaaaataaaagactctcccgcaaatcaaaatcacctcacccactcagctttcccccttccgcaactcctcgccggcagccggcggcggcgagtatctctcctgccgtttccacggaattttccccattgcggccactcttccccttccctcgtcctgcttcgtcgcgccttggctgtgctcctctcttcttcctccgagtccaggtgcgcgcaggcgcagggactgggaggaggtccagatgctactatgctgctgtacttttccccaacaaatccagacctgtgctccgcgctcgtcgtttcacccaagctgcttgccgcggagcttgctcagctccggcgagcaggggaggagcaaaaagagcaagctccaccgcgtcagggcgcatgttttcaagtccaagaaccagtctttgcgctctcaatcccacctggttgatagccacgggggccctgcggataaaatcccgagaaaggattttccttgttccgcagcgccgtcgctgccggacgcggaggcggtcgcgttctggctgcgtttctgccggagggagctcgacgtccggagagcgcacgcggttgccctgcggtcgctcggcagcctgggggtgttcgtctccaacaatctgatcagcgcttatgtgcggttcgacgaggttgctaatgcgaggaaggtgttcgacgaaatgcccgagaggagtatcgtgtcgtggacagcaatgatgaatgggtatcagaagcttggctgccacggtgaggttgcgaggcttttgatggatatgctgatcgctggcgtccaaggtaacagcttgacttttgtttgcctgttgaaatcttgtggggagcgatgtgatgccaggttggggcaacaggtccactgttgcgttgtgaagggtggctggagcaatgtgatagttgacagcgccatcacacacttctatgctcaatgcggtgatgttgctgctgcttcaactgtgtttgataggatggcatcccgcgatgttatctcatggacaacaatgatcacggcttatgtgcagcatggccatagtgacaaagctcttcagatgttcccaacaatggtgtctgagggatttcgccccaacgaatttactgtttgcagcgccctcaaggcttgtgcagaggagaaggctctaagatttgggaagcagttgcatggtgctattgtgaagaagctatacaaatatgatatccatgtcgggagcgcacttgtcaccatgtatgccagatgtggggaggtatttgatgctcagacagtgttcgataagatgccaagaagaaacactattacatggacttcaatgatctctggatatgctcaaagtggctgtggtgaagaagctgtcttgttgttccgcaagatgaagatgcgcagagtatttgttaaccaccttactattgttagtctccttagtgcttgtggctctatgcagtcaatttatcatggaaaagaacttcatgcccagataataaagaattgtatggaagagaatctccagattgggagtacgcttgtttggttttacaacagacgtggggagcatacttatgccacaagaattctagaagcgatgcctgaccgtgatgctgtcgcatggacagctatgatttcgggctataacaatcttggccataatgttgaagcgcttaaatcattggatgaaatgttatgggatggtgtggtaccaaacacttacacctattcctcagctttgaaagcttgtgccagattggaggctctgcaagatgggaggaggatccatggtgttgttaacaagacccaagctttctcaaatgtgtttgtgggatgctcactgatagatatgtacatgcggtgtgggaaagttgatgaagctcgaagagtcttcgacgccatgccagagcacaacttagtaacatggaaagtaatgattacaggatttacacaaaatggccgcagtgaagaggctttgaaatacatgttcctaatgcaacaagaaggttatgttgttgatgaatttgtgctttcgacagttttgtcgtcatgtggagattttcagttgaaatcagaccgcatctcgttcatagttcaataaccagtctactttcagtgaagttttagactagttagcgaatatcagcaaaatgctggtaaaactgtacaaagtcactggttggtctcaggatgctgcaacaagtttctttgtctgattgcgcattggaaaatacaatcagaagctggtgatttcaaggtgtgggaatatatctgtacttcaaagcaa

SEQ ID NO: 87890 - DNA, 2210 bp, Zea Mays
cccactcagctttcccccttccgcaactcctcgccggcagccggcggcggcgagtatctctcctgccgtttccacggaattttccccattgcggccactcttccccttccctcgtcctgcttcgtcgcgccttggctgtgctcctctcttcttcctccgagtccaggtgcgcgcaggcgcagggactgggaggaggtccagatgctactatgctgctgtacttttccccaacaaatccagacctgtgctccgcgctcgtcgtttcacccaagctgcttgccgcggagcttgctcagctccggcgagcaggggaggagcaaaaagagcaagctccaccgcgtcagggcgcatgttttcaagtccaagaaccagtctttgcgctctcaatcccacctggttgatagccacgggggccctgcggataaaatcccgagaaaggattttccttgttccgcagcgccgtcgctgccggacgcggaggcggtcgcgttctggctgcgtttctgccggagggagctcgacgtccggagagcgcacgcggttgccctgcggtcgctcggcagcctgggggtgttcgtctccaacaatctgatcagcgcttatgtgcggttcgacgaggttgctaatgcgaggcttttgatggatatgctgatcgctggcgtccaaggatggcatcccgcgatgttatctcatggacaacaatgatcacggcttatgtgcagcatggccatagtgacaaagctcttcagatgttcccaacaatggtgtctgagggatttcgccccaacgaatttactgtttgcagcgccctcaaggcttgtgcagaggagaaggctctaagatttgggaagcagttgcatggtgctattgtgaagaagctatacaaatatgatatccatgtcgggagcgcacttgtcaccatgtatgccagatgtggggaggtatttgatgctcagacagtgttcgataagatgccaagaagaaacactattacatggacttcaatgatctctggatatgctcaaagtggctgtggtgaagaagctgtcttgttgttccgcaagatgaagatgcgcagagtatttgttaaccaccttactattgttagtctccttagtgcttgtggctctatgcagtcaatttatcatggaaaagaacttcatgcccagataataaagaattgtatggaagagaatctccagattgggagtacgcttgtttggttttacaacagacgtggggagcatacttatgccacaagaattctagaagcgatgcctgaccgtgatgctgtcgcatggacagctatgatttcgggctataacaatcttggccataatgttgaagcgcttaaatcattggatgaaatgttatgggatggtgtggtaccaaacacttacacctattcctcagctttgaaagcttgtgccagattggaggctctgcaagatgggaggaggatccatggtgttgttaacaagacccaagctttctcaaatgtgtttgtgggatgctcactgatagatatgtacatgcggtgtgggaaagttgatgaagctcgaagagtcttcgacgccatgccagagcacaacttagtaacatggaaagtaatgattacaggatttacacaaaatggccgcagtgaagaggctttgaaatacatgttcctaatgcaacaagaaggttatgttgttgatgaatttgtgctttcgacagttttgtcgtcatgtggagattttcagttgaaatcagaccgcatctcgttcatagttcaataaccagtctactttcagtgaagttttagactagttagcgaatatcagcaaaatgctggtaaaactgtacaaagtcactggttggtctcaggatgctgcaacaagtttctttgtctgattgcgcattggaaaatacaatcagaagctggtgatttcaaggtgtgggaatatatctgtacttcaaagcaacctctactaaccatttttcttcgctttcttttccttacgaagctgtatatacaccataattcaagcattgttagcctgttgcaaccagcatagttcttgcagtttactatatcctgggccaatgggaatttgtccacttctgtaaaaaggttgtcatcacgataatttagaacaactccagcaggatttctagttttctacttaatcctctatagctaaatatagatgtctaaataaaaaaaaaca

SEQ ID NO: 87891 - DNA, 1809 bp, Zea Mays
atgacgatgaacgtcgtcgttgccggcgtcctgctcctcgtgctcggcggcctcaacaacccaccctcggtggccgccgatttctgcgacaatcttaaacaggtcgccgccactctcccaaagaacacctccacttcccccttgcacttcgccaccgccaccttcggccaagcgcccgacgtcgtgtacgcgctagcgctctgccgcggcgacgtcctcgacgacaccacctgcggcgactgcgtcgctaacacgttcgacaaggtgaaaccgccgccgccgcaggtctgctacccggccgcctactactacggcggggcctgcaggctcgtctactccggcgacaacatcctcgcgccccccaataccacggcagcgaacggcgatgacacgccgtacccgctatggaacatcaagaatatcactgccgccgacgccgacgacgtgcgcctcatcgtccgcctcgtccacgagctggtggtggagacggtacagctcgcggccagcacggcgccaaggcggttcgccacgggcgtcatggacagcggcgcgatgtttcccaaggtgtactcgctggcgcagtgcacgccggacctgtccgccgccggctgcctggcgtgcctccagcgtctcctgggcatggtcaactccaccatggccctgcgcatgggagcacagatccatgtcatccggtgttatttcaggtacgaggcgtatgcgttctacgacagcaagcccatgctgcaagttgggccgtcggcgccggcgccggcgccatctccgaacccggtggaacacaagaggcgtagcagcaagctgtgggtaattccggtagttgtggttcctctagcggcagtagcatttctctgcttcatcttctactccccttgcttcagaaggtacaggagaggcaaagcaatgaggttacaagcaggatcaaggcgtactcagggcttgcacggagacgaagaactagtctgggatgggaagaattcagacttctccgtgttccactttgaacaggtactggaggccacagatagtttttcagaagaaaacaaacttgggcatggtggatttggtgctgtctacaagggccagtttgctgatggattgcagatagcagtcaaaagacttgcttcacattcagggcaaggtttcacagagttcaagaatgaagtccaactcatagccaaactccaacacaggaatctggttaggctcttgggatgctgctctcaagaagaagagaagatattggtctacgaatacttgccaaacaaaagcttagacttctttatatttgatgaaagtagaagagctatgctagattggtccaaacttctagtgataatcgaaggaatagcacatggacttctttacctacataagcactcccggttgcgcgtcatacaccgagatcttaagccaagtaacatcctcttggacagtgagatgaaaccaaaaatctctgattttgggcttgcaaaaatattcagttcaaataacaccgaacggaacactacacaaagagtggtcggcacatatggatatatggctccggagtatgcttccgagggcatcttctcgatcaaatcagacgtcttcagctttggtgttcttgttcttgagatcctcagcgggaaacggaactctggcagcgaccagtgtggggattttatcaatctcattggatatgcatggcaactgtgggatgaggagaggtggattgacatcgtggatgcatcactggtaaacaagagccagtcctcagaaatgatgcgatgtggtcgccatgctaagcactga

SEQ ID NO: 87892 - DNA, 2189 bp, Zea Mays
acaagaataagcagtaacaacaataatctagcctgcctgtccttagcgtagtcatgccatggcgggcgatgcgctcatcgtcatcgtcactagcttcctcctcgcgctgccgtcagcgacggcaataggcaaggtctgcggcaacgccggcaactacacggccaacggcaggtaccggtccaacctcgactccctcgccgcggccctcccagccaacacgtcctcgtcccctcagctcttcgccaacgccaccgccggccaggcccccgacgccgtgtacgcgctcgcgctctgccgcggcgacctgaccggcaacctcaccgggtgcagcgcctgcgtgaacggctcgttgcagtacgcgcggagggcgtgcccctacgccaaggccgccagcgtctacgacgacaactgcctcatcggctactccagcgccaacatcctcgtcccggcctataacgccacccgggacacgagcacgctcttcgactactggaacagcatgaccatcgccggcaacggcacactggtggccgcccacgtcgacgacctgctgacgcagactgcccagcaggctgcctccagcccgaggaggttcgtcacggcctacatggacggctccagcaacgccgtcatcccgacgctctactccctggcgcagtgcacgcccgacctgtcagccggcgactgcctggcctgcctccagcggatcctcggcttgctcaacgccacgacgtcggtgagccttggagggcgggtcctcctgctgcggtgcaacttcaggttcgagaataacatgttcttcgacggcgcacagatgacgcagatcaggccgtcgtccggcgctccggcgccaccaccaccgtctccgacgacaaataaaggatctggggtgaagccttgggtaattgcggtgtctgtagcacctcctgtggcggtagtagcattctgcttcatcctttacaaccgtaggcaaaggagaaggttcagaagaggtagatctaaactacgacaaaagcatcctcgcaacaacttgaaaggagacgaactagattgggaaatggaaacagagctctcagagttttctgtttttgacttccatcagatattggaggctacagataacttctctgaagaaaataaacttggggaaggtgggtttggccccgtttataagggtcagtttcctgatggaactgagatagctgttaagagacttgcttcacattcagggcaaggttttgtagagttcaagaatgaagtacaactcatagcgaaactccaacacacaaatttggttaggctcttgggatgttgctctcagggagaggagaaaattttggtctatgaatacttgccaaacaaaagcttggacttctttatctttgatgaaaacaggaaatcgttactggattggaaaaagcgtctagcgataattgaaggaatagcagaaggacttctctacctgcataagcactcccgtttgcgtgtcattcatcgagatcttaaaccaagtaacattctcctggacagcgaaatgaatcctaaaatttcagactttgggttagcaaaaatatttagctcaaataacatcgaaggaagcactacaaggagagtggttggtacatatggttatatggctcccgagtatgcctctgagggcatcttctctatcaaatctgacgtattcagctttggcgttctcattcttgagatccttagcggaaaaaggaattccggcaaccacgattatggagatttcatcaatattctcggatatgcatggcaattgtatgaagaggcaagatggatggatctcgttgatgcctcattggtaccaatggatcactcatctgaaatcatgaggtgcatgaacattgcattgctgtgtgtacaagagaatgccgctgatcgaccagccatgttggatgttgttgcgatgctaagcaacaaggctaagaccctggctcagccgaaccacccagcgtatttcaatgtacgggtaggaaacgaagaggagtccactgctgctacggcgtcaggcagtatcaatgagatgaccgtatctgtcacaactggtagataatttttgtttgtacaaagtggttactgttgagcttatatatataattatccttttgataatgtgcaatgcagacatatttcattatatggggtatatgtttatttaa

SEQ ID NO: 87893 - DNA, 1788 bp, Zea Mays
cagatattgaacagatataaaccaaggagcagaaataaaacctaaagaagacacaatgtcatagtgtttaacagcactacaatgagcgttattttaagaaatgacaaatctgacagctattcagttgttgctggtacagtggtactacatccatgaaacggcagcaggaaagaaggaataaaaggggtacacgcatacgcatcagatggtgctttttcaattttattgatgcacagcaggggtatatgtatctacacactgcacatatattgtaagcacacaacacaattgccatggtgaccttcaaggcacaccggagcgatccggagctggtgacaccggcatcaccaacacctcaggggagcaagaccctctccgacgttgacagccagatccccctgtggttctacgccacggtgatcgagttcttccgcccccgtaacgctgttgacggccacgacacccaggcggtggtcgatgtcgcggaggccatcagggaggccctggccaaggccctggtgtactactacccaatcgccggccgtctcagggaggtctccaaagggaagctggcggtggagtgcagcggagaaggagtggtgttcgtggatgcccatgccgatgtgcggctagacgagcttggtgagccgctgctgccgccgtacccttgcattgaggagctcgtgtgcgacatcggcgacgccaaagacgttgttggcaggcctctgatgttcatgcaagtgacgaggttcaaatgcggcggatttgcaatcggcgtcagcatatgccacaacatggctgacgccttcggtgtcatccagttcctcaagtgcgtaacggatctcgcgcgaggcgacgagcacccggccgttctgccggtgtgggacagagagcttctgacggcgcgcaacccacccgacctgacaagcttacccttcgtccaggagtcgcacgagtcatcgccggtccagcccatgaccatggacaagatggtcggttgctacttcctcttcggcccgagagagatcgccgcgcttcgaagccaagtgaccgagccggccaccaacttcgagctcatcacggccgccatgtggatgtgccgagcggaagctatagctcttgctcttgggtgcgggagcgccggcagccagcagcagcgagcgtcgtcgtccctgctgatcaccatgaacgttcgagggaaagcgaagctgacaccgcccctcccgcgcgggttctacggcaacggcttcgtcttcgtggaggcggagctgtgcggggcgacgcgctcgctcggtggcacggtcgagctcgtgcagaaggccaagcgcggcatgacggaggagtacgtgaagtcgatggtggatctgttctcgctcggcggggcgccgccgtacgcgcaggggtggacgttcgtggtgtccgacataacgcggatcggggaggacgagttggacctggggtgggcggagcgggtggccggcggcgtgcccattgtcggaaacgacgacgcgaccaagatggttagctaccagatgaggtgcaagaacgcagacgatgaggactgcgtggtagcttccatgtacctaccagagccggccatgaacaagttcaaggagaagatcctcatcttagcaacttcaaagctagcgacttgaaacaaaaccataatgttctagtactccttaccatgtatggtttcggtaataagttatatgcatctccatggggtttttggattgataactttccaagaatacttaattaacgttagtactagttaactttcca

SEQ ID NO: 87894 - DNA, 109 bp, Zea Mays
ttttttatgaagacttcggaactggtaagaactttacttaaggagtacatcagagttatatactcttttgatccaatagtgatggcatatattgtttgattgtttcagc

SEQ ID NO: 87895 - DNA, 129 bp, Zea Mays
gatttaaaagtcctagggcaagtaatggaaaaggagacacgtcatatttttatttccttatttttggtacaaggcagggtggtatggtgtaaagtccaaaaattggtagaagaaaaagaagtatattat

SEQ ID NO: 87896 - DNA, 101 bp, Zea Mays
ccctatttagggtaaagcttcctatccagggtcctatttgcaaaacattaaaacaatacaacttgtttgaaatttttgcctagtgaatgcactctaggtgt

SEQ ID NO: 87897 - DNA, 3866 bp, Zea Mays
ccctagtccctagccaattcttttttgtatcaaaccctctttccccatctcagatccctctcccgtcccagctcgatcctgcctgatggccgccgtaccgtacgccgctgctgccggacgctgaacgaccaggacaaccacctccgacgtccccccgtgtatccacgagatggtcgcggaggcggcgccgtcctcctcggcggcgatctggtcgctccgccgcgacgagatcactttcgaccgcctccacaagttttggagtgccctgtcatctcgtgcacggtacgaactgctaagacttgataaacagacccttattgagcatgctcgcaagaatttgtactgttcaaggtgcaacgggctgcttttggaaagtttcacacaaataatgatgtatgggaagtcactgcatcatgaaggttcgtgtgagccaaggattcaggaagttgaagcagaagttcaggacccttcagttcatccttggggaggcctttcgacaacaaaggatggcatcctaactcttcttgattgcttcataaatgcaaaatcacttcatgagatccagaatgtatttgacaatgcacgtgctagagaacgtgaacgtgaaatgctttaccctgatgcatgtggtggcggtggcagaggatggattagtccagtgatgcctaactatggcaggggccatggaacacgagatacttgtgctttgcatactgcacatctttcttgtgacactctagtggatttttggtcggcactgggtgatgaaactagatcatcacttttaaggatgaaggaagaggacttcattgaaagactcatgcacaggttcgacagcaaaagattctgcagagactgcagaaggaatgttattcgtgaattcaaggaactcaaggaactaaagcgcatgcgaagggaacctcgctgcactagttggttttgtgttgcagataccacatttaactgtgaggtgtttgaggatgctattcttgttgattggcatcaatccttattggagcaagatggaatttaccatcatttcgagtgggctattggaacggatgaaggaaaatctgatattctaaactttgaaaatgtgggcatgattgggcaagtccacaggaaaggccttgatcttgatcagtttgaagactattttgttacactgagagcatgtaggctggatggccgccgtacagaattctgtgtgaaggcccatgccttgaagggccaatcttgtgttcaccggaggctaatcgtgggggatggatttgtgacaattacaaaaggtgaaagtattagaagtttctttgagcatgctgaagaagctgaggaagaggatgaagatgatgtagtggacagagacagcaatgaccctgatggtgatatcgctcatccacaaaagcatgctaagagccctgaacttgcaagagaatttcttctggatgctgctgcagtgatcttcaaagaacaggtcgagaaggctttcagagaaggtacagcgcggcaaaatgcacatagtgtttttgtgtcccttgctctaaaactgttagaagaacgagttcatgttgcttgcaaggaaataattacattggaaaaacagaccaagctacttgaggaagaagagaaagaaaaacgtgaagaagaagagcgcagggataggaggagaacaaaagaaagagaaaagaagaatagaagaaaagagaggctgaaaggaaaagacaaagataaagaaaaaatattggttcggtcaaaaaaaccaggtctttcaacattttctccgagcagccaagcagcaccaagtagtaatgagtctcaggatgttctagacttgagatattcagatagcgaagaggaagacaatgttgtggtcagggaacactatcctgattcttcagctgatcaatcttcaagcaaggatactgatgaacgaagcaatgagcatgaatgcagtgcaacagcagaatttgttccctcagattgtgatggctcattcttatgtgatgagtctaattcatcaagaaacttgagatttagatgggacttcccagaaaaagatgtcagttattggtatgaagattgtcgtgttgattctggagatactcaattgcagtctagggagaggatcagaaataacactagaagttacaacactgtatttaatacaaataaccgaacaagagacaagtacaacccctgcagctgtggccatcaagaagacttcagatatttttccacagcaactagatcaagtagggagacaaagatttccaggaaaacagtggctgagaaacccaggttgcaataccgcaggtgctatcctccagaaagcttcgctgtgtcaaatggacgtgttggtggtacaccaaacaagaacacaggtccaaagcaagtatgggagccaatggatgcaagaaagaagatagggaatgggagaggatcagaaataacaccagaaactactggtgctgctgatggttcagatcaagtggaatgctcaaaggacattagtgaatgtgagaagcttgaggtagtgtgtgaaacacttgctgaaacttgttgtgagatatctgcagaagcctgtaagtcagatcaaccatgtagacaaggtgagaaaaatcagtctgcttgcagcgatggatctaaatgcgtagataagccaaattgctgcttgacaaaggacactgttaggacaacaaatttaaccagttcagacagcttttcgtgtctaagtgagggagatagagacagcagcatgagtagcatgacctcactgagtgctcagaatgtagaatcttcatctacatctgattcagatgagtattcagacaggaacgatagcagcccaggcgatccaccagtgaagaatgtttctcgttcattacttgagatgtgtgcaggaaatggtttcagggagtaccaaccgaaaggcttgaaccctcctaatggcaaccaatttggatttatggtggcacctttacaggaccagatgttgcaccaacagaagatccatgcaccgccgtactcgtcaccatttgtggggttccacaatcaccccttggcagttccaacaaatgggtacttgccatatcctcagccaggtcacttctaccctggccttatgacccctgttggatgtggagtcgctggcagccaatgcgttgactttccaatgcagtacagcaataacattcatccttactcgggccccgaatttggttttctgcctgcaaaaccagttcacaagaccccagtgagcttccatgctgtgccagtgccaccactggccccgctgtgtagaagcgaggtgccagtggtgataaatcaagagaggcagcagggctctgcaccccctaaattcaaacaggcagtgctggtccctgagaacggctgttcagcagaagacaacaccttcaaacagaaaggtgatgacacagacagcacacccttctccttgttccagttcaacctgcctattgcccctcccaccctggcaacatccaaagaagagcaaagtggagcgatgccgtcaatggcactgccaccagctcagataactcgagcccagctgtgctccagggaggagaccaatgtcaaggagtacaaccttttctctgggtgtaacggagtgatgtttcagctcaactagaggcgaagaaaagtgagcagctattcaatatacatacatggtgaacgatttgtattctagtaaaacagaataaagtaggtcgaggtttttactgtgttgccctcgaatatttatttcttttttaattttgatttgttgtgcttcccctccctgtttttttgtgtgtatggaaaactgaaaagacagtgagtggtatagattctgcagttttgacacg

SEQ ID NO: 87898 - DNA, 2184 bp, Zea Mays
agatgcgcatgatgccttcttccctccctcattctcgctcgcccccattccaccttcgacgacccctttctccttctccctcctcaatcacctgcagcgaaaaggaaaagggtgtcagaccgtaactaagagctatttagcaataatacatacatagctataccctctttaggtcaagagggtggagttctccttattcggaggaagagctccatcctcattctacaagaccaaaccaataaatggcctctagcccacagtcctcgccatcatcctccaagaagtcgccgccaccacaagaagcatcagctttggcgccaaaatcatcttcaaagtcaccctcgccaccaaagggtgaatcaaattcatctcccagtcccccatcgaaatcgtccctgtcaccaccgccacgaccaaagaaaagtgctagtacatctagctctaaagatgggaagacgaagaagtcgtcttcatcgtcttcatcgtcggataatacagccgctgtgatcaccggcgtggtgcttggggtggtgggcttcgctctgctcttgtccatcgtggcgtgcgtgtgctgcgccaagaagaagaagaaacgtccgcccccaatgaacatgcccttctacaccgacgagaaaggcaatgtgtattaccccaacgctggtctgccgcctatgtggcagcaatatggcagcaacggcagcatccctccgccgggatggcaccatcacggcggcgggaacccgctgtcgccatcgctgggctcgatggcggcgcccctgagcggcgagatgtactcgtccggcccccacgggcctcccctccccccaccttcgccgaacgtggcgctggggttctccaagagctccttctcgtacgaggagctagcggcagcgacgtcgggcttctcgtcggcgaacctgctggggcagggcgggttcgggtacgtgtacaagggcgtgctcgccggcagcgggaaggaggtggcggtgaagcagctcaagtccgggagcgggcagggggagcgcgagttccaggcggaggtggagatcatcagccgcgtgcaccaccgtcacctggtgtcgctcgtgggctactgcatcgcgggcaaccagcgcatgctcgtctacgagttcgtggccaacaacacgctggagcaccatctgtacgccaaggacggccctgtcatggactggagcacccgcatgaagatcgcgctcggctccgccaagggcctcgcctacctccacgaggactgccatcctcggatcatccaccgcgacatcaaggccgccaacatcctgctggacaacaacttcgaggccatggtggcggacttcgggctggccaagctcacgacggacaccaacacgcacgtctccacgcgcgtcatgggcaccttcggctacctggcgccggagtacgcgtccagcggcaagctcacggacaggtcggacgtcttctccttcggcgtcatgctgctggagctgctcacggggcgccgccccatcgataccaccaactacatggaggacagcctcgtggactgggcgcgcccgctgctgagcgccgcgctggcgggggagacgggcttcgccgagctcgtcgacccccgtctgggaggcgagtactccgtcgtcgaggtggagcgcttggcggcctgcgccgccgccagcacccgccactcggccaagcgccgccccaagatgagccagatcgtgcgcgcgctggagggcgacgcatcgctggaggatctgcaccaggacggcggcaagcccgggcagagcgtgctcttctccggcggtggctccgacaacatctcccgcctaaggcagctcgccttcgacagcggcgactactcggactacagcaccgactcctccaccggtggtggtggccgaccgccgcgcaggccatgatgatttatcaacttgacaacttattactagcacaaattgaagctacagtctatacacacatgcaaattagattgagcgagggagatcgagagagagctcttaactaatttgagggcgatctatagttaagctatggcagcaagtggcgatcgatgtggagatccatggttcatgtaattatattattgctgtgcttgtgatatacacatgcatggatttttactggactggatcctcgatggttatacgtacgtacgtacgcaggatc

SEQ ID NO: 87899 - DNA, 747 bp, Zea Mays
ttaccaatattcttcaaacaataatctcggtgacagaacatgggaggtggaagggacaatcatcatgctgacaaaggatgttatcctccgactgtctatcctccagtacattcaactggatcatatgtatttgcgcctccagttgcatatccatatccgtatgcacaacatggatctatggctccacccccattaggatcatatccatatccttcacctatgtactcttcacatagtggttacccaccatctggatatccaacatataatcaaagtgcttacccatcaatgggtggctatcctggtgctagtttgcatgctactcaacatcatggtaatggatataacatgggggcaacgctcattggtggagcagcagccgccgccgccgctacctatggtgtacatcacttaacccatggccatcaccctcacaatcaccacttaggacattttggcaagtttaaacatcattataatggacactatggcaagttaaagcatggaaaatttgggaaacacattgggttaggaggaaaacatggccttctagggtggaagcatcaccgtcatgggttctttggaggaaaatacaagaggtggaagtagttaaaatatagggaagggtatgcaattggatcctgcaagtatgataactaacatatgtaaaataaaaatggttggttcgtgttaatgctatacatgcatgtaatgtttttataaattacttgttgtatgtgtcattat

SEQ ID NO: 87900 - DNA, 301 bp, Zea Mays
aagggttggagacacatatttatagccctagaggctgcactaccacactaccacaccttctcacacacactacacaacaggattgtcctctagatgctaaagagactacagaggacagtcaaaagcgaatgttgtcctctagatgctaaaggtactacaaaggacagtcaaaaagccactgttgtcctctagatgctaaagtgactacataggacagtcaaaaagcgactgctgtcctctagatgctaaagagactacagaggacagtcaaaagcgactgctgtcctctagatgctcaaga

SEQ ID NO: 87901 - DNA, 467 bp, Zea Mays
tggtttggtattgatcttgcttgatttattccctgctgccatgcggcttataaatagccctatggctaattaacttctcctacaaactctcaactaactcctactttcttggacttatctgctgctaaccaactctccacaattctctcatctcaatcttattctctagccttatcccagctcatctcaatcttattctctagccttatcccagcctggctgttgcctctcgctccctatgatgcccatgacaatgctaaagggactacagaggacagtcaaaaagcgactgttgtcctctagatggtaaagggactacagaggacagtcaaaaagcgactgctgtcctctagatgctaaagagactacagaggacagtcaaaagcgactgctgtcctctagatgctcaagacttattccatcagaatccatgtccgcaagtgttggtacattggtctttcatgccg

SEQ ID NO: 87902 - DNA, 1082 bp, Zea Mays
atgaccatcatgcatcacagcaagcactgcaattctgttgagcaaacccaatcatacaatgtgagccgtttgcaaagtgaaggatattatggaggcgtccggctgctgatggctatctgtaaagttttctacaactattgtgttcaaaataacatcagtttaaaagctgaaaatttcaccttatcatacgatactaatattcctcggcagtctgggctgtctggttcgagcgcgattgtttgtgctgctctaagctgccttcttgacttctataatgtcagacatctaataaaagttgaaatgagacctaatctgattctcaatgctgagaaagagcttgggattgttgctggacttcaggaccgagtggcacaggtttatggtggactagtttatatggattttagccagggtcatatggacaagctgggtcatggcatatacatgccattggatgtcaatctgcttcctcctctatacctcatctatgccgataaccccagtgactctggtccacagcactgttagacaaagatggctgtcaggtgatgattttataacatcacgtatgaaggaagtagcgcagctagcgctcgatggccacaaggctttgctgcagaaggattatactgagctagcgagatttatgaataagaattttgatctgcgaagggagatgtttggagatgatgtacttggtgcattgaacataaagatggtggatgtggcacgcagcgtgggcgcagcgtccaagttcactggcagcggaggcgcagtggtggcgctgtgcccagatggggattcgcaggtggagcgtctccgcaagggatgccaggaggccggctttgtagtacagcaagtgaaagttgccccctcggtgctgacggacgaggagctgtcaagtttattattagcttcctagttgaacgataagaaaggtgaacaagacaacaaaacagttgtgcgacgttccttcatttgtggtgttttgatgtgtgcgatgatgtgtctgtttagttgatattcaatataagagacggtttggaacttcagataatagttagccagctaacagtgattgg

SEQ ID NO: 87903 - DNA, 1128 bp, Zea Mays
atgaccatcatgcatcacagcaagcactgcaattctgttgagcaaacccaatcatacaatgtgagccgtttgcaaagtgaaggatattatggaggcgtccggctgctgatggctatctgtaaagttttctacaactattgtgttcaaaataacatcagtttaaaagctgaaaatttcaccttatcatacgatactaatattcctcggcagtctgggctgtctggttcgagcgcgattgtttgtgctgctctaagctgccttcttgacttctataatgtcagacatctaataaaagttgaaatgagacctaatctgattctcaatgctgagaaagagcttgggattgttgctggacttcaggaccgagtggcacaggtttatggtggactagtttatatggattttagccagggtcatatggacaagctgggtcatggcatatacatgccattggatgtcaatctgcttcctcctctatacctcatctatgccgataaccccagtgactctggcaaggtccacagcactgttagacaaagatggctgtcaggtgatgattttataacatcacgtatgaaggaagtagcgcagctagcgctcgatggccacaaggctttgctgcagaaggattatactgagctagcgagatttatgaataagaattttgatctgcgaagggagatgtttggagatgatgtacttggtgcattgaacataaagatggtggatgtggcacgcagcgtgggcgcagcgtccaagttcactggcagcggaggcgcagtggtggcgctgtgcccagatggggattcgcaggtggagcgtctccgcaagggatgccaggaggccggctttgtagtacagcaagtgaaagttgccccctcggtgctgacggacgaggagctgtcaagtttattattagcttcctagttgaacgataagaaaggtgaacaagacaacaaaacagttgtgcgacgttccttcatttgtggtgttttgatgtgtgcgatgatgtgtctgtttagttgatattcaatataagagacggtttggaacttcagataatagttagccagctaacagtgattggaacgttctcctaaagctagttaggtcccatttggttttagt

SEQ ID NO: 87904 - DNA, 897 bp, Zea Mays
atggcctttgttctgcctctccacgcatcggctgctgccgcgcgtaaatccgtcgtgcccccggtcccgcaaatccgccacgccagctccgcccgctcgattcccctcccagcgcccgcattccccgccgccgtcctcgcggatggaaggttgcgcacacggatggaaggttgcgcacaaggaggacgcagacgagcacagctggaaggttgcgccaaatcgtgcatccgccgcaacgcccacggatggaaggttgcgccaccaaatcgcgcggatggaaggtccacctcctcatcctcctctccccaaatcatgcatccgccgcgccctcaaatcccgcgggcgttcaactctttctcggtcaccgtcaatggaaggtcccagatctcttctcgccattaccgcgcccgccccatcaattcccatatctcttctcgccattctctcggagcatccactgccattcatggacggcagacgattccatcctctcggttcatgaaggtgctcttcctgcgcctcggcttctccggcgtcgcggacatgaagatccaccgctccgagtggggcggggccctggtcgcgccgcgcaggtccgggtcgctgtcggcgcgcatcagcgccgcgctgtccggtggcctggtgctggcgccgccggcggtggaggagaaggtggaggtcaactccgccatattctccaagggcccgccggtgccactcccggttcagaagatggccacgcacatcgacaccaccgaggtgagcaggggccccgacgacctgccgggctactgggtcgtcaccggcgccaagctctgcatggaaggcggcaaggtcgccctcaaggtcaagtactcgttgctcatcgcagtgcaagaggaccctgaaggacactga

SEQ ID NO: 87905 - DNA, 93 bp, Zea Mays
agcttaaaacctctctgcagtatcaaccaccggccgtgcctccacacgcttcctatcggaaaggtaagggccccgtttcaccgcatcattcaa

SEQ ID NO: 87906 - DNA, 789 bp, Zea Mays
atgtatcagcaacaccgtcactgcgccagttcctcttgttattgcgttgatggtgaggtcgaaggtggtgatgccatcctttcctctcagctagaagccttgcttgccaatggaggagcattcctgtcatctacttcgtcgctaccgttaccgccgttgagctacatgcctcactatttttcccggcaggaccctgccattgttccttcacccatggccagccagctgcacgccatcacccacttgtccccatcgtcgtcgtctggcatggcttcagcaacgtccccgtcgtttcgccgggcgttgagcacgggtgacctcatcgtccaggaggaccgggaccgggacgaggagcagagggcggtggtggcggcggcaacaaggtacagcgcggaagagcggcgggagcgcattgacaagtaccggagcaagcgcaaccaacgcaacttccaaaagaagatcacgtatgcctgccggaagacgctcgcagacagtcgtccccgggtgaagggccgcttcgcgcgcaacggcggcgactacacggaggcggatgcagttgcagaccaccatgtcctaggagcagcacatcagtcggagtcagagtcagagtcgccagcaacagcagccacgccggagtggtggccggcagtgcaggaggagttgcctgccgttgccgctgccggcatcaacctagcagagttctgtgccgacgacgacgagatgctggcagcctaccttggagtctcctccattagtatagctgatcatcactacagctgtcagccgtag

SEQ ID NO: 87907 - DNA, 276 bp, Zea Mays
tcacccgaggggacgaagacgcggccgatcgacgatgcagtgccgcccgccccgttgcgcgcaccctggcgacgaattcggtccatgaactgccgcccacgaaccaatagtgcattcgatagtgggcaaagctccctcgtggttcacctcaggcgctctctggttgcttatcggtggcgcgaggtcggatcaatggtggccgcaacactccatctctcagctctcccatgtggcgatactgttctcgatgtttgcaacgcggaagccccgatggct

SEQ ID NO: 87908 - DNA, 2969 bp, Zea Mays
ttttttgatttctatattttttctttagaattccttcaatccaaacggatctaaacatattttcactcgtccgatcaggcgattcagaggacgacatcgctagcacgtggtgtctgttccggctaaaatgaaaggtagtggcaaaattgtggaaagcaccagggaagattttccgcggtggggaaatatcaagaatacccctggcatccgcagccctaacaaatcaaccccgcttcgtcttcccctcctccttcccttcttcccctcccttcccggccgccgcggtgcgcgcccgcctccttccgtccggaggcaactactcgcttctctctactctcggggaagcctgagctgattcctcctcgtgctctctcgtgggaagcatggcggatgggggtattgtggtagccatttgccaatatggtggagaattcacttctggccccaatggtaatttgacatacaaaggaggcgaggcgcatgctgttgatgttactcgtgacatgccactggagaacttcaaggatgaggtgtccaaggtgttccatgttgacgtcactgacatgtcattgaagtacttccttccgaataattacagaacgctaatcacaatatcatgtgatcgagatttacaaaggatggttgattttactaccagtgccacacaagtggaagttttcttgattagtagagtagaaaacaggagtattgttacttactctggagcttctgcaagtaagcctggatctaatgctcctggtgataaaaggaaaaggccaccttccaaaaacaaggtatccaaaagtaacaagaagactccaactcccagtgctcctggcacttcagtccaacctagtgctaataatgtgaaacagccaagaccaatagctattgaaaccaacgacaacagggtattccaactggaatttggaagtgatgttgcctttgccaccccagctggaggtgcttctactgcgccagacattctggatcagcaaaaccttgctcttgttgacactgcacatcgggaaccaattggccatttcgatgattcaggtgactcgtatgttggttctgagatcactgtagatcctcagcatggactcgacaatcctgttatgttttgggatgacattattaaaggtgttggtcaagaatttgataatgtgaaggatttccgtgctcaattgtgcaaatatgccattgggaaaggatttgcgtaccggttcattaaaaatgaaactactcgtgtcacggtaaaatgtgttgcagagggctgcacatggcgaatgcatgcatccgagtcatctcgtaacaagaaatttgtgatcaagaaaatgacagatgagcatacatgtggaggaggaaatggagaaggtcagcgtcgagcgacaagacaatggctgaccactgttattaaggagaagctgcatgataatccgatgttgaagccaaaggaccttgtcaaggaaatatatgaacaatatggagttacactgacttattcacaggtctggcgaggtaaagaagtagcacagaaggaactgtatcatgctatcagggagacttacagccatttgccctggtattgtgagaggcttacagagtccaacccagggagtattgctttgttatctccaatggtggatacaaagttccgtcgcttttttgttgcatttcatgcttctttgcatggttttgcaaatgggtgcaggcccctattgtttcttgacaaggttccactgaaagcaacaaatgagtacaagttgctggtggccgctgcagtcgatgctgacgatgctgtctttccagtggcatttagcgtcgtcgaggatgaaaactatgaaagttgggtttggttcttaatgcagctgaaattccctgtccaaaatcacagctacgcttacaatgccatgacattcttgtccagtggacagaagggtctggatgctgccgtttctcaagtttttgaagatagccatcatgccttctgtttgcatcatatcatggaggaattcaaaggagagctgagaaagggaccatggtcacaacaaataagagaggggatgattgaggattttactcgcgccgctcaagcatgtagtattgaggattttaacacgtcaatcgagagcattaggaacatatccactgaagctgctgagtggatcatagcaagcaagcctgagcattggtccgacgccattttcagaggctgtcgatacgaccatttctcctcaaacattgttgatgccttcaataactggataccaaccaagaaggagggttcaattgtgctgatggttgactcactgagaacaaaaataatggagataatagaaacaaggcgtgaggcttgcaaggcgtggtcaggacctttgacgccttccatggaattcaaagcacaggaggaggtgacgaaggctggtaaaatgactgttctgtgctcttccgaaaccgtgtttgaagtgcgaggcaatgcgatctttgtcgttaatctcgcaaattgggaatgcacctgccggaggtggcagctttctggcctcccgtgcctgcatgctgtcgctgtgttcaaccggatcgggcgatctttctacgactactgctccaagtttttcagaatagagagctaccatatgacttactcaggaacgatcttcccaatacctgatatggacactgttgattttagtgccggtgcaaatctaatcccgcctcccaagccacggacgtcggataaaccaagaaggaagcggtttaaccccaacaagatccccacggtaatacggctctgcagcaggtgcaagcaagcaggccacaacaaggcaacctgtgaagctattttgtagacaaaaaagtagctgctgcatctggggtttgtattttatagcaggtacctttttacgttttaactttgacttctcgtgctatatatatttttttcctgaagataatattttgaatcatgg

SEQ ID NO: 87909 - DNA, 3478 bp, Zea Mays
ttttttgatttctatattttttctttagaattccttcaatccaaacggatctaaacatattttcactcgtccgatcaggcgattcagaggacgacatcgctagcacgtggtgtctgttccggctaaaatgaaaggtagtggcaaaattgtggaaagcaccagggaagattttccgcggtggggaaatatcaagaatacccctggcatccgcagccctaacaaatcaaccccgcttcgtcttcccctcctccttcccttcttcccctcccttcccggccgccgcggtgcgcgcccgcctccttccgtccggaggcaactactcgcttctctctactctcggggaagcctgagctgattcctcctcgtgctctctcgtgggaagcatggcggatgggggtattgtggtagccatttgccaatatggtggagaattcacttctggccccaatggtaatttgacatacaaaggaggcgaggcgcatgctgttgatgttactcgtgacatgccactggagaacttcaaggatgaggtgtccaaggtgttccatgttgacgtcactgacatgtcattgaagtacttccttccgaataattacagaacgctaatcacaatatcatgtgatcgagatttacaaaggatggttgattttactaccagtgccacacaagtggaagttttcttgattagtagagtagaaaacaggagtattgttacttactctggagcttctgcaagtaagcctggatctaatgctcctggtgataaaaggaaaaggccaccttccaaaaacaaggtatccaaaagtaacaagaagactccaactcccagtgctcctggcacttcagtccaacctagtgctaataatgtgaaacagccaagaccaatagctattgaaaccaacgacaacagggtattccaactggaatttggaagtgatgttgcctttgccaccccagctggaggtgcttctactgcgccagacattctggatcagcaaaaccttgctcttgttgacactgcacatcgggaaccaattggccatttcgatgattcaggtgactcgtatgttggttctgagatcactgtagatcctcagcatggactcgacaatcctgttatgttttgggatgacattattaaaggtgttggtcaagaatttgataatgtgaaggatttccgtgctcaattgtgcaaatatgccattgggaaaggatttgcgtaccggttcattaaaaatgaaactactcgtgtcacggtaaaatgtgttgcagagggctgcacatggcgaatgcatgcatccgagtcatctcgtaacaagaaatttgtgatcaagaaaatgacagatgagcatacatgtggaggaggaaatggagaaggtcagcgtcgagcgacaagacaatggctgaccactgttattaaggagaagctgcatgataatccgatgttgaagccaaaggaccttgtcaaggaaatatatgaacaatatggagttacactgacttattcacaggtctggcgaggtaaagaagtagcacagaaggaactgtatcatgctatcagggagacttacagccatttgccctggtattgtgagaggcttacagagtccaacccagggagtattgctttgttatctccaatggtggatacaaagttccgtcgcttttttgttgcatttcatgcttctttgcatggttttgcaaatgggtgcaggcccctattgtttcttgacaaggttccactgaaagcaacaaatgagtacaagttgctggtggccgctgcagtcgatgctgacgatgctgtctttccagtggcatttagcgtcgtcgaggatgaaaactatgaaagttgggtttggttcttaatgcagctgaaattccctgtccaaaatcacagctacgcttacaatgccatgacattcttgtccagtggacagaagggtctggatgctgccgtttctcaagtttttgaagatagccatcatgccttctgtttgcatcatatcatggaggaattcaaaggagagctgagaaagggaccatggtcacaacaaataagagaggggatgattgaggattttactcgcgccgctcaagcatgtagtattgaggattttaacacgtcaatcgagagcattaggaacatatccactgaagctgctgagtggatcatagcaagcaagcctgagcattggtccgacgccattttcagaggctgtcgatacgaccatttctcctcaaacattgttgatgccttcaataactggataccaaccaagaaggagggttcaattgtgctgatggttgactcactgagaacaaaaataatggagataatagaaacaaggcgtgaggcttgcaaggcgtggtcaggacctttgacgccttccatggaattcaaagcacaggaggaggtgacgaaggctggtaaaatgactgttctgtgctcttccgaaaccgtgtttgaagtgcgaggcaatgcgatctttgtcgttaatctcgcaaattgggaatgcacctgccggaggtggcagctttctggcctcccgtgcctgcatgctgtcgctgtgttcaaccggatcgggcgatctttctacgactactgctccaagtttttcagaatagagagctaccatatgacttactcaggaacgatcttcccaatacctgatatggacactgttgattttagtgccggtgcaaatctaatcccgcctcccaagccacggacgtcggataaaccaagaaggaagcggtttaaccccaacaagatccccacggtaatacggctctgcagcaggtgcaagcaagcaggccacaacaaggcaacctgtgaagctattttgtagacaaaaaagtagctgctgcatctggggtttgtattttatagcagcgtaaaggatctcaagtttttgctggagcgctatggctggtgctgcctgctttctgcagcttcttatctggaaaggggaaattgggtatcaggcatacatatgattccctgtgtttatgtgggagccgtagcttaaatcttttgtggagtgggtggatgaacccaagtgttagggatctgtctgctagtacagcatagattgttaccagttcgacaactctaggtagtccgtagtcttatcgtctagatgaaaccattagctgtttattctcatgtagatcgatcttcgcacgtgccatggtggttgctttcgtaatactatctccgttctcaaatatttatcgtccgttagtttatttttaaactaaaacatgacaaaataaaaaaaaacggagggagtatcgttttgtacaactttctttgtgtgcgctcctctcaactcttaggtagaggctgccagtcaaaggtgcaaatagtatggctagctattttgccaaacggaccgaactcgtaactccgaagagaggaggctccagcgattcggtcggtattcttgatccaggtgttcagggtataataattaaa

SEQ ID NO: 87910 - DNA, 738 bp, Zea Mays
atggatgataatggtgatcaggttataaagaagcaaacaagcgctgttaatagcagttcctcaccatctaatcaagagaatggtggccctgttcctatgcagacaacaagtttttctttgcttgcatctctttcgtcagtgggggtaaccaattcccctcccaggacagaagggcttagtgcaaccttgtctcatcttccacagtccttgatcggctgtcattctgtgcatcttgctggtatcaatccagagcatcaaaatgagaagccagagcagcagtgcatagtagctagtgaggaaactacgcctaaaaaacaaattgtaccaatacctgctatcaaccatcccaaggctgtttcagtgcaaggtgatgggctgaatttgaagcagtatacagcagaaagtgaagatgctatgatcgtctctgatatatgtgctttggatgtgaccatccaacctcatattaacaacttttcagagcagggaagtgatatgatacaggagcaagtcggaacaggcgctgggacggttatagccgaaggtgtcaacaacgatgtgtttgcagcggctactaccactatggaaaaacttgaagtctcaaaggctgaccagaggattgaagtatccatccacgagtggtttgaggtcggcgtccgtgttgacagcggcagcggtattgggaggatcaacacgattgttgcgagatctgaaattttggccagggatgggacgttgtga

SEQ ID NO: 87911 - DNA, 507 bp, Zea Mays
atgctgcatcgtggaatcatttccttccgtcgttccgggaggcgcctgatgcagcagggccgagctgtcgtcaggctcaggcagcaccaaacggtagttcctgacagcagcaaccaccacctgcgaggctcttgtcagagggctccctcccactctctggtacctgtaaaccttcctaccggcgacgaacagcacgagtcccgacagcatgagcagggtcgggatcgcgaacccgactccccacccaacgttgtcctgcacccagacgaccaccgtcgcggacagcagggagccgatgttgatggagaagtagtaccagttgaagaaggagcccttggcccgccgctccacggggtcagacgcgtcgaactggtcggcaccgagcgcgcagacgcacggcttgattccgccggtgccgagagcggcgaggtagaggcccaggtacgcgaagaggcggtgggcgctacggctgtaggacgcgcccatgagcagcgggagaagagctga

SEQ ID NO: 87912 - DNA, 1148 bp, Zea Mays
caaaatatctctcccctggcggcgcggcggtggaggcatctccagcttgctcgaccctggctgccgctgcttgtaggctgcgcatccggcacgtgttactcctccgtggttcttcaagatccagaaggctcacctgggcttcgtcaccaccgtttaggcccacctgcactcatcctctgctccaagatccagaaggaactctgcgagggcctctttcgacggcaggcgtagaagatcccggtggctctggtttcatatttgctcggtcctgaggagaggtctgcactgtttatcaggaaaacttgagcttctgtttggatctatgtgtcaggtgccgtttcaagatctcaacccagccagtggtttagtgaagttcgaaacaaatagaatgtgtagatgtagataaggtggctaaagttgtccaaacataaaaacacccgattcggaagtcttagcgaagtatatagtacgctactgcgtgggggggatgtggacatgtggtggttgctttgcttcaccttgacggcttgacccatgagccatgatcaattcagcaaagaaacacggtttccgttatgcgaaaaggcgggagggggaagtcgacccatctgcggaagcacgtacctaaaatccagaagcccgccgcacgctctccggttccttgctccctttacgtacgtcgtttcagagcaggctctcaaccttcatcccgaaggtttgcaatggagaggagaggagaggtgggagagaggaagagaaacatttgcaatgaagaggagacaagagatgtcagagagaggaccaagggacatacccagcggccttgccggggcgggcccagggctgaagttattgcttcacggatcgtcctgcgctgaatcagttacagtgcactactattctctacagaaacaatccccacggactaggacggtctccaacaacgttttctatgtttatccctactttacattcttctataaaagatttttcatcctctatatctcctttctctccaacaacgtcataaatcacatactctataagcaaatacttatattagagacatttttttacatacgtatttgtcatattctcaaatgtattatacatattttagttttgttaaaccagttgtttaaagtatt

SEQ ID NO: 87913 - DNA, 553 bp, Zea Mays
cccgcttgtttcacttgctcgccttcacccctcgccgccgccgccgtcgccgtcgcaagcgatgatgctcgacatcaacttgttccgcaccgacaagggcggcaaccctgaccttattcgtgagtcccagcgcagtcagttcgcctccgtcgagctcgttgacgaggtcatcgccctcgacaaggcatggcgcgaaaggcagttcgagctagataagatccggcaggagctcaacgctaccagcaagaagatcggcaagctcaaagccatacgtaccagcaagcaagaagaggaagcgaagaagctcatggagagcacagacgaaattaagaaaaggttggcagccaaagaagttgaggtgcaggaggccaagagcaccctcgacgccaaggtcacgacgattggcaacatcgtgcatgagtctgtgccagtcagcgatgacgaggtaaacaataaaattgtatgagcatttggagagaagagagtagaggataatttgaagaaccacgtggacctttgcaggatgcttgatattgtcgcattggaaaagggt

SEQ ID NO: 87914 - DNA, 615 bp, Zea Mays
atgtcgcgcgttgttcgctgccctgtagcatgggccccgcgtgacagttccttcttcctagtcgtgttctcccacgactctgctctatagggattccatttaggccatggccaagctgaccccacaccgccggactctccgcctctgcttgcgcacgtgaagaaagaacgccaccgcgtcgtcctcctctgggcgacacgggcggctcctccatcgatcccactcaactccacccgccgcacaggtcttcacttcgccgtcgccggagcagctcgccgaaagtccggcgagcagcgaggaggacagcggcgggaccgttttttccctcatttccctccccttcccgtctcctgctcccttcttccatcccctccactcctccctcctggcctgtaagccgttgggaaggctggatcggtgtgctgggtggctagatccgctgtgctgggtggctagatccgctcttcgcccggcgtggctggcccgcggcggctgcgcccgcacactcgcgtcggcggcggtcggatctggtggcctctcggctggagcacggcgcaccagactggcttctgaaaaaatatcccaaacagcgcaattaaatttttagtattataa

SEQ ID NO: 87915 - DNA, 876 bp, Zea Mays
atgtcgcgcgttgttcgctgccctgtagcatgggccccgcgtgacagttccttcttcctagtcgtgttctcccacgactctgctctatagggattccatttaggccatggccaagctgaccccacaccgccggactctccgcctctgcttgcgcacgtgtgagtgtcagtcaccgtcgtttggatcccgctcgttggagccgccgttttgcttcaaccgcaatcgtgcgtagtagctgtgcgtgctgtctgcaaacgtggagaccgtgcgggggccgaggaatccttcgcattagctgagccgccatcgccaggactcaccctgcattcaccctcgatgaatgagacacgtcctccatgaccctctactgtttctgttctcttttgcatctgactgtgtttgattttgtccacaggaagaaagaacgccaccgcgtcgtcctcctctgggcgacacgggcggctcctccatcgatcccactcaactccacccgccgcacaggtcttcacttcgccgtcgccggagcagctcgccgaaagtccggcgagcagcgaggaggacagcggcgggaccgttttttccctcatttccctccccttcccgtctcctgctcccttcttccatcccctccactcctccctcctggcctgtaagccgttgggaaggctggatcggtgtgctgggtggctagatccgctgtgctgggtggctagatccgctcttcgcccggcgtggctggcccgcggcggctgcgcccgcacactcgcgtcggcggcggtcggatctggtggcctctcggctggagcacggcgcaccagactggcttctgaaaaaatatcccaaacagcgcaattaaatttttagtattataatcca

SEQ ID NO: 87916 - DNA, 916 bp, Zea Mays
caaacacattgatatatgttcatatcacaaattcacataagtccaaatatataagttcacaaattcacataagtccaaatacataagttcacaaattcacacaggttcacatccatagttcacaagttcaaacacacaagttcaaacattagctccatcgctctcgatcaggacatcggattgttgttcgtagatccaccactggaattgagacatctgtccgcaaagtcaacgtgagggggaggagtcacttgatgagagccggaatcctacaaaataaaccaaaatttctcataaatacacaactgacattaaatcacatgtacacaaagatataggaaagcatgataaacacaaaaatgtggcttccatatttgtgcataaacatgaacatgagagtgaaaacaaacttcatttcaagacgcagcaccgtgttatttaaaatgatgcatcgtgcaaagcatccgcgatgttaactgtccaagaaactactttggaaattcagacttagacgttattccaaatctgaaaattcacaattcaaccacctaacagtccaaagcatgtcacaacaaaacagctctcacaacactaagctaatgagagatcaagtgcaagtaaactgctcctaagctaaagatgctttggccatgagaactatgtatcaaagttgggccttgagttaaagggcaactttacctttaaatgatggacaaaagatgagaggcttgactggagaaaaacaatctcaaatgaaacactaaagttgcccaaaagtggatttcaagatctagctatgttttgctaatagtccatatatcaaagttgtggagcttggaaaagttaacaagtttcttatttggagatttccaagctatgtgcaaaagtttggagtaaattgcaaaagttcagaatt

SEQ ID NO: 87917 - DNA, 1332 bp, Zea Mays
gtgctaattaccttgtactgatactggagcataggtacggtagcacgcacgatgtcgcttctcctgggcatgctcctcgcgatgcacctgttccaacggcgcgacgccgccgcggcagagagggtcccggcagtgatcgtgttcggcgactcgaccgcggacacgggcaacaacaacttcatccagacactcctccggggcaactacacgccttacggccgggacttcgccggcggggctgccaccgggcgcttctccaacggccgcctcgccgcagacttcgtctcccaggggctcggcctgcctccctctgtgccagcgtacctcgaccctggccacagcatccaccagctcgcgtcgggtgtcagcttcgcctcggctggcagtgggctcgacgatataacggggcaaatcttttcagcagtgactttgacgcagcagatagagcacttcaaggagtacaaagagaagctccggcgtgggatgggggccgccgccgcgaaccacatcgtcggtcgtgcactctacctcttcagcgtgggcgccagcgacttcctgggcaactacctcctgttccccatcaggcgctaccgcttcaccctgccagagtacgaggcgtacctcgccggcgcggccgaggcggcggtgcgcgccgtgtacgcgctcggcgcgaggcgggtccacctcccggggctgccgccgctggggtgcctcccgctgcagcggaccgtcaaccgcgccagccccggggactgcaacaggtggcacaacatggtggcacggagattcaaccgcgggctcagggcgatggtgaccaggctcaaccgggagctgccgggggctcaggtggtgtacatcgacgtctaccgcctcttgtcgaacatgatcgccaggccatcggcgtatggtttcgagaattcagtgcttggatgctgcggcaccggatacttcgagacaggagtgctgtgcagcttggacaatgcactcacatgccaggatgcggataaatacgtcttctttgatgcggtccatccatcacagagagcctacaagatcatagccaacgcaattgtacatgctgcgtcagcgtcacacagacccgagtagtagtgccattatctcgttccggtgaacttgaatttcatacatatgcacgggttgtactcattctaacaatctaatgttcattcaatgtaagaagtaagcatacgggttatgacgtattttgtaccgttgtcctgactagtacataacacatatataccacccacttatgtgtaaaatactacgtctaccaaatatcaattcatgttaatggtttacatcactgct

SEQ ID NO: 87918 - DNA, 78 bp, Zea Mays
tgacttttgaggtgactgggcagcaacatattttaaaacatcaaagaaagtatgttgtcatatcgaagcagccttctg

SEQ ID NO: 87919 - DNA, 415 bp, Zea Mays
atggctcaagcgtcgagctctttctctattgttctgttgttcctcgcactagtacttgtggttgaggtttctgctggaaccgcaaatgaagagctttacagacctgctggtgcagaaggctctgtccccatagaacaatgtccagagaaatgtgactaccggtgctctgctacatcgtacaagaagccatgccttttcttctgcaactactgctgcaacaagtgcttgtgcgtcccgtccggcacatacggcaacaaggaagagtgcccgtgctacgacaacatgaagaccaagcaaggcggccccaaatgcccgtaaaatgaatattagaggcctggatcattcaaaaagacaactaaaaatgaaaccatgtactccctccgttcccatataaaattcgttttggctactttgt

SEQ ID NO: 87920 - DNA, 423 bp, Zea Mays
gtgttggtattttcagctgctcaatcaggccgatctagtaggaggactatgagttcaaatgaggattctgaaccagaatgtggacggcttgtcggtactgttaggcgccacatgcctattgatacacgtgatcctgttggagctgttatccatttttatcttggtgattcatttgattctaactggctcttgcccgttgctggattgctgctgttcctaatatgcctttttggtgctttgactgctttctcactatctattgttttctcactggcatgcaagtaagtaatggtgtttctcaggtgtagagtttggatgcttgtgctcataatatcatgtccaatgttttgcttctctgcttattggttccatggccacaatattaaagacaataattctgtcattagtcagaaaaaagaatga

SEQ ID NO: 87921 - DNA, 643 bp, Zea Mays
agatttggctaatccagatcttttgttgcctccactctgatggaatatggttttggatcctgaaggaggaagcgggtcctaagggaggaagcagagcaattggagcttgaactggagatgcgtagagagttaagggagtagatgttgcaactcttgtggcctacactcgagctgaagccagattagtgatgagggggcaattgtccttgctgctaagcatgcagaaacaatggccgggaaaccattgttgtatggaataggtaccctgttggtcatgccgctgaggacactgtatggagtgggttgtgtttttggcgcacggtggttcctctacaacatgacaagcatatctccatcgctgcaaattgagtttgtaagtggtccgaaacacctaggtagctactagctattgagtatttaggagtcaatgcttaatgatatttacttaatgcttaattgcttatcgaagtaagaaccctgttttttgtattgacatggtggtgctctttagaagagaagccaggggtaaaaaacaattagttctgcggattttattttatttcgatcagttgtgagagtttcttacaattggatgacattgctttgtagaaagaaaatacaaggtattttttagtaggaaaga

SEQ ID NO: 87922 - DNA, 1354 bp, Zea Mays
atagcgttcgtctctctcacgcgccctctccttgctagcgcgcagccgcgcccctctacacggccatggccaccacgccgagccattccgcgcgccatgccatccggatctcccgctcccgctctggctcatctgcgccaccgccacatcgcttctctctccggagctcgccatggatgttggccaccgctgcgtgctcgccccggccttcatcctcaaagtcatcgaccccgcctggagccctggactcgccaagccacgacctcgtcgtggccccctgctgcagctcacctccatggccgccggagttttcttgtcgttgcatcctcggtcgcccccacctctgctcctctggcgctcggctcctggtgcggatctcctggccggcacacgacttccagctcgtcaagctcgtccccatggcacccctctcggatctcgccctagtcgcccgccattcccagcgcctcggcctcctagctcggaccgcgcgtctctgctccatctcccacggcgcgcacctcaagctcgcccggtagtcgtgacctcgttgtggagcttccgtgccggcgcgcgcccatctccctgcgctcgtccattgccaccgtcacaccgatccgtgcccctctgcttcgttcgctagagcttgtacgtgccctggactccatggcgttctcgcctccatgctagccccagctgagtcctttttcccatcgagctcgccctcaactctacagcgccgtcgagcccgtcgtcgccatggctgcagcttttctcttgtcgtcgtgaagactccacctgcgccgtgcagcagcgcgccccttgccgagcttgtggtcgtggtcaatcctgccattcctgttgtgcctcgctttctccatgttcgatcaaatgtcgaaccaggaatccacgacatcgttcatcctcgctgtggaaccctcacgcccgcctcaccatgacgcgtgtcgtcgtctttgatctcagtagctcttccaatacgcacctggacgtgcttcgcctcctcgtggtcagcaccatttgggccatgagggcggtagatctcgacactgcttcacatttctattttagaggttggtgtggtggatggtttttgccctctcgtcgtgttcgtgataatcatcgatcgtcgcaggtttgagagaaattagcgaaaggtgtggagaaggaagcgaagctgcacaacacccgtatgatgttcgacgacaagcccgagtcaggatttatcagcattcttacgagtattgagtcacgtttgatgctggtgagctgatttataatttttgtaagtttatctgatgattggattaactagacttattagtcgtaataattc

SEQ ID NO: 87923 - DNA, 1394 bp, Zea Mays
ctcctccccttcagatttttttggccgccgcccccttccgatatttggcaccgtcgagcaggtctctggtgtcttctccatggcgttcgtctctctcacgcgccctctccttgctagcgtgggcagccgcgcccctctgctcggccatggccaccgcgctgagcccctccgcgcgccatgccgtccggatctcccgctcccgctcatctgcgccaccgctgcatcgcttctctggagctcgccatggacgttggccacagctgcgtgctcgccccgaccttcatccccaacaccgttgaccctgcctggactcgccaagccgcgacttcgccttggccccctgctgcagctcgcctcaatggccgccggagttttcttgtcgttgcgtcctcggccgcccccacctctgctcctccctcactcggctcgcggatctcctggccggtgcacaactaccagcccatcaagctcatccccatggcacccagctcggatctcgccctggtcgcccgccgttcccagcgtcgctgcctcccagctcggaccacctgtctctgctccatctcccatggcgcgcccctcaagctcgcccggtagtcgcgacctcgctgtggaacttccgtgccggcgcgcgcccatctccctgcgctcatccattgccgacgtcacaccgatccatgcccctctgcttcgttcgctagagctcgtccgtgccccggactccatggaattcttgcctccttgctagccccagccgagtcctttttcccatcgagctcgccctcaactctacagcgccatcgagcccatcgtcgccgtggctgcagctttgctcttgttgtcgtgaagactccaccagcgccctgcagcagcgcgcccctcgccgagctcgtggtcatggtcaatcctgccactttctctatgttcgatcaaatgtcgaaccaggaaaccatatgtggaaccctcacgtccgcctcgccatgacgcatgtcgttgtctttgatctcagtacctcttccgatacgcacctggccgtgctttgcctcctcgtggtcagcaccatttgggccatgagggcggtagatctcgacactgcttcacatgtctgttttagaggtttctgtcgtggatggttttcgccctctcgtcgtgttcgtgatcatcgtcgatcgtcgttgttttgagagaaattaccggaaggtgtggagtaggaagcgaagctgcacaacacccgtatgatgttcgacgacaagcccgagccaggatttatctgcattcttacgagtattgagtcacgtttgatgctgatgagctgatttataatttttgtaagtttatctgatgattggattaactagacttactagtcttaataattctcgtgtttagcaggc

SEQ ID NO: 87924 - DNA, 112 bp, Zea Mays
ttaatttatgactgatttcgttgaagccagactgattagaaattattcgagttcggctctaattacctttatctgctttaaatgatttactaccaaataactcctgattatc

SEQ ID NO: 87925 - DNA, 438 bp, Zea Mays
atggaggccatgtccgccatgggagcagggaaatgggccccgacctgcttgagctcgcaggggggagccggctggagaccgacacagggagcatggggccaagcgccatgggagaaggtccgagtgggggaagcgctggcgagctcctggcaggggttagctcggccacggcaagagcagggaagagggggcgcgcatccgggtgtaggagagttggagagggagtcgacggtcatggccaggcccctagagagcacgcaggataagggccttgctggaggggaggtgagtccggccaccactccgactgctgcgtccaagaagtctgaggttgaagatgccagggcgggggagaaaatggtaggtacgccctgctcgatgctcgtccataggaggaacagggtgggaattctgggcacacacgcccgccctagatag

SEQ ID NO: 87926 - DNA, 910 bp, Zea Mays
gttctcgctcgcgtgcgctcggttaccggaaccaccgcgccaccgcgccgtgtcgtggtggggatttttccgccgccaccaggaaacccaccggcagccgcaatcggggggcaatatctggttggggtgcttcgtagggttgcaccgagtcttgttaatgcatctacgggcgcactagatggttgggactgctcaccggagctctgcgggcagctccgggccgcatcggtgccatggtcaggactcctcacttctcaaattaccgttaaattttccctttcgcgctcaccagggcccctgctacgattagttctctttagatcggggtttgttgcactaatgcggtgtatgggcgtgcccagtatggccgccgccgcggtaagcgcgcgttccgccgcttgcgcactggcgtggggtggaagacggcgtatgggctgtccgatctttgacgagcgcgtaagattagttcgtgttgtaaggagcctgggccatcggatcggaattgaagggatacgattcgatcgtggggataccgattcgggggcttaatttcgaccattgattgtctatccaatggtttgggttagatatgggcgtggagtgttgcggtacatggatcccggatcaaacggttatcatcgcgtaccggttcatgaagagataatctaatttacaccgccagtttctgatctgacggtgctcgttgtccgataccctttcggctagccatctttacataagagccctcggaggaaatgaaattcagcccacagtccaggcggctaatgctctgtgtcttagagattctcacactagggcccctgcggatttctggattcatgcacccagtcctgggagttagaaaattagataaatggatttaaaaatagattttaagatgacaataata

SEQ ID NO: 87927 - DNA, 464 bp, Zea Mays
agatgccgacggtaaacaccaacaagtttattgagttctatgatgtaagagcagcagaggctgctcttcggtcactgaataaaagtgagatagctggaaaacgaatcaagttggaaccaagtcgtcctggtggaacacgcagaaacttgatgcagcagcttggtcacgatttggaccaagaagagccaagaacctacatacattctcatgttggctcacctattgctaactctcctccaggggcatgggctcaatacagtagtccaacagatagcaatatgctgcaagctttcaccagatctccaactggaaatggaatgagtcctatcagaattccttccctgatttcaaatgctccaaagattgctcctattggcaaggatagcaaccggtctaagtatgatcaagtgttttcaaatggtaaccagtccctgggagctgcatttcagcactcccactcatac

SEQ ID NO: 87928 - DNA, 116 bp, Zea Mays
atggacatatgttgtatctccgtaaaatttcacgattttttaaggctatttatgtattattaatttcttgtcatagaaaatcattaaaatacaattaaaccattaaaatattgcag

SEQ ID NO: 87929 - DNA, 1860 bp, Zea Mays
gcaattagcctacatctttcgcggattctgtagttttcccagctagagattagcagagcggcatgaataactcaaacacaggtgttgcagtttccgtcatcgaaattaaaggatatacatacatatctctttgttcctgcagcaagctgcaaagagaacgcttgttggtagaacaaagtatatgcccccatgacaccgagtccaagcagcaggctcgagcatgagctggagaagcccccacatccgcatgggctggatgcccatttcatgaggaggcttgtgagccggagctgggaggaatccaggctgctatggcgccttgccttcccggcgctcctgacggaggtgtttcagttctccatcggtttcgtcaccaccgccttcgttgggcacctcggagaggtggagctcgcggctgtcagcgtcgtggagaacatcttggattcctctgcctatggggtcctgtttggcatgggcagcgcgctggacacgctgagcgggcaggccgtcggcgccgggcagctggacaggctgggcacctacacgcagcagtcgtggatcatctgcggcgccaccgcgctggcgctggcgccggcgtacgccttcgccccgcggctcctgcactcgttcctccaccagcccgaccacgtgtcgcgcgccgccgggccgtacgcccgctgggcgatcccgaggctgttcgcgcacgccgtgaacataccgctcctcatgttcttccaggcccagagcaggatctgggccgtggcggccatctccggcgcggtcctcggcgtgcacgccgcgctcacctacgtcgccgtcacgaggctcgggtacggcatgcccggggccgccgtcgccggggacatctcccactggctcgtcgtcgccgcgcagttcgcctacatgaccggcggccgcttccccgacgcgtggaagggcttcaccgtgcgtgcgttcgacaacctcggcgccttcgtcaagctgtcgctcgggtccgccgtcatgatctgcttggagttttggtactacaccacgcttctcgtcctcgtgggtctcctcaaacatggcaaactccaaatcgacatcatgtcagtctgcctcaacttcgagttcttgactgtaatggttgcgctgggcttcagcacagcaatcgggattagagtgtccaacgagctgggtgcaaacaggcccaaggaggcaaagtttgcagtgcttgtggcagtatcgacatccatgttcatgggagcagtctttatgtgcgtcgtcctcatctggaggacgagcctgccaaagctcttcagcgacagcgaggaggtgaaacgtggagcttccaagctggggcatctcctcgctctcaccgtatgcgtcagcagcatctggcctgtgctatcaggcgtggccgtaggagctgggtggcaagtgcgtgtggcgttcataaacgtcggttgctactacctagtgggcattccgatgggtatcctgcttgggttcaagctaaaacacggcacaatgggcatatggatgggcatgttgacaggcacgtttctccaaatgtcaatacttctcgccactatcttcacaacaaagtgggataaacaggccgcactggcagaagtgagaatggcggagtggggaggaaagaacgagaacctaacactgacggaaacaacacatacagatgatctgatggctcctgtgcaagagaaaatgttggcgaatgacagccagaagaatgtagaattagtgcgcatagattgatcacagagtatattcatttcagctcgagacagtatttcattgtttactaggatgatagtatgaatctattttttttataaataatctctccgttccaaacta

SEQ ID NO: 87930 - DNA, 1481 bp, Zea Mays
ttagtttggagatccagagccagggtcaaagaatattcttcaaaaataatgacacgtaaggaatgccctccataaataaacccgttcaccataccgatccattggcagaacgctcacccactattcagtgtccaccttcgtcgtccatgtcgtcccagcagtggtggacggctcccgccaaagaggaggcgccaccgccacccgagttcatgtgcccgatcacgttagacctgatgcaggaccctgtggcggcgcccactggcatcacgtacgatcgtgctgccatcgagtcttggctgcttgccggcggccagcgtgcgtgccctgtgacacacggcgagctccgcgcgggagacctcgtccccaaccacaccctccgccgcctcatccaggactggtgcgccaccagccgttgctgctgtagcgtcgatcgggttcgggtccctgccacgcccgaggaggccgccgttgccgagctcgagagcgccacgcgcgcaggcgacgccgagcggtgcgctgccgcagcgcgcggggtccggcgactcgccagggcggccgagcagaaccggcgccgcctcgagtccgccggcgctgcgcgcgctctctccatggcgttcacgtcgtttgcggacaccgcagatgctgcggtcgccattgatgtgctcgacgctgtgctggcagcgctggtgctcgtgatgccaatggacgaagaggccatcctggtcgtgggctcgtcgagcgcgtccgtagcgcggctggtcgccgtcgccgcgaacggcgacctgcacaggaggctgcaagccgtggtggtaatcagagagatcatctcgctttcagtttacagaggtaccgcgtgtacgatcggtctgtgcgccaacaccgaggccatcgcccgagtgttggtgaagacgatcagagacgccatctgcccgccggccaccagggcgtgcctggtcgccgcgtaccacctcgcgcgcagcggcgagagcgccgcgacgcgcctctcggtggcggggatcgtgatcgtgctcgtcgagctcctcgtggacgctgacaggagcacggccgagaaggctctcgccgcgctcgatgcagcactggcgtctcgcgacggcagagcgcgtgctcgtgccgacgcactcgtcatgcccgtgctggtcaagaaaatgttctgcgtgtccgacgcggccaccgcgctcgtcgtgtcagcgttgctgcgcatctgcaagaagtgcccggaagacgacgaggacggcactgcggtggcaggggcagctagacggcacgccatcgttgaggcactgcagctgggcgccctccagaaggtgctgttgcttctgcaggcgggatgtagagaggaaaccaagggaaatgctactcaactgctgagactgatggtcaggtatcagggctgtggggagtgcgttgacgcaatggatgtgagagggctcaagagagacactgcaattttgactggatag

SEQ ID NO: 87931 - DNA, 90 bp, Zea Mays
ccatccgaattagctggagcagtttcattttcagcaagtgctggtcattcactgctctgtcaatccaccgcgtcatcccgggcttcatgt

SEQ ID NO: 87932 - DNA, 2016 bp, Zea Mays
gaaaaatgtatgctgtgcgcgcacagccttttcttaaaaaaaggaaaaaagaggcacaataaatggcgtcaaagccacgggccttcgcgaaggtcttcctccccgcgctcccgccgccgcccctcctcactgcccccgtcttctcgcggtagccggccgacgaatcggggtgccggcgcggcggcgatgtcggctgcggcggcagcgccagcgcaggctccaaggaagtgggagggactagtggacgaggtgctcgagagggaggtgctggcagcgtgcctggaccaggcccccgagcgccgccgcatccgcgaggctttcaaggacgttcagctcagcatcgaccattgcctcttcaaggtcaacccctccccctattttgcctatttgcttaaaatccagttaaaggtgccactttttctcgtgttccagaaattatgttcgttcttattatcggttcttcatatttagtgacgtgccaggataggattggttgggcaagataatacaagtactgttttcgtgcgttattgtctactagttgagagaatagactaacaagatgcaatagaaacctgtgtttataataaaatgtttcgttttgtgaaccacaaacttctggccttcatctaaaagatgtctaggcaaagcatgtgttatcaattggttggaagtatgggtgggtactagtaatactgtacaatattattattttttggctttttaatctccagtgcaatggtttttgtagaatataaataaactctgctataatatattttttcaatcatctcacttcaaatgatggcatagaaaacaggctttatgatttcccatgctatggatgatctctctcacttgcattcggattatgatgcagggacaatatagtggcatcagaacaaaggagtcatgtgagcataactctaggggtgtggagattttctcaaaatgctggtttccggagaatcgtcgaatgagagcaattgtttgtctttgccatggttatggagacacatgtaccttttttcttgatggagttgcgaggaagattgcttcagctggatatggagtatttgcactggactaccctggctttggtctttcagaaggacttcatggatatattccaagttttgatacacttgttgatgatgtagctgaacacttctctaaggtcaaaggaaatcctgaatatagaggcctaccgagctttctgtttggccaatctatgggtggagcagttgcattgaaggttcacttcaagcaaccaaatgaatggaatggtgcaatactggtggcaccgatgtgcaagatagcagacgatgtggttccaccttggcccattcagcaacttctaatttttatggccaaacttctgccaaaagaaaagcttgttcctcaaaaggatttagctgagttggcattcaaagagaagaagaaacaagagcagtgttctttcaatgtgattgcctacaaggataaaccacgtttgcgaacagctctggagatgctgagaacgacacaagagatagaaaggcgtctagaagaggtttctttgcccttgatcattttgcacggtgaggctgatatggttactgacccggcggttagtaaggctctgtatgagaaagccaagagccaagacaagaagctgtgcctctacaaaggtgcgtatcacgctatcttggaaggtgaaccggaccagacaatattccaagttctcgatgatatcatatcctggctcgatcagcattccacaaaagaaggtatatcgttgtgaatcaggcagcgctgttcaccaggattgggtgaattcctttggcaatgctgtatcgcttccggttggggatcccagattcaacggtggggattccatttttgatatgaccctgtaaaatttttagttcagattatcgatgtctccgtcatgtacctgaacgatgtagacgtacatatatgtaactgattaatgtgtatcaattgaccacgaattatttgggaaaacctcagttg

SEQ ID NO: 87933 - DNA, 1496 bp, Zea Mays
gaaaaatgtatgctgtgcgcgcacagccttttcttaaaaaaaggaaaaaagaggcacaataaatggcgtcaaagccacgggccttcgcgaaggtcttcctccccgcgctcccgccgccgcccctcctcactgcccccgtcttctcgcggtagccggccgacgaatcggggtgccggcgcggcggcgatgtcggctgcggcggcagcgccagcgcaggctccaaggaagtgggagggactagtggacgaggtgctcgagagggaggtgctggcagcgtgcctggaccaggcccccgagcgccgccgcatccgcgaggctttcaaggacgttcagctcagcatcgaccattgcctcttcaagggacaatatagtggcatcagaacaaaggagtcatgtgagcataactctaggggtgtggagattttctcaaaatgctggtttccggagaatcgtcgaatgagagcaattgtttgtctttgccatggttatggagacacatgtaccttttttcttgatggagttgcgaggaagattgcttcagctggatatggagtatttgcactggactaccctggctttggtctttcagaaggacttcatggatatattccaagttttgatacacttgttgatgatgtagctgaacacttctctaaggtcaaaggaaatcctgaatatagaggcctaccgagctttctgtttggccaatctatgggtggagcagttgcattgaaggttcacttcaagcaaccaaatgaatggaatggtgcaatactggtggcaccgatgtgcaagatagcagacgatgtggttccaccttggcccattcagcaacttctaatttttatggccaaacttctgccaaaagaaaagcttgttcctcaaaaggatttagctgagttggcattcaaagagaagaagaaacaagagcagtgttctttcaatgtgattgcctacaaggataaaccacgtttgcgaacagctctggagatgctgagaacgacacaagagatagaaaggcgtctagaagaggtttctttgcccttgatcattttgcacggtgaggctgatatggttactgacccggcggttagtaaggctctgtatgagaaagccaagagccaagacaagaagctgtgcctctacaaaggtgcgtatcacgctatcttggaaggtgaaccggaccagacaatattccaagttctcgatgatatcatatcctggctcgatcagcattccacaaaagaaggtatatcgttgtgaatcaggcagcgctgttcaccaggattgggtgaattcctttggcaatgctgtatcgcttccggttggggatcccagattcaacggtggggattccatttttgatatgaccctgtaaaatttttagttcagattatcgatgtctccgtcatgtacctgaacgatgtagacgtacatatatgtaactgattaatgtgtatcaattgaccacgaattatttgggaaaacctcagttg

SEQ ID NO: 87934 - DNA, 1489 bp, Zea Mays
gaaaaatgtatgctgtgcgcgcacagccttttcttaaaaaaaggaaaaaagaggcacaataaatggcgtcaaagccacgggccttcgcgaaggtcttcctccccgcgctcccgccgccgcccctcctcactgcccccgtcttctcgcggtagccggccgacgaatcggggtgccggcgcggcggcgatgtcggctgcggcggcagcgccagcgcaggctccaaggaagtgggagggactagtggacgaggtgctcgagagggaggtgctggcagcgtgcctggaccaggcccccgagcgccgccgcatccgcgaggctttcaaggacgttcagctcagcatcgaccattgcctcttcaagggacaatatagtggcatcagaacaaaggagtcatgtgagcataactctaggggtgtggagattttctcaaaatgctggtttccggagaatcgtcgaatgagagcaattgtttgtctttgccatggttatggagacacatgtaccttttttcttgatggagttgcgaggaagattgcttcagctggatatggagtatttgcactggactaccctggctttggtctttcagaaggacttcatggatatattccaagttttgatacacttgttgatgatgtagctgaacacttctctaaggtcaaaggaaatcctgaatatagaggcctaccgagctttctgtttggccaatctatgggtggagcagttgcattgaaggttcacttcaagcaaccaaatgaatggaatggtgcaatactggtggcaccgatgtgcaagacgatgtggttccaccttggcccattcagcaacttctaatttttatggccaaacttctgccaaaagaaaagcttgttcctcaaaaggatttagctgagttggcattcaaagagaagaagaaacaagagcagtgttctttcaatgtgattgcctacaaggataaaccacgtttgcgaacagctctggagatgctgagaacgacacaagagatagaaaggcgtctagaagaggtttctttgcccttgatcattttgcacggtgaggctgatatggttactgacccggcggttagtaaggctctgtatgagaaagccaagagccaagacaagaagctgtgcctctacaaaggtgcgtatcacgctatcttggaaggtgaaccggaccagacaatattccaagttctcgatgatatcatatcctggctcgatcagcattccacaaaagaaggtatatcgttgtgaatcaggcagcgctgttcaccaggattgggtgaattcctttggcaatgctgtatcgcttccggttggggatcccagattcaacggtggggattccatttttgatatgaccctgtaaaatttttagttcagattatcgatgtctccgtcatgtacctgaacgatgtagacgtacatatatgtaactgattaatgtgtatcaattgaccacgaattatttgggaaaacctcagttg

SEQ ID NO: 87935 - DNA, 1525 bp, Zea Mays
gaaaaatgtatgctgtgcgcgcacagccttttcttaaaaaaaggaaaaaagaggcacaataaatggcgtcaaagccacgggccttcgcgaaggtcttcctccccgcgctcccgccgccgcccctcctcactgcccccgtcttctcgcgccggccgacgaatcggggtgccggcgcggcggcgatgtcggctgcggcggcagcgccagcgcaggctccaaggaagtgggagggactagtggacgaggtgctcgagagggaggtgctggcagcgtgcctggaccaggcccccgagcgccgccgcatccgcgaggctttcaaggacgttcagctcagcatcgaccattgcctcttcaagggacaatatagtggcatcagaacaaaggagtcatgtgagcataactctaggggtgtggagattttctcaaaatgctggtttccggagaatcgtcgaatgagagcaattgtttgtctttgccatggttatggagacacatgtaccttttttcttgatggagttgcgaggaagattgcttcagctggatatggagtatttgcactggactaccctggctttggtctttcagaaggacttcatggatatattccaagttttgatacacttgttgatgatgtagctgaacacttctctaaggtcaaaggaaatcctgaatatagaggcctaccgagctttctgtttggccaatctatgggtggagcagttgcattgaaggttcacttcaagcaaccaaatgaatggaatggtgcaatactggtggcaccgatgtgcaagatagcagacgatgtggttccaccttggcccattcagcaacttctaatttttatggccaaacttctgccaaaagaaaagcttgttcctcaaaaggatttagctgagttggcattcaaagagaagaagaaacaagagcagtgttctttcaatgtgattgcctacaaggataaaccacgtttgcgaacagctctggagatgctgagaacgacacaagagatagaaaggcgtctagaagaggtttctttgcccttgatcattttgcacggtgaggctgatatggttactgacccggcggttagtaaggctctgtatgagaaagccaagagccaagacaagaagctgtgcctctacaaaggtgcgtatcacgctatcttggaaggtgaaccggaccagacaatattccaagttctcgatgatatcatatcctggctcgatcagcattccacaaaagaaggtatatcgttgtgaatcaggcagcgctgttcaccaggattgggtgaattcctttggcaatgctgtatcgcttccggttggggatcccagattcaacggtggggattccatttttgatatgaccctgtaaaatttttagttcagattatcgatgtctccgtcatgtacctgaacgatgtagacgtacatatatgtaactgattaatgtgtatcaattgaccacgaattatttgggaaaacctcagttgcaaaacgccttttattttatcacaatttctatc

SEQ ID NO: 87936 - DNA, 2019 bp, Zea Mays
gaaaaatgtatgctgtgcgcgcacagccttttcttaaaaaaaggaaaaaagaggcacaataaatggcgtcaaagccacgggccttcgcgaaggtcttcctccccgcgctcccgccgccgcccctcctcactgcccccgtcttctcgcggtagccggccgacgaatcggggtgccggcgcggcggcgatgtcggctgcggcggcagcgccagcgcaggctccaaggaagtgggagggactagtggacgaggtgctcgagagggaggtgctggcagcgtgcctggaccaggcccccgagcgccgccgcatccgcgaggctttcaaggacgttcagctcagcatcgaccattgcctcttcaagggacaatatagtggcatcagaacaaaggaggtactatatcttaaactctatgatttcttcataataattagatccctcaacttctactgcaacacataaatttatttcatccatttctatacaaggttatttatgtcatactgcaacataaatttatttcatgcatttctgtacaaggttatttatgccatagagttgatcccttgttttctttctaatgagtgcacactgtacattggagaaatatttgaatgttttactctatgcaagtgaggtgtgttatttatttaattgaattgaagtattgaacgagtgctcaccgtgttgaaatattggatagttgcagtatttgttttttaaaaaagtaagtacagggcactgtaatgttgaaattcacatggcatgtccaatagtacattagtttctcctttgctttggtaggtgttttgctgtgagtgatgaaccttcaggagttggctattttatagatcatttttccttgtatggaagatattttcagtcatgtgagcataactctaggggtgtggagattttctcaaaatgctggtttccggagaatcgtcgaatgagagcaattgtttgtctttgccatggttatggagacacatgtaccttttttcttgatggagttgcgaggaagattgcttcagctggatatggagtatttgcactggactaccctggctttggtctttcagaaggacttcatggatatattccaagttttgatacacttgttgatgatgtagctgaacacttctctaaggtcaaaggaaatcctgaatatagaggcctaccgagctttctgtttggccaatctatgggtggagcagttgcattgaaggttcacttcaagcaaccaaatgaatggaatggtgcaatactggtggcaccgatgtgcaagatagcagacgatgtggttccaccttggcccattcagcaacttctaatttttatggccaaacttctgccaaaagaaaagcttgttcctcaaaaggatttagctgagttggcattcaaagagaagaagaaacaagagcagtgttctttcaatgtgattgcctacaaggataaaccacgtttgcgaacagctctggagatgctgagaacgacacaagagatagaaaggcgtctagaagaggtttctttgcccttgatcattttgcacggtgaggctgatatggttactgacccggcggttagtaaggctctgtatgagaaagccaagagccaagacaagaagctgtgcctctacaaaggtgcgtatcacgctatcttggaaggtgaaccggaccagacaatattccaagttctcgatgatatcatatcctggctcgatcagcattccacaaaagaaggtatatcgttgtgaatcaggcagcgctgttcaccaggattgggtgaattcctttggcaatgctgtatcgcttccggttggggatcccagattcaacggtggggattccatttttgatatgaccctgtaaaatttttagttcagattatcgatgtctccgtcatgtacctgaacgatgtagacgtacatatatgtaactgattaatgtgtatcaattgaccacgaattatttgggaaaacctcagttgcaaaacgccttttattttatcacaatttctatc

SEQ ID NO: 87937 - DNA, 513 bp, Zea Mays
atggagctcgctgcggtatttcatcgaacacatcgagggcgcgacacgaaggagtgtcgtgctgctgctgctccatggcctagggcgagagcaagcaccagggaaaatgacatcggcaaggttgaggacgggcagcccagttcggcgtcggacagaggcgaactgagcagcggcgcttgctgtcaagttaagacgacggcgatgacacaagtccggaacagtggtgaacgacggcgcaagacgagcagggagacgacgatctgcactacgacaggaaagacgcagcagtccccaacggcgtggggaggaccagctggtggcgctgttgctactcgttgggtggacgtcagggggccgagcacaacatctagagcggcggcgcggtggtgcctaggagctgagcagatccatgaacggagttgggagacatggccagcttcaacgaacggtgctgggagtagggaggccgggacgggatggccgtgcgccatggccgagatttgggcgagctag

SEQ ID NO: 87938 - DNA, 582 bp, Zea Mays
atgaataacataaggagaacagctattccttaccggggtaaacgacgacgtgaccgggactgcatagatcaagatgaagctttcgaacacgtcgatagtgcgacacgaaggagtgtcgtggctgctgctgctccatggcctagggcgagagcaagcaccagggaaaatgacatcggcaagcttgaggacgggcagcccagttcggtgtcggacagaggcgaactgagcagcggcgcttgctgtcaagttaagacgacggcgatgacacaaggccggaacagtggtgaacgacggcgcaagacgagcagggagagcagggagacgacgatctgcactacgataggaaagacgcagcagtccccagcggcgtgggaggaccagctggtggcgctgttgctactcgttggggtgggcgtcagggggccgagcacaacatctagagcggcggcgcggtggtgcctaggagctgagcagatccaaggacggagttgggagacatggccagcatcaacgaacggtgctaggagcaagcaggccgggacgggatggccgtgcgccatggccgagatttgggcgagctag

SEQ ID NO: 87939 - DNA, 1458 bp, Zea Mays
ctaccgtgctcgattcttccctgcgcgtctcctccgcttggagcttcctgcgctccctgcgtccctctgtggccggaactcccttcatggccggagctcggacggcgctcggtcctgccgcctgccccaacgtcgactatctccagctcgcccccgacctcttctctccctgtcgcgtcgctctctctctgctcgctctcctccatggccgccgtgggctcgccggcgtggtccgtgtcctggccgccgtggtgccgcgtgcccatgtgccagcgcatgcccagctcctctccgtctgctcggtcttcttcctggagcgagctctcttctctcccatggcgtccggcatttctccctgtcgctccttccatgccgcgctcggactgaagcttccctacgcgacctgccgagcctcttcctctgccaagtccctttccccgcaagcccctgccctctctctgtcagccgcacgctctgcgccctggctccctcgccatcgccggagttcttctgttcggctccagctcgatttggtcttcagctttctgcgcgcgcgaatccgccgtcgcgtcttgctctctggtggtcgagctcgttcagctcgcctcctgtcttcaaccatggatgtagatgtcggccgccctggattgttcgcaaactccgccgcttgatgtcgcgtctccagcaccagtgtccctgctccctgttcctccatggctgtgtcgcgcgcgtttcgttgttcctgcgcgtgctgtcgtgaagctctttgttcgtcgtcatcgctcggtcgcacgacaggctgattgcgtgtcatgtgtcgcacatcctaggtcctcgtcgttgggtttcgtgcgtgctcacgtttaccgtcaagtcgtcgaacccgtcatcctctgctcaaactccacctcaccagctcgcttcaaacacgatctcgtcgtcaagcttcgccttagccttatctcgtcggtcacgctcgccagatgttcgatcaaggactttagccgaaggatgtcgtcgttcaggcaactaccaaatcgagttgtgatgtggtacgttgattaaccacgagatgcggagaacttgagtcaagtcgaccccaagcgtgggctaatccgtaggatgaagctgatggaccaacctgaagatggttaaatcaagcaagtgctcgatcgagggatactcgtcaagtggtcgtcgcctaacaacactaacctagtgttacccaggcaagccccggtgcatgcaacccctttccttgtgtttttaaatacttttcgcacacttaagtctggtgaaatgtgcattaggttcataggaattgcttgaaaccctttgatgcattgctttccttgatatccatacctttatagatacttctgtgaagtatcaaaatatgatttacaaaaatgcttagccttgcttagatcttgtggatagaggttgtccttaatttaa

SEQ ID NO: 87940 - DNA, 931 bp, Zea Mays
gcagggactaaaatgcaaaatgtgcttcttctaccttgagctcttgctcacgctccaattgccttgttcagcaaagtctgaaagatgggaaagttgtggctctgtaattggtagttcaagggtccaatcaatccttccaagaaatgttcttgacgcttctcgttagtgtccacttcctctagggcgtaacatgaaagctgggtgaagcgatcacggtactcactaacagtcatgttcccttatgtgagggaaaggaactccttcttgagcttcattattcccgagggaatatggtgagcatggaagttcacttggaattcctgccaggttatggcatcagcattggcatgtgccgcgatgaaggcatcccaccaatcggacgcggcaccttcgagtcttccagaagcgtacaagaccttctcttggtcattgcactgggtgatatctaacttctttgcaatgaccttaagccaatcatcggcatccaaagggtttactacatgagagaaagcaggcgggtgatgactcatgaagtcctggtgcttgtctctagcttggggtgcatgttgttgttgttgttggtattgttggttctattgattttgctgaatttgctgcaccgaagctgtgagtccttgcagaagttgcatctgcgctgcgatgaattgatccatagtagggttgggtggtggtggtggcaactgttgaccacactggttctgatggatattgggacctgatcgagtgttcaccatctggttggttagaaagtgcaatcccagggtaagggaggagtagaaaagattctagggggaatagcttattattaatgttaagtttattattattattattattattattattattattattattattattattattattattattattattattattttatgctcttatggccatc

SEQ ID NO: 87941 - DNA, 846 bp, Zea Mays
ctgtttatcgcatcactagctttttttcttcacttctggtcggcgtctcttgtttgttgttggcttcataagcgcacagaaggatgagagatagagcgacgaagtatcttgctcggaactctcccacagctaggctctgagatgagtaatgggttctgaggatagagccacgcgagcttcctcccgttctgcgtccctgcgacgtatgggcactgccgggggctatgacctgtaaccaaagaagagggaaaatgcgagataagcagtagctggaccatgataaccagggatgcaggtatggctgttgatttgcttcgtgttcacagaatcctctccaccctgttggagacaaaggggataaccgccacgagatatatagaaggtagaggtaatacccagaaaacaactgaattgttgctggaagctggtgagcaagagattttacgcacctgggaagacccaatggtcgaggagtgcaaacatgatagcaaggactcgattcggagaacaatcgtggagcatgataaggtcttcaggcagcaggtacgtagcaagcaacaccataatttgtgaggtatatttgcacacatagacgacgagaagttaacagactgctccagttctgtaataagttgacgaccagttgttagtcagacctaagttgtcttgtcatccatgcaacaagaacttttgcatatgatactgcttctttgcatcaagtgcatgagctgcatcgtttgtaccatgtacaaaaaacattaatggttgaatgcgatagccataggtatcaaccgagagcagaaggaactcatgaagtggtgcagggatcaaggtcgaacctcaagt

SEQ ID NO: 87942 - DNA, 1814 bp, Zea Mays
caggagtgctggaagcatttcaccctgcctccgcgaatcaacaccccaccggccaccctctcgactcgcttcaggggccaagccagtgtcgcttttgaatccgcctccgttcggttttccccaaaacgccttccttccactactgcttggcatccttggattcgtaggcagtcagatcacgcggcgcgcctcccctggtgactgacctagggctcgccgcgagcgcgcggcgatggcgtcgtccacgtccaggcgccggaggggtgggggcctcgagcgggtggcggacaactgggagcgcctcgtgcgggccgcgctcaagcgggaccgggaccacctccgcgtggggggagccccggctgccgtgggagggcagaggcttgccgacgccgtgccggcctcgctgggtcggaccaccaacatagagcagatcctgcaggccgccgacgacatcgaggtcgaggaccccaacgtcgcgcggatcctttgtgaacaagcgtacacgatggcccagaatctggatcccagcagtgaaggtagaggggttcttcagttcaagacaggtttggcatctgtaattaagcaaaaacttgctaagaaggatggggctccgatagaccgacagaatgacgttcaagtcctgtggaacttttatcttgaatacaagagtcgttgtcgggttgatgatatgcaacgtgagcaggagagactgagagagtcaggaacctttagtacagagatgggaaatagggcaatgaaaatgaagaaagtttttgctacattgagggctttgcttgatgttctggaaaatcttgttggtcagtcaccaactgatagacttcatagacaaattctggaggagataaagagaataaaaagatctgatgcagccttgagaggtgaacttatgccatacaacattgtaccccttgatacatcatcgtcagtggcaaatatttttgggtttttccctgaggtcattgctgcaacagcagcaattcagaactgtgaggacctgccacgattcccttttgatacaccccagctaagacaaaaagacattttcgaccttttgcaatatgtttttggcttccaggaagataatattcggaaccagcgtgaaaatgttgtacttatgttagccaatgctcagtcccggttaagcctgcaaattgggtcagaacccaaaattgatgagatggctgttactgatgttttttgcaaagtcctggacaactacataaaatggtgtaggtacttgggcaggcgtgttgcatggaccagccttgaagcagtaaataagaaccggaaaatcatattggttgccctctactttctgatttggggtgaagcagcgaatattcgttttctcccagaatgcatatgctatattttccacaatatggcaaaggaactcgatgggattcttgattcatctgttgctgagactgcaaagagttgcactactgagggttccacttcatttcttgagaaaataattacaccaatttatgataccatggcagcggaggctgaaaataataaagatggaaaagctgcacattctgcttggaggaattatgatgacttcaatgaatatttctggtcacgctcatgctttgagcttggttggccacctgcagagggttccaaatttttgcgcaagcctgctaagaggaaacgtgtaagttaacaatatgtgttttccttaggaactactactaattcaaattataagtggtgttggtttttctaggtagcttttggcatgtatctttaggtgcatagcaaaatcctatgtacttaaaaaaacc

SEQ ID NO: 87943 - DNA, 6328 bp, Zea Mays
caggagtgctggaagcatttcaccctgcctccgcgaatcaacaccccaccggccaccctctcgactcgcttcaggggccaagccagtgtcgcttttgaatccgcctccgttcggttttccccaaaacgccttccttccactactgcttggcatccttggattcgtaggcagtcagatcacgcggcgcgcctcccctggtgactgacctagggctcgccgcgagcgcgcggcgatggcgtcgtccacgtccaggcgccggaggggtgggggcctcgagcgggtggcggacaactgggagcgcctcgtgcgggccgcgctcaagcgggaccgggaccacctccgcgtggggggagccccggctgccgtgggagggcagaggcttgccgacgccgtgccggcctcgctgggtcggaccaccaacatagagcagatcctgcaggccgccgacgacatcgaggtcgaggaccccaacgtcgcgcggatcctttgtgaacaagcgtacacgatggcccagaatctggatcccagcagtgaaggtagaggggttcttcagttcaagacaggtttggcatctgtaattaagcaaaaacttgctaagaaggatggggctccgatagaccgacagaatgacgttcaagtcctgtggaacttttatcttgaatacaagagtcgttgtcgggttgatgatatgcaacgtgagcaggagagactgagagagtcaggaacctttagtacagagatgggaaatagggcaatgaaaatgaagaaagtttttgctacattgagggctttgcttgatgttctggaaaatcttgttggtcagtcaccaactgatagacttcatagacaaattctggaggagataaagagaataaaaagatctgatgcagccttgagaggtgaacttatgccatacaacattgtaccccttgatacatcatcgtcagtggcaaatatttttgggtttttccctgaggtcattgctgcaacagcagcaattcagaactgtgaggacctgccacgattcccttttgatacaccccagctaagacaaaaagacattttcgaccttttgcaatatgtttttggcttccaggaagataatattcggaaccagcgtgaaaatgttgtacttatgttagccaatgctcagtcccggttaagcctgcaaattgggtcagaacccaaaattgatgagatggctgttactgatgttttttgcaaagtcctggacaactacataaaatggtgtaggtacttgggcaggcgtgttgcatggaccagccttgaagcagtaaataagaaccggaaaatcatattggttgccctctactttctgatttggggtgaagcagcgaatattcgttttctcccagaatgcatatgctatattttccacaatatggcaaaggaactcgatgggattcttgattcatctgttgctgagactgcaaagagttgcactactgagggttccacttcatttcttgagaaaataattacaccaatttatgataccatggcagcggaggctgaaaataataaagatggaaaagctgcacattctgcttggaggaattatgatgacttcaatgaatatttctggtcacgctcatgctttgagcttggttggccacctgcagagggttccaaatttttgcgcaagcctgctaagaggaaacgtacaggaaagaccaattttgttgaacatcgcacttttctgcatttgtaccgcagtttccaccgcttgtggatttttctgctattaatgttccagctcttagctattattgcctttcaccatgggaagatggacattgacaccattagaatactacttagcgctgggccagccttttttgtactaaacttcattgaatgctgcttggatgtcatactcatgtttggtgcatataagacggcaagaggttttgctatctcaagattagttattcgatttctttggttaactgcagtttcaacatttgtaacctatctctatgtgaaagtcctggaagagagagacacaaggaattcagattcgacttatttccgaatttatggtcttgttcttggtggttatgctgctgttcgaatcatgtttgcactgatggctaagatcccagcttgtcataggctctcaagtttttctgatcggtctcagtttttccaatttttcaagtggatataccaggagcgatattatgttgggcggggactttatgagagtattagtgattatgccagatacgtgatattttgggtcgtcatactggcatgcaaatttacttttgcatattttctccagattaggcctttagttgaaccaaccaatattattgtgcaactccatgatttgaagtattcctggcatgatcttgtatcaagggggaataaaaatgctttgaccattctgagcctatgggcaccagtcttagctatatacctgatggacatccacatttggtacactcttttatcagcacttgttggtggcgttatgggtgccagagatcgccttggagagattcggtcaattgaaatgcttcataaacgttttgagagctttccagaagcgtttgctaaaaacctttccgcttcaaggttcttaaccctattctcaatatttgaatcagaaattacaactaagacgtatgcctcaatattttccccattttggaatgaaattatcaagagcttgcgtgaagaggactatatcagcaacagggaaatggatctgcttatgatgccaagtaactgtggaaatttaatgcttgtacagtggccactgtttctattgactagcaagatcatgttggcaaatgactatgcttctgactgtaaagactcgcagtatgagctatgggatagaatatcaaaagatgaatacatggcttatgccgtcaaagaatgttactacagcactgaaaaaattcttcactctttagttgatgctgaagggcagcactgggttgtaaggcttttccgagatcttaatgacagtatagcacagggttcacttttagtgactataaatctgaagaagttgcagttagtccagtctagattgacgggcttgaccggtcttctgatacgcgatgagactgctggccgtgcagctggtgttactaaagctcttcttgagctttatgaggttgttacccatgaatttctttcacagaatctgagggaacagtttgacacgtggcaactgttgttaagagccagaaatgatggacgcctattctctaagattttgtggccaaaggatccagaaatgaaagagcaacttaagcgattacacttacttcttactgtcaaggacagtgccaccaacataccaaaaaatcttgaagctcggagaagattacaatttttcactaattctctattcatggacattccacaagcaaagcctgtatctgagatgatcccttttagtgtctttaccccatactacagtgaaacagttctttatagcatgtctgagctttgtgttgagaatgaagatggcatttctatacttttctaccttcagaaaatataccctgatgagtgggctaacttcttagaacgaattggctgtggtgaatcatcagaagatgattttaaagaaagtccaagtgacaccatggaactccggttttgggtatcttatcgtggccaaactttggccaggacagtgcgtggaatgatgtactatagaagagctttgatgttacaaagttacctggagaggagatgccttgggggtattgaagatggaaattctgcagcagaatatattgacactcaaggctatgagttatctcctgatgcacgggcccaagcagatataaaatttacttatgttgtttcttgccaaatatatggactacagaagcaaacaaaaaaacaagaggctgcagatattgctctcctactgcaaagaaatgaggctcttcgggttgctttcatacacgaagaggaaatcatatcaagggatggtaaggctacaacaagagagtattattccaagcttgtgaaggctgatgttcatggcaaagaccaagaaatatactgcattaaattgcctgggaaccccaagcttggtgaaggcaaacctgagaaccaaaaccatgccataatcttcactcgaggagatgcagttcagacgatcgatatgaatcaggataactacttggaggaagcaatgaaaatgagaaatttacttgaagaatttcataatgctcatggaaaacatggcatacggaagcccacaatcctaggtgtgagggagcatgtattcacggggagtgtctcttcgctggcgtcatttatgtcgaaacaggagactagttttgttactttggggcaacgtgttcttgcttacctcaaagttcgaatgcactatggacatcctgatgtttttgatcggatatttcacataacccgaggtggcattagcaaggcgtctcgagtgattaatataagcgaagatatatatgccgggttcaattcgactttgcgccaagggaacatcacacaccatgaatatatccaggtggggaaagggcgtgatgttggcttgaaccaaattgcactatttgaggggaaagttgctggaggcaatggtgagcaagttctcagccgagatgtgtaccgtctgggccagttatttgatttcttcaggatgctaaccttctttttcaccactgttggttattatgtctgcacgatgatgactgttctaactgtgtatatcttcttgtatggaagggtttatctggcactctctggccttgactactcaatatctcgccaagctaggtttttggggaacactgcactagatgcagctttgaatgctcaatttttggtccagattggtatttttacagcagtgccgatgataatgggtttcattctggagctggggctgatgaaggctgtttttagttttattacaatgcagctccagttctgttcggtgtttttcaccttttcgcttggaacaaggacacattactttggtagaacaatccttcatggcggtgcaaagtatcgtgctactggaagaggttttgttgttcggcacataaagtttgctgaaaattataggctctattctcgaagtcactttgtcaaagcgcttgaggttgctctcctcctgatcgtttacattgcatatggatacacaaaaggcggttcatcttcatttattctgattactatcagtagttggttcctcgttatgtcctggcttttcgcgccttacattttcaacccttctggtttcgagtggcaaaagactgttgaggactttgatgactggacaaactggttactttataaaggtggagttggtgtaaagggcgacaacagttgggaatcttggtgggatgaggagcaggcgcatatccagacattcagaggacgtattcttgagacaatcctcagccttagatttctcatgtttcagtatggcattgtgtacaagcttaaaattacagatcataatacttctcttgcagtttacggcttctcatggattgtactctttgttatggttcttcttttcaagctttttactgcaactcctaggaagtcgacagccttgccgacttttgttaggtttctgcagggcgtccttgctattgggataattgcaggaattgcccttcttatcgtgctcacatcattcactgttgctgatttatttgcaagtgcacttgcttttatagcaaccggctggtgtgtcttgtgtctggccgtaacatggaagagggtagtgaaagtccttgggctatgggattcagtccgtgagattgcaaggatgtacgatgcaggaatgggagccatcatctttgtgcccatcgtcgtcttctcatggttccccttcgtgtcaacattccagtcacgtttcctcttcaatcaagcgtttagtcgaggtctggagatctccctcatccttgcagggaacaaggcgaatcagcagatttgaaaggccctgccgcatccatcgtatttttctgttgtatattctgggaattactgagagctgcttagttagtttgaacaatttaatgagctcgatttgaatgacaaccttctacataattgcccctgtaatttgtacactaattatgcggagaggcagctacggcagtagagatgagctgatgtatgtcgatttgatcttaaccaaacctctctttaaggctacgacggttcagtaggcctgcactagtatgttgcacccatccacgtgacatggcatcttcattatgttacccatcctcgtaccaatatttaaattctattatataaatagtttagtatatagtat

SEQ ID NO: 87944 - DNA, 6307 bp, Zea Mays
caggagtgctggaagcatttcaccctgcctccgcgaatcaacaccccaccggccaccctctcgactcgcttcaggggccaagccagtgtcgcttttgaatccgcctccgttcggttttccccaaaacgccttccttccactactgcttggcatccttggattcgtaggcagtcagatcacgcggcgcgcctcccctggtgactgacctagggctcgccgcgagcgcgcggcgatggcgtcgtccacgtccaggcgccggaggggtgggggcctcgagcgggtggcggacaactgggagcgcctcgtgcgggccgcgctcaagcgggaccgggaccacctccgcgtggggggagccccggctgccgtgggagggcagaggcttgccgacgccgtgccggcctcgctgggtcggaccaccaacatagagcagatcctgcaggccgccgacgacatcgaggtcgaggaccccaacgtcgcgcggatcctttgtgaacaagcgtacacgatggcccagaatctggatcccagcagtgaaggtagaggggttcttcagttcaagacaggtttggcatctgtaattaagcaaaaacttgctaagaaggatggggctccgatagaccgacagaatgacgttcaagtcctgtggaacttttatcttgaatacaagagtcgttgtcgggttgatgatatgcaacgtgagcaggagagactgagagagtcaggaacctttagtacagagatgggaaatagggcaatgaaaatgaagaaagtttttgctacattgagggctttgcttgatgttctggaaaatcttgttggtcagtcaccaactgatagacttcatagacaaattctggaggagataaagagaataaaaagatctgatgcagccttgagaggtgaacttatgccatacaacattgtaccccttgatacatcatcgtcagtggcaaatatttttgggtttttccctgaggtcattgctgcaacagcagcaattcagaactgtgaggacctgccacgattcccttttgatacaccccagctaagacaaaaagacattttcgaccttttgcaatatgtttttggcttccaggaagataatattcggaaccagcgtgaaaatgttgtacttatgttagccaatgctcagtcccggttaagcctgcaaattgggtcagaacccaaaattgatgagatggctgttactgatgttttttgcaaagtcctggacaactacataaaatggtgtaggtacttgggcaggcgtgttgcatggaccagccttgaagcagtaaataagaaccggaaaatcatattggttgccctctactttctgatttggggtgaagcagcgaatattcgttttctcccagaatgcatatgctatattttccacaatatggcaaaggaactcgatgggattcttgattcatctgttgctgagactgcaaagagttgcactactgagggttccacttcatttcttgagaaaataattacaccaatttatgataccatggcagcggaggctgaaaataataaagatggaaaagctgcacattctgcttggaggaattatgatgacttcaatgaatatttctggtcacgctcatgctttgagcttggttggccacctgcagagggttccaaatttttgcgcaagcctgctaagaggaaacgtacaggaaagaccaattttgttgaacatcgcacttttctgcatttgtaccgcagtttccaccgcttgtggatttttctgctattaatgttccagctcttagctattattgcctttcaccatgggaagatggacattgacaccattagaatactacttagcgctgggccagccttttttgtactaaacttcattgaatgctgcttggatgtcatactcatgtttggtgcatataagacggcaagaggttttgctatctcaagattagttattcgatttctttggttaactgcagtttcaacatttgtaacctatctctatgtgaaagtcctggaagagagagacacaaggaattcagattcgacttatttccgaatttatggtcttgttcttggtggttatgctgctgttcgaatcatgtttgcactgatggctaagatcccagcttgtcataggctctcaagtttttctgatcggtctcagtttttccaatttttcaagtggatataccaggagcgatattatgttgggcggggactttatgagagtattagtgattatgccagatacgtgatattttgggtcgtcatactggcatgcaaatttacttttgcatattttctccagattaggcctttagttgaaccaaccaatattattgtgcaactccatgatttgaagtattcctggcatgatcttgtatcaagggggaataaaaatgctttgaccattctgagcctatgggcaccagtcttagctatatacctgatggacatccacatttggtacactcttttatcagcacttgttggtggcgttatgggtgccagagatcgccttggagagattcggtcaattgaaatgcttcataaacgttttgagagctttccagaagcgtttgctaaaaacctttccgcttcaaggttcttaaccctattctcaatatttgaatcagaaattacaactaagacgtatgcctcaatattttccccattttggaatgaaattatcaagagcttgcgtgaagaggactatatcagcaacaggttattgggtgaatttctttccagggaaatggatctgcttatgatgccaagtaactgtggaaatttaatgcttgtacagtggccactgtttctattgactagcaagatcatgttggcaaatgactatgcttctgactgtaaagactcgcagtatgagctatgggatagaatatcaaaagatgaatacatggcttatgccgtcaaagaatgttactacagcactgaaaaaattcttcactctttagttgatgctgaagggcagcactgggttgtaaggcttttccgagatcttaatgacagtatagcacagggttcacttttagtgactataaatctgaagaagttgcagttagtccagtctagattgacgggcttgaccggtcttctgatacgcgatgagactgctggccgtgcagctggtgttactaaagctcttcttgagctttatgaggttgttacccatgaatttctttcacagaatctgagggaacagtttgacacgtggcaactgttgttaagagccagaaatgatggacgcctattctctaagattttgtggccaaaggatccagaaatgaaagagcaacttaagcgattacacttacttcttactgtcaaggacagtgccaccaacataccaaaaaatcttgaagctcggagaagattacaatttttcactaattctctattcatggacattccacaagcaaagcctgtatctgagatgatcccttttagtgtctttaccccatactacagtgaaacagttctttatagcatgtctgagctttgtgttgagaatgaagatggcatttctatacttttctaccttcagaaaatataccctgatgagtgggctaacttcttagaacgaattggctgtggtgaatcatcagaagatgattttaaagaaagtccaagtgacaccatggaactccggttttgggtatcttatcgtggccaaactttggccaggacagtgcgtggaatgatgtactatagaagagctttgatgttacaaagttacctggagaggagatgccttgggggtattgaagatggaaattctgcagcagaatatattgacactcaaggctatgagttatctcctgatgcacgggcccaagcagatataaaatttacttatgttgtttcttgccaaatatatggactacagaagcaaacaaaaaaacaagaggctgcagatattgctctcctactgcaaagaaatgaggctcttcgggttgctttcatacacgaagaggaaatcatatcaagggatggtaaggctacaacaagagagtattattccaagcttgtgaaggctgatgttcatggcaaagaccaagaaatatactgcattaaattgcctgggaaccccaagcttggtgaaggcaaacctgagaaccaaaaccatgccataatcttcactcgaggagatgcagttcagacgatcgatatgaatcaggataactacttggaggaagcaatgaaaatgagaaatttacttgaagaatttcataatgctcatggaaaacatggcatacggaagcccacaatcctaggtgtgagggagcatgtattcacggggagtgtctcttcgctggcgtcatttatgtcgaaacaggagactagttttgttactttggggcaacgtgttcttgcttacctcaaagttcgaatgcactatggacatcctgatgtttttgatcggatatttcacataacccgaggtggcattagcaaggcgtctcgagtgattaatataagcgaagatatatatgccgggttcaattcgactttgcgccaagggaacatcacacaccatgaatatatccaggtggggaaagggcgtgatgttggcttgaaccaaattgcactatttgaggggaaagttgctggaggcaatggtgagcaagttctcagccgagatgtgtaccgtctgggccagttatttgatttcttcaggatgctaaccttctttttcaccactgttggttattatgtctgcacgatgatgactgttctaactgtgtatatcttcttgtatggaagggtttatctggcactctctggccttgactactcaatatctcgccaagctaggtttttggggaacactgcactagatgcagctttgaatgctcaatttttggtccagattggtatttttacagcagtgccgatgataatgggtttcattctggagctggggctgatgaaggctgtttttagttttattacaatgcagctccagttctgttcggtgtttttcaccttttcgcttggaacaaggacacattactttggtagaacaatccttcatggcggtgcaaagtatcgtgctactggaagaggttttgttgttcggcacataaagtttgctgaaaattataggctctattctcgaagtcactttgtcaaagcgcttgaggttgctctcctcctgatcgtttacattgcatatggatacacaaaaggcggttcatcttcatttattctgattactatcagtagttggttcctcgttatgtcctggcttttcgcgccttacattttcaacccttctggtttcgagtggcaaaagactgttgaggactttgatgactggacaaactggttactttataaaggtggagttggtgtaaagggcgacaacagttgggaatcttggtgggatgaggagcaggcgcatatccagacattcagaggacgtattcttgagacaatcctcagccttagatttctcatgtttcagtatggcattgtgtacaagcttaaaattacagatcataatacttctcttgcagtttacggcttctcatggattgtactctttgttatggttcttcttttcaagctttttactgcaactcctaggaagtcgacagccttgccgacttttgttaggtttctgcagggcgtccttgctattgggataattgcaggaattgcccttcttatcgtgctcacatcattcactgttgctgatttatttgcaagtgcacttgcttttatagcaaccggctggtgtgtcttgtgtctggccgtaacatggaagagggtagtgaaagtccttgggctatgggattcagtccgtgagattgcaaggatgtacgatgcaggaatgggagccatcatctttgtgcccatcgtcgtcttctcatggttccccttcgtgtcaacattccagtcacgtttcctcttcaatcaagcgtttagtcgaggtctggagatctccctcatccttgcagggaacaaggcgaatcagcagatttgaaaggccctgccgcatccatcgtatttttctgttgtatattctgggaattactgagagctgcttagttagtttgaacaatttaatgagctcgatttgaatgacaaccttctacataattgcccctgtaatttgtacactaattatgcggagaggcagctacggcagtagagatgagctgatgtatgtcgatttgatcttaaccaaacctctctttaaggctacgacggttcagtaggcctgcactagtatgttgcacccatccacagatataaaaagaaaaatattcttaatataaaataa

SEQ ID NO: 87945 - DNA, 1133 bp, Zea Mays
ccataaacaaacccaatcggtgtttgtaaggacgatggcgattccgatttgtgcatcgctccgaacatcgacgagcgttgagcggcttgccttcttctccacgcaaaacacggggtttctctcctccacaaaaataaaacaaagcagcacacatacataattaatcataggaaaataacgtcaatgcggaatcgaacaaggagcgtcgcggtctcaccggggtgaacgacgacgatgttggggctgcgcaaaaacagcaaacaaccgacgagtgtcgacggcgtgctgttcactgcgctttataaaacagcgagcccgcagagcgcggagacgccggggctgctgctttggatcggcaccgctgcgcagcgaagttggacgccaaggctgcgagcaggggcttcttgctgctgcacaaggggaaaaagaaggaggggggcgagcagagctgctgctcggccatggagatgtggtcggggaaggcgctggcttgagggagaaggggtgggacagcaaggggcagaggaggtcggcagccatgggagaaactcgagctccctgtttgctgcagccgcggacagcagagggaggacaaagacccgactgctactgttgttgtgcgccggccatggagggaatggagcagagagcgtcggccatgggactgctcactgcgcctgtgtcagggaagcggtcgaaggggaaaagtgctgtccctgctgccaagcctgaaggggcgccatgggacaggggaacagggagctgcacggctgggaaaaacaggggcaccatggttgggtgcgcggctgctcgagcttcgctggcgccatgggagccgcaggggaacagggctccaactggggaaaaagccagagagagctcgcggcgagcagcagcaaggggaatggagatctgagtgggggagattgttggcgagctcgcggcagggaggtgagctcgggccatgggaatggctgcttgctgccgtgatgcgggaggaagaaggggaggacgccatgggaggagagggagctccctgctgcagccgctcgcaggaggagccgggagggcgccgggcagaggtccggctagaggtggaagaaggctgctggtggcgactggaattttttgag

SEQ ID NO: 87946 - DNA, 117 bp, Zea Mays
ctctataataccatagcttcagcaaaactggatcagtcaatcttcaatattaaaaagggcaggcccgctgccggaggctcccacatgagtggggtctatgaagcagtcataatgcac

SEQ ID NO: 87947 - DNA, 470 bp, Zea Mays
gtgtggaaaacctgggccctgcctaaatgcagattttttctttggctcactgcgcataacaggtggtggactgctgacaggttggccaaaagagggcttgatcacccaccaaaatgccccttacgtgaccaagaggatgaaaccttagaccatctcttggtcgcctgtgttttctgaagggatttctggtttcagctcctgaggactttcgaccttcaagtgctagccctcagcctggtttgtcttccttcatgagctggtgggaagaagcttcttattcggtcaggggtcttgttagaaaggagctcaattctcttattgcattcggggcctggattatttggaatcttcgcaacaaatgcatctttgataattggaaccctaatgtgtctttagccattaggatggctacagaggaaagatggatgtgggaaatggccagggctaaaggcctttcctacctatgtgcc

SEQ ID NO: 87948 - DNA, 366 bp, Zea Mays
cggtcttgccctcgtaggtcgagtgtttttagattttgaaatcttaggattacatgtcggtgttgctaatatctggatgccttacatctgtcgacctcataaccccagttgccatgtttatatcagcagccaaacaactacacattttgttttcacttgaactgtgctacattgttatatgctctttgttctttacaaactaagacttgtatgctttttatttatcaattttagatcttgtttagattcttatggtgtcaaaatatttctacgttgtttcaggatcttctgtttttggcttgtagtcatctagataacagaactacaatgactagagtgtccagaatggatttttggagatttttg

SEQ ID NO: 87949 - DNA, 333 bp, Zea Mays
atggctcgtgtccttcgcctggcgcttgggcttaacctgcagcgggtggtggtcgagggcgacggcctcatgcttgtgcggctgctccgtggcgaggacaagcggacgcggatccctgtggcgctgcagaaggagatccacgggctgcttcgctgttttgcagggtgcgatgtgaggcatgtgtaccgcgaggggaaccaggtggcgcacaccctttgccgtcaggcctaccactgccccgccgtgtgggtagggactgtaccgtccgtcgtgtttgacaaggccgaggaggaccggcgtggcgtattgcatgagcgctcggtggtccgatga

SEQ ID NO: 87950 - DNA, 332 bp, Zea Mays
aacaaatccttatccgtacaagatatatatgacaacacccatacatgttttagtatctcagtttaggactacagaatccaaaacaaactgcacaattaaacatgtgactcagtttagcactacaaccacaaatatttcagtttaggactacaaccacaaatagaatcctaagagttctttctttttcttccttggggtcagtttcttttgaactatcttcttggtagacgttgctatcttggttgaagtaggcatagttgtctgagaagaattgctttctaacagagcagcaagtcgcctgcacaaattttggaattacctttttgtcattg

SEQ ID NO: 87951 - DNA, 95 bp, Zea Mays
aataaactgacaatttcatattgcagttcacacatatcacagatacatagttctgtgactcagttccagttcacacacagaaaccacacatacat

SEQ ID NO: 87952 - DNA, 865 bp, Zea Mays
atgaccaggacagctccctctttgcaaattcaaattggttcacatttgatggaggggggaagcattgatgatcatttatctgcgtctattccttcatcatcccccaattacatggagacttcactagaggccaaggaagctgatgatggtaaagtcattggcaccgaggatgaaatggaaacaatatatcttggaaatggtagtgtcgaggaggtaaaagatgtagcagaatgtaatgaacaaccaaattgttgtactgaggatgagcaattgaaaaatacaggagtgatggaacggcatccagatgcttcaaatcactatatcgacatatgtacaaacgagattgtccctactgcaacagaatcttcagccccatcagttgagatagtggtagagaaaatagtagatgaactggcagaatcatctttggatagttctatctctatacctttgccagctcttgttagtacgcctgccaacttggaagcatcttcagaacaagttgcccatgacactgatgtgcaacaaccagtcaaggaagctcctgacgaggaaattgatgcaaagaaaactgatgcagccaaagtaagcgagtgaattagcaacatgttggactgagctaatcagagcaattacttgtgaactgaaaacactgtggagtgtagtctgggcattgatcttgcttatgtgtgctcagctgccacaaaataagcctaaagcaaactgttgtatgataagagcaagtgattgttctggtatcaaccgaggcatatcactgtacaaatgagcaccattgactaatgcacataagtcgccttatctgaaactggtcattttctttgaaattcactctccagtttatgtg

SEQ ID NO: 87953 - DNA, 217 bp, Zea Mays
actgtctgctttgacaaaaaagaggattaaatctcctactgagattatatgtgtgatgtgctctttttttatttattggtcagagctacataagtcggagctggagaagcaggttcttcaagatgcagagaccatcaagatgattgctcttctcttccatcagcaagatatgaagactcgggcgcaagagtaaagacagatcgtgccgtatgctggt

SEQ ID NO: 87954 - DNA, 700 bp, Zea Mays
gaccgaatcggaggcgatggaattagcacgcacaagcagcaagtggtggttcttacctgctcgacgacgatgaacttgcgagcaggatccttggcgagcgcgtccaccacggagtcgagtgtgttcatcacacacgcgccctgccaggagccggtgcgtgagaattattaactgaaatgacaggaagcagcaggaagaaggcggcaaggtacctggatggagttgttggatccgacgtagtactggtcgatggtcatgagccacccgacgtcgtcgtgcgagtgcggcaccaagtgcacgttcagcttgttccccaccgcggtgcctccaccaccacccggcgtgctcctattgttgcacccctccgtgaacgccgatgcctccatcaccatcggcgttgctgctgccaccgcgagcgctacaagggctaccagcagaagcgtcggcgccatgatggcgtggagtgggaattcgcctacagcgcagacccgttggtttcttggagttggcgtttcttttgtgatgagtaccgggccctgccctcacgatgggctccttcgtaaccaaccaaccagctgtggtcaccctgcctgcagccaaacgctgtgctatatagcttggacctcgttgctactagtctgtttatgaccaaaataagctaaaattaaaagctaaatcatgtatattgtttagcaacttt

SEQ ID NO: 87955 - DNA, 725 bp, Zea Mays
gaccgaatcggaggcgatggaattagcacgcacaagcagcaagtggtggttcttacctgctcgacgacgatgaacttgcgagcaggatccttggcgagcgcgtccaccacggagtcgagtgtgttcatcacacacgcgccctgccaggagccggtgcgtgagaattattaactgaaatgacaggaagcagcaggaagaaggcggcaaggtacctggatggagttgttggatccgacgtagtactggtcgatggtcatgagccacccgacgtcgtcgtgcgagtgcggcaccaagtgcacgttcagcttgttccccaccgcggtgcctccaccaccacccggcgtgctcctattgttgcacccctccgtgaacgccgatgcctccatcaccatcggcgttgctgctgccaccgcgagcgctacaagggctaccagcagaagcgtcggcgccatgatggcgtggagtgggaattcgcctacagcgcagacccgttggtttcttggagttggcgtttcttttgtgatgagtaccgggccctgccctcacgatgggctccttcgtaaccaaccaaccagctgtggtcaccctgcctgcagccaaacgctgtgctatatagcttggacctcgttgctactagtctgtttatgaccaaaataagctaaaattaaaagctaaatcatgtatattgtttagcaacttttttggccacacttcttcccactgtc

SEQ ID NO: 87956 - DNA, 1059 bp, Zea Mays
atgcagcccgcaccaccaccatctgctgcggcgtcggcatcgcagacggcgtggccactggattggccggtggacgggcgctcgctcaatcctccatcgccgcccactatatcagtccagtatagcgctaggtatgctctctatgcctacgatgatttatatgaggatgacttagataaggaggtggatcacatgtcagtttcgagcaaggattggccaccagggtcgtggagtatatgttgcccaattttaatgaggtctggtgggatatcattaccttagatatcttgatatgcaaatagtttggtgagacatttgaagataattgatgttcatgtcacaaacattcagttaccttgtttatattaatgtgatctgcaataagttagaattaagcagccgacatgtcctccgtttgcttgattttatacagtttctttacatcagatatatatctattagtcagaaaggaaaataaaaactaatacatatttgacatacttctgacatcacattttgtttgactatactatttaatgttatgccacttgtcgaatatgcatggccttgggaatccaagaagaattgttggcatttgtaacattatttggtaatgatagttctatgctttctacttaaacaacaattatttttgatgcaggtgtttggactggaatgcgcacagtctgttactttgatgcaaaacgtatgaattggttggacagagccgccaacgaagtaccatgggtaaggatgtgctggacaatgaaagcttctgtcttgaaataataggatacaagaagcttgcaagtggttttgtgaaggcttttgtgaatcacttgaatcattagttcttttaagaatggttttgtaaagcgttagcaaatatgtgtaaaacacaataagatgtgtggcaaattcagtgatctagttgtacaattttttgtgtttatgggatatgtggatatttcattgtggaatgttaatgaagtgtgtatgtctatgtgattatgtgtataaaatatatgttttgtggtgcttttgtgataatatctattc

SEQ ID NO: 87957 - DNA, 210 bp, Zea Mays
atgtcgacgacggagccgctcctctcggccggcaccgcgaagaagaagagcgccaaggggcggcacgtgggcatcgacgaggcgcggccgcggatagcaggaagccagccagacaaacacacaagcacacgaaagaagaagcacgtacctgggaaccgcaggatagcagacacggttggagctctcgctgaaggacggcgatactgctag

SEQ ID NO: 87958 - DNA, 1033 bp, Zea Mays
tgtcattttatatgcagagaattttatgtctgggctgaaggtcgtgtttgatcgagagaggaaggtcttgggctggaaaagctttgattgttacaacatgggcaactcaagaagcaaccttccagtgaacccaaatccttctggtgttccccctagaccttccttgggaccgaacaactacactcctgaagctaccaagggcgcctcgtcgaatggcacccaagtcaatgtcttgcaaccttctgcaagtttttcgccgaagatgcattgcaacagaaacgtcctcgtcgccgctgctttgctgttcctcctaattctttgatcacctcaactccccatgacaatcttttcaaaaaccaaatcaacagatatgatatattttagttaaaacttggtttaccctatattgagttacgtatagtgcgatagtatcacattcttttggcttgtgtctacagttccagtaggagttaggatagaacacgggatgagtccatatcctttttttgcacgttcataatgtacctgatgggtgtactatgtacatattagatatgacttcaagatgtattgattttataggataattgaataatgatgctcgcatacacagatatatatacttcacatatgctcacgtgtaccaccatcgtcatctgtcatgtttttaatacagtctagaggcatggaccttcggcgaaaatttccagatacccgtactattttcatatggcataacacactggcattaagtcttatgagagaccttgccaaagaattagcgcttggaggaggaagaatgacctagaactgaagatggatgagctgatgtgcaaaatgaggggaagaatgacatataactgaagatggaggagctcaggtgaaaaatgaacttgttcattgtgtgttttctaacccttttttggaattgtattaaaatatactgtaatgaattggtgtaagaatgtgttggaagtagcaaagaacctgatgccttttgcaatgagaatgtttgtctggcaatttatcctga

SEQ ID NO: 87959 - DNA, 558 bp, Zea Mays
cgcgctcgccgcgcttgaggctcgggtgcgcctccccgctcgctgccctcgtgcctctggcttctgcaccgccgtcggccagggagacacaaccgacctccctctccgccaggtggcctacgacgcccatgcgtccctggggaacccgtggccactccaggccgaccacgcgcgttctctgcactgctgccggcagcgtccaaagagaggggaaagaactgctagttcagcatttgcttgttggtgaaaaggatgtcaggcttctggttgatctcgaaaagaatatcattgcaggaggtgccatctgattctcaaactgcttttgtatgtactttttgcgtggtattctaatcttgtttggatcgtgtatttaattcgctagcttacaaagagtttcggttaattgggaacatatgcatttgcaatggaaatggaactattgaacatctcaggagtagacttgagtgatttagccgtggagcactccttatgtccatccaaagcaaatggtggtatgcttggtgggtttgaaggcgacagatggtacaacattaactt

SEQ ID NO: 87960 - DNA, 479 bp, Zea Mays
cattttcagctactgtatctgctcttggcatctacaacaaagatgggatagtagtttatgatggaaaggggctgtttagtgctgctcgtgtttggtggtggggaggactgcacagttcgcatctagagcatcaaaacaggcgagctaatctttgtgcggagcatggcagacagtccctcacgacatcttgttggcccgaaagcagccatggcttgtgtagtccttggctgtttgatgtaaaccatagctaggaagtcagacatcacctagagctagggtgtccattcttgacatgtttctcttagtgataggtggatactgtctagctaggaacagagtcttgagggattgatggacgcatgcatcttcaattcttgtgtgttgtattactactggtacaatctccaattcttgtgaacttatgtatttggactgtgaatttgtgatatgaacatatatcaatgtgtttgaaatctata

SEQ ID NO: 87961 - DNA, 241 bp, Zea Mays
cctacgattcagtgtaccaacggcgctggcgacaaattccgtgggcttccccggcccacgactctgatgaacctgctcctgatgatcccgccgggcttctagatggcacgccccagccggatggtcaccccaagcgcggatcgacggtggcggctgcgcacacagcacagcgcccagacggtggtggtgttgcgatacaagaagggggttcctgacctggtgagctatggtaaaggaagcg

SEQ ID NO: 87962 - DNA, 1721 bp, Zea Mays
atggcagtcgtgccccgctccccttcatggcagtcgcgacaggtcagtccttcccaaataacctccacgccagggaaggtatttcccaaatcacgcatcctgtcggatggggcgcacgtccagcgggatccacgagagaggacgcaggctgtggcggcccacctcgtacgcctcgtgctcccgcgggtgtaccccacgaacacacggaacggctcccccgacgtcagcggtagcgccgacattgctggcctgagtagggtggatctggtcggtggaacgaggaagctgggaggagcggcccagaggagggcacgggaggtgggacccaggctaaagatggtgaggagcatgcgtgagcaggggggcgggagatggccagatggagatttcctggtttcctccccgccactgccgagcggccgtgctggtcctggttttaggtggaaaatgcgtccagccgtcgtccccacgtccgcacgtgtacgggccttcaatccattttccatgccaagtatttaccgaacgtgcattgtggagctggatggcatagtcggaggcgatgctcatggcgctcatccgggcggcgagctcgctagcgagcgactcctgcgggacacggaggagctggctgttgaggtagagcgggagcagcgcgtccaggatctacacggggtcctgctcgaactgcaccacgggggagaagggttgcatctcgatcttcaccttctcgcgctccacggtgagcttcccctccttggtggtgaggcggaagagctcgtcctcggtggcgtccatgcagacggtggcgccggcggcttcacgaggatggctgccgcggcgggggaggaggcgttgtctagcgccaccaagcagaaggtggcggcggtgaagcagtacatcgagaaccactacatgtcgcagatgatgtcgcttcaggatggcaaggagagcttgtctatgccatttttaggggagccgggttctagtccatgtcatgcttcccagcaggatcaaggtcgttgccgtctccaggatttgttttctgtctctccagcatatatatttggagccattctgcctgcttttatggtcgctggactttacttctttgatcacaacgtagattcacagttggcacaacaaaaagagtataatttgaagaagccttctgcctaccactataacattttggtccttggattcgtggtcctgctctgcggtttgcttggtatccctccatctaatggagtgcttcctcagtctcccatgcacacaaaaagtcttgctgtcattaagaggcagtttctaagcaaaaagatggttgatactgccaaggagagcataggaggaagtgctaccagtttggaaatatatggcaagatggaagaagttttcatcaaaatggatagcgaagagaatactgattctgttgaaagggagttgaagaacttcaaggatgttgttctgcaagaaggcaacgaagaagggagattggctagagaatttgaccctcgcaaacatatagaagcccacttgcctgttcgagtgaacgaatagagactgagcaatctgctgcagtccatactggttggtgggtgtgttggagctatgccagtcatcaggatgatacccacatcggtcctctagggttactttgcctacatggccattaacagtctaccagggaatcagttctgggagaggatatagcttctgttcat

SEQ ID NO: 87963 - DNA, 1721 bp, Zea Mays
gccgcagctcccagcttctccctcggctcgcccaagctccttcttcctcctccaactcggcgcctcgatctctctcctccctccacctctctccagccgcgcgtctccctgctctctgcgttcttcttcctccctggctcctactcacccaacgacgccgtcggccggatctcctctgctctctctgctcgccctggcccgccgtgctctgctcgtcacggccgcgtgagcggcgagctctctgccgcggcttccttcctcttccgctccagccttctcctttctctcttctctagccctgttcggcccccagcttggatcttccttccgctcgatcgtctgcctctcgcgctcggctccctggagtggatttcctcgccgtggagctcaacttgagtattgtccgccggccaactcccgctcgtctcccttagcaccacctcgagctctcctccaagtgccgcgccgcagccaagctccctctcccatggctgaccgtcgggtgcccctgctgcgcgcccttcttccctgtccccagatggccgccctgctcgagttcgtcctggtggccgttgactaggagcagactcggtcgcgcctctgctctctctgccgcgcccctggctcagtggctctaacctccctgtgaacgacgctggtattcaggatggcatgggtaaagctactcaagggggcgcgggagaatcaccagcaggaggcgagggcgacgctgttccagcagctcaggcgcggcctgcggaccacaaggcccaacaagaggaggtgcacaggccttgagtgggtgaattaggtctatgactatgtatcgtggctccactatatatgggttgttcgtagacagagagagggcgttttttggctgtaagaactcaggcggcggcggcgatccgaggtgatcgtcttccgaatcggaccgtactttccacaccaccataatcaagcgtgtgttccgtcttaatcctatgtgagtgttgtttgtgttgtttgaatgctaacatttggtatcagagccaagcgggatccaccaccgcacgaccaccttaccagatttcaagtgaacgctggggccatggcgccgcaatggaacgaagagcaagtggcgcagttgttggcgaggattgaagagggaaatcaagagaagtggcggatgatggacacgatgcaagcgacgatcgagaacatggagtcctcggtgaaaagtgtattgtctgaacaaggcgatctgcagaagtggcgctcggaagaggaggcgaacgtctctaaagtcgtggaggcggtgaaggcgatacagagcaaggttgatcaagcgattctaaagaaggcggtgatcctcccgaccaacgagtcactgggagtggatggtgtgtcggcttccacccaccaggaagcgattctgtctgagacgaagcacgagcaaatatgctaccgcaccgttgatccttactggaggccgggtgccagaacggattcagtccggacacctcctccggtcggaggtattgtgcccacccacaactcgttttcgccacaatttggttccggggcgaccagtagagcgtcgatgggaaattggtctcagacatcaagagttatggtgcctagtatgagttcccctatttttgttggatcaaatccaaagcggtggagtcatagatttgtagatggctttaaggatgagattaagtcagcagatattgttc

SEQ ID NO: 87964 - DNA, 1717 bp, Zea Mays
caattagactgtggtcaatcttccccgctagtccttgttcaccttctccggcggcagcctccaaaccaccctcgcgctctaccactccggtcgtgtagctccccagcaggcaaccaccatcgcgcacccaccggccaccgcgtctacatttgccaatctctgcttgaagcgttctgcccactctttcaaccgagaagttcactattatcctgcgcatgttccctttccccctttcgtcgtggcacgcacgttaggagttcgaccgattgccggaacgtcttccgccgtcttctgcgccatcgaaagagcgatgaggtttgtggtgacgaaagtttgcagcggcggagggaaggcgcgggcgggtgcgctccatatagccggcgccggcattggcattgagacgccggcgctgctgctgtccactcgtaaggggctgccggcattcttgtcctgtgacctccttgcctccttgccactcccggactccctccttctccatgtctgtcctacccattttatagaaggccctccagtgaagacaatatcagctattaggggtttgcacggtatgctgggtttacctgatcacattcttgtagcggcggcaagcgattctattgagagtctgccatcatgtgaagccaccaacaaatttggtgcctcctttgaaactccttcgggtcgtagactggtaaaaccatcagactatatggagttgatttcctgtatgaagcctaatatatgggccagtttggcggatgaggtaccagcttgggtgactgagaaacgaaacaaagtctctgttgacaggacattgcggtggcttgatgcatgtattgctttggatgtggcttctgggactaatagttttggtgtaattgtgggaggatctagcttagaacagcgaaagctatgtgccactgaagtgtcgaagcggaatgtttcaggcttttggattgcaggatttggctttggagagagtattgaagaacgttgcactttgctcaatgccacaacagattgcttgccacgggaaaaacctcggctcgtatctaggcttggtcttccagaggaggtcttggagggtgtggctgctggtatcgacctttttgactccacatacatttaccaacttactatgggtggtttcgcactgatcttccctgttgacatggttgaaagagaaatgcagaatggtgtactcaacactactgatggcgattcaacaaagattaacctgcgtgctacaacatatcggaaggatacgtcacggctagttgatagctgtaattgcttcacatgccaaaatcacacccgtgcgtacctcaatcatttgctcaatgtccatgagatgttggctcaaattcttctggagatacacaatacccatcattatcttcgtttcttccattccatacgggaggcgatcaaggttggagagtttgatcttttccgacaggagttcgttaagaagagacgcacccatttcgctgctgttgtggtctagacgtgaccaagagttcatctggctgtcctcacaagattaacttatcaattaatcagacttgtgtacacctgaatccttactagtcaactttcacgtctatgattgacaagtctgaaaagattcatacattaagtgatagaagttgtgtgctaaacaactgatgcattttcttcattggaaaattaattaccattccttgttacctgattt

SEQ ID NO: 87965 - DNA, 211 bp, Zea Mays
tttgttttcttgtaacaaacctatttggtggacctacatgtgcttgtacttagatgcaatacataatatcatgtattataattttttacttttttctaccttagcacaaagtggttgctgatcattgcccaattttgattactttatgttacaagagcagattatttgagtggtcgataagcattgcattttaatgtacatggtgaatttg

SEQ ID NO: 87966 - DNA, 1366 bp, Zea Mays
ctgttccgcagaatccgagtccaatagctctcctccccagggctttcaacttctccaaaccccatctcgccgccgaggccgagcgagcagagcagaacaccacgtcggcggcttttccctgtctctccgctggatactacacccgccgccgcagcgccgatcctgtccgagtcaagcggagcgggggatcggattggttgcttccttccctccatctcatgttggtggactgagagatggagttttaatttcaaatagcatctagaggactgccactaagcttttaagttggtatataatgggtggctgttgttgctgttcgtcgagaacatctgaagcagttagagcacgagcaccagttgatatatatcatcaacaaaatcttgaggagcaggagccattgtcttcaatttttgatggatcatctccagcctctgcaattgttgcagtagacacaaatctggatacttccacacctgacacatatcgagcgccgcctgcacccttgccttatgatgttattttggcagtcccaaataaccctggtttggagaagccagacactaagagcaaaactgatgaccaacaagagtccataaatgatcaggagtctttaaaggtggatgagtcatgtaagaaaagtgtcactgaagataaggctgatgaggaggatgtttgccctatctgccttgaagaatatgatgaagaaaatccccgttctataactaaatgcgagcatcatttccatctttgctgcattctcgaatggatggagcgaaaagatacttgcccagtttgtgaccagattactttggtggatgagatgttcgaataggtttggtaaccttggtggatcatcactcgaagctgttcgttactgagaaagtgcagcaactaatttacttttgatattgatccattccgggtggctcgcatggtaatgaattgagggggcaaaaattgaaaggatgaatgtcatgaaatgtatttacaacgcctcctttgtcatgcgttgtgtcatgctatatatatgccggcttgcgggttcattcagttcaaagtccaggactatccttttgcttttctgaattcagagtttcagacatctgctggttcttccaggttccggtcagctgtgtatatcatatattaggtggttgcaggtaaaaatggtctagagggtgggggttgctttgtacaatccacatggtatttaagcttcatgtatataatcttttctgtttctcttcgttttgttctgctgaatacttgcagatccttactgttctgataaaacttactgactcccaaatctgtgccagacaaaacgtgtttcaggaacataatacatctgatagcacttgtt

SEQ ID NO: 87967 - DNA, 1384 bp, Zea Mays
ctgttccgcagaatccgagtccaatagctctcctccccagggctttcaacttctccaaaccccatctcgccgccgaggccgagcgagcagagcagaacaccacgtcggcggcttttccctgtctctccgctggatactacacccgccgccgcagcgccgatcctgtccgagtcaagcggagcgggggatcggattggttgcttccttccctccatctcatgttggtggactgagagatggagttttaatttcaaatagcatctagaggactgccactaagcttttaagttggtatataatgggtggctgttgttgctgttcgtcgagaacatctgaagcagttagagcacgagcaccagttgatatatatcatcaacaaaatcttgaggagcaggagccattgtcttcaatttttgatggatcatctccagcctctgcaattgttgcagtagacacaaatctggatacttccacacctgacacatatcgagcgccgcctgcacccttgccttatgatgttattttggcagtcccaaataaccctggttttggaaactctgtaggtttggagaagccagacactaagagcaaaactgatgaccaacaagagtccataaatgatcaggagtctttaaaggtggatgagtcatgtaagaaaagtgtcactgaagataaggctgatgaggaggatgtttgccctatctgccttgaagaatatgatgaagaaaatccccgttctataactaaatgcgagcatcatttccatctttgctgcattctcgaatggatggagcgaaaagatacttgcccagtttgtgaccagattactttggtggatgagatgttcgaataggtttggtaaccttggtggatcatcactcgaagctgttcgttactgagaaagtgcagcaactaatttacttttgatattgatccattccgggtggctcgcatggtaatgaattgagggggcaaaaattgaaaggatgaatgtcatgaaatgtatttacaacgcctcctttgtcatgcgttgtgtcatgctatatatatgccggcttgcgggttcattcagttcaaagtccaggactatccttttgcttttctgaattcagagtttcagacatctgctggttcttccaggttccggtcagctgtgtatatcatatattaggtggttgcaggtaaaaatggtctagagggtgggggttgctttgtacaatccacatggtatttaagcttcatgtatataatcttttctgtttctcttcgttttgttctgctgaatacttgcagatccttactgttctgataaaacttactgactcccaaatctgtgccagacaaaacgtgtttcaggaacataatacatctgatagcacttgtt

SEQ ID NO: 87968 - DNA, 363 bp, Zea Mays
ttcagctcgtgcccagggcctctcctcgcccgacgccgcatcacatgctccctgctcggcctccccagcgtgctgctccctcgccttggcccccctacgagctccttctccctcgcccggttttcagctcgggcctcgccggatgcagacgccgcttctctgacctcgcctcgacactcaatcgctacagcacgctatgccgtgtgtgccgcactgtcatcgtttgctatcctcattctcaccaattttcctcatcgtttcttggctacaaccgcgtcagctcctacgcgtcgtgcacgtcttgtgttcgggtcgagccccagtattttgaggaaaaggaagctccaatgcatcgaccggtga

SEQ ID NO: 87969 - DNA, 80 bp, Zea Mays
aagttgcaatattctgattacagatatccttgctccacgccaaggcagggtttatctactacttccatcttcccaacccg

SEQ ID NO: 87970 - DNA, 880 bp, Zea Mays
agagtgaacacaggacaccagtatgttttttattccaggcagtcttctctgagaccatgccaggcccgtgttccccgccaacctcgagccacgcatgaacaaacagtggcaacaaacaacatagcacgacggcgattaacttaatcaatcaatgcccacccgcaagcatgcattaatttcttctctagaactagaactagaaccagaaccagtactagcagacacaagtgtctaatcctgcgactaactcaacatcatcaattgatagtaatcatctacagacactgctacaatgtaaggtaaggtacagtacagtgctactacgtacgagtgggtttcctctaccctctccatcaccactacagcagaagccgccgcaaatggaggccgcagagcaatgtcgccaccacgaaccgagccgaagccaccagcggggcgcccgcggcggacgcgtcgccggtggccatgttggcgagccaagagacgccgccttcgccgctgctggctccgagtagcacgctgccttgttccccgccctcgatgcccaggccaccaccaccacccatcggcatcccgctgtccggggtggcgtccgtgaacgtagtgcccggcatcatggtccctgtcggcaacgctggggtcgcgcccggcattggcatcgtccccggcaccgtcgtgggcgtcgcccctggcactgtcgtcgttgtcccccccggcaccatcgtcggcgtcgcgctcggcatggtcgtcgacttctggctgcgctcacgttacggatacacacaatagcagcgccaaccgatcagtgttcacatgctcagtagtacggacaaaagcaattcacgcaaatggaaaatagccccaaaaaaataaaaacaaa

SEQ ID NO: 87971 - DNA, 169 bp, Zea Mays
gatgccaacactttaggctaggatagatatttatcatgctttcctatatcttggtgtacatgtcattttgtgatcttcttgaaagccacattttgtgtttatcatgctttcctatatcttcgtgtacatgtgatttaatgccagcattttgtgatcttcttggaagcca

SEQ ID NO: 87972 - DNA, 120 bp, Zea Mays
atggagccgtccagctcccatctcctccctgttgttcacgtgcaggaggcaaggttgaagaaggcgccttgtctcaatgacgtgtgggcccaaggcagggttttagtggaaaagttttag

SEQ ID NO: 87973 - DNA, 997 bp, Zea Mays
gtcgccatcctccaccggctagttacattataaataccccatccatggattggctgttagcaccgtcatccatcctagcaccgtcatccatccatcggctggatttcccaagcacgctgctgccagggtctccagctgcaagcacgcatcagcattccacaagcgaaatggcggcgacggcagccgtgccttcttggcgccgggcattcgcggcgctcttgctggtcctgcagctgcgcggcgcgcggtcggcgacgttcaccttctgccccgccgtgcccaccagcgtgaagtcgacggggcagaaccctcaggccgccgggttaccgcagcagctgaacaacggcaccaccatggtcttcttcggcggcaacacacagaccagcagcgccgccgcctcatctgccaactctctcttcgccgtcaccgtcaccatcacagcagccgtcgcgctcgcgctctcgcgctcgactcgcctgtgaccggtcatcatcgctgtcaggtgggccacgcttatcagaagaccggtgagcatacatacagtatgttgagcccctagcgactgcgacggaacatgagcatagtattctaggcttgtagcttaggtaggacgagtagaatttcttcttttgttttttggcttcgaaaatattcttttcatccgttgggcagagactacaggtggtgtggggcaattctttcactgttctttctcctagttaggtcgtatgcatcgggaggatgtgctgtaacctcaaaagcgattattggttgattgattcgattggggggataatcaaaatttaagcttctttcttctcacacttcattacgctctcaacatttttcaacaaccgacagcaactatgccagtgaatgattgggagtgctcgggtgctaaataatcaacgtgttgtcgcgagccggctatattcctggactcgtgtattgacactagttaaatatctgcacgtcacatacagaaaataaaataaca

SEQ ID NO: 87974 - DNA, 441 bp, Zea Mays
atcctccatcagcatccatcaactgctaccgagttaagtatattcagagctcgtctgcagccaaaagcttccatttgcattgcgatgggggctctacctcgcggcctgctagctggcatctgcgccgtcttgttagcagcagtggttgcccatggtgcggaacaggaaacggcgtcaatggtggtcggcttggccaagtgcgccgactgcaccaggaagaacgtgaaagctgaggcggcattcaacggccttcaagtggctgtcaagtgcaagaacgccgacggcgtcttcgagaccaagtgtacccctttcctctgcatccactcttacgtagtgtctgttgcatcttgcatagaccgtcattacctcctgtttcttgacagtgtttgtcacctctcaccggccagggctcccactaatagaaataaaacttttgttcta

SEQ ID NO: 87975 - DNA, 1293 bp, Zea Mays
atcctccatcagcatccatcaactgctaccgagttaagtatattcagagctcgtctgcagccaaaagcttccatttgcattgcgatgggggctctacctcgcggcctgctagctggcatctgcgccgtcttgttagcagcagtggttgcccatggtgcggaacaggaaacggcgtcaatggtggtcggcttggccaagtgcgccgactgcaccaggaagaacgtgaaagctgaggcggcattcaacggccttcaagtggctgtcaagtgcaagaacgccgacggcgtcttcgagaccaaggccctcggtgaggttgacaagtccggcagcttcagcgttcccctcccggctgacctcctccgcgaggacggcgagctgaagcaagactgcttcgcgcagctccacagcgcggccaacaagccatgccccggacaggagccgtcttggatcgtccggccaaccaccgacaacgacgacgacgataagatgaagaataccttcgtcgcagtcgccggcaaggtgcactacccatcaaaggagtgcgcctctgctttcctcttctaccatttgttcaagaagcacctgttgcacaagaagcccatggtgatcatccctcacatccacaagaagcccatggtgccgatgtaccgccactcgcccgtgccggagtacaagccacctcacccgacgcccaccccgatctaccatgctgcagctgagcacaagacacagaaccccgagacggaccctgagaagttcaagaagctgctccccttcataaaaaagaaccccttctttcccaagttccccaagtttcctcccggcaaggaggagaacaaggcgtaaaaatatgagggcgagagaccaagtgtacccctttcctctgcatccactcttacgtagtgtctgttgcatcttgcatagaccgtcattacctcctgtttcttgacagtgtttgtcacctctcaccggccagggctcccactaatagaaataaaacttttgttctaagcaccttaaattcttcatgctgggttagtcatgactcaagggatgttttgtttgggattgtaatctgctcagattatataatctaataaattttgaacgaagcgttagttccgaacagattataatcctgaacaaacacccctttatatggtctatatgtataatggtatttagacatcttcattccgagcgagatagaaaccttttctgggcccgctcggttcctacgttttcggaaccatcctactcgaattgtttgtctaatttatataagctttgatc

SEQ ID NO: 87976 - DNA, 794 bp, Zea Mays
gatcctacttcgttgcggccaggtagacttgacaggaaagttgagttccctcttcctgattggcggcagaagaggcttgtgttccaagtaagttgtatttttgtgtgaaattgtgaactaattgataagcattatattgggttcttgcgaagtagcatgacttgcatatttattaatttgttgaagtgttgtataatatattggattcgcatatgatgaaacttccatggattgcttcaggtattgttattaaggtctttttcatctcatgcaaataactattaagctgctcaaatttctttatttggtaattaattaaaatttttaaccatgtcatattgcatacaaattgccaactttttttgcacatatgcgcatgctcaattgtgataatgtcatatggtctgtcaaggatttacggtcaatgcaaactaaattgttttcttctttatatgttttgacttgatttttcatatttgtcactgggatcattttttctcaactgttttgctggctactgtttgaaatcaggtatgtactgctaagaagaatttgagtgaggaggctaatttggaagattatttttgcagaccggataagatctgtgatgctgatgttgagttggtttcatggcacagaccaaaatttttatgcatttgttgttttctaacaattgtattgctagggtacttttgtcctgcgctggccaaagctgtcaaaactatgaaaaaggcagagaagctgctccttatagtaaagccattggtagaccaacagttggagaggaaggtgtt

SEQ ID NO: 87977 - DNA, 324 bp, Zea Mays
atgcgggatcctcgccaccgcgggacgggtcccagcggaggcggaaacgggtcccagcggaggcaaaaacgggtccccgcggggaagtcatgcgcgtgggcgagcttggaggtcgacgcgaacgacaggcgtagggtcgcgtcgccgtcgcggatggcggccgtcggtacggcgcgcgggaaggggttgttgaggcgtgcgtggtgcttcttagcagtcttgggtgacgccatggcgacggcggtgatggcgcgcactggcgaatggaacggacggagaggccgtgcagtgctctctgctcggtccgaggccatcattggctga

SEQ ID NO: 87978 - DNA, 3802 bp, Zea Mays
ctcccctcctcccccaactatccccactaccaaccatccccaaaaccccacgaggaatcccgtaaattcgtcctgtttccccgcagatcgcaccatccgcgcgcatttccgtccaattcgacccggttacttggcttctttgattggggaggggagatgggggagggggtgaaggagatgctggctccgccgatccagctggccgacgaggtcgccaagcagtgtgctgccgcgcggagcttccgtgccgagtgcgcagaacttaaggcccgcgcggacaagctggcggcgctgctgcggcaggcggcgcgggcgcaggaactctacgaccgccccgccgcccgcatcttggccggcgccacccaggcactgtccagagcctccaccctcgccacgcggtgcgctcgggggcacccgcgcctgcgcagcctcttcacgctcagccccgccgccgggttcccccgggccgtggcggcgctcgacacggcgctcgaggacgtcgcttggctgctccgcatctcctcgcctggcgccaccggcgacggggacgacgactcgctcctgggcctccccaacatcgctcagaacgagcccatcctcttcttcatctgggaccatgtcgcgcgcctgcacacaggctcccctgccgcccgcgctgactccgccgccaatcttgcctcgctcgcccgcggcagccagcacttcgccaagctcattatcgaggaggatggcgtgccgccgctgctcaaacttctcaaggacggcaccgacgagggccaggaggccgcggcacgcgccctgggcctcctgggctgtgacggcgagagcgtggacaagctcgtgcaggccggggtttgctcctcctttaccgccgcactcaaggagctgcccatgcgcgtgcaggtagcagtggctgaggcgatcgcttccttggctgaccagagctccacctgccaggaccttttcgcgcagaacaatgccgttcggtaccttgtcgggcaccttgcttctgggactatccaggagcacagcaggtactccgtcagctccagcagctacaagagcagcgcagccactgctgccacgacacagcagcccatgaagtttctccactctgtggtgcttgccaagacgctcagcatgcgccacagcagtgaccgtgacaccaccagcagtggcgctgatgagctgccaaggatgtccaatggtacaccaggagaaaggaacccccaaatgcaatcggtggtacactcggctatggctgccaagacaaacacaaatggcttattggttccgttgttcaggcctcagctgggcaccagtggccgtggtgctcgagaggtcgaggatcccgaaaccaaggcacatttgaaggctatggcggcaaaagctttgtggaagcttgctcataaccatttgggtgtgtgcaagagcattacagagtcacgtgcgctactgtgctttgctgtgctccttgaaaagggtgatggcgatatgggcactaacgtgcagtacttctcagcaatggccatcatggagattgcccgtgtcgctgaacacagcctcgtgctgcgccaatcagcattcaaacccagttccccagcagccaaggctgttgttgatcagctgcttcgtgttgtccgcaggggtgaatacgatgcattgcttctcccatgcatcactgcccttggctgccttgcccgtaccttcacagcaagtgagaccaggatagtgcctcctcttgtgcagcttctcgatgagcgtgagcctccagtcattaaggaggctgttgttgcgctcacaaagtttgcatgcactgagaaccacctacatgtgaatcactgcaaggccattgttgatgatggtggtgcgcggcaccttgtccagcttgtctacctgggtgatgaggtgcaaattgaggcgctcatactactctgttacattgcattgtatgtgcctgagagcgaggaactcgcacaagctggtgtgctggctgtgctgctttgggcatcaaagcaggctcacatggttcaagacatgcgtgttgaggcactgcttccagatgccaaaggaagacttgagctgttccagtctagggcctccaggtgatgttggagatcggatcattgggcatcggttagttctttattgcaatgtgtaattatagtagaattattcccatcatctgtaattgctcttgtgaggtatggtacattttagggacatttacatttcgcccactagtctggacgcgctgctcaaatctacccccgcccaaattctctaatcagttttcccctcccacctccacactttgctcagaaatcacctcacggcgctatattctcccgtcaaaggctcttacaggtggacccgacaccttacaagtgggacccgctcccctttcccctttcccctttcccctgcttctcttcccaacgcacgctcccagcttctcttcccaaattgaaacgcacgctcccaggttccctgcagcggcccatccatcgccctccaccactcagccggcgagctcctcgacggcgcgctcctcgacggcgcgccccggcgagctcctcgacgagctcctcgacggcgagtccccggcgagctcctcgacgtgcccttctccggcgcgcggcacggcaagggtgtccaggcggccatcaccggcgttcaagggtgtccaggcgcggcacggcgcgggtcgcagacgtgcgcgggcagatccttgccgtgcgcgggcaggtcccggcgctcgacggcgcgccccgcagccgcaggagccgttcgcccgggccgcacggcaggcggatctcggcctccgcgggcgctccggcgggcggatctcggcctgcgcgtgtgctccagcgggcggcttctacgcgggcggatctcggccgccgcggtgtgctccggctggcggatctcggccgccgcggtgtgctccggctgacggcttctacgcgggcgcttcggcgggcggatctcggccgccgcggtgtgctccggcgggcagcttctacgcgggcgagctcgacgcgggggtgggcacggctgggagcagccagccgcaagcgagctcgacgcggagcgagcgcttctccggcgagcttctcgagagacaggcagcatcctccagtaagccccaaacgtcggtcggctcctagtgtgagcatccatagagaatgtcgcgtgcgagctcatccaacagattgcaaggttttcccagcttcgaccatgtccctctcgtccagtgtcctgattgcacccggtcagagccattggttaggctcaggacgaaaaaatcagaaaacggcaactacggcagagaattcgtaaagtgcgaaagcaaatcacaacccggcaagatccttaagaagtgcaacttttttatgtggatggatgagtacatcgaatggttgcgcttgagtggtatgactaaacagacatggtccagttttgagcaagaacaaggtgctacgcaattgatggtgaataattgtggagcagagttatgtggtgcagataaaggagatgtgtctgtgaagttggacattctagcaattgaattgatgaagataaatggcaacctcaacaaaattatttacattttagtcatttgtgcttttatgatatttgttgttttactttttattatgaaccaaggtggtaagcactagaaatttgtaagctctatgcactatggatgaactatggatgaagtaagttgtaagcactatggatgaactatgacatcaaatagctaactaatgaagaatccaataatatttatttaggt

SEQ ID NO: 87979 - DNA, 303 bp, Zea Mays
atgcatgcaatgcacagcgcgtcgacgacgacgtcacaggccgtggcggccgtggtgcccacggtggtggtggcggaggaagaagttgatcatcggcgacggagccggagccggggctggcagcggagggaagaagaggccggtggcattgaacgccgtcgccgccggtggcatggagggcgccgcggccattggtggcggcggcggcatgaaggccgccggcggggcagcagtgagatgcgcctcagcagcaggggccttctcgtcggcgatgccgccgcctcctcctcccgccgccattaa

SEQ ID NO: 87980 - DNA, 702 bp, Zea Mays
atgctggacgccctcgacctgtccgtggacgagcgaggcgacggccatgtaccaggcggtgtaggtggtcatgacgaggcccaggaaggaccagacgcggtagttgtggaaggaggggatgaagacggtggtggcgcagcaggcgccgaagacgtaggtccacgtccgcttgtccagccggtcgttgacgtagtagatgttgctggcgcagccgatgagctggatgacggagccgaagaggaggaaggtgcagttgaaggccagcccggcgttgcgccagtgccggcccagcagcccgtccagcacctcgaaccactggatcacgtggttccggaagtccgcggccttctcgcgctcccgacgggtgcggtactccaggtacaggatgctgatcaggtacgccgtccagctgcccagcaggccgtagaagagctggaacagcacgccgctcagcatccccagctgcgcgaacgagtagggcagcgtcagcagcacctgcgccacctggttcgacgcgcagctgaaccacgcgtcgtacgccgacccgccgtgccacagcagacccgacagccgggacttgacgccgctgtgttcctcctccgcctccgtcatctccgccgcctccaggtgcccgccgaacgcctcagcagcaggggccttctcgtcggcgatgccgccgcctcctcctcccgccgccattaa

SEQ ID NO: 87981 - DNA, 2138 bp, Zea Mays
tcatgcgtgcatgcatgtaagatcgagctgtgtttgatcaatgcgtaggcctatataaggcactgcattgcctcctcgtcatctcatcatcgagtcatccatctaaacatccgatccgaccatggcggcagacgcacttcggggccttctccccggcgtttacgccgtgctgatggtaatcgccgtcacaagcgccgcctccagcgacgcgtcctcggtggtcgtcggcctcgccaaatgcgccgactgcaccaggaagaacttgaaggccgaggcggcattcaagggtcttgaggtggcgatcaagtgcaagaacagcaaaggcgagtacgagagcaaggccatgggcaagcttgatggcttcggcgccttcagcatcccacttagcacggacctccacggcgctgactgcgttgcacagctccacagcgctgcggggaacccgtgccccggtcaagaaccttccagaattgtgccacaatcgtcaaagggcaacttcgtcgtggtccctggaaagacagactacccatcgaaggaatgtgcgtccgcaaccctgtgtgggtcgatcaagaagcacctactagaccatttccacaagaaacctgtgccaccaaagccaaagccagaacctaagccagagctggagccgaagccagaacctaagccagagccagagaaccacccacctacaccaacatacggatcctcaactccgatctaccatcctccatccaggcagttgtttgacaagaaacacatgtttgataacttccacaagcaccacgactaccatcacttctttgaccacttccacaagaaaccagttccaccaaagccaaaaccagaacctaagccagaaccaaaacccaagccccagccagagtaccactctccaactccaacatatgggtcgcccacaccgatctaccaccctccggctaggcatttgtttgataagaagcccttgctagatcacttccataaggaccatgactatcaccacttcttagaccacttccacaagaaacccgtgccacaaaagccaaagctagaacccaagccacagcctaagcccgagtaccaccctccgacacccacatatgtttctccaactcccatctatcacccgcccgctgagacagaaatgaagtatgacaagaagcactttgatcactttcacaaggatcatgactaccaccacttctttgaccacttccacaagaagcctgtgccacccaagccaaaaccggagccagagccaaagccaaagccacaacctaagccagagtacaagccccccatgcccacatacgggtctccaactcctatctaccatcctccagccaagaaagaagtggcatttgacaagaagcacttccttgatcacttccacaaagaccatgactaccaccacttctttgaccacttccacaagaagcctgtgccaccaaagcctaagccggagcccaagccagagcccaaaccacaacctgagcctgagtaccacccacctacaccgacctatggatcaccgactcccatctaccaccctccggccaagcattgatcgatggagttgaatggtggtcagtgatcgacgtcgctagctaagagttgcatgtgtggtctagctagcgtggtttgcagtcctgcttttttgtttctacagaataaattatagctttatttgggtatgtatacttatttgtgtatcggttagtatcatataaatgtatgatttgagtgtgcgttgtttttaatatgcatgttctatgatgtactttattccttttaaaatattattatttatatgtagaagttaaaaggtttacagtagtgtgatttgcttcttttccatgcccgaaggtctggatgtgtggacgatcaatgtgctgaagtgaatagtgtaatgtatgcccgtctcgatattagtcatatgaaaatattctggatacaaggttgtcctatatattgttttatctacgaagaaaaccatctctagggttagtttggaaattaaactcaaatttagtataacacgacctcattttttttattgtactactaattattagattatgatgaatgaaatgatgatcaactcattctataatctattccacaaaccaaataaaaaa

SEQ ID NO: 87982 - DNA, 786 bp, Zea Mays
atggtatttgaggatatgggtatccaattcagcgtagagccatcctgcatctggagagagaacactgcatatcctgatggcgagtggctaccaggcgccgagctcaacgctgctgctaattgcttgactgctaaacccgggaggagctccgacggtccggccattgtatggagggatgaagggaaggactctgatcctcttaacttcatgtctttggaggaattgaggaagaaagtttggaccacagaaaattctgacagttctccatattcaggggagcccaaagcaattccatggacacatataacacccctaaaggcagctgccgatggatggtgtcacatggatattcgtaaaggagatgttgttgattggccaaccaatcttggtgggattatgggcccttggcttgtttacgcctccttgctgaatggagcttccatggctctgtataatggctccccaaatagttcaggctttgtgaagtttgtacaggatgctaaggtaacaatgcttggactggtacccagcatcgttcgtacttggaagaatatggactgtacaactggactagactggtcctccatccggtaattttttaattgctcaactatccagaccttttgtcttaactttgcaagttacacatatagtatggtatgcagtttctattgaccatattcattatatacagatgctttagctcctctagggaggcatccagtgtggatgattatttatggctgatgggaagagcgggttacaagccagtaatcgagtactgtg

SEQ ID NO: 87983 - DNA, 837 bp, Zea Mays
atggtatttgaggatatgggtatccaattcagcgtagagccatcctgcatctggagagagaacactgcatatcctgatggcgagtggctaccaggcgccgagctcaacgctgctgctaattgcttgactgctaaacccgggaggagctccgacggtccggccattgtatggagggatgaagggaaggactctgatcctcttaacttcatgtctttggaggaattgaggaagaaagtttggaccacagaaaattctgacagttctccatattcaggggagcccaaagcaattccatggacacatataacacccctaaaggcagctgccgatggatggtgtcacatggatattcgtaaaggagatgttgttgattggccaaccaatcttggtgggattatgggcccttggcttgtttacgcctccttgctgaatggagcttccatggctctgtataatggctccccaaatagttcaggctttgtgaagtttgtacaggatgctaaggtaacaatgcttggactggtacccagcatcgttcgtacttggaagaatatggactgtacaactggactagactggtcctccatccgatgctttagctcctctagggaggcatccagtgtggatgattatttatggctgatgggaagagcgggttacaagccagtaatcgagtactgtggaggcacagagattggtggtggattttttactggatcgatgctacaacctcaagtgttgtctgcattcagcacacctgccatgggttgtaacctgttcattcttgatagcagtgggaatcctttggttcatataaccgtagcgtttgattgttag

SEQ ID NO: 87984 - DNA, 1677 bp, Zea Mays
ttattgtattatttttgcatgaacgacgctatcaaggtccatggaattagcttacaataacagcatagatacccaaacaaagatcgaaaaagataaacactaaggtagaatgacaggaatggtcctatcgaagatccagttgatggggatgggtgtgggtttcttttgtgctttgaccgctctatcgtgggccttctcttccatcctctttatcttgtgcggcagcgcgcacaggtagtcccgcgcgcgcctcccctcgccggtgagccccgccgcaagttcctcgacgccccactgccgtatgaagtgctcgagaatggcgcggtagtcggaaaccgtgtacgtgccggcctgctgcgcgatggcgacgaagcgagcgtagaagtcgccgctgctgtggcggccgtcgttgatgagcacagtgggcatgtcgatccggcgccgcatcatgtacgccatggcgcgcacggcggcgtccgggtcggcctcgaagaacttgcccacgacgcgggtgtacgccgcctcgtgccgcttctcgtcggcggcgacggtgccgcagatgcgcgcgagagcggcgtccccggccccgcgcgcgcccacgaggcgcgccgtgttgccgtgcgcgatggcggtggcgcgctcctggaaggcgacgtagacgaagccgtggaacgggctcgccggcgcgtgcactatcaccccgtcgcggatgaggcgctgcacggtgcgctccacctcgcgcatgtggaagcggcccgagaggtgcatgtagcggttgagcacgtcgccgtggcggttctcctcggcggaccagccgcggatccagcgcgcccacgccgtggcgtcggctcccgtggcgtcccgcacgacctcgaggcggttcagcccgctcgggtacgagggcagcgcctcctccgtgatcatgttggcgacgaggcagacgaggaggtcgtccggcacccccgccgcggccgctcggagctcgaggcacgcggcgtggaagccgtcgctgcccagattcgccgggtccggtagcaggtcggacggctgccacgacgcctccaccggcttgagcaacggtagcacgtgctcttccacccacggctccatctgtctcagcatttccagcctctccggagccaggtagctgcgccattcgtcctccccctcgaccacgtcgtccttcttctctcgccgacgtccggccacggccatagtcgtcgttccacttgctgtggtagccatattccggcacctcctgctcattggacgactcagcatgcatggcatatatgtagttgcgttgcatacgtcaacaatcactcaacgcaagacacgtacgtctgaattattagaaaaaaaacgcagtttaatttgcggtggttgctttgctatgctgcacttattttgttatacacgtaccagttcctgcgcgtgattgtcgctagggcatggacaccgttgccgccgctagcagcggcggtggctgtaggttgtttgcatgcaccaggaccactcagtttacacgactggtacccaaacttgtaaaaggctgatgccatgatcattgtgttgaaacagcgtgcagaggagatgactacactcgagcccagagagccctgcaccaggggtaaaaaaaaaaccagacttgggttgtttgttgcatctgctggctgc

SEQ ID NO: 87985 - DNA, 369 bp, Zea Mays
atggtcgtcggccgaccaagaatggaggggatgggagccgcgacagatgggattgctggccacgctcggtcagcgtgccgcgcgtggagcaagggagggcaggggacgagaggccctgagggcacgcgccgcgggtgggctttgtcgactagcggctgccgggacacatgggcgaggggaaaggggaccatggccaggggaggtagagggtggggcatcgggcagggcagagggctcctcacctcgacggggaaacagcagctacagtccatggatgaaccttcaactcgccatggatcatcggcgactcgtcggagtagtgggcggttggggaacgtcagtggggttgcgtgcaggggcttcgagtga

SEQ ID NO: 87986 - DNA, 100 bp, Zea Mays
agtatccacagctgctttccagcttgggaatcgaatcgaaggtatggcctttcaacttccagttccatagattttttagttctcactacatcttggtaca

SEQ ID NO: 87987 - DNA, 453 bp, Zea Mays
ctaggagaagcataccaagttctcagtgaccctacacagcgccaagcttatgactcgcatgggaaagacggcatctcaacggaggggataattgatcctgcaacaatttttgcaattctgtttggtagtgagctttttgaggaatatattggtcaactggcaatggcatcaatggcttcacttgataattttggtgaagatgagcagattgatgcaagaaagctgcaagagagaatgcaggtatgttcctttagcaggattgttctataaaattccagatagttggttaatatcatccagcatgctgaaggagaggtgtccaaacttagaaatgtaggttttagccattactaatcagcccttctgtccctcgatgctaaatatgttttttttttcttttgattctatgctgtctgtgttcttagttggcatatggtatggaataagtttttc

SEQ ID NO: 87988 - DNA, 98 bp, Zea Mays
cgaggaaccgttcgctcggagccttggatcatcaacgtcgagatctccactcaatcaagttatcgtatctcacggaagatcgggccacgtctactatc

SEQ ID NO: 87989 - DNA, 754 bp, Zea Mays
cgagcatgcgctcccaacagccgcgatgcctggtttctctccctagccactgcgccgtcatgctccctctgcctctgctttttttcaggacgctgagcactctccccacaggtcgctttttccagctgcgccggacactctgtgatttggccgcgtcgcgtccaggactcccatggctgcctccctggcgtacctcgcgcagcagccgtgacgccagttcgcgcagccacgtgaatctcctttgcgtcacgccctcggcgtgctcgacataatgccgcagcaagcctgcagcagcagcctgcggatcccctccgcatcgagagcagtcgcgtcgtcgatccgtgcaaccccgacgtctccgtgtcttgcttcgccgtcaatctgcgcagtccccatcgcgatgccgtcgaaacccgcgccccttgtcatcgtcgcgcttcgcgcgtcgtttctcgacagaaagccaaaccgacatacatgcatgcgcaactccactcagatttcggccaggttgttcgctttagaaaaatcgtgatttcgttttatttacgattcagtcgatggcgtgaatatgtgcgagaaaatataattgtatgaatggacgcgagtagagaaagaagacgaagtagaaagaaactcgtatgtttttatattttgataaaaaaatatgcgatgtgttgtttgatgcgaaaaactaagttacaaaatgcggattatgttttgggaaatgtatcgatatgtgtttatgtgaaaa

SEQ ID NO: 87990 - DNA, 257 bp, Zea Mays
tgagtggttttttgtactcaggatgggcttctctgttacagcccattgtactctgttctctattttaatgaaatgggacgcggctctcttgcgtaattcgaaagaaaaaactttgttattttatattctggttcccttattttactattatcatctgttgatcccccttgtcaagtaacattagaacacctttgtcatctactggagcacaacctagtcaattgctcaattaaagtggaaaaatgttgttctctacc

SEQ ID NO: 87991 - DNA, 183 bp, Zea Mays
atggccatccagttaagctatccaaccaggaaatatcttgtcaaatctcacgtccagtactccactcctctctccttcagtctctatacacccacgtcgtcgcccatctggtcaatagctttcacgtgcgattacccaatctcgacctcggcggctcggcctcgaccgtaccggtcagcttaa

SEQ ID NO: 87992 - DNA, 1088 bp, Zea Mays
gtagatttatataaacgctctgctttgacacgatacaacccctcaaagccagcgtagataaacgtcgaccattatgggaccttacagcaccgccgtcgccgtaagcgcatcgccggtcctgcaggcttcctcactcttgacgcgagcccgtggttcttggaggcccacggtggcggcgttgcggctttctgcttccgtgaaatgccgtcggcgggcactcaccgtgacctgtgcgctcccggagaaagaacggccggcggcattcaacatcccgcccactgctctgctgtgccccgtgcccccgccggacggcaaggaacggtgggacatcaaggaggaagatgaccgcgtcacgctgtggctccaggtgccagggctgtcggcgagcgacatcgaggtgaccaccagcgaggacgtcctcgagatcaaacgcagggtcgtcgccccacagcagccggcgcccgtggacgcgcacggcgtcggcgcgttccacatccggctgctgttgaccaaggagtacgacggcagcaacgtcacggccgatctcaaggccggcatgctggaggtcaccgtccacaagaacccgcaacgccccggcgaacgcgccgtgatgatgggggcgaccaagcccccgcccgagccccgtcaaaacgaggagagcagtaccaaccaaaggtcctcgaccgcaagaaaggaaaccggaacccccatggggagacaaaatccaaatggagtctagctggttgagggctcggaccctgctttgaataagcttctcatttctagctgcggatggactcaaaccagcaatcgccttctgttatatcaattgcctggagagagcttacgctgcttgtagtatcatgtgtgtttccttaaaaaaacccttctttgtttctttatttattatgagggtttttttttggtgtgcggtcacacagagtgaaaacaattccattttctaagcaaaattccaatggtcgtcttccctgtactgcaaaatacaccttagactttgtttaggtattgtaatattaactctaatccacgtgtgttgaagtggattgatatataaattagtttaagtt

SEQ ID NO: 87993 - DNA, 1031 bp, Zea Mays
ctgattcatggaccaagcaaaggtaacctcttgtcagttgtctcccactgcagtaccctctccaatctataaatttcttcacaatatcttctgcacctctcacacaagacatccttacattttcttgctgatcacagctagtagggagcgagagttaccttgaaatcaaggcagtacgtacgagtacgatcgacaatgtcgacggtcacttcttgcacctttctgagcctcgggtccccagtgcggccggcagtctcctccgcgagaccggcggcggcggcggtggcttcccgacggaggccccggtccctttctgtgtgctgcgaggccggccggaaaggggatcacaacccaaagacggatctgcatccatttaacatccctgccttcgttctggtgcacccggtggcaccacgtgaggaacggtggcagctggaggaggacgccgacaaggtgaacctgtggttcgaggtgcctgggcagtccaaggatgacctcaccgtggagatcgacgaagacgtgctcgtcatcaagaagaggaaggagctggtgggccagcggagccctgctggcggtggcgtcgcagagtacggctcgcagtcccagcagcagagcaggaggggcaccgcagatggcaaggagctgccggcggcacagcagggccaggccggcgaggtggtctatgcccggatgctcctcccggcggggtacagcagggatggcgtgcaggccgagctcaagtccggcgtgctcagggtcactgtcgtcaaggtcacggagcgagcgcgcaggaagatcgacgtccccattcaagtcaagtagatatgcgtgtatgtgtatgcacattcgtcctgcgcacgtgtcagcaggggtgctttatttacatctgtctcatgtccaacatgcagactacagcggtcgatctcaccacgtactcgatcgcgtcgactacacatgttcatgggctttgtgttcccatgtactcatcaatcaataaaatgagcatatgtgttctccgccatgcaacataa

SEQ ID NO: 87994 - DNA, 222 bp, Zea Mays
atttttgtgaccatgcacttgtctatattattcagtttgtgcatttggttgggaatatactatcaattattggctcattcagttattaaaacaaaatgacctgtttagataagggagtatttttataaatcctggtggtttggatcctaatcatccatatcaagacaggtccttgagtatcccatgcgtcaaagctgtattttcattaacactgatcaaatc

SEQ ID NO: 87995 - DNA, 114 bp, Zea Mays
ctaaaaaaaaaaaaaaaaaaaaaaaaacaaaaaaaaaaaaaaaaaaaaaaaaaaaaaaaaaaaaaaaaaaaaaaaaaaaaaaaaaaaaaaaaaaaaaaaaaaaaaaaaaaaaag

SEQ ID NO: 87996 - DNA, 980 bp, Zea Mays
gattttctttcactgcgttggccattggccttatccctagctgcgctccatcgtcttcaccccacgcgcgtctgcttcctgctcagatttcgtccgtgccaagctccatccctggtcgtgccttgcctgccgccgcccagccgttatcttccacctcccagctcctccaagccatggccgcccctctctgctcgctcggcttccagctccatggcctagctcccgtcttcctgcgcgtcgtcgttcccctcgcagctcgtggaggccgacctcggcagcgcccccatcgctgtggagctctcccggccgtctccagccccacgcccacggcagctcgcctccacaccgcgctcctctgttagccgtgacctcgccttggttcccatggcgctcggccgcccatctccctggtgctcggactcgaccgccgcgcagcaggccgcggagacgaacgcgtgcagactgcagtggcgtgcgcgacgggactggccgtcctagctcctcgtcctcccctcgactctctccctgccggagctccttctccagtcgccatcaaccatgatcgaccttgttgcgtcaagagatggagaagaaaggagttaggtgaagaaggaagcaaagcccaatgcaatgctcgctgcgtgttcggtagaattccttgagccaagagtcattgccgtttgagcgaatgtcgagtcaattttggtcgtagtgcacgcggtaatgattttcaaattctttgttactgcctgtgctattccgtgacgtcgttaaggaagaaagcgaagctgtgtggtgtttgatggactgttcgaaccgaagagcgtggacgatctcggggatttaaatcaaattggtcatggtaagctgaattgttgtttatgctagttggattgaggagtagatcgggcatatctattagtcgcaatgattatctttctatagcttacatgaagtgaatatattgttgtatggcaaaa

SEQ ID NO: 87997 - DNA, 1694 bp, Zea Mays
agatttttttgttcagcggtcttatcttctacgcgcagccgctccagcccgtgtcttccccagccgcgtgcacaggaccacgccctccctgctccatcttcccatcgctcgctcctcaagttcctagcgcccagctgaattcccctgcgcgcgccctatcttccaccatgtgccctgctcgcccatggcgccagccacagctcggagctccctctgcatccccaggcctgcgcctgctgcttgccccagcttggagctcgctcgacctccagctccggcgcccggctgagctccctggctgccgcgccctgctctcttttgctgctcaccggtgctccagctcgcggcgcccctgcttttctctctcctcctctactcccgccatggcgcgcgtctctgctccctcccccacggcgtgcccctcaagctcgtccaggccgcgacctcgtcgtggaccttcctcgccggcgctcctccctgctcagctctccagcgcgcgccccatctcgctgcgctcggcccccagctcggtcttcctcggtcgcgctcgctctggtcgtggacaccgtcgagctcagggccctgctcgccgtatgtccacgcatcatgcgtggagcaatgggggaaatctatagcctaacagcttgttcgctgcggcttgctgcggctgcaatccggctgcggctgcggcttctacagtatttttctctctatggattgcagctgcagcagtccaaacagctgcaacagtgtcggcttgcagcctgccgaacacgccctaagccttggtcaatgtctgtgtggatttgggaaagaagacggagatatggttgtagaagacagtgaagtcggcttgtgtcgcacgtctggtgctcgacgaaaagctcaaacatgagaccgtcatcgattcggttgtcgtccatctcaccaacatattttatccgtcgtggtttagctcgccatgggcctgctcattgtccctattttgccttccccaagaagccacgtggatggccttgccctcgccatcatcgttcggtcacctcgccttaatgccagcccctatatgatgcctccgacttgtgttcacgccgacaaaagaatcccaagaggatgtggagaagcaagcccctggtcgatgcccccaagtgctcagcgaaaggcctgaacaaggatcatcgtcattttgcgaagttctagtactatggagagattccaagaattgtggattgaggagaaagtgaagctcagttcaatactcgtctggtgtttgatcgaagacttcaatcggagactgtcgtcgttctcgcaaatattgagtcaagttaattatggtgagccgattcagtatttttactattgattttatgatcgggaaataagacgcttagtttgcgtatgaagtttaagttagaaataccagtgatgcgaggtgtgcttcgatgagtttagttgccgagtatattcgaactagttctattttgcagagtgtagtgtctcggtgacgcgtaggttaagtttagtattttaagcaattatcgataagtctgtcgatgctaattgtgttcagtgcgcgtatgatgaaatcgatgtcctgtgctagtagttagtatcatctatgtttgtgatcgataatgttggagtcggatattgattagttagattgatagctatgaataaatagttgttatctg

SEQ ID NO: 87998 - DNA, 1138 bp, Zea Mays
atgtgccctgctcgcccatggcgccagccacagctcggagctccctctgcatccccaggcctgcgcctgctgcttgccccagcttggagctcgctcgacctccagctccggcgcccggctgagctccctggctgccgcgccctgctctcttttgctgctcaccggtgctccagctcgcggcgcccctgcttttctctctcctcctctactcccgccatggcgcgcgtctctgctccctcccccacggcgtgcccctcaagctcgtccaggccgcgacctcgtcgtggaccttcctcgccggcgctcctccctgctcagctctccagcgcgcgccccatctcgctgcgctcggcccccagctcggtcttcctcggtcgcgctcgctctggtcgtggacaccgtcgagctcagggccctgctcgccgtatgtccacgcatcatgcgaagccacgtggatggccttgccctcgccatcatcgttcggtcacctcgccttaatgccagcccctatatgatgcctccgacttgtgttcacgccgacaaaagaatcccaagaggatgtggagaagcaagcccctggtcgatgcccccaagtgctcagcgaaaggcctgaacaaggatcatcgtcattttgcgaagttctagtactatggagagattccaagaattgtggattgaggagaaagtgaagctcagttcaatactcgtctggtgtttgatcgaagacttcaatcggagactgtcgtcgttctcgcaaatattgagtcaagttaattatggtgagccgattcagtatttttactattgattttatgatcgggaaataagacgcttagtttgcgtatgaagtttaagttagaaataccagtgatgcgaggtgtgcttcgatgagtttagttgccgagtatattcgaactagttctattttgcagagtgtagtgtctcggtgacgcgtaggttaagtttagtattttaagcaattatcgataagtctgtcgatgctaattgtgttcagtgcgcgtatgatgaaatcgatgtcctgtgctagtagttagtatcatctatgtttgtgatcgataatgttggagtcggatattgattagttagattgatagctatgaataaatagttgttatct

SEQ ID NO: 87999 - DNA, 741 bp, Zea Mays
tcgtcgttcggtcacctcgcctcgatgccagcccctacgtgatgccttcgacttgtgttcgcgccgacaaaagaatcccaagaggatgtggagacgcaagcccctggtcgatgcccccaagtgctcggcgaaaggcctgaacaaggatcatcgtcatttttgcgaagttctagtattatggagagattccaagagttgtggattgaggagaaagtgaagttcagttcaatactcgtcaggtgtttgatcaaagacttcaatcgaagactgtcaccgttctcgcaaatattgagtcaagttaattatggtgagccgattcactatttttactattgatttgatgatcaggaaataagacgcttagtttgcgtatgaagtttaagttagaaataccagtgattcgaggtgtgcttcaatgagtttagttgctgagtatattcgaactagttctattttgcagagtgtagtattttggtgacgcgtaggttaagtttagtattttaagcaattattgatatgtctgtcgatgctaattgtgtttagtgcgcgtaagatgaagtcgatgtcctgcgctagtagttagtatcatctatgtttgtgatcgataatgttggagtcagatattgattagttagattgatagctatgaataaatagttgttatcttgttttcgtttgtccaaattaattggaggcgaacaacattatttggtccgcttcagttgaaatctaaaaaaaaga

SEQ ID NO: 88000 - DNA, 112 bp, Zea Mays
tttaaattgggttttgaattccaccctcaagttcaaatgcataaatagattccagcatgaaatgcgaaattgtattttatttataatatttggttatctatatgcctcaaaa

SEQ ID NO: 88001 - DNA, 1960 bp, Zea Mays
gtccagccacttgaagccaaatccctccaggctccagctcatcactcccacgatcccactctccccgctcacctcaaggagtcaaggtgcaaagctaagcttagctcattgctcaagcttccgtctctttctctctgcgagactgcacactgccaccacgcgcaatggcggcattccaccatttgttgccggccttgctccttctactcctgctcccttccacccctgaggcgacgtcctcggcgctgcttggcatcagctacggtcgcgttggcaacaacctccctgcagctacatcagtgccgcagattgtggcttccctgggcgtcggccgcgtccgactctacgatgctgacagcaccaccattcgcgccttcgccaacacgggcgtcgagctcgtcgtcggcgtccctgacgagtgcctcgccactgtctccaccccgacgggcgccgcctcctgggtccgctccaacatttcccctgcgctcccggccacaaagatcgccttcctcacagtcggcaacgaggtgctcaccggcgtcaacagctcctcgctgtccaggtacctccttccggcgatgcggtgcctccacgacgcgcttgcgcaggccggcctggacaagcaggtcgccgtgaccacggcgcacaacctcggcgtgctggccacgtcgtacccgccgtcgtcggcgtacttccgcaaggacctcctcccgatgctctgccccattctcgacttccacgcgcgcgcgggctcgccgttccttgttaatgcgtacccctacttcgcctacgccgaggaacccaccggcgtggagctcgagtacgcgctgctggaacccggccatgccggtgtcgccgacccggggaccgggctgcactacaccaacatgctcgcagcgcaggtggatgcggtgtaccacgccatcgccgcagccaacagcgcggcggcgcgggccgtggaggtgcgcgtgtctgagaccgggtggccgtcggcgggggacgccaacgagaccggcgccacgccgcagaacgcggcgaggtacaacggcaacgtgatgcggctcgtggcccaggggaagggcacgccgctgcggccggcggcgccgctgcgcgtctacatgttcgcgctcttcaacgagaacatgaagcccgggccaacgtcggagcgcaactacgggctcttcaagcccgacggaacgccggcgtacgagctttcctaccgcctcccgctggacaacaccacctcctcctcttccgccggtggcagcattaccggcggtggtgggtacaatggccacggctacgggtcgtcggacaacggcggatactacagcatctcggccgccgccaaggtgacaccggtaagctctgctctcttgctagctgctgctaatgatggttgacatccctgctgatatatcttttctttggcaaatttagtgcaatgttgtagactgagcaatgccggatgctttagttagcactataaaggaacatgggcacaaaagcattgtcaatcagataaattaataacaaccgttcgggaaaagaaacaattgaaaaaaatgcatgaatgttaagcatatgcttggtaacattgaagcagagaatgaattttagctttccaagtcatccggttttggttctgcgttccagtgttgggctggcacaaaaccagaaatgtgagtaggtagccatgaacacatggtagaaaggtggaatcgcaactgacgagctgaacttacttcctttgccgtcagtagcatttacctgcatttctgcaatcatgaaagtggagaacaaccctccactggcccatctgcccattgttcttccgattggaactttgcgcccccttttgctcgtctgctgaggtgttactcctttgtttgtgcttgcaagggttggtggacatggccacaggtagctgtggcaccatgtgtggctgtactggccatgg

SEQ ID NO: 88002 - DNA, 1800 bp, Zea Mays
gtccagccacttgaagccaaatccctccaggctccagctcatcactcccacgatcccactctccccgctcacctcaaggagtcaaggtgcaaagctaagcttagctcattgctcaagcttccgtctctttctctctgcgagactgcacactgccaccacgcgcaatggcggcattccaccatttgttgccggccttgctccttctactcctgctcccttccacccctgaggcgacgtcctcggcgctgcttggcatcagctacggtcgcgttggcaacaacctccctgcagctacatcagtgccgcagattgtggcttccctgggcgtcggccgcgtccgactctacgatgctgacagcaccaccattcgcgccttcgccaacacgggcgtcgagctcgtcgtcggcgtccctgacgagtgcctcgccactgtctccaccccgacgggcgccgcctcctgggtccgctccaacatttcccctgcgctcccggccacaaagatcgccttcctcacagtcggcaacgaggtgctcaccggcgtcaacagctcctcgctgtccaggtacctccttccggcgatgcggtgcctccacgacgcgcttgcgcaggccggcctggacaagcaggtcgccgtgaccacggcgcacaacctcggcgtgctggccacgtcgtacccgccgtcgtcggcgtacttccgcaaggacctcctcccgatgctctgccccattctcgacttccacgcgcgcgcgggctcgccgttccttgttaatgcgtacccctacttcgcctacgccgaggaacccaccggcgtggagctcgagtacgcgctgctggaacccggccatgccggtgtcgccgacccggggaccgggctgcactacaccaacatgctcgcagcgcaggtggatgcggtgtaccacgccatcgccgcagccaacagcgcggcggcgcgggccgtggaggtgcgcgtgtctgagaccgggtggccgtcggcgggggacgccaacgagaccggcgccacgccgcagaacgcggcgaggtacaacggcaacgtgatgcggctcgtggcccaggggaagggcacgccgctgcggccggcggcgccgctgcgcgtctacatgttcgcgctcttcaacgagaacatgaagcccgggccaacgtcggagcgcaactacgggctcttcaagcccgacggaacgccggcgtacgagctttcctaccgcctcccgctggacaacaccacctcctcctcttccgccggtggcagcattaccggcggtggtgggtacaatggccacggctacgggtcgtcggacaacggcggatactacagcatctcggccgccgccaaggtgacaccgggttggtggacatggccacaggtagctgtggcaccatgtgtggctgtactggccatggcattgtgaccattagcagagatcaagtggtacctgcctggacttggtggatggaagcctctggcttctgatggagtcagaagcagcgtatggtgtgggtcagtgaactgctgttctagagaaacgcattgctcgtggtgatccacttcctctctctctatgttgtttcccttttctccacgttgttgtaactgaggtgtccttgtaatcagtggtgaacaaatggactagacaattgtcattaatgattagacagccatattttttgttcttaattgtcattaattcgtcgaatgttctatcgatccgaatattcgatgatatacaaacacatttacttgtgtatttattagtggctacatttatagacacttcgttgtat

SEQ ID NO: 88003 - DNA, 780 bp, Zea Mays
gcgcgtagtactactaggctagcagccatgagctcttcggtccttggggcgagtgcaggcggtggcggcggcggctcatctaccggcgggccgactcggggcgttgcaggagcaggcggtggcgggccgtgtggtgcgtgcaagttcctgcggcgcaagtgcgtgaccgggtgcgtcttcgccccctacttcgactcggagcagggcgcggcacacttcgcggcggtgcacaaggtgttcggcgccagcaacgtatccaagctgctgctccaggtcccgcctcacaagcgcctagacgccgtggtcaccgtgtgctatgaggctcaggcgcgcatccgcgaccccgtctacggctgcgtctcccatgtcttcgccctacagcaacaggtggtgaacctccagaccgaactcacgtacctgcaaggccacctgagcacaatggagcccccaacgccgccacctttagctgcacagaaccagatgccaatgacgactgccgccttctgtgtttcgaacctgccgtggccgtccaacgatatcccgcccaccgttgacgtgtcaacgttgttggaggagccacagacgcagcagtccaactgggtctcccagcagcaacagcactatgtcatggtgggagagggctctggcgctggcgtcagtggaagcggcgccggcgctagaggaggtggagacctgcaattgctggaccgccatggcacagcaccagtttggtctcagcctgagccgccgccatgcacacaatgagcaccaacctataca

SEQ ID NO: 88004 - DNA, 181 bp, Zea Mays
cttgaacgcgcaggagagctgcacatcattatattaagagaagaaaagggtccaaagtggaccaaagtacaaagcccaaaaggcagaacaaacagacccaccaacctcctgctgtgcacagtgccccaacctccaacaaaaggaggcaaacaacaaacgtgccaacaggccccccacacac

SEQ ID NO: 88005 - DNA, 8721 bp, Zea Mays
tattgaactgtcagcaataggaactactaagtcactgcatattatctagtaatccccaacacaacatatacgtggaaagattgagagaagaaacacttaccttgtagtgctggcttccacaatgctcctaaggtaacataagcgttggttgaatatgctgtgtgctgaaattcttctttctaaaagtgaaaacaagaccttaccaatcatttctaaaccaaccaagatctctgaggcaactgaaagtcaatacaaactaaacaaaacataagaaactctaaagtgttcgcagataatgtgtaacaatacatgcaatcgatgtatgggagttaatggcacagtacaaatattcttagccatacatgttcaaataaactatcatcatatacgacacaatgtagagaggaataggtttagaaaccttgtgtagctcaaattatttttactgtagcaatttctttaataaaagagtatgcaaacatatgtttgcatttttgtaacaaaaatattttagtggttagttatggaccagtttgggctaaagcattactgtagcagcgctacggtttctagggtttagatatttatttccttagttgcgattagtttcttagaaatcaagttacctcgtctatatatagatgggattgtgccctagttcattaagcaatcatagaagtcaagctacctcatctatatatagatgggattgtgctctagttcattaagcaatcaatcaaacaaagaaatccttacccaatcctgtaatgtctctcaagctcttggcaaagtataaagcccatttatcccctacctccccattatatggttatacgaaaaatgtggtaccacaaatgaatatgcagctgcacaaacaaatgccacacaactttttggaagtataaaatgatctatgacatcaacttttaaggattgacagagatacactattgaattaacttggcaatatttgcagggcacacataccaaaacattgtcgagtataaggttaactatcaactgctcaacttcttcttttctaagatcaacagcttcattgaaactacctgcttgaacattatcagctgtaatgtaagatcggttgaaatgattttttcctccaaagcgtagaagaactgcggatcattgtattaagaagaaagattggggtctatttacaacatataatgctggatgatgattgatagcataataatttccaggaaacaaggcattaacaaaaaaggtaaatttttttcttgaacgcgcagaagaactacgcatcattatatcaagaaggaataaaaggtcggtccaaagaggaccaacacagagtacaaaacagccacttcatggcggccaaaaacgagagtacaagaaagcatctctatccattaaactagaataaatcaccctctactacagccctggaataggcgccatgaagagggaagacttctgtctcctgccatcttccataggacaccttcctccttagcttttgtgatggctgtctccatattggggtttgccatatcaaaaacacaaccatttttgtggttccaaatggtccaagctcctaggatgattaacgaattatggccttgccttgcgatgccatgcacctgctcagacacttatttccaccagtccatgaagacacaatcacctggctgaggcgctaaggtctgaaggttaacaagtcctaggaagcggaaccagaattcactagcaaaggggcaatcagtgagtagatgattaattgtttcaggagcctgatcacagaggagacatctgtccagatgtgcaagcccacgcctctgtaaccccccacacctccaccaatccctcgccggattccactccggacccggcgaccaactcctcgacccccaccccctcggtgaatgcccccagtctagctagtcgcctggtcctccaggaggaaggacgttccaagacccagagatggtgtgatgatgatagtggcgctgcctcgtcgggaggatcctctctggcctcttgttcctataaagaggcacttctccatacttcagggcgtgctgatattgctgcttccgtagcaaatcacgctcctgctccgcccttcacgaagacaacggttggtgaccattcggaggtacagcgtccttctgttgtaagccgacatctggatgatgatggatgcgggtggttgagcgcaggaggagatatcgtgatgtgcaccttcctcgtcgagggtccatagtggatctccgagggaagtgttataagtgtttctctgcctcccacctggtggattcttgccgacgccctacgaggtgttttcgcttcttcaagtttggtcatcaggcggcgagggggaagacagtgtggtagcgtctgggtccttgcgatgagcgagttccaatgtggcagaggctatctgttatggacaattccactccaccggtgggcgtgcgtccatcctttcagcacaaggccccagaccccagtgtggagaaggctctccctgccacaagattcctcaatggtgggcagaagatcggaggacgacatgcatctggctgagtggcatatgaagaagagaagacgttccaagcaaggaaaaggcaattctgggttgtactcggggccgagccagccccaccccaatccttcaggtgttgttcagacctctttgccttggaaaccttcctgagttttggagttctccactgcattggcaagggaggaagtggatcttcggagagccttgtttgtttcggtgattggcaccaggccgactgttcgcggtgaagatgtgctagaggaattggcgcgaagctttgacatcaaccctgatgacatgtctattcaacatgccatgccagaggatttcctattgttcctgcctgatgaacacacaacaacacaaattcttaatgagggaagacctttcagaggccctaggttttctctcagttttaaaagatggtcgagattctcgcatgcctcgtcgacgtccatgacggcactggttgatattgaaattcaggggattccagcgcatgcatgggaactctccacgacaaagatgctgctgcaggactcttgctgggtcttggaactacttcgtgattcaggatcgacatttctgctgcgcgcctggtgttttgatccgaatcgattatatcgggaaatggatctgcatattgttgagtcgggtgttgatgagcagaagaaccgatgtctgacatacaacatcagtattgcagtttctccggtgccccttcagttaacctccatcagtgttacttcctccccttcatcagagggtgggcaatttggtgaaggggatgaccgtgatccgtcaagttctcagcagcgccgccttccccctcaacctcggcggggttcagttcatcttcgccagctgcccactaaagcacgcgctgcctccttaaatgagccgcaccctggagctcgtgttgcctcctttaaagacgtcgctagaaccaaggtgccgcctgttgttgggtcgctggacgggtctaggccaacctcgccccaacactacactgttgttgctaggccgctggagttggacgggacggattcgccccaagataccgggcctttgggatctattgatgatgggctgcgagatccgcttagcctgacttcgcctcgccaggacgttcccggggctgagccgctggagcaggctatgacaggtccgtcccatgacgcaggtcgtaccccaggaaatatatttgaagtcatgtgggcgcctgaggatctaggatctactatttctccggacactgggatgccgtcctcaaccaggccatctctgccccaactcatccactgcaccaatgatgagaatctgcctgaacatgatcatttgaggacaccgccaattgggtgtcctcactcgcccaagctggtagtatattcaagaaagaggatcaacaaaaagagtatttcagaaaacaaggatgaagaaaggaatgggccaaatgaatctgagatggggggtaaagccaaaaaggtctctgacctccttgcaacacctcatgatccatctttgatgtcgaagagtgcccaggctcctgatattatcccacgtcgtagtcatcaaattgcaggggtgggggttgaatttgacaagcaggacttatgctcaaggtccacaaagagagtcatgcaggccctgaaagtgattggggactcggagggaatcagccagcaagccaaagaagactatctgaaagttttctccaatgaactacctctttctcatgttgaagcattggtggccttctttggatgggcggtgccagatgaattaaagataggcagtaacagcgttggcattagtgcctgttaattctccttccctaatttagttgatgaaaatgttattaaatggatccaaaaaaatcttgagttggaattggaatgtaagggaccttaattctgcatctaggaaaagttccgttagaacctttatcgaatcatgtggtgcagatgttatctatcttcaggaaacaaaaatgcaggaaatcaacaaaggaaaggtgttggctatattgggaacatattttgaccagttcatctttttaccatctaatggagctagtggaggaattctggtttcttggagaagacatataaaggtgacagggcttaatagagtggattcctatagtgtcccagtgcaagaaaactaatggtcagccctggtggttaacctgtgtttatggaccccaaagtaataatgaaaagatcctttttctccaagagttaaggcaaatcagaagtgtttttttgatccatgggttattgtaggagacttcaatctaatttacaaggtggaagacaagaataatgacaatgtaaacagagcaatgatgggtcgagtcaggaaatttatcaatgatgttggtctgattgatgctcccctaattggccgcaaatatacgtggtctaaccatcaaacttcaccatcattggtcagactagatagagttctttgcacctcagactgggaggcactgttccctaatcatcttcttcaaagtgctgcatcggaggactcagatcattgcccattgattcttgggcttaatagtaagtgttctggcacgcgtcggtttcattttgaatctttctggccaaaactggaagggtttcaggtgacagttcaggaagcttggacctcggtcaaggaaagaaactgtcctttcctgacctttgaattgaaattgaaagcaactgctaaagctcttcaagggtggagtgctaaaaaggtaggtcatgtggcctcccagttggcccttgctagagaagtcctacatcaattggaagttgctcaaggttttcaactcttgtctccaatggaggtgtggcttatgaggggtcttaaaaagcattctttagcccttgcttcctcacgcactattgcccgtttgagatcaagaatcagttggataaaggagggtgatgccaattccaaactttttcatatgcacgctagacacaggataaggaagaactttgtcgccaagattgtctcgggtaatgacacattcattgatcaagatgagaaggccaaagaggtggatgagttttactataagctttttgggctgcagggtggacagatccttgactgttgatttggactacttgggtttaccctctcatgacttggctgctttagatgcaccgatcgatgaaaatgaggttctggaatccataaaacagctaccttcagacaaggcgccaggtccagatgggtacacaggcagattctataaagtgtgtgggccaattatcaaaggatatgtaatggctgttgtttctgcaatttggtgcaggaaatttgggcagtttggaaggctaaatacaacatttgttactcttatccctaagaaggagggggctgaggaggtaaaggatttttgacctatcagtctagtgcacagtattgctaagcttgtcaccaaattgatggctaacagactgtcccaattgctgcatgatctagtttctctaaggcagagcgcttttattaaaggtcgtttcattcaagacaacttcatgatggttcagcagcctgccagattgcttcatcaacaaagaaaaccaagggtacttctgaagctagacatcaccaaagcctttgattctgtctcttggcctttcttgcttgaagttctccaaaaactgggatttggacagatatggagagatatcttaagcgggctattggcaacttcctccacacaagttctcctcaacggagttccaggggacatcattcatcataagagagggttgagacaaggggatcctctctcacctatgctttttattttagtaatggacatccttggatgccttgttactaaagcagaagaggaacctctctcctccaaacctaaacccagctttttatttttttcatccaagggagaatgaaatccatactattctcagtattttgaatctggttggagaagcttcaggcttaaaaactaatattcagaagagtagtgtttatcccatccgatgtggtgaggaggagttgataacccttcatgatcggcttccacgtgacctatcttcttttccctgcaaataccttggtctgcctctgtctttaaagaaactgtccaaaaatcaggtgcaacccattattgacagagtggctgatcaactgtctgggtggaaagcggatctaatgacaagggctggcagaagagtacaggttcagtatgtgatgacaggcatgctcatttatttagccatggcagttgacatacccccaggttcactcaaagctattgacaagatcagaaaaggctttctctggcgtggaaggaaagatgtcagaggaggacattgtttagtggcttggggcaagagtctatagacctatcgaaatcggcggtcttggtatttctagtctcaaagaattaggatggaccttaagaatgaaatggttgtggctgagaaaaacggaaccggataaaccgtggtcctcactgcctatacagttttccaaaaaaaatgaaggccttcttttacactgccatgctcattgaaattgggaatggttcttgaaccttattttggcaagaccgttgggtccatggaaagaaaattgaagaccttgctcctcgactgcttgcagttgtgccaaacaggattaggaacaacagaactgttcttgaggccttaacagatagaaaatggttaactgatattaaagggggcttgacagtaggagtttttgctgacctcatagatctctgggatgcacttcaaacaatccagcttcatccagacatggaggataaacatattttcaggtttgctactgatggaaattactcagctaaagcagcctatgagggtttcttcattgggtcgacccaagctgagcattgggagttaatttggaaaacttggtctccttctaaatgtaaattcttcttatggcttgctgatttaggaagatgttggacagcagaccgtctagagaaaagaggtttaagccatcctgacaaatgtcctttgtgtgaccaagatcaagaaagcatagaccacattttggtgggttgtgtctgtgctaggaacttttggttccagctgcttggacaagtcaatctacctggttttgctcctcggctgggggaagtgaacactatgcagtggtggagtagaaccagtgagcaactgcaggggattgcaaaaaaagggcttaattctttaatcaccctcgggctatggactctctgaaaccatagaaatgggtgtctgacagaattaaacccagtctagaggtagctataagaatagttgaagaagatattgatttatggacgttcgcgggggccaaacatcttgctcttctcacagctcccatttcaggtgtcttacaggagtctggtagagggagcagttgacaacatcatagatgaagatattgtctggtgctgggctggtgcgtcgggtctgtgtagatggtggcctttttaggtgtccgtttatggatgttttcatgttttctaagttgcggccaccatagggtgtccttttttttcttttcttgtatttgtaattggtctatttttggaccctccttcctttcttaatttaatgatacacagctctcctgcgcgttcgagaaaaaaaagtagacagagccaaggagggggaggaagccagcgccgcctgggcggggagggtggtcgtcagcgccggagtggttgctggcgaggggctgggggtttgcgtggcgccgacattggtgggaaacaaggggtgggggcatgagccgagggggcaggcacaggccgactatccatctctatcaacaaaagaggtaaaattacatcaataaaaagttacaacatcgtaaaaattttgtcgaggagatgtacctaaacctttccactttgacttgaacttatccaccagctgtagtagtgtagctctttgatcattaaagttgcatatcgtgaagaagtgaaactataatttttgtatggtctaaacaggaagtagaaaaaattactgtgagaatatcatgaaataaaaaacattttccccctgaaataaagtgaataaatgttggtcatttgttgtaatttttaaactgacgcaaaataaatcatacaggtgacatcaatatccttctgctcaatagtggaagcacaattgtcg

SEQ ID NO: 88006 - DNA, 98 bp, Zea Mays
tttttccgaacacgcaggagagctgcgtatcattgtattaagaagaagggtctaaaaattagaccaattacaaacacaacagaaaaagaaatataaag

SEQ ID NO: 88007 - DNA, 120 bp, Zea Mays
gttttgtacccatttcatgctattcaaaggatactaaaaatattgtattcaataattttagaaataataatctaaaaataatggttgattaataatttcgaattgtacaaaataaataac

SEQ ID NO: 88008 - DNA, 447 bp, Zea Mays
acacttcgcatacactcctccacaacaatgaaccggttcgcagattccaatatttttcttaggatggcgcaagacatggaagatgaagaacatgagctcgaggttgcgacgtaccaacatcgtaggcgtcgtgcacttaacgagcgtcggtatgctggttccattcccggtcgtgttcgaatccatcgtgaccatatcagtggtgatgcaagaatccgagccgactacttttgcgcgcaaccggtttacacggatgcacaattccggaggaggtttcgcatgcgtcgctatgtgttcgagcgcctcgttcttgctgtgcaacaagtggatccctacttcgttcagcgtccaaactgttatgttggtcccaagctactatgtgtactgcaaacagaagttcttgacatttctggttgtggaatgtgtgatggtgtaattcacgaatga

SEQ ID NO: 88009 - DNA, 730 bp, Zea Mays
caattcgcccccttcccgcacaacgcatcccccttcctcctccccgtcgatggtgttgtcttctctctcaccctaggacaagggagacactatcgctcctctgccaacgatgtcgagtgctcccccacacgtacggagttgttccaaagactcctgtacttcccctgcaagcctcggcggtgaccatcatcgatctatggacctcggtgagtggaggtcacggatctactccaccggtgtcgacgaggtttgtttccccgtcctggagaagcgacgacgcaatagatcttcgtgcactgcagagtcgtctcccccaagccgcaaaggaatcactccactccatcctcgttctttgaatcgatctggcttatcattacacgtccatgtgtcattgtgctcacttggatcttactaaagacaaagtatgggctgagaaagttcattggcatttgagtttgcatggctggccttattttggtcgtattttctgatgtgtgttcttcttatcgagcaagtgtggatctgatttgtaatggcttattaggatttaggccaggtgtgatctggtttgtaaatgaatctctttgccatgcattgagttgttttttctgtgctgtctcatggttacactctattggcattgtacagttcatcagactaggtgcaagtttttttcctgataaaacatcaaaaaggtctaaattacatgtatgattcaggcatgttttct

SEQ ID NO: 88010 - DNA, 745 bp, Zea Mays
caattcgcccccttcccgcacaacgcatcccccttcctcctccccgtcgatggtgttgtcttctctctcaccctaggacaagggagacactatcgctcctctgccaacgatgtcgagtgctcccccacacgtacggagttgttccaaagactcctgtacttcccctgcaagcctcggcggtgaccatcatcgatctatggacctcggtgagtggaggtcacggatctactccaccggtgtcgacgaggtttgtttccccgtcctggagaagcgacgacgcaatagatcttcgtgcactgcagagtcgtctcccccaagccgcaaaggaatcactccactccatcctcgttctttgaatcgatctggtgtggatctgatttgtaatggcttattaggatttaggccagattgaagaggactatagtctatagatcatatgctcatttcaacatcaagggcaatttgattcaattaagtctaggatgatgattttcagtacctaggatgaagtttcagagctgccacctaatttcagagctgcaagatttctacagaattggaagactatgctaccaaaaaagctttcctaatttacctaagatgaagttcagtattgtttaggacgagtcatatgtttatgtctttgtgtctccaaaaatatttgtacacgtatcaagtggtgattattttaagtttcgctactctatatattggctattttatttcaatgagaaatggtttgtcc

SEQ ID NO: 88011 - DNA, 816 bp, Zea Mays
caattcgcccccttcccgcacaacgcatcccccttcctcctccccgtcgatggtgttgtcttctctctcaccctaggacaagggagacactatcgctcctctgccaacgatgtcgagtgctcccccacacgtacggagttgttccaaagactcctgtacttcccctgcaagcctcggcggtgaccatcatcgatctatggacctcggtgagtggaggtcacggatctactccaccggtgtcgacgaggtttgtttccccgtcctggagaagcgacgacgcaatagatcttcgtgcactgcagagtcgtctcccccaagccgcaaaggaatcactccactccatcctcgttctttgaatcgatctggtgtggatctgatttgtaatggcttattaggatttaggccaggtgtgatctgattgaagaggactatagtctatagatcatatgctcatttcaacatcaagggcaatttgattcaattaagtctaggatgatgattttcagtacctaggatgaagtttcagagctgccacctaatttcagagctgcaagatttctacagaattggaagactatgctaccaaaaaagctttcctaatttacctaagatgaagttcagtattgtttaggacgagtcatatgtttatgtctttgtgtctccaaaaatatttgtacacgtatcaagtggtgattattttaagtttcgctactctatatattggctattttatttcaatgagaaatggtttgtccattgcaaccgtgtggagtttctcatttttattaatggcaaatgctgatgtatattcatttt

SEQ ID NO: 88012 - DNA, 201 bp, Zea Mays
cgcaattgttatcccaacttggataatggcgtctaacaccacgaccgatgtccctaattcagacccccaaaggaagctcgattatgccatagtacactcattctatgtcaagactcaccaaatagttaaatcatgatgtacccttgtttctataccacacctgctaatggcataaaaagaatttcaggtgtataaaaaaat

SEQ ID NO: 88013 - DNA, 545 bp, Zea Mays
gaaggtttccattccgctctccgtttgtttcgaccgacgtctcggaggttttagccaacggcgacctgaagctgcaggtgacacggatgtcgaggatggagacgtagcttggcgccgatctagagttcgtgtacgaggaagggcagtcgtctgaatccgtgatgaacacatactatccgcgcccatcgaccgacatcgacgactgctccgacacatcgctcaggctcgagctaccactcttcagctccaagtgacagagatttggcatgtccggtagcggagcgatgccgatcgcttgcccttctccactctagatcgttctggattgggggagagcagcactgctggatcgggaagacccaagtgaccaacgcgtcgcatcagaataaggcattttgagtgttgtatggtgtgtgtattctggctctgaaagtgagacctactttttgtaataatacatacatacaggcagcatggcaatacatgctgccgctgggatgctacctgcagtctggtgacctgtgtctgccgatcttgtttctagt

SEQ ID NO: 88014 - DNA, 906 bp, Zea Mays
gaaagttgtctctctttttttctctcattatatatacttaaatattttgctaaacattttattaggataatgcaaaagtacttgtccatgtaggtaatttactatcttctccctaaaaaggtgcctctagatttgttagagcatagaggcatgcactattacagtagctagaacatgagatttcaattctgaaagttatcatagacctcatgtcacgtttgatggtgacatgtacaagtgggaacagatattccagatttgataactaactgatgcaaggtttgaggtacctggaacagatccatttgaaaaattgcgagaattgctataacacaaagaacatattccaaagaattggaatgtattgagccattaaaatgcaaaacagtgaatatatagctcgtgaagtattaaatgtcctctactcttgaagtttgtgtcatagaagctactgttagatgatgtttgtacctgataagggagcattagtttgctcactcaccctttttatttcaatctctggcgcttcccatttcttaatggaaacctaaatagtaacgatctatgccagagcagaatgcagtaggcacatttttcctaatgaagagctctggcctcttgccatttcagagtattcatgtttgccgtgtagctgttactgatagtgttggtttcttaacgcaacacctcaatttaaatcttcatgtcatttctttatgcaattcctcgtgtgggtcaaaatcaaacctcttaacactcctgcttatccaggggctcatatcgtgctcggtaagtatcagcccagtgactcagggaatcataagccaggattgctactaagcgcaagtgcgggaggctcccgattcccgaggatattttaaacctgcagagcctgctcgatggaac

SEQ ID NO: 88015 - DNA, 590 bp, Zea Mays
ttagtatttttaaaactattataaaacatatatgttaatatgtttttcctataatatcagcgaggcaaactgatctcagcacaaccttgtataatgtctatctctacttagcaactcttcagttagccgtataaacatctaccagcaaaagaaaagtatgtcacttgactgcgccaaatttaaattataccaatgttttagacaatgttgaactgctgagccaactcagacattggattctttgaccgtggattcaccttcctcagttttcctcttcttggccctaggaaccaatcttttaacgtacgaaatataagcatcaacgtcaaattttctcttgcaaccagcataattcatataacgtatctttccaaataccggacgttccttccaaccctaaaaaatagaagcgtagactaactcgtaagctttaagaatgatactaattatggaaccgcagaaatagaccactgaagggaactatcaaagttcaccaacctggtcatggaggccacaaatagaccacatgcaaccaacatagccattgggatccctgccatcgatatgatactgcgaaatattgataaaga

SEQ ID NO: 88016 - DNA, 583 bp, Zea Mays
tctagtttgtgcctcgactagggtgagtgccgccattgccgacctctgtggttgtcacttggtccgccgccatcgtagatgcttgtctgcactggcgcttggcgaccgtgggtggcgatgtgagctcgcgggtgtgtgtgggtcgcttgcctaccctcctccgacgaatttgtgcaccagagccctcccaattcctcgtcgatgtacgagtgctgccgcagatccgcattgcgccatgggcagcgcggtcgaggccataatcctcggcagcatggacagaccccacaagtaataaatttggaagcctgcactctgcaactatgaaaaggaacaaacaaaaaggatgtggggttcaccacatttcatctcctagacgagaccaagggcctatcatcacatcccttcctttccaatggcgtcattggtgtcaaaagccttggttggtcagcggttatgacctccacgatgtcgactatctgttcaataacctctttgtcatgtactaaccaatctatcattggtgagtggtgcctggtgtacctgactgattgtaaagaacaaaagaaaatcataaggtattcct

SEQ ID NO: 88017 - DNA, 376 bp, Zea Mays
gtgcaaaataagtcatagataaaaactttaggttggagtagagtttcaaatgttcaaaaataccatggtatctgcaaaaccatggtattcaaaacagagttttttacaatgtaaccaaacacctcttagcaaaacaatgagaaatactatagtattcttcaatatcatggttttacctcaaaactctaaaaatactttgctccaaacaccccctaaactgggtaaataaataaatataagacaagcatacattattattatacaaacatacagaagcgcctctcccatcatttgagatgctcttttggctttcccacttacaacagtggccccaatgtgctgcaatacacgcttccatgatttcctacataaccag

SEQ ID NO: 88018 - DNA, 768 bp, Zea Mays
atgggagcgcccgtgaggccgtggcggctgcctgcacgcacgcccgcttggccccggtggctgctgcacactggctcgagtggccttggcggctggcgcggggcgaggccgcaaagaggctgccgcgacaagcaggggaagggaggtgggcgaccaacaaagcaggcggcggcggacacagatccgacgctagggaagggtggcgtgggctcgccgacgagcagggggagagaactgcacacgcggctgggggtgcggcgacgcagaggagcagagaaggtggccctgtgcgccagcattgaggggtgcagcctggggactgctagagctcacgtccatggacaagggggccgagcgccaggggaggaagatggctccctgcgcgagcagggggagaggaggtggtggggagaggaggcgtccccggagggaaagatgatcctcccgaagacgacggcgctagagggccctggcggctgcttgcaatggatggtagttgcggctgtgggggtgggaggggatgttaaagtggatgcactaaccgattcaaccaaaaagcttaagctgatgggagaaagtagtcaatccacttataaacttttaacacccccactcacgtgcagccaaaaagaaaggagtaaatgtggaaataaatggatgaagacacaaataaagcttctgccaggattcgaattcgagaccacatacataacacacactgtcctaacgacgaccataggaaaagcccatgtgaatagtaataaatga

SEQ ID NO: 88019 - DNA, 2137 bp, Zea Mays
atacatcagccgttcctgcaattcctgggatacaaacaagaggtggcacaaccttgggtccaaagtcatagtacctccacagttttgacccaatctacaaagtcaccgtggaaaaggaatagttcagaaactagtcacacatatggcacaaattgaaaatattaaacatagaaaaaacacgttcagaacttttgtatcaaaagggatataacacattaaaatcatactaaactgatagggatcaatatgaagttaggacaagctcctgactaaatataaaatggattgtaaacacgatagtataacatgaacagactcatgggacttgtaagtagattgacaattcatgtaataacatgtaatactactggacatagtcaatgcataagtaattaagtatgcaatgtcaaataaaacccttttgcaatatcatgtcctttgcatgtgcactatgatgtaaaaagatacaaactccaacagcaagaaaaaaacaacaggttgcaacacaccatagggtatgtagcatgtaactgatgatgcacttggtcaatgtgtgttgaaaggtaagacatctcagttggtcagcagatccgtcttagggcttgttcggttattgttattccatgtggattagagtggtttgagtgggtttggaatggatttttgacttgctatggatttaaaccgactcaataccatccaatccacatggattgaagaacaacagaacaagcccttaaaatgaaattcactcctttttgctaagtcgttacatttcaattgcctgaattttcagacaacagtcttacagaaccaactagtatcattaaaaggacaactcaaaagagacaattcacatttcttttctatagcccaacaatgaaaaaattacatatctggataacaacaaataaacagggagctgaaatatacaagaagtgtattgctaaataacttggctaagcagactaagtacaaagatatggaacgaaagtaaactaaggggatgtttggatcagctagggctaatttattagctggagctaaaaattagctaatactccttccattcattgatctacatcgttttatccttcggcacaatgaccaaggagcagcaaaggatcggcaatttccaattaatcaccgcagtcctcttaatgccctggcgttcattcgtttcaccaagttccgatgacaaaaagaggaagtactatcaggatgatctaaagatcaccatataccttgacttgttagcaaaagctgatcctcctacacttcgtcgtggagttttgaaataagtatctgcttggtgtccctttaagagttgtataggccatttggagcaaagtgttggctgcatgaagctccttgtcatgaagctccatgtccgtaactaggacatcagcagcatcacttcgatcaatatcagtaaatgtttcttgggagtcaggcacttcagattcaccagccaaaaaaatctataacaaaacgcaactcggtcgtggaagaattgttggattcattgcaggaatctgacaccgtgcacaagaccctgatcggcggcagtgccctggcactccattgtaatcaacgaaagttatggtgaggtgcgacggtgaaggacgatcatgtaggcgtgcgccaggacatactggtgtgatggactcctaacaggatgggacgggagatatttgaagcaacgggagaagagccgaagcaacaaaggtgcagcatatacgaggagtcacggacgtgcgaggacgaagcgaacccgtggtcccaatctaataccatgtagactcttggattttttttcagacgaggtagataatgaacggagggagtaactagcgttgggtgatccaaacaggacatagttagggacagctagcgagttagctcacaactccaacatagcccacctattagccccctatgtagatgagcaagaggggcaaaaattagctggctaacgagaaatagcagccctatgaatcaaacaggcccctctggagaaagttgagcagaacattacaagtatacacattgtagtgtctggagagatatcatcagattcaggtaaagatactgttcggattcaatattaccacaccaaattacaccaaccaacgag

SEQ ID NO: 88020 - DNA, 198 bp, Zea Mays
atgaccaaggagcagcaaaggatcggcaatttccaattaatcaccgcagtcctcttaatgccctggcgttcattcgtttcaccaagttccgatgacaaaaagaggaagtactatcaggatgatctaaagatcaccatataccttgacttgttagcaaaagctgatcctcctacacttcgtcgtggagttttgaaataa

SEQ ID NO: 88021 - DNA, 414 bp, Zea Mays
atggacagaaccaagaccctgtgcgcggtttcgaacctcccgctgcagcccaacgcggagccgctctccctcgacgacgcgcgcaggctcctcttcaaggtcgtcgggtggaggctcgtcctctccggcggcgacggcgacggcgacgagcagcgtcccgcacggctgcagtgcgtctggaacgccgcgctctacggcgccggccacgccccagcggccctggcgttcgaggcccccaaccaggtgatggccaagctctccacgtcctccgccgccggcgacagcctcaccatcaacgactacatcgtcccgtggttgcaactgccgcgaagcggagccggtgatttcttctggagcgcgcgagcgaaggtgtctccgcgaagcagcgtagggggagaacagtgctcctcctaa

SEQ ID NO: 88022 - DNA, 810 bp, Zea Mays
tgactctaaatatatcttgactaattgtttatcagttaattatttagcgactaattgttggccggcggcaaacaggataaagaaacatggattaaaacgatgttgtactaccgacgaataaggacaaccattcaaatcccctaagtattatacgttcaccgaacctgtacaccatgggttgcattactccaaagctaccctatataaaaccctaatagctcctgtgtcctggaccaaactgcacacctacccatcacattagcactaactatttcagtgagtgccgtctaattcactgacttctcgagcatgagaggcaaggccacgaaggctgcaatggcgacatgtatgccacggctggcacgcagaggcggctgccgcgcgtccacggcgcgtccggcggcgtcggtctcccttctcgagcgcattcgtgatgtcgtgctccgcctcatcatgctctccgccgtatccagggcctccacgcagcccaccagcagcagcggaagcggcaagtcggccaaagcctcgtcgcccggcgatgccagccagcaccgtgaatctgacacgtgcgtggcagtggcagcgacgtgccgccgggaggactccatcaggaacgaggccgtggaggattgcatcgagttccttaaacggtcgtcggccgagggcgacgccgccaagctctccactgtcagcgccgccgacggcaatctgaccgacgtaggtggggaggacaaagagataggggcgttcttcatcctcaacgtcgaggcacggcgtgagatctcaccgagcagcgggtgtagagaatga

SEQ ID NO: 88023 - DNA, 110 bp, Zea Mays
ggccatctcatgcaaacagcttcagccgaaagccgcttttcccttgaagaccttcggcgacgaagcatagacccaacagtatggattgaagttcgtggcgaaagaaaaaa

SEQ ID NO: 88024 - DNA, 252 bp, Zea Mays
atggcgaggaggcgagcgcctagaccgacgacgagcttgctgcagcacattgagcgacgtcgattcgaacacgaggacatgaaagtacgcgtccgccgccggtctaagctggagtggaggttggcgtggctgattgaaaacatcggcagaggactcgacgagcacagccaaggcgagaacaccggcgaggtggctggggaacgacgcccagggagccgccacggcgtgaaggagtttaccgcgagcacctga

SEQ ID NO: 88025 - DNA, 1407 bp, Zea Mays
atggagcagagcggcgccggcgctgtggctcctgctgcctcttctagttttgatggtgctcaagacaaatctcctgccagtgcttgcacgataacacgcagttcattggaaacgcaccattcagtagtcgggtctccacatatcgcggcatcaacacgcggtgcgagtgtgaccagcaacgacgtcgatgccccgaaagctgtggctgcaccaatgataagcagcaagctaatctgcaacttgagcaaccatcagtcgaacacgtgcaccatgaaaggcgacgtgcgcatccatggcaaatccgcaactgtatacgtcgtctcggcgtccacctactgtccggaaaattcgacgatcaagctccgcccgtatgcacgcaagtgggaggagcaggtgatgctgctggttcgcgaggtcaccgtgcgttccagttcgccaccagcaggcggcggtagtgcccacgacccaccaccaccgcagtgctcggttcggcacgacatgccagccgtggttttctctaccggcggatacaacaggaacttcttccacgtcatgaccgacgtgatcatcccactctacctgacggcccgagagtacgacggccacgtccaactgcttgccaccgactacgagcccaagtggatcgccaagtacaaggccatcctcgccgcactgtccagctacccagtcatcgacatggacaccgaggacaccgtgcgctgcttccagtcggcccatgtcgggctggagagccacaaggagctgggcatcgtcccggctctctcccgcaacggctacacgatggtcagcttccgggacttcatccgctccgcctactcgctgcagcgggcacgggtgacacccgtgagcaggagcacaaccgggcggaagcctcggctcgtcatggtcctgcggcgcaactcgaggcaactcaagaacgaggccgacgccatcgccgccgcggccggtgtcggcttcgaggtggtggctgcgggaccagacgacgtcagtgacctggagcgctttcccggggtggttaactcctgcgacgtgctcatgggcgtgcacggcgctgggctggccaacatgctcttcctgcctcacaacgccacggtggtgcagatcatcccgtggggcgagctcaggtgggcgtgccggcattcgtacggagacccggtgccagacatgggactccgctatctcgactacgaggcctcggcggaggagaccacgttgaaggagacctacccccgcgaccacgccgtctttacggacccgctctccatacatcaccagggattcgacaagatgtggaacatcttcatcaacggacagcatgtcatcgtagacatcgaccggttcacagggttcatgaagcaactttaccagtccatcaccacggagtag

SEQ ID NO: 88026 - DNA, 642 bp, Zea Mays
tgacataatcaacatccatccagatggcattcacgacatccatgggtgagaaacattgttaatctattattttctattgtctaatcgcaggggtaaaggacagaacgtgacgagccaccttatcgcccccggtccatcagccacctcaccttcatcatcgtcggtgcgtccacctcaccactaccgcgagttgcgctatcaacggctaccaaagttccctggcagcatcgtcccacgacacgcgcgcctatatcagcatcggcagcatcgtccaagcatccgtttgccacaatgacctccacatcgattttcgactagagtgtttgctgacgatgcattccagcaactgacctctccatcgacatcgattctaccagattggctcgccaacgacacattctggtgatctgatccacatgggctccctaccgtgacttcgcccctgcatggaggactcacacaaccacctcaacaccccgcaaaagctttctaaaaagtcttggatcactctttttggtgatctgaagattaagttatggatgtttaaattctgaagactgaatctgtctaattctggacagtaaagtctcctagtgtcttttaaccttgatacactttaaatcaacctgaattgtttataaa

SEQ ID NO: 88027 - DNA, 135 bp, Zea Mays
tttttttttgtttccttttattttcctttcttatttcaaatccaaatcaaaccaagtttaaatcctaaatttcaaatttatgcacaagcaaaactccagcatggggtgcaagtataattttatctatttgtaccc

SEQ ID NO: 88028 - DNA, 119 bp, Zea Mays
ctttttttgggttggaaagttatttccttagtcgtactcctgtcttttgtctcaatggatatctcaaaaatgttgatttggaatgtaaggggactcaataataagtctcgacgggattc

SEQ ID NO: 88029 - DNA, 1808 bp, Zea Mays
atgccgccgccccaaatcccttcctcggctagctgccccacaggcaaagctcaccgcgccaccgccaaggtcactagcaacatcgcgcccgatctggacgtgctcatcgtcaaggccaccagccacgacgacgaaccggccggggagcgccacatccgcaagatcctccaccttacgtccggatcccacgcccacgttgctgctgccgtggtagggtgctcccgcaggctctcccggacccgcgactatgtggtcgcgctcaagtcgctcatgctcgtgcaccgcctccttgtcgatggtgactcgtccttccaccgcgagctcctccatggcacacggcggggtacccgcctgctgaacctctccgatttttgggacgaggcgcactctggatcgtgggatcactctgcctttgtgcgcacctatgcgctctaccttgaccagcgcctcgagttcttcctccatgagcgcaagcaggggttccttgacaggttccttgcttgccgccccactggtggcgcaaagcaaagcaggttggtgctggttgcgctgtatcagattgtgagagaaagcttccagctctactctgatatctgcgaggtgctggcggtgctgctggacaggttctttgacatggagtatgcggagtgcgtgaaggcttttgaggcatatgctagtgctgcaaagcagattgatgagctctctgcattctatgcatggtgcaaagatagtggagttgcaaggtcatctgagtacccagaggtgcagcatgtcactgataagttgctggagacgctagaaaagttcatgagggaccgggcaaagaggcctaagagcccaccacgggagcctgaacctgagcctgttaaggaagaacctgagccggatatgaacagcatcaaggcgcttccagcaccagaagattataaggagcctgaacctatgaaggtggaggaagaggtgaagccagagccacccccacaaccacagggtgacttggtggatcttagagaacatactgttagtgcagatgagcaaggtaataggcttgctctagcactcttccaagggccacccgctgctagtggaaacaatggttcatgggaggctttcccttcaaatggtggcaacgaggtgacttcggcatggcagaatcctgcagctgaacctgggaaggctgattgggagcttgccctcgtagagacagcaagcaacttgtccatgcagaagccagcaatgtcaggtgctttggaacattttcttttcgatccacaacacaagcagcatgactttggccagcagttacatatgtatagtgctcagatgggatctcaaatgggaccccagttcacccgtccgtcacaatctggacagaccccaaacactaatgaaacacagggttctgagaccggacaaggaaacccacagatggacatacagtggtcgatgccccctagaggacagattcttcctccacaaccaggtatgggatattggccgccaccaccatggggatatcctacacatccaatggggacttggggacgccccctatggccaacacagccacttccatcaccagcggattccggctcccatcaagtgacttctcccccttcacgttgactttgcggacagatgtctcaattctagtggtggagctacgaacaacaatccgatgtcctgatcgagagcgacagagctaatgtttgaacttgtgtgtttgaacttgtgaactatggatgtgaacttgtgtgaatttgtgaacttatgtatttggacttatgtgaatttgcgaacttatatat

SEQ ID NO: 88030 - DNA, 818 bp, Zea Mays
atcacaacttatcaattaattaattaaattctaaacttatcccttattttataaattacactacatctttataagtgattaaaatatttcatcagcacacatgtctattaaaattctactcgagacactaattcaactaattgaccggaatagcgaaataactcgctataactgaacctggctcaataataacaaaaactgcgaagtcgaccagaggttcgtgacttacgcaatttatcgagcaccttaatgagcctcacactaacacattaacttattcaacgatcggattatactgaataatttatcggcttaccgtttccacagctgacatgaatccatgagatcagtagcgatttttccgattcaggcaatttgtcgagcgcttggggaataccgcgctgctagcttcgtcttcatccgatccttgggattcctcgatgacgcacggaatgacgacgatcttcgattgaagtcttcgaccgagtacttgataagagatgcacagggacctcacttatttttgtctaaagtccgagattcgtggtcgacgagatcgagcagagaagaacgaggttcgccgggctcgacaacgatacgggagagtgacatatatggagctgtaggtctggcgagctgacgtaagggatcgtagctgctgcttcgacatgaattacttgctgccgagcatgacggaagccggggagctgccgacggtcggcccgagaacgacgatggagcagcggacggacgagcaggaaaacattagagaaagggatcacgccggtcaacagagaagcgcgcggcgagcatcaggg

SEQ ID NO: 88031 - DNA, 321 bp, Zea Mays
atggggttgaagccggatagaggtctgatggcgctggggcaagcactgcggcagatgacgcggacgagctggagtcgggcactggggatgggcaccgagctagaacagggaggagggagaaacgccggcgagccgcagcagggaccaagcagagggagccgctcggttggtgtccacgccatggccaagggagaagcagatcacgacaagctggagccaggtccagggcgcggaagccatggcaagcagacagagagtgtcgcgagttggagctgggggatggagaggacgcagggaatccgtcgtcgggagcacgactag

SEQ ID NO: 88032 - DNA, 126 bp, Zea Mays
tttctatttcttatccgcacaggtacgaatccagggtttaagtacacacggttcgcttacaatactagcccaccaacggtgccattaagttctttgattaacgacagtaaagtaattaagcagtag

SEQ ID NO: 88033 - DNA, 447 bp, Zea Mays
atggagaaggggttcggctgccctccatggctgcctggatctcaggcgcggcaggggttcgctccaggcgctgaacatgggaggagtggaagggggcgtcggtctggggaggatggcggccaggtggggctgctcgatggaatccacggcaaggcgggggtggccggacttgagaagggcaggaagccagatgggagagggagcgtacgtgcagaaagcaaacaaggagcccaagccaaggggacgagctcacctgctcgagctcggaccctgagaaatgccctgcgcgctgtattagagatggagatcttgggtttggttccatggcgtcggtcgacattggaggaaggaaggaggaacagaggtgcttctctgctctgcgcaccgtggcggccatgggccagagaagggcgccccggcatccatcgctggagcagaggcacgtag

SEQ ID NO: 88034 - DNA, 753 bp, Zea Mays
atggagcccgatcaagacgcccacgcactgtacgtctccatcgaggccctgttccaggcgaacaaggagtctcgcgccgtcgtcctcgagcaggagttccacaacctgtcccaagccgacctctccatcgacgcctacgctcagcagatgaagcgcaccgctgatgcgctccgggaagaacttcgcctcggcaccgagaacaaggaagcttcggcatcggctctcgctgtttccaccgccccgtcctgcacgtcgccagcctgccactccaccacctcctccttcagcaatgggtgcagtggcaagggcaaggggcgcggtggcaacagtggcggcagagacggtggtgatacttggatgcctctgtgcttcgaggacttcacccagcagctaggatatgagagtaaccgaaacatgaaggtttattggttactagagaaggcgctagaaaatagtttgaaggttgcttcggatcatgataccaatattatggtctctgttcttgaatatttcaataatttgttagattattttggtcaatgcggacaacattgcatgtctcggctaggatgtcggagttgccaatctaagtgccctaaggcaaggcaaagaaactggccgaaaagtggcaagggggctgatgaggattctgtagacattgacaatgagatagatgatgcagatgatgaattgttggacaacgatatgcatatacctgtacaagagctcaaagggggcaataaagccaaatga

SEQ ID NO: 88035 - DNA, 408 bp, Zea Mays
atacaagtatacaagccacacacactgtgtaactatagaaggatttatctggaactgagacatacatccgtatatatatgtctcaactggtgtcaataaaagttcatctttgagtcattgttgttgtgcagaaataaaagagacagcaacttatgtccattgttattaaaacgtcgtttaaacgtttaaacgagaaaacgtgtttaaaagttggaacgtttgaacgttttaggtttaggacgtagaacgttcgtttcgagcatttaaacgtcgtttaagcgtccaaatagcgttttagtgcgttttacatgttccgaggacgttctacccgtcctgggccttcagcattttctaggtcactttcctgggcactgaccagcgctggacgcggcgccctcactccctcag

SEQ ID NO: 88036 - DNA, 216 bp, Zea Mays
atggtcgcggacgtgattggcaaggagtacacacgatccgcggctaattctgtagtaagcatgtcaaatgcttggaagggtcgggacggggagagcgatggcgacgggtctagtggccgcaaggacagtgttgaagaggcagagcagttcctgtgctccatgctcggggataattccgagcttggcatgggtgttgtcagagacgtgccagggtag

SEQ ID NO: 88037 - DNA, 739 bp, Zea Mays
catggagctccttccccaacctctgtcttcctccctacgcgtgccgcgcccatggcttggacccagctcggtgccctcccaactcctagcttctctcctctgctcgccgcgctgtttgctcctctcatccggcctcagctcggccttatctcctggttgttgtataccgctccgctggtggccgccgttaagctggagcaccgcctcgagcacacattgccgcgcgctctgttcgcccagcgagtcacgcccaggctgcactgagcccttcccctggtcgctgcttccctactgccgcgtccctggctcggctctgctcgccgcgcgccatgctcgctccgcgtgcctggcagccgctcgtctctgctcgccatggctgccgcgcgccgcacgcgctgctccccgagctcgccctgcgctcggcttcttctccctggactccccagccgcgcccctgtttccctgcgctcaccgcgtcctgctcgtccatggcgtcatctctctagccgcgatctccctgctcggctccttcctccactgctccctccaatggcgcgcccttcttctctcgtctccagtgcccagcgccgcgcctactccctctgcgcgccgagcctcttccagccgtgtgcccagtccccagctccttccctgcggcgccctactcctttgcttgtctccatggctgcgccgcagaccgtgatgccccagcccggatctccctgctcgcccctgcgct

SEQ ID NO: 88038 - DNA, 108 bp, Zea Mays
attagatgttcagaccgcaggtaaatttatcagatttcgaatcaaatcaaactgtgtcgcaagtaccatcgacccttttgttatcgctaaaaatatcgatccaaaaat

SEQ ID NO: 88039 - DNA, 348 bp, Zea Mays
atgggtgatggcgagctgctgggaacggcggccgacgacgtccatggctgggggcaggggcgagtgccagggaggagagggactgggagtggctgctggcgagctgcagaggcacacagaagaagagcaccgagagggagagaccatggcggcgatgctcgagtaggagagggcgctcgacgcagggggagatggctgacggccatggaggacgaggaatggagggagggcgccgtgaaggagagggctggcgtggggaatagagcgagcaaggagaagtgcgctttggaaatcctccagaacagtgcggttcaggatgaggatagaggaagcggtggaaggagataa

SEQ ID NO: 88040 - DNA, 1740 bp, Zea Mays
atgcaacaacaaattactcaattgatgcagcaactacaggcgcttcagcatgatctacgccatgcacctaccatggaggatcaacctgacaatgaagaacatgtggaagatgatgatcatgcggccttggaagcagaggcagcacgtcgtgctgctgctggaggtggtggccgaggacgtggtgctggtcgaggacgtggtgctggttttggcaatttcggtgctccgaatatgaggccacaattttttggccgtgcacaacgtgttccaattggaggtgctgcaggttttgatggtgatcctaattttggttatttagatggccatcgagcaggttatcatggccgccatggtggttacgatgatcgtggaggtggtcactttggtgcttttggtgaccaccaatttgctggtgatgatggccaccgtgatcagcgtcgtgcacaaaatagttctactccatggcgcaattcacagcagccaggctcgagggcacacacaccttcatctcatgcagcttctacaccatctcgtgcaacccctcgctcagtttcagcttctggaaagcaatctgatgggaaaggcaaagctatgagttctaatcagtacaactcctctactgcagcagcccaaaagaagacaagtaatattgagtgttttaagtgtggtggtcatgggcataagcaagctgaatgtcccaatcggcgtgttattctagcacttgcagatggttcgtatgattcacaaagtgaggaggaggatgtaaaccatgacaccaatatacatgatgaaaatttggaaacttttgagtatgaagcagaggatggtgaatgcgaattggtcctgaattgtttagcactgaaacaagttcattgtattgttgagaagcacatgactcaagctattgttcctagctctctagaagaaattacttgtgctgattttgatgaactacttactgatattggtgatttgtacactcatatttctccaccagaagctagtctccatgaatcttctactggtccctttaataatcggagtatcacattactggctgcaccctatcacatttcaagtagccacaagaccattactctagctgttgcaccggatcaagtagtgcaagaagtcatttgtgctccagagtttggtactaaactaccattatttccattatcatatgatttgtcaagcacatcacagcccaattatcactcgctgcaatctgaatgtttatcatctccttttggttcaccgcatcattctatggtggtacgtcatgttctttcaacacaattagttgcagctgagcaagggcagcgccataatttatttcaatcatgatgcaaagtgaaaggacaggtgtgcagatttataattgatggtggcagctgcaacaatattgtaagtgccctgcttgttgagaagcttggcctaaaaatgcatcgacaccctcacccgtaccatatgcaatggttgaataatttagggacagtgaaggttacatccatggttcgcttgcctttctcaattggtgactataatgatgaggtggattgtgacattgttccaatgcaagcatgccacttactgttgggtcatccatggaaatttgatgtcgattctgtgcattttggtcgctcaaacaaatactcatttgttcacaaagagaagaaagtgatccttgtcccactaactcctaaagatatacatgcttctgatgttgctcgcatgaaa

SEQ ID NO: 88041 - DNA, 616 bp, Zea Mays
acgactccttctcaagagagggaggctgatgaggacacccctagcattgacactaaaattataaagaataagaatgcaacaaatattgatggtccagttacaagaatgcgagctaaacaactagagaaggaaatttattctcaggtgaatgctaaccttattttaattaatcacaacgatccagatcagtcagtgctttcaagttgttgtttgaatattcttaggaatgatggcgtgtacccaagttcatgggacgatgatggattttgccttccaacattgtgatgatcagctctctctgtgacatgctgatattgcagtgtgaaacttagaagaataatgatagcttggtgcttggacgtgcttgtgagaataaagggagaaggacggaccattcagctaccatgcagatcagccgtggatgtcaaataaatttgtgagttaagaaggcagtcagcaaccaggttgttgtccacacacgtacaagcatgcagaagagtatcaaccatccaaagagttccattaggccaggctattaatagaaggtgtgctacaacttcccactgtgtgttcccatttattttatctaaactgaaaacaccactagtgctatatg

SEQ ID NO: 88042 - DNA, 916 bp, Zea Mays
aaatctgaaccgcgtctgctctctctctgcttcgtctccctcccggcgccctgcgtctcctacggcgcgcacccctcccctgcacgctccatctctcacgcgctgccgccctagttcctgatccctggccaccgtggagcttccccatcgcccctggctcggatccagcgcccgagcgacctaccttcggcttctgcgcgccggatttggagctccagccatggcgcttcgcttcccccagcagcactctcctcctctactccaaccatagccgcgcccctcagctcaccctccagcgtcgtgacttccagcgctcggcctccagctcctacgcgcgcaggagccttatcctccatgcgccgtcgccctcctctggtgttcgctcgccccggcctctgttcctccaactcggcgcccagctccctctctcttggccatggctgccgtgtcgaggtcccttccccgcgagctcccctgctccctcgcggcgaccttccctctgccatctcctggtgccgcgcccctactctgctctctgttcggccatggccgccgtgccaaggcctccttccccgcgcgcagcttttcctctactcctcccggctcctagcgctctcgtcctgtctccctgctcgccagacgtgtgtgatcaaagacgtcaaccggaaaccgtcgtcgtgcttccgactatctcgtcgaattagtcagggtaagcaaatttgttattcgtgctagtggattgatgaatggtctgactaggtatactatttattaggatgcccaagtcatctacagtgatttggtcgatgttgtgtggagaaagaggtcgcaataggtcccagtgcttgcgggattgtaggtgttaaaaatgtgatgttttattaatatatatgtgatacacaggttaaccgggaaa

SEQ ID NO: 88043 - DNA, 387 bp, Zea Mays
gagtattcgtcgccgcgaggcagcaggggagctcgcggggaagggatctcggcatggcagccatggccaagagagagggagctaggtgccgagttggaggaacagaggccggggcgagcgaacaccagaggagggcgacaacatatggaggataaggctcctgcgcgcgtaggagccgaaggccgagcgctagaagtcacggcgctggagggcgagctgaggggcgtgactatggttggagtagaggaggaaagtgctgctgggggaagcgaagcgccatggctggagctccaaatccggcgcgcggaaaccgaaggcagggcgcccgggcactggatccgagccaggggcgacggggaagctccacgacggccagggatcaggaac

SEQ ID NO: 88044 - DNA, 2289 bp, Zea Mays
atggggcacaccgccgccgctgcggccgcggccgccgaacccgctctcggactcaccaagcccaacgccgtcgagccgcctcaggtcaccttttttgcgaaagacatcaaattctctgagtggaagggcgatattctcgctgtcaccgtcacggagaaggatctgtccaaagacgcttactccaaatttgagaatgccgtcttgaagaagctggacggccagctcggcggcctcctgtcggaggctgcggtggaggaagatttcactggaaccgtgctggggttgtatgaggacaacagatacaagtctgaatcgaaaaaggtgcacctgaaacaggttgatattattggactaggttctggtgcggaggtggatcagaaaattaagtatgctaatgatctttcgtcgggtgtgatattcggaagagagcttgtgaactctcctgcaaatgtccttacccctgatttgttgccagtatacttatcgcagtcatcctttgttctttcagctgtgcttgcggaggaggcgtcaaagatcgcttctactttcagtgatgtgttcactgccacagtactggatgtagagaaatgcaaagaactaaagatgggttcctacttgggagttgctgcagcttctgctaaccctcctcacttcatccatttgtgctacaaacccactgatgggaacatcaagagaaagctggctattgttgggaagggtttaacttttgacagtggtggctacaacattaagaccgggccaggctgcagcatcgagctgatgaaatttgacatgggaggctctgcagctgtatttggtgcagctaaagctttgggacaaataaagcctcctggagtagaggttcactttatagtcgctgcctgtgaaaatatgatcagtggcacagacatgagaactggtgacattgtaactgcttccaatgggaagacaattgaggttgctctagactacattggaaaacatggcgcaacagttggtgtcactcgagaaaagagaattaaatatgcaaaagaaatacttcaaaaggaaatgttacgtgttggggaattatgtgaaactaagaaggcatactattttgggtatattattcaccgcctactgatgtgtgctcttagtcgaagagctgaggatgaccgagatcattatggaaacaaaagactagatcttgctggtccactgcttggagggctgtttagaatgtgtgtagataatggaaaggaagttaattttcaatttgctatcaaagcaaaaactgttaccagtggcttgaagtactcacttgctactggaaactggggacaggctaaccaagctggaaccagagcaggggtttctcagtcaaataagaagttacaaggtttaagggaagaattgaatgcgattgtcccatacttggaggagatgagaaagaagaaagttgaaagatgggaccaatttgttgatgtcatagagcaaattaagaaggttgcatctgaaatcaggcctgcagatattgtaccctttagaattcctgtggatcagtctgatctgtctttaagaaagctggaggagctaacgaaagagctgcaatcccttcagaaggagaagagtgatcggctgaagcaagtcatggaacatcttaacactttgcattcgttatgcgaggtgcttggtgtagacttcaaacaaacagtaaatgaggtgcaccctagcctgggtgaggctgatggatcaaagaacctaagcaactgtacaattgaaagccttgcatcagctgcaagcagactgtgtgaattgaaagtccagaggatgcaaaaggtggaatctgaagttttaagactcgagcaacttaaagtgagcaagatgaaagaccttgttctaaaaaagaagacagaactggaagagcataggagacgtgctcatttgattagcgaggaaggctatgcagctgaatttagcgatgaggttattgaggcaggagttgttgatcctgcgctggtgctggaacaaattgaggctcacattgccacagtgaaagaggaagcctttagcaggaaggatattctcgagaaggttgaaagatggttgaatgcatgtgaggaggctcagttaactggacgacctaattctgctggaggtggtcaaggacaatatggatcactgagaaagcatggagtaagcgtcaatgccattgtacaacaaaaccaggaattcagcattcagaatgaagattttctagctttaccagtttggataattgcattcaggcattcacaatatatgctataa

SEQ ID NO: 88045 - DNA, 607 bp, Zea Mays
acacacgtgtagcctagtggtttgccgcgttgctttccaccgtctcgcgctcttcttcgtggagccatgacggattgacgggacgcgacagcgagagagccatcttcgtcggtgctggaggttgcagcggcagagtcgaggcaatgcatccgttaaggccgactgcttcggatctgcaggcaacagcttgcggtgatacccagaggaagcgtgagatggtgtccggcgacacaagtatggacggggttggagaccacattccccgtggtggagtcgatctgcgaggcctagcccgccgccgccaccatcgcgcgtatggccacggtggtgctcgagcgttagaagttcttcctggtggtgctccagcgtcagaatctagtcaatggggaggggttcttgctaagtgctatttaattgctttgtttttagtcagattgaatgcttaagatatttggcatcattagaatgttcccatctcatgaaatggtagatttgttttttttatgggacacaatatagctcctttttgttttgatctggtgttgtaatgccagattcatgccatgctaaaaagaagttaaaagaagtttgattaatgttatgttaa

SEQ ID NO: 88046 - DNA, 587 bp, Zea Mays
cccacctcgccagcttcatcatgtgttcgttccccgtggcgtgtccttatcactggtcgttggactcggcttagaccccatgctttgcgtcctttcgacgttgacgacgcttagctccctcctatagctctccgtgcggcaagcccagctttcatctccagctccagcagctgcccctcctggctccagtcctctgttcgtccctcgtcgtcgatctgtgcagccttgacgcgccatcggctccctgtccgacttcatcctcgtcgccgatctcatcccgttcaggctttcaccggcgtgctgctccctcgcctcggcgccctgcgagctccttcttcctcgcccagtttgcagctcaggcctcgatggatgtcaacgccgtttctttgacctcgccttgacactcaatcgctgcagcacgctatgtcatgtgtgctacaatatcatcgttcgctatactcattctcgccaattttccttgtcgtttctcggctactacctcgtcagctcctgcgcgtcgtgcacgtcttgtgttcggatcaagcaccaggattttgaggaaaagaaagctccagtgcatcggccgg

SEQ ID NO: 88047 - DNA, 734 bp, Zea Mays
aagattattgtatttcagatgtatagggctcagatgggatctcaaatgggaccccagttcacccgtccgtcacaatctggatagaccccaaacaccaaacataacacagggttctgagaccggacaaggaaacccacagatggacatgcagtggtcgatgccccctagaggacatattcttcctcctccacaaccaggtatgggatattggccgccaccaccatggggatatcctacacatccaatggggccttggggacgccccccatggccaacacagtcacttccatcaccagcggattccggctctcatcaagtgactcctccccctcacgacaactttgcggacagatgtctcaattctagtggtggaactacgaacaacaatttgatgtccagatcgagagcgatggagctaatgtttgaacttgtgtgtttgaacttgtgaactaaaaatgtgcactatggatgtgaacttatgtgaacttatgtgcatttgtgaacttatgtatttggacttatgtgaatttgtgaacttatgtatttggacttgtgtgaatttgtgatatgatcatatatccatgtgtttgaaatctgtattgtatgtgatatttaatgtttgaacttgtgtgtttgaacttgtgtgtttgaacttgtgaactaaaaatgtgcactatggatgtgaacatatgtgcatttgtgaacttatgtatttggacttatgtgaatttgtg

SEQ ID NO: 88048 - DNA, 676 bp, Zea Mays
aatcaacaataggagacggacagactttggctttgggtgtgcggcgggcggcggcaccgtggcagttggcactgcggtctacagactgcatcagccggcaggactctgcgtctcctcccgtcctccggttctccctgcgacggacaaatctgctgctcgatttctctggttgtccctgtggcggacggcacatcggcaagccaggcagccagctcgtcagctctaaatcagattcagtaattattcattctattttgactgatctaaatccttcggaaacctgcatggattttgaggaacaagatgctgatagtgatcccgatgtcatgaatgattatggtgagctttaactgcgagtctaccactagttatggtgcttaatccttggcaatatgtttgtaaactttagatacattgtatagagcagcagcagctctgtaccatgaaccttgatatatcttgtgtgctgtgtgtgatgaaccatgagcttttgtatcaaactattgtatggagcagcaacagttctgcaccatgaaccttgatatatcttgtgtgctgggtgtgatgaaccatgaacttttgtatcaaactattgtatggagcagcagcagctctgcacttgtgtgccttagtgcctatgtgtatttaaatccgtgtgcaactgttgactgttgtc

SEQ ID NO: 88049 - DNA, 3064 bp, Zea Mays
atactgttgttgctttagctttactaacatcagcagcatatttttatccgggtcttagcaaaaaaggattgagttatttcgaaaattatattaaaccaaccccaatccttttacctattaacatcctagaagatttcacaaaaccattatcacttagttttcgacttttcggaaatatattgacggatgaattagtcattgttgttcttgtttctttagtcccattagtagtccctatatggtcatgtttcttggattatttacaagaggtattcaagctcttattcttgaaacgttagccgcaacctatataggtgaatccaaggaaggtcatcattgaattaactagtttttgaaatagtcttccttttttagcttagcccaattcatgcatgatttcggataatcctcttagttggaaaactaaatagttcgaaaggggtatgaatatacaacctagagttgcaggagagataatagactatattatggaagaggtaaagtatatatgcattcaagggggccaagtcaggttagatctatatctttaatgcctacaagacagtcatcttttgtgtggctttctaaagaatgtttttagaattggattcaatagaaaatgagaaaataggcaaacaaaatagaagaaacaaatgtatatgggattttttattcctaagttagattcattatctaatccgatatatagaattcccttctatatggaactcgattatatatctagttctatgcaacatattgttatcaattgtatatcttgatttgattcctattggatttggattagttcgatttcaattggggttcttcatctatttcgtcttttattatgttagatcaaggggggaaatgggaacttaaagatatcaaagagtaaaaaaaggatggaataaatgagtgattggttgaaaagaaagacaaatagaataatgagaatcatatggatttacacaaacctctaatgattagaaactaaaaatgagatctcgaagtaatttgaacgatttcgattatcttttatttgtacttattagttacttctacctgatagagcttagaagttggaaataataatttcttggttgattgtatccttaaccatttctttttttttttgacacgaggaactcatcatgaatcctctaattgttgctgctttcgttattgctgttggattggtcgtagggcttgcttctattgggcccagagttggtcaaggtactactgcaggataagttgtagaaggtattgcgagacagccagaagcagaaggaaaaataagaggtactttattgcttagtctagcttttatggaagctttaacaatttatggactggttgtggcactagcgcttttgtttgccaacccttttatttaatcctaaaaaaagaaaatgagttctatatattagatacttttttcttttttactacattggtatttgcttatgtaattctaagtatatcaataatttactttactcctatttattatattatttctttttatattattccggaaattttgtatttatcgggatagacaataccgtatgaaccccaagaagggctgatttgagcatgatctatttagaggatatgctcaccctcttccttcccgtccttagtttaggatagtggaaagtatttttcctttaattttaggaattttgggaacatttcaacaaaggagatctttcacaggtcaaatgagacctaagacttaatctaaaagaaattattggattgtctatttgcattaaaaaccgatcaaaaaaggatgagcaaagtaagtaatcgaaaaactttcttctttgttcgtcctatctataagaggagagtgtgacagaacctcccaagtcattaggcccacctacagttgtccttgtccatcggacttcggacaaccctgcaggtgcacctgatcacttgacaagtttggtatctgaattctttaccttgcccaagagtgtttcacccgtcacgcagatattacaacacatcagaggtacgaatatgcggaagcagttacaacaacttattttatattaaagtatggaaagagtagtattattacagaccagtaaaaatataagagtgcaggagtaatattattacatactcgggaggcaaaaacccctttcgattaacagtaaaaaagtttttaaaggaggacacttcctcccggggcttcagtcctggttttcttccttaggcaccaccttggaacaaaagcaacaaaaatttgctgcttcctcacctacaacaacatgggttcaaaaaccctgagtacggagtgtactttcgcaagtcttacccgtcaaaataaaagactctcaaggatatgctggcttttgggaatcaaggtatgtcttatcaagaatccagaatcaaggtatggcttatcaacgtgtaggtcagtgaccaagtcttcatgtccgagaagtaacggcgatctgaatcgattaatacccagctggggatctccaatcacacgacatatgtagcacttaacccttgcatatgtcaactcgccaccagggttcttaagaccagatcaggttcacgccaactgagagcacagatacaccaccgtccagcctcttgccacggagggtacacgctactctcgccatctctccactcccattgcgtgttatcttattctagtattagtctgcctgaggcaaagcttacccatgatgaggcatgtgaccagataaaaggtcctcaatcatcaagcctacatcgagacggtccataatcgactcagacggagacactacaccgagactcccttctcgtgcaagtcaaccgcccgatctcagctttattattttcaacccaaagtttggtacctggtagaggtacaacttttctgatgttgaacccatcacggccatgatgggtccaccatgaagttttattttgaaaacatcccatcccacttgaagcatcatcttttgtcaaaacaaaacattttgtttttctagagcaaggctaagcataagaaaaacctatttataaaacaggggatcaagga

SEQ ID NO: 88050 - DNA, 1141 bp, Zea Mays
ttcgcgccaccaccacagaccgtctggccttagagccagaccgtccgcgcggtcatttccagcactaaacaggaagataccgaactttcagatttgaaaaaagtttcagaagatttatctaaagtagatggtgattgataaagcaattcttgtttgtaagttccagtgtgagtactgcgccgaacataaagtttgtgacgggtagtaaaagatctatttttctttgactttgacatagagttcgatcatcaattatttctcgcgctatcttcttacgaagttttgttacggaatctataacagcctctggtttaggcaggtaaatcggcaggtagacgtccacaggaattaacttatcaactcctcgaacggtactataggaatctgtactgaacatgccccctgtaatagtacaggctcccatagcaatgacgtattttagttcaggaatttgctcatataatcgcactaaagatggaaccattttcattgttaccgaaccagctgttaaaattaggtctgcttgtctaggacttgatcttggtaccaatccataatgatcaaagtcgaatcgtgagcctattaatgaagcaaattcaatgaaacaacaactggtaccatatagaaggggccataaacttgagagtcctcaccaatttgaaagatcgtttggtgtagttgaaataatggaattggaacttgtttggtcaagtaacggaaactcagtcaaactcataattgtctcaatggaatcttttccttcttttttttgaatattcagttaagaccattccaaggcacctttttaccatgcataaactaaaccaacaacttggataagcacaaaaaatgaaagcttcgataaaacggatacacccaatatgtcgaaactcattgcctaagggtagagaaagactatttccacatcaaaaacaacaaaaactagcgcaaacaagtaatagcgtattcataattgtaaccaatccccccatgggttctatacccgattcataactagaaagcttctctggtccttcactaaccagggctaaaagtcctgaaatcctaagtaccaaaataggaataaggcttgctattattagaaatgtccaaaaatatcatattcgtgaagcataaacat

SEQ ID NO: 88051 - DNA, 499 bp, Zea Mays
atgcattccaaaaatagaaactaatacaaggaaaagtatcacgacagtgtaagaaatgttcgacactttccaaacatcgtcacatatatacaaccagcggcctccaaaagtaatgtacaaatagcagccaagccgcctaccgcctatgggtcgattaattaggacgatagaaacctccaaaggcgtggtgtacaactaaaggcctcaggtacacacataggtaattaacactctccaatgcacactaggaactgctctcctctggccgcccctcgtgcctttttctatagccgccacgagcacctgctcaatttatttttcaacaacagtaggacctgttgtcctcttactgtccctcatgtgccttttctcaatgctctctgcagacgtcaggacccctcactgcttagtttaccttccaacacagcaaggacctactctgctacgatcaagacccctcactgctcagtttatctgccaacacatagaaagattctct

SEQ ID NO: 88052 - DNA, 768 bp, Zea Mays
atgggtggtgcccttattgggagacactatgaatcgagtgtgacagcaattgactccacggacccgccagctgagaagcatgagtaccaggctgaggtcaacaggctcatggatttgatcgtacacagcttgtatagtaacaaggaagttttccttcgagaactggtcagatgtgtggtaacggattctgttgcattgctggaagaacatgaaaatatgttggggacaattaggtatgactctggtgaaactgcttgcagcttgcacatgctacatgatgcttttcagttgctttcagctaatttatgcaacttgggatacttccatttttatgcgagatcgtcggggttcgagcagttggacgggcgagtcaaggtgcttcagatagaggacgcggcgccaccaggagctgacctcgtcacaaccggagttgctggagaggatccagaagctgaaacaggtgcgtatggatttcccagaatgtccagaacatctgcattagaacacctaaaaaagaagtccgccaaagatttgaaatggagtacggaactgtttttggacaaggctggatcaaattttggagcaaataccatttcaccgaaccaggttgctgtctgtatataccacctgaaaatttacacatggggacattttttagtgaaccaattaccgctgccagtttttagtgactacaattggggatgtcgtgggcggtttatttctggtggctgctatctttttataggagttgtcagagaattgttttag

SEQ ID NO: 88053 - DNA, 168 bp, Zea Mays
aaggcatcttagccagctcaatttgattggaaatattgttgttttaagatacagagtccatggttactgttgtacgcttctctaagcaaccttgtcatcccaataatttggttctagagcaacctggagctatatattgatctagcttcttttagtaacaaatgtaag

SEQ ID NO: 88054 - DNA, 316 bp, Zea Mays
ttttggagatttgaacgcaccttcaattcagttgatagttttgccgagatagtggacgaagaaaaatgccagtccatgaaccctatccatccgccgtcctcgacgagcaggtccaccagatgcttcacaactcgcgtgccgagctcgacgtcccatcagcagcttcctctctccagggtgtaggcaagtccccgaacactatccctccgcccgtcacactgttccccatttctagcctaatttatgtatgtgcatgaataattagtttataggttatgtgccatagcttttatgtctaaaagaattgtgacaattg

SEQ ID NO: 88055 - DNA, 188 bp, Zea Mays
tgcaggcacctgatctttgctttgggaaagaagggatgtagcagcacggccaccacacttttaaataaaggaataactgtttattaatgatgctaaacaggaagggtcaagtctagggaattattacattctaatctttcatggtagttgaactgtttagtttggtgggctgagatgtctatcttttg

SEQ ID NO: 88056 - DNA, 2338 bp, Zea Mays
ttaacacaaaattttcaaaaaaaaggaatttgttgaattttttcttgttgaataatgccaaatcaaaaaaatcaaaaatccaaaagtcaaaacaaaatgaattagttaattcaataaaaaagaaaaggcgactcacacttgatttcgttgcccaagcgaatcccattcaatcgtttacttatgaaatgaatccgttggaaagttcaatccattttcatataaatttcgccttgtgtgaaggatctgtgcctactctactttcctatctaggacttcgatatacaaaatatatactactgtgaagcatagattgctgtcaacagagaattttcttagtatttaggtatttagattcaaaatatcaaaggggaagaactttaaaaattataaaataaagattagggtttgggttgcgctctatctatcaaagagtatacaataatgatggatttggtgaaacaaatccacggtttaataacgaactgtgttaacttaccataacaacaactcaattcctatcgaattcctatagtaaaattcatataggatagaacgtacacagggtgtacacattatatatgaatgaaacatattcattaacttaagcatactccttttttatttaatgatttgatattaattaaatatctttttttagaattttgcaaaggtttcatttacgcctaatccatatcgagtagaccctatcgttgtgagaattcttaattcatgagttgtagggagggacttatgtcaccacaaatagaaatataagctggtgttaaggattataaattgacttactacaccttggagtacgaaaccaaggatactgatatcttggcagcattccgagtaactccttagctcggtgttctgcttgaagaagcaggagctgtagtagctatggaatcttttactggacgatgctatcacatcgagcccgttcctggggacccagatcaatatatctgttatgtagcttatccattagacctatttgaagagggttctgttactaacatgtttacttccattgtgggtaacatatttggtttcaaagccttacacaatctacgtttggaggatctacgaattccccctgcttattcaaaaactttccaaggtctgcctcacggtatccaagttgaaagggataagttgaacaactacggtcgtcctttattgtgatgtactattaaaccaaaattgggattatccgcaaaaaattacggtagagcgtgttatgagtgtctacgcggtggacttcattttaccaaagatgatgaaaacgtaaactcacaaccatttatgtgctagagagaccgttttgtcttttgtgccaaagcaatatataaagcacaagccgaaaccggtgaaatcaaggggcattacttgaatgcggctgcaggtacatgcgaagaaatgattaagagagttgtatttgcaagggagttaggggttcctattgtaatgcatgactacttaacacgaggattcaccgcaaatactactttgtctcattattgccgcgacaacgacctacttcacattcaccgagcaatgcatgcagttattgatagacagaaaaatcatggtatgtatttccgtgtattagctaaagcattgtgtatgtcggggggagatcatatccactccggtacagtagtaggtaagtttgaaggggaacgcgaaatatctttaggttttgttgatttattacgcaatcattttattgaaaaagatcgttcttgcagtatgtttttcactcaggactgggtatccatgccaggtgttataccggtggcttctgggggtattcatgtttagcatatgccagctctaatcgaaatctttggagatgattcgtattacaatttggtggaggaactttaggacatccttggggaaatgcacctggtgtagcagctaatcgtgtggctttagaaacctatgtataagctcgtaacgaagggcgcgatcttgctcgtgaaggtaatgaaattatcaaagtagcttgcaaatggagtgctgaactagccgcagcttgtgaaatatggaaggagatcaaatttgatggtttcaaagtgatggataccatataaataaaaaagaagcaaaatagaaagagaaaaaataagttaagaaatgcagtaattcttctttattcctctaattgattgaaattcaattcggctcaatcttttctaaaaaaagattgagccaaattgaaatagatcttgatacgatcatgagacttgacaaatcgagattcttctattctatatatctagaatatagaaaggtattatacaacaaacaaatataaatcaaaata

SEQ ID NO: 88057 - DNA, 1658 bp, Zea Mays
atgcgtgttttgaagatcgaaatatataaacattattaccatgggagaagagaagcaacgtcgggatggccatggcggaaagaacaagtacgccgtggcgtgctccattattggctccatcatctccattctcatgggctatgacacgggcgtcatgagcggcgcgatgctgttcatcaaggaggacctcaagaccaacgacacgcaggtccaggtcctcgccggcatcctcaacgtctgcgcccttgtcggctccctcacggccggccgcgtctccgactgggtcggccgccgccgcaccatctccctcgcggcctgcatcttcctcgcggggtcagtcctcatgggcctctcgcccaacttcggtacgctcctggcaggacgctgcgtggccggcgtcggcgtcggatacgcgctcatgatcgcgcccgtctacgcggccgagatttcgtccgcccacatccgcggctccgtcacctcgctgcccgagatctgcatcagcttcggcatcctgattgggtacgtggccaactacctgctagctaagctcccgctggtctacggctggcgcgccatgctggggctcggcgcgctgccgagcgccgtgctcgcagtcgccgtgctcgcgatgccggagtcgccccggtggctcgtcatgcagggccgcgtcgagcaggcccacgccgtgctcaggcgcgtgtccgacactgcaggcgaggccgatgtgcgcctcgcggaaatcaagaccgcggcggggctggcagacgacgatgacggctcaccgagaggtgtcggcaagggcgtgtggaaggagatgttcctgcacccgacgccccccgtccggcgtatcctcgtcgctgccttcggagtccacttcttccagcatctcacgggaatcgaagccgtggtcctctacagcccacgcatctttaaggcagccggcatcgccacccgcagcgagatccttgcagcgaccatcggcgtgggcgtcaccaagacggtgttcatcatgacagccatcctgctggtggaccgcatcggccggaggccgctctacctctcgagcctggcgggcatcatcgcctcgcttgcctgcctcggtcttggcctcaccgtcgtggagcgctcggtgccgcgccactcgccgacgtgggctatggcattgtccatcgcaacggtcttcaccttcatagcgtccttctccatcggtgtggggcccatcacgtgggcgtacagcaccgaggtgtacccgctccggctgcgcgcgcagggcgccagcgtcggcgtggccatcaaccgtgtcatgaacgccggggtctctatgacgttcgtgtcgctgtacaatgcggtgaccatcggcggtgcctttttcctgttcgcagggctggccgtgttggcggccatgttcttctacttcctctgcccggagacgcaaggacggccactggaggagatcgaagaggtgttcggccgtgggtggcgcgcgcgcctcctgtcatgggacgaagctgttgtggagcttccaatgtccaacaccaccgacggcaacaccaaggcgcgcccgtgatgcaaatgcgattgcaaaaattatggatagacattcatatatggtcacgtaaaacactagtttactttatattgtagaatatagttttttt

SEQ ID NO: 88058 - DNA, 357 bp, Zea Mays
atggccatgaacaaaggcgcgcacagggagctagagaccgagcgtggcgaaatggacaggaccgagctcggcaggagcatgcgcgcacagaatagcagggacgcgcagaggctaatcccgacgagcacagcaggggtgcgaccatgggccaaataccggagagctgacggcgcgcgggagctgaagcttgccggagagcagggaggtgggcggccaagcgcatgggagctccagcgacgagcgcaggggcgcggctgggaaagcaccaaacagaggacggcagcgcgtgtggaagaagatctgggcgccgagcagagaaggactagggcgagcaagcatctgggcgcgcggccatga

SEQ ID NO: 88059 - DNA, 119 bp, Zea Mays
tttctttttttccatttttttagaaaaattgtcacacccgggtttcggggcaccaagacccgagcgcgaacataatcaccaggtgtgccaggaccaagtctcacacatatgatgaatca

SEQ ID NO: 88060 - DNA, 2095 bp, Zea Mays
atattgtcaatagtaacagtgagaagaacacacaaaatgagggttcttgtagagaagctgttagtctctgtgtttttagcagcattctattcagggtgcatggtcgtgtctctagaatatgatcacacggcaagcatcgagtgccttggcgacccaatgaaacccttgtacaagggcggcattgtccagaacagcgagttcaacagcggactgatgggctggtcgacacaccggaacgtcaaggccggcgtgagcagatcgccgtccggcaacaagtttgcagtggtgcatggggcgggaagctacgtgagcagcagcggcaagctcctaccgtcccacagcgtgtaccagagaatccagatgcagagcgacaggcactactcgctatcagcatggctgcaggtgtcgaacggcacgtcggcacatgtgagggcggtgatcaagtcccccaacggcgaacgcgtcatcgctggtgccatcgttgcccagtcgggctgctggagcatgctcaagggaggcatgaccgcttactcttcgggacccgcagagatctactttgagagccacgcaccagttgacatctgggtggacagtgtctcgctgcagcccttcaccttcgacgagtgggacggtcacacccgccgctccgccgacaaggtccgccggcgaaccgtgaaggtggtcgccatgggcgccaacgacaagccgatggcgcatgccaacgtgagcatcgagctcctccgcctcggcttcccgttcggcaacgcggtcaccaaggagatcctcggcctcccggcatacgagaagtggttcacgtcgcgcttcagcgtggccaccttcgagaacgagatgaagtggtacagcaccgagtggacccagaaccatgaggactaccgcgttccggacgccatgatgaacctgatgcgcaagtacaagatcaaggtgcgcgggcacaacgtgttctgggacgaccagaactcgcagatgcagtgggtgaagcccctcaaccttgcgcagctcaaggcagccatgcagaagcggctcaagtccgtcgtgtcacgctacgccggcaaggtcatccactgggacgtggtgaacgagaacctgcacttcaacttcttcgagacgaagctgggccccatggcgtcggcacagatctaccagcaggtggggcagctggaccgcaatgccatcctattcatgaacgaattcaacacgctggagcagcccggcgatcccaaccctgtgcccgccaagtacgtggccaagatgaaccagatccgcggctacgccggcaacggtggcctcaagctcggcgtcggcctcgagagccacttcagcacacccaacatcccgtacatgaggagctcgctggacacgctcgccaagctgaagctgcccatgtggctcaccgaggtggatgtcgtcaagagccccaaccaggtcaagtacctggagcaggtgctcagggaaggcttcgcccaccccaacgtcgacggcatcgtcatgtgggcagcgtggcatgccaggggctgctacgtcatgtgcctcacggacaacagcttcaagaacctccccgtgggcgacctcgtcgacaagctcatcgccgagtggaagacgcaccgcgcgtccgccaccaccgatcacaatggggcggtggagctccacctgcccctaggcgactttaagttcaccgtaagccacccatctttgaaagccgctgctgttcaaaccatgaccgtcgacaattcggcgtcggcgtcccagcataccatcaacgtcaagtcctaggagacgacatcaggcactctgtggcggatctttaattaatttcttctttatttttcattctggtgaataaataggtcccaaagagagagataaaaggagaaggaaaggagacgtggcagcatggccacgttagtgattttttgttcggtgatttttttttgtaagctatatatagatagagagtagtcatttttaagttattaattatatagttgcaaatgcgcacgttaatggttgtcaatagctttgtcacatctatatggattcctagtaatacacataaacattacagatctttgaacta

SEQ ID NO: 88061 - DNA, 2035 bp, Zea Mays
tcacttgcatctaggcttctagctgtactcctcggccggtcggtcccacccatggacagtgacaatgattgcggctccgacgccggcgccgagtgggtctgggtacgccgtccgtcggaggttgaggccgctgccgcggcggccggatggctggcggatgaagaggcgcggccgctcaaggtggtcttcggctccccggctaagtacttcaccgacgcagcgccgatcgggaacggccgcctaggcgccatggtctggggctgcgtcgaatctgagaggctccagcttaaccatgacactctatggacaggtggacctggtaattatacaaatcccaatgcacctgctgttctttctaaagtaaggagccttgttgagaacggaaagtaccctgaagccacatctgctgcatatgatctatctggtgaccaaacacaggtctttcaacctcttggggatattgatctggtctttggtgaggacatcaagtacacaaattacagacgagagctagatcttcacactgcaacagtcaccgtcacatatactgttggggatatagtctacacaagggaacatttctcctcaaacccacatcaagtcattgtgactaagatctctgcaaataaaccaggaaatgtctctttcacagtgtctttaactagtccactagaccacaagattcgtgtaacacatgcaaatgaaataatcatggagggtagctgtccaggccaaaggcctgaagagatcaagactgctgctgatcaacctattggaattaaattttctgcgattctttatctgcagataaatggtgccaatagcacagtggaagtattgaatgataacatgctgaaacttgattgtgccgactctgttgttttacttcttgcagccaccacttcatttcaaagtgcattcatcaaaccttcagaatctaaactggatccaacagtgtctgcttttacgacattaagtattgctaggagaacgtcatattcacaactaaaagcctaccacattgatgattaccagactcttttccagcgtgtttccttgcaactatcacaaggctctaattatgatcttcggaggagtaggctagttcagtcagcagagactagttctcagggtgctaatgtatcggattatggttttcaaatatctggctgcaccagattgacatcccttaatagttttgtgaagcctacggtagaaagaattgtaactttcaaagacaatgaagacccttctcttgtggaacttctgtttcagtttggtcgttatctactcatttcgtgctcaaggcctggaacccaaatttccaatctacaagggatatggagcaatgacacttcaccaccatgggacaccccatccaaatataaatctacaaatgaattattggcctgcgcttccttgtaatcttagcgagtgccaagaaccactgtttgactttattggttccctctcaatcaatggagctaagactgcaaaagtgaattatgaggctagtggttgggtcagtcatcaagtcacagacttatgggcaaaaacatcaccagatgctggtgatcctgtatgggctctatggccaatgggtgggccttggcttgcaactcatctctgggagcattactgttttactttggacaaagtgagccgcactagaacaaaatatagtaatatacattacttatttactttcgtgtatcaaactaaaatgagaaaattgtttttccatagttagatattaaaagagacaaagagtagtttcatggtcatttttattttgcgacctcttgatgacacttccattcttctgggcaatatcttgtgctactattagttgagtctcatctgctgtcatcctgggatggcatgctctctatttggtcaaggtacttgtcttttcaacactaaaagcacaatacaatgaacactagaaagggtgttaggaattgagaatcatctgaactacatgtgttagatgtagcatctagcaccagaaagatgtatgttttcatgtgtgcca

SEQ ID NO: 88062 - DNA, 2824 bp, Zea Mays
tcacttgcatctaggcttctagctgtactcctcggccggtcggtcccacccatggacagtgacaatgattgcggctccgacgccggcgccgagtgggtctgggtacgccgtccgtcggaggttgaggccgctgccgcggcggccggatggctggcggatgaagaggcgcggccgctcaaggtggtcttcggctccccggctaagtacttcaccgacgcagcgccgatcgggaacggccgcctaggcgccatggtctggggctgcgtcgaatctgagaggctccagcttaaccatgacactctatggacaggtggacctggtaattatacaaatcccaatgcacctgctgttctttctaaagtaaggagccttgttgagaacggaaagtaccctgaagccacatctgctgcatatgatctatctggtgaccaaacacaggtctttcaacctcttggggatattgatctggtctttggtgaggacatcaagtacacaaattacagacgagagctagatcttcacactgcaacagtcaccgtcacatatactgttggggatatagtctacacaagggaacatttctcctcaaacccacatcaagtcattgtgactaagatctctgcaaataaaccaggaaatgtctctttcacagtgtctttaactagtccactagaccacaagattcgtgtaacacatgcaaatgaaataatcatggagggtagctgtccaggccaaaggcctgaagagatcaagactgctgctgatcaacctattggaattaaattttctgcgattctttatctgcagataaatggtgccaatagcacagtggaagtattgaatgataacatgctgaaacttgattgtgccgactctgttgttttacttcttgcagccaccacttcatttcaaagtgcattcatcaaaccttcagaatctaaactggatccaacagtgtctgcttttacgacattaagtattgctaggagaacgtcatattcacaactaaaagcctaccacattgatgattaccagactcttttccagcgtgtttccttgcaactatcacaaggctctaattatgatcttcggaggagtaggctagttcagtcagcagagactagttctcagggtgctaatgtatcggattatggttttcaaatatctggctgcaccagattgacatcccttaatagttttgtgaagcctacggtagaaagaattgtaactttcaaagacaatgaagacccttctcttgtggaacttctgtttcagtttggtcgttatctactcatttcgtgctcaaggcctggaacccaaatttccaatctacaagggatatggagcaatgacacttcaccaccatgggatgcagcaccccatccaaatataaatctacaaatgaattattggcctgcgcttccttgtaatcttagcgagtgccaagaaccactgtttgactttattggttccctctcaatcaatggagctaagactgcaaaagtgaattatgaggctagtggttgggtcagtcatcaagtcacagacttatgggcaaaaacatcaccagatgctggtgatcctgtatgggctctatggccaatgggtgggccttggcttgcaactcatctctgggagcattactgttttactttggacaaacattttttagagaaaacagcgtatccactattggaaggatcagctaggtttttgttggattggttaattgaaggacacaggggatatttggagaccaatccttctacatctccagaacattattttattgctccagatggtaaggaggcctgtgtgagctactcaacaactatggacatctcaattataagggaagttttctcagctcttatattgtctgctgacattttaggtaaatccgacactaatgtggtgcagagaataaaaaaagcactgccaaatctcccaccaatgaaagttgctagagatggcacaatcatggagtgggcacaagactttcaggatcctgagattcatcacagacatgtgtctcacttgtttggtctttatcctggacatactatgtcacttgaggaaacacctgacctctgcagagctgttgccaatagtctttataaaagaggttcccagctgcgttgtcggaaatgctggtacagagcactgggaccgacttgtaccttctccctgctctgccccgcaacaagtggcctcaaggctacgttaaaggtctgaaggcccgaggtggtgttactgtaaacatcagctggaaggaagggagcctccatgaagctctgctatggtctagcggcgggcagaataccctttcaaggctgcactacggggaccagattgccaccgtcagcctatcatcgggtcaagtttacaggttcagcatggatttgaagtgcttgaagacttggcccctgtgatagcacacatttgctgaaatgaaagatacgattgattgtgcaaaaattcatgaaaacttctggctggcaagaaaataatcgatttcatacatcaatcataacacgtatcatatttcttatttactgtgtatgtttagttacatttcactgtatacatgtttactcgttgcccgtgccaagtgctatacagtgcacgactgcatgtgcattctgttaacatttttttagatgggaacatatcgaatgcaaaccacgttttggtgtaaacttcgtcctactaaaaaaagtttcaaaaaattctgaaaaaacatgaatgtacatctcagcttaacttatctatatacaaactttcatggtaaaatttatcttactctagcagttaaaaaaacaaa

SEQ ID NO: 88063 - DNA, 3515 bp, Zea Mays
cacttgcatctaggcttctagctgtactcctcggccggtcggtcccacccatggacagtgacaatgattgcggctccgacgccggcgccgagtgggtctgggtacgccgtccgtcggaggttgaggccgctgccgcggcggccggatggctggcggatgaagaggcgcggccgctcaaggtggtcttcggctccccggctaagtacttcaccgacgcagcgccgatcgggaacggccgcctaggcgccatggtctggggctgcgtcgaatctgagaggctccagcttaaccatgacactctatggacaggtggacctggtaattatacaaatcccaatgcacctgctgttctttctaaagtaaggagccttgttgagaacggaaagtaccctgaagccacatctgctgcatatgatctatctggtgaccaaacacaggtctttcaacctcttggggatattgatctggtctttggtgaggacatcaagtacacaaattacagacgagagctagatcttcacactgcaacagtcaccgtcacatatactgttggggatatagtctacacaagggaacatttctcctcaaacccacatcaagtcattgtgactaagatctctgcaaataaaccaggaaatgtctctttcacagtgtctttaactagtccactagaccacaagattcgtgtaacacatgcaaatgaaataatcatggagggtagctgtccaggccaaaggcctgaagagatcaagactgctgctgatcaacctattggaattaaattttctgcgattctttatctgcagataaatggtgccaatagcacagtggaagtattgaatgataacatgctgaaacttgattgtgccgactctgttgttttacttcttgcagccaccacttcatttcaaagtgcattcatcaaaccttcagaatctaaactggatccaacagtgtctgcttttacgacattaagtattgctaggagaacgtcatattcacaactaaaagcctaccacattgatgattaccagactcttttccagcgtgtttccttgcaactatcacaaggctctaattatgatcttcggaggagtaggctagttcagtcagcagagactagttctcagggtgctaatgtatcggattatggttttcaaatatctggctgcaccagattgacatcccttaatagttttgtgaagcctacggtagaaagaattgtaactttcaaagacaatgaagacccttctcttgtggaacttctgtttcagtttggtcgttatctactcatttcgtgctcaaggcctggaacccaaatttccaatctacaagggatatggagcaatgacacttcaccaccatgggatgcagcaccccatccaaatataaatctacaaatgaattattggcctgcgcttccttgtaatcttagcgagtgccaagaaccactgtttgactttattggttccctctcaatcaatggagctaagactgcaaaagtgaattatgaggctagtggttgggtcagtcatcaagtcacagacttatgggcaaaaacatcaccagatgctggtgatcctgtatgggctctatggccaatgggtgggccttggcttgcaactcatctctgggagcattactgttttactttggacaaagtgagccgcactagaacaaaatatagtaatatacattacttatttactttcgtgtatcaaactaaaatgagaaaattgtttttccatagttagatattaaaagagacaaagagtagtttcatggtcatttttattttgcgacctcttgatgacacttccattcttctgggcaatatcttgtgctactattagttgagtctcatctgctgtcatcctgggatggcatgctctctatttggtcaaggtacttgtcttttcaacactaaaagcacaatacaatgaacactagaaagggtgttaggaattgagaatcatctgaactacatgtgttagatgtagcatctagcaccagaaagatgtatgttttcatgtgtgccaacttgttatgtcaatagtgtgctgaagatgctcaatgattcacatgctgcacttcagtgatatcctaaaaactgcactagtgtcatttactaatacacaagctttactgattgtaatatatggatagtttattttgattacatggtgaagtttcggtgttaatgcccttgactaggagggaacgcatgtcgatagctttgaactgactgttttcttttaacaaattgcatgctcacattccctgaatattttaaaatttacataaaattgaacaagatcagatgcgagttattccactttcgttgcagcattttttagagaaaacagcgtatccactattggaaggatcagctaggtttttgttggattggttaattgaaggacacaggggatatttggagaccaatccttctacatctccagaacattattttattgctccagatggtaaggaggcctgtgtgagctactcaacaactatggacatctcaattataagggaagttttctcagctcttatattgtctgctgacattttaggtaaatccgacactaatgtggtgcagagaataaaaaaagcactgccaaatctcccaccaatgaaagttgctagagatggcacaatcatggagtgggcacaagactttcaggatcctgagattcatcacagacatgtgtctcacttgtttggtctttatcctggacatactatgtcacttgaggaaacacctgacctctgcagagctgttgccaatagtctttataaaagaggtgacgaaggcccaggctggtctacttcatggaaaatggtcctatgggctcgccttcacaacagtgaccatgcatacaaaatgatactgcagctaatcactttggtggatccagaacatgaggtttcaagagaaggaggcctatacagcaatctgttcactgcacatccacctttccaaattgatgcaaattttgggttcccagctgcgttgtcggaaatgctggtacagagcactgggaccgacttgtaccttctccctgctctgccccgcaacaagtggcctcaaggctacgttaaaggtctgaaggcccgaggtggtgttactgtaaacatcagctggaaggaagggagcctccatgaagctctgctatggtctagcggcgggcagaataccctttcaaggctgcactacggggaccagattgccaccgtcagcctatcatcgggtcaagtttacaggttcagcatggatttgaagtgcttgaagacttggcccctgtgatagcacacatttgctgaaatgaaagatacgattgattgtgcaaaaattcatgaaaacttctggctggcaagaaaataatcgatttcatacatcaatcataacacgtatcatatttcttatttactgtgtatgtttagttacatttcactgtatacatgtttactcgttgcccgtgccaagtgctatacagtgcacgactgca

SEQ ID NO: 88064 - DNA, 2169 bp, Zea Mays
gcttctagctgtactcctcggccggtcggtcccacccatggacagtgacaatgattgcggctccgacgccggcgccgagtgggtctgggtacgccgtccgtcggaggttgaggccgctgccgcggcggccggatggctggcggatgaagaggcgcggccgctcaaggtggtcttcggctccccggctaagtacttcaccgacgcagcgccgatcgggaacggccgcctaggcgccatggtctggggctgcgtcgaatctgagaggctccagcttaaccatgacactctatggacaggtggacctggtaattatacaaatcccaatgcacctgctgttctttctaaagtaaggagccttgttgagaacggaaagtaccctgaagccacatctgctgcatatgatctatctggtgaccaaacacagtttggtcgttatctactcatttcgtgctcaaggcctggaacccaaatttccaatctacaagggatatggagcaatgacacttcaccaccatgggatgcagcaccccatccaaatataaatctacaaatgaattattggcctgcgcttccttgtaatcttagcgagtgccaagaaccactgtttgactttattggttccctctcaatcaatggagctaagactgcaaaagtgaattatgaggctagtggttgggtcagtcatcaagtcacagacttatgggcaaaaacatcaccagatgctggtgatcctgtatgggctctatggccaatgggtgggccttggcttgcaactcatctctgggagcattactgttttactttggacaaacattttttagagaaaacagcgtatccactattggaaggatcagctaggtttttgttggattggttaattgaaggacacaggggatatttggagaccaatccttctacatctccagaacattattttattgctccagatggtaaggaggcctgtgtgagctactcaacaactatggacatctcaattataagggaagttttctcagctcttatattgtctgctgacattttaggtaaatccgacactaatgtggtgcagagaataaaaaaagcactgccaaatctcccaccaatgaaagttgctagagatggcacaatcatggagtgggcacaagactttcaggatcctgagattcatcacagacatgtgtctcacttgtttggtctttatcctggacatactatgtcacttgaggaaacacctgacctctgcagagctgttgccaatagtctttataaaagaggtgacgaaggcccaggctggtctacttcatggaaaatggtcctatgggctcgccttcacaacagtgaccatgcatacaaaatgatactgcagctaatcactttggtggatccagaacatgaggtttcaagagaaggaggcctatacagcaatctgttcactgcacatccacctttccaaattgatgcaaattttgggttcccagctgcgttgtcggaaatgctggtacagagcactgggaccgacttgtaccttctccctgctctgccccgcaacaagtggcctcaaggctacgttaaaggtctgaaggcccgaggtggtgttactgtaaacatcagctggaaggaagggagcctccatgaagctctgctatggtctagcggcgggcagaataccctttcaaggctgcactacggggaccagattgccaccgtcagcctatcatcgggtcaagtttacaggttcagcatggatttgaagtgcttgaagacttggcccctgtgatagcacacatttgctgaaatgaaagatacgattgattgtgcaaaaattcatgaaaacttctggctggcaagaaaataatcgatttcatacatcaatcataacacgtatcatatttcttatttactgtgtatgtttagttacatttcactgtatacatgtttactcgttgcccgtgccaagtgctatacagtgcacgactgcatgtgcattctgttaacatttttttagatgggaacatatcgaatgcaaaccacgttttggtgtaaacttcgtcctactaaaaaaagtttcaaaaaattctgaaaaaacatgaatgtacatctcagcttaacttatctatatacaaactttcatggtaaaatttatcttactctagcagttaaaaaaacaaa

SEQ ID NO: 88065 - DNA, 2105 bp, Zea Mays
atcgacgtgaccgtgataccaggttgtcaagtgcctcagcacctaacaacgtcggaccgcgactacgcagattgtagtcgcgctccaggccttcaccgagagggggagctcctgccggcggcttgagggagttgagggaaagggagcaggtttggtgataactgattgcttgattccattcctccaagtctgattaaattatataggccattgccccactaatggctcctatattttaggcatagaaaggaaactattgatttggggaaaagggaaactaatctgctcctttattttaggcatagaaaggaaactattgatttggggaaaagggaaactaatctgctatttgaatttcgaaatctcagccactaatggtggtgccatcctgtgtagcgtgagcagcacgctcagctacgcgtctgatgtcacgacggcgcctatacttgtgcccgtacatgacaaaaggtcctgactccctcatcatcctaggggcatggatgatttggaaacaccgtgatagatgtgtttttgataactggatgcccagcttgcctctaatccttaggcttgcggatgaacagaggagaatgtgcgaatgcaggggccaaggggctagcctatctggcagcttccttgcctgatacctatgggatgctgtctttggagtagcagtggtggttcaggattttatgtactcttttttgtatgcatgtttttggcctccgtaaagagtgccttgtatttgtttcagtcttctttaagaccttgttacctttcttcttaatatataaaaggcacagttctcctgcgtttttcgagaaaaaagtcttattggcagacaacagttactcctcaaattctaacggaacagactaaagctagagatttcatgttttgctatatctgattttctatattttttcctgacaggtgaattatgaggctagtggttgggtcagtcatcaagtcacagacttatgggcaaaaacatcaccagatgctggtgatcctgtatgggctctatggccaatggcattttttagagaaaacagcgtatccactattggaaggatcagctaggtttttgttggattggttaattgaaggacacaggggatatttggagaccaatccttctacatctccagaacattattttattgctccagatggtaaggaggcctgtgtgagctactcaacaactatggacatctcaattataagggaagttttctcagctcttatattgtctgctgacattttaggtaaatccgacactaatgtggtgcagagaataaaaaaagcactgccaaatctcccaccaatgaaagttgctagagatggcacaatcatggagtgggcacaagactttcaggatcctgagattcatcacagacatgtgtctcacttgtttggtctttatcctggacatactatgtcacttgaggaaacacctgacctctgcagagctgttgccaatagtctttataaaagaggtgacgaaggcccaggctggtctacttcatggaaaatggtcctatgggctcgccttcacaacagtgaccatgcatacaaaatgatactgcagctaatcactttggtggatccagaacatgaggtttcaagagaaggaggcctatacagcaatctgttcactgcacatccacctttccaaattgatgcaaattttgggttcccagctgcgttgtcggaaatgctggtacagagcactgggaccgacttgtaccttctccctgctctgccccgcaacaagtggcctcaaggctacgttaaaggtctgaaggcccgaggtggtgttactgtaaacatcagctggaaggaagggagcctccatgaagctctgctatggtctagcggcgggcagaataccctttcaaggctgcactacggggaccagattgccaccgtcagcctatcatcgggtcaagtttacaggttcagcatggatttgaagtgcttgaagacttggcccctgtgatagcacacatttgctgaaatgaaagatacgattgattgtgcaaaaattcatgaaaacttctggctggcaagaaaataatcgatttcatacatcaatcataaca

SEQ ID NO: 88066 - DNA, 213 bp, Zea Mays
atgttgtctgaggtggggtgtggcggaagtacctatgcaggaatgcagaggatctcgtttcggggcctcgagggggagattgagctcctctgggcggatctaggctgtgcggtggcgaggggctccgccggggaggcggatgcggagtcggaggctggaagagtcaagcctgtgagttgcgatgcggaggctctagaagagtccagtctatga

SEQ ID NO: 88067 - DNA, 120 bp, Zea Mays
catatttttcatttttagggttgaaaagaacttgaagttgttgaatcagcagagcatgatgtgcaaaatgaaattagggataatgacaatgaggatactcaagatcgtgaacactatgat

SEQ ID NO: 88068 - DNA, 207 bp, Zea Mays
atggccaccgcgccctgtttctctctcccctgcgctcagctcgtcgagctctccctctccctggttccgcgcgactccggcatcgagctcctccccgcgcgtgcagccaccgttctccctcagctcgccggcgatgctccggtttcctgctcccatctccctagccgcatcgctggcccttcggacctgaccatcgtttgccgctga

SEQ ID NO: 88069 - DNA, 1621 bp, Zea Mays
ccgctagcgatgccggtgccgccggcgcagcagcgcacgctacccctcccgcatttcaccctcccgcctctcaccggccaggaccacctcttcgtggctgctctccgctcccatctctccgcttcgccgccccctgccgtcgcttccctctcccgcttcctccccggaatcaccccgctccgcttctcccacctcgtcgtcctcctcgcagggcgcgtccgtcctccgcacaacctcctcactgcgctcctcccctcaccgcctccatcgctcccgctagccatcctgctccactcactcccaccgcgccgctgcgctgagctcctcacctccgtgctcccctccgtctcgccgcgagccttcccggacctcctccaccacgtgatcctcaccgcccgccttgctgctgggacgcagcgcgctgccgtagtcccggccatagacgtcctcttctcctcgtgcgcacgcgacaagaagctctcctgggccacgcttacctaccgcgccatgcgcgcgcacggcatgttcccgacggtcgagtcctgcaatgtcttcatctcgggcgcgctccgcttgcggcgcccagagatagcaatatccttcttccgagagatgcgccgctgccgggtctctcccaacgtgtacaccgtcaatatggtgatgcgggctaaatgtgccctggggcgtgtggtggacgcggcgcagttgctcgacgaaatgccgtgctggggattcagcaggactgcagccagctttaacacgctcatcgctgcctactgccatgacagtggtggcatggagaccgtgttgcgtctgaaggagaggatggagcgtgaaggtcttgtgccaaatgaggtgacctacaacacgatcgtacatgggctgtgcaaggagggcaggatgcaccaggcgaggcggatagtgaatgagatgagggtgaagggtgtgactccaaacactatcactttcaacacactaattcatagttatgtgactcttggcgataatgaggtggcgatgaagatgcatgaggagatgatgaaggctggacttagtgctgatctggtgacctacaatgcgctcattctcgggctctgtaatgaagggaagacatggaaggccagtcagttggttcaggagctttgtgctgccaaacttgagcctaatgcatcaactttctcggctctgattattggccaatgcaagaagcagaacccagagcgtgcattagatctgttgaatgcaatgaagaaagctggatttcaaccgaattactacacatatagtattctcatatccactttctctaagaacaaggactttgaaggcgcaattgatgttttgaaggacatgctcatgaggtgcattgctcctgacaaagccttgttgcatgagttcttcgaaggcctctcaaaagctaaaaaactgcacctggcagctgatcttcgttcagtggccaatggcacaagatttatttctgatatttattatactgatgattataggaatatagatgaagagtaaataacatgttaagacgcatcctgaactacaaactctcatcaatatataaagtttttgattaagtggaaccggattgatcaaagaagtcaataagtcc

SEQ ID NO: 88070 - DNA, 224 bp, Zea Mays
ttacatgttataacaagattacaatatatatcatcggagtgattacaaaagaaagtgattcaaaaaaattacaatttaaaatgtataaaatatttataggttttcaaatacatgctagcttaagtgacaatcctcaataaagaagctaaagatgggatatacttatataagaaggccgagcccaccggcacttagcaccatccacaacagaacaaaaatataac

SEQ ID NO: 88071 - DNA, 404 bp, Zea Mays
ggccgcttctctccttgcccagctgcctctgcgtgccgagttgttttggtgctctacagtgaggactgcctcaaggatctggccgccgacctgctgctttccccgtccttctatgcccctccccgtggccagattcctagtgattggacgaactctgaaactcaagtaagaaatctcgtgtgcatccctgtttccttcacgtagctagtagtatttggttaggctatgggagcacttgaagcaccgagcttgtgctctagtaatggcggctgtggggggtctccctcaccaacgtgttagacagactaggggttgaagaagagtgtgaaccgttggatccacatggacggttcagattaaaacacaaatatcttttcgcttcagtaaaccatgatcgtagatca

SEQ ID NO: 88072 - DNA, 675 bp, Zea Mays
atgtgcctggggtggagtgcgcgctcgcttcccctaccgatacgagctcaacagacccatggattccgtgggtcgctgggattagctgccgtgatccagggcgtctggctccttgatgggctatataagtcggtcgtgacctattctccgcatcccatccaagtaccaccactgttgatcattagggcgttttgtcgcgctcgccggaatcgcgtgggcaaccgcggacctgtgcacgctgataaagcaggagtcgcagcggcgattcatccccgcctccatcgctctgcattcaaggattcagtcgagatgggtttgcgagatcacaacgaagcttcggtggacatccgagggtgtgggagcaaccagaaccatgggaaattccgcatcgcgggagcacacagccgcggagcatcgctcaccgtagctagcattcaactctacctcaagtgcggtaagaaggcctctaccgagttcgctgctatctcttctacgcatagcgctagggaatcgagaattgaatgttgtgggcactggattgggaacgcgctggctataccccgtcgtggtgtgctctacgccgcaggtgggtcagccgatggggagaagaagctgggtgggccgttggatcggcaatggatgggcgaggggtcgcggaccggtgatccatcctga

SEQ ID NO: 88073 - DNA, 113 bp, Zea Mays
gaacttgaatctgaacgcattccgaaaagaactgaaagtttcttctcaaaagagtttccatgaatatgtttcaaggatggcacgaatcagctttactgctacaaagaaaaaaa

SEQ ID NO: 88074 - DNA, 1979 bp, Zea Mays
agtatagcagtaggaaatagaagagactatgaaggtgaggagatcggaaccagttctagtccatgcgaccggagccgcgaccacccaagagtactacttcctctcgaacctggataggaatgtcgccgtgctcatgaaaacagtccacatcttcagcgtgtcatgtgacgatgtggcaacgctgctcagggattccctgagcagggtgctctcgcagtactaccccttcgagggtcggctggccgtacgcgaggacgggaggctcgccgtgcggaacgaccgccgcggtgtccccttcgttgacgcggtgtccgattacgagctgcaggtggtctgtgacgcaacggccccgggttctgagcttctcggtgacctcgtctacgtcagcatgcagcacgagaacgccctggaagcgccgatgctgaccgtgcaggtgaccacgttcaagtgcggcggctttgtcctcgggctcgccatgaaccactgcttggcagacggccagtccgccgccgagttcatctgctcctgggcggagaccgcgcgtggtgtggccatgtcgacgccgccgtacctcgaccgcacggtgcagcgcgccaggccgatcccgacggttgacttcgcacatgacgagttcgcagagatcgaggacgtctccggcctcgccggcacattcggcaaggagccgtgcgtttaccgctccttcactttcgacgcaggcaagctgcacaggctgaagcaagccgcaagcgagcaagggcaaggaggcaccaagagctccgtcttcgtcgcgctcacggctttcgtgtgggtatcaaggacgcgggccctgcggatgctccccgatcagaagagcaagctgctgttcgcggtggacgcccgtctgcgcgtcgacccgcccttgccgcccggcttctggggtaacgccatcatcttcgcctgctgcatctccactgccagggatctcctcagcaaaccactgtccgcggctgcccgttccatcagagaagccatcgtccgcaccgacgacgcgttcatccgttccgccgttgactacatcgagttgaacagcggtgctcgcccgtcgctaatggcaaccaccctggtcactgcttggaatcgactcaggtttcgcgcggcggacttcggatggggtgaagcaatctactcggggccggcggagctgccgcagaaggaggtggccatgtttctgcgcggcgtgagtgacagccagagcacagtgctggttattgggatgcctgtgtcatgtatgcaagcattccaagaaacggtagatctgctgtgaaatgtgtgtgtcttcacaagttaaaaaaaacagaagccttctgactgtatgagggaggaaaatttggtgatttatattctgcagtgatctattgtacgcatgaccagtggctcatgtttacaaacaatatgatttacattcactcgatcaggattatgcccccaagatctgatcaaacgttgggtaaacaaaagcattcgataaaaatatttggcttcggccagactggacgcaaggtggactatttgtacgtctaacttctctgcaacactctggttggacgaagtcttatgttagtggtctccttcgtcgccgaaggtcccataagaaaaaacaccttcgaaagattgacacaaagtcgaagctatcaatcagagagctttagagtacatttccaaatgcaccgacttaaagatgaaatcaccaatcgacccatgataacttatattatgattgtaaacatttttaaagggcatgaatgtaatttctcgcaggctgcgtcctgtgcctatacatagtcctgcactgttcacgttatcctgtattcgctcgtgcgtaacacttggatttttgccttctgtcaagccgaaggtataaatgtaattaaatattgtatttaaatatccaagtttatataatgaagacatgtgaatgatattatatgtttattcatgtt

SEQ ID NO: 88075 - DNA, 1341 bp, Zea Mays
ggaaatagaagagactatgaaggtgaggagatcggaaccagttctagtccatgcgaccggagccgcgaccacccaagaggattccctgagcagggtgctctcgcagtactaccccttcgagggtcggctggccgtacgcgaggacgggaggctcgccgtgcggaacgaccgccgcggtgtccccttcgttgacgcggtgtccgattacgagctgcaggtggtctgtgacgcaacggccccgggttctgagcttctcggtgacctcgtctacgtcagcatgcagcacgagaacgccctggaagcgccgatgctgaccgtgcaggtgaccacgttcaagtgcggcggctttgtcctcgggctcgccatgaaccactgcttggcagacggccagtccgccgccgagttcatctgctcctgggcggagaccgcgcgtggtgtggccatgtcgacgccgccgtacctcgaccgcacggtgcagcgcgccaggccgatcccgacggttgacttcgcacatgacgagttcgcagagatcgaggacgtctccggcctcgccggcacattcggcaaggagccgtgcgtttaccgctccttcactttcgacgcaggcaagctgcacaggctgaagcaagccgcaagcgagcaagggcaaggaggcaccaagagctccgtcttcgtcgcgctcacggctttcgtgtgggtatcaaggacgcgggccctgcggatgctccccgatcagaagagcaagctgctgttcgcggtggacgcccgtctgcgcgtcgacccgcccttgccgcccggcttctggggtaacgccatcatcttcgcctgctgcatctccactgccagggatctcctcagcaaaccactgtccgcggctgcccgttccatcagagaagccatcgtccgcaccgacgacgcgttcatccgttccgccgttgactacatcgagttgaacagcggtgctcgcccgtcgctaatggcaaccaccctggtcactgcttggaatcgactcaggtttcgcgcggcggacttcggatggggtgaagcaatctactcggggccggcggagctgccgcagaaggaggtggccatgtttctgcgcggcgtgagtgacagccagagcacagtgctggttattgggatgcctgtgtcatgtatgcaagcattccaagaaacggtagatctgctgtgaaatgtgtgtgtcttcacaagttaaaaaaaacagaagccttctgactgtatgagggaggaaaatttggtgatttatattctgcagtgatctattgtacgcatgaccagtggctcatgtttacaaacaatatgatttacattcactcgatc

SEQ ID NO: 88076 - DNA, 923 bp, Zea Mays
aagataacgaagagagggaaaacaagtgtggaagagggaaaactggaaaaggcacagcaaaccgagaaaatggcggctcggcgtgggcgagagtgggacggggacgagcagggcgcggcgctgccaacgccggcgcccctcggcgcgccggtcgtctgccttctcagctccgccggagacctagccgccggcgccttcgtaggctccctcgtcggatacggaaaaggtttgatcacaaaccaaggcacgaaggcttgtcttagcattgctggatcttctgcaaagacatttgctgctcttgctggtgtccaaagtttcatcatgtgcttgctaagaagactgcgtgggaaagatgacatgatcaatgcgggtatggcaggttgttgcacaggcattgctttgagctttccaggtgcgccccaggcaatgttccacagctgtgtcaccttcgcagcattctcatgcataatggacggtctcagcaagcagcaggcagcaatggcactcacacttgatgtgaaatctccaactgtcaagtatgaggagggccgggtcatcccaccattcactcttccgccgcttctggatgcattggatcctctaggttcattctgccagacccttatcaagcctaagcattaggagtgcgctgaggcttgttaccccaaaaaggcagtttcgatctatagtttggcactgtatgctctataaccgttctgaatttgtctccagtcatgctgttcaagtttggtaactgtagtggcgctataggacatatgcccattttttgtcaatggtacattttttatgaaacttgctgaagagattataaccataagattgttcattggtgaagatttgatagttcattgcaacaatggtgttcaactctctgagttgaagatattttttcagaaaacaaa

SEQ ID NO: 88077 - DNA, 384 bp, Zea Mays
atgaaaccaatcatcacccagacccgaactagtagccaaggtccagcaggtaaccgtaaacacgcagtctatgacgatgaggcagcacacagattacgcgcatgcgtagagccatcccccgatcagatgacgaccatcggcgtggaccaaccaccaacaccagcgccaaatgtcggtggcgagcagctaggaggatatgacagccgaggacaacggcgacaacgtgcgccgcccgtcgcccaagaaggacatggaaccctcgacgcccaagaaggaggaggagccccaacgccaaaggaggaggaggactacatcagtaaggaggaccggaagatatttcgaaagatcgctagagtcctcctccacgaagacaaggatgcctag

SEQ ID NO: 88078 - DNA, 2044 bp, Zea Mays
gtcaaaccaaagcagaactatctatatctagcgtcaacacgacagttacaacttctagattttaagtgacacttcaccttgccatgaagatctagttggtaagataaccattgggtaagattattctatcaacatgtaggtatgatgctcatgtttagaattcaaatagtagcatagcaaagaaacaaatttctcaaatataacatttcagcaaggaccataaaaaaactagaatccatgaatatcaatcgatcacattaacaaatattgaggaccacaaatgatgttcacacatgtgtacctgcagaggaaatgtcaacaccatgccgaagatacaaccaatactctgtttttccatccaaggtaaaggacaccatctctctcctcaagcctgtagtagctgttgtaggtatgcaacaatgtgttgatagtgttgttcacaactgaactcagtgggtacggtctaaatccagccattgcaaatcttgacttccattttccaaacagctcgtgcctctcaaccctttcagcaccctcgcatgcgattaaattaacaatatcccttgcaacacagtgttgttctgcgctcatccgcctcctatcatcccttgggagagcaacatctatcgactcaaacatggctgtatagtagttgagagtttccatgtaccttgggaagaatggagctgtgtttgtatttgactcctgttcaacgagagtaacaaccctaggattgatgctcttgatcattcttataatcctatcccgatgattttctgtacttacactttcgtcaggaacatgatgtagctgataggcaaaattcacagcaataatctccccatgtcttatagcaagatgctgaagctcaacctcatggctagcagctggaacggcattgaactcaaaaggaagaccacatgaattagcaacatcacacaacgtcctcccaactatatcaagcccgcctcctctggcataagcagaatttgagtcatctataccagtgattctaatgtatggtggccccccaggtcttgcagcaagggcctgtagcagagtaacccactggctcccctgagcaatttggaaatcaattatgtgaacaaagttctcgcccttaatagcctcggcaatggcaccatttgctgacatgtaaccaaacttgtagaatgggcagatctcgtaaaggagatgcatatatgacatgagctcagagcttgtaggttctttacatttcaaagatttatatagcatactgccggaggaagaaagtctagcaacaattccttcaagcatataggctccaagtcgttgcattggatctccagatacagataccaggtgaccaagctcagatattaacagttctgttgcaaagacatcattctctgcaacagccttaccacatgctatgactacttgcatcaagtctcctccattaattcccagaagttgtctccagttgtctggtctcactggaacatgggcttgcaacaagctccgagagcagtcagaactaatgtccagtccaggtccaacaatggaattctctaattctttttgtttaatcaggagatctgcaacctcagttagacaggaagcacttggaggagaactatatgtgtggtctgagtggctgtcatgctgagacagggggctcccacttaaaggggagatgctatgagaagatgtggagctttgtgcaggataaacaccatttgctgaggatgattccagagtgcagtactgtgcttcaaatacttgagggttggaattgttgatcctttgtgatccaatatcggaggatgagtaatgatgtcctagactgttttctgccatatggatcctaccattttctcctacaggtgctgagttattgtagtacggcatttgagaatcatccgaacatttatatgaatgattagaatccctagctgacattctgccctttgcaatcttgtaggacaaaactcagcaggaagctaatcctgccatcttcatcaggattgtatttagtgtgctcatgtcatccactgaaaat

SEQ ID NO: 88079 - DNA, 5144 bp, Zea Mays
gtcaaaccaaagcagaactatctatatctagcgtcaacacgacagttacaacttctagattttaagtgacacttcaccttgccatgaagatctagttggtaagataaccattgggtaagattattctatcaacatgtaggtatgatgctcatgtttagaattcaaatagtagcatagcaaagaaacaaatttctcaaatataacatttcagcaaggaccataaaaaaactagaatccatgaatatcaatcgatcacattaacaaatattgaggaccacaaatgatgttcacacatgtgtacctgcagaggaaatgtcaacaccatgccgaagatacaaccaatactctgtttttccatccaaggtaaaggacaccatctctctcctcaagcctgtagtagctgttgtaggtatgcaacaatgtgttgatagtgttgttcacaactgaactcagtgggtacggtctaaatccagccattgcaaatcttgacttccattttccaaacagctcgtgcctctcaaccctttcagcaccctcgcatgcgattaaattaacaatatcccttgcaacacagtgttgttctgcgctcatccgcctcctatcatcccttgggagagcaacatctatcgactcaaacatggctgtatagtagttgagagtttccatgtaccttgggaagaatggagctgtgtttgtatttgactcctgttcaacgagagtaacaaccctaggattgatgctcttgatcattcttataatcctatcccgatgattttctgtacttacactttcgtcaggaacatgatgtagctgataggcaaaattcacagcaataatctccccatgtcttatagcaagatgctgaagctcaacctcatggctagcagctggaacggcattgaactcaaaaggaagaccacatgaattagcaacatcacacaacgtcctcccaactatatcaagcccgcctcctctggcataagcagaatttgagtcatctataccagtgattctaatgtatggtggccccccaggtcttgcagcaagggcctgtagcagagtaacccactggctcccctgagcaatttggaaatcaattatgtgaacaaagttctcgcccttaatagcctcggcaatggcaccatttgctgacatgtaaccaaacttgtagaatgggcagatctcgtaaaggagatgcatatatgacatgagctcagagcttgtaggttctttacatttcaaagatttatatagcatactgccggaggaagaaagtctagcaacaattccttcaagcatataggctccaagtcgttgcattggatctccagatacagataccaggtgaccaagctcagatattaacagttctgttgcaaagacatcattctctgcaacagccttaccacatgctatgactacttgcatcaagtctcctccattaattcccagaagttgtctccagttgtctggtctcactggaacatgggcttgcaacaagctccgagagcagtcagaactaatgtccagtccaggtccaacaatggaattctctaattctttttgtttaatcaggagatctgcaacctcagttagacaggaagcacttggaggagaactatatgtgtggtctgagtggctgtcatgctgagacagggggctcccacttaaaggggagatgctatgagaagatgtggagctttgtgcaggataaacaccatttgctgaggatgattccagagtgcagtactgtgcttcaaatacttgagggttggaattgttgatcctttgtgatccaatatcggaggatgagtaatgatgtcctagactgttttctgccatatggatcctaccattttctcctacaggtgctgagttattgtagtacggcatttgagaatcatccgaacatttatatgaatgattagaatccctagctgacattctgccctttgcaatcttgtaggacaaaactcagcaggaagctaatcctgccatcttcatcaggattgtatttagtgtgctcatgtcatccactgaaaatgtaaaagattatatattcaagtaagataggatataagcatatcaaaattatttttcaatacctgaagatgaaaattagctgtcaatgtactccaactcatataaacttttcatggacatatagttgttgagctatattgtattgtcaaaaacataaaccaaaattcaactattgtcacttctagaaccaaagtgtcaatccagaaagttgcctatccaaaatgagctatgtaaaacgatgtatttacacatagttacatttaaaagtaggctgacaccaacaagaagggatagtgcactatagattatctagaagcttaataataagcttaaaagttgaaataaagacaggcccgtaaccataacgaatgattgaccatcactacatagacataactcataatatccagtaaatcattccttgcattgagatataataaagaccctgtttcgtaggccatttcaaacagctccatctctggctcatggtgaagctgtaccaaacaccgaagaaagaaacagctttgatggaggagccacagcttatttactagtggccagccagagttgcaaaacatgggtttgcattcccattcattaatgaaataccatactttttatttcatattgtcaagtttgctgatttattttctcaatattttcaccaagacttcaaaccccatcttagagccacaggccatggattggagttgggtggatctctgctaaaggatgctgcaggtaggctcgtgggttggtggctacacctgctgaggagtgctagcaatggtctagctcaccttgaaatctcatgtgacagcagcgctttgcattcgcgtttggcagcggcgatggcagattctgaagaatagcagtctgctacaacaacagcagaacatgatcgtgttggcgagcaaggatagtgaaaagtctgcttagatggctgcctgcactccggccgtgtcatatgctcttgccagtgcaggtaagagtgaaaatggtatggacatttcctgaccaaccatccaacctaagggttcaagatactaaatatatagtccatatctggatctggacattcaacatatgtacaatatctgtatctagatactcaaagtcgagtatatataatgttgatatccattgatatcttatctgacataccaacactatttgcaccaaaatacgaatccaagaaaaaataactatttgtatccatttcagtaggtatccaatctgtttatgcgcaggcctgccccagtacatggttctatcccgcacatggctgggaagctgcacacagcccattgccttgcccacacccacctcacagcagctgccctagatgcagtgcgcctgctgccaaggccgacagccttgatctggtctgatcctcgcagcagatggcctagaactacttgcattcgtggcgccgacactcacggctcctgccatgtggccaccgccgccgccgctagggcagatatgggattgggtgagaagagtgtgtaagatgatgaagtgtactttggtccttatgtgtttttattttacgtataattcagtctttcaaagtaagggcaaacggcacattcaatttcaaaacatgagggcaaaatcaccaagttgtaaaacaaggtaaaatcaccattagcctctatagtaagggcaacaacactaatctcagtagatatttaagtataaaatcgaagaactatacacttatagggtgtttggtttgaggctccattcaaaatgagatggtgcatcatgggtctattcctcaaatttggtgggatggcttcatttctcatattagtactaactaattaactataaagaatgagatgatgatggatcaactcatttcattccacaaaccaaacaaaaaaactataatgaatgaggtggtgatggatcaactcatttcattgcacaaaccaaacaaaaaaattgagaagtgagaaaatgatggactagctcatttctcaaaccaaacagcctattaatgtttgcaagtctcgaacacaaaagaatgattttattcactttgtataagaatatataaacaatcaaatgtgtatctgctaaaccctcaattagaaaagggtgacaaatgaatttcatgtctaggctattgagctaacgtatctgtaaccaagttcgttgttctagcgaacttgactatgaaatgaatcaacaaaaaatattgacctaaggatttcaagtaaccactttttaccaagaaaaaaacatgtctgcaattctgcatcgaactgtttcaccatggaaatatacataaatgctaagagcctaagagttaaaacaatataatcttagaaacccatcattcatgcaagataatcatttaagttgtattctcccctccaatgcacatttgattattgtgaaaatatactcgatgtgccaggacttgtgaggtatggaagttaactcaagaaatcttcattgtgcttccagacatgaacaacaattgatcaaagtgattaaacatgaaggggttcaattgctttcagacgtcaatttctgttagtttgtcttgtcttaatatatgtacaactcctctctaaactttcttactgattatgtaagctgttaaatcctcatacaagtgttgtgagaggcattcattgaggattaagttgtcaactgtgggctggacattgtttactcatctatacatataactgaaaaatggacaacgtgtcagcaatgaagtcttgtttccaaaataaatgatgcattttcgttctgaactgttcgcaagcccaacaacaaacataatacccagggttccaaaaagtggcactaagcgcacgcttcagcgcgcggaagcgctaagaggacgggtaacgtttcgctttggggcataagcgctcctaaagcggcgagactgccttggtggagcagcggctgctggctcccgctgctctcaggccgcttgcggcgcagccgccggggctgggcgccgttgacgatccaccggaggcgggaagagagagaggggcacgcacgcagggtcaccggccggcgttcggaggaccggaggcgagagcgcgaggcgactggcgagagccggg

SEQ ID NO: 88080 - DNA, 2225 bp, Zea Mays
gttgaagaatcagatagctgtctcaaatagctgaaatgtgtaaaaaaatgcggatacagatctggattataactacacaaattaaggagtatcctcgcaaaagaaaaaaaagaaatgaggagaagagacaaccgatcggattccgaatttccgatccgagagaatcggccaggccactcgcaccgcgaccactcgtcattagtcgcgctcctcccgcggcgaaccccacgtggaggccgcgcgcagctatataatggactatccttggatccccgcatatcgttgagcgagttccgagggtgaggcggcgattgctgcgttccgtccgttcgtttttgtgtggggcagaagccaactaagaccgcgaggagatcggaggatgttcgcggagagcttccgggtggagagcccgcgggtgcggtacggcgacggcgagattcagtcggagtaccgctacgacactaccgaggtcgtcccgccggggaatagcggcgcagggtgggtggtgcgcccaaagtccgtcacctacaacttcaagaccagcaccaacgtcccaaagctcggggtgatgctcgtaggatggggcggcaacaacgggacaacgctcacggccggggtgatcgccaacagggaaggaatttcgtgggagacaaaggagaaggttcacagggcgaactacttcggctccctgacccaggcttcaaccatcaggatcggcagccacaacggggaggagatctacgcgcctttcaagagcctcgtgcctatggttaaccccaacactatcgtctttggtgggtgggacatcagtaacctgaacatggccgacgccatggccagggcccaggtcctagacattcaccttcagaagcagctcaggccctacatggaatccatgcagccactcgccggcattttcaacccagacttcgtcgccgcaaaccaaggtgcccgtgctaacaatatcattaagggaaccaagaaagagcaggtggagcagatcaggaaggacatcagggagttcaaggaaaagaccaaggtcgacaaggtagtcgtgctatggacagcaaacaccgagaggtatagcaacgtggttgcagggcttaacgacaccatggacaacctcttggcatcgctggacaagaatgaagcagagatctcaccatccaccttgtacgcaatagcctgtgtctttgagggtgttccattcgtcaatggcagccctcagaacaccttcgtgcctgggctgatggagcttgccataaaaaagaattcggtgataggaggcgacgactttaagagtgggcagaccaagatgaagtctgtgttggtcgatttcctcgtcggtgctggaattaagcccacctcaattgctagctacaaccacctaggaaacaatgatggcatgaatctctctgcgccacaagtcttccggtctaaagagatctccaagagcagcgtggtggacgacatggtcgctagcaatccgatcctctacaagcccgatgaacatcctgatcacgtaatcgtgatcaagtacatcccctatgtgggtgacagcaagagagccatggacgaatatacctccgagatcttcatgggcggcaagaacaccatcgtgctgcacaacacctgtgaggactcgcttctcgcctcgccgatcatccttgacttggtgctcctagctgagctcagcactcggattcagctcaaggctgaagggcaggataagttccactccttccatcctgtcgccactattttgagctatcttagcaaggctcctcttgtaccccctggcacacccgtggtgaatgctctagccaagcagagggccatgctggaaaatatcttgcgggcctgcatcggccttgcccctgagaacaacatgatgcttgagcacaagtgaaagagtttcatatccctaatgaccacagaataggatgaatggaatggtgggatcgagcgagcccaatgaagaaataacaggaggccagaaaaagtgtacggagagaagatcaagtatggatgatgccacatagacccttttttaacgttatcattttttttagatttgactcgttttggggtgattagattgtgtactggctatccattgtatgcagcatgaaacctttatttatttgttgtgtgatagaggttatagaagtatctaacctaatttcttaaactcttagttgattaatatttttaattgatcgctg

SEQ ID NO: 88081 - DNA, 732 bp, Zea Mays
ccaccggaaggcttccctctttgatttcgcattttggtgctccccggcagctgcgagcgccgccgccatttactccctgcctcggggcggactcatttctctgagggctccttccttccttgttggcgatgaggaggcacgggtggcagctaccctaccatcctctccaggtggtggcgatagcggtcttcctggcgctcggattcgctttctacgtcttctttgttccctttgttggtggagataggctgcagtatttgctcatgggcctctataccccactggtgaacagctgacatcattgtgttgtcccccttctgtttcaaacagccctcttgtgtgtgtgatcgatccttctttagagtggttacttagatcttcatttccttttgcgcacttcacctctgtgtctttctttacatctgtagtatgtgcagtgaggagtattctatgctttggtagttgatacaaatattaatgtgacatgagcaaagattgaaaacacaagcacaactaacagtaaagagttctgcctacagtgtatgttggtgtatgttgagtaatgaagccaaaattatcatttcaggttagtgtaggtcaccataatatgtgcatacatgttctgattgtaacattgtacaatcagtggcaaaacttgttcacaatggtattaggcctctaatcttctcataacaattcaagagagagaaagcaaagggagcatcttccacc

SEQ ID NO: 88082 - DNA, 2060 bp, Zea Mays
ccaccggaaggcttccctctttgatttcgcattttggtgctccccggcagctgcgagcgccgccgccatttactccctgcctcggggcggactcatttctctgagggctccttccttccttgttggcgatgaggaggcacgggtggcagctaccctaccatcctctccaggtggtggcgatagcggtcttcctggcgctcggattcgctttctacgtcttctttgttccctttgttggtggagataggctgcagtatttgctcatgggcctctataccccactgatcacctgcgttatcctattatatatatggtgtgctggaacagatcctggtgatccaggcattttcttaaattcaaaaaggccacctgaaaagcaaggaagttcaactcacgaatatccagaaggagtgtcattcagcaattgttgcagggttgttcataacagtgagaatataagcaataattttgaagtaaaggattcatcttcatacctgacatttaccagggttctttgcttgatatacttcccgttttcttgcttatgcaaaagatggttccactcagatgatcaatcttcagaacagaacacaagtgaagaaggcatgtttttctgcagcttgtgtaaagcagaggtcttgcagcacagtaagcattgtagggtttgtaacaagtgtgtcgatggctttgaccaccactgtaggtggctcaacaattgcataggaaaaagaaactacaaaggattcttcatcctattggcttcagcagttctcttgcttataatgaagtggttagtgggtgctcttgtgttgattcttttctttatgaagcggggagaattctctgggcagataacctcaaaacttggaagcagcttctcagttgtggcttttgtaattgtcgtggtgacatgtacattgctagcgatggttgcaacaataccactctcacaacttctatgcttccacattcttcttatcaagaaaggaattagtacatacgattatattgtagctttgagagagcaagagcaacaagaacattcggagcaccagagcccacagatatccatcattagctctatcacaggacttagtaccagtagctcttttggtccacttcatcgtggatcatggtgtactccaccaagactattagttgaagatcaggatgtttttcatccggatatgccacagaattccactggcaagaaggccaggaaagacgaaggaagcaaaaggaaaccaccaggagctgtaaaaatcagcacatggtcactggctcgccttaacgcagaggacgtcacgaaggcagctgttgaggccaagaagagatctaaagtcctccagccgatcacaaggcgggggaatattcttaaacctgacaagagaacagacaaaagcagggtgttcctacctgtacctgaacaatctccggatcccatggcaaggacatccgcaagtggaaccgacggtaatttgagcgacatgatgatggaaacacccgctagcttagccccattgcagcacgaggccaggagtgactaccaacccagtgctgtgacgtctatcatgaacctcaaccttacttcatcaccggagagtagcttggagtcacctgatctccaccccttccgtatctccatgtcaggagcagatgaactccgaagcttcatgtcacttgcagcctcagagtcaactgctcagaagactattgcactttcgaggtcgacaagcggtgggtatgaagcctcgggaggcgacgacagcgaccaaataccctctagaattgtgcacaggtcgtccaattggacaaatgtcattctcaattcaggtaggcaggcaactatgtccgatctgaacttgcctaggctacacctgtagggttcataactaacaccaggctgacatagctcaaaattgtgagttgctgacttcttaattagctatgtgttgttagcctgtgagcatgcattggtcagaaccagtgttgggaacctggtttttgggtttaagagtcgggttatgttttgcgatcaataaatacatgtgcctttccaa

SEQ ID NO: 88083 - DNA, 2051 bp, Zea Mays
ccaccggaaggcttccctctttgatttcgcattttggtgctccccggcagctgcgagcgccgccgccatttactccctgcctcggggcggactcatttctctgagggctccttccttccttgttggcgatgaggaggcacgggtggcagctaccctaccatcctctccaggtggtggcgatagcggtcttcctggcgctcggattcgctttctacgtcttctttgttccctttgttggtggagataggctgcagtatttgctcatgggcctctataccccactgatcacctgcgttatcctattatatatatggtgtgctggaacagatcctggtgatccaggcattttcttaaattcaaaaaggccacctgaaaagcaaggaagttcaactcacgaatatccagaaggagtgtcattcagcaattgttgcagggttgttcataacagtgagaatataagcaataattttgaagtaaaggattcatcttcatacctgacatttaccagggttctttgcttgatatacttcccgttttcttgcttatgcaaaagatggttccactcagatgatcaatcttcagaacagaacacaagtgaagaaggcatgtttttctgcagcttgtgtaaagcagagcacagtaagcattgtagggtttgtaacaagtgtgtcgatggctttgaccaccactgtaggtggctcaacaattgcataggaaaaagaaactacaaaggattcttcatcctattggcttcagcagttctcttgcttataatgaagtggttagtgggtgctcttgtgttgattcttttctttatgaagcggggagaattctctgggcagataacctcaaaacttggaagcagcttctcagttgtggcttttgtaattgtcgtggtgacatgtacattgctagcgatggttgcaacaataccactctcacaacttctatgcttccacattcttcttatcaagaaaggaattagtacatacgattatattgtagctttgagagagcaagagcaacaagaacattcggagcaccagagcccacagatatccatcattagctctatcacaggacttagtaccagtagctcttttggtccacttcatcgtggatcatggtgtactccaccaagactattagttgaagatcaggatgtttttcatccggatatgccacagaattccactggcaagaaggccaggaaagacgaaggaagcaaaaggaaaccaccaggagctgtaaaaatcagcacatggtcactggctcgccttaacgcagaggacgtcacgaaggcagctgttgaggccaagaagagatctaaagtcctccagccgatcacaaggcgggggaatattcttaaacctgacaagagaacagacaaaagcagggtgttcctacctgtacctgaacaatctccggatcccatggcaaggacatccgcaagtggaaccgacggtaatttgagcgacatgatgatggaaacacccgctagcttagccccattgcagcacgaggccaggagtgactaccaacccagtgctgtgacgtctatcatgaacctcaaccttacttcatcaccggagagtagcttggagtcacctgatctccaccccttccgtatctccatgtcaggagcagatgaactccgaagcttcatgtcacttgcagcctcagagtcaactgctcagaagactattgcactttcgaggtcgacaagcggtgggtatgaagcctcgggaggcgacgacagcgaccaaataccctctagaattgtgcacaggtcgtccaattggacaaatgtcattctcaattcaggtaggcaggcaactatgtccgatctgaacttgcctaggctacacctgtagggttcataactaacaccaggctgacatagctcaaaattgtgagttgctgacttcttaattagctatgtgttgttagcctgtgagcatgcattggtcagaaccagtgttgggaacctggtttttgggtttaagagtcgggttatgttttgcgatcaataaatacatgtgcctttccaa

SEQ ID NO: 88084 - DNA, 1954 bp, Zea Mays
ccaccggaaggcttccctctttgatttcgcattttggtgctccccggcagctgcgagcgccgccgccatttactccctgcctcggggcggactcatttctctgagggctccttccttccttgttggcgatgaggaggcacgggtggcagctaccctaccatcctctccaggtggtggcgatagcggtcttcctggcgctcggattcgctttctacgtcttctttgttccctttgttggtggagataggctgcagtatttgctcatgggcctctataccccactgatcacctgcgttatcctattatatatatggtgtgctggaacagatcctggtgatccaggcattttcttaaattcaaaaaggccacctgaaaagcaaggaagttcaactcacgaatatccagaaggagtgtcattcagcaattgttgcagggttgttcataacaatggttccactcagatgatcaatcttcagaacagaacacaagtgaagaaggcatgtttttctgcagcttgtgtaaagcagaggtcttgcagcacagtaagcattgtagggtttgtaacaagtgtgtcgatggctttgaccaccactgtaggtggctcaacaattgcataggaaaaagaaactacaaaggattcttcatcctattggcttcagcagttctcttgcttataatgaagtggttagtgggtgctcttgtgttgattcttttctttatgaagcggggagaattctctgggcagataacctcaaaacttggaagcagcttctcagttgtggcttttgtaattgtcgtggtgacatgtacattgctagcgatggttgcaacaataccactctcacaacttctatgcttccacattcttcttatcaagaaaggaattagtacatacgattatattgtagctttgagagagcaagagcaacaagaacattcggagcaccagagcccacagatatccatcattagctctatcacaggacttagtaccagtagctcttttggtccacttcatcgtggatcatggtgtactccaccaagactattagttgaagatcaggatgtttttcatccggatatgccacagaattccactggcaagaaggccaggaaagacgaaggaagcaaaaggaaaccaccaggagctgtaaaaatcagcacatggtcactggctcgccttaacgcagaggacgtcacgaaggcagctgttgaggccaagaagagatctaaagtcctccagccgatcacaaggcgggggaatattcttaaacctgacaagagaacagacaaaagcagggtgttcctacctgtacctgaacaatctccggatcccatggcaaggacatccgcaagtggaaccgacggtaatttgagcgacatgatgatggaaacacccgctagcttagccccattgcagcacgaggccaggagtgactaccaacccagtgctgtgacgtctatcatgaacctcaaccttacttcatcaccggagagtagcttggagtcacctgatctccaccccttccgtatctccatgtcaggagcagatgaactccgaagcttcatgtcacttgcagcctcagagtcaactgctcagaagactattgcactttcgaggtcgacaagcggtgggtatgaagcctcgggaggcgacgacagcgaccaaataccctctagaattgtgcacaggtcgtccaattggacaaatgtcattctcaattcaggtaggcaggcaactatgtccgatctgaacttgcctaggctacacctgtagggttcataactaacaccaggctgacatagctcaaaattgtgagttgctgacttcttaattagctatgtgttgttagcctgtgagcatgcattggtcagaaccagtgttgggaacctggtttttgggtttaagagtcgggttatgttttgcgatcaataaatacatgtgcctttccaa

SEQ ID NO: 88085 - DNA, 526 bp, Zea Mays
accacgcggactcggggcgaccattattcctcttcacgcttcacacgcaccgcccgcaggccgtcatcccacgcattcgcatccttccccgctctcgctctctcagccgcagagccactcgtgtcggtgacggcggcgaaggcaatgtcatccctccgcccgtccctcctgctcgtggtgtcgctgctcgcggcggctctgcttgcagcggcgccgtcctccgcgtctcgcgacctccgcccgctccaggcgagcttcgtcgtgcgcggccgcgtctggtgcgacaactgccgcgcgggcttcgagacccccgcatccacctacattgccggttcgacgcctcaccgttccctccctctcgtatggctttgctatgctactgatatgcttgctgaattcgaataaacttcccccctccccttctggatctggctgtgtacatactgtttggttcaacggagtgttgtttggatgcgctttactgctctgggcgtgtgagaatggcgtcgagcctcgtacgtcctta

SEQ ID NO: 88086 - DNA, 1027 bp, Zea Mays
ggggcgaccattattcctcttcacgcttcacacgcaccgcccgcaggccgtcatcccacgcattcgcatccttccccgctctcgctctctcagccgcagagccactcgtgtcggtgacggcggcgaaggcaatgtcatccctccgcccgtccctcctgctcgtggtgtcgctgctcgcggcggctctgcttgcagcggcgccgtcctccgcgtctcgcgacctccgcccgctccaggcgagcttcgtcgtgcgcggccgcgtctggtgcgacaactgccgcgcgggcttcgagacccccgcatccacctacattgccggagctaaggtgagagtcgactgcaaatcgaagaccaccggggcaaatacatgcagcttcgaggggcatactgaccgcaccggcacctacaacatccttgtcattgatgagcatgagcatgagctctgcgagtccgtccttgtgagcagcccggacaaggggtgtgccaatgttgtggctggtcgtgagagggcccccgtcttccttaccagcaacaacggtgttgcatccaacgttcgtttggcaaatgctctggggttccagaaggacgttgcccttcctagatgcgcgcagatcctcaagatgtaccaggatgaggatgaccgtgtctaattacgcctgagtttagatgtacttggcgagttacaatatatttatgtggtgtctgaaatgttctagaacctctaaatctattactaagagcaacgatattgtcgcttcttaaaccttagtactacggatgttatgagctaataaatatatttcgctaatgtgatgcagttaaaaaatagtctggtattgctggggttatgactgtctagttttgatgatccttgagaaagcatgatactattgcaggtgcttttagctatacaattgtttttcatttgtaatatgataaatacaacatatagttgaatcagtacaagttatattataggatgtataattcatacaaaagacagtcaaaattgcaacagaaaaaataa

SEQ ID NO: 88087 - DNA, 1070 bp, Zea Mays
gagcaggaaatcgagatccgagttgggcgagtgggaggaacagggagctgggcgaccgagcgccaatggggatggggcatgcgcgtccctgcgaccagagggagtgccgcggctacaggggcgcggtttggccagggaggagcagccgacgctggagctggaagaggcttcagccatggggaaaacaaggggccggggaggaactcggctgggaggagctcgacgcaatggagcacggaggaaggagaggggtgcgcgccatggatgcgcaggagcgagctccggcagcgcgcgtggggctggaacaccgggctggcaaccggcgcgcagagagaggcgaccgaggaagatggagaagctcggccgagcgccatcggggcgagccgagggagaaaggaagccgcggcagagagctcgccgctcacgcggccgtggcgagcagagcacggcgggccagggcgagcagagagagcagaggagatccggctgacggcgtcgttgggcgagcagagcgcgccgcgcagagaagactccactggagaacgagcagggagaacaaaggatctgggcgagaaatttcacgcgcgggcgccagggaatatgatagggccgagcaggacgccgagaggagggagatgaaggaggatcgagctcatcggctggggatagaggtgcggctgggaagataagactgctgtgatttttttgcaggtgaccgacgaagcttacgcggccacggcaagaacgaactggaggctgaatgccgcagggagataagaacggaagctgttaagcggtaagaaaatcaaaggaagagacaaacgtgcgggagttgctcagtgccttgagaaaaatcccggcaacggatgaagataggagtggctgaaaggatattttcctagatgtttttttatttttcttttcttctctctttttttaaagagaattgcaaatattttggatcatgatttttagcgatgtacactgggtcgacacgctatacggctacacatttctttctatgaatcagcgaactaaattaatcactaattactcgctttcagttctaa

SEQ ID NO: 88088 - DNA, 849 bp, Zea Mays
aaaagcatgactacggcggccatggataggcactggcgccgccttcaagctactccgccgccgctaggcgccgtgcagtactacagagagctaatccactccctagacaccccggtgcaagctgctccgatcatggtggacaccgagccgggccaagccatggctatcgtcggcgccagcagaagcaagtgctaccacctcatcacgccggcgcaggcggcctactactaccgcgtcgtaggcgggcgcctgggatcggcgccgcgcctgatgaagccgtaccgctgtctgggcgcgccggcaccctcgacgacgacgacgaagctgtaccgcggcgtgcgtcagcggcactggggcaagtgggtggcggagatcaggctgccgcggaaccggacgcgcctgtggctcggcacgtacgacaccgccgaggaggccgcgcttgcctacgacggcgccgcgttccggctgcgcggcgatgccgcccgcctcaacttcccggagcttcggctaggcggtacgcaccttgcgccgccgctccacccgaccgtcgatgccaagctccaagccgtgacgacatccgcgccagcggcgcctgccttgccccgacccgagagcctggatatcgagagcgagacctcgacgaccaccacggcaacggcgtacggcacaggcctctgtccatcatccaccggctcatcgtcgttggctaagacggcgccactgcccgatatgcaggagctcgacttctcggaggtgccgtgggatgagggcgacggcgtcgcgctctgcaagtacccgtcgttagaaatcgactggaacgccatcctctcatgatgtgaccgtgcaacc

SEQ ID NO: 88089 - DNA, 879 bp, Zea Mays
atgatagacgagcgcgaggccgcggggttgacgttggagttcgtctttgcgagcttctgcggcgacggggtgagctgctgctgtagcggcgtcatatcttcctcccagagtcgcggacccatggaacgatcagtcgtctcgatgcggaggttgggccgtgggcgcttcctgctcccgccgcgccgcggaggcagcgtctgcgacgccgagaagacgaacgacggtgctccgaggcccacggaggggagcgtcgtcttcttggctgcagcggaagatggagagcctagtttcgcgcacgcggtccccttcggagggaagaattcgaacccgacgcctcgggtcgtagaccccgtgcgcgccgtcttcgcggagtggagggacgcggctgcgccgctaccggtgagcatcaaagacgcctcgcagccgctggcagtggagcacatgggcgtcaaaggctgcttcggcgaaggcaagaacgtgagcctgccggtgttggagcccctggaggtgggcgtcagcggaccctcgggcgaagccgcgaacacgaagccacccctggaggtgggacccgtgggcgtgttgggccgttccggcgcagccaagaacgcgaacatgttccccgcacagctggcctcggatccccccgcggaggttggctggcgcgggcggagtcccggctcgaacgagaacgcggcgcgcggcaccatcggtgagatgggcgggggcgggggcgtcggcggagttgacggggtgttcggcgtggtgtcaaaggggggaagctcgaggagtatcctcttgcgcacggaggaggccgggaggaggcagcggcgcttgcgcctcgcgtcggcggcgcagggcgcggagaaggcaacagcgtga

SEQ ID NO: 88090 - DNA, 1674 bp, Zea Mays
atggcgtccgtcgaccaccgccgacgccaaactctggacgaagaaggaggtgtcgagcaggaatcgggcggtgccattgccgacaaggtggaggctgtggcgacgcacgaacttcctagagatgagaccggagcagaggtcgcaacccagcagccatggcgcctatgtcgatccacttcgtccctggtgatgatgggttcagatggagcatgcatggggtttgcagctactcaccgtggcgagcttgtcgctggcggacacgctggaggagcactctgctccggagttgtcgcagtttccgttggacacgtgcgagttcacgttcaaccgtgcgtccgttccgcggatggagctgctcaccctgggcatcctcgaggggtgggtggtcgccgacatccctttcccctacatctgctacttcgtggcgcagttctggcaggacgagcgccaggcgatctgcgagcgcgccgtgcagcaccaactacctcaagcattgaggaggatgtacccttcgacacgctcaccaagtgttcgatgagggtcctcaaccgcggcaccaactacggccacaacacggccgcttcactgaagaccagtggaaagagggccgaattcatcgtctccatcgtcaagggccgcggcggctcgctgttccgcgagaagatgatcgtgggcgttggcgctcacttcatcgtcatcgtcgacgcgtccaagctcgtgtcgcgcctcggctgcatgggcgccaaccccatcgaggtcatccccttcgacgcgctccacgcgctgggactcatctgcggcctcttcgacggcttgcctggatcccacaccaggcggaggtctgttcccgccgccgccgccaacgggaaagaagactcgaaacagtacatcatcaccgacaacgacaactacatcgtcgaggacggcatccgcggcgacctgcgcggcatcagtgatcgtctgcttcagatcaccggcgtcatagaacacgacatgttcctgggctacttttcccacgctgaagaaggtggagatgcgaggacgaaggtgcagctgacagaggccgcggagcgttgcttcgacgagctggtcggaagaggcctgctccgtctcacggtcggaagcaatggagccgcgggagccaggatgcccatcatgatctgctccttcgcgaaggacgtgtatgaccatgagaacttctgcactgagtcagcagcgaataatctttccgaagtgcgacggttgtccatcgttgagaacgaggctgacgatcgcattggtgaggggatgacaatggcagcatggacgacgagcatggaaacagtggttaagctagaacaggccggcgagcgcctgtgggtcaagatgggcggccacaaggtgctcaacgtcgacaagtacgacaacatcttcgccaagccaggcggctcattccgcggccccgatgtgcacgtcgagacggccaggagaaatactgtcacctatagcattttggagcagagagacgcacagaaggttcagctcttcaaatccattaatagtggtgctgtttttggctttcccgagaatcttgaggaagctgcaagagctagtctcatgagtggaattaagcaaccatggcctccacctatggagttgagcgattggatttgtgcagggcctccggcaacttga

SEQ ID NO: 88091 - DNA, 2518 bp, Zea Mays
tctccacgatgggccacgccacaccactgagcacccttcctccctgttcttgcctctgtcctatactactactactacccatctttagccgccgcgtgcatgcaagaagagaaatagccgccgatcgatcagcgctcgaccgacccgtcatccttgacgaacgaccagctaggaaacaggaggcaccttctttgcacgtgtcagtgccagccagacgaacccaagggctagctgtcaggacggctcagctccagctttgcggccctccagctctccccagttcaagttcaatattggcgagcatgcgagtttgccctcttccgtcgtcgtcatcatcatcgtcctcgcgatcccggcgtccctgtttcggcctacgcctcccgtagacaacagttgcgccctgctctccggcaagctatggccaagctgagctgcttccccgctctgctccccggcaagaggaagaagaagacacgcaagatcaccgatgctatcaaggccagcggcaacgagtgccccaaggtgaagccggtcgaagtcgaactcatcgacccgacgcttggtgcaggcgtcgtccaggacgtcgtccccgccgagctctcggtccccgtggaggaccgcaacaataaggaagcggctgatcaactggtgttggtgaaggagagcgatctgtcagatttcgacttcagcttccacgcggccatgaagcccgtccggtccgacagtgacgtggcactggacacctcggccgacgctgcggtggcggacacatcgccgaagctgaagcggtcttgctccaacatcgagactaagcgaccaggctcgcgttccgcgcccgagatgccggcccggtcgcgctcctacggcgatctgggcaacctggtcgccggcctcgccctggacgcgacggcgaccccgcacggcgcgccggaggccagtccggcgtccgtgaagacgtcgcgcactgccgaccgcgtgatgctgaagaagcggtcgtccagccaggtgctgccctcgcgcagccggaagctctggtggcggctcttcctctggagccaccgcaacctgcacatgccgcggtcggcgcgcacggcccaccgatcgttctcgcctggccgccacgacgggtacacctcggacacgttcgaggagggcccggccgccgaccgcaagaacaagacggtcatggtcgacgagtcgccgccagcagcgtctgtgcccaaccagtgggtcgccttctgcgccgagagctccatccacgaccgcgtcagcgcgtgggtcagcagcatcgaaagcgagcctccgttcgatatcgccgaggaggatgacgacaactacgacggagaggacgatgaggagaatggcgagtgtgcggcgtcgcagccgcgccatctcgagctcggggagccatcgtccgggaagggcggaaacagcaaatccaagcgctgcgcaacgacggccgacgaggtcgtccaggccaacaccgtggtgcagtccctgaacgccttctcgtcggtggcgcacatctcagggatgggcctcaaggtggtgccgatgatcgcgcccttctcaaccctccgggccgtcaacctctccagcaacctcatcgttcatatctcccctggatcgctgcccaagggcctccactctcttgatctgtccaggaacaagattgccagcgtcgagggcctccgggagctcacaaagctacgcgtgctcaacctcagctacaacaggatttcgcggattgggcatggtctgtcgaactgcacggccatccgggagctgtacctggcgggcaacaagatcagcgacgtggagggtctgcaccggctgctgaagctggcggtgctggacctgagcttcaacaagattacgacggccaaggcgctggggcagctggtggccaactaccactccctcctggcgctcaacctcgtaggcaacccggtgcaggccaacatcggcgacgacgccctgcgccgggcggtcacgggcctcctcccgagccttgcctacctcaacaagcagcccgtgaagccgcagcgcatcgcgcgggaggtggccacggacagcatcgcgcgcgccgcgctcagcggctcggacagccggagcatccggaagaggacgtcgcggcggctcacgcagagcccccgctcgtcgtcgttgaccagggcccgtggcggcggcggcggcggttcacccacaccaagaaacacctctcgtcgtcgttgaccagaagaaccaactgcgtgattcgcgttgctctttggagacgggagacggtggcgtgactgcgtgcaggcagactcagacgacaccatgattcggcacggcgccagcatgatatgagacaaaccaagtatataaagcaagtatgatgtgagagaattgcgatgcaacacataatgtacatacttgttagggagatattgcttagattaatactacgaccgatgcatctttgtacctgaaaatatcaatttgagcctggttgaagatgaacatccatccaaca

SEQ ID NO: 88092 - DNA, 2562 bp, Zea Mays
ttctttgcacgtgtcagtgccagccagacgaacccaaggtgaggcctcgctgttcagaaccctttaatgcccccctcctttgtttggcgtgcctctgcttcgtcttcgtggtatataaatgctttcccctcttctgtgatcgcctttgtgcctgcgccattggggcctgtttggagaggggggttgccgtccaaatcgaaccaggctctgaacatccgtaaagcaacccccctctccattccaaacaggccctcctgcctccgttcctgggctagctgtcaggacggctcagctccagctttgcggccctccagctctccccagttcaagttcaatattggcgagcatgcgagtttgccctcttccgtcgtcgtcatcatcatcgtcctcgcgatcccggcgtccctgtttcggcctacgcctcccgtagacaacagttgcgccctgctctccggcaagctatggccaagctgagctgcttccccgctctgctccccggcaagaggaagaagaagacacgcaagatcaccgatgctatcaaggccagcggcaacgagtgccccaaggtgaagccggtcgaagtcgaactcatcgacccgacgcttggtgcaggcgtcgtccaggacgtcgtccccgccgagctctcggtccccgtggaggaccgcaacaataaggaagcggctgatcaactggtgttggtgaaggagagcgatctgtcagatttcgacttcagcttccacgcggccatgaagcccgtccggtccgacagtgacgtggcactggacacctcggccgacgctgcggtggcggacacatcgccgaagctgaagcggtcttgctccaacatcgagactaagcgaccaggctcgcgttccgcgcccgagatgccggcccggtcgcgctcctacggcgatctgggcaacctggtcgccggcctcgccctggacgcgacggcgaccccgcacggcgcgccggaggccagtccggcgtccgtgaagacgtcgcgcactgccgaccgcgtgatgctgaagaagcggtcgtccagccaggtgctgccctcgcgcagccggaagctctggtggcggctcttcctctggagccaccgcaacctgcacatgccgcggtcggcgcgcacggcccaccgatcgttctcgcctggccgccacgacgggtacacctcggacacgttcgaggagggcccggccgccgaccgcaagaacaagacggtcatggtcgacgagtcgccgccagcagcgtctgtgcccaaccagtgggtcgccttctgcgccgagagctccatccacgaccgcgtcagcgcgtgggtcagcagcatcgaaagcgagcctccgttcgatatcgccgaggaggatgacgacaactacgacggagaggacgatgaggagaatggcgagtgtgcggcgtcgcagccgcgccatctcgagctcggggagccatcgtccgggaagggcggaaacagcaaatccaagcgctgcgcaacgacggccgacgaggtcgtccaggccaacaccgtggtgcagtccctgaacgccttctcgtcggtggcgcacatctcagggatgggcctcaaggtggtgccgatgatcgcgcccttctcaaccctccgggccgtcaacctctccagcaacctcatcgttcatatctcccctggatcgctgcccaagggcctccactctcttgatctgtccaggaacaagattgccagcgtcgagggcctccgggagctcacaaagctacgcgtgctcaacctcagctacaacaggatttcgcggattgggcatggtctgtcgaactgcacggccatccgggagctgtacctggcgggcaacaagatcagcgacgtggagggtctgcaccggctgctgaagctggcggtgctggacctgagcttcaacaagattacgacggccaaggcgctggggcagctggtggccaactaccactccctcctggcgctcaacctcgtaggcaacccggtgcaggccaacatcggcgacgacgccctgcgccgggcggtcacgggcctcctcccgagccttgcctacctcaacaagcagcccgtgaagccgcagcgcatcgcgcgggaggtggccacggacagcatcgcgcgcgccgcgctcagcggctcggacagccggagcatccggaagaggacgtcgcggcggctcacgcagagcccccgctcgtcgtcgttgaccagggcccgtggcggcggcggcggcggttcacccacaccaagaaacacctctcgtcgtcgttgaccagaagaaccaactgcgtgattcgcgttgctctttggagacgggagacggtggcgtgactgcgtgcaggcagactcagacgacaccatgattcggcacggcgccagcatgatatgagacaaaccaagtatataaagcaagtatgatgtgagagaattgcgatgcaacacataatgtacatacttgttagggagatattgcttagattaatactacgaccgatgcatctttgtacctgaaaatatcaatttgagcctggttgaagatgaacatccatccaaca

SEQ ID NO: 88093 - DNA, 2836 bp, Zea Mays
cagacgtagttaatgatgaagttggcgattctttgcatcgaagcatccagccgaggaaatcaacggttacaattggatggttggtccgaccacaatcaatcttagtcgcacaacgcgcctccctgctccagttttccattccttgcgcccccttcagatccgatctgatccacgccggcgagacaccggaggaccgccatgacgctcagcctccgtcgcaagcagctcgatgttatcgtgcggatgctgcacctgaaccagcagcagttgccgaacggcggcgagggacagggagaggacgatgcgtacaagatcctggttatggatccgccctgtatctccatcctctcgcctgtgctcaagctcggcgacctccgccaccaaggtgtcaccctcaccctcgccatcgatcgtccgcggcaggcggtgcccgatgcgccggccgtctacttcgtccggcccacccccgggaacgtggaccgagtagcggccgacgccgccgcggggctctacgggtctttccacgtcaacttctccacctccgtcccgcgacccctgctggagcgcctcgcaaccgcctgcgccgccgctccgcccgcgtgtgcgggccgcgtggcgcgcgttgctgaccagtacatcgacttcgtctgcatcgaggatgacctcttttcgctagcgcagccccgggcctacgtcgcactcaacgaccccgccgctgccgacgccgacatcactgccctcgtcgacgccgtcgcgctgggcctcttctgcgtagtcgccacgctcggtgttgtgcctgtcatcagttgtgcgcgcggcgggccagcggagatggtggccggcgccctcgacgcccggctccgcgatcacctactcgccaagcccaacctcttcacggaggctgcatctgccgctgtcacgtcattccagcgccctgtgctgtgcctcttcgacaggaatttcgagctgtctgtaggggtgcagcacgactggagctaccgcccattggtgcacgacgtgcttggcttgaagcagaacaagctgaagttgccggcagagaagtacgaattggatgactctgataaattctgggtggcaaacagctggtctccattccccaaagttgctgaggaaatcgaagcgcagcttgccaagtacaagcaggatgtggatgaggtgaaccagcatactggtggtggcaaggttggggttgagtttgatggtactgatctaattggcaacactaagcatctcatgaatgcggtgaactcactgccagaactgacagagcggaagaatatgattgataagcacaccaatattgcaacatctttgcttgggcatatcaaggagaggtctctggatggatactgcagctgtgaaaatgatatgcttgtgagtggcactgtcgaccggaatacactgctgagtctcatcagagggaagggtaccaaggaagataagcttcggctagctgtgacctacctgctgtcctttgcgacaccaccatcatctgagctggagcaggttgaggccgctctgcgggaatcggaagttgacatgtctgcatttcagtatgtgaagaggataaaggcattattgaatacccaatttgcagctgcctcaggcacagcaactaagagcaacatcgtcgattgggcagagaagctgtatgggcagtccattggcgctgtgaagaatctcttgtcagatagtaggcagctggccttgacaagaacagttgaagctcttatggaagggaaaccaaacccagaggtggatgactaccttttgtttgatccacgggctcctaggtcaggaactagtgggcagtttaaaggacccttcagagaagccgttgttttcatgatcggtggtggaaattacattgagtacaagagcttgatagagctaaagcaacgctcacagccttccaaacatgttatatatggtgcaacagaaattcttagtggggccgagtttattcaccaactggcagaattggggcagaaagcagggttgggtggtggcagcagcaacataccaccaggttcagcacaataggtaggatgctcttacaagaccttttaatgttaaggagtgattcgagcttcagggactacggtaaatacgctcataccccacattttattttaaggagcgttccaggctgcatagattagtgatatcaaatttcatgaaaagtttatgccccttcgattgattagttgtcaatacatagctttgttgtttcaatttgggttttgatattgcccatgtatgactatttttacttttctgtactctatttccttgcccccctccctttattttactaagaaatttttcttggaattctgtttgcacactcaaagaaatccgttcatgaatatttgtaacagaaacctagttctgatgtttggataatttgattttggttgaaatcttcatagttccaggctgttacatcttttacttgtagtgcaaggccatatgtgggttcttgaaaccccatatatatgactaaccatctcaataatatgtatgcagggtggcgtaatatataaattcattttgtgtgttggggatataagtttattacttgttttatctacaatagttggatacttggattgggaaaatgcattgtagcaatggcaagctgaaggtttgtgccactggttctcaaaagttgatttattcatgcgaatggaatctaaacatcttttgtactgaagcgctgcgattaaataaaggctatcaatagttaatagctccgttggtacatatggtatagaactatagacagtgtacaaccttaggctcactccaacga

SEQ ID NO: 88094 - DNA, 2212 bp, Zea Mays
atgacgctcagcctccgtcgcaagcagctcgatgttatcgtgcggatgctgcacctgaaccagcagcagttgccgaacggcggcgagggacagggagaggacgatgcgtacaagatcctggttatggatccgccctgtatctccatcctctcgcctgtgctcaagctcggcgacctccgccaccaaggtgtcaccctcaccctcgccatcgatcgtccgcggcaggcggtgcccgatgcgccggccgtctacttcgtccggcccacccccgggaacgtggaccgagtagcggccgacgccgccgcggggctctacgggtctttccacgtcaacttctccacctccgtcccgcgacccctgctggagcgcctcgcaaccgcctgcgccgccgctccgcccgcgtgtgcgggccgcgtggcgcgcgttgctgaccagtacatcgacttcgtctgcatcgaggatgacctcttttcgctagcgcagccccgggcctacgtcgcactcaacgaccccgccgctgccgacgccgacatcactgccctcgtcgacgccgtcgcgctgggcctcttctgcgtagtcgccacgctcggtgttgtgcctgtcatcagttgtgcgcgcggcgggccagcggagatggtggccggcgccctcgacgcccggctccgcgatcacctactcgccaagcccaacctcttcacggaggctgcatctgccgctgtcacgtcattccagcgccctgtgctgtgcctcttcgacaggaatttcgagctgtctgtaggggtgcagcacgactggagctaccgcccattggtgcacgacgtgcttggcttgaagcagaacaagctgaagttgccggcagagaagtacgaattggatgactctgataaattctgggtggcaaacagctggtctccattccccaaagttgctgaggaaatcgaagcgcagcttgccaagtacaagcaggatgtggatgaggtgaaccagcatactggtggtggcaaggttggggttgagtttgatggtactgatctaattggcaacactaagcatctcatgaatgcggtgaactcactgccagaactgacagagcggaagaatatgattgataagcacaccaatattgcaacatctttgcttgggcatatcaaggagaggtctctggatggatactgcagctgtgaaaatgatatgcttgtgagtggcactgtcgaccggaatacactgctgagtctcatcagagggaagggtaccaaggaagataagcttcggctagctgtgacctacctgctgtcctttgcgacaccaccatcatctgagctggagcaggttgaggccgctctgcgggaatcggaagttgacatgtctgcatttcagtatgtgaagaggataaaggcattattgaatacccaatttgcagctgcctcaggcacagcaactaagagcaacatcgtcgattgggcagagaagctgtatgggcagtccattggcgctgtgaagaatctcttgtcagatagtaggcagctggccttgacaagaacagttgaagctcttatggaagggaaaccaaacccagaggtggatgactaccttttgtttgatccacgggctcctaggtcaggaactagtgggcagtttaaaggacccttcagagaagccgttgttttcatgatcggtggtggaaattacattgagtacaagagcttgatagagctaaagcaacgctcacagccttccaaacatgttatatatggtgcaacagaaattcttagtggggccgagtttattcaccaactggcagaattggggcagaaagcagggttgggtggtggcagcagcaacataccaccaggttcagcacaataggtaggatgctcttacaagaccttttaatgttaaggagtgattcgagcttcagggactacgggtggcgtaatatataaattcattttgtgtgttggggatataagtttattacttgttttatctacaatagttggatacttggattgggaaaatgcattgtagcaatggcaagctgaaggtttgtgccactggttctcaaaagttgatttattcatgcgaatggaatctaaacatcttttgtactgaagcgctgcgattaaataaaggctatcaatagttaatagctccgttggtacatatggtatagaactatagacagtgtacaaccttaggctcactccaacga

SEQ ID NO: 88095 - DNA, 273 bp, Zea Mays
atgtcgaacatcatgactgcgtccggatgcaaagcgccgagtcgccgacctcatctgcaccatcgtgcagcgtggcgtgaggtgggaggggcagcccttaagcatccgcgggccccagatagctgtgagctgcaagacacggttatagagcagcccatgcgtgagctcaggttcgctccatggaccaagcgagcaggaggcgccttccatggaccaagttggggactaatgggaagcgaggagactcatggaccatggatcaagtggagctag

SEQ ID NO: 88096 - DNA, 939 bp, Zea Mays
gtgcataaggacccagcgatcaggagctgactgttttgtcctccagcaatcggccatgtcgtccctggtcaggtcgttcgggtctctctactcccagaagctccgctccaccacccgtctcggatccgcgacggcggcgccaccgcgtttccaggcgttggtccgatcgggattctcgggctccagccacgggggagacgtgagacgtccgccggctcggccgagccagcatcagtctcaggacaaggagcggacgcctttcttcatcttggcaaggctggccgtcggttctattcttgctgctgcagcgccaatgctgcattccagatgggcgtcgttcctgctgattcagagtgaggtggatatggtgaaagacacggcggaggtagtggcggaggccgtcgaggacgcggccaccgtcgcagagaaggtgtcgtcggaagtggccgagcagctgcccgagaacgggaggctgaggacagcggtcgtgctcctggagcacgcgtccaaggaagtcgccgaggaggcacaccttgcacagaacatcatccacaagtggtcacctacactgcgggatgaagtatctagccccgagccagctacggagaaacgagtttatttttttatctcgggaaccaggctcaggctagcctgtttggagcggccagactccactatgaaacaaccaaatgtgcctagattgtctccagcagtaaatgtagaatatgggacgtggaattgtagatacgctgtttgaaaatgtttgcagagtgaagtttaaaatatgggatgagataggaaatgtgatagaggatctaccggagattgtcttaaatcgtatgtttggttcctggttcaaaccttgatgtaggccaagcctagtctgaacaaatggatgcaagtaataattagctcggttgtttggttgtctgcattaaa

SEQ ID NO: 88097 - DNA, 860 bp, Zea Mays
gtgcataaggacccagcgatcaggagctgactgttttgtcctccagcaatcggccatgtcgtccctggtcaggtcgttcgggtctctctactcccagaagctccgctccaccacccgtctcggatccgcgacggcggcgccaccgcgtttccaggcgttggtccgatcgggattctcgggctccagccacgggggagacgtgagacgtccgccggctcggccgagccagcatcagtctcaggacaaggagcggacgcctttcttcatcttggcaaggctggccgtcggttctattcttgctgctgcagcgccaatgctgcattccagatgggcgtcgttcctgctgattcagagtagagcaaagagccctgtaccgcgcgccgcgaaactctgcaccgatgcaaaatttaactctgcgccgatgccatcaggtgaggtggatatggtgaaagacacggcggaggtagtggcggaggccgtcgaggacgcggccaccgtcgcagagaaggtgtcgtcggaagtggccgagcagctgcccgagaacgggaggctgaggacagcggtcgtgctcctggagcacgcgtccaaggaagtcgccgaggaggcacaccttgcacagaacatcatccacaagatctcccaacataagtagtgaagattcaagatgaagtggcagctgaagaggagtcactccagtacctgctcatcaagtggatggagctatctaactaatggttaggtagaaggatctagcacatctttacggcaacaaaggcaagccccggtgcatttgccccatccttgtatttaaaatgacttttgtacaccttaagtctaatgaaatgtgcattaattttata

SEQ ID NO: 88098 - DNA, 782 bp, Zea Mays
gtgcataaggacccagcgatcaggagctgactgttttgtcctccagcaatcggccatgtcgtccctggtcaggtcgttcgggtctctctactcccagaagctccgctccaccacccgtctcggatccgcgacggcggcgccaccgcgtttccaggcgttggtccgatcgggattctcgggctccagccacgggggagacgtgagacgtccgccggctcggccgagccagcatcagtctcaggacaaggagcggacgcctttcttcatcttggcaaggctggccgtcggttctattcttgctgctgcagcgccaatgctgcattccagatgggcgtcgttcctgctgattcagagtgaggtggatatggtgaaagacacggcggaggtagtggcggaggccgtcgaggacgcggccaccgtcgcagagaaggtgtcgtcggaagtggccgagcagctgcccgagaacgggaggctgaggacagcggtcgtgctcctggagcacgcgtccaaggaagtcgccgaggaggcacaccttgcacagaacatcatccacaagatctcccaacataagtagtgaagattcaagatgaagtggcagctgaagaggagtcactccagtacctgctcatcaagtggatggagctatctaactaatggttaggtagaaggatctagcacatctttacggcaacaaaggcaagccccggtgcatttgccccatccttgtatttaaaatgacttttgtacaccttaagtctaatgaaatgtgcattaattttata

SEQ ID NO: 88099 - DNA, 421 bp, Zea Mays
gctgtttggtgcgcggtggtggacggggagggagtttgtgctgctcgtcaccgccgtcttcgttctgctgccgctcgtgctccgccgccatgtcgatgccaagcgtctcattggcaggaggtttagtgatgcctccgtccagagtgatattaagttgtggcccgtcaaggtcattcctgggcccagtgagaagccaatgatagttgttcagcataagggggaggagaaacattttacagccgaagagatctcctctatggttctcatcaagatgcgtgagatcgctgaagcttaccttggcagcacgatcaagaatgttgttgtcacggtccctgcctacttcaacgactcacagaggcaggccacatgggttatattcatcttatgaagcgttggtacttttgtgaatgattttgtaaag

SEQ ID NO: 88100 - DNA, 1697 bp, Zea Mays
acatggagtaagaaatattctacccaattttagatatttggccaaaatcgttagtcttgaaattgaacaatgatggtttcttcaaggtaattaaaataaaaaaaaatagtcatatcataattgtagcattgtatgctaaggttgtttaagttgtgaatctaatttttgaaacgaaaatatgaagtaggaaaggcttacctgccaaagataacatgttaggtatcaaatatctgtggcacaagccatcagcagggcaccacccacatgcccaacccaaccgctgcttttatttatacacctcctttggcctcttgcatcatcagctagtttacttgcgctgggcaagtctctagtgccagcttgtttacttgtagatccaggctctctcctctccaagcctttagcacagcaaagtcccagtgccatccctgttctgccgttgtatgtgaaccctcctatgcaatagcaagatctccatctctctcagctctctccagcttcatttccactcaagagttgagcacggatgaagaggccgaccagcagaggttcttcaatggtcagcgggcaagcaaccacagatctacaagaagatagctgcaggtccatggagccgcacggagtggacggcgatgctacggccgcggctgagcgcgacgacgtggacgccggggcgtacgacgaggaggtggacgaagaagaggagctcgcagggtcccgcggcggcctcggggagaagaagcggcggctggcggcggatcaggtgcgcgccctggagcggagcttcgaggtagacaacaagctggacccagagcgcaaggcccggatcgcgcgcgacctcagcctccacccgcgccaggtcgccgtctggtttcagaaccgccgcgcgcgctggaagaccaagcagatcgagcgcgacttcgccgcgctccgcgtgcgccacgacgcactccgcgtcgagtgcgacgcgctccgccgcgacaaagacgccctcgccgccgagataaaggagctgaggggcatggtggaaaagcagatggaggtgaagctggagtccgcggcggaggagctgctgccggtggcgacgaggtcagcagcagcagccgctgtgtataacaaggacgggtcgacggacagcgactcgagcgccgtgttcaacgaggaggcgtcgccctacccttactccggcgcggccttagaccatcagcagcagcaagaaaccagccacccgctgggcttcacgggtttcacctccttcttgacgtcctctttcccttccgtataccatggggattcgcatttggaccaggaagcggacggcttcttcagcgccgccgccgccggcgacggattcttcgccgaggagcagagcgcaggcatcggcagctggtacggcggtgagggttggtagaacagcaacagctaagctgttggctgcctggaggctggagatcactcttggtatcgtatctaccattcttgtaaaatatggcgctgtacattatattatgcatgcatgggtccgggacgcggtaactatatactactatgtagagttaatttatatggagtagttaatttctgtatttttcactggcgggctgaaagcctgaaacacgggctacgagaggagataggccgggtaatacggttattgttctataaatcttggttgacatgcagttaatttttagaca

SEQ ID NO: 88101 - DNA, 2466 bp, Zea Mays
acatggagtaagaaatattctacccaattttagatatttggccaaaatcgttagtcttgaaattgaacaatgatggtttcttcaaggtaattaaaataaaaaaaaatagtcatatcataattgtagcattgtatgctaaggttgtttaagttgtgaatctaatttttgaaacgaaaatatgaagtaggaaaggcttacctgccaaagataacatgttaggtatcaaatatctgtggcacaagccatcagcagggcaccacccacatgcccaacccaaccgctgcttttatttatacacctcctttggcctcttgcatcatcagctagtttacttgcgctgggcaagtctctagtgccagcttgtttacttgtagatccaggctctctcctctccaagcctttagcacagcaaagtcccagtgccatccctgttctgccgttgtatgtgaaccctcctatgcaatagcaagatctccatctctctcagctctctccagcttcatttccactcaagagttgagcacggatgaagaggccgaccagcagaggttcttcaatggtcagcgggcaagcaaccacagatctacaagaagatagctgcaggtccatggagccgcacggagtggacggcgatgctacggccgcggctgagcgcgacgacgtggacgccggggcgtacgacgaggaggtggacgaagaagaggagctcgcagggtcccgcggcggcctcggggagaagaagcggcggctggcggcggatcaggtgcgcgccctggagcggagcttcgaggtagacaacaagctggacccagagcgcaaggcccggatcgcgcgcgacctcagcctccacccgcgccaggtcgccgtctggtttcagaaccgccgcgcgcgctggaagaccaagcagatcgagcgcgacttcgccgcgctccgcgtgcgccacgacgcactccgcgtcgagtgcgacgcgctccgccgcgacaaagacgccctcgccgccgagataaaggagctgaggggcatggtggaaaagcagatggaggtgaagctggagtccgcggcggaggagctgctgccggtggcgacgaggtcagcagcagcagccgctgtgtataacaaggacgggtcgacggacagcgactcgagcgccgtgttcaacgaggaggcgtcgccctacccttactccggcgcggccttagaccatcagcagcagcaagaaaccagccacccgctgggcttcacgggtttcacctccttcttgacgtcctctttcccttccgtataccatggggattcgcatttggaccaggaagcggacggcttcttcagcgccgccgccgccggcgacggattcttcgccgaggagcagagcgcaggcatcggcagctggtacggcggtgagggttggtagaacagcaacagctaagctgttggctgcctggaggctggagatcactcttggtatcgtatctaccattcttgtaaaatatggcgctgtacattatattatgcatgcatgggtccgggacgcggtaactatatactactatgtagagttaatttatatggagtagttaatttctgtatttttcactggcgggctgaaagcctgaaacacgggctacgagaggagataggccgggtaatacggttattgttctataaatcttggttgacatgcagttaatttttagacatctctctcgctgtatctaatctagaacaatcatataatgtggacagtatataagatactcgtactttgtgggcatggttatcagagagatcgacacatgaccacatgtagaaacacagcaggacagacaggattagggagacaggggatggagaaaatgcatgaggatacagtgtacttggtcttctaactagctaggagtatattactaaactcattttttctgaaagatttgtaaggtcatttttgttacgataccacatgcagagagggaccatgatgcatgggtacggtaaagagttaggtaaacactagttagatgaaagtcttcgtatccaccggcctatatatatagagagagagagttaaaactttttcacatgccgtatttgtacccagattgtcaatctaggatgtgcttctttaggcaacaacggaagtgcagcaaattaaaggtatctagtgacagggacaacgagtggacttgtttaaccatgtggagcagggcaaagaaaattgaggtctttctggctgattggcgattagaaggggatggggggagaatgtgctcgctttgatgcggccctctatgccaatattgtaatgcacaccagcgatagcagtagtagtacagggtgtggcccagcagcttcttctagatgcgtcttgctcggaaaagtgaagcgcacaattagctaaataaagccaatgggtacaacatatctgcccgcagtttttcatatgtggagcgtgtacgggaacgatctgtt

SEQ ID NO: 88102 - DNA, 720 bp, Zea Mays
ttgtagatccaggctctctcctctccaagcctttagcacagcaaagtcccagtgccatccctgttctgccgttgtatgtgaaccctcctatgcaatagcaagatctccatctctctcagctctctccagcttcatttccactcaagagttgagcacggatgaagaggccgaccagcagaggttcttcaatggtcagcgggcaagcaaccacagatctacaagaagatagctgcaggtccatggagccgcacggagtggacggcgatgctacggccgcggctgagcgcgacgacgtggacgccggggcgtacgacgaggaggtggacgaagaagaggagctcgcagggtcccgcggcggcctcggggagaagaagcggcggctggcggcggatcaggtgcgcgccctggagcggagcttcgaggtagacaacaagctggacccagagcgcaaggcccggatcgcgcgcgacctcagcctccacccgcgccaggtcgccgtctggtttcagaaccgccgcgcgcgctggaagaccaagcagatcgagcgcgacttcgccgcgctccgcgtgcgccacgacgcactccgcgtcgagtgcgacgcgctccgccgcgacaaagacgccctcgccgccgaggtacgcgatggattgctttcattgtggagtggaggttttgatttatagatcagctgtcatgtcatgtcgtcagataaaggagctg

SEQ ID NO: 88103 - DNA, 213 bp, Zea Mays
atggtggccggccctgcgcggccaggccccagcacggcggtgctcgcgtttggcatggctctcgcgctcgcgtctagcacagcctgcgtctgtgcccccgacgcggcctacgaagcccccactcggattttgcacggccccggcgcagcagcagcctcgcgcgttctcatgcctcgccgcgagctcgtctggccgtcattgcgagttaattag

SEQ ID NO: 88104 - DNA, 741 bp, Zea Mays
atgcgtcccgctgcccatgtgcggtgccaggacgacgttgtcgagcgccatgagcgcctgcggcacgtccggctcggcctggaacacgtccagccccgcgccgccgaggcggccatcggcgagcgccgcgacgagctcgggctcgtcgacgtgcgcgccgcgcccaacgttgacgagcacgcccgtggggccgagcgcctcgatcacctcgcggctcacgatgccgcggctctgctcgttcagcgagcaggccaccacgaggacatcgctgtttgctgcgagctggagcaccgtcgggagatagatgtagttggggtacgcatcctgccttgttctctggtagtagcagaccgggcaaccgaagccttccactcgcttggcaatggaaagccctatcctgcccagcccaatgatgccgacccttttgccactgaaccgagtggtgagaccgtagtggccatcattggccttccacagcccggcgcggacgtagctgtcggcgtgcgggatcctgcggagagcggcgatggcgagtcccacggcaaggtccgcgacgtcgtcggtgagcacgtcgggggtgttggtgacccggaccccgcgctcgcggcatctggtaaggtccacgcagtcgtagccgacggcgtagcacgcgatgatctcgagccgcgggaggtcgtcgatgagagccgggttgccgccgaagcccgagccgccgccaatgaccacggcgcggatcgatga

SEQ ID NO: 88105 - DNA, 1281 bp, Zea Mays
atccaattgaggaagagaagaggcgataagcacactaatggctgacgagtcatggagggtgccaaccccagtgcaagaactggccgcaggcgtggtggagccaccgacccagttcgtgctgcaggagcaggatcgtcctggatctgggaccctgctcttcgccactgacatgccggagcccattcccgtcgttgacctcagcaggctggcggctgccgacgaggcttccaagctccggtcagcactggagacctgggggctcttcctggttactaagcatgggatagaagcatctctcatggacgatgtgatggccgcgtcacgcgattttttctaccagccgctcgaagcgaagcaggaatacagtaacctgataggcggcaagcggttccagatggagggttatggtaatgacatggtgaaatccaaagatcagatactggactggcaagatcggctgcagctcagggtggaaccccaagatgagaggaacctcgcttattggcccaaacaccctgattctttcagggatcttctggagaagtatgcatcaaaaaccaagatagttaggaacaaagtcttacgggcgatgggcaaaacattggagcttggcgaagactatttcatcagccagattggtgacagggcctcagcaattgctaggttcaactactaccctccctgtccaaggcctgatcttgtctttggcattaagcctcactctgacggtggcgcggtgacgatacttctcgtcgacaaggatgttgggggcctgcaagttcagaaagatggcgtttggtacactgttccgtccatgcctcacacgctgcttgtcaacttgggtgactccatggagataatgaacaatgggatcttcaaaagtccggtgcacagggttgtgacgaatgcagagaaagagagactctcactcgccatgttctacggcgtggaaggccagagagtgcttgagccagcgcttggtttgctgggtgaggagcgaccagcacggtacaggaaaattatggcctcagactacattattgggctccgtcaaggaattgcggaaggacagagatttatcgagactttgaagatatagtcaatcgtgaatgctcaagaataataaagagttgcttcgcccattgctaaatcagatcagagtccaatgtccattctgtaatgcattaccacattgttatacatgctcggaagacttcagagaagatgtaatcctgctcgttttactaaatttggggcattaataaatgattaaataaaaac

SEQ ID NO: 88106 - DNA, 1488 bp, Zea Mays
gcacttgttcggaaccctgcctggtccaagcgagtagcgattagcctgtcgttttctgcttcttgatttttcttcttttcttcaattttttctatggttgcgttccgttgttgctgcagttttttgagattcctggtatagtaatgagattcctgatatggtaatgcgattattttacattttctggttaggatcttgctgacgtgagaattgagatcgatctgaaaggcttgattgtgccttccctacatcaatccatcttgaagtctcttggaaattccccaaaagctaaaaagaacctgtttggtggttgcattgtttgctttggtaattcaactttgcttttgcttgtttcttctttattccgtgccaatgatgattcactttcaaggtgaattctttgatggttgcattgttggctttggtaattcaactttgcttttgcttgtttcttctttattccgtgccaatgatgattcactttcaaggtgaattctttgattgttttgtgatgttcttgaggcgttcaactgaggcacgaccgaatcgaaatttaattactgctttgtagttcatcaaaatcttggctttaattcagtagtagaaaattgaactttgaaactttgtattcgtgtcaaatctttttttatgttactcatctcaagtgtactagtgatgctgaattttggatgactttatttgctggttcacagctacggtgatatgcatttgaggtgtacacctgaggcacgtcgcacgcttgaagaagcctatgcacttgttctttctgatccttaagtttgaaggttcattcgtttggtctttcgaatggttcttattgcatcagcagctaatttcttgcatgaaaatagcgatttgcttaggttaccctgcacctactttcaacaaatatgtcatgttttttctcattcatttgtgatttgcctccaacgtcctcatgagtttgatcagtacaatatcatgcattttcttaatcaagtgtatggtttggaaaaaaagatgcgttgaagtatcaatgccaattagaataaactagtgctaacttagtcatgctaaaataactagcatgaaccacggaaggaggaaataactggattcgtgtggctgcatgtatgtatgttaatttggactttagacataatatagcattagtttgtatggggtgtgggttttatctatctcgatctggtcttaataaattaagattttctctcagttcggattccatctctgtttgtatcctttgtaaataaagtaccttaattttgtagtgaaaacttttataagaaaactacagcggtggttaccttggcgaagtgaagggtggtggttggaactttggtgaccaaaaaatatgtaaagtggtggacagagatataaagtggtggaaagcattggaatatgatactttggtttgttttgcaaaatttcattgttaagagaattttggtttgtttttctattgat

SEQ ID NO: 88107 - DNA, 208 bp, Zea Mays
tttttttttttccttgtctcctgtgaggaggaagacgggatccaatgtcatgacaatcccaaagtaactatgaactcatttcggctggaactctcatttccttttgtacttggaagatgagatactcggacatcttatcctcaaacattttactgctctgattagtttactactttaagctgaatgtttgaattcacgcattcaattc

SEQ ID NO: 88108 - DNA, 1370 bp, Zea Mays
acaatcggtaaccatatcaatatgaaaatatcacaatacaacaaagtttataaatatcacaaaaacacaagtacatgaccacccgcactaaaagcagattctgaattgtggagaaggccttccacaccgttctagccgagatctaccggataatcagcaagaagcccctgtcttcggaggagtctggtttggggtctggtaacctcagagagagacagtccattcaagtgtcagcaacaaattctggcggccttacgtcgcggtgctgctcttcttagagccacgcccaccaggatcatctgaagaacaacagttcgtcaagaaggtcctctcttccgagtcgaaatatttactcccctttgtgtgaacaataagtgtagatttaaagaatgtcaggctcgagacactgactatatacttgacctgcatagtcatgttccgtcgagaggtgctgtgggagaaaagttttattgctctcgagcatagaagaaggctgtgtgtatcagaccccagcaaagctgcttgctattaactcgtggcagggtagtctctgtgattttgcagctataattttgttgggggttaattactatgactgcggaagttgtcgtggcttgtggcaacttgattcccgacgtattctagaatcctctttgctatccgtttggcatctggttcttcctgtttatttatcctcaccaaccaagcgcactggagtttatcctaggaacatgacatttgataacgaaattgatacttctctgtggaggaaaaatttaatactttgctataatatccccttaaccagtggccagtgggtgcgtcagttcgtccggcgcgcgaggaggaggaagagcagcggatgcgtccggcgcgcgaggaggaagagcagcggcaggaggaggactggagtgtgtctgtgcaggtgcagctgggtgcgtgtgcgtccatggcggctggagttgcccttgcttggagtgggtgcgtccgtgcgtccatggcggctgggtgcgtccggcagagggtgcgtgcatccatggccacaaagctagattagggattacagattacttactggattggggccttgggggcagtgtgttcgtccgtggtctgcacgtgcagcccggcagagaggaaaggaggaagacgagtcacgccgtcacggaatttgggggcacgccatggagcgccgagctgagcagtggcgactggcggtggcggctatgcttgctgtgcggctgtgcctgggcgaggggcgagggcgacggaagactgcaagtggaagagcagtggccgacgacaattgggttgtggacttgtggtggcctgggctgcttgctgaaccatgggccgcccatgagttgtga

SEQ ID NO: 88109 - DNA, 748 bp, Zea Mays
gtcgatcccatctccctgggatttttacccgttgcgcttgccatcttcattttccccacgcacgctctggtttctgatttttatcagctcgtcttccacctccgtttgtcgtacccgtgtggttgagctcggcttcgagctcccattcccgatgcgccgtccgtcacctcgccctcggcgcgcgcctctgcttcctggtagccgcgcccagcttcctctcttccgcgcgccccgctgcttctccttggccggggcttcttcctctccctgctcgccatggctggtcgagtttttccccagccgcgaagctccctcgtgtgcgtgcgcgctctgcctctccctcagcccaccgcgtcatggagccctgcgcaccacggtagttctttcctgcccctcccatggcggctcccctggatccctcctctgctcggccgcctccctggagtccaagtccggacgccgctccagccttctcttttctctcttctctagccctgtccggcctccagcttcagccatggtggcgtgttcatctccctggtgtttccccaagccgcgcacctctgcttggctatggtcaccgtcacgcccaggattttgccgcgcatgcagtttccaaattcgtcttcagctcgtggcgctcctcatcttcttccccgacgtcgccctctccccctcgatgctcggctggtcggcgtctctccctgccctcggccatggagcaccgcctcgagcacccgttgctgca

SEQ ID NO: 88110 - DNA, 2406 bp, Zea Mays
ctgatggcagctccccttctcttgcctttgatcctgctgctgtcgtctactcctcctcttcaagcccaacagaacatcacccaaggttcctccttgacgccccaagggcctaccacctcttggcactctccatctggcgactttgcgtttggcttccagcccatcgacggtaacacctctgtctacttgctggccatctggttcaacaagataggcaaccttacggtgacttggtatgccaagaccagcgatcaggatccagtgccggtgcaagtttcatccggctcacgcctccagctcaactccaatggggcgctctcgctgcaggactccaccggcacagaggtatggagtccccaagttgtgggcgcatcctacgctgccatgctcgattctggaaactttgtactggctgctgcagatggctctaccagatgggagagcttcaaataccctacagataccatcctgcccactcaggtgcttacccctggaatgagcctccgcagtcggatcatccccacagactattccaatggccggttcctccttgacctgcaaagtactggtgtgtctctttataccgttgctgtgccctctggttacaaatatgatccgtattggtccatggatgtgaacaccacagatttggtgttcaatgcgactggtgcgatatatatcggcaacaatactgaaatcacatcttgggtgatcagctccatagcagactactaccttcgtgccacactagacccagatggcgttttccgacaatatatgtacccaaagaaggacaacaaccagagtaatcaggcatggtcagcagtggacttcaagcccccaaatatctgcggagcacagctgacaaagattggaagcggtatttgcggttttaacagttattgcttatggaacggcgcaaacaaccagagtacctgcaagtgcccagatcagtactcatttattgatggcgagaggaagtataaaggctgcaaaccagacttccagccacaaagttgcgacttggatgaagcggcaatcatgacgcagtttatgttgatgccgacgagccttgttgattggccactatctgactatgagcagtatacctccataactaaggatcagtgtcagaaactctgtctgacagattgtttctgtgccgttgctgtgttccatagcgaagacaatacatgttggaagaagaagatgccgttgtcaaacggcaatatggcggataatgtgcagaggacagtttatatcaaggtacgaaagaacaatggcacacagtctgagatcactgatcccaacaaatggaagaaagacaagaagaattggatcattggaagttcattgtttttgggaagctctgtcttggtgaacattctgctgatttctataatactccttggtagttactgtaccatcacgataaagcaagtcccagctatgcagtcatcaaacaatataggattgcccctcaaagccttcacttatactgagcttgagaaggcaaccggtggtttccagaaagtgattggcactggtgcttctggtattgtgtacaagggccagctacaagatgatctcagcacccacattgctgtcaaaaaaatcgacaagcttgcgcatgaaacagaaaaggagttcaccagtgaagtccaaactattggacggacacaccacaagaacttagtcaggttgctaggattctgcaatgaaggaaaagaaagactattagtgtatgaattcatgaccaatggatcactcaacagatttctatttggtgatgccaagcttcagtggagtattcgagctcagcttgttctcggggtggcaagggggctggtatatttacatgaggaatgcagcacacagattatccattgtgacataaagtcccaaaacatccttctcgatgacaatttcacagcaaagatctcagactttggcttagccaaactgctccgaaccaaccagacacaaacaaatacaggcattcggggtacccgaggatatgttgctcctgagtggtttaagaacatcggtatcactgccaaggtggatgtttatagctttggggtcatcctgttggagcttgtctgttgtcgacggaatgttgaattggaggccgcagaggaggatcaaaaaatactgactgactgggcaaacgactgttatagatatggcagaattgattttctggtgaagggtgatgaagaagcaatttctgatttgaagaacgtggaaaggtttgttgcagtggcattgtggtgtctacaggaggacccaactatgagacctacaatgctgaaggtgacacaaatgcttggtgaagcagctgtagtccccagccctcctgatcctacttcctttgtcagtacacttgcatagcatcactcctgc

SEQ ID NO: 88111 - DNA, 1957 bp, Zea Mays
gggatcagcccgtgctcagtgctgacgtcgtcactcaaatgctgtttcgtccccgtccgcccatgtccatctagaattcgatccagtccaaactacctttcccggcttggtcaatcctgtcgccttcggtccatctcacacagactccggccggcggctccactccactgccccgccgctcggtgccgtacgtcgtcgtgctccaccgcctcgatcctcggtttattgctttcctgcatagcttccttagctagctaggtctcgtttcatcagtctcgatctgctgctcgttggccgccggcggctacgagcatggaaacgtacactacggacgacgcgctgacggccatggggtttggcaagttccaggcgcttgttcttgtgtacgcagggacgggctggctggcggactccatggagctcatgctgctctccttcgtcggaccgctggttcggcagcagtggaacgtctctgcccagcacgagagcctgctctccagcgtcgtcttcactggcatgctcctgggagcctgttcctggggctatatttccgacaaatacggaaggaggaccgctctattgttctccgttactcttaccgctggagcagggttgacaagtgctctatctcctaactacatatccctgctggcacttcggtttcttgtgggtgtaggagttggtggcacgcatgtattttcgtcttggtttctggaatttgtccctaccaagaaccgtggtgcctggatgcttgtgttctctgctttctggaccatcggaaccatcttcgaggcttcgcttgcgtgggtcgtgttgtcaagactgagctggcggtggctgctggcgttcacctccctcccatgcttcgccttgctcgtgtttttcgtcgtcgcaccggagtcgccacggtacctctgcgcgcagaacagaatatccgacgcgacccttgttcttgagaggatgtccaggacgaacaaggccgctcttcctcccggagctctggcataccaccacacggaaacgcagctgggactgggagagagtacaacagacgacgcctccaaatccggttccggtggcatggctgccctgcgcaggctgttctcgcgcaaactgctgagatccacgcttctcatctggttcgtttggtttgcaaactcctttgcctattacggcctagtgttgctgacgtcgcagctgagtgacgcgaaccggaggtgcgcatcgtcgtctgctcacaaatctcaagcgcacgaaggaaacccgaatctctataaagatgtcttcataactagcttagcagagtttccggggctggttatttctgccattatcgttgattggcttggccggaaagctacaatgtggatcttgctgtttggatgctgtggcttcctcggacctctggctgttcatcagaaggagtcggtgacaaccgctcttctgttcggtgctcgcgcctgtggcatggggagctctacggtcttgtgcttatacgcaccagaggtgtacccaacatcagcgcgctccacaggtgttggcattgccaccgccatcggaaaaattggcggcatcgtttgccccctcatcgctgtcggcatgctgcggagctgccaccaaatgcaagccgtcctggtctttgagcttgtcctaggcctcgcgggagtagcctgcatcctcttccctgtggagaccaagggccgcgagatgaaatgacagacccttcacagcacccaaagcgaccactactttcagcggcgtacgttcgaacataaagtatttttgttgaagacgcgtactcagaaaattgctcaagctatatctttaatgaaatattctgagtatcctttttatcaattagttttttctaccctatgtctttttagttttcactattttgattagattttgttttctaattaaaatcttaatacaacctgcgtggagttagtttgct

SEQ ID NO: 88112 - DNA, 2113 bp, Zea Mays
gggatcagcccgtgctcagtgctgacgtcgtcactcaaatgctgtttcgtccccgtccgcccatgtccatctagaattcgatccagtccaaactacctttcccggcttggtcaatcctgtcgccttcggtccatctcacacagactccggccggcggctccactccactgccccgccgctcggtgccgtacgtcgtcgtgctccaccgcctcgatcctcggtttattgctttcctgcatagcttccttagctagctaggtctcgtttcatcagtctcgatctgctgctcgttggccgccggcggctacgagcatggaaacgtacactacggacgacgcgctgacggccatggggtttggcaagttccaggcgcttgttcttgtgtacgcagggacgggctggctggcggactccatggagctcatgctgctctccttcgtcggaccgctggttcggcagcagtggaacgtctctgcccagcacgagagcctgctctccagcgtcgtcttcactggcatgctcctgggagcctgttcctggggctatatttccgacaaatacggaaggaggaccgctctattgttctccgttactcttaccgctggagcagggttgacaagtgctctatctcctaactacatatccctgctggcacttcggtttcttgtgggtgtaggagttggtggcacgcatgtattttcgtcttggtttctggaatttgtccctaccaagaaccgtggtgcctggatgcttgtgttctctgctttctggaccatcggaaccatcttcgaggcttcgcttgcgtgggtcgtgttgtcaagactgagctggcggtggctgctggcgttcacctccctcccatgcttcgccttgctcgtgtttttcgtcgtcgcaccggagtcgccacggtacctctgcgcgcagaacagaatatccgacgcgacccttgttcttgagaggatgtccaggacgaacaaggccgctcttcctcccggagctctggcataccaccacacggaaacgcagctgggactgggagagagtacaacagacgacgcctccaaatccggttccggtggcatggctgccctgcgcaggctgttctcgcgcaaactgctgagatccacgcttctcatctggttcgtttggtttgcaaactcctttgcctattacggcctagtgttgctgacgtcgcagctgagtgacgcgaaccggaggtgcgcatcgtcgtctgctcacaaatctcaagcgcacgaaggaaacccgaatctctataaagatgtcttcataactagcttagcagagtttccggggctggttatttctgccattatcgttgattggcttggccggaaagctacaatgtggatcttgctgtttggatgctgtggcttcctcggacctctggctgttcatcagaaggagtcggtgacaaccgctcttctgttcggtgctcgcgcctgtggcatggggagctctacggtcttgtgcttatacgcaccagaggtaatggttgtgagttgtttcttgtatggttgagtactctcatgagtatattagctacccttcttcctctttgattggcaggtgtacccaacatcagcgcgctccacaggtgttggcattgccaccgccatcggaaaaattggcggcatcgtttgccccctcatcgctgtcggcatgctgcggagctgccaccaaatgcaagccgtcctggtctttgagcttgtcctaggcctcgcgggagtagcctgcatcctcttccctgtggagaccaagggccgcgagatgaaatgacagacccttcacagcacccaaagcgaccactactttcagcggcgtacgttcgaacataaagtatttttgttgaagacgcgtactcagaaaattgctcaagctatatctttaatgaaatattctgagtatcctttttatcaattagttttttctaccctatgtctttttagttttcactattttgattagattttgttttctaattaaaatcttaatacaacctgcgtggagttagtttgctaacgcatgtgccatgatatggttacaggataatgaaaaacagttttgagctcttttaggctcaaaccacgagttc

SEQ ID NO: 88113 - DNA, 110 bp, Zea Mays
ctaccaattttgggctttacagttagcggcaacccccagtcgcctgcctgtgaaggccgcgtgtatctacgtttcttttacgcactttgattattgtaaagactatgtgg

SEQ ID NO: 88114 - DNA, 407 bp, Zea Mays
tttttcgacaacgccaaacatctggtttcgctgccccgattcgccacgaagccgcactgtgagagagggacgcggcccgttgtcctcggcttgtacgcaatccttccgtcgctgcgaagctgatccctcgtgttcgccatggcccccagcgtcgccgtggaaaacctcaaccccaaggtcttgaaatgtgagtatgcagtccgtggcgagattgtcatccatgctcagcgcttgcagcaacaactacaaacacaaccagggtctcttccttttgatgagatcctgttctgcaacattgggaatcctcaatcccttggtcagcaacctgtgacgttcttcagggaggttcttgctctttgtgatcatccatgcctcttggaaaaagaggaaaccaaatcattgttcag

SEQ ID NO: 88115 - DNA, 256 bp, Zea Mays
ccttccgtcgctgcgaagctgatccctcgttgaaatgtgagtatgcagtccgtggcgagattgtcatccatgctcagcgcttgcagcaacaactacaaacacaaccagggtctcttccttttgatgagatcctgttctgcaacattgggaatcctcaatcccttggtcagcaacctgtgacgttcttcagggaggttcttgctctttgtgatcatccatgcctcttggaaaaagaggaaaccaaatcattgttcag

SEQ ID NO: 88116 - DNA, 693 bp, Zea Mays
gtaaaagaggaggttacatggagattactggcttcagtgctccggtaagagagcagatctacaaggtagcttcagtgaacctgtgctccaatatcactggtcaaatccttgcgagcctcgtcatgaatccaccaaaggttggggacgaatcatatgcttcctacaaggcagagaaagatggaatccttcagtctttagctcgccgtgcaaaggcactggaagatgcattcaacacgcttgagggattttcatgtaacaaggctgaaggagcaatgtaccttttccctcagatccatctgccacataaggcaattgaggctgctaaagctgccaagaaagcacctgatgcattctatgcgctccgtctccttgaatcaactggaattgttgtggttcctggatctggatttggccaagttcctggaacatggcacgtcagatgcacgatcctgccgcaggaagataaaatccccgcggtgatcacccgcttcaaggctttccatgaggcgttcatggctgagtaccgtgactgaactgttacagtggctgagtaccaccgtgtagaccgaaacaaaataaagctcccccctctctctgtgtctgtgcgtgtgtgtgaactgatctctgaatggacgaacaatgtactctgttggcgcctttaatggcaattgaggaaaattttgatcaaatttc

SEQ ID NO: 88117 - DNA, 312 bp, Zea Mays
atggctccctcatccgatggcacggcggcggcggctccccggtggcgcgacgacagcggcttcttgatccgaaggcgcaacgacgacagctcccggatccggtggcacgacgacgacaattcctcgatccagaggcgcagcgacaacgagtctccgatctggaggcacggcgtcgatggcttcacagaggcgtgcgcgcaacgtcggctcctcagatgcgtgcgctctggagtggcgcatgctgacgacccacctctcgtgaccacgccggccttccctataagcgagagcgacgacgaaggacttctctag

SEQ ID NO: 88118 - DNA, 930 bp, Zea Mays
atgcaggcaagcattgcagttgcagaggcgctcgatgccgggaagctcacgcctcagcccgtcgccgacgcggccgacttcgcagttgccggtctcgccgtggccattggcacgcttgccgtcacagcgtcgttcatgcttgtctccttcgacgcgcgcgcggggcagggccaactgcgtcgtatcctcgacctcggtccatcactatgtggaccacgcttgttgctcgtcttctttgtggggctcctggccgccgccgagatgctccgcctcccattcttccacggcgccatgctgccgccgcgccaccacgtcatgccatgcctcgcgtacccgctcgtcgcccatggcatcgccgagccagggttgctcgcatgtgtgctcctgctgttgcgtgtgtctgtcggtggcgcgcggctgccagcgtctgcacttgtcgtgccgctcgcctgcttgccattcctcaccgtgcatgttctcgtgctcgccacgccggccaccgtcgccgcctacccaggccagctcgcccatgccgctgatggaattgggcactgcgcgtacccgacgtacgccgccacgctgctcctcgccctcatcgcggtatacctgtagttgctcgccaccgcgtgctgggacgtcgcagccgtggccatcaataagcggctacgcacgagggcgtacgcgctctccgtgctcatccttgtgccactgccactacaggtgttggcgctcgccctaacctcagtgtgggacatgcaccagtacacgtcccccaccgtcggcctcgttgggtttgtcgcggtggcggtagccgcggaggcaacacttgtcatcctcgtcatgctaccggttcatgatgctcttgtccttgtccagaagttgccgtcagtgaccacctggtcagaggagacacctgatgaccccggaaga

SEQ ID NO: 88119 - DNA, 924 bp, Zea Mays
agccgccatccaggctccagccgttcgccaggaaggcagaaaaccgcagctgcccaccaggcgccagcgcccagcagccgcaagctccgccgccgttcgcccaggcgcccagccagccggcggttctcttccaccgttcgaccagccgccagcgtccagcggcttgcgggctgcggccccgccgttcgcccagcggccccgccgtcgaggccaggactcaggagcccaggacccagccaccgagcggcctttaaacctcacagaaatattgggtgaagcaaatgagaaggttttttcacccactttcaagaggctctggcactaatgctaataataatgtgaataacacaccaattgttggagggacgttcaatccggatgacatagttgcagatcccgctttaaggaggcaaatttatgaatatgataaagatgtccaagaccaagtgagaagggcatatgttctaaatggtccatgccaaccaaagggtttagatttccctcgtagacagtatggacaaagtttaaggccttttaaagaggaatggtatgacaagtatgattggttggagtatagtgaatcaaaagatgcagtgtattgcttttattgctttctttttaagcaagcagtgaagggtgataaatatgaagctttcactaaagttgggtataataattggaaagatgcagttgaaaggttgaaatcacatgttggtggtgttaacagtatccacaacaatgctaggttacattttgatgattttaacaaccaaagacaaagcatatctactatcatgtctagtgccagtcgtgaggctgaagacctttataaaattcgtttgacttcttcattggcttgttccagatttcttttgatgcaaggtttggcttttcgtggtcatgatgaatcatctagttcgctaa

SEQ ID NO: 88120 - DNA, 593 bp, Zea Mays
accactaacagaaatagatgtggagttatcaatagctgccacacctcgtatgcgctgcgctcccaaaggagcacggcctcggaggcacactccggtcgcccttgcagagcgcggacaccagctccaacttccgctccgaccagctctgctatccacgctgctaaagactccagttgacgtgagagctcgcggagattggcatacctgctctgatcggacaacgcgagacgagaagtggaagatgaccttgagcgtttgcagcgccggcttgaccaggccctcgcccgcccacttcgggaagcaccatccttccacaggctcgtcagttatggccgggacaggtattgctcgtgcacctcagtcacaaaacacatcctagtcacaaaacacatcctgcaccctcagaacggtcgacgaggaggatggcgtgcacgattcgtcgtctcgccgaacctgtgtgactagggatagcttgggcattgccattcatgctctagttgaagtctcataggtgtatgttgtcttttcaaattcatcctacatcctacgagactgaaattgatttatcaggttcgtgttttgagttttgccac

SEQ ID NO: 88121 - DNA, 453 bp, Zea Mays
atgacgacagcacaggaaggccgcacgggggggggggatcagcaccgagggtggaggtcgcatgccgggaggggccaggcaggccgcgccgtgcagatgtggcggcagaggtctggtgggccgtgccgcgcgggcaacggcggtggtccacacgtggaagcctgtgttttctcccgacaattctggttccagcttcttcagaaggtcggtctccagaagctgtgccacgaacctggaattgcttcctttggtgattggtggtggcatgctagtgaggcagtatctaggctctcaaggcatggtctgaattctatgattattttgggagcttggtccctctggaaacatcacaatagatgttatgcaaccgaaacatacaaattggcagatttgaacgcggaggctcaagaatctggagatgatgaagatgataatgtgtgggaagagggttaa

SEQ ID NO: 88122 - DNA, 108 bp, Zea Mays
ccggccactctactctgcctcctcgtcagcctgcgatgccgctggtatggttgggtctcgacaggaagaagagagcgaaatcatggacggcggcggcggtggcgagcc

SEQ ID NO: 88123 - DNA, 345 bp, Zea Mays
atgggagaggagctcggttcggaggaaggaggagcgtgcggtggagacgctcggctgggcgtacggcgcgcggcagaggaagatgggcagagccgagcgcaggcatcacgggcgagcgccaagggcgagcttgagcagggagagggcgcgcgatgcagggagatgggcagggatggagctcggccggacggctgccagcagggggaagccgccatggacgagcagcgcgcgagcacggccaaagatgaagctcggcacagcggctatggcaacgggcagagggacttcagcgtccatggcagggtcgacggcggctggccatggaaggtggagctcgcgcgctag

SEQ ID NO: 88124 - DNA, 467 bp, Zea Mays
tttgtttattgttagagaatgaatttcatctaattagttactttttgggggttaaactgcaccccttccattttctagttccaactttgtttgtgtatataattggaaagaatccacctcattctcactccatttgccaactccttttttatggatttgctctcatctttagaccccaaaaagcgtatatggatagtaacctaataaaataaaaaccaagcaagcgctctttttcctaaatttaaatatgggatcctttttatttaagatcctcttttctccatctcatttctacttctactgcttattgggatgtctatgtgacccatagaaagttggtcatataatacatacataattgtatgtataactataagaaaaaggaagtgaaattggataagataagaaagatttttggttatacatatagaaaagcaaaagtagaaaagaatgaaaaaagaatagag

SEQ ID NO: 88125 - DNA, 1591 bp, Zea Mays
ccttttcccctcctccctcgctaaggttcctgtgcagcagccctgttgcatgccatcttcctagcttagctagcaagaatctcttgccctccttgcttcctgatcctgcgcccttggatcaccttccatgtgttcttggccttgttctctcgtgcatctgaccatcagttcttaagagtatatttccattggaagcaaattttagggtttcctggaagagactctgccaacttttttttttttttgccctggtgcatctgcatcaacttgttcgtttctctctcgtaaaaaaaactcactgtcgtaaacgttttcgtcaattgatccatgatagactaacgtggtgtagatgtcacaaatcctctccgaggtgagtcaccgctgcagatttatgatcaactcaacgctccggcgaggcacccatcttgttctctctttctccgttgtgttcctctattggttctatgtgttctcagtaagatcctaaccaccaatacaacatactagtatcatatccttggaaattataagcctctacatacaacaacttaattagtcagaggaaagctttcaagtctagatataaccccaagtatcttttgaggatgaccctgtccggtggggcctcgtctgggtctagtcatgggacccgtagcttggggtcagagggtgacatggtgcaccggatggagctcatgcgcaagagaaggatggagtcaaaccgggagtccgcgaagcgatcgaggcagcggaagcagcaacatctcgacgacctcaactcgcaggtgaatttgacacaaagcaaaagtcagatgaaaaaaacgagacttgtgcttcaggatatgctgaagcaagcaaactccgataatgcgcggtgccccttaatttctcagggtccaccacccaataaaattgattcaaagtaggccattccaacctaagcaaagaacgatgcacgacgtgccaccgtcgaaatctttctcaaaaaaagggaaaaaagggaaaaaaattccacaccaattcattggctgtctcggcaaaatcaacacggtcatatatatatcaatcattttttttcttcttcttctacccgacgtcgcgtttatatcggaataattgaatcgtcttctgtataaaataaaacaaaacaaaacaaacaggtggacaagttgaggacgacgaaacagcaactcatggtagcactgaacatgaccagccagaactacgcggcagcagcagctcagaactcggtgctgcgcacccagatgatggagctgcagagcaggctctgcgcactgcgtgagatcatatgccatatgtacgcaacaacaacgaatgtccatccagcaactgtcatgggcggtgctgctacctaccatacttttggcgaaactgcgtggaactctggcagctgcagcatgcaaatggtcgaccacttgttgcaccagtgcttctaggctctagctacgtacaaggaggtagaggccaagacaaacaaaggcatgcatatatatgtattccatgttttgtaagtagtgtgtacgtcatttgatttaatgtataaaagggtttgtgaaattaattgtgcaca

SEQ ID NO: 88126 - DNA, 911 bp, Zea Mays
aatcgaaatggtgaatttgctgctgtgctctgtatatatataggccacttttgctttttatgtattgaagcttgcactcatgtgcaggtgaatttgacacaaagcaaaagtcagatgaaaaaaacgagacttgtgcttcaggatatgctgaagcaagcaaactccgataatgcgcggtgccccttaatttctcagggtccaccacccaataaaattgattcaaagtaggccattccaacctaagcaaagaacgatgcacgacgtgccaccgtcgaaatctttctcaaaaaaagggaaaaaagggaaaaaaattccacaccaattcattggctgtctcggcaaaatcaacacggtcatatatatatcaatcattttttttcttcttcttctacccgacgtcgcgtttatatcggaataattgaatcgtcttctgtataaaataaaacaaaacaaaacaaacaggtggacaagttgaggacgacgaaacagcaactcatggtagcactgaacatgaccagccagaactacgcggcagcagcagctcagaactcggtgctgcgcacccagatgatggagctgcagagcaggctctgcgcactgcgtgagatcatatgccatatgtacgcaacaacaacgaatgtccatccagcaactgtcatgggcggtgctgctacctaccatacttttggcgaaactgcgtggaactctggcagctgcagcatgcaaatggtcgaccacttgttgcaccagtgcttctaggctctagctacgtacaaggaggtagaggccaagacaaacaaaggcatgcatatatatgtattccatgttttgtaagtagtgtgtacgtcatttgatttaatgtataaaagggtttgtgaaattaattgtgcacatggatgtgggttaaagcc

SEQ ID NO: 88127 - DNA, 506 bp, Zea Mays
atggatgatttacttttaggccaagttgatcaagtaatatctgttgaatctcatgatgttcaaagtgaagatatggagaagggtaagaagtcaggctcgggcaggggctgcatttcttggaatgatgatatggacaaggcacttcttgacacattcgtggagtactacaacaagggtgacagatgccaaaatgggtggaagtctcatgtctacacggctactatcaagaatgtccgagaaaagtgcaatgtggaaatcacaaaagacaacatcatgtcaaggaacaagacatttgacaagcaccacactatcatcaatggtatgctacaaacaagtggctttggttgggattggaacaaagcaagatatccgtcgatagcgattctgtatgggaggcttatgtggcgaaaaataaagaagctaatgggtacagacacaagatagtcttatattgggactcgatcaacttggtgtttgggaaagatcatgcaaccggtgaagcggca

SEQ ID NO: 88128 - DNA, 1725 bp, Zea Mays
gcacgcgcctacgcttattagccctcattcgaagtcgacggcacccgtcttctctccgcactcgaaaccccatccttgactagctccgatctggtacgagatggccggcaagatgaaggagttagacggcgccagccctgccaagatcttcattggcgggctctccaaggatacaagcatgagtacattcaaagaacattttgggaagtatggggatataattgatgctgtcataatgaaggaccgctacacacaaaagcccagaggctttggctttattacttttgctgatcccactgttgttgacagagtgattgaggatgaacatgttatcaatggaaaaccggttgaaattaagagaacgatccctaagggagctgctcctttgaaagatttcaagacgaagaagatttttgttggtggattaccctcagctctaaaagaagatgaattcaaggaattcttttccaagtttgggaaggttgtggagcatgaaatcatccgtgaccatgcaaccaaccggtcacgtggatttggttttatagtctttgatgcagaaaaagcagtagatgatttattacataagaagggcaatatgattgatctaaatggttctcaggtggagatcaagaaggcagaaccaaagaaaccctctaaccaaccacctcgttcacttgatagtgagcctaggggccgtccatatgcagacagttatgatggatttggcagctcttacaattatggtggtagttttggtccctatagatcacctcgaagttttggcgctaggcctagcagctacagtagtgcttatggtcctggtgattatggtagtggctatgctacttatggtggagcattagtaggataccgtgaaccttccctttattctagtcgctatggtagcacttatggaggcagccttggtggtgggtatggtggtgttagttatgatggtggattagctggtgcatatgagcgtgatgctgggggctatggtggttctagctatggtcgtagttatgactcttcctgggctaatactggtgatgggtttggcaccggtggactctatggtgctaggacaggctatggtggcagtggcggcagtggtgctgctggtcgttaccatccatatggaagatagaaaatctccagtgctgctgtttgctagagaagcttgcagaagatgaattctagatgtgtgctcaagagatcatctgcatctaaaagatgcactgaagttcaatatgctcagttttctgtattaggaagtactgttagatcaacttgtagaaatttaaacctttgttttggtatttggaattggaatttaagcatatttgataagcgtatgcacttttatagatagaaaatctagtgacccgtcaaaactagctgctagtacaagcatgagttattctttgttagtatagtttgctttgtctttacgaatattatggagtggtcaaagttaacctaagggccgaacgcagtttctttacatgtagttacagaagtgttatcttgtttctttatcttgttccgcgtaggttttgtttggagttcgatggattaagttgtacttagaactagattggtctttttatagtggttcgcatgctttcaccgtttaacatgccgatgttgttttccccattcattatgtaatcggtgatcttgatatcatcacgctggtaattacatcttaattacatttgggta

SEQ ID NO: 88129 - DNA, 915 bp, Zea Mays
atccactacattcttctcttcctccacacgaccccacccaaccaagccgcctcgaacagtttccagaatactacatcccaccaacatggcgtcgccgccgccgggtgccgggcttactgagtatgagcgccgccgcgaggagaacatccgccgcaacgagactatcctcgccgcgctccgtcgcaaggccgccgagctctctgcctccttcatccccacggcttcctctcccaagcgccccaagaagcagcatcccctcgcgagaacgaccagccccgtcgtcctccgccgctccttgcgcacccgcggcatccccgccggcgaatcctccgcttgtgacggcgctaacacctcgctaaatacgccgccgtccccgacgaagccccgcagcacacggttctcatcctccctcgcctcggccctgcgagacgccaccgccgcagagccgtcgccatcggtcaaaagctggatcggtgcgcctgacgggttcgacccctgtagggagctggtgctacggcccgtggacgtgaggaaggtggtgccgggccggatattgtccttgcgaatcctgccgctgtccgaccggactgtggtggttgccgggaacgtgcacgggcatattgggttctgggatgtggatcgtctcgtggaggatgaggatggtgatggtgtagacggggtattcgagtattttcctcacagggggtctgtagggggcattgtgatgcaccccgctatgttgcataagatttacagctctagttatcatggtgaaatttgtctcatggatgttgagaaagagaactttaatacagtctacttgtgtgactatcccattttctcgctttgtcaagcaccaaatagtccaagctctctatattttgccgagggaaatgaattaaaactttttgatga

SEQ ID NO: 88130 - DNA, 756 bp, Zea Mays
atgatgctggtggacataatcaacggtgggtggctgggtgcacggcagatggatggcgctggcgactgggtgtgtggcagtatagcagatggacggcgcatcgggctggaggatggacgagcggccacaacggcccgtagacgagcaacgactgagctcttgcgtgcgcgaggcggtgtttgggcagccacagtgagccttgatgacactgtccgaatttttgacatcgataacttcgatgattcatgtactcttaagcatgataacaggacaggcagatggctgtccacattcaaggcaatctggagctggaatgacagcaatctatttgttgggagcatgaaaagagcaatagatgttatctcagttgatcgcagacagaagagcatctcagcttcgtacatggcatttcttgagagtgaacacatgacagccatcccatgccgctttacgctgcacccgtgcaaagttggccatctggctggtgcaagctctagtggtaaggtgtttctctggaccagagcttgaagcaggctgatcatcgactgactgggatgtcctcggcctgttgctggccctgtcctgcccaagttcctgaccacggagatcctcatctcgcggttctgtactaatgatcgttagcattatcctgcttttaatgtataagggctagtttgagaactctattttttcaagggatttctgtttttttaatagaaaatgaactaatttctattggaaaaataaaaaaaatcc

SEQ ID NO: 88131 - DNA, 672 bp, Zea Mays
caaactctagtttgagttcaacttaaatgcacaagtaaacaccaatatgaatgcaagtataattttatttatcatttatttattgttttattcatttatgcaaatgttttttttacatacacacaataatatttatatcaacatcaacatagcctttgagtcccaagcaagttggggtagactagagttgaaacccaaaagatgtcaccaaaaggggaaagagagagaaaggggaggaaaaagcttttgagaacatggttagttggtgatagagatggcaatgggtacccgcgacccgatacccgatgggtatttactccattagggtatgtatgtgtgctaaatattctacccgtggatatgttattgggcaaaaatcttcacccaatgggtaaacgggtattaggacgttccgccttcacccatacctgttaacccgtgggtataaaatacccaatataaacttagccaagcatgaacttagactttagtcatccatcttttttactatttaacaaccttttaggccataatgtcatagaaggcttaacgacaatttaatgaccatgtaatggaacatgtaatgtgctatgtaatactatcctagtgttactactttatctaattatctttggtgtgttgaatagatggttaaatgagactagaaacttt

SEQ ID NO: 88132 - DNA, 2464 bp, Zea Mays
accaaaccgccgctcgcgtcggtcacgccaggcctgacgcgagcacatcgcaatcctagccaccaaaacaatgcccggcggcaagcgccgccgcgcacgcaaccccaccgccggcgggcctcagcgtagcgccggcgcaggtcgtcgtcgtcccgtccccgagctcccgtcttttgtctcccccgcttctgtcgccgccgccttctcccccgcctcgggcggccgcagccgcgggcggtgcgcccggcgttgcggcgcctactccgatggcgagtcctcccacgccgtcccctttagctatccttccctccgctcctgctccgcttatccggagcgtgatcaggcgcaggcactggaggtgaccatcgacaccgcaccctgcgccgacccagccgcttccgtcccgatgtactcgtacggccccgccgtgctcggtgagaccgggcttgtgctgagtgcggacgaggaggaggcctgtgatagagggctgcatctcgggttaggattccgggatggaggacacgatgagatggagctcaaattgaaagagctgacagaggaagatgtctccttcaagacgcccaagcggaagcaggagcagagggcgaaggccaacccaggatttttgttgattgggggagtcaggatttacacggaggacatctcatcatcagaatcggatcggatgagcagctctgatgtggatttagagcccaactcaggtgatggggagagatttgagaatgatgatggtgacagtgacgaggaagataggcaaggcgaggagagagattcaatatctgatagcgagtcattaggatcggaatcagatgaagatttgagcaccggggattcttcttcagttgacaatgaggttgttgctgattacatggagggtattggtgggagtgacgagctgttgagcagtaagtggatcactagtatgaatttgggtgatgcagatactatagagcagatgtatacaaatgacaatgatgggtttgtgaagaaggggaaggaaaagcttgagggttatgcactaatgactgcatccgagcagtatgggatgaagaggcggaactcccttgagcagcggaagggaaaaggaatggtttgtgacagggatttgtcaagcatgcaagtgatggaccaggaagatatgttcatggtgaacaatgtctggatgccaaacaggtcaagaaaggggatgaagacaggatcatcatcctctcagctctcacagtcgtggcctaaagatgataggaaaagcaaaaactatcagagcaggccaggtgaaaagaagcagcataggaaggaactcattgcaaagaagcgtcaacaacgagctctaagcagaggagttgacttagggcaaattaatagtaaattgaggaaaatggttgtggatcaggttgacatgttatgttttcatccaatgcactctcgagactgttctcaggtacaacgccttgcatctatttatcaattgaagagcgggtgtcaaggttctggcaagaagagatttgtaactgtgacattgactgggcactcttccttgccatctgcagatggccaagttcgacttgaaaagcttttggggactgaatctgagaactctgtctcgagctctaaaggcccagcacgactgaagggccattctgctccaggaaagtgtgtaaaacactgggaatccagtggaaataaatctaccaagaaacaggtctccttcgcagagcgtccagtatcttttgtcaagtgtggaaccattgtggactcccttactgaggcaatagctggcccaagtggtggtgatacctcgtgtgttaaacctgttgaaagtaactccacccatctaggctcctttgaggtgcacaccaagggctttggttcaaagatgatggccaaaatgggattcatcgagggcactggccttggtaaagatggccaaggtatagtgcagccgatacaagccgtgcatcgtcccaaatctcttggactaggtgtagaatttgacagtgtggctgaggcgatcaaagcaagggcagaacccatcaaattaatttcagagctgaggcggaatgtgtgggcaccagagacgagtggcgttggctcctttgagaaacacaccaagggttttggctccaaaatgatggtgaatatggggtttgtcccagggtccggactggggaaggatggccagggcattgccacccccttgaccggagtaaggcgaccgaaatcacggggactgggagccgaggacaaatattagcttacaccattttcgcatttgatgtatctttcttgtcgtgttccttgttacatgcggattacatagtttgctgggagggcgaacctttgagcaccctgaatggtgaaacaatgggttttcacttgtttctttcaacttctcaatgaagttttatatatttgttctatcaatgttatatttgtttcatttttc

SEQ ID NO: 88133 - DNA, 1146 bp, Zea Mays
actgcttgctttgccctaggaaaaaagcttaggcgagccagaacagctctccgctgctggcaaggatagccttgctgagcgaggcgaggcaagttgagcaggacagaaaaccaaacatgccctgaattgctaaagcttgaggtacaacgccttgcatctatttatcaattgaagagcgggtgtcaaggttctggcaagaagagatttgtaactgtgacattgactgggcactcttccttgccatctgcagatggccaagttcgacttgaaaagcttttggggactgaatctgagaactctgtctcgagctctaaaggcccagcacgactgaagggccattctgctccaggaaagtgtgtaaaacactgggaatccagtggaaataaatctaccaagaaacaggtctccttcgcagagcgtccagtatcttttgtcaagtgtggaaccattgtggactcccttactgaggcaatagctggcccaagtggtggtgatacctcgtgtgttaaacctgttgaaagtaactccacccatctaggctcctttgaggtgcacaccaagggctttggttcaaagatgatggccaaaatgggattcatcgagggcactggccttggtaaagatggccaaggtatagtgcagccgatacaagccgtgcatcgtcccaaatctcttggactaggtgtagaatttgacagtgtggctgaggcgatcaaagcaagggcagaacccatcaaattaatttcagagctgaggcggaatgtgtgggcaccagagacgagtggcgttggctcctttgagaaacacaccaagggttttggctccaaaatgatggtgaatatggggtttgtcccagggtccggactggggaaggatggccagggcattgccacccccttgaccggagtaaggcgaccgaaatcacggggactgggagccgaggacaaatattagcttacaccattttcgcatttgatgtatctttcttgtcgtgttccttgttacatgcggattacatagtttgctgggagggcgaacctttgagcaccctgaatggtgaaacaatgggttttcacttgtttctttcaacttctcaatgaagttttatatatttgttctatcaatgttatatttgtttcatttttc

SEQ ID NO: 88134 - DNA, 990 bp, Zea Mays
gccccagcccgtggccatcggcctcttcttcgccgcatgctctccttgctcgagctcgcccacttcctggtgcatcttcctcctcgcctcccatctcaggatcaggctgctcggccacgcccagcagctccttgaacgcgcgcccctccgagcatctcgtccctttgttggtcgccatctttcctatctccccagcgtaggtggctggctgtgcctccccttgccggtgtcctcgttctccctgctcgttgacccctagggaaaaaacatctccctcacggctgctcccatggctgcctgcagccctagccgagctcgctctccccgcccagcagcaagcagctcctttcccctcgccatgaacgtcgtcgatctcctactgcagttcctccacgtggtctggtcgtcgaccgcgcgcatcacctactcgtggttatggaaaaccagcaagcctctcctcacggtgtagtttcctcacgtcatcgttcagcccgatgaggacctactgtctccttgtgtttattcctcgttagtacctgtacccgacgtcgatttattagatgataattatgtgtatgtttgtgtgtttgtggtggatctaaatcctgtgagatttagatgagaagaaagctttagcgaggcgcttgccaagtgtttggtgaatcgcctcaaccaaatgtggttgtcgatctcgcggagtcgagtcgagtttagttgtggtaagtcgatccattgtttctgttggtcggatggatggattagttggatgttttaattatgtcggtcctcttgacagtagcatgtgtgtgtcatggttgtaggtataatacgtattgaaatgcacgagtcacttgcagcgatttggtcgctgttgtgtctgtgtatggagttgatgtccggctaggggaatcattatgctatatgtggtgatcgattaggagtcttgaccaagtgttgattgatacttgagtatgaaatagactagtttat

SEQ ID NO: 88135 - DNA, 1787 bp, Zea Mays
ctaaactttcccccctacataatcggcaatagtgcgggctgcggcaccgcagcagcgccatgaacgccgtcgaaccctccgccgccgccatcgccgaagaccccattactccggccgcctccgcagccccgtaccctggccgcctccgcgaagcacttaccgccctttccgaggcttgcgagtccggcaacttcaatgcttccgaaaccgcctccttcaccatctccgacattcttgacaccgcagccggcgtaagtggcgagctcgatgacgggagcgacgacagccaagacgcgtcgaggtcaggggcctccgaagtgctgcttcgcgaggtgctcgagttcctctctcgcccgtcatcgatctcgaaccagatggcccttgacgcgctctcgcttgtgcttcccaaacccgtggcgaagctaggggctcgaatggggagatgccgggatgttgccgcagctatcctaaagttcttcgtgacgaattgcaatccgagggacatgctctccatcctctgtgaggcattagatgcaccaatggagctaccaaatggcttatccagttttgttcttctactcgatgcacttgctaaaggctcttgtatcacgaagcagacagcaggatattctctctgcttgtggttcagttgtttttcagagtttcagatttcttaaaactagtggattcacctatcgtggcctactaactggcagtgatgtcacagctgcaacggttgaactttccaaagaggaagatgctgattttatggagcatttttcctttgctatggatggtgcagcactttcagttgtgtggacacttatgcatgatgataaagatatgtcaaagtatgctggagaagagttggaattagcagtaaaggaagttcagggcaaccatatggaaaaatgggaagcaattaacatgcttaaatatgtcctatcctcaattcattacccatggataatcaaatcccacagtttaaacttaatgctgattctatccggtgaagatcatgttgaagagatcaataatcatgtagatttcacatgctttgctcatcgcatttttgaaacactcaaggccattgaaagcgttatgattgctgcccctatggcattggtgcggaaaaaagcatttgctgctttgaaaaaggttatttcaatggtgccatcatcccagagatttgacatcttacatggtcttgtaaacaatagtacatctccagctttgactgcaattctccttgatctagtgaggcaggaagtttcgagagagagtcgccaagctgacaatgattgtattgaagacgaaggatttcgaggtaatgggttaccgcgctgggcatctcatgcacttgagttagttgagctgattttgaggcctccagaaggtggtcctccttgccttcctgatcacagtgaacaggtaatatcagctctaaacttgctaagatttattctgataatagattcaagaggacaaagatctgcaaaattgtttcggaaagagacattgcacaaggtgcactcggagtggctgaccccattaagaccaatcgcggagcaaattcagttggaaaatgaaaaggatgctgatgagattacaaaacaaatagtgtgcatgttaaatcttgttcaactggtgctataccgctgcatcgagttggtggaggaaaagatgaaaggctgctaatgtttttggtacctgtcatttctatacagtagcatctgctgtatctggatggaatgttcttgaggatataaattccatcttctcaggtt

SEQ ID NO: 88136 - DNA, 1982 bp, Zea Mays
ctaaactttcccccctacataatcggcaatagtgcgggctgcggcaccgcagcagcgccatgaacgccgtcgaaccctccgccgccgccatcgccgaagaccccattactccggccgcctccgcagccccgtaccctggccgcctccgcgaagcacttaccgccctttccgaggcttgcgagtccggcaacttcaatgcttccgaaaccgcctccttcaccatctccgacattcttgacaccgcagccggcgtaagtggcgagctcgatgacgggagcgacgacagccaagacgcgtcgaggtcaggggcctccgaagtgctgcttcgcgaggtgctcgagttcctctctcgcccgtcatcgatctcgaaccagatggcccttgacgcgctctcgcttgtgcttcccaaacccgtggcgaagctaggggctcgaatggggagatgccgggatgttgccgcagctatcctaaagttcttcgtgacgaattgcaatccgagggacatgctctccatcctctgtgaggcattagatgcaccaatggagctaccaaatggcttatccagttttgttcttctactcgatgcacttgctaaagtgtttactttaattcagaggcgacatatcgagcaagtaaaggtggcactgcccgttgtacttaaagttatgcatgctactgtatcagaatgtgttgaggaacatggaagtgctgctgttgatcttttcaatgcagcacatggtgttggcaaggccattcaagaaatgtgcatatcaatgttcaacaaaaacaaagatctctgtgcaattcttggtttatactcccttcagaatatagctcttgtatcacgaagcagacagcaggatattctctctgcttgtggttcagttgtttttcagagtttcagatttcttaaaactagtggattcacctatcgtggcctactaactggcagtgatgtcacagctgcaacggttgaactttccaaagaggaagatgctgattttatggagcatttttcctttgctatggatggtgcagcactttcagttgtgtggacacttatgcatgatgataaagatatgtcaaagtatgctggagaagagttggaattagcagtaaaggaagttcagggcaaccatatggaaaaatgggaagcaattaacatgcttaaatatgtcctatcctcaattcattacccatggataatcaaatcccacagtttaaacttaatgctgattctatccggtgaagatcatgttgaagagatcaataatcatgtagatttcacatgctttgctcatcgcatttttgaaacactcaaggccattgaaagcgttatgattgctgcccctatggcattggtgcggaaaaaagcatttgctgctttgaaaaaggttatttcaatggtgccatcatcccagagatttgacatcttacatggtcttgtaaacaatagtacatctccagctttgactgcaattctccttgatctagtgaggcaggaagtttcgagagagagtcgccaagctgacaatgattgtattgaagacgaaggatttcgaggtaatatcagctctaaacttgctaagatttattctgataatagattcaagaggacaaagatctgcaaaattgtttcggaaagagacattgcacaaggtgcactcggagtggctgaccccattaagaccaatcgcggagcaaattcagttggaaaatgaaaaggatgctgatgagattacaaaacaaatagtgtgcatgttaaatcttgttcaactggtgctataccgctgcatcgagttggtggaggaaaagatgaaaggctgctaatgtttttggtacctgtcatttctatacagtagcatctgctgtatctggatggaatgttcttgaggatataaattccatcttctcaggttattgtatatttacatggccaggaagtctggttttatttaaagtgtgcataacgtattcacagg

SEQ ID NO: 88137 - DNA, 2092 bp, Zea Mays
ctaaactttcccccctacataatcggcaatagtgcgggctgcggcaccgcagcagcgccatgaacgccgtcgaaccctccgccgccgccatcgccgaagaccccattactccggccgcctccgcagccccgtaccctggccgcctccgcgaagcacttaccgccctttccgaggcttgcgagtccggcaacttcaatgcttccgaaaccgcctccttcaccatctccgacattcttgacaccgcagccggcgtaagtggcgagctcgatgacgggagcgacgacagccaagacgcgtcgaggtcaggggcctccgaagtgctgcttcgcgaggtgctcgagttcctctctcgcccgtcatcgatctcgaaccagatggcccttgacgcgctctcgcttgtgcttcccaaacccgtggcgaagctaggggctcgaatggggagatgccgggatgttgccgcagctatcctaaagttcttcgtgacgaattgcaatccgagggacatgctctccatcctctgtgaggcattagatgcaccaatggagctaccaaatggcttatccagttttgttcttctactcgatgcacttgctaaagtgtttactttaattcagaggcgacatatcgagcaagtaaaggtggcactgcccgttgtacttaaagttatgcatgctactgtatcagaatgtgttgaggaacatggaagtgctgctgttgatcttttcaatgcagcacatggtgttggcaaggccattcaagaaatgtgcatatcaatgttcaacaaaaacaaagatctctgtgcaattcttggtttatactcccttcagaatatagctcttgtatcacgaagcagacagcaggatattctctctgcttgtggttcagttgtttttcagagtttcagatttcttaaaactagtggattcacctatcgtggcctactaactggcagtgatgtcacagctgcaacggttgaactttccaaagaggaagatgctgattttatggagcatttttcctttgctatggatggtgcagcactttcagttgtgtggacacttatgcatgatgataaagatatgtcaaagtatgctggagaagagttggaattagcagtaaaggaagttcagggcaaccatatggaaaaatgggaagcaattaacatgcttaaatatgtcctatcctcaattcattacccatggataatcaaatcccacagtttaaacttaatgctgattctatccggtgaagatcatgttgaagagatcaataatcatgtagatttcacatgctttgctcatcgcatttttgaaacactcaaggccattgaaagcgttatgattgctgcccctatggcattggtgcggaaaaaagcatttgctgctttgaaaaaggttatttcaatggtgccatcatcccagagatttgacatcttacatggtcttgtaaacaatagtacatctccagctttgactgcaattctccttgatctagtgaggcaggaagtttcgagagagagtcgccaagctgacaatgattgtattgaagacgaaggatttcgaggtaatgggttaccgcgctgggcatctcatgcacttgagttagttgagctgattttgaggcctccagaaggtggtcctccttgccttcctgatcacagtgaacaggtaatatcagctctaaacttgctaagatttattctgataatagattcaagaggacaaagatctgcaaaattgtttcggaaagagacattgcacaaggtgcactcggagtggctgaccccattaagaccaatcgcggagcaaattcagttggaaaatgaaaaggatgctgatgagattacaaaacaaatagtgtgcatgttaaatcttgttcaactggtgctataccgctgcatcgagttggtggaggaaaagatgaaaggctgctaatgtttttggtacctgtcatttctatacagtagcatctgctgtatctggatggaatgttcttgaggatataaattccatcttctcaggttattgtatatttacatggccaggaagtctggttttatttaaagtgtgcataacgtattcacaggaatata

SEQ ID NO: 88138 - DNA, 2454 bp, Zea Mays
ctaaactttcccccctacataatcggcaatagtgcgggctgcggcaccgcagcagcgccatgaacgccgtcgaaccctccgccgccgccatcgccgaagaccccattactccggccgcctccgcagccccgtaccctggccgcctccgcgaagcacttaccgccctttccgaggcttgcgagtccggcaacttcaatgcttccgaaaccgcctccttcaccatctccgacattcttgacaccgcagccggcgtaagtggcgagctcgatgacgggagcgacgacagccaagacgcgtcgaggtcaggggcctccgaagtgctgcttcgcgaggtgctcgagttcctctctcgcccgtcatcgatctcgaaccagatggcccttgacgcgctctcgcttgtgcttcccaaacccgtggcgaagctaggggctcgaatggggagatgccgggatgttgccgcagctatcctaaagttcttcgtgacgaattgcaatccgagggacatgctctccatcctctgtgaggcattagatgcaccaatggagctaccaaatggcttatccagttttgttcttctactcgatgcacttgctaaagaggcgacatatcgagcaagtaaaggtggcactgcccgttgtacttaaagttatgcatgctactgtatcagaatgtgttgaggaacatggaagtgctgctgttgatcttttcaatgcagcacatggtgttggcaaggccattcaagaaatgtgcatatcaatgttcaacaaaaacaaagatctctgtgcaattcttggtttatactcccttcagaatatagctcttgtatcacgaagcagacagcaggatattctctctgcttgtggttcagttgtttttcagagtttcagatttcttaaaactagtggattcacctatcgtggcctactaactggcagtgatgtcacagctgcaacggttgaactttccaaagaggaagatgctgattttatggagcatttttcctttgctatggatggtgcagcactttcagttgtgtggacacttatgcatgatgataaagatatgtcaaagtatgctggagaagagttggaattagcagtaaaggaagttcagggcaaccatatggaaaaatgggaagcaattaacatgcttaaatatgtcctatcctcaattcattacccatggataatcaaatcccacagtttaaacttaatgctgattctatccggtgaagatcatgttgaagagatcaataatcatgtagatttcacatgctttgctcatcgcatttttgaaacactcaaggccattgaaagcgttatgattgctgcccctatggcattggtgcggaaaaaagcatttgctgctttgaaaaaggttatttcaatggtgccatcatcccagagatttgacatcttacatggtcttgtaaacaatagtacatctccagctttgactgcaattctccttgatctagtgaggcaggaagtttcgagagagagtcgccaagctgacaatgattgtattgaagacgaaggatttcgaggtaatgggttaccgcgctgggcatctcatgcacttgagttagttgagctgattttgaggcctccagaaggtggtcctccttgccttcctgatcacagtgaacaggtaatatcagctctaaacttgctaagatttattctgataatagattcaagaggacaaagatctgcaaaattgtttcggaaagagacattgcacaaggtgcactcggagtggctgaccccattaagaccaatcgcggagcaaattcagttggaaaatgaaaaggatgctgatgagattacaaaacaaatagtgtgcatgttaaatcttgttcaactggtgctataccgctgcatcgagttggtggaggaaaagatgaaaggctgctaatgtttttggtacctgtcatttctatacagtagcatctgctgtatctggatggaatgttcttgaggatataaattccatcttctcaggttattgtatatttacatggccaggaagtctggttttatttaaagtgtgcataacgtattcacaggaatatatggtgttattatcataaactaacaaataggatgtggttaacccgtcaccggttgctccggtagcctctatgacaacgtgcgacacccctgattgcacgtaacgagcgcctctgaccgtgtgtcatgagtgcctcctgtgtactgtacattcagcctagatggccaaattggccgaccggcctgtcatgacacgggcctgaaaaatagaacagcttgatatttactactagtagctaacgcgcgataatttatttctttgaaggtgtttgataacgagataattggattttcagtttacaaataattatcatgaacaattacagtgagttgtgatcttcaaaataaaataacaatcttcgaacttggtttataggaacag

SEQ ID NO: 88139 - DNA, 1163 bp, Zea Mays
gattttggatggcatctctacgtcctatgtactgtaacattgccttttttttaatattgcacttatttatgacactacattgtcaggttatttcaatggtgccatcatcccagagatttgacatcttacatggtcttgtaaacaatagtacatctccagctttgactgcaattctccttgatctagtgaggcaggaagtttcgagagagagtcgccaagctgacaatgattgtattgaagacgaaggatttcgaggtaatgggttaccgcgctgggcatctcatgcacttgagttagttgagctgattttgaggcctccagaaggtggtcctccttgccttcctgatcacagtgaacaggtaatatcagctctaaacttgctaagatttattctgataatagattcaagaggacaaagatctgcaaaattgtttcggaaagagacattgcacaaggtgcactcggagtggctgaccccattaagaccaatcgcggagcaaattcagttggaaaatgaaaaggatgctgatgagattacaaaacaaatagtgtgcatgttaaatcttgttcaactggtgctataccgctgcatcgagttggtggaggaaaagatgaaaggctgctaatgtttttggtacctgtcatttctatacagtagcatctgctgtatctggatggaatgttcttgaggatataaattccatcttctcaggttattgtatatttacatggccaggaagtctggttttatttaaagtgtgcataacgtattcacaggaatatatggtgttattatcataaactaacaaataggatgtggttaacccgtcaccggttgctccggtagcctctatgacaacgtgcgacacccctgattgcacgtaacgagcgcctctgaccgtgtgtcatgagtgcctcctgtgtactgtacattcagcctagatggccaaattggccgaccggcctgtcatgacacgggcctgaaaaatagaacagcttgatatttactactagtagctaacgcgcgataatttatttctttgaaggtgtttgataacgagataattggattttcagtttacaaataattatcatgaacaattacagtgagttgtgatcttcaaaataaaataacaatcttcgaacttggtttataggaacag

SEQ ID NO: 88140 - DNA, 1299 bp, Zea Mays
tcatgctcatagtctattggaggataaaagtaatatgaatgttactgcccttaatcttctaaggcacaatatgcttagaatgacaaacatggacgttaaattttgagcttcttttttaacgtcatcaataaatttctgacttgtggttattgtagactgcaattctccttgatctagtgaggcaggaagtttcgagagagagtcgccaagctgacaatgattgtattgaagacgaaggatttcgaggtaatgggttaccgcgctgggcatctcatgcacttgagttagttgagctgattttgaggcctccagaaggtggtcctccttgccttcctgatcacagtgaacaggtaatatcagctctaaacttgctaagatttattctgataatagattcaagaggacaaagatctgcaaaattgtttcggaaagagacattgcacaaggtgcactcggagtggctgaccccattaagaccaatcgcggagcaaattcagttggaaaatgaaaaggatgctgatgagattacaaaacaaatagtgtgcatgttaaatcttgttcaactggtgctataccgctgcatcgagttggtggaggaaaagatgaaaggctgctaatgtttttggtacctgtcatttctatacagtagcatctgctgtatctggatggaatgttcttgaggatataaattccatcttctcaggttattgtatatttacatggccaggaagtctggttttatttaaagtgtgcataacgtattcacaggaatatatggtgttattatcataaactaacaaataggatgtggttaacccgtcaccggttgctccggtagcctctatgacaacgtgcgacacccctgattgcacgtaacgagcgcctctgaccgtgtgtcatgagtgcctcctgtgtactgtacattcagcctagatggccaaattggccgaccggcctgtcatgacacgggcctgaaaaatagaacagcttgatatttactactagtagctaacgcgcgataatttatttctttgaaggtgtttgataacgagataattggattttcagtttacaaataattatcatgaacaattacagtgagttgtgatcttcaaaataaaataacaatcttcgaacttggtttataggaacagatgtgatcctaactcccaagtttgtagatttgacaaagtaccaagataaatgtcattcaaaattattggtttgacaaatatcttaagaggtaacacatcattagtgcaataaaaattaacgataaaaactaaaaaaagaataaga

SEQ ID NO: 88141 - DNA, 436 bp, Zea Mays
atggcgacggaaacgggaagagcgacgccgctgttttgctcaggagacagaggcttatggctgtttgtgggacctttcatctgggagtggactgttctggatgcacaacatgtgtttgagctccacccgatggctttttccctttatttttcccacaacatgcaagctgtagctaaagccactgaagatcagacagacgcaacacaacaacatccactcccgccggctttctcattgatttcccacaaggcgaaagctgaagctcaagccgctgttggccaaccatcaacatttgcgtttttactgtacctatttgaaatctaatgttttttcctttcctttcaatcacataaacatttacccgtttttagcctctcagagcttagaaatattctaaataatgtcatttcattatgcaatatggattacatatgat

SEQ ID NO: 88142 - DNA, 468 bp, Zea Mays
atggacgtcgcgccttgcttcctgcgcgcccggcctgaaccctccctgcgctcgctgcggtgcttttcccctgctcctccggtgccgcgagctccagctcagatttggaccagtcgcgccctgctccctggtgattgtatcttccccgccgagctccccatggtgctcgcccatgccggccagagatcactcggccgcggtctcgtcccggctccctgctgtgctcgcctagatcgccgctgtcgagttccatcgctgagtctagcccctgttgctgcgctctgcatcctcgccgcgttcgtgaagctgccatggaattgcggtcgttttactttgtgtcatgaatacggggctacctgcagcatggtaattgtgtccccgattgcgaagtcgtcgtgctgcatagctaagtttaggtttaacgacataggttatgcgagaaggattaaatcggtgtttcgtatctga

SEQ ID NO: 88143 - DNA, 115 bp, Zea Mays
acggtttcatctttgctggcttgctatatggcaatagcttagccgttgtgtttctgtggttctggtatttcagtaatgtcattcaatggctctgcaatgcccactgttcctttgc

SEQ ID NO: 88144 - DNA, 311 bp, Zea Mays
agaaaaagttgatctattaccatcacatttctcatagaccaataattagtaataaaatgagaatgcatttattctaccagattcatggaatcaagattagcacatagtaacacaatacaataatataagcttattttatttgcagatgtatagtgctcagatgggatctccaatgggaccccagttcacccgtccgtcacaatctggacagaccccaaacaccaacgaaacacaggtatagttttgtagtatatttactttaatttacaattataatcatgcattgttttatttggttatagggttctgag

SEQ ID NO: 88145 - DNA, 408 bp, Zea Mays
atggggcctcacaacggtctggtgatggtggttttggtgacgcctctggtgatgtggctggtcggcctcgtcgatgtcaggcgctgccctgtatctgagtgggagacaagggtggagtccaacagctttgatttggaagcggacatggtgggttcagagtcacagcaattggagttaattccaaaatctttagctcgccatggtatggaaagtttacaacctctttggccatcggtgacttttgaccgtttgcatacaagagatatctcagatgatgcgacgtttgaggttatggagatgggagggggcattgaaggagcaatggctaccccgtccgagtcttccttggatgttgtagggcctactgctactccgcctaaatctagtgctaggactcagggtcgttag

SEQ ID NO: 88146 - DNA, 1185 bp, Zea Mays
tgatgatcgattgtagcattattgcattaaactaaacgtgatgcaaacatatacatatctgcgaccaggtttcctaccacggcctgtcttcaattgggaaaactcaaaatgaaaagtacaatgagcgccaatcctccacttgttttttttttaccttaagcacatttacccgaacaatattcatggctcaatcatcacaagaaaaatgcggcttcaaaatttgacttctcaatgccggaaccagcatgccagaagaaaccgaatcgaatggcagcaccgtaccttgaggtgtatcacgccaaacggcttccacagctttcctgcccccgcggccacctcccgcgcctgctgcacggcactcccgtccccgatcactctggctgcagcagcagcgggcgacacggctacccccccagcaccagctccgcggagcttgtagtaggatagcaccccatcctcgagcacgaaccaccgcgaccgccaccccttcccatagttgacccacttgtgcagcacccccacaaccgcatcctgctttggggccggcgtcgccggcggtgcaccagcgaggatgcgctgcgggtgctcgtggagctgatccgcagcgtgctcgagcgagaccggcgcgatgcagcataacgggttcatcgcgacgcagccaccagcccgcacgatgtggatcgggggagcccgctccccactcaggaggcagatgccgccttgtggcctcgctcgcgcccgccgcctaggtttcgcacaaccatggagatcggcgccgcatcggctgcgcgcaggacatagcagcagcagcgaagtggctgtcggagtactgggcggcgcagtaccgtggagtactggcgttggcggtgtgttttgatggcgacaaggtggattttaggttaccatgaacatgaagctctcctctaagaaaatgaagaagatgctggatttcaaagtgcaatgccgtaaaataggtgcccagttggcacacttggcacaattgacatagtccatagttggcaaagtgaaataccgctcaatggttttgcattaaagaatccattacccactaccatgtataatttttccaatgttgtaagtggatcaccctacatcatacatagggaatgaacatacaacattatctaatgctacaagtttcattagtgcgcaatgcaaaaacaa

SEQ ID NO: 88147 - DNA, 412 bp, Zea Mays
acaaaaaaacatatattcatatgtacaatttatattaaatgttataaacacttgagcatgatgttctactcgttagacaactttgcccagtgtctcccacccttcttccatcagggtgtgcgttcaaaccccacctcctgcaccgctttttaatattttacgctgagttgatttggaagaaatgtagggacttttttgtaaaaagattaaatattataaacacttgagcatgatgttctactggttagatagcttcgcccaatgtctcccacccttcttccatcagggtgtgggttcaaaccccacctcctacattgctttttaatattttacgctcagttgatttggaagaaatgtagggactttttttgtaaaaagatgatgcaggacgaccgttgaaattgatgcttta

SEQ ID NO: 88148 - DNA, 1384 bp, Zea Mays
gggcaaatcagaaagtgtccaggatctaaccaaactcctctcgaacgcttttaaatcctctttacttcagtgtctcaccatccccattggccaccacccgtcgccggcccgatggccgccagctccggcgaccactctgccagtggcgacgtgggatgcgcaagtggtgagtgctccacaccctttgtaagcgcgccgtccagccccgcccgcgacccgtccttctccgctgtcggttgcttttacagcgcgccggcgagccccggcactgcggatgagtatggattccaattcgacttcgacttctcctcgcgttgcccgtctcccgccgcggcggcgatgtcctccgccgacgagctcttccaaaacggtcagatccgaccaatgcggctagcgtccttcctgctccgcccgcaggtgctcccgcctctcaacggaggcgtccccgccggcaacccgccgccacagccgccttcgcggccggcgcctgtgggggcggacgagcgcagccgtctccggagccggtccgtgcaccgccggtaccgctccctctccccattccgcaaccgctggctgtcgccgtcgtcgtcgcctgccccaccgtcgaagtccatggaaccaacggcgggcgaggcagccccgtcggcgtcacggtcgtcctcctcctcttccacggcgtcctctgcttcctcttcctcgtcaagaagctaccgcaggtggtgtttcttgaaggacatcctccaccggagcaagttcgacggcgccgagcacccacctctaccctccaacccgtcgcctccgccgccggcgcccaagacgaaccccccagcggcctcaccaggccgcgggagggcgaggagatcagcgcacacgcggctgtacgagacccggcgcgcagaagcggaggagatgcggcggcgcacattcttgccgtaccggcagggcatcttcctcggctgcctcgggctcggttcccgcgactacggcgccatgcacggcctcgctgccggctgccgccggcaaggctagacggtggcgcatgccatcaccaaccccacctccatgaacacctctcctgctcttcccctttgagtggccgttcttggagctgaacttgtcatggctagctagtgttaaatagtagtgttaagtgagtggctgcaaaaaaaggttgtctttttttgttgtatagaaaagggatcagtggcctgtctgatctgtttgtagtaatcttatagtgatgtattttcaagtgttgatgaatgctgaaaatgttggtcttctgctggtgattctttgttcaagatgtagttatttggctcacaggtcgttgtggtgacaagacaagaactaggaactaaaaatgtcgtgctctagcactgag

SEQ ID NO: 88149 - DNA, 519 bp, Zea Mays
atggcgttcgctcggccctgcccttctccagccgcgcctgctctggctcatctgcgcgcaccgcacccagttctctacgcacgcgccgccgtcaagttccacgtgtcccgagctcctccagccgcacgccgtgctctctacttcttcctgcgttgcgcgcgagctcggcatcctcctctgctcgccgaggccccttctctgcgcgctctcaggccagccaaggtctcgccagccacagctccgctcggcgttcctactgctcccaggttgacgcacgccccgacactactcttcactggattcgcccagcgccatctcctggccatggatgtcgtcgtcctccagtcccgtggacgcgtgcccctctaccccaacatcggtagcgtccctgggcttgtgtttgtcgacctattcactcctctcccatggtcgaccaacctcgccgatgttgctctttggttgtcgcctctaggcctaaccgatgatttccctcggcccaagccttgcccacgcgcctag

SEQ ID NO: 88150 - DNA, 100 bp, Zea Mays
cggcgtccgcggataggtgagcgtgtgggtgttcaaaatatatattgtgatcgacaccgttttagtattcgtgtggtgatttacgtctttcctgtgttca

SEQ ID NO: 88151 - DNA, 147 bp, Zea Mays
atgaaccatcgatatcccactcttgaggggaggtggtgccagctcttgggatggttttgtcacttcagtgttcaaactagggtcttcgatgtgcaacttcagcacctgacggtaaacatttgtttctcaggtggattgagcaagtaa

SEQ ID NO: 88152 - DNA, 765 bp, Zea Mays
cagtcttattttttttcccattgcaatatttatatacagtatgacaattgcacaacacttaagttttattccctactattaaccaaagttcaaatgggaagtcagaaactaatttgagactagctagaacgtgccctcttctcctacatcttttatgcaatttcacctgacatgattgatcgttgctcacagatgatgaagaagaggcacaagattgagcgggacctgagtatcggtgaggaagtgggatggtcaaagaatcagcaggtggctaaatccaaccccacccttgctgcaatgaacaagaagtttgggatgatccacgggctgtcatcactggccaacatcatgtcgtttggtagcttggccatgcactcctggtacctggccagcaagctggagctgtgaagaggagccaagacgtcttccatctccgcgttcttgtgaattttatcactatggtggtaatggtgcacgtcaggttgtcagatcgctagactaaactgtacgattgcgctattggcttcacaagataataaattgtactcctagttaaaaaaagaaatcctgtgttgcatggagctcccaaactagttattcaaaatcagaataattcagccaacaacgtggtatttgttgatctttcttcggtggaaaatgcatggtcctctttggaacagagatctgcaaaacacgaaaataggggaaaatgtaaggtaccttcaagaatagtcaatgtgctagcttatatgaaagagaccatta

SEQ ID NO: 88153 - DNA, 893 bp, Zea Mays
aactatcccctccgtttgataaaaaacatttgcatttgtgtacgaaccatcctcgaatccaacgtcctctcctctccgtacttcctccgcagctacccccatcacattcccaaaccctccgtcgacccctcctcctcgatctacaccggcgatcggcggcgagtgatggggtgggcgacgcggttcctggcggcggtgtgcttctttgctgcgggtgtcctcttcgtccccgaggctctccttggttccccctccggcgcaggcgccgtcaccgctgccaagctggcccacgtcctctcctttgccacttcctggggcgccgccctctgggccacctttatcggcggcatcatcatgttcaagaacctgccgaggcacatgttcggcaacttgcagagcaagatgttcccggcctacttcacgcttatctctgcctgcgcagccatctcggtcgccaccttctcgcacctccacccgtggaagacggcgtccaccgtggagcgctaccagcttggattcctcctatcagcgctcggttgcaatctctccaacctgctagtcttcacccccatgacaattgaggtgagcctaattactcttaggctttggtctcttttcactgaggagcgaattttatgagcacctaggatttgttatgacagtagagggttcatggtttgtagacttgacatgaccataaaaatgtggatcggttagtaaataatcatcactaatttttagctgcaattgtacaaaattgagcaatgctttagagatcaaacctgattagtgctgtgctataactgtaaggtgaatgtaatagcttgtagttaatttgactaacaatggtgctttctagtttgttgcacccagttatgctgattgatttcttg

SEQ ID NO: 88154 - DNA, 789 bp, Zea Mays
tttttaactcaaatgacaaatataccttgtgaaatcatttgatgttattttctgcagcttaaaacatatacctttagcataaatatgccttgtataatatggttgctattgctatgattcacaatagtttacgaaaatggtttctcaagcattgtggttgaatagctttcgacattaaaagccaagggtattttaattcagatgtcctttttaatatcctggtgaaaaatactgttataattattcctctaatcaataaatatacttcacaattgatactacagcccaagttaagtgttaaatgacagatgttggcatcacattatcacaatgtctcacacaacaaggtgagtcaatgttattaatttggtatagcttgccagaaatagtacaaatgctaaaagaattcagaatttgtgatgactatggtatgattgcaggaatcaagtttctaaataagtcactgatcactccttatcttaacttgtaggaaattgagtaatgctttatctggtgtgcaatttattagagaatagaaatagcagccgctgtgtcatgactgtcatcgttgaaagttggatgcaaaatctgtgcatagtcaatggactaataataggtttgtttagtttaactgctcatgtaaatttgatagatttcttataagttcatggtagtgacctagttgctggaaggtgatagatcaggacattgggttctttttgtttctggtcttgttgagtcttaaaaggtgtttcatgctaatctactataaagctgacattgccggtc

SEQ ID NO: 88155 - DNA, 2636 bp, Zea Mays
ttcccgcccaaagcctcctctttattcccttcttcccgccatcccccgaacacttcgccgcccccctcccgcctcccgctgttctctgcctcccacccccacgccgccgtcccatcaccgccgctgggatgaagaaccctgacttcgccgcagacaaagcgctcgccaaggacttcctgtccaatttcaccggccctcacggcgagcccaagtacctgaacatcctgcaagatgtcgcgaacaggaagatacgcgcggtccagatcgagctggacgacctattccactataaggatgtcgacgaggagttcttgcagcgtgtcaccgagaacacgcggcgctacatcggcatcttcgcggaggccatggacgagatcatgccggagcccacagaggcgtacaccgtcgacgaggaccaggacatcctgatgacgcagcgtgtggatgagggggccgacggcggcgcggacggcacggacccgctacagaaaatgccaccagagatcaaacggttctttgaggtttacatcaaggcattctcaaaggtgactccactcaccattcggcaagtgaaggcatccaacattggtcagcttgtgaaaatatctgggattgttactcgctgctcggatgtgaagcccttgatgcaggttgctgtttatacatgtgaagaatgtggcttcgagatataccaggaagtgactgctagagtgtttatgcccctcattgaatgtccatctcaacgatgcaagctgaacaaagcgaagggaaatctaatccttcaactgcgtgcgtcaaagtttttgaaatttcaggaggtaaagcttcaagagttagcagagcacgtaccaaagggccacattcctcgtgctctgactgttcatctaagaggagagctgactagaaaggttgcacctggagatgtggttgagatgtcgggtatttttctccctatgccatactacgggtttagagcgatgcgcgcaggattagttgctgatacttacttggaagcaatgtctgtcacccacttcaagaaaaaatatgaggagtatgatctaaaaggtgatgaacaagaacaaattgaccgattggctgaggacggtgatatctacagtaagctggcaaggtccttggcacctgaaatatttggccatgaagatgtcaaaaaggcactgctgttactacttgttggtgcaccccatcggaagctcgcagatggcatgaagatcagaggagacctgcatatatgcatgatgggagatcctggtgttgcaaagagtcaacttctgaagcatattatcaatgttgcaccaagaggagtgtacaccactggacgtgggagcagtggtgttggacttaccgctgcagtccagaaagatccagtaacaaatgagtttgtcctcgaaggtggagcactggtactggcagatatgggcatttgtgctatagatgagtttgacaagatggaagagtcagacaggacagcgattcatgaggtaatggagcagcaaacagttagcattgccaaggctggcatcaccacctctcttaatgcgagaactgcaattctggctgctgcaaatccagcatggggaaggtatgatatgaggagaaccccagcagaaaatataaatctacctccagctcttctgtctcgtttcgacctcctttggttaatcctggatcgtgcagacatggaaactgatcttgaaatggcaagacacgttgttcatgtgcatcaaaatcttgaatcaccagcgctggggttcacaccacttgagccatctgtactcagagcatacatatctgctgctagaagagtcattccttctgttcctagagagctcgaggaatacattgcaactgcatattccagcatccgccaagaggaggcgaagtcaaatgcaccaacctcctacacaactatcagaacacttttgagcatactccgtatctctattgccttggcaagactgaggttctcagaaactgtggctcagagcgatgtcgacgaagcactgcgactgatgcaaatgtccaagtactcattatactcagatgaccgccagcggtctggccttgatgcaatatctgacatatattccatcctgagagacgaagctgctaggacgagcagcatggatgtgagatacgctcacgctcttaacttgatctccagaaagggatacagcgaggctcaattgaaggaatgcttggaggaatacgcttccctgaatgtgtggcagatccatccaagcacatttgacatccacttcattgatgcctgatgcagaagccgatgccgatcacctaacatttcatcatgatccaaggatttgaagaccttcgactgaagcctaacaagatttaaaagttttctagtgatagtgaacgacagcccatttcttgatggcaatgatgtaatgctgagaagcctatctcaattgcactagtagaaacaatctcaattgtactagaagaaccattcttgtatgacttgtgagtagcttgtttttatatttgctgacatttttccacacttgatagtgaagtagatgtaacttgcgtgtttcttgtttgcttgttataaatcaatacgacacaaagtagatcaaatatagagaatatacata

SEQ ID NO: 88156 - DNA, 1558 bp, Zea Mays
cccctctgtgcgagtttaccgaaacgacctcggcccggcattaaataagcctcccaggctcacctgatcccctcccccttccctctcttccgcctccgattgagtggctcaccttctttcccagccagcacgagcttgcaagcaagcgagctcctgagatttcagctcgcttctcctccagaggtcgagcagaccagactcctccgaccgaagctctaccacttcccagttagcctgtccaggaactgcttggccggagatccaaacaaacctctgtgttggggttctccggggttccttgcgctggagggaggtttcgttctcgctggccatggtttggctgagaagcagcagcggcagcatcttgatgccaaatctctgagctttatgaagatcgccactcacctgcgccgctcctgcttcctccactccttctcggttgtcttcctctactggttttatgtgatctcataacttgccctcccccggatccgccattcccccgtgccctctctccgtcccctcaaccttctccctcctttcttgcttccctcaacaatcgccaaataacagcactagcggcagcggtagaggatcttttcgaggtaagctaggccggccggttccctgcgggaaaaagaaaagaaaaggaccctgtcttgatgtcgtcgtcgtcgctgtctccgacggcggggaggacgtccgggtcggacggcgactcggcggcggacacgcacaggcgcgagaagcgccggctgtccaaccgcgagtcggcgcggcggtctcggctccggaagcagcagcacctggacgagctggtgcaggaggtggcgcgcctgcaggccgacaacgcgcgcgtgggggcccgcgccgccgacatcgcgtcccagtacacccgcgtcgagcaggagaacaccgtgctccgggcccgcgccgccgagctcggcgaccgcctccgctccgtcaacgaggtgctccgcctcgtcgaggagttcagcggcgtcgccatggacatccaggaggagatgccggcggacgacccgctgctgcgtccctggcagctgccctacccggctgccgccatgcccatcggcgccccgcacatgctccactactgatgattgcctccaccaaccacaccaccatacatctgaggctgtcagctggggctggttggcaacaagacaagaagaattggctgcctctcaacaacattcacatctactacctacctggctgctttgagaattacagggcctctactatctgctgctgtgttaaatctacctcctggtttctccaataattgtcgctgttctgtactcttctcttctcttatgttctgtctgtcagtgtgtatgagatgatgctcatcttatgttataaggcttaatcatgtgtctagttgtactttctgtcttgtaatgttatcagttatatgaataataagtgttatgtaagctcctatagtcaagcgtttattcagatctggtgatgtttcatttcttgtatatggttaacatcagctagaaagtaactccatgaaaacatttttgtc

SEQ ID NO: 88157 - DNA, 489 bp, Zea Mays
cttattcaccacaaaacaccaattaacaattccagcagaaatatggatacgagaaacaattccagcattggtttcaaacattgcttcttcgaccaaaagttatatgtacaccaggtacccttcacctaacctggcactcacttccaaaaaacgtagccatcaatcatatatccaaacaaagccacaaaatgctgcaaagcaaattagttggacaaatttccttatcacccaacaaagaatcaaggtaacagtatcaatatcctagcatctgcaatagcgagggctgaaactatccactacctaacaagcatacatcaaaccagacagacaataatatatcagaatcacaggcttcatcattgacttatcatctaccaaacaacaataacaacaaagcattttatcccgagcaatatgaggtaggctagagttaaaaaaaccaatagaaaccacaagtcatggttcaggcacatggatagctagtttcta

SEQ ID NO: 88158 - DNA, 450 bp, Zea Mays
cacatctctcctctctgtcccgaccgagcaacagcggccaagcactcaagtgttccgcgctcggcactttggcttcgggattcctgacctagcgcagccgccaccacagcgctgcccctgtcgcgatagctctgcgtcgccgctcaacggaggccgacgaggtgacgagaagcggaggccgagcagtcgcacttgcaggtccagtcctgctggtccgcagtccacagttcgccctctaccctctgctctgggatctgcagtaccgtctgcttcggcctcagcactgccatccgcttcagcctctgcactaccgtccaagtcaagtcgctgtatcaccttagcccatggacgctccccatgccttgacggcttgacctccgatggagaggaagcaagttgtactgctgtaccagttcactgtatttgtagactacactacgccatgctttg

SEQ ID NO: 88159 - DNA, 82 bp, Zea Mays
gttgcacatcatattggagttttattggtgcactaaacttgaacttaaatttagaacagatttgaattcaaaattgaattga

SEQ ID NO: 88160 - DNA, 3045 bp, Zea Mays
atggcgacgcacttcacgccgtcgcaggcgcacgcggcgtcgcaccacgcggcgcaccaccactcggcggccgccgcggcggcggtcacggccacggccaccgcgcgactgcacccgtccgcgccgccggcctcggcgtcggccgcggccgcggcgctgtgcccgccacacctcctcgcggcggcttccccggccgcctcctcctccgcggcgtgccagcccgcccacaggcctatcttcgttggccacggcgcgccgtgggcgcagcagccccagcgcaccgcggcggcggccgccgcgctcggtccggagtttcggcgcgcgcgcaccaccaagaccatctccaagcgcacccgtggcggcggcggcggagggggcgcacaggaccgcgggcgcgtgtcctcagccgccgcgggtcgctgtgtcgagaagctgctccgcgtcgcgcctgaagataggcgagggcttggttcggccctctcgtcgtttcggggcgagctacttggtcctgaggactactgccagatcctccgggggctcggcgacagggataaatctgcacttcgtgcattcgaggtgttctatgccgcactacccttagttgggggtggtgctgttgacaagggaaaacttctgactgccgccattggtgcacttggcaagatgggccggccagacctcgcgaggagggcttttgatactggcattgcagggagctatggcaatacggtgtttgcgcactctgcgcttatctcagcttatgccaggagtgggcttgcaactgaggccatgggggtgcttgagtcgatgaaaggtgcaggattgcggcctaccacggtatcatacaatgcagtgattgatgcatgtggaaaagggggtgttgaccttaggttcacacttggatatttccgtcagatgctgcaggatgggctctgtccggaccgtaaaacatttaactcacttcttgctgcatgtagccgggctgggcatttggaagatgctcgcactgtctttgatgaaatgatccatcttggtagtgggcgtgacatttacacttacaacacattcgtcgatgctatttgcaagtgtggcaacatggggctggctctgcaagttgtattggatatggaagcaaacaatgccaagccaaatgtcgttacatatagtacgcttatggatggattctccaaactggagaaatatgatgaggcactcaagttgcgtgaaaagatgaagtctttgagaatacaactggaccgagtttgctacaacaccttactggccatatatgtgaagacagggaaatatgatgaaattgctactgtatgtgaagaaatggagaaattgggcattgagaaggacactgttacttacaattccttgattaatggatatggaaagcaaggacgcttggacatggtcgctttccttgttcaagatatgcgggcgcaaggcgtagctcctagtgtgctgacatactcaactttgatagatatctattcgaaggcaggaatgcatggagatgcatttaatgtctatttggattttaaggagtctggtctaaaggcagatgttgttctgttcagctcttttattgatactttggccaagaatggcttggttgagtgtgctttgtctttgcttgatgagatgatgaagatgggtatcaagccaaatgttgtaacctacaacacaatcattgatgcatttggcaagtcgaagatttttactgaggaggattctgatattggtgacatgggaattgttggggtttatggtggccaggttgtaagggtcactaatccagtgataagaggagggcgctctgccactgatgttaggatgaggaggtcacaggaactatttttcattctggaattgtttcagaagatggtccagcagggtgtacggccaaatgttgtaacattttctgcgatcctgaatgcttgcagtcgctgtaatagttttgaagatgcagcccttttactggaacagcttcgcttatttgataactctgtctatggggttgcgtatgggcttttgatgggccatcgagaagcttggtctcaagcacggtccctctttaatcagctgggccgcatggattctccaacatcttctgccttttacaatgctcttaccgatgtgctatggcatttcggccagaggcaaggagctcagcaagttgtgcttgaaggggtaaaccgccgtgtttgggagaacacatggggtgacttctgcttggacctgcacctcatgtcatgtggtgcagctcaagcaatggtgcatgcatggctcctgaacgtgcgctctattgtttttgaaggtcgagctatgcctgagtttttaagcattctgacaggctggggaaagcatagcaaggtagctggatcaagcaccctccgtcgagtcattgaagcgctgctcctttcaattggagcgccgtttcaggccgagcgcttcaacatcgggaggtttgtgtcacccagtgccttggtgtctgcctggctgagagagtccggcaccattaacatcctcctcctccgcaacgagcgaacgcaacatgcaaacgcgtccaatctggtaccgaggttacaggcgttgcagttatagccccttgatctcatctccttgtccctggtagggttggttcagttctgtcacaagcttcgctctgtttttttttatattcatcttcattgagaagattgtagagtaccataggctgagggaatagctcgcttgttgaatcccagtgttttagtccggtttagccatgaatgtaaaaatgttgtaaaattgtcagcctgccttacaactccttccatcaaggcaaaacgagtgcaatttctatttcttcacgaaaggagctccacggctggaaacctcagacccgtgcctcgcttccttaactgcaaagccctcgtgctcctctttcggtttgtttgatgaaagctacacctggccattactgctttctccctttttggctcgtgatgcctttgctgctttgaggagatgccagctctgccgaagatggagaga

SEQ ID NO: 88161 - DNA, 332 bp, Zea Mays
acatcatgcttaggatcatactctaacggactctaaattttatactataaaatttaagaattaaatcatattaggatcatactctctttctatttatttttaaagttagcttaattaaaggctcaaacgaatgcatatggacatgactagatgttttggtcaaaagtatgcacttctaaagtataaaatttatttaaatcaagtagacacctaaaaatagaactaccagactctagttgtatctttttacgttctcttcgtttgaagtataataattatatctttatatacatatttaccatttttatccaaaatttatattttgagacggg

SEQ ID NO: 88162 - DNA, 1013 bp, Zea Mays
tgccattattattactactattgtattttattcaatctccatctggatgcgtgtgtgtgaccggtgagcgagacagattccacagcaatttgctcctcttccacgcacaggcaagactgctccccagaaaagattgtagttttcatcgatttagccggtttctgcccggggggatcgctgctggagatctcagagaaccgggaggctccgagcttttgctccgtttgcgtcgaatctgcctcgggagcggagaaaggagcggccttccgagctcgtaggggccgtccctgagaaggcgagaggggacgcggcggcggcggagtcagctctagggcgctcgtggaagtcggtgatgccggtggtttgaggacgaggcggcctcggtggttttgaggaagccagcctctgccgcggcaaggatggactccagcggggaggaactcctgaagaagatccgggaactggaggttgggcaggcgcagctcaagcaggagatgtctaagctaatacccggcgctggggagcgtcggcgctcgcaatccgtctcgccgcggcgcggcgtgccggtgccgccgccaccgccggccaaggcgaaggcgggggcgccaggtaggcggctgtccggggggtttgagggcgggcagcgcgcgtgggcccgtgggtcggcgtctttcccgcactcatcaccgctgcagcgggagggccgcgcaggcgctggagacgctagcaccagcgctaggctgccggagaggcagtactccagggtgcttcagtcaatggggcagtccgtccacattcttgacctcgacgggaggatcatatactggttagatttctggtgcttcactgtgtttttttttatttgcttgcctgcagagcttgacaaatattcgaaggaatgcagtagtggtcttgctggtttgatatgttgattatattctagtgcctgcaatggagtaagtcttgtgtaattgaagctcttgcaatagcaatccttgacccttgagcaattc

SEQ ID NO: 88163 - DNA, 3128 bp, Zea Mays
tttattcaatctccatctggatgcgtgtgtgtgaccggtgagcgagacagattccacagcaatttgctcctcttccacgcacaggcaagactgctccccagaaaagattgtagttttcatcgatttagccggtttctgcccggggggatcgctgctggagatctcagagaaccgggaggctccgagcttttgctccgtttgcgtcgaatctgcctcgggagcggagaaaggagcggccttccgagctcgtaggggccgtccctgagaaggcgagaggggacgcggcggcggcggagtcagctctagggcgctcgtggaagtcggtgatgccggtggtttgaggacgaggcggcctcggtggttttgaggaagccagcctctgccgcggcaaggatggactccagcggggaggaactcctgaagaagatccgggaactggaggttgggcaggcgcagctcaagcaggagatgtctaagctaatacccggcgctggggagcgtcggcgctcgcaatccgtctcgccgcggcgcggcgtgccggtgccgccgccaccgccggccaaggcgaaggcgggggcgccaggtaggcggctgtccggggggtttgagggcgggcagcgcgcgtgggcccgtgggtcggcgtctttcccgcactcatcaccgctgcagcgggagggccgcgcaggcgctggagacgctagcaccagcgctaggctgccggagaggcagtactccagggtgcttcagtcaatggggcagtccgtccacattcttgacctcgacgggaggatcatatactggaatcagtctgcggagaatctgtttggctatcctgcatcagaagcccttggtcaggatgccctcatgcttctggttgattcccatgaccacaatgcggtaaataacatcttccaacgtatttctatgggtgaaagttggactgggaagtttccagttaagaacaagcaaggacatagattttcagctgttgccaccaatacacctttctatgatgaagatggcagtttgatgggtttcatttgtgtttcaagtgattcccgccaattggagcagatattttgtaagcctccgacctctgcaaggtcccagtcagaatcatctatgacatcttgtgatgggagttgcagcaacactagtcacagaatcaattcgttgaatagaagttcttttgattctaatctacccctgcaaagcactttagcatccaagataacgaatttggctaccaaggtcacaaataaagttcgttctcgggtcaggacagacgagaatgacgatggtggcagtggtgagagccattgcttggatcgtggtgcaaaggaagagccaacatctagcggaacaagcacaccaagaggggatgcaccacatggtccctttgctacagaagagaactcacctgggaaatcaacgaacccaaacagcgacgaatcagaaggaaaagtaggtctgcacaagattttgggttctaaggcagaggcactattgaacaagaaagggatatcatggccttggaaagggcgcgagaatgagggacctgatgaaagaaaccatgtgatattgccgtggttgcatggtggccaagagaatggtgtgaatcatcagaaggtttctgattctagtatatctccagacgcccaaggcgctgaacacaaccaacctagcaaaaatgaggcatcaggttcctggtcctctttcaacaataacagcacaggcagtgcaagcagcacgggaagcactaatagcagtgctctctacaaagtagatcatgaagcagattgtctggattatgagatcctgtgggaagaccttgtcattggagaacaaataggtcaaggctcttgtgggacagtatatcatgctttgtggtatggttcggatgtggctgttaaagttttctccaagcaagaatattcagaagaagtgatactgacctttcgacaagaggtatcccttatgaagaaattgcgccatcctaacatactgctcttcatgggtgcggttatgtctccacaacgcctttgtattgtatcagagtttctcccccgtggaagcttgtttcgcttacttcaaaggagcgctaccaagttggatgtgagacggcgtgtccacatggctttagatattgtaaggggcatgaattatcttcaccattccagcccgcctatcattcatcgagatttaaaatcatctaaccttttggtcgacaagaactggattgtgaaggtggcagactttggtctttcacgtctcaagcgtgaaactttcttgacaacaaaaacaggaaaaggaacaccccaatggatggcgcccgaggtgttgcgcaatgaaccttccgatgagaagtctgatgtgtacagttacggggttatcctgtgggaacttgttactcagaagataccctgggaaaatctgaactcaatgcaggtcattggtgcagtgggttttatgaaccaaaggttggatatcccaagtgaagtagatcctcagtggaaatcaattatcctgagctgctgggaaagcgacccgcagcaacggccgtcgttccaggagcttcttgagaggctccgggagctgcagaggcactacgccatccagcaccggaacacaaagaacagcatcgaggagtaaagaacacaatgcgacctctcagagcggcttgcttcgaagcattttgcgagcgaacgaacgaagaaccccaggtctctagaagggcctggaccctcctgtactgtatggttttgcttctgcggaacagccaaggctggaagaagtttgttgtacagacgggggtacgttcttctttgtttgacagggcaattgtgactgtaatctctgggtcctgacacccaagggtagggtagagactatagagtgagtagtgactgagctccggattgctggcgcatttgggttcttctgattcgtggcaatgcaaatgcgtggttaacaataacatccaatccggggcttgtgtttctggaaaagggcatgatgatgtgtagattgtttgctctgacaagagtggtgcgtacatgtgatcggttgtgatcatgcgtgattgtgagtttaatcgatgtagtaaaatcttaatattctaaaatgcc

SEQ ID NO: 88164 - DNA, 111 bp, Zea Mays
aattttattttactcctcacatgtttttcatgtcaacaattactcaaacatttctttatcacacaggcctactaatattctactcgatacattaattcagctaattaaccg

SEQ ID NO: 88165 - DNA, 579 bp, Zea Mays
gggttcgaaacgccgacaggagtgatctgaaaggatcaacaaatttgggtaggggagaattctgccctcagaaccaaaattattgcagctttgcatgattcgtcattgggtggtcattctggaatcactgctacttaccacagaattaaaaagttgttctgttggtcagtcctaaaagctgatgtggaattatttgtgaaacaatgtgcggtttgtcagcaggccaaaagtcccaagcagtatccttctgggttacttcacccattgcctgtgccagcaggagcttggcaagacttaactatggatttcattgagaagttaccccggtcagaaggatatgatacgattttggtggtggtagatcgattcaccaagtatgctcacttctttcccttaaagcaccctttcactgctcagggagtggcccaaatcatggtagattcagtcatcaagctgcatggggtgcccaaaacagtggtatctgataggaacaagatttttacgagtgctttttggaaacatttgttcaagctcttggatattaagcttgctttaagcacagcctatcaccctcagaca

SEQ ID NO: 88166 - DNA, 84 bp, Zea Mays
gattcgccgtgtaccgggcgagatcctcccgtgttgaggtataccatcttgtaccccgtcatatgaatacttctttcaacaatg

SEQ ID NO: 88167 - DNA, 1277 bp, Zea Mays
aatacatgcgtaacacgtcggacgtgtgcaaaataattaaagaaaatcaaaattgaagttggttaaagttagttatatggaaatggttttttaatgagtagagggatatataggggaaagtatagggggaacggttgcaggacgagtgaatataggggatggaatcttgctgacgtgacgtggctgcatagtaacatttagggggaaaaatttagggtgaacggttgcggacagtctaaaccgctgctctttgggcttgactctgcccgctcctctccatctccacttggtccctctcgcatggcggcggcggcatcggcgtcgacgccgcagggggtggcggagcggcggggcatcccggcggcggccttcgtcgaggacgtcgaggcctacctccggcaggccgggcttgacgttaactccgccctcgccttcctccaggaaaggttgcaacagtacaaaatagtggagatgaagcttctagcacaacaacgagaccttcaggcaaagattcctgatatagagaagtgtttggatattgtttcaacattacaagctaaaaatgatttgggtgaggcacttatagctgattttgaattatccgaggggatatactcctgtgcgaaaatcgaggatactgactcagtgtgcctgtggttgggtgcaaatgtgatgctggagtactcttgcgatgaggccaatgccctcttgaagaaaaacttggaaaatgctaaggccagcttagaagtccttgttgctgatcttcagttcttgcgagaccagcaaaccatcactcaggttacaattgctcgggtattcaactgggatgtacaccaccggagaagcaaacaggctgtaaaggaaccttaatcagttagatcacgaggtcaaccaatgtgattgggacaaattttttcgtaccttttggtacctctggcagattagtccatcatagcgagctctttgtttgttgatggtttctttgctgtgtaacaatgtatcggtttattctctttaatggtgtgggaacattagtagaagatggaacattttactgcctttttccccactggatgtccactggatcacgtcgcaaaatattttttttttcatgattcatgcataattcctgctttccaaagggcttcctttatgtttactgcattacagtccaggagatagacggtccattgtcatgttgagcaaagatagaagaaaatcgacaacaggtgaggtgactcgtttttacatatgtagggctttactgcttgacactt

SEQ ID NO: 88168 - DNA, 909 bp, Zea Mays
atgcaattacgtaaacctgccacagcaatcctcgccctggcgctttccgcaggactggcacaggcagatgacgccgccccggcagcgggcagtactctggacaaaatcgccaaaaacggtgtgattgtcgtcggtcaccgtgaatcttcagtgcctttctcttattacgacaatcagcaaaaagtggtgggttactcgcaggattactccaacgccattgttgaagcagtgaaaaagaaactcaacaaaccggacttgcaggtaaaactgattccgattacctcacaaaaccgtattccactgctgcaaaacggcactttcgattttgaatgtggttctaccaccaacaacgtcgaacgccaaaaacaggcggctttctctgacactattttcgtggtcggtacgcgcctgttgaccaaaaagggtggcgatatcaaagattttgccaacctgaaagacaaagccgtagtcgtcacttccggcactacctctgaagttttgctcaacaaactgaatgaagagcaaaaaatgaatatgcgcatcatcagcgccaaagatcacggtgactctttccgcaccctggaaagcggtcgtgccgttgcctttatgatggatgacgctctgctggccggtgaacgtgcgaaagcgaagaaaccagacaactgggaaatcgtcggcaagccgcagtctcaggaggcctacggttgtatgttgcgtaaagatgatccgcagttcaaaaagctgatggatgacaccatcgctcaggtgcagacctccggtgaagcggaaaaatggtttgataagtggttcaaaaatccaattccgccgaaaaacctgaacatgaatttcgaactgtcagacgaaatgaaagcactgttcaaagaaccgaatgacaaggcactgaactaa

SEQ ID NO: 88169 - DNA, 995 bp, Zea Mays
gaagcgaacttgagccagagagagaatctcgcaccgcagcaggaggggaccgagagagaagcgaactcgagaaagggattcaaggaggctgttgccgatggccatggcggcgcggctgctgcgagcaaccgaggtggcatctcgatttctatctgcttcccatggtttcgtccagcgagctgcatacacagctggtgggatagtcgatgttggccaaccaacaccccagtctcatccagaggttgtacacaacccggtggagtagcagttttgagtgaagaaacagggttctgcatgttcatgccagatacaaataaggaggatttagtttggcaaggtgaaactgctggagttgaggctgctgtggatttctttaaagcagataaagcatttccacttagtcagatgcaaaagatccttcctgaactgattgagcaatcaaaaggggtgtatcacaatgtgaatacaacatcttcttataagaacttggatgcctttcgtagggcatcactcaacaataaagtaaaagatcttacaaattacactgatgaattacggtgggtcaagtcgaaatcagaaattaagttgatgagggaatcagcatctattgtttctcaggtattttgttaaatgtttacctttggcatccagccttaggtcatagagtattaatttctcagttcagccttgcatagagaattttctgagtctgtttgttgttccagttcctaatattagtctagcttgcttctgataaattattaggagctgtggttattctggatggggaagggtcaagatggtttttaatttcttaggtgaacttttggagttgatgtggggaaaaccattggtagagtaacagagactcaacactgaaggtacttcagctaattagataggtgggtgaacatgtagtcctttttggtttggtaaaaccaaaggtacactgtctaatgattatccataccacactgtcctgaacatatttcctg

SEQ ID NO: 88170 - DNA, 1847 bp, Zea Mays
gaagcgaacttgagccagagagagaatctcgcaccgcagcaggaggggaccgagagagaagcgaactcgagaaagggattcaaggaggctgttgccgatggccatggcggcgcggctgctgcgagcaaccgaggtggcatctcgatttctatctgcttcccatggtttcgtccagcgagctgcatacacagctggtgggatagtcgatgttggccaaccaacaccccagtctcatccagagttattagctgatggagagatcacaccaggcatcacaaacgaggaatacatctctagaagaaaaaaacttttagaggtgctaccagagaagagcttggccattattgcttctgctgatcagcagatgatgactgatgtagtgccatatccattcagacagaatggtgattacctgtatattacaggttgtacacaacccggtggagtagcagttttgagtgaagaaacagggttctgcatgttcatgccagatacaaataaggaggatttagtttggcaaggtgaaactgctggagttgaggctgctgtggatttctttaaagcagataaagcatttccacttagtcagatgcaaaagatccttcctgaactgattgagcaatcaaaaggggtgtatcacaatgtgaatacaacatcttcttataagaacttggatgcctttcgtagggcatcactcaacaataaagtaaaagatcttacaaattacactgatgaattacggtgggtcaagtcgaaatcagaaattaagttgatgagggaatcagcatctattgtttctcagtctcttttacaaacaatgttgatgtcgaggacccacagagaggaaagccagttggcagctaagattgaatacgagtgcaaaatgagaggtgcccaaagaatggcgttccatcccgtagttggtggaggagcaaatggcagcattatacattattcaagaaacgatagaaaaatcaggacaggtgatcttctgctcatggatgttggctgcgagtatcatggctaccttagcgatctgactcgaacatggccaccctgtggcaggttttcacctgctcaggaagagctgtacagcctaatactggagacaaataaggagtgcataaagctctgtaaacccggcacaagcattaacgagatacacaatcattcggtaaagctgttgataaagggattccaagaactgaggatcctggagaaggggaaatccatccaatacaactacttgaacccaaccgcaataggccactcgttaggcatggatattcatgactccatgacactccccaaggacaagcccttggagcctggcgtcgtaataacgatcgagcccggggtgtacatcccggcggccccggtcctgaacgagcgcgcgccgagcaggtaccgcggtatggggatccggatcgaggacgaggtcctcatcaccgacgacggccacgaggtgctgacggcgtcggtgcccaaggaggtctcgcacctgaccaccctgatgaacatgggcaggggcggctcggctgcggacgcccatggccatgagctgcgagccgcctgcagctagctgaggcggctgcgtgcgtgaggtcatgcccgtggcggcggccggacctagtagacctggcacgacgtcgtggagcagaatctacgtgctctgcgaatacccgttgcatccattgattggactgttgtaatcacgggaacagatagcgaattgggcaggtgtttttttaaggtaatgggaggtgttatattctggacccttaccatggcgcgtcattgtatttgcatgcgcagttgtgttgtggccgcattcagcttctttatat

SEQ ID NO: 88171 - DNA, 1663 bp, Zea Mays
gaagcgaacttgagccagagagagaatctcgcaccgcagcaggaggggaccgagagagaagcgaactcgagaaagggattcaaggaggctgttgccgatggccatggcggcgcggctgctgcgagcaaccgaggtggcatctcgatttctatctgcttcccatggtttcgtccagcgagctgcatacacagctggtgggatagtcgatgttggccaaccaacaccccagtctcatccagaggttgtacacaacccggtggagtagcagttttgagtgaagaaacagggttctgcatgttcatgccagatacaaataaggaggatttagtttggcaaggtgaaactgctggagttgaggctgctgtggatttctttaaagcagataaagcatttccacttagtcagatgcaaaagatccttcctgaactgattgagcaatcaaaaggggtgtatcacaatgtgaatacaacatcttcttataagaacttggatgcctttcgtagggcatcactcaacaataaagtaaaagatcttacaaattacactgatgaattacggtgggtcaagtcgaaatcagaaattaagttgatgagggaatcagcatctattgtttctcagtctcttttacaaacaatgttgatgtcgaggacccacagagaggaaagccagttggcagctaagattgaatacgagtgcaaaatgagaggtgcccaaagaatggcgttccatcccgtagttggtggaggagcaaatggcagcattatacattattcaagaaacgatagaaaaatcaggacaggtgatcttctgctcatggatgttggctgcgagtatcatggctaccttagcgatctgactcgaacatggccaccctgtggcaggttttcacctgctcaggaagagctgtacagcctaatactggagacaaataaggagtgcataaagctctgtaaacccggcacaagcattaacgagatacacaatcattcggtaaagctgttgataaagggattccaagaactgaggatcctggagaaggggaaatccatccaatacaactacttgaacccaaccgcaataggccactcgttaggcatggatattcatgactccatgacactccccaaggacaagcccttggagcctggcgtcgtaataacgatcgagcccggggtgtacatcccggcggccccggtcctgaacgagcgcgcgccgagcaggtaccgcggtatggggatccggatcgaggacgaggtcctcatcaccgacgacggccacgaggtgctgacggcgtcggtgcccaaggaggtctcgcacctgaccaccctgatgaacatgggcaggggcggctcggctgcggacgcccatggccatgagctgcgagccgcctgcagctagctgaggcggctgcgtgcgtgaggtcatgcccgtggcggcggccggacctagtagacctggcacgacgtcgtggagcagaatctacgtgctctgcgaatacccgttgcatccattgattggactgttgtaatcacgggaacagatagcgaattgggcaggtgtttttttaaggtaatgggaggtgttatattctggacccttaccatggcgcgtcattgtatttgcatgcgcagttgtgttgtggccgcattcagcttctttatat

SEQ ID NO: 88172 - DNA, 360 bp, Zea Mays
atgcggcggggcaggggaagatgcggctcctccaggagacgggcctctcccagcggcctgctcccgctgcgtgacatcatcgagtgcggctacgtcgaggagacgggcttcgtgtggctcaggcagccccgcaaggtggaccactacttctccaaggccggcaggcacgtcatgtacggcgccgaggtgtcggcggtcggcgacaagggccggctcaggaagatcacgggggtcaaggccaaggagatgctgctgtggatgacgctccacgagatctgcgtcgaggaactgcactgcaaggccatcgagggactgtccagtagcttccccgtcgaggccttcgatcgacgtggtgggtaa

SEQ ID NO: 88173 - DNA, 487 bp, Zea Mays
gatgaattggtacgtgcctgggaggaaggggtatggatgtatgaccgagctacgaagacaaacttcagaatgcatgtttggtaccagtactccatgcatgacttaccggcctatgggctattctgtgcctggtgtgttcacggtaagttcccatgcccagtttgcaaggaagctcggcggttcatttggttgaaaaagggtggcaaatattcgtccttcgataaacatcgacaatttcttcctgctgaccatccattcctcctagacatcaagaactttacgaaattttttttagtgacagaccacccacctgcaacgatgactggtgccaaaattcgtcaacagatagatgggctcttggccaatacagaaggtggttttgtgggatatggtgagcaacatatgtggacacataagtctggcttgactcggctcctgttgggggccttcggcttccgaaggtcctcaaaaacgtgatttgacaatg

SEQ ID NO: 88174 - DNA, 381 bp, Zea Mays
atggggactaggtggagtccaacgacattgcgcaggggcttggcgtgggacgtggagctcgctgcgcacgatgtcactgcagcagtccagcaacagggaagaaacccgctgttttctggcgcgttaattgccgatgtggaggaagtcgagggcgcgatggagctcaccatggatctcggtgttcggctgtcgtgctggccatgtggagcagagggagacacaggggccgacggccatggggagaagtggtcggtgcagggagcgtatatatactgcgcacaagccaaggggtgcggaggcagggaaatcaaatcccaacaacccggagcgatcccggcggaggcggacccgctggggctgctggtttggggaagaatctga

SEQ ID NO: 88175 - DNA, 140 bp, Zea Mays
attctgaagaattccagccagttgtgcctgttgtgaaagccgagccacttaaaaatcagtgggctcatgaagatgttgaagaagatgatgtaaaagaatcatgggaagaagaggaggaggaggaattgcacgcatgttag

SEQ ID NO: 88176 - DNA, 107 bp, Zea Mays
cacttggttattatatgtgttgttcttctttggcacacatatgagacgcacccgactttatgccttaaatccgggtgtgacagtttcctgtcttatggctagtaacg

SEQ ID NO: 88177 - DNA, 2989 bp, Zea Mays
cttgtgcctttttgctttccgtgtgctcagctcactcagcatccagcaagcctcccctggacagttcttgagcaatgcatatttttcagggtaacttttttgctttaaacgtttttttttttgtaccaagatttcttttgtgaattggcagcggtgcccctcctccgccactgcctatatatgtgccctcaaacccgctccattgctctgtagctcttccctctgctgctctctctgagcctggcccttgccctcctctccctccgggaaccagccctgctctctatgctcctcttccattcatagcctcggccttcgtcttcctccatggatccgcgctaaatgcattgcgaggttccaaactggtagcacttctccctgctccatctgccgcaagatgtaagcacggcctcacgccctcacttgacactccgactggccatccagaatataccttcagatcttcctgtctgcgaaaagcgacgcccttttggcccgggcaatggaggagagcttcgtgcccttgcggggcatcaaggacgacctccacgggaggctcgcctgctacaagcaggactggaccggagggttccgtgccggtatcaggatcctggcgcctaccacttacatattcttcgcgtccgcgataccggtgatatcgttcggggagcaattggagaggaacactgatggagtcctcacagcagtgcagacgttggcgtccactgccctgtgcggcataatccactccattgtaggagggcagcccctgctgatcctgggagttgccgaaccgacggtactcatgtacacattcatgttcaactttgccaaggacaggcccgacctcggacggaatctgttcctggcctggaccggttgggtttgtgtgtggactgctatcctgctcttcttgctggccatactaggcgcgtgctccatcatcaaccggttcacccgcatcgctggcgagctgttcgggcttctgattgctatgctcttcatgcagcaggctatcaagggacttgtcgacgagttccgcgttcctgagagggaaaacacaaaggcactagagtttgttccatcatggcggttcgccaatgggatgttcgcaattgtcttgtcgtttggccttttactcactgccctcaggagcaggaaggcacgatcatggcgctatgggacaggttggctgcgtggcttcatcgctgactatggtgttccactgatggtgctagtgtggactggagtgtcttacataccttatggaaatgtaccaaaaggaattccgcggcgcctttttagccctaatccatggtcccctggcgcatacgacaattggacagtcgtcaaggacatgacacaggttccactcctctatatccttggtgcattcataccagcaacgatgatcgctgttctctactacttcgatcacagcgttgcgtctcagcttgctcagcagaaagagttcaacttgaggaagcctccatccttccactacgatttgcttctcttaggtttcctgacgttaatgtgtggccttattggtatccctccatcaaatggtgtcattccacaatcacccatgcatacgaagagtttggctactctcaagcaccagatccttcgtaaccggctagtagccaccgcacggaagggcatgagccagaatgcaagcctgagccaactgtatggcagcatgcaggatgcttatcagcagatgcagacaccactggtttatcagcaacagtctgtcagaagaggcttaaatgagctcaaggactcaacagtccagctagcttcgagtatgggtaacattgatgcaccagttgatgagacagtctttgacatagagaaagaaattgatgatctgctgcccatcgaggtcaaggagcagcgtttgagcaaccttctacaggcttcgatggtggtgggctgtgtcgctgctatgcccctgctcaagaagatccctacgtctgtcctctggggctattttgccttcatggccattgagagcttgcctggtaaccagttttgggagaggatcttgctcctcttcactgctcccagcagaagatacaaggtgcttgaagagtaccacacgacgttcgtcgagacagtgccattcaagacaatagccatgttcacagtgttccagacagcttacctgttggtctgctttggaatcacatggattccaatagccggagttcttttccctctcatgatcatgctcctggttccagtcaggcagtacatcctccctaagctcttcaaaggtgcacatctaactgacctggatgcagctgaatacgaggaatcaccagctataccattcagccttgctgcgcaagacatcgatgtcgcattgggacgcagccagagtgcagaaatcctagacgacatggtcacgagaagccggggtgagatcaaacgcctgaacagcccgaagatcaccagctcaggtggcacgcctgtggcagaactgaaaggcatccgcagcccatccatttctgaaaaagcatacagccctcgtctcactgagctccagcatgagcgcagccctctgggagggagaagcaggcctaggacgccatccaagttgggtgaaggctcggcaccaaagtgaataaagcaatgatgcattgcttaagctatgcaactactgggttactggccatcaattatataagtgattttaaagtggtttcagtgttagtatccaagatgtcctctgatgagattactactattcatgtgtatctctagcctctttttctttctttctcttcttttgtgttctcctgattaaaggagtgctatacctgtaatctctgaactagcagaaatattagagtaactactcgaaaaatcctgtcgctaacatattatcattcttcgattgttttaatatgtacatgaaattggtgggaaattatgcgcatgcatttccattgaactcaagcatgcatccggattctggaat

SEQ ID NO: 88178 - DNA, 3794 bp, Zea Mays
cttgtgcctttttgctttccgtgtgctcagctcactcagcatccagcaagcctcccctggacagttcttgagcaatgcatatttttcagggtaacttttttgctttaaacgtttttttttttgtaccaagatttcttttgtgaattggcagcggtgcccctcctccgccactgcctatatatgtgccctcaaacccgctccattgctctgtagctcttccctctgctgctctctctgagcctggcccttgccctcctctccctccgggaaccagccctgctctctatgctcctcttccattcatagcctcggccttcgtcttcctccatggatccgcgctaaatgcattgcgaggttccaaactggtagcacttctccctgctccatctgccgcaagatgtaagcacggcctcacgccctcacttgacactccgactggccatccagaatataccttcagatcttcctgtctgcgaaaagcgacgcccttttggcccgggcaatggaggagagcttcgtgcccttgcggggcatcaaggacgacctccacgggaggctcgcctgctacaagcaggactggaccggagggttccgtgccggtatcaggatcctggcgcctaccacttacatattcttcgcgtccgcgataccggtgatatcgttcggggagcaattggagaggaacactgatggagtcctcacagcagtgcagacgttggcgtccactgccctgtgcggcataatccactccattgtaggagggcagcccctgctgatcctgggagttgccgaaccgacggtactcatgtacacattcatgttcaactttgccaaggacaggcccgacctcggacggaatctgttcctggcctggaccggttgggtttgtgtgtggactgctatcctgctcttcttgctggccatactaggcgcgtgctccatcatcaaccggttcacccgcatcgctggcgagctgttcgggcttctgattgctatgctcttcatgcagcaggctatcaagggacttgtcgacgagttccgcgttcctgagagggaaaacacaaaggcactagagtttgttccatcatggcggttcgccaatgggatgttcgcaattgtcttgtcgtttggccttttactcactgccctcaggagcaggaaggcacgatcatggcgctatgggacaggttggctgcgtggcttcatcgctgactatggtgttccactgatggtgctagtgtggactggagtgtcttacataccttatggaaatgtaccaaaaggaattccgcggcgcctttttagccctaatccatggtcccctggcgcatacgacaattggacagtcgtcaaggacatgacacaggttccactcctctatatccttggtgcattcataccagcaacgatgatcgctgttctctactacttcgatcacagcgttgcgtctcagcttgctcagcagaaagagttcaacttgaggaagcctccatccttccactacgatttgcttctcttaggtttcctgacgttaatgtgtggccttattggtatccctccatcaaatggtgtcattccacaatcacccatgcatacgaagagtttggctactctcaagcaccagatccttcgtaaccggctagtagccaccgcacggaagggcatgagccagaatgcaagcctgagccaactgtatggcagcatgcaggatgcttatcagcagatgcagacaccactggtttatcagcaacagtctgtcagaagaggcttaaatgagctcaaggactcaacagtccagctagcttcgagtatgggtaacattgatgcaccagttgatgagacagtctttgacatagagaaagaaattgatgatctgctgcccatcgaggtcaaggagcagcgtttgagcaaccttctacaggcttcgatggtggtgggctgtgtcgctgctatgcccctgctcaagaagatccctacgtctgtcctctggggctattttgccttcatggccattgagagcttgcctggtaaccagttttgggagaggatcttgctcctcttcactgctcccagcagaagatacaaggtgcttgaagagtaccacacgacgttcgtcgagacagtgccattcaagacaatagccatgttcacagtgttccagacagcttacctgttggtctgctttggaatcacatggattccaatagccggagttcttttccctctcatgatcatgctcctggttccagtcaggcagtacatcctccctaagctcttcaaaggtgcacatctaactgacctggatgcagctgaatacgaggaatcaccagctataccattcagccttgctgcgcaagacatcgatgtcgcattgggacgcagccagagtgcagaaatcctagacgacatggtcacgagaagccggggtgagatcaaacgcctgaacagcccgaagatcaccagctcaggtggcacgcctgtggcagaactgaaaggcatccgcagcccatccatttctgaaaaagcatacagccctcgtctcactgagctccagcatgagcgcagccctctgggagggagaagcaggcctaggacgccatccaagttgggtgaaggctcggcaccaaagtgaataaagcaatgatgcattgcttaagctatgcaactactgggttactggccatcaattatataagtgattttaaagtggtttcagtgttagtatccaagatgtcctctgatgagattactactattcatgtgtatctctagcctctttttctttctttctcttcttttgtgttctcctgattaaaggagtgctatacctgtaatctctgaactagcagaaatattagagtaactactcgaaaaatcctgtcgctaacatattatcattcttcgattgttttaatatgtacatgaaattggtgggaaattatgcgcatgcatttccattgaactcaagcatgcatccggattctggaatactctagtgcttattctattgacgttggtgctggagcatggaatcattttttgcttcaaaaatgtatactgaacgtgtgattcaataaccaattcagtgaactgaaagttcagaaacggattcagaaaaacaaggataaggtcagaaatgactgattcagacatgatgctaaaagttcccaacatcataaaagtttttgacttgagagttgcgcatgcgaaaaacaaggataaggtcagaaatgactgattcagatagaaagatgattgcacagggagataccaatcgtgtggagtcttccactctacgtatctgcaagaggaattccatgctgactccggcagtaatttgctaggcaccaccacaagctgtaagacatggtatgattgtataggagacctgcatggccaaatggttcttctcaatgtcatgaatgccaagtacatctgctgaatacagccttgaaatcgtacttgctcatgctactatagagggaaaggctccttgtggtgggaacaactgcaacacatgcctgcagtaggtagaaagtgtagaaacttgagggtggcacccaagcacagcacagctacaatccatccttctctctactgcagccatgattccagctttagaagaaaccccctgcattggccctgaagcgttgacctgctgaagccaacatgtcatagccccaccatgaaattccctcaggatgcaggctcacctcattgcagcaggctaaacgacacgccccttgtcggcaattatggccgtccgtcttcctttcccggatcgacaattttcc

SEQ ID NO: 88179 - DNA, 1724 bp, Zea Mays
accaagatttcttttgtgaattggcagcggtgcccctcctccgccactgcctatatatgtgccctcaaacccgctccattgctctgtagctcttccctctgctgctctctctgagcctggcccttgccctcctctccctccgggaaccagccctgctctctatgctcctcttccattcatagcctcggccttcgtcttcctccatggatccgcgctaaatgcattgcgaggttccaaactggtagcacttctccctgctccatctgccgcaagatgtaagcacggcctcacgccctcacttgacactccgactggccatccagaatataccttcagatcttcctgtctgcgaaaagcgacgcccttttggcccgggcaatggaggagagcttcgtgcccttgcggggcatcaaggacgacctccacgggaggctcgcctgctacaagcaggactggaccggagggttccgtgccggtatcaggatcctggcgcctaccacttacatattcttcgcgtccgcgataccggtgatatcgttcggggagcaattggagaggaacactgatggagtcctcacagcagtgcagacgttggcgtccactgccctgtgcggcataatccactccattgtaggagggcagcccctgctgatcctgggagttgccgaaccgacggtactcatgtacacattcatgttcaactttgccaaggacaggcccgacctcggacggaatctgttcctggcctggaccggttgggtttgtgtgtggactgctatcctgctcttcttgctggccatactaggcgcgtgctccatcatcaaccggttcacccgcatcgctggcgagctgttcgggcttctgattgctatgctcttcatgcagcaggctatcaagggacttgtcgacgagttccgcgttcctgagagggaaaacacaaaggcactagagtttgttccatcatggcggttcgccaatgggatgttcgcaattgtcttgtcgtttggccttttactcactgccctcaggagcaggaaggcacgatcatggcgctatgggacaggttggctgcgtggcttcatcgctgactatggtgttccactgatggtgctagtgtggactggagtgtcttacataccttatggaaatgtaccaaaaggaattccgcggcgcctttttagccctaatccatggtcccctggcgcatacgacaattggacagtcgtcaaggacatgacacaggttccactcctctatatccttggtgcattcataccagcaacgatgatcgctgttctctactacttcgatcacagcgttgcgtctcagcttgctcagcagaaagagttcaacttgaggaagcctccatccttccactacgatttgcttctcttaggtttcctgacgttaatgtgtggccttattggtatccctccatcaaatggtgtcattccacaatcacccatgcatacgaagagtttggctactctcaagcaccagatccttcgtaaccggctagtagccaccgcacggaagggcatgagccagaatgcaagcctgagccaactgtatggcagcatgcaggatgcttatcagcagatgcagacaccactggtttatcagcaacagtctgtcagaagagtacatgttctattacccaaaacttagtacttcaaaacactttattcagacaatttgtttacataacattttctatacttttt

SEQ ID NO: 88180 - DNA, 4857 bp, Zea Mays
atggcctcgagtctgctcaccacggacaggagatggggtgctactcctgcaaggaaatctggtatgactgttctaggaaaagtcccaaaacctattaatttaccaagccagaggttggaaaacaatggtcttgatcccaatctagaactggttccaaagggcacccacacctggggcagcaaagcaccatccacaacaccaaatgcatggagttcctcgtcaattctgtctaccaagaacgatggaagttccagttcatctagccacttcaatggtcgaccgtcctctggcggaggctcaaggccatcaacagctggaagtgaaccacttggttcacccaatgcttggggtccaaattctcgcccatcttcagcatcaggcacatttccatcatctcatctaccaatggccacaaatcgtccccgaagtgcggaaacaagacccggaagttcacaactttctcgatttgcggataatgcttcagataatgtgaaagcgtcgataaggactattgatagaccggggtcttcatcacatgggcctgggttcacactaagtactggtgatttcccaacacttggctctgaagcaaatagtcaacgaggccatagttcgaaagggcgcccaatttctagttcgggtaaagaggtgtcgcaaggtgaacaagtgaagagcctaacaactggaaatggtgaattaatttcacaatccaataatcaacctgttgatatcatgaagacagagcagcatgcacacactggaggtgctcctgtcctcgccacaaatgtgccaaatgaaggcctgcaaccgcggccatatccaccaaattttcctatgcctcatccgcagtttgattcatggcgtgcacctcctggtcacccccctgagggaatgtggcatagaggactagtgccaggtgggccatacagaccagttggcccccctggtagttttcctgtcgaaccatttggttattatggtcagttcccacccaactctgaagttgcagcaaggcagggcccagggcatggtggatatcaggctaaaaatggagatgtgtatcatcctacgcctcctaattcctatattatgaatcagcctgttattccagtcagaccagtttatcagggtccagtgccgtatgatgggtattatggccctcgagcacatttcaataatgccaatgttagagatcctcattttgttggaggtcctggaatattaaatcaattccctaatcagaatgacaggtttcaccctggacatcctcaaaacagaccaggcagacatgaaacagttccaagggagcagctggaatatgataaaatacatgtgtttcatcgaggaaaccctgggagtttgcatgataattctgatcgtctaggaggttcccgtgaatttgaaaggaatgcgcagccagcatcgccacttcttccacatcctgatggaaaccggactgatgtgaacatgaggacagatacaagggacacctttagtgaaagtgaaagaaccagggtacttacaaaatcggtgcctaatcagagaggttcggttggtacagaacatttgtctgtttatgacaatgcacattcccatcacagagaaactggcgatggcactctgcgcaagaaattcaaggaggatggttcagctgcactgcatcctgtaattaagaagaatgcagctttaatagagaaaattgagagtttgaacaacaaagccagaaatgttgatgcacgtaatctcccagaatcagcttcgtccaaggaattcaataagcataaaaaaagcactgatgtttcatctaatgatgtcatgggtatggcatgcaaatctgacccggcagtttctgtttcctgtgtttctcctgcggtgcagagactaccaaacgtgcccatcaagggtacaattcttggtccggcacatccacagttaactgaatttagcaaagctgaaaagcttggtgattcaattagcgatcatgtacataggaaaagtgattcttcaagaaacagttaccatggtccttctaaagataggccagctaataaattcggaagtcatggacggggagaaagttccacaactgatctgaggaataatatcgatcatggccaacaacctgagattgcttcgcagctgcaacctgcgattgtacctgatgatatgccagcttcactcgattatgagtctcagcgtgcaaaaatgaaggagttggctgcagaacgtgcaaaaaagttgaaagctgaggaagaggaacggataaagaaccaaaaagcaaaagcgctcgcaaagttggaagaattgaacaggcgatcatcagtacttcagaagaaatcaaatgatataaaagtagaaacttatgatgcacatgataagcaacatgctggacttgatgtgactgctaaacttgacacttcaactgaaccacatgatgttattgcgcctgataggcttactgatcttctgcctcctaatgatcccaatcatactatggttcatatacaggcccagtctacagcacaatcacatgctttagatggtggcaaagaccctgatgctcatgcaacctcgtctttggtcaagaacactcacagcaacatggagcctgttgtgcagaagagtatctcgcagttgcatgacatcactgtggtaaaggccaagcaagggtacaggaaaagacatgtgtcagaagagaaaatttctgatgagaaggcaagtgcttcaataaccactagaaatattacgaaaaatgttgatgttctcatcgacacagtgacggctgttgttgcaccacatgatgatccacctactcagaacaagaagggaacccgacatttgagaagtaagaaaaagttagatgatgctccagttacttctaaacatccacctgtggtgttgaatgagccgaatacagtgaaagtctctaccgagccaaagacacatactggtggtgttatcatcagcagctctattgttcccactgaaggtactattgtaactgttggaagtataactgttggtggaatttcacttaaacctatgaatcaggagcgggttaaatcaccagatggaacaaataatactgaaagtagccaaccaagacctcagcaaacgagaaaatctggaaagcatcagcatgttcttcggcctgttgagaagccacatgggaatgatggtatcttgtgtgcaccagttaagccaccagtgccgaatgagcactctgatggagccatgccgactgcagcagtagctgacctcactaaaccagtagggaaagccataaatgatggggagaatgtgacaagaacaaagagggctgaaatggaaagatacgttcctaagcctatgtccaaagaactgcaacaacaaaatccaagtgatgataaggaagcagttgataagcccagtggtgctaaatcacatcctgcagccgaacccaagaaaactagcaaagcacatgggggtaaatctaatccttcttggcgcaagaggaatccagatgaatcagctttggtggcaccaaattctgttgagcaagcagacgtctcttatgaatcaaaggaggttcagaacttcacctatcagaagcagcctgttgaacttggcaagcaagatacacagttaaaattcagtgtagatgctgctgctgaaaatagctcagctccagttcaaacagttccgctatctgtcggtggcgcaaaacaacatagtgcagctaacagacaaaggcgacagcatgttaaggctcaaagaaatgaagcaagtggctactcaaatgagagcaaaggtagcgagggcaagaatgatgttgtctatcaatcagcaacacccgtcatggattcgaactcatccaatcacaggaatgtgccaagatctgatgtgaaaaacagcggcgtagtttcacactctagagcctggaagccgaaaaccaattcccatcctcaggacagctcagacggcaagattgctgttgacgggcaagtggattcccatggtggtaggcttgagatgaatacgtccaaaggatctgatacaattacccatctagtgaccagtagtgaaccgacgaaaaggagtgatggcaaagaggtctcacacagcaaacatgagaacctggcacgggaagatggtaaccagaagggtgagactgaacaggagcaggctaatcctacactacgtcgccaaggccagcccaatgcaaggtaccacaggggaggtgggtcacacaggggaagggggggttatgacactgggaggccaaaccatgtcacaaatgtggagaggcggaagggtggcagccatcttgaataccagccagtcggaccccaaaacaaagctgcagacttccaacagagcctgggcatggaagaacgaaccgaggggcctcctgcttctggacaagcgttcaggcagcgtggacacaacagggggctacgcccagcaggccgctttgtccagcgaaaccctgcttctacgcctaccactaattctcaccaaaatgaataatcttccgcggctgccacatccactgagcttcaggaactcgcgcttgtggtggtgtttcacaacagataggtttggatgcgcggcaggtgtccttctacgactaaactctactggtggtgagcattaggatcctgtaatgataatagtctttgtcccaagggcacctggaccctgtgattgtgggaatttgcctttgttgggatgcaatgttggaacgtgtactaacagagttgttgtgtttgagaacttggtttaaatgttagcctgtgatgctaatgagaacagaaagtgttggtttttgcccaacttcctggcctcagtggataatatgctggcatcaccatagca

SEQ ID NO: 88181 - DNA, 777 bp, Zea Mays
gggtccatctttcttccccgcacctcctctcgtctcgcgtccaccgcccgcgcctagccctctcctcgcgtgcctctcgcctccggcgccccaggccgtgcttgcctgccgcgcccaccgccggtccgcgctcgcgcctacacggagcatcaggagttcaggcgcggcgaacagggggaagaagcagccaacctcgctcgctactcgctagcctagtcggcggtcgccatggggatcggctacgtagtgggcgttctcggcggcgccatcctcgcccacgccgcctacgccaccatccaaccgggcggtgctcaagatcacggaggaggagttctcgcggccgcccatggatgtgatgatggagttgctcctagggttggctttgtgcatgtgggcaggtcttgctgttccagcgaaatttctctcagtgctcccacattctgaggagaataggatcgtctcgttcccggctaacctggatttcatgatcttcaaccaccggggaagagcgctgccgtcagactcagacctgaagctcaagacatagacatgccgttccagaatccagatcttgttccttatttcccttgtaacctggaggaggttccaattttgtgcccgtttgtttaggggggaaagaacttttcctgaattcagatcacaagtagcttatctatgctgtaactcgataatttgtggcgtcttaatttctactatctgtatggaggtgattcaagcttttgttgtattccgagcagatcaatcctgtgattaatc

SEQ ID NO: 88182 - DNA, 827 bp, Zea Mays
gggtccatctttcttccccgcacctcctctcgtctcgcgtccaccgcccgcgcctagccctctcctcgcgtgcctctcgcctccggcgccccaggccgtgcttgcctgccgcgcccaccgccggtccgcgctcgcgcctacacggagcatcaggagttcaggcgcggcgaacagggggaagaagcagccaacctcgctcgctactcgctagcctagtcggcggtcgccatggggatcggctacgtagtgggcgttctcggcggcgccatcctcgcccacgccgcctacgccaccatccagtaccgggcggtgctcaagatcacggaggaggagttctcgcggccgcccatggatgtgatgatggagttgctcctagggttggctttgtgcatgtgggcaggtcttgctgttccagcgaaatttctctcagtgctcccacattctgaggagaataggatcgtctcgttcccggctaacctggatttcatgatcttcaaccaccggggaagagcgctgccgtcagactcagacctgaagctcaagacatagacatgccgttccagaatccagatcttgttccttatttcccttgtaacctggaggaggttccaattttgtgcccgtttgtttaggggggaaagaacttttcctgaattcagatcacaagtagcttatctatgctgtaactcgataatttgtggcgtcttaatttctactatctgtatggaggtgattcaagcttttgttgtattccgagcagatcaatcctgtgattaatcagtagcttttgttacccttgctgacgttccagttaacgaaaactaaga

SEQ ID NO: 88183 - DNA, 878 bp, Zea Mays
gggtccatctttcttccccgcacctcctctcgtctcgcgtccaccgcccgcgcctagccctctcctcgcgtgcctctcgcctccggcgccccaggccgtgcttgcctgccgcgcccaccgccggtccgcgctcgcgcctacacggagcatcaggagttcaggcgcggcgaacagggggaagaagcagccaacctcgctcgctactcgctagcctagtcggcggtcgccatggggatcggctacgtagtgggcgttctcggcggcgccatcctcgcccacgccgcctacgccaccatccagtaccgggcggtgctcaagatcacggaggaggagttctcgcggccgcccatggatgtgatgatggagttgctcctagggttggctttgtgcatgtgggcaggtcttgctgttccagcgaaatttctctcagtgctcccacattctgaggagaatagagttgaacctacaccaagctttttaatgggaattttggatcgtctcgttcccggctaacctggatttcatgatcttcaaccaccggggaagagcgctgccgtcagactcagacctgaagctcaagacatagacatgccgttccagaatccagatcttgttccttatttcccttgtaacctggaggaggttccaattttgtgcccgtttgtttaggggggaaagaacttttcctgaattcagatcacaagtagcttatctatgctgtaactcgataatttgtggcgtcttaatttctactatctgtatggaggtgattcaagcttttgttgtattccgagcagatcaatcctgtgattaatcagtagcttttgttacccttgctgacgttccagttaacgaaaactaagagcctgtttggttgg

SEQ ID NO: 88184 - DNA, 431 bp, Zea Mays
ggtgacagatgccaaaatgggtggaagtctcatgtctacaacggttgttatcaagaatgaccgagaaaagtgcaatatagatatcacaaaagactaaatcatgtccaggatcaatacttttgacaagctccacactattatcaatggtatgctagaaacaagtgactttggttaggcttggaacaagagcaagatattcgttgatagtgattctgcattattattactattcgcgtgatttatgttgcatgataaattgtaggggtaaaactagtctctaatctattgcacatgcaatgactcagcaatacacatgtgcatagcaaggcacatgtgtatgttggtgtgtacgagttgatgggtattgtgtacaagttgatgtggttacttccctccaaatatgtaaattatataattatccaaacttgata

SEQ ID NO: 88185 - DNA, 360 bp, Zea Mays
ggcgttcacatgggggactagtcctatgcgccgaagcatgcctctgttcctgtcatggctgcagtggcgaaggaacccgttgaggtgcttgtctccgacaagaggcgatgggagcacggcggcatggatgacttcgaccacgagtttgacaggtaccttgccttgctagctccgccccaccttctctctccacgcccaacctctctctccattcctttcgtattcactacttttgattcgccatggtctatgagcgaggctgttggttcgaatcgaggctatgaaggagggttttcgttcgtaattgtacctctattagccgcgatatttggtttatctacagtgataatttttatttgg

SEQ ID NO: 88186 - DNA, 5538 bp, Zea Mays
atgacgggctcgaaacccgcgcccgccgcctcgcagaaccctagcgcggtcccgcatcgtcgtcctcctcctcctcctcctcctcctcctccgccgccggtgacagcggttgcgagggtgcgcgaagaaggcgagctctcctccggcgccgacgacgacgagactctgcaaactcagctaggtgccgcatccattcttgggaagtttgtggaggctggatctcaagtgccatcggcaagtctcctcggtaaaggcagtaacaccttgattgtctcaaatgctctgaatcataaagcgtctgctccaagttacaagaagatcatgagggtgaatcaggggcaattcaaacctggcactaaccggaatctttcatggcagaagcctgtgtcaagtgataaccttctgataactttctcagatgatgatagtggggcagactctgggaagacagggcgagataaagttaggaaggctagctctcaaggtacacagagaacagggaacagtatgcaaactaggatcatgagagaggaagtatctcagcagaaaaaccttggttcaaaagtaggtcctgcacacttgcctgcttttccattcacacatagaaatgttggggccggcagggcatcaggtaatacctttttcaggaaagagctgcctgtccgccaagttaatcctctaaagtctaaacagaaagttcaaaatggggtaggagtacattctgaagatcataggttagaaatcttgcgccataagatagctgctaaagaaaatgaactaaaaggtcaaaaaagacctttgtccgctgttgctacaaagaatgcagatttttcttccaatcagccaaggctgccatctgaaaagataaggcttgaagcttccagcattggtgaatattcacgctttaatagtctgtctgaacatagtggaggaccaaataaaaggttgaagctcaatcagcagtacaaccaattttgtagtgacctgacaccattggcacctattggttctatatcaggaaaaaccaatgtgcaatcttcagaagtgacaaatcggtctgaaaatggaattactatgaaccttaatgttaatgaaacagatacaacagacacaacagaacttgcagatcaaatacaacaaggtggggcaactaagagcctacgtcaccacaaagattcaggaggtgctgagaaccatgttatgcttgagtcacatgatgggcttgcagcacaaccaccatttactgacacacaaactataccagaagatacaagtgcgttggcccctgtgacgtcagcccaagctaggcaacaggtactggctgttggtacttcacctgtgttagacggaacaccacaattgcaacctggaaaggagaatgacgaatgtttgaacagcagtggccagataggcgtagagacacagaacacaatattgttctctctacttgagatggaagaattacaagacaaggaattggaggatgctcaggagcatagacaaaaatgtgaagctgaagaaagagaagctcttagagcttatcgcaaagcacaaagagctttacttgaggcaaatgaaagatgtgcaattcttcgtagaaaaagggagatttgctcttcacaagtccatggtttaattgcagagaattcttctttggtgcagtctttgagtattcggaatcctgaagatggccttgcaatgccatcactgctcaattctcagattcatgcagttagtcagattcctgaaaatcagggtggtagacacaggctgtgtcctgaagaaccttctcagcagcaaattgataagcatgaagatgaagcacgtccacactattgtgataagcttgctgccagcacagctgatcccagctctgtgagtgctgtcaatgctgacagcatcctttcagattatatggaggatgatcttctgttcccgactagacaggcaagatcagaatgtgctctggatgttgagaatcaaatggaagaaactatacatgtatatgcagaggaaaacagacaagtttctggtgacggtggtgaggattatgaacttttagaagcttctttgaggtctagattggtggaaaggtttgggaagaaatcatgtttgaatggcaccattgatgaaggtactgaaggacttgctgttgggaaagtagctgcagaacatggcaagcagtctgcatatgttggacatcagttacaggaagcagagcagaatattatgacaactactcttgaaggtacaatggagctggaaaatgatggtgctgaaaaaactgttggcctctctaattcttgtagtggtccttcaatgggcaactgtgatcctgaggacaacatttcctctctcaaagagttatgcatgccattggttatggacagtcttatttttccttcttcagctccactaaatgctgctagacaaatcaagcgggcatttcctgggatttgcaaggagctttcagattacaaaaatgaccatctgaccagtgatgcagtgtctgaagttacaggaagtgtacaagatatgatacacgaccttgttggagaaaatatgaagatgctcccaactacccaaaatgataataatatggtgcacagtgtgattgatcccttctggcccttttgcatgtttgagcttcgaggaaaatgcaatgacgaagagtgccagtggcagcattttgagcatcatgattggagaaagctagagcttacaaaacactctatgatctctgtttcaggccagatcccttatggtttgtctcagtatattcttccagtgccagtgtatcgtgttggttcaaatcttattaaagctgatctgaacttgacacagtcagtgttggctagcagtttatggcaatattggcaaagggggttttgtgcttcttttcctttacctttatctgttcaaagagttcttccatcagatgcaccattctttcaggctggtgatggccggattgctgattttgataggaacagacaactactaaaatttcgaatgctggatagcaggaagaataagattgtacagggttctgttgatattgaattcttcttggaggcagcccttgatttatattgtggaaaagtaaacaagcctgacagaatcaaggctctttcatttctggcgcggtccattgaggctgatccaagtacagttatcctgtgggtgttttatctccatatttactatcaaaaggatgaaggacttggaaaagatgacatgttttctgatgcggtgcaacacaatgtttattcttatgaattatggcttatgtatataaatagtaggttacgcgttgatgatcgattggatgcttataacgatgctttgagcatgctctgccaaatgacagctgagactgacaaggatctacaagaaagaagtgctttcatactagacattttcttacagatgatttacttcctgtgcatgtctggaaatatagacaaggcagtttctaggattattggaattcttccaactgcaatgcctgataattctggtgacaagttgcttgctgatgtcatttcttgcttgaccatgtccgacagatgcatattttggatttcgtgcctatatgtcttaatttacaggaaccttccagaggaaattattgatcagctggagtttcagaaagctttacctcgtgctttaatatggccttctattgatcccagtgtagacaacagagataagattacagatcttctaaattttgctgcttgtaagatggctgaagatattagtgagtgtgttaaaaacggggatccatcttacctgatgttatcacaattcctcgctgttaaccacattagttgtctagcggccattggaggcttaaaatcttctgttgatatgctggtgacctacatgaaggagtacccaatgtgtcctcagattcttctgatctcagctcggttagacagaaagcatggtacatgtccaggtctgaaaagctttgatgagttgatcttgaattggcctaaagaggcacaaggaattcaatatatgtggaatcaatatgttgaacatgctctggccactgatgccgagttagctgagaaggtactgacttgctggtttgaagaacatggaaaggactgtgatatccaaagcaatgctgctatttgtatagaactgagcagtgaagaacctggaacatcatcacttgtttcacctcaggcagttggttctggtccatctatatcagaagatctcgtctttcggttactaaacctctcactgtataagatactggagaacaacctacaggaagcacaaatggctgcgagtaaagcattgaaattggctcatggggagtggtacgagcactgtataagagaacatgctgcaattcatgcactggagctggagaaatcatcatcttcgacagatgctcaaactcgggctacattcagtttaatcattggctaccttgctgatcattgcaacttgcccacgagggagctgctgtcacgaaggttttgccagaatattaagaagcataggcttaggcagcttatagatgatactattggttctgttcctgcagattcttctctgataaactctgtccttgaagtgtgctttggcccatccctccttccaaaaagcattagcgatgtgaagtacctggttgattttgttgaaacagtcatggaggctcttcctgcaaactatcgcctgggcttggctgttggtggattcgtagctaagcacttcacaggttatggcgcagcctccactgggaccaggttctgggcaagctctgttctgatcaatgccatctttcgagctgtacctgtcgcaccggaatcagtatggctagaaggtgcaggcctcctggagaaactgcatgccacagagattttgaagaggttctatcagcaggcggcatcggtctatcccttctccttcaagctgtggcacgcccatctgaattactgcaaagccagtgggagcaacactgagagcatcctggagagtgcgaggcagcgtggcatcgagctgaatctgacaccaacatagtgtgtcccttggatccaagctgcatgatgttttgccagtcggagatgttggtagtgttgtgttaactggagatggcgtgtagatatatcggtgatcatggtggtgtgagatcatttttgttctttaggtgcaggtttagtgggacatagtcgtcggtatcttacagcatgtgtttctgatggagtgatatggttagtaagcagtggtgaaggatacaggcatacgggcactggggcatataccatacttttggactagacgggctagagactgattttggagtccgttatgtttccattttccgttctcttggttttctctgtcgtcaatgtattataatcatgatgatgaatggatggagaaatgagatgagatttttttgagttcactcttgcagtttcggttattatatttttgtgctgtcttcgaatctgatttggtcgacggcatgtttggaagtaaagtattttaaaatcaggttttggaatacta

SEQ ID NO: 88187 - DNA, 618 bp, Zea Mays
cgagcaaaggcgcaacacgcgcgcgggcggtgaacgatatgcatccgctggcgctggtggaggcgctcgtcggggaacggcagcactgggcgccggcggtgcggcacgcggcggcgtgggcgggggcgctcgcgctcgcggtgtccgtcgcgtcgttcgcgccggaggcggccttcgtgtgggcgctggcgggaggcggccccgtggcggcgtgcgcggccgggacggtgcgcgtgccgctggacggcggaggggaccacgtctgcgtgccggcgcggatggccgggcggtccggcatcgacctgctcgtgccgccggcgttcgcggggctcgcggtgggcgcgtccgcctgcttcgtcagggctctcgccatcggccgccgccacgacgagtactagctagacgcgtttcttgcattggagctgaggcatgcattactgagttcttcctgtttgccaagcgtacaaaaatacacagcgtgctaccatgaaacttgtacataacacgccggttaattaattgtaaccttaccatggaaatgtgcttttatacgtatccccgtatgcaatatatatgaattatcacttatcaatacaatacaaattctttgcactgtca

SEQ ID NO: 88188 - DNA, 408 bp, Zea Mays
atggagcccaggttctcgtcctgcgacagcacggccgccaaggcgacggatgaggtgaggtacgcatctctggtgactggtggaagtggaacagcactagcgggcagcgggtgcacctaccgtgttgacagtgctttggaggttctgcgccgcatggtaggcgaggaagacgaagagaaaggcggagctcagcaggtgcacgtcgcgggacgcccccatcaccgaggcgggcgcgcggcgggagccggggccggcgaccaggggcgcggcctcctcgacgtcgccggcggccgacgcgagccctgcgtcggcgcccgccatggagaggcgttggggcgaacaggcgaaattgaggggacgagattgttaaatgcaatttatacgtactatgagtatatgacacgataa

SEQ ID NO: 88189 - DNA, 1316 bp, Zea Mays
tgttaaaaacaaaaaattcaggtttatgtaccggtgacagcgaccgcgacaggtcctctcccccggaccgcacccgctgtagccgccatgtcgtccgccgccgccacagcctttgccggagtctccgtcgccaccccgaacctcaccactccatttcgcggtcgcgtgcgccttccgctacgcggggtctccgctgccccacgccgcgccgtcgcttcgatggccgtgtccgcccccaggtccggcgccgccgcctcgttcctggagcgccgcgagtccgagcgcgctctccacttcgtcaagtaccagggcctcggcaatgacttcattatggtggacaacagggattcgtcggtgccgaaggtgacgccggaggaggccgcgaagctgtgcgaccgaaacttcggcattggtgccgacggcgtcatcttcgtcatgccaggggtcaatgatgccgactacaccatgaggatcttcaactctgacggcagcgagccagagatgtgtggtaatggagtccgttgctttgctcggtttataggcgaacttgaaaatctgcaggggacacatagcttcactattcatactggtgctgggaagatcattcctgaaatacaaagtgatgggcaggtaaaggttgatatgggagagcccatcctttctggagcagacatccccacaaaactggtagctaccaagaacaaagctgttatccaagctgagttggcagttgagggcttaacatggcatgtcacatgtgttagcatgggcaacccccactgtgtcacatttggggcaaacgagttaaagatcgacgatttaaaactcagcgaaattgggcctaaatttgagcatcatgaaatgtttcctgctcgcacaaacacagagtttgtacaggttttgtctcgctcacacctcaaaatgcgagtctgggaacgtggtgctggagcaactcttacctgtggtactggtgcttgtgcggtggttgttgcagctgttcttgagggtcgagctgagcggaaatgtgtagttgatttgcctggcgggccattggaaattgagtggagggaggatgacaatcatgtttacatgactggtcctgcagaggccgtcttttatggatctgttgttcactagatttatcttgatgcactgcagaatgaatgggcttactagtttgctggtatgaatgttgcctatttcctggaaatcgttgtcatctaaagtgcttctgacaaaagacagcatgggttattggttatgactcactgctaatttcacctgcaacaattaataaagtgtcacattctgtgctt

SEQ ID NO: 88190 - DNA, 1304 bp, Zea Mays
tgttaaaaacaaaaaattcaggtttatgtaccggtgacagcgaccgcgacaggtcctctcccccggaccgcacccgctgtagccgccatgtcgtccgccgccgccacagcctttgccggagtctccgtcgccaccccgaacctcaccactccatttcgcggtcgcgtgcgccttccgctacgcggggtctccgctgccccacgccgcgccgtcgcttcgatggccgtgtccgcccccaggtccggcgccgccgcctcgttcctggagcgccgcgagtccgagcgcgctctccacttcgtcaagtaccagggcctcggcaatgacttcattatggtggacaacagggattcgtcggtgccgaaggtgacgccggaggaggccgcgaagctgtgcgaccgaaacttcggcattggtgccgacggcgtcatcttcgtcatgccaggggtcaatgatgccgactacaccatgaggatcttcaactctgacggcagcgagccagagatgtgtggtaatggagtccgttgctttgctcggtttataggcgaacttgaaaatctgcaggggacacatagcttcactattcatactggtgctgggaagatcattcctgaaatacaaagtgatgggcaggtaaaggttgatatgggagagcccatcctttctggagcagacatccccacaaaactggtagctaccaagaacaaagctgttatccaagctgagttggcagttgagggcttaacatggcatgtcacatgtgttagcatgggcaacccccactgtgtcacatttggggcaaacgagttaaagaccttgcagatcgacgatttaaaactcagcgaaattgggcctaaatttgagcatcatgaaatgtttcctgctcgcacaaacacagagtttgtacaggttttgtctcgctcacacctcaaaatgcgagtctgggaacgtggtgctggagcaactcttacctgtggtactggtgcttgtgcggtggttgttgcagctgttcttgagggtcgagctgagcggaaatgtgtagttgatttgcctggcgggccattggaaattgagtggagggaggatgacaatcatgtttacatgactggtcctgcagaggccgtcttttatggatctgttgttcactagaatgaatgggcttactagtttgctggtatgaatgttgcctatttcctggaaatcgttgtcatctaaagtgcttctgacaaaagacagcatgggttattggttatgactcactgctaatttcacctgcaacaattaataaagtgtcacattctgtgctt

SEQ ID NO: 88191 - DNA, 1329 bp, Zea Mays
tgttaaaaacaaaaaattcaggtttatgtaccggtgacagcgaccgcgacaggtcctctcccccggaccgcacccgctgtagccgccatgtcgtccgccgccgccacagcctttgccggagtctccgtcgccaccccgaacctcaccactccatttcgcggtcgcgtgcgccttccgctacgcggggtctccgctgccccacgccgcgccgtcgcttcgatggccgtgtccgcccccaggtccggcgccgccgcctcgttcctggagcgccgcgagtccgagcgcgctctccacttcgtcaagtaccagggcctcggcaatgacttcattatggtggacaacagggattcgtcggtgccgaaggtgacgccggaggaggccgcgaagctgtgcgaccgaaacttcggcattggtgccgacggcgtcatcttcgtcatgccaggggtcaatgatgccgactacaccatgaggatcttcaactctgacggcagcgagccagagatgtgtggtaatggagtccgttgctttgctcggtttataggcgaacttgaaaatctgcaggggacacatagcttcactattcatactggtgctgggaagatcattcctgaaatacaaagtgatgggcaggtaaaggttgatatgggagagcccatcctttctggagcagacatccccacaaaactggtagctaccaagaacaaagctgttatccaagctgagttggcagttgagggcttaacatggcatgtcacatgtgttagcatgggcaacccccactgtgtcacatttggggcaaacgagttaaagaccttgcagatcgacgatttaaaactcagcgaaattgggcctaaatttgagcatcatgaaatgtttcctgctcgcacaaacacagagtttgtacaggttttgtctcgctcacacctcaaaatgcgagtctgggaacgtggtgctggagcaactcttacctgtggtactggtgcttgtgcggtggttgttgcagctgttcttgagggtcgagctgagcggaaatgtgtagttgatttgcctggcgggccattggaaattgagtggagggaggatgacaatcatgtttacatgactggtcctgcagaggccgtcttttatggatctgttgttcactagatttatcttgatgcactgcagaatgaatgggcttactagtttgctggtatgaatgttgcctatttcctggaaatcgttgtcatctaaagtgcttctgacaaaagacagcatgggttattggttatgactcactgctaatttcacctgcaacaattaataaagtgtcacattctgtgcttatat

SEQ ID NO: 88192 - DNA, 1634 bp, Zea Mays
tgttaaaaacaaaaaattcaggtttatgtaccggtgacagcgaccgcgacaggtcctctcccccggaccgcacccgctgtagccgccatgtcgtccgccgccgccacagcctttgccggagtctccgtcgccaccccgaacctcaccactccatttcgcggtcgcgtgcgccttccgctacgcggggtctccgctgccccacgccgcgccgtcgcttcgatggccgtgtccgcccccaggtccggcgccgccgcctcgttcctggagcgccgcgagtccgagcgcgctctccacttcgtcaagtaccagggcctcggcaatgacttcattatggtggacaacagggattcgtcggtgccgaaggtgacgccggaggaggccgcgaagctgtgcgaccgaaacttcggcattggtgccgacggcgtcatcttcgtcatgccaggggtcaatgatgccgactacaccatgaggatcttcaactctgacggcagcgagccagagatgtgtggtaatggagtccgttgctttgctcggtttataggcgaacttgaaaatctgcaggggacacatagcttcactattcatactggtgctgggaagatcattcctgaaatacaaagtgatgggcaggtaaaggttgatatgggagagcccatcctttctggagcagacatccccacaaaactggtagctaccaagaacaaagctgttatccaagctgagttggcagttgagggcttaacatggcatgtcacatgtgttagcatgggcaacccccactgtgtcacatttggggcaaacgagttaaagaccttgcagatcgacgatttaaaactcagcgaaattgggcctaaatttgagcatcatgaaatgtttcctgctcgcacaaacacagagtttgtacaggttttgtctcgctcacacctcaaaatgcgagtctgggaacgtggtgctggagcaactcttacctgtggtactggtgcttgtgcggtggttgttgcagctgttcttgagggtcgagctgagcggaaatgtgtagttgatttgcctggcgggccattggaaattgagtggagggaggatgacaatcatgtttacatgactggtcctgcagaggccgtcttttatggatctgttgttcactaggtactggggagtggggaccaagatagaagggttggctgccactcaaagcttgtgagattggttacaatatccatgaaactgaatgttctggtgccagtacactcgtttagatattttaaattatggttgcttgatttgggtagcagtagaggcttccttttgaagcattctagtgttgtccaccttttgtactcctttagtctgtcaggtttgaactacattgttagcatgtctttccaaccattttctgtttcttttctttgcaagttaacgtcaatgcagcttcagtattgttttctacagatttatcttgatgcactgcagaatgaatgggcttactagtttgctggtatgaatgttgcctatttcctggaaatcgttgtcatctaaagtgcttctgacaaaagacagcatgggttattggttatgactcactgctaatttcacctgcaacaattaataaagtgtcacattctgtgcttatataa

SEQ ID NO: 88193 - DNA, 741 bp, Zea Mays
agttcctccctgcgtcccgcggttcgagatccaagctcctcgcggcggccatcaggtagatatcgagctcaaatagtttatcaaaggctactcagatggcagcaaaggaggagatgaccacttattgatgctaaaattgaaagagtggccccgacccagtgtcttggaggcgtttctgttgtgccaaaggccagaatttattgttaactttcctcttgttgattttattcatcctagatggggtctcctaaaccttgctgccaagttacccccagatgccaacctgaattaggcatgaaactgctaattgcacatggaagtcaccaagaacttggtaaaggtgattcaatgacacatctaatgattaacatgtgcgatgtggttcacatgttaatgcaagcaactgaagtgcattaccaatgtcccaagagggtaagggtacagtctgatgtatctgaaaggattgctaatggaactagtgttcatgtaaatactcatactcctgttcaaaatttgaatctggatattgaagagcaatcacacaaacactcgatttcacacatcgaggagccaaacactaataattcagaaggatccctggctggtgctgtttgggatgtattccgcaggcaggatcttccaaagcttaatgaatatctagctgttcatcgggaagaatgtgcagctagatgtcaacaagtgtcttctgtaatgactcatttcttccctatgacaaattag

SEQ ID NO: 88194 - DNA, 1906 bp, Zea Mays
atagaattctgtgtgattagttagataaatacgcataggaaaaaaaagtttcacagcctattcatactatcccacgcgccgttcaggttacatggtcggagctttcggtcgattccaggtaccataaatggtgctgtgtagaaaaaaaaataagacactccaacgcttgtttgagaagcgttgtgatactggcacagtttctgtcagtggcaggattgacgacaatgtcgtcaaattcgttcaggtgagcaggttgaaagcagcggccactgcaggatcagtccaagtgagacggtcgcagtcagagttgggcggcagggaggggttaacgaagttgcgtgtcatcttcggcaacgacatggggagccaaagccaactcggggaacaggtggggagtgcgtgggatcctctagcgaacctacaagaaatatggagaaaggagaagtggtagaattcactctgcctttccattcccccatccgccatggcggcgccgccggagctcgttgacgacacgatcgccgagatctgcctccgccttcccccggacgagcccgcgcacctcgtccgtgccgccctggtctccaggcgctggcgccgcatcctctccggcggggccttcctccgccggtaccgcgcgttccacggggcaccccctctgctcggcttcgtcgacaacaccatcgggctccacggcgccacggcccctcgcttctcccccaccacctcatccggctcccctttccccaggcggacgttcgactgcatctgctgggaggccctcgactgccgccacggccgcgtcctcctcggcctcttcgccgagagggtcaacctcgtcgtgtgggaccccgtcaccggcgaccactgtgggctgcctgaccccggggtgctccccggttactacagcgcggcggtgctctgcgccgcgcgcggctgcgaccacctccactgccgcggcggcggcccgttccgcgtcgtcctggcgggcatggactacttctcaagggacgccggcgtgcgggcgcgcctctactgctcggaggccgctgcctgggtcgcctctgctcagctggcctccgattcccatgtcatgcggaagcccagcgcgctcgtcggagacaacgtctacttccagctcatggagggtgacgtgtttctgaggtacgacatgggcaggaaccgtctgtccaccttcgaccctccggcggcgcacgtcgacgaagggggcgtcgtgctcatgcccatgggcggtgacggctcgctggggcttgccggcgtcaggggatcaaggctttgcctgtggtcgacgagtgtcggcgcagaggggattggaggatgggttcgacgcggggacattgagcttatgacacggatcccctttatgccctatagcgaagcacatgtgattgcttctgcggagggcttgggtttcggtacaatcttcttggtctcaactgaggttggcctcttcgcggtcgacctcaaatcagggcaggagcgcaaactaagcgagcctgggaactacaacgacttcgctgtcttccccttcatgagcttctatactccagactgtacaagcggcaaggtaccgtcacccaggaggacacactaatcactgtaatactgaggcgaagaatggtattgcctggctcatctacagatccatcaagttgagtttgcaggtgctgtcatctttctgttgcaggaatgacgtctcgcaagaaacacaagccatgaagccaacatattggtcgcttatgctcctatgctctctagctgattcttagatgcataatgtatacgcagccttttttttgttctcgtaatatgtgtgttgtttggttcacatatttgtaatataataggtaacagataacgttaaattatgtttgtttaaatccaa

SEQ ID NO: 88195 - DNA, 758 bp, Zea Mays
cgagccgagctggctcgctcttttcacgagccagaaaaacaggctcggctcgggctcgttcggagcgtcgagccggtccgagccgagccgagctgctgcgagcccgagctagctcgtcgagctcgagctttttttccggccctagctacagctaaggccaggccactgggcctttcgtgttgggccatccgagactggaaagtggggcccacgaggcgtatcgatcaagcaccgtccactctcacatcaaaggcggaggtgagctccttcggctctgcgcctttgcagttgcggataacggggaggaggcggagcgaccaacggcacaggcaccatggcgatgcgagcagctacagcggcggcgacaggcttcttctctccatccaccgtccctccgaggcgcttctcgtccgttacaccgccggcgtcactctgcaccgcgcgctgcatccagcgtcaccgtctccgcgccttcccaagcttggaaatacctctagaggaactcaacccatccgtcgatctacttgtaggctccacccttctccctccccctgttcctgtcatattttatcttcctgttattgtttttaaataatcgttgccctacttatggacggattttgcatggttttcttggttgcaatctaatgcagaggagaactgcggaggccgttggcgatttcaggaaaacgccaatctatattgttggtatgcttgtcagcttcctttggaattttttttccaggggatagggggat

SEQ ID NO: 88196 - DNA, 1009 bp, Zea Mays
cgagccgagctggctcgctcttttcacgagccagaaaaacaggctcggctcgggctcgttcggagcgtcgagccggtccgagccgagccgagctgctgcgagcccgagctagctcgtcgagctcgagctttttttccggccctagctacagctaaggccaggccactgggcctttcgtgttgggccatccgagactggaaagtggggcccacgaggcgtatcgatcaagcaccgtccactctcacatcaaaggcggaggtgagctccttcggctctgcgcctttgcagttgcggataacggggaggaggcggagcgaccaacggcacaggcaccatggcgatgcgagcagctacagcggcggcgacaggcttcttctctccatccaccgtccctccgaggcgcttctcgtccgttacaccgccggcgtcactctgcaccgcgcgctgcatccagcgtcaccgtctccgcgccttcccaagcttggaaatacctctagaggaactcaacccatccgtcgatctacttaggagaactgcggaggccgttggcgatttcaggaaaacgccaatctatattgttggtacggattgcacagccaagcgcaacatcgccaagctgcttgcgaattccataatataccgctacctcagcagtgaggaactgcttgaggatgttcttggtggcaaggacgccctcagagccttcaaggaatctgatgagaagggttatcttgaagtcgaggtgctttccttctttctccctcatgtttttcttactagttttcttgctctaaatgttactgcccctgcattacctagcaccaattttccattttctgtctcgctgctagaccgaagggttaaagcagctcacgtccatgggtagccttgtactgtgctgtggagatggcgccgttatgaactcaaccaatctgtatgtatgaatgtatatccagtgtctattatttttttcatgcatgttaagttgttagttaagtctatcaatgct

SEQ ID NO: 88197 - DNA, 1488 bp, Zea Mays
cgagccgagctggctcgctcttttcacgagccagaaaaacaggctcggctcgggctcgttcggagcgtcgagccggtccgagccgagccgagctgctgcgagcccgagctagctcgtcgagctcgagctttttttccggccctagctacagctaaggccaggccactgggcctttcgtgttgggccatccgagactggaaagtggggcccacgaggcgtatcgatcaagcaccgtccactctcacatcaaaggcggaggtgagctccttcggctctgcgcctttgcagttgcggataacggggaggaggcggagcgaccaacggcacaggcaccatggcgatgcgagcagctacagcggcggcgacaggcttcttctctccatccaccgtccctccgaggcgcttctcgtccgttacaccgccggcgtcactctgcaccgcgcgctgcatccagcgtcaccgtctccgcgccttcccaagcttggaaatacctctagaggaactcaacccatccgtcgatctacttaggagaactgcggaggccgttggcgatttcaggaaaacgccaatctatattgttggtacggattgcacagccaagcgcaacatcgccaagctgcttgcgaattccataatataccgctacctcagcagtgaggaactgcttgaggatgttcttggtggcaaggacgccctcagagccttcaaggaatctgatgagaagggttatcttgaagtcgagaccgaagggttaaagcagctcacgtccatgggtagccttgtactgtgctgtggagatggcgccgttatgaactcaaccaatctagggctgctgaggcatggtgtctccatttggattgatgttcctcttgaaatggcagcaaatgacatgttgaagagcacgggaacacaagctactacagatccagactctttttctcaggcgatgagcaagctccgtcagcggtatgatgaactgaaagagcgctatggggtttctgatattactgtttcagtacaaaatgtggcttctcagcgggggtacagtagcattgacttggtgacgcttgaggacatggtccttgaaatcgtgaggcaaatcgagaagctgatccgtgcaaaggagatgatggaagctgcagggaagccattctaaacaagatacacatacacaatagttctgctccggcatacctattttctggccagttaccagacctccgatgcttcgctgttcaagaaaccgattgcagttgcctacggctcaaagcacaagcgcgtgaaatctaaggaactgaatctggttgttccactcgaatatgcttatattgtattgcaagatcacttgccaattgatagtgcaaaaaatgcattttgtagtttggattctctagtattgactttaatccatatgtattgaagtagattggagtgtaacttaaactaatttacacactaatttaccttaacatatgtggattaggatta

SEQ ID NO: 88198 - DNA, 1376 bp, Zea Mays
cgagccgagctggctcgctcttttcacgagccagaaaaacaggctcggctcgggctcgttcggagcgtcgagccggtccgagccgagccgagctgctgcgagcccgagctagctcgtcgagctcgagctttttttccggccctagctacagctaaggccaggccactgggcctttcgtgttgggccatccgagactggaaagtggggcccacgaggcgtatcgatcaagcaccgtccactctcacatcaaaggcggaggtgagctccttcggctctgcgcctttgcagttgcggataacggggaggaggcggagcgaccaacggcacaggcaccatggcgatgcgagcagctacagcggcggcgacaggcttcttctctccatccaccgtccctccgaggcgcttctcgtccgttacaccgccggcgtcactctgcaccgcgcgctgcatccagcgtcaccgtctccgcgccttcccaagcttggaaatacctctagaggaactcaacccatccgtcgatctacttaggagaactgcggaggccgttggcgatttcaggaaaacgccaatctatattgttggtacggattgcacagccaagcgcaacatcgccaagctgcttgcgaattccataatataccgctacctcagcagtgaggaactgcttgaggatgttcttggtggcaaggacgccctcagagccttcaaggaatctgatgagaagggttatcttgaagtcgagaccgaagggttaaagcagctcacgtccatgggtagccttgtactgtgctgtggagatggcgccgttatgaactcaaccaatctcaaatgacatgttgaagagcacgggaacacaagctactacagatccagactctttttctcaggcgatgagcaagctccgtcagcgatgtggcttctcagcgggggtacagtagcattgacttggtgacgcttgaggacatggtccttgaaatcgtgaggcaaatcgagaagctgatccgtgcaaaggagatgatggaagctgcagggaagccattctaaacaagatacacatacacaatagttctgctccggcatacctattttctggccagttaccagacctccgatgcttcgctgttcaagaaaccgattgcagttgcctacggctcaaagcacaagcgcgtgaaatctaaggaactgaatctggttgttccactcgaatatgcttatattgtattgcaagatcacttgccaattgatagtgcaaaaaatgcattttgtagtttggattctctagtattgactttaatccatatgtattgaagtagattggagtgtaacttaaactaatttacacactaatttaccttaacatatgtggattaggatta

SEQ ID NO: 88199 - DNA, 1501 bp, Zea Mays
cgagccgagctggctcgctcttttcacgagccagaaaaacaggctcggctcgggctcgttcggagcgtcgagccggtccgagccgagccgagctgctgcgagcccgagctagctcgtcgagctcgagctttttttccggccctagctacagctaaggccaggccactgggcctttcgtgttgggccatccgagactggaaagtggggcccacgaggcgtatcgatcaagcaccgtccactctcacatcaaaggcggaggtgagctccttcggctctgcgcctttgcagttgcggataacggggaggaggcggagcgaccaacggcacaggcaccatggcgatgcgagcagctacagcggcggcgacaggcttcttctctccatccaccgtccctccgaggcgcttctcgtccgttacaccgccggcgtcactctgcaccgcgcgctgcatccagcgtcaccgtctccgcgccttcccaagcttggaaatacctctagaggaactcaacccatccgtcgatctacttaggagaactgcggaggccgttggcgatttcaggaaaacgccaatctatattgttggtacggattgcacagccaagcgcaacatcgccaagctgcttgcgaattccataatataccgctacctcagcagtgaggaactgcttgaggatgttcttggtggcaaggacgccctcagagccttcaaggaatctgatgagaagggttatcttgaagtcgagaccgaagggttaaagcagctcacgtccatgggtagccttgtactgtgctgtggagatggcgccgttatgaactcaaccaatctcaaatgacatgttgaagagcacgggaacacaagctactacagatccagactctttttctcaggcgatgagcaagctccgtcagcggtatgatgaactgaaagagcgctatggggtttctgatattactgtttcagtacaaaatgtggcttctcagcgggggtacagtagcattgacttggtgacgcttgaggacatggtccttgaaatcgtgaggcaaatcgagaagctgatccgtgcaaaggagatgatggaagctgcagggaagccattctaaacaagatacacatacacaatagttctgctccggcatacctattttctggccagttaccagacctccgatgcttcgctgttcaagaaaccgattgcagttgcctacggctcaaagcacaagcgcgtgaaatctaaggaactgaatctggttgttccactcgaatatgcttatattgtattgcaagatcacttgccaattgatagtgcaaaaaatgcattttgtagtttggattctctagtattgactttaatccatatgtattgaagtagattggagtgtaacttaaactaatttacacactaatttaccttaacatatgtggattaggattaatactagagtgtccaaacaaagccttacgtgttaatctgccatggttgaattttgcaatggcagttttt

SEQ ID NO: 88200 - DNA, 1107 bp, Zea Mays
acgcgggcagacgaggcgagacggctgcgtggtgggccccacgtgcagcctcacgagccgcgtcatgtccccagatggggcttcgggcttcggctattacctggcgcggagaggagagggagtgagtcgagatccattcccaactgcacctgcgcgcctcgactggtagcccgaaccctagctagcaggtcggaggcgagagagcagccatggcgcggtgcctcgcgctcgtctccctccttctcctcggcctcgcctccgccgcctccgctgccgatgcgccctttgtcgtcgcgcacaagaaggtttcgctctcccgccccaagccgggcgtcgagcgcgtcgccgtctccctcgacctctacaaccagggatccgcgactgcctatgatgtgtcacttaatgacgactcttggccaacacaagcatttgagcttgtcactggagagaaatcgaagacattggaaaggcttgaccctggtgccactgctacacacacatatgtcctggagaccaaaacacagggcaggttccagggttcaccagctattattacgtaccgtgttcccacaaagactgctcttcaggcctactcaactcccatcttcccactggatattctcgctgagagacttcctgagaagaagtttgaatgggtaaaggcttgtggcgaaatatgggtcacttgtgtctgttgtctcatttgttggattgtttatctacctcgttgcgagcccgtcgaagagcagctcaaaaggaagcaagaagagacgttgatctacttatagttcggcgcagttgaagttgtagctggtggtttttgcctggaggaactcttggtagtttgagctgagcgaaagctttaaattttacatttactcaccacaccatgaactgcaacgaagtgagcatctgttagaaaagtggaccagtaattttggttggttatttatttcctgtttctctgtcagactcttaactcggaggacctgtaactaggaaagttacttttgcttgaaagaacattttggtatggttggtgttcctgtgcttcgtgtcgtgcgtgggtctgtgaatttgagagcaaccatttggtgggacgcttcc

SEQ ID NO: 88201 - DNA, 680 bp, Zea Mays
acgcgggcagacgaggcgagacggctgcgtggtgggccccacgtgcagcctcacgagccgcgtcatgtccccagatggggcttcgggcttcggctattacctggcgcggagaggagagggagtgagtcgagatccattcccaactgcacctgcgcgcctcgactggtagcccgaaccctagctagcaggtcggaggcgagagagcagccatggcgcggtgcctcgcgctcgtctccctccttctcctcggcctcgcctccgccgcctccgctgccgatgcgccctttgtcgtcgcgcacaagaaggtttcgctctcccgccccaagccgggcgtcgagcgcgtcgccgtctccctcgacctctacaaccagggatccgcgactgcctatgatgtgtcacttaatgacgactcttggccaacacaagcatttgagcttgtcactggagagaaatcgaagacattggaaaggcttgaccctggtgccactgctacacacacatatgtcctggagaccaaaacacagggcaggttccagggttcaccagctattattacgtaccgtgttcccacaaagactgctcttcaggcactggagtttctaatggtaatgatcaaggagctcctgctatctcatggttgtcatttcgacctctacaagtctacatcaccaaatcaaagc

SEQ ID NO: 88202 - DNA, 1027 bp, Zea Mays
cgggcttcggctattacctggcgcggagaggagagggagtgagtcgagatccattcccaactgcacctgcgcgcctcgactggtagcccgaaccctagctagcaggtcggaggcgagagagcagccatggcgcggtgcctcgcgctcgtctccctccttctcctcggcctcgcctccgccgcctccgctgccgatgcgccctttgtcgtcgcgcacaagaaggtttcgctctcccgccccaagccgggcgtcgagcgcgtcgccgtctccctcgacctctacaaccagggatccgcgactgcctatgatgtgtcacttaatgacgactcttggccaacacaagcatttgagcttgtcactggagagaaatcgaagacattggaaaggcttgaccctggtgccactgctacacacacatatgtcctggagaccaaaacacagggcaggttccagggttcaccagctattattacgtaccgtgttcccacaaagactgctcttcaggaggcctactcaactcccatcttcccactggatattctcgctgagagacttcctgagaagaagtttgaatgggtaaaggcttgtggcgaaatatgggtcacttgtgtctgttgtctcatttgttggattgtttatctacctcgttgcgagcccgtcgaagagcagctcaaaaggaagcaagaagagacgttgatctacttatagttcggcgcagttgaagttgtagctggtggtttttgcctggaggaactcttggtagtttgagctgagcgaaagctttaaattttacatttactcaccacaccatgaactgcaacgaagtgagcatctgttagaaaagtggaccagtaattttggttggttatttatttcctgtttctctgtcagactcttaactcggaggacctgtaactaggaaagttacttttgcttgaaagaacattttggtatggttggtgttcctgtgcttcgtgtcgtgcgtgggtctgtgaatttgagagcaaccatttggtgggacgcttcc

SEQ ID NO: 88203 - DNA, 672 bp, Zea Mays
cggctattacctggcgcggagaggagagggagtgagtcgagatccattcccaactgcacctgcgcgcctcgactggtagcccgaaccctagctagcaggtcggaggcgagagagcagccatggcgcggtgcctcgcgctcgtctccctccttctcctcggcctcgcctccgccgcctccgctgccgatgcgccctttgtcgtcgcgcacaagaaggtttcgctctcccgccccaagccgggcgtcgagcgcgtcgccgtctccctcgacctctacaaccagggatccgcgactgcctatgatgtgtcacttaatgacgactcttggccaacacaagcatttgagcttgtcactggagagaaatcgaagacattggaaaggcttgaccctggtgccactgctacacacacatatgtcctggagaccaaaacacagggcaggttccagggttcaccagctattattacgtaccgtgttcccacaaagactgctcttcaggaggcctactcaactcccatcttcccactggatattctcgctgagagacttcctgagaagaagtttgaatgggctaaggtatttctgtttttccgtctacttttgtcaattttccttgtccatctaaataagctgctcaggtagatttaagcattcatttgacctggacactgac

SEQ ID NO: 88204 - DNA, 1022 bp, Zea Mays
cggctattacctggcgcggagaggagagggagtgagtcgagatccattcccaactgcacctgcgcgcctcgactggtagcccgaaccctagctagcaggtcggaggcgagagagcagccatggcgcggtgcctcgcgctcgtctccctccttctcctcggcctcgcctccgccgcctccgctgccgatgcgccctttgtcgtcgcgcacaagaaggtttcgctctcccgccccaagccgggcgtcgagcgcgtcgccgtctccctcgacctctacaaccagggatccgcgactgcctatgatgtgtcacttaatgacgactcttggccaacacaagcatttgagcttgtcactggagagaaatcgaagacattggaaaggcttgaccctggtgccactgctacacacacatatgtcctggagaccaaaacacagggcaggttccagggttcaccagctattattacgtaccgtgttcccacaaagactgctcttcaggaggcctactcaactcccatcttcccactggatattctcgctgagagacttcctgagaagaagtttgaatgggctaagaggcttgtggcgaaatatgggtcacttgtgtctgttgtctcatttgttggattgtttatctacctcgttgcgagcccgtcgaagagcagctcaaaaggaagcaagaagagacgttgatctacttatagttcggcgcagttgaagttgtagctggtggtttttgcctggaggaactcttggtagtttgagctgagcgaaagctttaaattttacatttactcaccacaccatgaactgcaacgaagtgagcatctgttagaaaagtggaccagtaattttggttggttatttatttcctgtttctctgtcagactcttaactcggaggacctgtaactaggaaagttacttttgcttgaaagaacattttggtatggttggtgttcctgtgcttcgtgtcgtgcgtgggtctgtgaatttgagagcaaccatttggtgggacgcttcc

SEQ ID NO: 88205 - DNA, 1419 bp, Zea Mays
cccatccctcctcccgcagcctctctgtctctcgctcattataatcacactgacacgacggtcccagcactcatcggacggtccaaaccagccgtgaacccatctccaccgtccgccctagggtaaccctcctcaaccccgatcattcactatatatataattctctctcttctcccacctccaaccctagccgcactgcgctcatttctgcatccccctcccgccgcgccgcctcaccgccgccggagaagatgggtcgcgtgatccgcgcgcagcgtaagggtgcggggtccgtgttcaagtcccacacccaccaccgcaagggccccgcccgcttccgctccctcgacttcggcgagcgcaacgggtacctcaagggcgtcgtcaccgacgtcatccacgaccccggccgtggcgcgccgctcgccaaggtcactttccgccacccattcaggtacaagcaccagaaggagctctttgtcgcagccgagggcatgtacacgggccagttcgtctactgcggtcgccgcgccaccctctccatcggcaacgtgctgcccctccgcgggatccctgagggtgccgtcgtctgcaacgtcgagcaccacgtcggtgaccgcggtgtcttcgccagggcctctggggactacgccattgtgatcagccacaaccctgacaacggcacatcgaggattaagctgccctctggcgccaagaagattgtccccagcagctgccgtgctatgattgggcaggttgctggtggaggcaggactgagaagccgatgctcaaggctggtaacgcgtaccacaagtaccgtgtgaagaggaacagctggcccaaggtgcgtggtgtggccatgaaccctgtggagcatccccacggaggaggtaaccaccaacacatcggtcacgcctctactgtccgccgagacgctccccctggccagaaggttggtctcattgccgctaggaggactggaaggctcaggggtcaagctgctgccacagcctccaaggctgacaaggccacctagagttattgtcgttgtttatctgtctactgtgctttagattgttaaaggacatgtgtttcagaacggatgtgttgttgcctcgtactatggtgaaacattgtctcagtttttgtggtcgctgtcaggattttgcattatgcctaaagatgtttactttggatatttttgtgttaaaatggtactgtattggatatgcctcccttgcttcgttttattttggcctttgtagaattgttgagcggttgtctctttgcgtgggatcgtgtaatttctgagttgctggaacgttggcaatacatggtttccgtcgaaacttcattagcgctgactgctgagagggcactgggcagtatggtgatgtctacaagagattagtttgac

SEQ ID NO: 88206 - DNA, 1775 bp, Zea Mays
ctgcgctcatttctgcatccccctcccgccgcgccgcctcaccgccgccggagaagatgggtcgcgtgatccgcgcgcagcgtaagggtgcggggtccgtgttcaagtcccacacccaccaccgcaagggccccgcccgcttccgctccctcgacttcggcgagcgcaacgggtacctcaagggcgtcgtcaccgacgtcatccacgaccccggccgtggcgcgccgctcgccaaggtcactttccgccacccattcaggtacaagcaccagaaggagctctttgtcgcagccgagggcatgtacacgggccagttcgtctactgcggtcgccgcgccaccctctccatcggcaacgtgctgcccctccgcgggatccctgagggtgccgtcgtctgcaacgtcgagcaccacgtcggtgaccgcggtgtcttcgccagggcctctggggactacgccattgtgatcagccacaaccctgacaacggcacatcgaggtctgaacacgatcacgaaccctcctatttcattgatttgtaatttcgtatgatgagatctggtgtagccgtggagtaattatatcactgaatatgatatgttatggatttatggcactattattgacaaatgatttagctctattgataagacttttacttatccgcgctagattttgtttttaaataatataaaatgggtcgatttgtgcagtactatggtagatatcatttgtttgatgttttttttggcatacgtgattcggttttacaatcatagaggttctagtttacttaaggtctttgcagtgaggtaaaatttttagtttttatgtagatatttatagctgatttgttgcaaggtgctgcagattatcaaataaacaccttacgtatgcatgttctgcaatggctacattgtatatgacgtgattattattgtgctgctttacacatctccatcatatatcctgatgacattgtaacctgtttctcatattgtgatgtcagtcggattattacattttacagctgaatataatttcagttggagtgtttttctgattgaataccttgtatgtatcctaatctgtctgcctactcttaatgccttgttgatgtcctaatgtagttgcctacttggatgtctttcatttatcagtgtatccaagtgaccttttgttatttgtctgcattcttaattctgttctgttctttcaggattaagctgccctctggcgccaagaagattgtccccagcagctgccgtgctatgattgggcaggttgctggtggaggcaggactgagaagccgatgctcaaggctggtaacgcgtaccacaagtaccgtgtgaagaggaacagctggcccaaggtgcgtggtgtggccatgaaccctgtggagcatccccacggaggaggtaaccaccaacacatcggtcacgcctctactgtccgccgagacgctccccctggccagaaggttggtctcattgccgctaggaggactggaaggctcaggggtcaagctgctgccacagcctccaaggctgacaaggccacctagagttattgtcgttgtttatctgtctactgtgctttagattgttaaaggacatgtgtttcagaacggatgtgttgttgcctcgtactatggtgaaacattgtctcagtttttgtggtcgctgtcaggattttgcattatgcctaaagatgtttactttggatatttttgtgttaaaatggtactgtattggatatgcctcccttgcttcgtttt

SEQ ID NO: 88207 - DNA, 741 bp, Zea Mays
atgggtcgcgtgatccgcgcgcagcgtaagggtgcggggtccgtgttcaagtcccacacccaccaccgcaagggccccgcccgcttccgctccctcgacttcggcgagcgcaacgggtacctcaagggcgtcgtcactttccgccacccattcaggtacaagcaccagaaggagctctttgtcgcagccgagggcatgtacacgggccagttcgtctactgcggtcgccgcgccaccctctccatcggcaacgtgctgcccctccgcgggatccctgagggtgccgtcgtctgcaacgtcgagcaccacgtcggtgaccgcggtgtcttcgccagggcctctggggactacgccattgtgatcagccacaaccctgacaacggcacatcgaggattaagctgccctctggcgccaagaagattgtccccagcagctgccgtgctatgattgggcaggttgctggtggaggcaggactgagaagccgatgctcaaggctggtaacgcgtaccacaagtaccgtgtgaagaggaacagctggcccaaggtgcgtggtgtggccatgaaccctgtggagcatccccacggaggaggtaaccaccaacacatcggtcacgcctctactgtccgccgagacgctccccctggccagaaggttggtctcattgccgctaggaggactggaaggctcaggggtcaagctgctgccacagcctccaaggctgacaaggccacctagagt

SEQ ID NO: 88208 - DNA, 423 bp, Zea Mays
atctgccaggcaaagatttctctttctgtttctcttcctcgtcgcgcatctcgggcgtatggttgaacccgcggcaccttcgctaactgcgactgcaccttgactcggcttcaaaagcgggccgaagaccctcctcgcttcttccctcgacctccctctcctagccgtgcgcgcaggctgagctaatccatgagagagatgaggaacagagaaggttgccgccgcgtgacagtatcacccaggtcgtcgccagggcccagattaatggtcagtgtgcatcgctggggccgtttgcacatgttagtggccttcccatgcggagacatcaacaggaccgcgacaaattgcttgccggacttggggaaatcaccgacgatcacaccatgccgtggccagccttgtgggtgcctttctcgcaggtag

SEQ ID NO: 88209 - DNA, 3753 bp, Zea Mays
tattatttgatttcctcgcctcgccctccctccactcctaccgcttccgccgccgcccgcctccacccctgccctccctccgccccacgcgcctgcgcatcgtcgatcggcgcccgggccgcgcgctccctccgcccttgcgcccccgtggactgaggcctcccgctccgctcaggccgtacgccgcggggtttgccactccgcgttcaacgacagtcaatatgtcgctcgatgttactcaagtactcttaagcgcgcaatctgctgatggcgcagtaaggaagcatgctgaagaaagcctcaagcagttccaggagcagaacctccctggattcttgctctctctctcaagtgagttggccaatgaagagaaacctgaggagagccgcaggttagctggcttgattcttaagaatgcactggatgcaaaggagcagcacaggaagaatgagcttttccagagatggctggcactggatgctggtgccaaagcacaaattaaaggattgctgctgcaaactctcacatctcctgttgcaagtgccagatccactgcttcccaagttattgccaaggttgccggtattgagattccgcagaagcaatggccagaacttataggatcattgcttgcaaacatacatcaggtccagccaaatgtcaagcaagcgacgcttgagacacttggctatttatgtgaggaagtttctccagatgctgttgaccaagaccaagtcaataaaatacttacagctgttgttcagggtatgaatgcttctgaggcaaactctgatgtcaggcttgcagctacacgggcattgtataatgctttgggctttgctcaggttaatttctcgaatgacatggagcgtgactatatcatgagagtagtttgtgaagcgacacagtctccagatgtgaagataaggcaggctgcttttgagtgtttggtggctatctcgtctacttattatgataagctggcaacatacatgcgggatatatttaatataactgcaaaagctgtgaagagagataaggagtcagttgcgctccaggctattgaattctggagttccatatgtgatgaggaaatcgacattctggatgagtacagcagtgaatttacagctgattctgatgttccttgctactactttatcaagcaggctcttcctgccttagtgccgatgttgttagaaactctcctcaagcaagaggaagaccaagacttggatgaaggtgcttggaatcttgcaatggctgggggaacttgtctgggcctggtggcaaggaccgttggtgatgacattgttcctctcgtaatgccttttgtggaggagaacataaccaagtctgagtggagacaaagagaggctgcaacatatgcctttggctctatcttggagggcccatcagctgataaactggctcctcttgttaatgttgcattgggcttcatgctgtccgcgctgatgaaggatccaagtaaccatgtgaaggacacaactgcttggacccttgggagaatctttgagtttcttcatggttcagcgcttgaaactcctcctatcattacggccgagaattgtcagcaaatacttactgtgttgcttcacagcatgaaggatgtcccaaatgtggctgaaaaggcctgtggagccctctattttcttgcacaaggctatgttgattctgggtctgcatcgccactatcccctttctttcaagatattgttcagaaccttcttatggtcactcacagggaggatgctggggaatctcggctacaaacagcagcatatgagaccctaaatgaagttgtcaggtgctccactgaggagacggctgctattgttatgcagttagtacctgtgatcatggtggaactccatcagacacttgaagctgaaaagttgtcaactgatgagagggagaagaggagcgaactgcagggcctcctttgtggttgcttgcaggtcattattcaaaagttgggagggatggagtcaactaagtactctttcttgcagtatgctgatcagatgatggaactgtttttgagagttttcgcatgtcgaaatgccacagtgcatgaggaggctatgcttgctattggtgcattggcatatgcagctggtccaaactttgcaaaatacatggcacagttttatcagtatttggagatgggtcttcagaactttgaggagtatcaggtgtgtgccattaccgtgggcgttgttggtgacctctgtagagcactggaagacaaaattttgcccttctgtgatggcatcatgactcaactcctgaaggacctgtccagtaaccagttgcacagatcagtgaaaccaccaatattttcgtgctttggtgatattgcactggcaattggggaaaactttgagaagtatttgatctatgcgatgcctatgctccaaagtgctgctgatttgtctgcccataccactgcaactgatgatgagatgctcgactacaccaatcagctaaggagtggaatcttggaagcctactctggtatcctgcaaggatttaagagttcacctaagacacaactactgatgtcatatgctccacatattattcagttccttgatgctctgtacaatggaaaggatatggatgatgctgtgatgaagactgcaataggtgtcttgggagatctggcagacacattgggtgtccatgctggccctttgatcaatcaatccacctcaacccaggcatttttagaggaatgcttggcatcagatgatcctttggtgaaagaatctgccgattgggcgaggatagcaatcagccgtgcagtttcgggttgatgccagagtcttgagtctgcacttgcattcatctacatatcatcatgcctgggtctttgattgcatcatgtccagacatgctcttgggagaaatccaacatttttacagcagagtctgagggtcctcactaactcatgcatcactacatgtgtcaacccgcccttcttgcttctgcgagaaaagagggttcaagctggccgtctgctaactttttctaaaggcatctgcaaccttcatttcttattggaggtgagatgtgagcttctattgtcgcatgacatgctgaccagtttccttggcatgtcaagcgtatgatctgtggcctatcatttccccttgcattcatctcatgcattgaacattggtcggatggtcacttgggacaacaggtccagttgcttgctgctgctccagtaagcaagagcgggctcaaacgcattgtcacaggattatttttgtatcgatcagggtggccaagtccatgctgatagtaggatgttaatttcctagcattcttttcctttcatccacttgcattgtctttgcatttcattcttggtcggattgttttgtaagagttattttagggcaaaactttgtcctgtctggtctgctaccgcacgctatttgtaagtcaagttcatgcgtgcattggtttatttacgggtgctattggagcagcgggtgtttgtgcttttttccatcttgtttttggtaatatacatacatgctgctccatttcggattatcaggagctgggcgggtgaagagacagttttataggtctttggagttgtttttgccggggcagaggcagttgagttggctgtgatatcttttgtgatttatgaagaaacaaagtgaattgagaataatatggtgaaatgtaaatggtcttcatttcacgcttgg

SEQ ID NO: 88210 - DNA, 1048 bp, Zea Mays
gccgccgcccgcctccacccctgccctccctccgccccacgcgcctgcgcatcgtcgatcggcgcccgggccgcgcgctccctccgcccttgcgcccccgtggactgaggcctcccgctccgctcaggccgtacgccgcggggtttgccactccgcgttcaacgacgccatggccggagccctcgtcttcgtcgctgttctcctcgccgcaagcgtcggcgctacgacggctaccacgctgaccatccacaacctctgcccccacccggtgtggccgctggtgaccccgagctcgggcttcccctccatctccaccaacaccgcgcggctgggccccaacgcgctgctctccctctccttcccgcccaccttctgggccggccgcgtcgccgcgcgcacgggctgcgacgccgccgcgtccggctgctggacggggaccacgccgcccgccaccgtcgtgcaggtcaccgtccacgacggcgggaacctggaccaggccacctacagcgtgtctctcgtcgacggcttcaacgtgcccatggtggtcagcccgcaggccgtcggcggcgggcagtgcccggcgctcgggtgccccatcaacctcaactgcgactgccctccccagaaccgcaccgccgagggcgccgcgtgccgcggcccgccggagtacttcaagaaccggtgcccgctcaccaggaccacgcccaccgacgtcgagcccgtgccgcagagctgccgcgccccgggggagctcaaggtcatcttctgccaggcgaccatcgtcacatgcggcggcgaagcagagcgcaccgtcctcgccgacagctagacagatcgagccgtccagctccattcgcctccaggctccgctgaatccttacagtaattgtcatgctttcttttgctccatgtgtttgttagctttggcttcgacgcgcgtgtactccggtggttttattttagaaatcagcagtgaagcaaaataattgtcttcggatatgttaaactggctgagccattcaaaatccacgaagcgcgagtgaggtgc

SEQ ID NO: 88211 - DNA, 960 bp, Zea Mays
gtctgatgtcttgtcatcacaaactcactacacgatcggctatagcgagctaacagaagctctatcaagtactgtgtaggccatggccggagccctcgtcttcgtcgctgttctcctcgccgcaagcgtcggcgctacgacggctaccacgctgaccatccacaacctctgcccccacccggtgtggccgctggtgaccccgagctcgggcttcccctccatctccaccaacaccgcgcggctgggccccaacgcgctgctctccctctccttcccgcccaccttctgggccggccgcgtcgccgcgcgcacgggctgcgacgccgccgcgtccggctgctggacggggaccacgccgcccgccaccgtcgtgcaggtcaccgtccacgacggcgggaacctggaccaggccacctacagcgtgtctctcgtcgacggcttcaacgtgcccatggtggtcagcccgcaggccgtcggcggcgggcagtgcccggcgctcgggtgccccatcaacctcaactgcgactgccctccccagaaccgcaccgccgagggcgccgcgtgccgcggcccgccggagtacttcaagaaccggtgcccgctcaccaggaccacgcccaccgacgtcgagcccgtgccgcagagctgccgcgccccgggggagctcaaggtcatcttctgccaggcgaccatcgtcacatgcggcggcgaagcagagcgcaccgtcctcgccgacagctagacagatcgagccgtccagctccattcgcctccaggctccgctgaatccttacagtaattgtcatgctttcttttgctccatgtgtttgttagctttggcttcgacgcgcgtgtactccggtggttttattttagaaatcagcagtgaagcaaaataattgtcttcggatatgttaaactggctgagccattcaaaatccacgaagcgcgagtgaggtg

SEQ ID NO: 88212 - DNA, 453 bp, Zea Mays
atggcccgcaggcgaggtgaggatctgttccgtcgcggcaatctgagcagcgatagcgtcggcggcctcgcgctcaagctcccacacgagggccgcttcccgcaaacgggcctgtcgcgccgcgtgctccgcacgggcagcggtgagggcggcgacggtgtatccctggtgggtgaccagtggaggaggcggctgatcgacgacaggatgtggatcgacgaccagcgacaggaggattggtgggggaggatcctctggaccggcaacacctgcgggaaccgcatccgccacagccgcaagggcagaggcggtgcccgcagcggtgagggccccaccggcgtcggtgggccctgccccccacgccggcccgagcgcaggggaggtgggaacggacccccacgcccctgccaccagagcctgcgcacccgcaggggaggcagcgacgacagctaa

SEQ ID NO: 88213 - DNA, 1099 bp, Zea Mays
acgggctccatctactgggattctcgttttaaacccctgacccccatgcatctcgcacgggcacgggcacgggcacgggcaccggcacggcacgggccacggttataaataaccacacaccctcaagggctgaaccgaaccaagcagtaacattaatcacccactctactactcgaagttactaccagcagcttgcttcaacagtagaagagagcgagaggatggcgtcaccgaagccctcgtcggcggccctgctcctcctggcggcggcggccgtgctggcgctggcgcgcgcggacctgacgcacgacaactgcgtgaagaacaagaaggtgacggtgcagaacctgtgcagccacgacgtgacgctgacgctggagccgctggccaacagcccgccgctgttcgcgggcacctacacgctgcacccgcgcagccacgccgagttccccgtgtgctggtggacggggcgcctgcgcgcgcccgacgccgcccaggtggagttccacgtcggcgtcgacggcggctccttctacctggcccccaacgcgcagccgggccagcgcgtcccggtctccgtcaccccgcacggctcgccgctgcagggccgctgccccgccgtcggctgcgccatccagggccgctgctccgtgcaccaggtgcccagcggcgactgccgcaacgtccaggagatgaagatcatctactgcaacccgcacgtgtgatgcgatgcggacatggggtcgtcgcgccatctcgcgacctgtgttgtgctttctttcatgtcgccgtcgccgtcgtgtgtccaaccgccattgtcgttaggttgttgttgattagccgtttgcttcgctcagtagcctcgctctccagtgtattatcactcgcatcgcatgcatgtgatgtgagccactgcacgcgtgagtgtcacatgagtcgtcgtcctgtctcgtctcatgtgtttgaaattgtaggcagcagaggatcgagatgcgtgtctgctttgttcgtgttcactgctgtcagtctgtcaccgagttcaataatttagctttgtttcatcgggaaattgaatggatgtctgttgttgtttaatcta

SEQ ID NO: 88214 - DNA, 730 bp, Zea Mays
aaccaagcagtaacattaatcacccactctactactcgaagttactaccagcagcttgcttcaacagtagaagagagcgagaggatggcgtcaccgaagccctcgtcggcggccctgctcctcctggcggcggcggccgtgctggcgctggcgcgcgcggacctgacgcacgacaactgcgtgaagaacaagaaggtgacggtgcagaacctgtgcagccacgacgtgacgctgacgctcgccgctgcagggccgctgccccgccgtcggctgcgccatccagggccgctgctccgtgcaccaggtgcccagcggcgactgccgcaacgtccaggagatgaagatcatctactgcaacccgcacgtgtgatgcgatgcggacatggggtcgtcgcgccatctcgcgacctgtgttgtgctttctttcatgtcgccgtcgccgtcgtgtgtccaaccgccattgtcgttaggttgttgttgattagccgtttgcttcgctcagtagcctcgctctccagtgtattatcactcgcatcgcatgcatgtgatgtgagccactgcacgcgtgagtgtcacatgagtcgtcgtcctgtctcgtctcatgtgtttgaaattgtaggcagcagaggatcgagatgcgtgtctgctttgttcgtgttcactgctgtcagtctgtcaccgagttcaataatttagctttgtttcatcgggaaattgaatggatgtctgt

SEQ ID NO: 88215 - DNA, 153 bp, Zea Mays
gtcgtgtcatgtgtgtgtcgtgtgtgttgtgttgttgtgtgttgtaccttcttctacctatttttttcgaacacgcaagagagctgtgtatcattgaattaagaagaagggtctaaaattagaccaaatacaaacacaacagaaaaaaaagaa

SEQ ID NO: 88216 - DNA, 240 bp, Zea Mays
atggcgctgcttctgggcttggcgctcgccttctgcctcaccgtcctctccatccagtcctccttctacgccgccctaggcaggaggctggatctggacgccgacgacgtgcgcgacctcgcggggttccagtcccgcgtccagcagtgtgtggtccatatggatagtccgactgatctcggtatctctgataggctgtcgttcattgctcaaaacttttgtgcccgttgttatctctga

SEQ ID NO: 88217 - DNA, 1102 bp, Zea Mays
gattcccggatggatgtgccggcccggcccggcccgctcggcgctcgtgcttctccccagtcccgtccatccaaagcgttttgcacttgtgcacaaactgcggctgctgtagatacgcgcgccgccactccaaggtccaagcctcccttgctcccgccaccgcccctcaccatgggcagcgccgccgcctctccgcagccgtctgggaatctgacgcaggacgagctcaagcgcgtggcggcgcaccgcgcggtggagttcgtggagtccggcatgacgctgggcctgggcacgggttccacggccgcgcacgcgctggaccgcctgggcgacctcctccgcgcgggcgcgctgcccggggtcgccggcgttcccacctccctcaagacggaggcccacgccgcccgcgtcgggatcccgctgcttccgctcgacgccgcctcgggcgccagcatccgcctctccatcgacggcgccgacgaggtcgacccggacctcaacctcgtcaagggccgcggcgggtcgctgctccgggagaagatgatcgagggcgccggcgatcggttcgtcgtcatcgtcgacgagtccaagctcgtgccgaggctcggctgcacgggcgccgtccccgtcgaggtcatccccttcggcgcgccccacacgctcggcctcatccgcaaggtgttcgatggagtgcctggcttccacgccaggctgaggacggtccccgccgccaatggggaggactcggacgcgccgttcctcaccgacaacggcaactacatcgtggagatgttcttcgaggacggtatccgcggcgacctgctggacatcagcgatcgtctgctccggatcaccggcgtcatcgagcatggcatgtttcttggcatggccactacagtcatcgtcgctaacaaggacggcaccgtcacagtcatcaacaagaagaagtaataatctacaagtagcctgtatgtgtgcgtccgtgtgtgatccagctacctaagttctgctcgttaccgttgtgaaaccatcattttgttttatcatctcatatctttcctactggtgattccaatatatcttatttattatccctccaata

SEQ ID NO: 88218 - DNA, 2046 bp, Zea Mays
cgcgcgccgccactccaaggtccaagcctcccttgctcccgccaccgcccctcaccatgggcagcgccgccgcctctccgcagccgtctgggaatctgacgcaggacgagctcaagcgcgtggcggcgcaccgcgcggtggagttcgtggagtccggcatgacgctgggcctgggcacgggttccacggccgcgcacgcgctggaccgcctgggcgacctcctccgcgcgggcgcgctgcccggggtcgccggcgttcccacctccctcaagacggaggcccacgccgcccgcgtcgggatcccgctgcttccgctcgacgccgcctcgggcgccagcatccgcctctccatcgacggcgccgacgaggtcgacccggacctcaacctcgtcaagggccgcggcgggtcgctgctccgggagaagatgatcgagggcgccggcgatcggttcgtcgtcatcgtcgacgagtccaagctcgtgccgaggctcggctgcacgggcgccgtccccgtcgaggtcatccccttcggcgcgccccacacgctcggcctcatccgcaaggtgttcgatggagtgcctggcttccacgccaggctgaggacggtccccgccgccaatggggaggactcggacgcgccgttcctcaccgacaacggcaactacatcgtggagatgttcttcgaggacggtatccgcggcgacctgctggacatcagcgatcgtctgctccggatcaccggcgtcatcgagcatggcatgtttcttggcatggccactacagtcatcgtcgctaacaaggacggcaccgtcacagtcatcaacaagaagaagatgaatcaagccgtgagctcaacttcaacgcgtggaagaggaaaaagtgaaagggtgtggacttattttgaggatgaagcattgttgaaggcactctttgagctatcccttgatccaaagtggaaaagtgagggtagtttcaagaatggttatctttctgtcctcaaagctacacttgctgaaaaaattccaggttgtggcctcactgcagttccacatattgagtctagggtcagacactttagaacaaagtatggtgcaattgaggttatgctagcaaatagtgggttttcttgggatgagaacaggaagatggtacaatgtgagaagcaacaatatgaggaccattgtaagagacatcctgatgcaaagggcttatatggcatttcattcccacaccttgataccttagccgctatatatgggaaggacattgcgacaggaaaaggtgctgaaggtcttggtgatgctatttcaaacttggagaaagaaataactttggaagagagtcatgatcgagaagtggaagaagatagtatgtctagagaaacaccacgatgggcttcagataggaacttacttgattctacttcatcaacctctaagagaaggaagcgagacaaaggaaatgaagttcgcaagtcaagtgacccatttttggatatgttaggtgaatttcgtgatgatcttaagaacgcttcaaatcactttggaaaaatgactgaaatcatggagcgtgaagctaagctccaagaggaggctgcacataaggatccaatgcaagtcctacaacaaaaatctataactgagctgactaggttgggatttaccagtactgagcttgtcaaggcagcgagtgtgtttgtgaatgtgccaaaccagatgaccatgctttttgcacttccagagactctaaggagagggttcatactgaacatgctcgccaatgaggctcaaaagaattgagtgctgaagagatgatcagttctgataagctaatgttcatctgtgaagcatttgaagttggaacaattttacagcatggataatggtctgaaatttctggaatacaaaattttggaagtattttcttagcatattcaagtttgtgcagatttctggatgtgcaagttccataaatttttggaagtattttcttaacttcatgttcttcattagacatggtgatgcagcatggataatggtctgaaat

SEQ ID NO: 88219 - DNA, 1044 bp, Zea Mays
ctattgttttttgtataaattatgttcttctaagctatttgtaaactgatttaaacgaacacttcttataggatgaatcaagccgtgagctcaacttcaacgcgtggaagaggaaaaagtgaaagggtgtggacttattttgaggatgaagcattgttgaaggcactctttgagctatcccttgatccaaagtggaaaagtgagggtagtttcaagaatggttatctttctgtcctcaaagctacacttgctgaaaaaattccaggttgtggcctcactgcagttccacatattgagtctagggtcagacactttagaacaaagtatggtgcaattgaggttatgctagcaaatagtgggttttcttgggatgagaacaggaagatggtacaatgtgagaagcaacaatatgaggaccattgtaagagacatcctgatgcaaagggcttatatggcatttcattcccacaccttgataccttagccgctatatatgggaaggacattgcgacaggaaaaggtgctgaaggtcttggtgatgctatttcaaacttggagaaagaaataactttggaagagagtcatgatcgagaagtggaagaagatagtatgtctagagaaacaccacgatgggcttcagataggaacttacttgattctacttcatcaacctctaagagaaggaagcgagacaaaggaaatgaagttcgcaagtcaagtgacccatttttggatatgttaggtgaatttcgtgatgatcttaagaacgcttcaaatcactttggaaaaatgactgaaatcatggagcgtgaagctaagctccaagaggaggctgcacataaggatccaatgcaagtcctacaacaaaaatctataactgagctgactaggttgggatttaccagtactgagcttgtcaaggcagcgagtgtgtttgtgaatgtgccaaaccagatgaccatgctttttgcacttccagagactctaaggagagggttcatactgaacatgctcgccagtaagttctcaagccttttgtactag

SEQ ID NO: 88220 - DNA, 456 bp, Zea Mays
atggcgcacgaccgtcccgtctcgacctcctccagctcctccgtcccctgttccttggcgctcgccgagggcctctccttcatcttctgtcgcgtctcaactcccatggccgcctctacgcacgagctcgccggacgccgcagtatatgctccctgctcggcctcctcggcgtgctgctccctcgcctaggcgcccctgcgagctccttctccctcgcccgatttccagctcgggcctcaccgcatgccttttctgacctcgtctcgacaatcaatcgctgcagcacgcataccgtgtgtgctgcaatgtcatcgttcgctatcctcatcctcgccaattttccttgttctttctgggctacaacctcgtcaactcctgtgagtcgtgcgcgtcttgtgttcgggttgagccccaggattttgaggaaaaggaagctccaatgcatcggccggtga

SEQ ID NO: 88221 - DNA, 768 bp, Zea Mays
gctggtgtgctcgacgccagtataaatttggtgtacccggcggcataagctgcagcaacgcaaacgcaagcagctgctagcataggttacaacatacaagtgcagcacgcgagtgcagacagctagagaaagtccaagatgcctgctggaagaagcgcgccggcaaggggtgcagcagtggcagcaatgctgctgctgactatgcttgcacggctaccatgcctagaagcccaaagctcgcgccgacctactgtcctcactgtagacatgacaggcaagggagattacagaaccatacaggaggcgatcgacgccattcctgccgccgcaaacaactcgaccagcgcggccatcgtcacgatcaacgtcaaccctgggatatacacggagaaggtcgttgtcaacaaggctggagtctctctagtcgggaggagcgccacctcaaccatagttacctggagtggaccctggaaccagaaccaccagtctgagtttgctctctacgtacaggcaaccgactttgtcgccaagggcttaacatttcagaacacgttagggagtaaggataatggcccggcggtggctgctaaagttgacgccgacaaggcggcgttctatgactgtagattcctatcgtatcaggacaccttgctggatgcaacagggcgccactactatcgtgggtgctacatagaaggcgccactgattttatattcggcacaggaaaagccttttttgagagatgggtagttcgtgtcaaaatttag

SEQ ID NO: 88222 - DNA, 3713 bp, Zea Mays
ccgctgcgggcttgcccccgcgcccagccacctccccgcggcccacctagcgcacacagctcatttccccaaaccctagcacctcagcgcgcctcctacagcagccgcagccgtgtccagccgccgggagcgcccgcgcgccagggccacgcccagggcaagtcttcttctccagactccaaccgtccgagttcccttgcccacgtcgccccaaaacaggaattggcactcccgttgcctcgtccctcgcgtccagctccgctagaaccacccacaaccgcgcctcgcccagctccggccacccgcgctgcgcatcaccatgcagggagccgtgccgcgctgctcctcgtcgtgccgcgctgcatcctcgtggctgccttggctgggcaagcatgcccctgcagccccatccccgcgctcctcctcagcgcgcagcgcggcagccccggccgtgtcctggcctcccttgccgagttgtgttgtcgttgtagccttttcatcttctctccctgcaagcctgagcgcgccactgcgctggccgacgattcgcccagcaccggcgagcaccccagcggccacgcctcgtctcgttcctccctgctccctgcaacgcagaccgcgtggagcactggagcccccacgcgtgcgtgttattcttgcccagccggccatctctccaagcgccgtgaacagaggagagaggaaaacaaccgctcgtgcgaggtgttgaggaagatggaaccaagtgtctctttggtctgcaagaccttctgtggccatgtactgtatagtcctctgcgtggccccggcgcaacagcaatcttgccgttctcatgcctcgccgttgactagtctggtcgtccgctgtcgttgcgaggtgagcatcgtctacacgttggtaaccttgtttcactatgtcgcgcattttaaatagttaattatatttttgtttaactaacgttagtcatttagacttttcaattaaactaatttatagtagttaacttacgctttataaatccatgtcgacgtaattaacagtaactcaaatgtgttgccctaatatttgtttaatataaatgtgacgactatttagtttcatcgtgtttcgcgcgcgttgttcgcgtatgtcacgcgtgctgttcatgtgtcgtcgttcacgcgagtcgttattcacgtgctttaataaaatcatttcgccatagagctcatgttaaataattagttaattgtttagttgttggttattaaaataacaattccatcgagtctgatttataattctaatcatgcattagtagatacgattagtattaaatcaattgttttgctctaatgtttgtttaatataaatgcgacgtctacgtagtttttctcgcgtatcgcgtacggtttcccacatggttacgtgttgattcgtgcgtcattcgcgcgtgctgttcgcacgcgttgtcgcgtgccgttcacacgcattgtcacgcgcctttcgcgtgtgtcgctcgtctcgccacgcgttgctcacgcgtatctcgtgtgtcgatcacgtgggtcgcgcggcgtctgcgcgtgataataaattgtttttcgcttataaacactcatattaataaggttaattcgtcaagtcatatatgttagataattaacttaaggctcactcgattaatatttattagattaatattctaattagattaaatgtgtagtgttcaacttgggcttttataataaatattaacatggataatattaatttaactactttctatttatttaacattcgtttagtataaacatgtcacctgttcagttattctcgtctgtcacgggtgctgttccacgcacggtggcatgctgcttcacgcgtcgtgcacatgctgtctgcgcgttgttcgtgcgtgatgtgcccgtggtcgcgtgctgattcgtgcgcgttcgcgctcgtcgcgcgcgttttttcgtgtgtcgtcagcgtgctatgtcgcgcatgtccgcgcgtcgtttgcacgctgtcgtgctgtttcacgcgtcataaattcgtctcgcttagaatctcccattttaattaaattacttaattaattgacattgttggtgtagcacattaatcgaactaactgatgtataatatttatatttgacaatgtcgaattagatattatgattaatactcgtttagtgtgaacgcgataacctctcgaccgtagcctcgaccgtcgcgtttctttgtcctcgtgtgaccgtagtaacacactctattttattttgtgtattttattatgttttacttgaatggagtaatgttcttatgcatatatatggttgtttgtttgtgcctgtttgtattcgttgtgcgccgcgaataaactgcgatccatttctgagcttcgatgaatcgacggtcaagcttgggcgaccaaatgacccagttcttcgagttctacaaaattgaagaccctgagcatctgtttggtgaaggcaagtgtcctctgacctattatgtcccatttactttataattcatcaacccgcataccatgatcaacctaaggattgactagttttgtatttaccttgtccttgattaccttttgggttattatggttagcttcatgctattgctttaccttaatcaatgaacatgatgtgaacatttatgatacgatgttgtctctatgattatgatgttggactggtgatactttagggggctcaagcggtttctcgagtgcctctccgtaaggacctgttcgttggatgaccgcccgggaaaacagtgcaaccatgagggtggaatgggatgccctttagctgaataattagaggaactggggtgtagttcgcttagccgtcgtgccgtcaatggggctcggtgtatgcggctcgctccgccaagtttggttcaccccttggggaggagtgcggtacatttaggaaacctaacgggaggctacagccccggggaatctttgtaaaggcttcgttgtgaatccctggccattcacctcggtagtgaataagggtcttgcaagcccgggctagagaggaaatcacgacttgtgggtaaagtgcgcaacctctgcagagtgttatgaaactgatatatcagccgtgctcgcggttatgagcggccaagggagctccagtgattagtgatacttgatcagagatgttcggattgcaggtggcaatgagactgatggttctcggttttaactctggtaatggtaagtggtactcttttcgtttggaaaggagtacgtttgggttaataacgtgggttaactctaaaacttggctttctctacaagtaataataatctgaccaactaaaagcaactgcttgacttaccctccacataaagctagtccactacagccaaacaggacacttgctgagtatgttgatgtgtactcacccttgctctacacaccaacccccctttccacaatttgtcagcattgcaaccactccttaggagaagatgaagccgtgggaaggagacttccaggagttccaagactacgacgagttctaggtgtgggttagcggcaacccccagtcggctgcctgtgaaggccgcatttatctacgtttcattttcgcactttgattattgtaaagactatgttgatgtctcaaacatatgatgtaatcggactattatttccctttttaatattatttgagcattgtgtgatgatgtccatg

SEQ ID NO: 88223 - DNA, 816 bp, Zea Mays
gggccacgcccagggcaagtcttcttctccagactccaaccgtccgagttcccttgcccacgtcgccccaaaacaggaattggcactcccgttgcctcgtccctcgcgtccagctccgctagaaccacccacaaccgcgcctcgcccagctccggccacccgcgctgcgcatcaccatgcagggagccgtgccgcgctgctcctcgtcgtgccgcgctgcatcctcgtggctgccttggctgggcaagcatgcccctgcagccccatccccgcgctcctcctcagcgcgcagcgcggcagccccggccgtgtcctggcctcccttgccgagttgtgttgtcgttgtagccttttcatcttctctccctgcaagcctgagcgcgccactgcgctggccgacgattcgcccagcaccggcgagcaccccagcggccacgcctcgtctcgttcctccctgctccctgcaacgcagaccgcgtggagcactggagcccccacgcgtgcgtgttattcttgcccagccggccatctctccaagcgccgtgaacagaggagagaggaaaacaaccgctcgtgcgaggtgttgaggaagatggaaccaagtgtctctttggtctgcaagaccttctgtggccatgtactgtatagtcctctgcgtggccccggcgcaacagcaatcttgccgttctcatgcctcgccgttgactagtctggtcgtccgctgtcgttgcgaggtgagcatcgtctacacgttggtaaccttgtttcactatgtcgcgcattttaaatagttaattatatttttgtttaactaac

SEQ ID NO: 88224 - DNA, 98 bp, Zea Mays
gcaatttttgggctttacacatctggggtgttacaagaacttcctgctgagggcgttgataggactgctggagtacgcatcatatggctccgtcagac

SEQ ID NO: 88225 - DNA, 177 bp, Zea Mays
ggagaagcttctagaacatgggggtgctcggccggtgcgaagaaaagtgtcgagtggaacgcatttgatagagccaggcaaaaacccgacgcacaggtccgatccggaggccggtggaaggaatcgctgaccgtgcaagcccaccagcagcgattaaggaaaagcagctgcggctgg

SEQ ID NO: 88226 - DNA, 97 bp, Zea Mays
cttgatagagataacaggtcccttctatgtattatcaataggatcaattctaacaagtcacacactcatattccagagataccaaaacaaaaaaatc

SEQ ID NO: 88227 - DNA, 1407 bp, Zea Mays
cagggctctctacatatggtatgtataactatctcaatttgaactgcattctggtgggagtcgctcttgttgttcagtaaccatttttctcaatgttatgtctaaccgtgttattcagttttgcaatatgcacagcaatttatggtgctatgaatgtacatggctacctcatgtttggagacaagacgctctcacaaataactttgaatcttttgaaagattcatttgcagcaaaagttgcacgatggaccacgataactattattatcggtttctctgattcaattaagtgggaacccttggtagtgattcaattaagtgagaagtgagaaccctcattgtgctattttttgtttcaggtgatcattcctttcacaaagtatccttacacatcatagttatcaactctgtaagttgaggtttttaggatggtgttacattcctgaaattgtttgaatcctttatgggatttcttcatccttaatcacttgcagatattctttagtgataaaaccattagcttagagtatggaagagttgtgtccaacaaggtttatgacggatagtcttcgctgttatgttgcgtactcgatgcgttgcctttctcctaccattctttggtacataactaacgcattatgcttaaacgtggagtcaatatcttataaattctttttctatcactactcattgttttggttcctatttggcataaattgtctgaataccttataaatgtgttgtcctatattttttgttctagacattgtttggttcccctgcttccagaatttatatgacttgtgaattttaaataaagaaaagaaaggaaaattatgaatcctggattaccgattcatgccataacattgacttttgtgtagggttgttatctgtctttagccgaagaaacaatcctgagaaagaatggagagctccttggctaggagtaatgtttctaagtggaattacctagtttatgcgagaagcacattaatggattccactggtcctctgttagctggtaggagaagtagcaaacatggctcaagtgagatgggggactgcatattcagctcaatgagacattttcttcagttggtgaatcaattactaggagaatttgttagatattaagattaatagtaatatgtattaattcgtttttatataattgttgtgcaccaacattttatttgaaagagagaaataaatcctagcaaaattgactatgggagaagggatataggaacggaaatggaatatgggagagggaacaaactcatcggcctatgcgccttgattagaatgtctcctaaaagttttagttattgaaaatatgacaggacatttattgtaatatgtttattttctgaaatactaattttgatgtatagaatattgaca

SEQ ID NO: 88228 - DNA, 2498 bp, Zea Mays
cacatctcaacggcttggattttttctcgatgcgttcaggaacattctagaacaccacagcccacccgctgacgcgctctttgctccctataaaatgtcacttccccgcattcgtcccactccctctcgaaaccctagtcctctgttacttctcccgccgccgccaatcccctcccgttctccgccaccgccaatcccctcccgtcctccgccacctctgctgagagcgagaagagatggccggcaagggtgatgggccggcaatcggcatcgatctcggcacgacctactcttgcgtcggtgtgtggcagcacgaccgtgtcgagatcatcgccaacgaccagggtaaccgcaccacaccctcgtacgtcgccttcaccgactccgagcgcctcatcggagatgcggccaagaaccaggtcgccatgaaccccatcaacaccgtctttgatgccaagcgtctcattggcaggaggtttagtgatgcctctgtccagagtgatattaagctgtggcccttcaaggtcattcctgggcccggtgagaagccaatgatagttgttcagcacaagggggaggagaaacagtttgcagccgaagagatctcctccatggttctcatcaagatgcgtgagatcgctgaagcttaccttggcagcacgatcaagaatgctgttgtcacggtccctgcctacttcaacgactcacagaggcaggccacgaaggatgctggggtgattgctggcctcaatgtgctgcgtatcatcaatgagccaaccgctgctgctattgcctatggtcttgacaagaaggcaaccagcgtcggtgagaagaatgtcctcatctttgaccttggaggtggtaccttcgatgtctccctccttactattgaggaaggtatctttgaggtcaaggccacagctggcgacacccatcttgggggtgaggactttgacaacaggatggtcaaccactttgtccaggagttcaagaggaagaacaagaaggatatcactggcaacccgagggctctccggaggctgaggacctcttgtgagagggccaagagaactctgtcttccactgcccagaccaccattgagattgactcgctgtacgagggcattgacttctactccaccatcacccgtgccaggtttgaggagctcaacatggacctgttcaggaagtgcatggagcctgttgagaaatgcctgagggatgccaagatggacaagagcagcgtccatgatgttgtccttgttggtggctccactaggatccccagggtgcagcagctgctccaggacttcttcaacggcaaggagctgtgcaagaacatcaatcctgatgaggccgttgcctatggtgctgctgtccaggctgctatcctcagtggtgagggcaacgagaaggtgcaggacctgcttctgcttgacgtcactcctctctctctgggtctggagactgccggaggagtgatgaccgtccttatcccgaggaacaccaccatccccaccaagaaggagcaggtgttctccacctactcggacaaccagcctggtgtgttgatccaggtgtacgagggcgagaggacccggacccgcgacaacaacctgcttgggaagttcgagctctccggcatcccaccggctccccgtggtgtcccccagatcacggtctgcttcgacatcgacgccaacggcatcctgaacgtgtctgccgaggacaagacgacggggcagaagaacaagattaccatcaccaacgacaagggccgtctgtccaaggaggagatcgagaagatggtgcaggacgcggagaagtacaagtccgaggacgaggagcacaagaagaaggtggagtccaagaactcgctggagaactacgcctacaacatgcgcaacacgatcaaggacgagaagatcgcgtccaagctggctgccgacgacaagaagaagatcgaggacgccatcgacgcggccatcagctggctggacgccaaccagctcgccgaggcggacgagttcgatgacaagatgaaggagctggagagcctttgcaaccccatcatcgccaagatgtaccagggcgcgggtgccgacatgggaggctccggcggcatggacgaggacgctccggctggaagcggtggccctggccccaagatcgaggaggtggactaagcggtttgtgtcagtctcgtgtgtctgctgcagtggctggctggcccagtcgctgctcgatttatcgtcgtcgtcgcggtgtatccgcgttagaaccttttgttggtgaacaatattatcgtggcacgcgttttaagtaatacggtattctggttcggtttcgtattgctgtttcttttctgctttatttctattcttgtcttgtttcgcgtgcttagccgtcttattaaccgaaggctgaagcaaaatacggagtagaataaacaatgggtggggcaagaaattagtccgttaatgatttcgtaacgttcg

SEQ ID NO: 88229 - DNA, 1181 bp, Zea Mays
atccactcgagtatgtcgtgaccacaaaaacgaagaacgtcgagcaggtcgctgagtaagaaccgaagccgccattgttggttcgttcgtacaccatcgatggggtctcaatgtcgggtcatggggcttaactagatcgcgaggaaggtgattatggcctcgcctggtggaaattcatagtggagcaccagagattgctcgtcggaattctttctccatcgtggagccgatggcctccatggcaacattgctcccaccactatatctgatacgaggagaagctggagaacttctgcaagctcatggactttgtcatagactcagctccacctgagttgaggcaggaggcccacttctcgatggttgacaggatgaagcatagggttgagaagtcagcattctggggccaccttcttcggcatgtgatgcagcaggggcagaagaacatggtggaattctttgacctactcctttctccggcatcgaaaatcttgaacacctggtttgagagtgaggttttgaaggccactcttgcaactgacgccatgataggagctatggctggtgtccacactccaggttctggatatgttctcctacaccatgtcatgggggagactggtggtcagcgtggtgtttgggcggcttggattgaatgaagaggttccacccaacatggattcgaagacaaagttcagtgatgtcaagggagttgacgaagctaaagctgaacttgaggaaattgttcactacctacgagatcctaaggccgcacttgaagaaatcttatatcagtttgaggaaaaactccaagttgaaagagaggaagctgctaggaagcaggaagagttgcaagcacaactacaagctcaacaggtcgcacttgaagaaaaccaaagtttgctgcgccaggcccaagtggaagtgaaggggatgcataccaagtttgaagagaccaatgcactgctacgagttgtcctgaaacttcagaaagattgaggtagggatgcataccaagtctgaggatgatgcctttgcttaaggtttttctaccttgctagaacatatctatggttagaactttgtcagaactacgtgcaatctgtttgaatgcttcaaacctttgtggtggaacctttgtatgtttgaacctcttttgtggaagaactattgtgatggaa

SEQ ID NO: 88230 - DNA, 2264 bp, Zea Mays
ctcgcgtccgatcgatccccatccccttccattgcgtgctggagccctcctccgcgcgctttctctggtgacgccgtccatgtctcctcctctcttcctgcacactgattgaggtcttcattcttctctctctctctctcctactgttagctacctagggtttgccatggccatcaccttttttgagccatcacactttactctctctctcttcacccatgacacatccatccagccacccccactagctctctagctagccatcctcctcatcaccctctccgcctctgtctcttgctgtcttgcggcactgttcttagctgcaggtagctccgtccagctcgacggttctctcttagcagctaaggaaggcgacataaattataaaaggcgccacttgagggcagggccaaggaaagttgtggtttccaactcctcacctcacacactctcttcttctctccttcgttctccctcgcaaagtcagggtcactgaaagtagcggaagagcccaagtagttcttcgccaccggtaccgcatcgatcatcatggtgttctcctcgctcccgatcttcctagaccctcccaattggggccaggtaattggtttatccaatcatatactcttcgttccttacttttagtttcgtcatgcacaagcatgacgaactggtttctctctccgtttcctaattattattttagagtgaatccggcctttttccaatacgaacttcaaatctctggttgattgatcgctgtgattcgcaagtttgtttactacctatgctcatgccctggttgagcatagacacaaaggaagggcatcattataggcatgttcttgaatataccgtgctttgaattccagcctttattaattgattcgttatacatacagatgcagatgcagatgcagcagcagtcaccgctccagtgtctcctcggcagcggcggtggcagcgaccaccaccacctcatgcctcctccgtccggcctggcgccgctgccggggggtcctgctgacacagcggcgagcggtccggcgggaggcggctcgtccacctcggcctcagtgcaagccgcggcgggagcgggggcaggggcgcagcctcgccccgtggtgtcgatggcggagcgcgcccggctcgcgcgcgtgccgctgccggagcccggcacgctccgatgcccgcgctgtgactcgaccaacaccaagttctgctacttcaataactactcgctgtcgcagccgcgccacttctgcaaggcgtgccgccgctactggacccgtggcggcgcgctccgcaacgtgcccgtcggcggcgggtgcaggcgcaacaccaagcgctccagcaagaagtcgtcccgcggcggcggcgcgggcgccacggcggcaacctcctcgtcctcgaccacctccacctccaccacggccactaccaccaccaccacgagcgcggccatggcggcggccgaggccatcgccggcatgcaggcgcagctgccccacctcggcctcccgcccgcagcggccgccgcggcgcttgaggcctcgctggagggctaccaccactacctcccgctccagatgcagccgcagttcctgcagcaggctggcctgcacggctaccatttcgccgacgacggcaccggcgtcctcgcagctgacgggttcccgaggggcgtcgtcgcctcggggctgctcgcgcagctcgcggcggtgaagatggaggagcacggcagcaacggcggaggtgccatcgcggcgcatcatgagcagcagtcctactggcccggcagcaccggcggtggcggtgggtggccggtggagttcttgtcggggttcagctcatcctcgtcggggaatgtgttgtgagttgcatgtggccgcgtccaggtccacctgggcatgcatgatggggggcatgcatgcatggatgctgatgaagctgaactagctcaccatcctcaattagttctagggtttatgtggtgtttggaacttaattggcgtcgtcttcttcaattaggctggtgatgatcttgtgttggggtaaggtttttacatgttttttttcttatgagttttaagctggttaatgtcgtgcagttggtagttttgcatgtagtgggaagtgcatgtgttgactcatggaggttatatgtgtcaggttacttaactatactatgtttaattatatgagaacttggtgggcatagttgtactagtacaacccgtttctaaattgcagatgtgtgtttg

SEQ ID NO: 88231 - DNA, 1962 bp, Zea Mays
ctcgcgtccgatcgatccccatccccttccattgcgtgctggagccctcctccgcgcgctttctctggtgacgccgtccatgtctcctcctctcttcctgcacactgattgaggtcttcattcttctctctctctctctcctactgttagctacctagggtttgccatggccatcaccttttttgagccatcacactttactctctctctcttcacccatgacacatccatccagccacccccactagctctctagctagccatcctcctcatcaccctctccgcctctgtctcttgctgtcttgcggcactgttcttagctgcaggtagctccgtccagctcgacggttctctcttagcagctaaggaaggcgacataaattataaaaggcgccacttgagggcagggccaaggaaagttgtggtttccaactcctcacctcacacactctcttcttctctccttcgttctccctcgcaaagtcagggtcactgaaagtagcggaagagcccaagtagttcttcgccaccggtaccgcatcgatcatcatggtgttctcctcgctcccgatcttcctagaccctcccaattggggccagatgcagatgcagatgcagcagcagtcaccgctccagtgtctcctcggcagcggcggtggcagcgaccaccaccacctcatgcctcctccgtccggcctggcgccgctgccggggggtcctgctgacacagcggcgagcggtccggcgggaggcggctcgtccacctcggcctcagtgcaagccgcggcgggagcgggggcaggggcgcagcctcgccccgtggtgtcgatggcggagcgcgcccggctcgcgcgcgtgccgctgccggagcccggcacgctccgatgcccgcgctgtgactcgaccaacaccaagttctgctacttcaataactactcgctgtcgcagccgcgccacttctgcaaggcgtgccgccgctactggacccgtggcggcgcgctccgcaacgtgcccgtcggcggcgggtgcaggcgcaacaccaagcgctccagcaagaagtcgtcccgcggcggcggcgcgggcgccacggcggcaacctcctcgtcctcgaccacctccacctccaccacggccactaccaccaccaccacgagcgcggccatggcggcggccgaggccatcgccggcatgcaggcgcagctgccccacctcggcctcccgcccgcagcggccgccgcggcgcttgaggcctcgctggagggctaccaccactacctcccgctccagatgcagccgcagttcctgcagcaggctggcctgcacggctaccatttcgccgacgacggcaccggcgtcctcgcagctgacgggttcccgaggggcgtcgtcgcctcggggctgctcgcgcagctcgcggcggtgaagatggaggagcacggcagcaacggcggaggtgccatcgcggcgcatcatgagcagcagtcctactggcccggcagcaccggcggtggcggtgggtggccggtggagttcttgtcggggttcagctcatcctcgtcggggaatgtgttgtgagttgcatgtggccgcgtccaggtccacctgggcatgcatgatggggggcatgcatgcatggatgctgatgaagctgaactagctcaccatcctcaattagttctagggtttatgtggtgtttggaacttaattggcgtcgtcttcttcaattaggctggtgatgatcttgtgttggggtaaggtttttacatgttttttttcttatgagttttaagctggttaatgtcgtgcagttggtagttttgcatgtagtgggaagtgcatgtgttgactcatggaggttatatgtgtcaggttacttaactatactatgtttaattatatgagaacttggtgggcatagttgtactagtacaacccgtttctaaattgcagatgtgtgtttg

SEQ ID NO: 88232 - DNA, 1882 bp, Zea Mays
ctcgcgtccgatcgatccccatccccttccattgcgtgctggagccctcctccgcgcgctttctctggtgacgccgtccatgtctcctcctctcttcctgcacactgattgaggtcttcattcttctctctctctctctcctactgttagctacctagggtttgccatggccatcaccttttttgagccatcacactttactctctctctcttcacccatgacacatccatccagccacccccactagctctctagctagccatcctcctcatcaccctctccgcctctgtctcttgctgtcttgcggcactgttcttagctgcaggtagctccgtccagctcgacggttctctcttagcagctaaggaaggcgacataaattataaaaggcgccacttgagggcagggccaaggaaagttgtggtttccaactcctcacctcacacactctcttcttctctccttcgttctccctcgcaaagtcagggtcactgaaagtagcggaagagcccaagtagttcttcgccaccggtaccgcatcgatcatcatggtgttctcctcgctcccgatcttcctagaccctcccaattggggccagatgcagatgcagatgcagcagcagtcaccgctccagtgtctcctcggcagcggcggtggcagcgaccaccaccacctcatgcctcctccgtccggcctggcgccgctgccggggggtcctgctgacacagcggcgagcggtccggcgggaggcggctcgtccacctcggcctcagtgcaagccgcggcgggagcgggggcaggggcgcagcctcgccccgtggtgtcgatggcggagcgcgcccggctcgcgcgcgtgccgctgccggagcccggcacgctccgatgcccgcgctgtgactcgaccaacaccaagttctgctacttcaataactactcgctgtcgcagccgcgccacttctgcaaggcgtgccgccgctactggacccgtggcggcgcgctccgcaacgtgcccgtcggcggcgggtgcaggcgcaacaccaagcgctccagcaagaagtcgtcccgcggcggcggcgcgggcgccacggcggcaacctcctcgtcctcgaccacctccacctccaccacggccactaccaccaccaccacgagcgcggcgcttgaggcctcgctggagggctaccaccactacctcccgctccagatgcagccgcagttcctgcagcaggctggcctgcacggctaccatttcgccgacgacggcaccggcgtcctcgcagctgacgggttcccgaggggcgtcgtcgcctcggggctgctcgcgcagctcgcggcggtgaagatggaggagcacggcagcaacggcggaggtgccatcgcggcgcatcatgagcagcagtcctactggcccggcagcaccggcggtggcggtgggtggccggtggagttcttgtcggggttcagctcatcctcgtcggggaatgtgttgtgagttgcatgtggccgcgtccaggtccacctgggcatgcatgatggggggcatgcatgcatggatgctgatgaagctgaactagctcaccatcctcaattagttctagggtttatgtggtgtttggaacttaattggcgtcgtcttcttcaattaggctggtgatgatcttgtgttggggtaaggtttttacatgttttttttcttatgagttttaagctggttaatgtcgtgcagttggtagttttgcatgtagtgggaagtgcatgtgttgactcatggaggttatatgtgtcaggttacttaactatactatgtttaattatatgagaacttggtgggcatagttgtactagtacaacccgtttctaaattgcagatgtgtgtttgg

SEQ ID NO: 88233 - DNA, 1005 bp, Zea Mays
tgcgtgctggagccctcctccgcgcgctttctctggtgacgccgtccatgtctcctcctctcttcctgcacactgattgaggtcttcattcttctctctctcttcacccatgacacatccatccagccacccccactagctctctagctagccatcctcctcatcaccctctccgcctctgtctcttgctgtcttgcggcactgttcttagctgcaggtagctccgtccagctcgacggttctctcttagcagctaaggaaggcgacataaattataaaaggcgccacttgagggcagggccaaggaaagttgtggtttccaactcctcacctcacacactctcttcttctctccttcgttctccctcgcaaagtcagggtcactgaaagtagcggaagagcccaagtagttcttcgccaccggtaccgcatcgatcatcatggtgttctcctcgctcccgatcttcctagaccctcccaattggggccaggtaattggtttatccaatcatatactcttcgttccttacttttagtttcgtcatgcacaagcatgacgaactggtttctctctccgtttcctaattattattttagagtgaatccggcctttttccaatacgaacttcaaatctctggttgattgatcgctgtgattcgcaagtttgtttactacctatgctcatgccctggttgagcatagacacaaaggaagggcatcattataggcatgttcttgaatataccgtgctttgaattccagcctttattaattgattcgttatacatacagatgcagatgcagatgcagcagcagtcaccgctccagtgtctcctcggcagcggcggtggcagcgaccaccaccacctcatgcctcctccgtccggcctggcgccgctgccggggggtcctgctgacacagcggcgagcggtccggcgggaggcggctcgtccacctcggcctcagtgcaagccgcggcgggagcgggggcaggggcgcagcc

SEQ ID NO: 88234 - DNA, 534 bp, Zea Mays
tattactgatcaagtccgccgctaaaactcctcattttttatagtaccatagtgaaaaaaaatgtacatagctatatgacgtctggagcagcatacatagtagactgtacacatctcatcattctgtgctaccttacgttcccagaaactgatggagcgatgggagcttcagcacacaagcatggaagaagccaaaccggacggacagatcagcatcagtaccgatagaacgtcgccatgaaagaactctggttcagcatgaacttttttggtagtactatccccaaaagaagacctcttttgatagtattatggcgaagatagattcatcatcatcatgcaaccgtgggttaaagaagtcccgattgttcaaggatatcggcctctgtaacaccaggtccgaaggcatcaagttgacgttcgagctcgtccaacatctgctcatgggagctgataccctcttgttgccgaaccaggaatctgctcattcgctcaaggagctgcaccgcctttctcctccccctctccgtgcca

SEQ ID NO: 88235 - DNA, 2571 bp, Zea Mays
atggctgagagcaagcggtttgatacgaagagcacaggttgtcttgaaggcctcttcaacttccttgccctcaaccaacggttgcaaatgccgaagacgattgcctatcgaaggcacagcgaaggaagtgacaatacactcagaatgaaagtcccaaagcccaaaacttgcagtgaaaaagatgaaaacatcccgaaggaaactagcagtgaccctcaaattgataaggccaacatgttcgtatggaggacactcatgttcaagagaaaaacactcgggaaagacaaaaagaagagcagctcaccggccagctccccatcctcatcacgtctgctgcgctccagatcaatccatcactcgaaatgctttgattatgaggttcctgatgagttagctgcacattatcatgcaatgaacaactcgggctccattgaaatgggttcttgtcacagtgaaccgacaccattgccacatgagtgtccacaacatcccactgtccaagagccttgcagggcttgtggcagcatggatggcaaaggtagcatagatatggaggcacccagtgagacagcacctgggaatctcactgatgagagtgaggctctcgctacacaaaaaactcgtgatgctgcaacacatccttcgaaggagttcttggattttcttgaattatttaatgcacatagggagctatttttgaagattcttcatgacccttcattactaggaacacctgaacaacaagggcaagaagcttcatccagtggttctgtaccattgaacaaattggaatcatttccaagaccaggagggtcatcagggaaacgtaaccctatatttgatcggagtgacagtgagaaaaacatgccagaaatccaaaggtcaccatcaagacctacctctgacccggaagctgcaaaggtcatcagtacaagaatgcctactggtgttgacagctccgcagtttctcttgcagaatcaaggagcctgaagaaagctggaacagcttcaaaccgttttaaagctatccgtagaaagataaaagatgtcgtaagggagaaccggaaagagcttgctcggattaccaaggatggggttttccacaaactgccatatggccaaaaaatgactgggttgaccaggagctcctccatggagaagtttgtccaggaggagaaacaaatccgaaggacatattctattgcagaatcagtagacaagtattcaacactttatgagtcaatctctagggactcaagaatttctctagaaagattaaacataacaatggaaggcggtgcaaacttaaatgataagaagacgccaacgagcctcaaaagaataacctctcttccagagatgcggttgtgttcatctcaactagaggtcctgcctgaagtttcagcttctcggattgggtccaagatttggaatgtggaatctgaccgcttttcttcacgtggaactgatgccttcagtatctgtgcggaaggaaattcctatcctgatgatgtcacggaaaaatcagaaaatattcacattgaattaaattgtggaggcttcttggaagaagatttccgcagcatccttcgaactccatcttctcttggccggtctttctcccaccgccgcattaatagtttaccttccttcgatcggtcattctttcaagaccgtactggtagtttcacggagtgttctatagcagattcagagccacagttcgaaaacttgcagcttgaggacgaggactggttagtcaagccaccactgtccgcaggagcatatgctgccaatttcaatgatgaagaatggctggtcacaccactgaagcgctcccgtgtcatgaatggtattgaccatgaggatgaagagtggttagttaaggcgacgaaactgtctggtgccaaggatgctgatcttgaagctgaagagtggttagtcaagtcagggcagcctaacgatgctttggattcggacttccgcttcatacacgaattttctgaacaaggtgctgcagaacccttgcacatctatgtcagtgacaagaacgaggctgatttccagtatgtcaaggacatcctcaagaaatcagggttcagctgcggcgatgtcgactggtacgcgtccaatcagccagtgagccctgtggtctttgacgaggcagaatgctcgtgtcaggaggtcagcatggcaagcgatgaacctcacagcatcgtcaggcgcatgctcctgtttgatctcatcaacgaggtcctgctggacatctatgactcctcactcgtcatcggcccatggcactcacgcttcgacctgcgaaccagacccattcccatggggtaccatgtccttgaggaggtgtgggcgaaggtgagctgctacctgagcctgcattggaaggaaggccagacggtggaggacattgtggcacatgaccttatgagaaaggacggctggatgaacctggtatatgacgcggagtgcaccgcgttggacatggaggatctgatggtggaggaccttcttgatgacgttgtcattcagatagtgttagaatccattgatgaatga

SEQ ID NO: 88236 - DNA, 750 bp, Zea Mays
agacaaacgtctcacaccaccagacgaggacgacgaccccagcgttcccctagaaacaaccgagtcgatcggtcgtgcacgacgatgctggcagccagcagcatgcctctcgccgtcccccttttcctgctcgttgtcgtcgcatccgcggtcccggccaccgctgagtacagcggcgccaggatggtgatcatccgcagcggccccgggacaagggtcggcggcggcgctgccggtgcccagagtaacaagtggcggcggcactaccggcgtctggaggacgaggtggcgccggagctcggcggcctgctgggggcgggcggcagcgcggcggcagtatcgactaccgcgtcctcgacaagaacacgtcaggttgcgtgaaaggcaaccagtgcgccaccaagggttctggtgggtcctacacccggccatgcatgtacaaggaaggatgccccaacggccccactgactgaccggccggcggccggcgttgccaacaaatcgagaggggccatgcgtgtggcggactgccggtcaggcactgtgtccgatcgctgcttaatgctggccgcacgctaaataagctacggaaacattctacgtacgttatgtatttgctagcagtctagcagatgtccatgcgctgctactgctaggggccgagggtttaaaaatttcagtctagcagatgtcataaaatttggagctggaggctgaaactatgataagctccagactggatttcgtgga

SEQ ID NO: 88237 - DNA, 454 bp, Zea Mays
acatctatctcaattattgcagcatcacggtacttgcgggtactgcgaacaacttttatggcaacatattcacgtgtttcacggtcccagcattccaaaccttctctcattttgctcaagattttatctgcaaagctcgtaggcctcttcattagaataataacggagatacccagcagaagaggagacgacagattgcagaaaacccaaaccttctctcattttgctgaagattttatctgcaaagctaaaaagcattctgtcaataaacataaccatatatcaaactaaatctaagtctaaaaggatactgggaactatacaagccgcatactgcataaagtttgttactttttgcgaaaaaaggttattgctattaaaatcacaaaaaactaaagatcagaatgggaaccctgcttcacacattattagcttgatacgacgaaggaaaacc

SEQ ID NO: 88238 - DNA, 219 bp, Zea Mays
ttctcataaacattgtcagcatcatctctactggcaggagagtaggacctccgcttcttatcttcatcatgctcctttggcaggcgcctgggaggagatgagcgatgggcttcctgtctccttggagaggcagagtagtcattcccccgccttggagcaggagacatacctcgaccgaggacggccccgatagcgaggagagcgagaacgagaccgacc

SEQ ID NO: 88239 - DNA, 916 bp, Zea Mays
tccccgacggggacggggatgggagaaaaagctcccccgtgagcgttcgcgggaacggggacggggaatttttgtccccgcggggacggggatgggaagccattccccgacgggaaaatccccgttgccatccctaaccatgggtggtacgaaaatagaaatgcaaaattaccatagtaagaagaccggcgaccttcatgaccagaatcataccttactctagttctgctgcgcatttcttctggcctttttcgtgactcagcagcaagaacaacagctatttcccgaccaaagaaaacttggcgattcatgtgatactgggcttcagaggcatcgtaaggatcaacaaactctacaaaggcaaatcctcgaggctccctgcatatgttagtttcattagacagtacggagaggaaaaattcaaggaagtgacaaacaaatgaagatgcaaagtgttcacaatggtgtcttgttggcgttttaccatcaaattcaaatattcactgtgccctctatggttctcagcgaagcacagtcaacaacttacaaacattccatcagaagagaagcaagtgttgcaaaaagcagtaagatgcccaggctctagtgtccaagtttcttgtatacaactacgtaaggtgatcctcataaagagtatcttcataaaaatcgttcgcttcaagttccccaacatttgaaaaagtcacaaaagtacttgaaattgacttgactctcttttatcttctcatgtaccagccagtatatatgtctctcatcttctcttcatgaaattaattttctcaaagtatcaaatcttgtcttcatagaagaacttcattggacaagactctatcttgccaagcaaatgaattgttagtaatgttaaaaggcattctttgagaaacaaagagtatgc

SEQ ID NO: 88240 - DNA, 198 bp, Zea Mays
aaccgtgaaactccctcgccgtgcgctctggcatcggctaccgccgatttcgccattgagttcgcaagcactccttattctgttcgtctcgccgtgggcgacttctctatgcttcaaatccgtgctgctcgccccgcatacgctcacttctcatccatcgggttttgtgcgtgctcgcgtttgtcgtcgagctgttga

SEQ ID NO: 88241 - DNA, 1542 bp, Zea Mays
cacaaggaggaggacgatccttcggggacggatgccagcgcccgtgccgtgcgaggacgacggaagagccgcgccgcgcctggagcacgcatgggagagaactcaagtgaagaaacaagcggggccggaaccagggccagcatggagcgcgtaaagcacgagaacttttgccgtgccgtcgcagaggacaacacagcgctcctcctctcagcagtgggaaacttcaggaaggaggccctgtgccgcatccgcaagggctccgacgcctcgagggtgctggaccaggagatgtccgtcaggctactccacctcgcttgcaagcacgacgcagtagagtgcgcgacgctgctcctagagggcggcagcgggatcacggcggcccccattgatgcaagggaccagctcacgcggacgccgctgcacgtcgcagctgagacccactcggccaggtgcatagagctgctactctccaagaacgcccgtactgatctcagggtggttgacgggagaccacttctcccgcttgagatcgcgctaatgagcaggagagttcaaactaactggtccgtggacaacccaattgaggatcttctgtcttttcttaaacaaagggatctcaatgcagtaaggctcctggcagagaaaaccagagtggttggggagcttgcttacagatacgccatggaaggatgtgtccctgcattgacaatgctgcttctggtggttgaagagaagatatcgtcacaggttagtgtggttatagagggtgtcagaacgaagcgttcaatctacaactccattgtggacgaggctttatcaacgggagatacttcagctcgtgatggacatgaaaggagaaaggccctgctctgtgagattcagctgcttaaccaatttggatcggcatcatggagggaccacaatgacaagagaacactaccccctctactgagagctgctaaggttggagatatgaatgttataaagatgctcctgatgggtaatgttgatgtcaatgaagccgactctgaaggaaacacagcacttcactggtgccttagtggtgcttcatgtaccaaggaaccaaggattgtgtggcttctgctcaagaatggcgcaagagttttccaggggaacaaattagggctcacaccagtacacagcgctgcagctaagggcaattacaaagctcttcagtcacttctgcttcatgcccaagattgtgttgatatacctaccaagaccaaagaaacgccattattttttgcagtgaagaatggttctgtggattgtgcaaaacttcttttgcgtttcggggctgataccaaagcccggaacctgagaaagcaaagacctattgatgtggcaacatcccaggacatgcgtttcatccttagctctgcgaatgtgttactatggaaccataactcacctcaaaagaatcgtgtgatgagaaaggaaatttacaaagagcttggtgatgaatttgacgattttgacaaggattcctgtgatgaaagctacactgggcttaagacatca

SEQ ID NO: 88242 - DNA, 1353 bp, Zea Mays
acgcgagaaaattgaatatttatactacccgtacacagcacgaacgggtatagtcgggccgttttcacccctagtgccatccctccctccggggtgcggaccttcctggagttctttccatcagccgaccaccggttccgaattccgacacgacatcgccaaattcctggaggccaaaacgcgatggaactcccagatgaaagagtacaagtagatgcactggagagacacttactagctggtttatcttcaaacgactatgatggaagttttgaggatgaggtcctctatgatgcatcatttgcagaaatggaagataattttgtcaagtatcaaattgctcagtggactttattatctctattactaatcgtagcttggggagtaggtgtgctcatgctactttacttacctattggggtatatgtatgtcgaagagactttcgctcgaggaagctgtacttgacaccgcatgctgttatttacaaggtaaacaagccttttgcttttccttgttttggagtttccaaaaaggagaaatattggatcctcccttcaatttccgatgttgttgttgagcaagattatctccaatccatttttggtgtatattcgatcaggattgagaatattagtgtcagaaagcctcctagttgtgatgtaaaaattactggggttgctcatccacatgatttcaggaaggccgttgtagtccatcttttgaacactaggaatcaaaaaacatcatcggatgaccaacagagcacaaatttgaattatgcagctagttcttcggaggcttctcttggagatttgatgctagagaagcttgatgaagttgaaatctctgtaaagaaaatgcaagcactgctacaggggcctgaaatttccaagtttaagaccacatcaggttgactccatgtatgttgacattttcacaggtgattgaagttgaaattgtttgactccttgggaaatgagaattgcgttctttttggaagtactagggagtacataccaaaattttgggcatgttcagctattggctgcggcagcagctgtacagccattcagcaactgtagcacatgcagcatccaatcagcagctggcacctcagcaaacagccgcttatacgcacagggaacaggcctttactgcagaagtcgcatttgtgcaggagtcatcaggttatgaaatgtaatgactatgtgtttttgtttctaataaataacgacgcaactgtaactaccaaaaaaaaagttctgttaaagaatgcagtaaccagcacataccctcctcttgttcagtaaatatcagccaaagtgccaaatccaaactaaagttatcaagac

SEQ ID NO: 88243 - DNA, 1286 bp, Zea Mays
tccctccggggtgcggaccttcctggagttctttccatcagccgaccaccggttccgaattccgacacgacatcgccaaattcctggaggccaaaacgcgtgcttatgaattgcagatggaactcccagatgaaagagtacaagtagatgcactggagagacacttactagctggtttatcttcaaacgactatgatggaagttttgaggatgaggtcctctatgatgcatcatttgcagaaatggaagataattttgtcaagtatcaaattgctcagtggactttattatctctattactaatcgtagcttggggagtaggtgtgctcatgctactttacttacctattggggtatatgtatgtcgaagagactttcgctcgaggaagctgtacttgacaccgcatgctgttatttacaaggtaaacaagccttttgcttttccttgttttggagtttccaaaaaggagaaatattggatcctcccttcaatttccgatgttgttgttgagcaagattatctccaatccatttttggtgtatattcgatcaggattgagaatattagtgtcagaaagcctcctagttgtgatgtaaaaattactggggttgctcatccacatgatttcaggaaggccgttgtagtccatcttttgaacactaggaatcaaaaaacatcatcggatgaccaacagagcacaaatttgaattatgcagctagttcttcggaggcttctcttggagatttgatgctagagaagcttgatgaagttgaaatctctgtaaagaaaatgcaagcactgctacaggggcctgaaatttccaagtttaagaccacatcaggttgactccatgtatgttgacattttcacaggtgattgaagttgaaattgtttgactccttgggaaatgagaattgcgttctttttggaagtactagggagtacataccaaaattttgggcatgttcagctattggctgcggcagcagctgtacagccattcagcaactgtagcacatgcagcatccaatcagcagctggcacctcagcaaacagccgcttatacgcacagggaacaggcctttactgcagaagtcgcatttgtgcaggagtcatcaggttatgaaatgtaatgactatgtgtttttgtttctaataaataacgacgcaactgtaactaccaaaaaaaaagttctgttaaagaatgcagtaaccagcacataccctcctcttgttcagtaaatatcagccaaagtgccaaatccaaactaaagttatcaagac

SEQ ID NO: 88244 - DNA, 90 bp, Zea Mays
aatgtgttgatctcttttcctgtgataattatgaaggttgaggcatctgatgatctgctacaagcagcaatgttactaaggttgcgtagc

SEQ ID NO: 88245 - DNA, 3475 bp, Zea Mays
ccaccccgcccccgcgaatccatcctatttccgccgatgccgccttcctcgaaccttcgtcgcccgctgcacctccccgccgcgccccctacaaagccagccagcagctaaaaacctcctcattctcatccacttcctcccgcgcaaccgctcttccccaacttcgccgccgccatgggctcctcctacgacccctacccgtccccggccgccgacgacctcttcctctacctctccgacctcggccccgcctcgccctccgcgtacctcgacctcccgcccaccccgcagcctcagccgtacccgcagtcccagcagcagcagcaggggagcaaaggccccacgcaggacatgttgctcccctacatctccagcatgctcatggaggacgacatcgacgacaccttcttctacgactacccggacaaccccgcgctcctccaggcgcagcagtccttccttgacatcctctccgacgacgcctcgtccccgaccaccaccactggcaccaccaacagcagcgccagcgtcaaccactcctcctccgacgcgtccgccagcgcgccgctcaccccagccgcggtcgactcctactccccggcccccgccgtccagttcgacggcttcgacctcgaccccgcggccttcttcagcaacggggccaactccgacctcatgagctccgccttcctcaagggcatggaggaggccaacaagttcctgccctcagaggacaagctcgtcatcgacctcgatccgccagacgaccccaagcggtttgtcctccccacccgcgccgcagaaaacctcgcgcccggattcaacgccgccgccgccaccaccgcccctgccgccgtggctatggcggtgaaggaggaggaggtgatcctcgctgcgcctgatgccgcgcttggcagcggcggcgtcgtcctgggccgcggtcggaggaaccgcttggacgatgacgaggaggacctggagctgcagcgccggagcagcaagcagagcgcgctgcagggggacggcgacgagcgggacgtcttcgagaagtacatcatgacctgccccgagacgtgcacggagcagatgcagcagctgcggatcgccatgcaggaggaggccgccaaggaggcggcggtcgccgccgggaacggcaaggccaagggccgccgcggtgggcgggaggtggtggacctgcgcacgctgctcgtccactgcgcgcaggccgtcgcctcggacgaccgccgcagcgccaccgagctgctcaggcagatcaagcagcacgcaagcccgcagggggacgccacccagcgcctcgctcactgcttcgccgagggcctccaggcccgcctcgccggcaccggcagcatggtttaccagtcgctcatggccaagcgcacgtccgcagccgacatactccaggcgtaccagctgtacatggccgccatctgcttcaagagagtcgtcttcgtgttctcgaataacaccatctacaatgccgctctgggcaagatgaagatacatatcgtcgattacgggatccattacggcttccagtggccgtgcttccttcgatggatagcggatagggagggcgggccaccggaggtgaggattactggcattgacctgccccagcctgggttccgccctactcagcgcattgaggagacagggcgccggctcagcaagtatgcccagcagtttggtgtgccattcaagtaccaggcgattgcagcatccaagatggagtccatccgcgcggaggatctgaatctcgatccagaggaggtgctcatcgtgaactgcctataccagtttaagaacttgatggatgagagcgttgtgattgaaagcccaagggacattgtgctcaataacatcagaaagatgcggcctcatacattcatacatgcaattgtgaatggctccttcagtgcgcccttcttcgtgacgaggttccgagaggctctgttcttttactcggccctgtttgacgctctggacacgaccactccaagagacagcaaccagaggatgctgattgaggagaaccttttcgggcgggctgccctgaatgtcatcgcgtgcgagggcacagatcgggtggagcgccctgagacgtacaagcaatggcaggtgcggaatcaacgagcaggcttgaagcagcagccgctgaaccctgatgtcgtgcaggtagtgcggaacaaggtcagggatttataccacaaggactttgtgatcgatattgatcaccactggctcttgcagggatggaaaggccgcatcctctatgccatctcgacatgggtggcaaatgatgccccctcttacttttagctgtttttttgtgactcacttgtctacaactttaggggccagtttggtacggcgcgtgcggcgccacggcgtgcctaagctgcggcgcccgaatcggccgccacacctgcggcgggaaaactatggtgcgccgtggcggcttagtccacgcaccaaacagcccctaggtttaggtatgtcatctagatatatctagtgacaagcgtgttcttggcctagttaatagccatggttacttggactctgcagtatgcctagtgccctagtgagaattcaacatgtacctgttctttccaagggtacattcagcttctgtggaacatgagtgacacacgggggatccagaagtcagaaggcataccgaaatctgtcctttgatttaatgtggattatatagatgctcatcactcagccatgctgttgcatagtgctaaatatgatctaggtcctggtctggataatgttctccacagcatctgctgtgcgtgtgacctgtgatcagttcagtcagttgaccaggttgtaattgacacttgttcctctgtttccggcgcttactgcgctgtttcagacttaaccatggctattatgaagtgatgaagcgtgggggttttttgtctgtctactttatcgcacatgggggagctctttccaggatttatatgccatgtgtttgttgatgtacatgattcatgttcaatgagttgaatcctctttccagcctgcatactggtttgtcgcggcgaggaaattattattatgacagtttatgaactgtggctgatgaattgttcagtaatcagtcgtgctgtttggttcacgaaatgtaacgtaaattgtaacggtaatgattcacattcgattcgagtaccagtggtaacaaatttgaatatgccgatattagttcttagtgtgatttagtttctagtgtgatatttaattacggttggtcacaaacaaacatgatataacgttattagttatccattacgttacaaatatgtgagctaaacgacaccttattaggctgttattaccaggattgcaattatctcttgctgtactgtctctgcgttttcaggctacatatggggttttgtgaggcccatgctgtcttgtatgggagctctctcca

SEQ ID NO: 88246 - DNA, 173 bp, Zea Mays
ggtcactagcaaattcttagtgacaccactaagacaaagtcataattttgcaaggtctaattcaagctgtctagcagaactaaaacataatatcacaacaaagtcttgttaatcctaaagattttgtccaaacccccaccacaaaaccaagccattgctccgagagagttatt

SEQ ID NO: 88247 - DNA, 2461 bp, Zea Mays
gttccctcgtgaattagtaggagggaggctgtagtgtcgaattgggtgggggaagggtgccagcgactgatgtcgatgagccaccactgcaccccactctcctccgtcatccccaccccaataccgagagtggaagcatcgcccttcacctccacctcatcctctgcattaatcgccactgtgaccttgatctagactcggattggggcctctgccatcgccgccgcagcctggacgcagatctgggtcgttgcggccttagtacaagacgaggagtcagaagcagacggaagccatggagaagaatctagcagatttatcccaactccttccatccttgcaagtgcaaaatgagtccatcaaagtggctctggaggagaataccgcagtggtacgtgatctctctgcttggaaacctcggattgaaactgacgtgagcaatctatgggaggatttgggtcatctttctgacaaggtggatgaattactggctgggcgaggcacaccacaacttgaactgaaggtgtttgatcatttgccgctactagttcaagcgtcagcacaagctcttttggtgaatctggatcatgctacttcacaccggagtgatggttttcgggtggtcactaccctaagaccacctccggtcacaggaggaaatctacacttgggcaacattgctacaactcgtagattaactgatactactgggaatctcaccacctctcgattgccttcactagctgttctatctcaggcttcttcagttggggatgtcaagcatcacaaagaagtcagtaaaattggtttggatgaacacaaagctgcaactctgatggcttttagaaaagctaagggcctttgttacaaatgtgggcttcgttggggtccaacacacaaatgcagtactactgtccctttgcatgtggtggaggaactctggcagctattggatacatctgggactcaggaaaatattttagagccaactaaagaatctagtgatgatttaatgaccttatcggtgaatgcggtgcaaggtattgaagccccacaaacggtgacattaattgcatccatgttctccaaaatagtggttatgcttgtggattcaggtagttcatcctcttttattagctagctcttggcagcttttggtcctggattagtagctctatctcagtctgttattgtcaaagtggtgaatggtcaagttatatgttgcactcatcaaattcctcgatgtcaaatgaacattcaaagccatatcttgtgtgttaacctcaaggtgttacctctacagtgttatgatgtcatcttgggtatggactggctatcttcccacagcccgatgcaggttcactagcaggagaaatggttatgtttttaccatgagcagtagctggtaattctacaaggtcagcgaactgattgctccaagttggaacaagtgtcagcctttcagttatatcatatggcacggttggatgagttatggtgtactatggaagtgcaaccaattctagaaacgcccaacatacaacatctttctcaggagatcaaaggccttctattgaattgacctccttatttgacccacccaaacgcctacctcctcccagatctcattgccacaccataactctcatccctggagtggtacccttttgtcttcatccctatcattacaacccagctcaaaaggacgaaattgagagacaaatagttgaactccttaagaatgggatgacacaacctagttgtaacccctttgcgtctcctgttatcttaggtcgcaagaaatagttgactggagattatgtgttgactaccgttgcctcaatgccattacagtgaagaacaaatatcccattccagtaattgatgaattattggatgaattgcaaggagtggtatggttcactagtttggatctgagctcagggtatcaccaaatccaaatggacccaaaagacatccagaaaaccacatttcaaactcatagtggacattatgagcatcgagtcatgccatatggagtaactggaggtccggctacatctcaacttgctatgaactcagtgcttgcaccattctttcgcaagtgtgtggttgtctttattgaccatattttgatctttagtgctacatgggttgatcatatacaacatatacatgttgttttctctgtattggaccagcaccaattcaagatcaagctatccaaatgctcctttgctcagaaaaaactacactatctgggtcatgtcatcagtaatgaaggtgtggcaatccaaggtagctattattcagtcatggcctactcccaaatcagtcaaagaagtgcgtagtttcatggggctagcaggttactatcgtaaattcgtctaacgttttcgaattctgagtcgaccattaactatgctgctaaaaaagggacaagtctttgtatggacacttg

SEQ ID NO: 88248 - DNA, 846 bp, Zea Mays
atggagaagaatctagcagatttatcccaactccttccatccttgcaagtgcaaaatgagtccatcaaagtggctctggaggagaataccgcagtggtacgtgatctctctgcttggaaacctcggattgaaactgacgtgagcaatctatgggaggatttgggtcatctttctgacaaggtggatgaattactggctgggcgaggcacaccacaacttgaactgaaggtgtttgatcatttgccgctactagttcaagcgtcagcacaagctcttttggtgaatctggatcatgctacttcacaccggagtgatggttttcgggtggtcactaccctaagaccacctccggtcacaggaggaaatctacacttgggcaacattgctacaactcgtagattaactgatactactgggaatctcaccacctctcgattgccttcactagctgttctatctcaggcttcttcagttggggatgtcaagcatcacaaagaagtcagtaaaattggtttggatgaacacaaagctgcaactctgatggcttttagaaaagctaagggcctttgttacaaatgtgggcttcgttggggtccaacacacaaatgcagtactactgtccctttgcatgtggtggaggaactctggcagctattggatacatctgggactcaggaaaatattttagagccaactaaagaatctagtgatgatttaatgaccttatcggtgaatgcggtgcaaggtattgaagccccacaaacggtgacattaattgcatccatgttctccaaaatagtggttatgcttgtggattcaggtagttcatcctcttttattagctag

SEQ ID NO: 88249 - DNA, 222 bp, Zea Mays
atggagatgcacatggacgacaagagcaagacgccgctttccaagaaggggagccggaggtcggcgtcggcgtcggcggcggcggggctgaagagccggccgtccagggccgccgcgggcaggtcggtgccgggccgcctggcgggcctggtgaaggagcagagggccaggttctacatcatgcgccgctgcgtcaccatgctcgtgtgctggagggactag

SEQ ID NO: 88250 - DNA, 321 bp, Zea Mays
atgcaccgcgctgcaatctggtggtggtggtgtggtggtggcgtggtcgcaggcagccagcgatctgctcgcactttcacaccagtggacggatacaaggttttgatagaaccagtcgtattgaattgtgaaagagccgcaacggaccgcctaacatggatgcctttgttgttcgacgactactgtgatgaagatttttatgggctaccgcggaaatacagtattgtcgctcgggtagaagttaaattctcgattgaaccacgttatcgtgacagacaacatttcattttatctgacatcaatgatgcaaagattctttga

SEQ ID NO: 88251 - DNA, 462 bp, Zea Mays
atggagctcggccaacagacagcttgcgtgcagggactagcttggctgcgcgcggcatgggcaagcagggagatccgggcgagcaaggagcagcggctggacgccatgagaggacctgcacgcagggatgaaactccacggcgaccatggctgcaggaagcgatgaatgagcggctgccttcggacgcgaggagggagaagaatgagcagaggccaaggacgcgagtccgagcagaggccaaggacgcgaggagggagatgaatgagcggctgccttcggacatggggcgagcagggcgcggcagaaagctccaaaccggcgcggccatggcagagctgggcgctagagagagaacggcggcgctggagctcggtggagcagagggcgagcagggacggcgcgctagggaagaagacgcgttggggaacagggagcagaaggagctacgcaccatgggctag

SEQ ID NO: 88252 - DNA, 75 bp, Zea Mays
gatcttaccttgctgaccattctgctgcttccatcatctgtactgaacagggagaagagctcaggaagcatattg

SEQ ID NO: 88253 - DNA, 135 bp, Zea Mays
ccggccctgtggcctctgtcgatccgccgccgcgcgccaaggagcaggctaatcatcgcgcgccgtcgttgttcgtcatcgactacagccccgtcttcccccaagcggccaccaagtgatcgaggtcgtcgtcct

SEQ ID NO: 88254 - DNA, 570 bp, Zea Mays
atggacctactttgcgatcaaggactgaaagggatattgttgatgaagaatgtgaaaatagttacgaagaatctgacaatcccatcattgatgaaggaatactatgaaatggatgaatctggtatagattatgttataacatctgcagcaaaaaagtggagagagtttaaggctgacctaaagaacaaatattttgatgaaacattgagttttgaagagcttattgctaaaagggatgaaagggtgaaagaatctgattgggagtggttgataacttattggatgtctccagaagccgaggttcattcaaacagaggtaaagataaccgttcaaagctgactatgtcgcatgcagctggcagcaagagttatgctcgtgtgggtcatgaactggccgagcaacaaggacgccctgcgagaagagatgaaatatatgttagaacacacacgcgtaagaacaaagaaggggatattgtgcctctacctggagcagaaatattcattatgggtcgtaacaaaaaatcaacgttgacccaaggttctacagcagcagtgcctactgttagttag

SEQ ID NO: 88255 - DNA, 560 bp, Zea Mays
attaccgccgcaacgcagcgcaagaaacaacgaactcatttctagaggcgaaagagcaaaacccttcagaaacccatcggagaagaggcggagggcgatcggagagcgggatcatggcggggccagttgcggcggtgacggaggcgtgggacaagctcaccgtgttcctgtactcccagctctacgacgagaggaactgggccaaaaacaagaagttggcgaaggctcttggtgtgttcgctggatccatcctgttcatgcgcacctgtggtgatatggtggccatctagggagccttcaaaagttgcctaccgtgaactagagacacccccttttttgttggcattggatgtgttcttacttcggtcagggacagttgaagcgtatctagactctagagactgtttgtcttgctagaatcgcaaccaaaagtattggtccaagattagtgcaatggtgaaattatttcacccaagcgcacgagttgcagtttttttttttcctggaaccatttgaattctggacagtggaatggtactcccttctttggcttccttaaa

SEQ ID NO: 88256 - DNA, 480 bp, Zea Mays
aacaagtggtcagggaattcaggtgcatctgctgtttgttttaggctctctgctggcagttcgtgagggcagcatgagggcgccgctgctgctatgggcggccgccacgtggctggccgtcagcgccgtggcgcaccctggcagacgtggcggcggcggcggggagcagccgctgtcgaggatcgccgtcgagagcgcggtcctcgccgtcgacgatgcggcgcacgtcagggcgtcccccttggtactggggctcaagggcgagagcagcgaatgggtggacgtggagttcttccatcccgacccatccagcgacgactggatcggtgtcttctctcccgcggatttcaggtaacgagttaacagtatcaccgtctcgctaatcgattggttggatcagtaaaactcaaccaaccaaacgggaaaatagatctcccccccataaacactctagtactctgcaaagaaagtgcagcgcag

SEQ ID NO: 88257 - DNA, 2167 bp, Zea Mays
aacaagtggtcagggaattcaggtgcatctgctgtttgttttaggctctctgctggcagttcgtgagggcagcatgagggcgccgctgctgctatgggcggccgccacgtggctggccgtcagcgccgtggcgcaccctggcagacgtggcggcggcggcggggagcagccgctgtcgaggatcgccgtcgagagcgcggtcctcgccgtcgacgatgcggcgcacgtcagggcgtcccccttggtactggggctcaagggcgagagcagcgaatgggtggacgtggagttcttccatcccgacccatccagcgacgactggatcggtgtcttctctcccgcggatttcagtgctgcgatctgtgagcctgagaatccgaggcagtctcctccagtgctttgctctgcacctatcaagtaccagtttgcaaccttcaaaaatgatgggtataacaagaccggaaagggctacctgaagcttcagctgatcaaccagaggggagatttctcgttcgcacttttttcaggaggcctcttgaagcccaagctgattgccgtctccaacaaggtggcatttgcgaatccgaaggcgccggtgtacccacgtttggcgcaaggcaagtcttggaatgaaatgacagtaacctggacaagtggctatgatattacagaagcggttcctttcgttgaatggggcgagaaaggcggacgccggtttcttgctccagctggaactctaacgtttgacagaaacagcatgtgtggtgcaccagcgcgaactgttggttggcgccatcctggctacatccatactagctacctgaaggatctgtggccagactcgcggtacacttacaggcttggccacaggctaatgaatgggacccgcgtctggagcaaatcatacagcttcagagcatcaccttaccctggacaagattctttgcagcgagttgtcatatttggagacatgggaaaggcagaggcagatggttcaaatgagttcaacaacttccagccaggttcactgaatactacgtaccagatcacgagtgacatagaaaacatcgacatggtggtccacatcggggacatctgctacgcgaacggctacttgtctcagtgggatcagttcactgcacagatcgaaccgattgcttcgacggtgccatacatggttggcagtggtaaccacgagagggattggcctggcaccggttcattctacggcaacctcgactccggcggagaatgcggcgtccctgcccaaaccgtgttctacactccggctgagaaccgcgcaaagttctggtacgcaacggactacggcatgttcaggttctgcgtcgctcacacggaggaggactggaggcccgggaccgagcagtacaggttcatcgagcggtgcctgtcgtccgtcgacaggcagaagcagccgtggctcgtcttcctcgcgcaccgcgtccttgggtactcgtcctgcgcctactacgagtcggagggcacgttcgaggagcccatggggcgggaagcgctgcaggagctctggcagaagtacaaggtcgacctcgccttctatggacacgtccacagctacgagaggacgtgcccagtctaccagagccagtgcgtcgtcgacgcgtcggaccactacagcgggccgttccaggcgacgacgcacgtcgtggtcggcggcgcgggagccagcctctcggagttcgccgcctcgaagatccagtggagccacttcaccgacttcgaccacggcttcgtcaagctcaccgccttcaaccactcgtcgctgctgttcgagtacaagaagagccgcgacggcaacgtgtacgaccgtttcaccatctcgcgcgactaccgggacgtcctcgcttgctccgtcgacaactgcccccggaccacactggcctcatgaagcctcacgatcgcggtggttttcacttttcagacaagggattcggtccgtgcggtgggtctcttgcagggcagcagcgattcaagttactgtacatagttttttttttctttttttctttttttggtagtgcgccaataaatgaggcgttttctttactgcctccgttacctgcatgtgaaactatgttgttctacccgtagctaaaatatgttttagtatgagaagggttaaccaaaa

SEQ ID NO: 88258 - DNA, 2614 bp, Zea Mays
gtagttgtagcatttgttttcacatgcgaagaccaatccgttgcttttgcggatgaaagacaccattttacgcatttatacatggctcaagaattaactgtactccagcaatttatcgtaaatttctccatcgttttcaagtgttgtcgtggtcctgtgctcccctgtatttggtggtttggctcctcgggatgttcttcctgtcccctccggaccaagagtccaaaacccaaacccaagcacccaaatccgaccccaaaatgcctgcttctcagtgatgggatgacggatgctcccctcctgctgtagccccagctcgcgccgcctcgctttctcccttcgcgacgccggcatttcgtggccggcggcgccgccttatcctctgccattcttgtgggcaagataagcagcgggttgtttttctttaccgttgtttctgaaggtttcggggccagttcagccggatcccggctcttcggacgccgccgctccctcggcctggtggagctggtggagcggaggggaggggcgatccatacggaggtggcggttccatttcttgttttcctgattgcccaagcaactgtggacctgaacagacttctgtggtgctgttgaagaattagtgccactctcccgatggataaacagaggaacaccaagaatggggaagtggggaacaatgtgttttgcagaatgattcttgatcatattgctggggacttatgtctcaatgaggagaacgtgccttgcaatactccaagaaactccgttcactccgcgtttggtggcaggacagttgcttctactagcggcagcttcaatactgattcggtgagcccaggcgagtatgtcagggatcctggatccctactgagtttacaaccgtggatttttagaagaaacggctcacagaactacagggaaagtgtgcgcgcgagtggtaaaggcaagaatctggtcgatgtccttggagagggtcaagctgtcgaaatctctccaaggagcccttgtcttggttctgggcctggaagaggctgtggagctcttaggagcagaagatctcgtaggaatttgatgaagccacttgtgccaatggaaaactcctacgttccacagctttacagtgagaacttcgaaatggaagaatgcacgtttgctccagctccctccccagcttctactaggccattcgttgtgacagacggtacaaggataattagtaaatcacgctatgagccagtacctctgccctttaatattagattagacgaggaatgtagaggcacctcattgatgccaggaagtatgattggaattgctcctctacctgagctgaagaaactcaaacatgaggccagagatttacacgatgcaaggcttggtctgtctggttctcagcgaagtagcaaatcgcatgaacaagcaggtctacgtgatcgactcctactattctctactggggtgagcatcggtattctgtcaaataagaaggaatttgatacattgaagggcacactgaaacaaatggagaacttagttcaggatttacaagatgagctggagatgaaagagggtttaactgtgaaagaattacttaatgaaacatctatcgaacatgatgatgataatagcaaactacacggagttgatccagagccaatgagcaaaattgaggctgagcttgaagctgagctagcaaggctggaactgaatatcacttcgataagtttagaagaagaaacatctgaaatcaatggggccgacgatgattccattggtgacattgtttgcggggaactgaaagctgatacggtccctcgcgacctcacagagtacagcagtgaatctgaccatcgcagggacagcagggaaagctccccaggttacacatgtggagccaactgtcctgtctcgccaagagatctcagcatccgtcttcacaaggtgatccaacacaggctcgaagaccgaatcaaggagctcgagtcagcaatcgtgcacggacagaagcagacgcaactgcagatgatggtgactgaccaaatggtctccgaccgaatacgctcgaacagcgagtcaggttcttcttcaggccagggaagtcccattttcatacaagaaaccagctcgctggcagaaccgtaccgtctaaacctatctggagacgcgctcgaagcttacgatgaagcttacgaagagttcatgaggatcgcggactccccttacaccacaagtccaaacgggaagccacaggcaaccgaagattgcttggcagaccgtggtctagtctggggaatggaggacagctctaggaagctgagagaagtgcccacctgggagagagctctaaggagtgcagatcctagcagagatcacgagcgcgatagggatgagtcaggtggcgacgacgacgatgacgactgtgaagtgctgatccggcagatcgtagagagaactagacaaggttcacatgtactcgttaacgcccagaaacttctgttttctgtggaccaatagtccactgcactatacaccattgctttttgagagatatatagcttgtatgtagtgtcgaattattgttgagaaaaaagggaattgttgattgttt

SEQ ID NO: 88259 - DNA, 814 bp, Zea Mays
atggccgtcgcggctcttcttgtactcaaacaagaggaacgagctgttgatggccgtgagcttgccgaacatcaagtgtcggcgtccctgaagaagctccagtacggcacactgtctctgaacgtagacaggctcgcgccgccgccgcagccaacggtgacatgggtcgtcgcgttgaaccgccccgcccgccgtaatgatccatatcatcttggactcaccggctctttgcctggtagacggggcacgtgcgctcgtatccgtggatgtggccgaagaccgctatatcgtacctctgccagaggtcttgaagcccgtcccggcccatcggctccccgtacgagcccatcattgtctcgtaccagccacccgacgagtagccgagaacacggtgcgcgaggaagacgagccagggctgcttcgatcgatgaacttgtactgctccgttcccggcccccagtcctcctccgtgttcgctatgcagagcctaaacatgccatagtccgtcgagtacctaaaacccgagggagagaagacgccgacccagtcgtcgttggaggggttcggatgcctgaactcgacgaccacccagttgctgctctggccctgcaacacaacacaacacaagtgcataccgaagaagataaggtgagggagggcagaggaggtaaaccttgaggccaagaaccgtggggtgagcactgatgctggccgaaccgtcgagagcgcggccgtcgccctctcgatggcgatcctcgacagcggctacccactctacccacttcattgcagctgatcgattacaaagtgagag

SEQ ID NO: 88260 - DNA, 2688 bp, Zea Mays
aagagagagaaagaggtgatattgataagacgggaaaataccctaggctctcgccagtctccggtgcggctcaacaccgaccgaacccgtgaaaaattcgttctcctttcgatccgtttggcggggggctcggccggatccgaccggaggggcgccgccgatccatccggtcgcagccgcgtctgatttggtgcggattttggcgagataccccgctcctagctccgctgtttcaaggataacaaagatggcgtcgccgcggggcgggttcgatgagcaagatcgccggacggagaagggcaccgaggtgttcgtcggcgggctgccgcggtcggccacggaaagcacgctccgagagatattttcttcatgcggagagattattgacgcgcgcataatgaaagatcagagtggtcactcaaagggatatggttttgtgcggtttgcaaagagggattatgctaatactgccaaaaggcaaaagaatggtattgaggttcaaggaaagaggcttgtggttgagctttcaatggatcaagatacagttttctttggaaatctttgcaaagagtggactttagaagaatttgaagaattgattcacaaggcattcaaagatgttgtttcggttgaccttgcaatggcgtcaaatcttggttcttcaaacaagaagaatatcaatcgaggctttggatttgtgagattttcttctcatgcagctgcagcacgtgtaatccgcatcggttcaagaacagatttcatgcttggtgatattttgcatcctgcgataaattgggctgataaagagtctcatctggatcctgatgaaatggccaagatgaagtctgcttttattggtaacctgccagaagatgttaatgaggagtacttgagaaagctttttggacagttcggtgaggtagtacgggttgctatctcaagaaaaggacaatgtccagttgcttttgttcacttcgccaaacgttcagagcttgagaatgctatagaagaaatggatggtaaaacggtgagaggacctggtcgagggccgtctttcaagatccaggtgtcagttgctcgacctacggcagacaacgacaagaagcgatctcgtgaagaagtgagaactagaagatcaaatgcatcaggagataggcgagattattctcatggaagatatggacacgattcacttgatcgtcaagtgaaagctccaagattatctaattatgtggccgatgctgctgacccctatgaatcagctgttaattcattaccttcagctgtcaaggaagtcttgcttcgaattctacgtctaagaattggtactcgatatgatattgatatccattgtgttaaaagccttgatgagcttcctgagtcatctgctcttgctgtccttaatcagtttttgatatcaggtggagacaaacacaacaaaggagattattttgcatcgttggttgctaagcaccaggctgagacctttggcttaacacatgcattacacggtaccacttatttgtcaagaaatccggaaatgcatagcaagcgatacccacatgaagattatgattttgtgacacccaggagcagtaggtacgattcgtcagcccatcatccttcaacatactacgaagacgatccaccagtgtctgagtcaagggttagaagatatgctgaagaaaggtccaccattgtaagaagcccagaaccacgtccgcgatatgacgaaacagacataagaataaacccagaaccaagattaccatatgaatcaagacacaacgccgaaaagcatctcgatcgaagatacatacaagagcatagttcaaatattgaaagaccagctgaagaagctctcctttctagggaaaggagatttctgcctgctgcagggtacatgccgaacccaggcggctcggatttccgctccaggtcgcccgccgaatattcagcacaacgccaacaaatgaggtttgatccattcacaggtgaaccttacaagtttgatcccttcacaggggagcccatcaggccagatccgaaccagcgccgctcaggaagcctgtactgatcagattagttggagcgatatgccagataagaccctgaaacaaagctagatctggataactcttcttcttgtctgccaagtgtctctgtgattttgcttgtgggctacagatcatgtaccccgagcaccatgtgtgatccagtcggactaatcatttcggcattgaaaagtcggactaactttttttgtgcccataacgctacgtattgtttggtagattaattaaaaattcatccggtgaaaagcaattttctggtatttttctggaggtgcagtaggcgtggtaatgcagaatttcaactgctacgtacactgcaagcgctgttttacccgattcgtctttacgtgttgccaaatgtttcattgacttcatagaactgatttcgactactttggatgctgagcaagggaccatgcctttctcacatatactcatctggagaatgtcaagcaagacggcccatctggacacatggcaagaagagataaactagctagctgcctcccaatgatgctactaccttctcttcgactgcttcaacgttcacatgcccctcccttgcatggcgtagtaaactgggttgcttgaaaaaacgccacttctaagcgta

SEQ ID NO: 88261 - DNA, 2307 bp, Zea Mays
tctagctgtgttcttgtggctgtgaaattatatctcccatgctgatacttgattcccttatctttgcttcattactacaccacagtaatttggatctgccattatgttactatgtaactctcatttgatatcaatcacagctgccacatacaaaatacaagtatgtttatctagataagatcttgattcatcaatcaccactgatctgagttttcgccactgcgatgcgaggaaaagacagatatctaataacatcttggtgaagatgttcttaggtcctttgctttctcttcaagtcagcttcctttgatttcattcctcaaactatcaatcacaggctgcagcacgtgtaatccgcatcggttcaagaacagatttcatgcttggtgatattttgcatcctgcgataaattgggctgataaagagtctcatctggatcctgatgaaatggccaagatgaagtctgcttttattggtaacctgccagaagatgttaatgaggagtacttgagaaagctttttggacagttcggtgaggtagtacgggttgctatctcaagaaaaggacaatgtccagttgcttttgttcacttcgccaaacgttcagagcttgagaatgctatagaagaaatggatggtaaaacggtgagaggacctggtcgagggccgtctttcaagatccaggtgtcagttgctcgacctacggcagacaacgacaagaagcgatctcgtgaagaagtgagaactagaagatcaaatgcatcaggagataggcgagattattctcatggaagatatggacacgattcacttgatcgtcaagtgaaagctccaagattatctaattatgtggccgatgctgctgacccctatgaatcagctgttaattcattaccttcagctgtcaaggaagtcttgcttcgaattctacgtctaagaattggtactcgatatgatattgatatccattgtgttaaaagccttgatgagcttcctgagtcatctgctcttgctgtccttaatcagtttttgatatcaggtggagacaaacacaacaaaggagattattttgcatcgttggttgctaagcaccaggctgagacctttggcttaacacatgcattacacggtaccacttatttgtcaagaaatccggaaatgcatagcaagcgatacccacatgaagattatgattttgtgacacccaggagcagtaggtacgattcgtcagcccatcatccttcaacatactacgaagacgatccaccagtgtctgagtcaagggttagaagatatgctgaagaaaggtccaccattgtaagaagcccagaaccacgtccgcgatatgacgaaacagacataagaataaacccagaaccaagattaccatatgaatcaagacacaacgccgaaaagcatctcgatcgaagatacatacaagagcatagttcaaatattgaaagaccagctgaagaagctctcctttctagggaaaggagatttctgcctgctgcagggtacatgccgaacccaggcggctcggatttccgctccaggtcgcccgccgaatattcagcacaacgccaacaaatgaggtttgatccattcacaggtgaaccttacaagtttgatcccttcacaggggagcccatcaggccagatccgaaccagcgccgctcaggaagcctgtactgatcagattagttggagcgatatgccagataagaccctgaaacaaagctagatctggataactcttcttcttgtctgccaagtgtctctgtgattttgcttgtgggctacagatcatgtaccccgagcaccatgtgtgatccagtcggactaatcatttcggcattgaaaagtcggactaactttttttgtgcccataacgctacgtattgtttggtagattaattaaaaattcatccggtgaaaagcaattttctggtatttttctggaggtgcagtaggcgtggtaatgcagaatttcaactgctacgtacactgcaagcgctgttttacccgattcgtctttacgtgttgccaaatgtttcattgacttcatagaactgatttcgactactttggatgctgagcaagggaccatgcctttctcacatatactcatctggagaatgtcaagcaagacggcccatctggacacatggcaagaagagataaactagctagctgcctcccaatgatgctactaccttctcttcgactgcttcaacgttcacatgcccctcccttgcatggcgtagtaaactgggttgcttgaaaaaacgccacttctaagcgta

SEQ ID NO: 88262 - DNA, 2175 bp, Zea Mays
gatggatggacaacggtccggcgcaagcgctcgcatggtgcccgagagcattcaagacgcccaaccaccaggccgtcgctgccttcaaattcggccagagacaaattgctggtaagtctgagcggtaaatgcttccgttgtctgggcagaggacatcgtgcttcctcctgcagggaccctctgcgttgcttcggatgcggaggccccggccataaagctcggctctgtcccaaggccaagacctcccagaatacgactgccccgcaaccgcctcccagactccacagcgacgacttccctccgctcgttcaagccaccatgcctcgaccaggcgagccagggacgcgccccagtgaaaccttcgccgtcgctgcttccactggcgacatggaggcagagctagagaggctctcgacccacgccgtcgtcgcctggctggggcgggaccgacctgaggtaagcgccgacaggatgaagagggcgttctgccaccagttctgcgtgcgccccgacgacatctccgtagcaagacatcacccagcggacttcgttgtcaccttctcccatcagcaccacagggagacggctttggagcgcagggaattcctctccggcaacctcgacatccgcgttcggcggtggcttccgatgacccaagcagaccctgtggacctcaggtatcacgtccggctatgcctggaggggattccccttcacgcttggaacgagagcattgccaagcgtgtggtggcgagggcctgcgatctggactatgtcgagctccagtcgctgaggaaggaggacacgcgcgccctctgtctttgggcctggacagaggacccgtcccgcattcctaaggtaacttggctaactatctcccgcagatcgtcgttggttcgagatggagctactccaccagctcgtcgctctggctcccacttccgagtaatcgtccacctcgacctcgtcgaggatccaccggaaagtgacggccgctgctccacccgcgagttcaggtgggcgttgggcgttgttgacggggagcgcacacctcgggatcgccacgacccggctccggtcgccattgttggtcgccgtgacgaggacgatgacgacgaagagcgtcgcggtcgccgcagccgtaaagaggactcatggagctcccgtctcttcaggagcctttcacgcgctccccatagggagcgagaccgctcggagccacgcagggatcgccatggcgacagaagatcgaccaccggcggccgccggcaccttacttgctctgtggatgacagcttgctgcagcagaacgggagcaagcatgtcagcctagacgtcttccccgaccgcgtcgcgccacgccagcctgtgtgcatagaaggctctgcaacaagtggaggcggccgagagcagcgacatcgccaagtcagaggcaggagacagagcatgagcccgtcgccgcgtccccgccaggacgcctaccctaacagtggaatggccacggctgctcgcggtcgcagccgggaacggatgccccgccgacgccctgggaggcgcgcgcggtccgtacctcgacgtcaacacgggaccggtctggactctaccgccgagggttcacgctgtacctcggatgcccgccgcgacgacctcgacagcacgcacccacctcccccaagcccgccggcgattggcaccaccttgccggcggggtcgaccacacccgtgcgccgcttccgcccaggatacgtctaccgcagacgcagcagatcggcgccgcaccaggagctgcaagcggcgacgtctttcatcgacagcatctccgcccctgtcgcccaacctatattgcgcccgcaagatcaggggtatgagctccccaagaagacacaaaaaagtttcaagggaagtgcaggaacttctacccgcaggagcgcgaggctggcgaccatcgcttggccgcgtggagacattcagagccgcgcgcgccaagtgctcatgaagcggcttggaatccttccagagtcggactctgatcagatgcagaaccgggcaactgacgaggagctcaagcgctacttcagcctgttcaatggcccgctgaccctcctagccaccaaggctttggtcgccctatgcggattggatgaccctaatgaggctgggctgcagtcatcttga

SEQ ID NO: 88263 - DNA, 1828 bp, Zea Mays
accgtctcttctgttctgccctgctcgtgctcgtgcattcacccaccggggcgggcgtctctctcaccgccttgccacgccagcacgccactgtgctctgcctctgctcgactgctcctccatattaagaggccctcccgcgcgcccgcctctcgccgtgctcgtcgtcccttcgttacccgggtcagtgccgccgtcggtagcagaggagcagtaggtggccagtcagtcagccaattgtccgctcgtccactccgttcgagctctcctactcttcaccacccacccatccatccatccatccatcggcgagcgcgagagcacactgttgcattgctgatcgctccgtctccgctgccgacgaggacgaggaagaacgagggagagacgcagacaggctgcgttgcgccatgaggagagcaggggggctatcgcgcgcgggccacggcgcggcgccggcggcgggggtcatgcgggcggcggcgtccgcgttcttcgcggggtaccactgcttcacctccgtggcggcgctgctggcgctgccgttctcggcggcggtgctggtggccgaggcggcggcggcggcgccagcgccggcgccggtggcgctgcgcgcgctagcggcgcggctgcgcgccgtgttcgccgccgcggggttcccgccctcgcccttcttcgcgctgctcgaggccaagctgtcgcagaccgtcttcacgttcgccgccgcgctgccgttcgcgctcaccttcctgctgctcgccaaggcctgcgtcgccgccatgctccgggacgacgccgcgtcgccgaggcggcaccggcggcgcaggtggcccggcgtcgccgcgctcccggcgtgcggggccgtcgcgcgcgcgtacccggccgtgctcgccacgcacgtcctcggcgccttcctcatgctgtccgccaacgcggcggcgttctcgctgctgctgctggcgttcggcgcggccgacctgctggggctcacgtcccgcgcctggacgctggcgctctcggccgcgggcgccgtcgcctactcgctggcggtcggggtcgccgccgtggtctgcaacctcgccgtcgtcgtggccgccacggagcccgggtgcgcgggccacgccgcggtgctcagggcctgcgtcgcgatccggggccgggtgtccacggcgctcgcgctcgcgctgcctaccaacctcggcatggccgccgccgaggcgctcttcggcctccgcgtcgtcgcgcagcgacgcagggacgggaggctcgcgccggccgtcgccgccgaggccttctccatcgcctacatccacgcggtctgcgtcgtgctggagatcatcgtcgcctgcgtgttctacaggagctgcaagaggagcgaagcggacgagctcagagagctcgagccagaggagaagggagacctccaggcttgatcacctattcacctatcaccttcaggcagctccagtctgctgcatgcacattgcacaagggaagaagaaaggaaaaccccacacacaaatagtagcgccatagtttgtctttctggtgaaaaccaacaggatcagatcatagggtacagagctgatccagagaaatatagtggcaagccgacatagatttctgcaaaatgtttcttttttttatgtaaagcaaattgtaaaagttgagttcaaataatatctgtctattcgaaactgagatgttttaggtgctcctcacaccatctgagtgtcagaacgcttcaagacacttgaaactgagtgtttaaaggctatcaagcactcgaggtcaaatgaaccaaataaaatttatcaaaaaaaaaaga

SEQ ID NO: 88264 - DNA, 1385 bp, Zea Mays
caaccagccgccgctcccttcttccatttcctggccgccaagcttctaacgtacgcagcctgctcgtcttccacctccggccaacttcctccctctaccgcgcttccctccccacaacagcagaccaccggcgctccctgttcttcttccccgtgggcgcgcccccttcatccaggcagcagacgacgcacgcacgccaggaacgcccgagctctccatctctaatccagcgctcaaggttccactccctctctcctccaagcgtgtggtgtcttccctgctcctccatggtgcccagatccggcgcgcgcccctgcaaatcttcactagcacaccgggctcctccctccttggtgctcggcctccatggatgcacatcacctcctcccatggacgccagcagcaggagctcctactcccagggcgcctctcccccatccatggcgtccgaccccctctcctttctcctccctgctcggagctctgctacggcacacgcaaatccctcccctttttgtgcagctcaccatccccagtagccgcaatgtctccctctgcacctgtccgattccatggaggacgacttccccatgggcaggaactcgacgccgcctccccaagtgcagccatggctgagctttcccttcccctgctcgggacaagcccctccctgctccatttttttctctctctgctctcggccgctagcaaccagggcattggcccctgctccctactacttctcctctcagcttcctctctgcagtagagagcgcaggaatatgctcggcgctttagcgcccagccttctgtaggagcagcgcactcctcttctgaagcacctcgctggcgccctcatcgtccatcgacaacatcccatggcgctgctgtccccatggtctccctgttgcgagagttgcctcgtcgcactcgtcgtcgggctcgaatcgggtgtgcgcattccatccgcgacagcgtcgacccccgcggcggccttgtactcgcgttgctccccgagccgagaccttgcacgcagcagcaagtcccggatcccctccgaatcgcgtgcttcgctggatctgtgcagccccagctgctacgacgtcaaatactggtgaaaacctactatccttgctgctatcacattctttgtgctcgataaaatgtttgaaccattaagtgatgttaatcgcagctagatgttgtcgcggcgcctcgcgcgacgcatggttcgatgaagcgcctaaaccgtggacgcatgcgcaactcgaatccgagtttgacaggttgatggatttatgatttactattgatgtgattcgattgatggcatgcatacatatatggtgtatattgatgttgaatatgtgtgactgcgatggttc

SEQ ID NO: 88265 - DNA, 1305 bp, Zea Mays
gcttccttctcgtatcccatctcgtactaatatctgtaccgataatctccatgttgatcataaaatagttctctgagtaaagaaaatctctaccgcgcttccctcccacagcagcagaccaccggcgctccctgttcttcttccccgtggggcgcgcccccttcatctaggcagcagacgacgcacgcacgccaggaacgcccgagctctccatctctaatccagcgctcaaggttccactccctctctcctccaagcgtgtggtgtcttccctgctcctccatggtgcccagatccggcgcgcgcccctgcaaatcttcactagcacaccgggctcctccctccttggtgctcggcctccatggatgcacatcacctcctcccatggacgccagcagcaggagctcctactcctagggcgcctctcccccatccatggcgtccgaccccctctcctttctcctccccgctcggagctctgctacggcacacgcaaatccctcccctttttgtgcagctcgccatccctagtagccgcaatgtctccctctgcacctgtccggttccatggaggatgacttccccatgggcaggaactcgacgccgcctccccaagtgcagccatggctgagctttcccttcccctgctcgggacaagccccctccctgctccattttgtttctctctctgctctcggccgctagcaaccagggcgctggcccctgctccctgctgcttctcctctcaacttcctctctgcagtagagagtgcaggaatatgctcagcgcttcagcgcccagccttctgtaggagcagcacactcctcttctgaagcacctcgctggcgccctcatcgtccatcgacaacatcccatggcgctgctgcccccatggtctacctgttgcgagagttgcctcgtcgcactcgtcgtcgggctcgaatcgggtgtgcgcatcccatccgcgacagcatcgacccccgcggcggccttgtactcgcgttgctccccgagccgagaccttgcacgcagcagcaagtcccgaatcccctccgcatcgcgtgcttcgctggatctgtgcagccccagctgctacggcatcaaatactgctagatgttgccgcggcgcctcgcgcgacgcatggttcgatgaagcgcctaaaccgtggacgcatgagcaactcgaatccgagtttgacaggttgatggatttatgatttactattgatgtgattcgattgatggcatgcatacatatatggtgtatattgatgttgaatatgtttgactgcgatggttcattt

SEQ ID NO: 88266 - DNA, 684 bp, Zea Mays
gcgagcctcatctggccctgctcaagcgggtcctgcggtatgtcaagggtaccctctccactggacttcacatcggcaccggcagcattacgagtttgtctgcctactccgacgctgattgggcaggctatccagactctcagcgctccacttcagggtattgtgtcttcctcggcgacaacttagtctcatggtcctccaatcgacagactacggtttctcgttcgagcgcgaaggctgagtatcgtgttgttgcgcacgctgtggctgagacttgttggcttcatcagctgctccaggagcttcatgcacccatctctacggcaacaatcgtcttctgtgacaacgtcagtgctgtctatatgactgccaaccccgtccatcatcgtcgcacgaagcatattgaaattgacatccacttcgtacgcgagaaggttgctttgggacaggtctgggtgctccatgttccatcgtcaattcagtttgctgatattatgaccaaagggttacctgtacagttatttactgattttaggtccagtctttgcgttcttaacactcccgattagactgagggggggtgttggaatgtatctatgacagcccatgtggggcgcctggcccattggcccatgtacactgtaaccctaaatgtaaccctagcctatcaggctatataatgaa

SEQ ID NO: 88267 - DNA, 242 bp, Zea Mays
cgattggcgatttgggcatacccatcaccgcgagaatcgggagccgtgggagtacgggccaccgtcgtcgcctcgcctccatttgttgctctgggcagtcagttggtcgtcgcggaagcttgggtatgcgtcattggagcgtcggggcactacagccacgacaattgcttgccagagtctttgctttgacctcgatccgctgtgcgtcgcgggtagcttcgttcggtgtccatctccggtga

SEQ ID NO: 88268 - DNA, 2422 bp, Zea Mays
tcttttccacctttccctccctcccctgaaccttctcaatctcccctccccacgtggagtatatcacccatacgcagacgccacacgcgcaagcacatgaaccaccaccatcccggcggctcccacttgctcttgctccccttcctctcctcgctctgatcctcctccagtgcactgctccgttccggcgacctcgctgccggcccggcgctccccggggcaggcgggctgtcatagggagtggcctgcgtgtatggtgattggtagcctggcaggccaccaataatatcttctctcctgggcttatttgcctccatttgtcatcagcttcttgaaatccacagtctggtcaaatgctgtgaagaaaattcctctagtgctgaataagttcagcatagaaccactatgggcgcctgtgtatcttcaagcaaaaagcggagatcgcaaaggtcatgctgtatatacaggcgctaccgtggcaaggttttaaccaatacacctatagtacgcgtcggtgaagtggagaaccttgcttcttctggagcagcagtccatttagggacttctgcagctgctcgacggagatccgatggctcaaacgttacgttccacctcacacaattgcagtggcgtcacagtgagctggacacagagaatggaaatgttgtgtgccaagaagaagcgtggttcgactctgtcagtatcttgggatctgactcagatgaagacttcagcagtgtcaatggagacttccctgctatgtcaaattcaacaggtacacaattgatgcagtgcgaagatgcttcatctatcgctgacgccatccagaagtttgaattgatttttgatggttctagtgttgctcaagctgttgggcagtacctgaaaagagatgcaaataaaatagaagcagagaggcctagagttgcaagccccgaagcttgtgatgtctctagtggaaaggttgaggatgctaagacacgaaatgagggtataaaaaaagttagaagaggcgaggatgcatgtaataccttgaagtctttcaaagatggagagaagcctcatgaaagcatcttcaaaagtttgacaccagtgtgcacacctcgtcatgctaacaaggtccaaccattggcagtagcaagtccacggggccaaaagaagaaatcagctgttgtcaggctttctttcaagaggcagtctttcgatggagaacaaactactgaaatatgttcctctagaaggtacttgatccgcccacgagctggattattggttccacaagctggtgagaaaatttctgaaggttgttggtctgtgcttgagccttcggcattcaagctgcgaggggaaagttttttcaaggacaaaaagaagtctcctgccccagcttgttctccatacacttcatttggtgtggacatattcatgtcccctaggaaaattcaccacattgcccagcatattgagcttccatctgtaaagccaaatgataaaattccttcgctacttatcgtaaatattcagatgcctacatatcctgctgctatgttccttggtgatagtgacggtgaagggattaatctggtgctatatttcaaactgaacgataactttgagaaagaaatttctccccagtttcatgacagcatcaagagacttgtaagcgacgaaacggagaaggtcaagggtttcccattggactcaacagtccctttcagagaaagattgaagatattggcagggttagttaacccagatgacatgaacctgagttctgcggagaggaagcttgttcaggcttacaatgaaaagccagtcctctcaaggcctcagcacaacttttatgtgggatcaaattacttggagatcgaccttgatgtacaccgctttagcttcatctcgaggaaagggctcgaagcattccgagaaagattgaaacatgggatgattgatctcggtctaaccatacaggcccagaagcaggaggaacttccagagcatgtactgtgctgtgtaaggctaaacaaaattgattttgtcgataatgggcaaataccaacactactgccatgtgacgatgactaaaaagttcggccagcagcctagcaacaaattaactgaaactgatgtttcggccaagaacatgagcatgtgctcacaagtccattccccgaagaattgtgagatgaactgaagtggggatctgcgtgtatagtcatggttttttttttctttcgtattctggtgttgcgaatcaaattctgttggaacttggaagttgatttgcgagtccggaattgaacatgccggcaagacgtcttatccatgttctatttttttcttttgaaggagtattattaattactctgcttataagaaagcatataagaggtacaacagaacgggataacaaaggataaaa

SEQ ID NO: 88269 - DNA, 2258 bp, Zea Mays
tgccgaacagttagtatttgggcgattcaaggcggagagtgcctccgcctttgggatcaggctgggattccgatgcgattcgtagatgttcctatgctgctcaggtgtccccctctgatcaatcgtgtcagttcttcgggctgtcatagggagtggcctgcgtgtatggtgattggtagcctggcaggccaccaataatatcttctctcctgggcttatttgcctccatttgtcatcagcttcttgaaatccacagtctggtcaaatgctgtgaagaaaattcctctagtgctgaataagttcagcatagaaccactatgggcgcctgtgtatcttcaagcaaaaagcggagatcgcaaaggtcatgctgtatatacaggcgctaccgtggcaaggttttaaccaatacacctatagtacgcgtcggtgaagtggagaaccttgcttcttctggagcagcagtccatttagggacttctgcagctgctcgacggagatccgatggctcaaacgttacgttccacctcacacaattgcagtggcgtcacagtgagctggacacagagaatggaaatgttgtgtgccaagaagaagcgtggttcgactctgtcagtatcttgggatctgactcagatgaagacttcagcagtgtcaatggagacttccctgctatgtcaaattcaacaggtacacaattgatgcagtgcgaagatgcttcatctatcgctgacgccatccagaagtttgaattgatttttgatggttctagtgttgctcaagctgttgggcagtacctgaaaagagatgcaaataaaatagaagcagagaggcctagagttgcaagccccgaagcttgtgatgtctctagtggaaaggttgaggatgctaagacacgaaatgagggtataaaaaaagttagaagaggcgaggatgcatgtaataccttgaagtctttcaaagatggagagaagcctcatgaaagcatcttcaaaagtttgacaccagtgtgcacacctcgtcatgctaacaaggtccaaccattggcagtagcaagtccacggggccaaaagaagaaatcagctgttgtcaggctttctttcaagaggcagtctttcgatggagaacaaactactgaaatatgttcctctagaaggtacttgatccgcccacgagctggattattggttccacaagctggtgagaaaatttctgaaggttgttggtctgtgcttgagccttcggcattcaagctgcgaggggaaagttttttcaaggacaaaaagaagtctcctgccccagcttgttctccatacacttcatttggtgtggacatattcatgtcccctaggaaaattcaccacattgcccagcatattgagcttccatctgtaaagccaaatgataaaattccttcgctacttatcgtaaatattcagatgcctacatatcctgctgctatgttccttggtgatagtgacggtgaagggattaatctggtgctatatttcaaactgaacgataactttgagaaagaaatttctccccagtttcatgacagcatcaagagacttgtaagcgacgaaacggagaaggtcaagggtttcccattggactcaacagtccctttcagagaaagattgaagatattggcagggttagttaacccagatgacatgaacctgagttctgcggagaggaagcttgttcaggcttacaatgaaaagccagtcctctcaaggcctcagcacaacttttatgtgggatcaaattacttggagatcgaccttgatgtacaccgctttagcttcatctcgaggaaagggctcgaagcattccgagaaagattgaaacatgggatgattgatctcggtctaaccatacaggcccagaagcaggaggaacttccagagcatgtactgtgctgtgtaaggctaaacaaaattgattttgtcgataatgggcaaataccaacactactgccatgtgacgatgactaaaaagttcggccagcagcctagcaacaaattaactgaaactgatgtttcggccaagaacatgagcatgtgctcacaagtccattccccgaagaattgtgagatgaactgaagtggggatctgcgtgtatagtcatggttttttttttctttcgtattctggtgttgcgaatcaaattctgttggaacttggaagttgatttgcgagtccggaattgaacatgccggcaagacgtcttatccatgttctatttttttcttttg

SEQ ID NO: 88270 - DNA, 357 bp, Zea Mays
ttcttatttttttatttgaaatgctaattctgtgcatttctctaggattagagttcatttcaaagagatgtacaaactgttttgattcgatccaggtcccagggagccaaattaatgctgagatgcatatacaattgtgactggttacttttaatctactacttcgagttttccctccaactagtcatggaaaaaaaagaatttctgaattctgaccaattctcatcagctaagatgcctaaaactctctcaagctacacgcagcgatgcattgttcaccggcgggcatctcggccttcgacaacgtctggtggtccttccccaccttgttattgccaatgcatctgcgtccaagtc

SEQ ID NO: 88271 - DNA, 339 bp, Zea Mays
gctcaccatgtcacgggggggcgaagcccaccggccgcattggaactgccatgatccaacaaaagattccgcctctccccacttcctcaaacaaggagacaaggccaaccaaccaaacagcaacacctataaacaagtactaatttatcgccatccacatggacagagatacaatcctccgtcactaggccatggacgggagcagacccagatgcagacgacggagattagattggccagcagatgacggtgagagggatcttctcctcctcggctccctctctctcccctttctctatctagtggagaagaagagagaaaatgggcttctcgaagaac

SEQ ID NO: 88272 - DNA, 697 bp, Zea Mays
tgcaaacataaccggccgttgtttctcttcttatctgtgtggattgggatacttctgtccgtttatctcttcttccactgcctccccaccacttcgtcctcgccggctcgcaactccttgatggcggccacggcgagtctcactaccactgctccctcccctccagctctcctcaaagcatcagctcctttgcttatctcctttcgccccgtctcccgccactgcaagaacctgtgcatcaagaccaaggccacagaaaatgatcagtctgctaaaaagcatcagaaggtgaagagcattctttgccaggactgcgaaggaaatggggcaatcgtatgcaccaaatgtgaaggaaatggggtaaattctgttgactattttgaaggccgatttaaagctggatctttatgctggttgtgcagaggcaagcgtgaaatcctatgtgggaactgtaatggtgctggcttcttgggtggatttctaagcactttcgatgaaactgcgcaatagtcatcggtttagcactttcgatgaaactgcgcaatagtcatcggtttaatttatgtttaagttacattgagggacccataatatatgtatcgtgttccatggacacataatcatattatataaaataatatttttaatgaatactccttcgtccacttgatttggacgttctgggtttttatagaca

SEQ ID NO: 88273 - DNA, 309 bp, Zea Mays
gtgccacccagtaagcttggtcatggctgcattccactcagagcaccacccaaattggtcagcaccaaatataggaggaatcagtgggttcaggtcgtggatgattgctttgtagtccctctgaagctgagtaaatttgtccatgaccaacttgtgaacagtcatatcctaggctacaatacacaccccaacaacatggtcatgaaggtcatgactggcacaagcattcaaaaccaaaatagcagggtcatcatccctcttggagccatgtgttttcaactcaaatcgaacttccttctcttctctgcc

SEQ ID NO: 88274 - DNA, 269 bp, Zea Mays
ccaatttatttgattatacgtgtctaatccattagatttttcaatgtgcagattttccaattttctaaatagcagtcttggatagaaacaaaaacaaggcaaagaatatggcccaaaaaaatttaaagagctatttcagtcaagcttctagtggaagtagacaagcactcgcactagtggagtttgcaatgaacccagaatacaagttgaagttcaagataataatagtgaagatgccaatggtgaaaatgttaatggtcaattcaaag

SEQ ID NO: 88275 - DNA, 693 bp, Zea Mays
aagaataaggcttattgcttctattgttacctttttaaacacgatcgaatgtatgataaattttgccatgatgcatttacaaaagttggcttctcacaatggagaaatggttatacgacatttccaaaacatgttggtgggcctaatagcatacacaatactgcagcaacaacattccatgatctttgtaaccaaaggtcaggtgttagtcataaggttgcaaattatagtaaagatgcattggtcaaatatgagacacggttggaaacttccttaagtattgttagtcttcttgcattgcaagctgaatcatttcggggacatgatgagactagtacttccttaaacaaagggatttttttagaatttcttgattggtacaaacaaaggaatgaagaggttagaagagcttttgatgagttgtgtcccaaaaatgctaagatgacttcggggacgattcaaaaagaacttgcaaactgttgtgcagaagcagtcacacgtgcaattaaagaagaaatgggggattgtttattctctgttcttgtcgatgaatcccgtgatatataggttaaagaacaaatggctattgttgtgatatttgtcaataaaaagggtgaagtaatagaaagatttttgggcatcaagcacaaggacacaacatgagaatcattgaagaaagcattagttgagatg

SEQ ID NO: 88276 - DNA, 1004 bp, Zea Mays
ccgctaatccccaatccggaacctcaccgcggagaaccccagatcaaacccttccccgcccattcccacttccatccttccagtacgatccgtttcttccttacttccctgctcatccgagggtgaggaaggagtcgggcgaggaatccaccgccggggtttcttgatccgggcgcgtgattcgccgcgcccaggcaccagtgagaaatcaaatcaagaacggggtgggggaagtgagacgagggcgcggggagcaatcaagatcgcttcttggagctttcggcccccccgagccaatgccggatccggttagcggcgccccccgctcccacggcgccgggctggcatgccccctctgagcgcccccgcctgcctccgcggctcccgatgctcgtgtggtcttcgggagcaggagagggagcagcggccgtcgtgggcggcggccaggagcgaggatgcagatccggctgtcgccgagcatgaggagcatcaccatctccactagccatggcctgctagacttgatgaggttcaaggtcgccgcgcgacacttctcctaccgcaccgtcttccacaccgtcctaatcctcgccttcctcctgcctttcgtcttcatactcaccgccgtcatgactctcgagggcttcaacaagtgctcttcactagattgtcttggaagacgtttgggtccgcgccttcttggtaggggaaatgatggttccatgaggcttgtgagggatttatatgtgatgcttgatgaagtaaattctgaggaagcacctcttaatttgaaggttccagaaacttttgatgaatttatctgggacatgaagaataatgattatgatttaaggtcatttgcttttaagttgaaggctacgatggagagcatggataaggaattgaggtcatcaaggttatcggagcagttgaacaagcactatgctgcaattgctattcctaaaggcctttattgcctttcattgcgtttaactgatgaatac

SEQ ID NO: 88277 - DNA, 197 bp, Zea Mays
tttgagttcatgtgacttattttagaaacttgagctcataaactttcttttatttggtctctatatggtggaattatgttattttatagtctctgttcgttcagtcagtcgttgtgaactctcttctaatcgctcacttcattggtcgtgttgtaccatgacatattgcatggagtaaacaataacatcagttagcc

SEQ ID NO: 88278 - DNA, 792 bp, Zea Mays
atgaggggcggtgcgtctcggcgctctcccaactggcggcgcacggcagctccctacaggcccatgccaggcgcccatgctaggcgccacgtaccggagactcctcgtcgtcgcgccactctctccgcccgcggcccctccaggcccatgccaggcgcccgcggcaaggtcgccggagccgccgaggcgggcgttccactgttctacgccccctggggttctggtccaccccggcgtcgtggaccgagggctgttcttgagccagcaatgcaaggaaaagacataattggccgtgctcgaacagggactgggaagaccctggcttttggtattcctatcatggacaagatcctcagctacaacgagaagaatggatttggcaggaatcctttagccataatcttggcaccaacaagagaacttgctcggcaggttgagaaggaatttagagaatctgctcccttggacaccctctgtgtatatggaggtgttcctatcaatcagcaaatgagagctcttaaatatggtgatgacatagtggtcggaactccaggtcgagttattgaccttctgagaaggggtgttttaaacctttcacagatccagtttgtggtcctagatgaagctgatcaaatgctggctgtgggtttcgatgaagatgttgaggtgatcatggagcaattgccacagaaccgtcaaagcatgctgttctcagcaacaatgcctagttggttaagaaaaaattcgaacaagtacttaaaggatccagttataatacgaattcaagcttaa

SEQ ID NO: 88279 - DNA, 783 bp, Zea Mays
atgaggggcggtgcgtctcggcgctctcccaactggcggcgcacggcagctccctacaggcccatgccaggcgcccatgctaggcgccacgtaccggagactcctcgtcgtcgcgccactctctccgcccgcggcccctccaggcccatgccaggcgcccgcggcaaggtcgccggagccgccgaggcgggcgttccactgttctacgccccctggggttctggtccaccccggcgtcgtggaccgagggctgttcttgagccagcaatgcaaggaaaagacataattggccgtgctcgaacagggactgggaagaccctggcttttggtattcctatcatggacaagatcctcagctacaacgagaagaatgggaatcctttagccataatcttggcaccaacaagagaacttgctcggcaggttgagaaggaatttagagaatctgctcccttggacaccctctgtgtatatggaggtgttcctatcaatcagcaaatgagagctcttaaatatggtgatgacatagtggtcggaactccaggtcgagttattgaccttctgagaaggggtgttttaaacctttcacagatccagtttgtggtcctagatgaagctgatcaaatgctggctgtgggtttcgatgaagatgttgaggtgatcatggagcaattgccacagaaccgtcaaagcatgctgttctcagcaacaatgcctagttggttaagaaaaaattcgaacaagtacttaaaggatccagttataatacgaattcaagcttaa

SEQ ID NO: 88280 - DNA, 385 bp, Zea Mays
tagggtgttctggacaaagaaagtttgtaccttaaaacaggaggatacaagaagctggagtggttgtctgaaggcttttgaactgcttgaagcattagtgtagttttggtgcttttgtgactgatcagctctggagcagctagagtgatgtagttgtgggcttttgaacaatagctggagtgatatgaaacattagtgatgtagttgtgggcttttgaactgctttaagctagagtgatgtcgctgtggtgttttttgtgactaatcatctctagagcttttgtgaatgatctagctagctatctgtaaatgatctagttgtgaatgatattataattgtgatgcttttgtgaatatataattgtggcgcttttgttttaatgtg

SEQ ID NO: 88281 - DNA, 539 bp, Zea Mays
atgcaccggggcttgcctggaataacattaggttagtgtttattagacgacgatcacttgacgatcaacttttggtctgacacttgttcaggtcatccatccttaagttcgtccatcagcatcaccttgcgaagaagcccacgcttaacaacatcttgtggtcgactcagctctggtcatccacatcacgtgatcacttaacatacttaaatgatatgcataatgcacatgaatggatataaacaggaatagcacacgactaattattgctacactaaagtggattaaatatttagtggcgaggcattacaacacttcaaacaatgctagatattaatacaccactaagtacaacattaatgtatttcttaacttaactagaccttaattaaacattaggaattaacaaactatccatacgctttaccttctttagttaaaacccaacactagcagattaacagatctagattcattagttctagacgtctaaatctaaaataagaaaagaagcacattaactaactttctaaaccacc

SEQ ID NO: 88282 - DNA, 509 bp, Zea Mays
gatgtagtatagatttacacaaactactctttacactaacagatggagaggatataatgtgtttttttatcaaattgatatcacatggatgtaaaatgcgagctccaaaagaaacctgaccatttaacagcgaaagcagcagtagccactcacattaattctccttgcattaattagtataggaaaagcaatcctttcttattacttaactaaactttatttgtttacaaaagcaccatcaggtaaacttgatttgtttgctagggtactatcatagctctattttcattgccattagtatgtacaaaataagatttgatatgataattctacatcttgcagactctctcgctagaccgtttcgttgcttaggatcatcgagaatctgttattacatcctacttttgcttgacacatttgactactgtatataacaacgtataaatttgttatcctttcttttaaataaattctttaacgtacatatggcaacttcattccttataatc

SEQ ID NO: 88283 - DNA, 465 bp, Zea Mays
atgccgccgccgccacacgacatcgcacatccgctcttctccctcccctcgctctcggcggtcgacgtgcgctcccctggtgccatcgcttgtgcccggctcccgccatcgctggctccccgatggacctcgcagctagtgtggggccatggatccccgacggatcgagggtcgcgccgcctcatgaggtcagtgagcccgcccacactctacttgcttgctccttgttctacgagcttcggctgcgctgaggcggtcatggtcgctgttcatgtggaattagatattttgcaggacaagatggagttggaaattgaggcatatattaggcgacattatgaaggggaaatttctgacatagaaataattgagaaagaggatttagatctagttttttcacttgctctgcatactgaatctaatattctgtttgacgtccataatgaaatgatgtcatggcgataa

SEQ ID NO: 88284 - DNA, 225 bp, Zea Mays
atgccgccgccgccacacgacatcgcacatccgctcttctccctcccctcgctctcggcggtcgacgtgcgctcccctggtgccatcgcttgtgcccggctcccgccatcgctggctccccgatggacctcgcagctagtgtggggccatggatccccgacggatcgagggtcgcgccgcctcatgagaaaaatcatctttttggctcgaacagaaaatacctga

SEQ ID NO: 88285 - DNA, 297 bp, Zea Mays
atggcacagcaaggtgagtttctgattggactcctcaatgaactagcctgttgggctttggcacctggagcagagtcattcttcaggtcccttctgttaggaaggatttggatgcgctccttgtttgagtgctccaaatatgaaaaccaagcagatagctgtacctttgaacttcctcttacttggaggactttcagtgtttcttctatctgcaggaatgtcctcaggaggcttggagccttcatgctggtcaatcttcccaagaagaaagctgcaaccgaaacagtagccagctga

SEQ ID NO: 88286 - DNA, 812 bp, Zea Mays
atggcacagcaaggtgagtttctgattggactcctcaatgaactagcctgttgggctttggcacctggagcagagtcattcttcaggtcccttctgttaggaaggatttggatgcgctccttgtttgagtgctccaaatatgaaaaccaagcagatagctgtacctttgaacttcctcttacttggaggactttcagtgtttcttctatctgcaggaatgtcctcaggaggcttggagccttcatgctggtcaatcttcccaagaagaaaggtgtattgagacttcaaatgcttctagtttgtcttcagctgagtgtaatcgtcaatttattcttactgttttctataaacctatgtctgtggtagtaagaaagaaggtagctacaacagaaatatgtaatagaataatgtccgtactccgtaacatgctatttcttatatgctgacatgctattgtggctattgtgatgttgcagctgcaaccgaaacagtagccagctgaacatgctgacatgttaatgcgggtggtcaaggctcaggattcagagcagaagatacacataaatactggtgaatgatgccatcgacgatgatgaaatgatcaaacgatggatgatgccatcgatgaaagatggaatggaactcaaatttgggtggtcgcacaagtgtggagacttgaatttatatatacttagttagtctcaatgttagcataaatagttgatgagcaagttttcccattgtattttagtttgaatttagagtacatttatgtaagagttatttgacaatgcttatttatgagatattga

SEQ ID NO: 88287 - DNA, 294 bp, Zea Mays
atggcggagcatagaggcgagccgagcttgggcggccttgcgatggaggacgactggcgaccatggaggacgatggcggaggacgagcttgggcggccttgcggcggcgaggtgctggcggcggcgcggtcagctttggctgcggggcggcgagccgaggacaggatttggtgggctggcagcggcgcggtgaccttaggcggtgtagcggaggcacagtgctgtgctagcggcgaccggtgttctggcggtggccggtgttgtggcagcggcgcggtgggcgggagagggtga

SEQ ID NO: 88288 - DNA, 108 bp, Zea Mays
agggatccggggtcatgggccacaacacgccaccaccgatcataccagcaccaggaggagcttatgcaggggagggagctactccaggagagaatccaaacccgttac

SEQ ID NO: 88289 - DNA, 109 bp, Zea Mays
ggatatttgagggctctaatattgaccttggtaggaataggggtggtaatggatcacgatccaaatgtctcttcacaatttgtttgagtcattcaaaaatgaatagaaa

SEQ ID NO: 88290 - DNA, 2354 bp, Zea Mays
actgagtaaaaattagatgactccataaactttaattaagcttttttttcctactagtgtagataaaagtagacggcaataaaaagcgttgagcagaaggtttcattgcattgcactggggggcgtgcgcagtaggcgtggatcggaggagcatgtggaggctaaagatcggagagggaggagggccatggatgcagacggcgagcgacttccatggccggcaggtttgggagtacgacccggtcgccggcaccgacgaggagcgcagcaaggtggagcagcttcgccgggcgttcacagagaaccgcttccgaaggagggaatcgcaggacctcctaatgcgtatgcagttcgctggacaaaaatatgtgcatgcggatctgcctgcggccaccaagatagaggaggaggatggcgacgaggtgccggtgacggaggagaggttgcgggagtcgctgaggcgagcgctgggttgcatggctgctctccaagctgaagatggccactggcctggtgattacagtggggttatgtacctcatgccgttctggattttcgcactgcacatcacaggcacggtcgatgctgtcctatcgaaagagcatagacgtgagatctgccgccatatctacaaccatcagaacgaggacggaggatggggcttaaatgtcatagacgagagcgccatgttttccacgtgcttaaactacaccagcttgagacttctgggtgaggtgcagcaggaggagaacgatgggctagctaaaggtcgagcatggatcctatcccatggaactgcaactgcagcaccgcagtgggcaaagatactactctcggttattggtgtatatgactggcgtggcaataatccagttgtgcctgaactatggctggttccacgtttcctcccaattcacccagggcggttctggtgcttcaccaggattatgtacatgtcaatagcttttctttatggcaaaaaatttgttggtcccattacaccaactatattagcactaagggatgaactctacagttcggcttatgttcacattgattggagcaaagctcgtaattcttgtgccaaggaggatatgcgcaataaaccttcaggaatattcaaatttatttcaacatgtttgaacatgtttgtggagccagtgttgaactattggccacttaaaaagttaagagagagagctttgaaccacatcctagaacatatccactatgaagatgagactactcaatatattggcatatgttcaattacgaaggcactaaacatgatttgtcgttgggtcgaaaacccaaactcagatgccgccaagcgacataatctaaggatacatgattatatgtggattgctgaagatggaatgaaaaccaaagtatgcaatggcgctaacaactgggagttagcatttataatccaggccttgttatcagcagatactaccaatgaatatggtccaaccgttgagagggctatgggatacataaagagagcacaagctactacaaaccctccagggaacccaagttactggttccgacataaatcaaaaggatcatggccactttcaactgtagactatggctgggcttcatcggatactactgccgaagtaactaaggcaatgttgttgctttccaaggtatatcccaacctcgttgaaaattcaaatggagatgagtggatgttgaatgccgttgattgccttctttcatttatgaataaagatggttcagtttcgacatttgaatgccaaagaacttattcttggctagagattctgaatcctgcggagagttttcgaaatattgtcgccgattacccaacggttgaatgtacatcctcagtgttgcaggctttggtattatttggtgacttcaattcagagtaccgcagtaaagaaataaaagaaaatgttgacaaagctgccatatttatcgagagtaatcaaaacaaggatggatcctggtatggcacttggggaatatgttttatctatgggaccctccatgcgataaatggcttagttgctgctgggagaaattatgagaacaatatttgcattcggaaagcatgtgaatttttgctctcaatacaactcaaaactggtggctgggcagagagctatcgttcctgcgaaagacagatggaacgggacccaacaccattacatcaagcagcaaaagcattgattagtctgcaactggagtcaggagattatcctcaacaagaacatgtcggcaacaccaactgctctgtatacttcaactaccccaactaccgtattttgttccctgtttgggctcttggagagtatcaccgcaaagtacgtgccaaa

SEQ ID NO: 88291 - DNA, 145 bp, Zea Mays
tatattttgtttggtttttcttgatcaaaatatgcttattattttgaccactcatcttgttcaaaaaaataataagttatcatttatttttttgttatttgttttatcatttaaggtagtttgtgattgacttaaaatttacatt

SEQ ID NO: 88292 - DNA, 290 bp, Zea Mays
agactagttcatacagaagaaacatatagaagcctaccaagttgtcaaattgtcgatgtcgcttgttcttctcacatcaaccctcctatacccctccaccatggagggtcagcagtgaggcatgttcccctatctcagaacaatgatggtgaggtaagataagatagtttaagattttcatttatcctctcaacaactaaagttgggcatgtcacctgtgtagtgttctactgttcttggtctgtattaatcgcagatgctctggcagtagatagttcactcttgacacc

SEQ ID NO: 88293 - DNA, 477 bp, Zea Mays
ggaagcctttgtttccttggaaaaaatgtggtcgaccagttggatttgatgactgatctcctgggtactcatacagttcccagagtatgctttctcattcatgcttaatgttcaactaaactgttccaaatggcaagcattgatccttttgctactatatgttcggaatgagagggcaatgaggtacttgagtagcatgaggagaaacaaccattattataccttaaaattcacaagtgatgtttttgttgtcattgatgtacaatcaggcactggctgatccatattttaaaggccttgcaaaagcagagagagaaccgtcatgccagccaataatataaatggaattagagtttgagcgaacaaaggtgaccaaagagggtgccaaggaacttatactgatggaggctggagtatcatcgtcctcaacttctcaaggatcacatgaatggaactgagaaaacaaactttatatat

SEQ ID NO: 88294 - DNA, 630 bp, Zea Mays
ctaatttaagatctgcttgtgtattgttagcttgcccaattataatctcttaaaatgatagaatccttatcaattgcagattagcactataccgagcttttgggcatatcatttccaatgctccagtaccagcagttataactgaagcacactaggttacagctcttttgattatgatatacatatgtccatgtaatattagcattcatagtcaaattaacttattattccctatcttgcagattttactggtatggttgatagcttagctaaattaagtatggatgttgggggtaaggacctggtgtacagtttgttacttgtcttctctggaatgttgatggatgaaaaaggttggaccatttttattgttttgttcttacattctcgccaacttttagtttatatgttaatataggttgtggcctccagatggataaattacttttgtgctctttgatattgtccttcaagatattgatctaatgcaatgcatttgatcttgtcattaacttcagtttttttctaaccagacaaagagtgcattctggacaacatccaaatcagaatcagcgttcttagtgaacttgtttcctatcctcacatgatggttgtgcaggagacaacatt

SEQ ID NO: 88295 - DNA, 1928 bp, Zea Mays
agtccccaccaggcaatcaagaacaccacctaccgctgacttgtcaattcctgtctgtgcgcgcgcgcgcgcgtggcgccggccgagcggccgttgacccgatgaccggcgcggcggccgtcgatcccccggcgcctcggccgcggcggctgacggtcctcccgctcatcgcgctcatcttctacgacgtctcgggaggccccttcggcatcgaggactcggtccgcacgggcggcggcgcgctgctcccgatcctcggcttcatcgtcctcccagtcctctggtcgctcccggaggcgctggtcacggccgagctcgcatcggctttccccaccaacgccgggtacgtggcctgggtgtccgccgccttcggccccgccgtggcgttcctcgtcgggttctccaagtgggcgtcggggacgctcgacaacgcgctctacccggtgctgttcctcgactacctccgctccggcggcgggctggcgctgccgccgccggcccgctcgctggcggtcctcgcgctcacggccgcgctcacctacctcaactaccgggggctccacatcgtcggcctctcggcgctggcgctcaccgcgttctcgctctccccgttcctcgcgctcaccgtgctcgcggcccccaagatccgcccgtcccgctggctcgccatcgacgcccgcgccgtcgacctcaggggctacttcaactccatgttctggaacctcaacttctgggacaaggccagcacgctcgccggcgaggtcgaggaccccaggaagacgttccccaaggcggtgttcggcgccgtcgggctcgtcgtcggcgcgtacctcattccgctgctggctggtaccggtgcgctgccgtcggagacggcggccgagtggaccgacggcttcttctccgaggtcgggcagcggatcggcgggccgtggctgcgcgtgtggatccaggccgccgccgccatgtccaacatggggctcttcgaggccgagatgagcagcgactccttccagcttctcggcatggccgagatgggcatgatccctgccatcttcgctcgcaggtccaagtacgggacgccgacgttcagcatcctgtgctcggcgaccggggttgtgatcctgtccttcatgagcttccaggagatcatcgagttcctcaacttcctctacgggctgggcatgctggccgtgttcgctgccttcgtgaagctgcgcgtgaagaacccggacctggcgcggccgtaccgggtccccgtcggcaccgcgggggccgccgccatgtgcgccccgcccgccgtgctcatcgccaccgtcatgtgcctagcgtcggccaggaccgtcctcatcaacgccgccgtggtcgtcgccggcgtcgcgctgtactacgtcgtggagcaggccaagaggcgcccgtgggccgagttcttggcgcccgtgccgcccgctgacagctcccacggaccagccacggcgcctgatgacgccgacgccgccgacctcgaggatgtccgcgccgggctgctcgcgggcgagccggccgacgaagaaggcagcaaggtcgagtactcaagactggagattcgtgcatgaacccgtttgccgttctgtgtacagtaattccagcgaatacatggcgaatcattgtgtgaaattcagaggaggaggtcaggtgatcgatcgcgctcacaagaagattcagaactgcaaaccgactactagataagtctgaaccatgaatcggagaagtgagaacagatctcaaattgtagaagctgtttttgttttgaccttttaagtgtagtgtgatgccaggcgaggtggtgccggtttgagaagaagctgtatttttccagcaagggggtcagataggttgtactgtacttgcattgagtcaacttgataattcagtaaagtaaccagcat

SEQ ID NO: 88296 - DNA, 1850 bp, Zea Mays
gtcaattcctgtctgtgcgcgcgcgcgcgcgtggcgccggccgagcggccgttgacccgatgaccggcgcggcggccgtcgatcccccggcgcctcggccgcggcggctgacggtcctcccgctcatcgcgctcatcttctacgacgtctcgggaggccccttcggcatcgaggactcggtccgcacgggcggcggcgcgctgctcccgatcctcggcttcatcgtcctcccagtcctctggtcgctcccggaggcgctggtcacggccgagctcgcatcggctttccccaccaacgccgggtacgtggcctgggtgtccgccgccttcggccccgccgtggcgttcctcgtcgggttctccaagtgggcgtcggggacgctcgacaacgcgctctacccggtgctgttcctcgactacctccgctcgctggcggtcctcgcgctcacggccgcgctcacctacctcaactaccgggggctccacatcgtcggcctctcggcgctggcgctcaccgcgttctcgctctccccgttcctcgcgctcaccgtgctcgcggcccccaagatccgcccgtcccgctggctcgccatcgacgcccgcgccgtcgacctcaggggctacttcaactccatgttctggaacctcaacttctgggacaaggccagcacgctcgccggcgaggtcgaggaccccaggaagacgttccccaaggcggtgttcggcgccgtcgggctcgtcgtcggcgcgtacctcattccgctgctggctggtaccggtgcgctgccgtcggagacggcggccgagtggaccgacggcttcttctccgaggtcgggcagcggatcggcgggccgtggctgcgcgtgtggatccaggccgccgccgccatgtccaacatggggctcttcgaggccgagatgagcagcgactccttccagcttctcggcatggccgagatgggcatgatccctgccatcttcgctcgcaggtccaagtacgggacgccgacgttcagcatcctgtgctcggcgaccggggttgtgatcctgtccttcatgagcttccaggagatcatcgagttcctcaacttcctctacgggctgggcatgctggccgtgttcgctgccttcgtgaagctgcgcgtgaagaacccggacctggcgcggccgtaccgggtccccgtcggcaccgcgggggccgccgccatgtgcgccccgcccgccgtgctcatcgccaccgtcatgtgcctagcgtcggccaggaccgtcctcatcaacgccgccgtggtcgtcgccggcgtcgcgctgtactacgtcgtggagcaggccaagaggcgcccgtgggccgagttcttggcgcccgtgccgcccgctgacagctcccacggaccagccacggcgcctgatgacgccgacgccgccgacctcgaggatgtccgcgccgggctgctcgcgggcgagccggccgacgaagaaggcagcaaggtcgagtactcaagactggagattcgtgcatgaacccgtttgccgttctgtgtacagtaattccagcgaatacatggcgaatcattgtgtgaaattcagaggaggaggtcaggtgatcgatcgcgctcacaagaagattcagaactgcaaaccgactactagataagtctgaaccatgaatcggagaagtgagaacagatctcaaattgtagaagctgtttttgttttgaccttttaagtgtagtgtgatgccaggcgaggtggtgccggtttgagaagaagctgtatttttccagcaagggggtcagataggttgtactgtacttgcattgagtcaacttgataattcagtaaagtaaccagcat

SEQ ID NO: 88297 - DNA, 1981 bp, Zea Mays
gtcaattcctgtctgtgcgcgcgcgcgcgcgtggcgccggccgagcggccgttgacccgatgaccggcgcggcggccgtcgatcccccggcgcctcggccgcggcggctgacggtcctcccgctcatcgcgctcatcttctacgacgtctcgggaggccccttcggcatcgaggactcggtccgcacgggcggcggcgcgctgctcccgatcctcggcttcatcgtcctcccagtcctctggtcgctcccggaggcgctggtcacggccgagctcgcatcggctttccccaccaacgccgggtacgtggcctgggtgtccgccgccttcggccccgccgtggcgttcctcgtcgggttctccaagtgggcgtcggggacgctcgacaacgcgctctacccggtgctgttcctcgactacctccgctcgctggcggtcctcgcgctcacggccgcgctcacctacctcaactaccgggggctccacatcgtcggcctctcggcgctggcgctcaccgcgttctcgctctccccgttcctcgcgctcaccgtgctcgcggcccccaagatccgcccgtcccgctggctcgccatcgacgcccgcgccgtcgacctcaggggctacttcaactccatgttctggaacctcaacttctgggacaaggccagcacgctcgccggcgaggtcgaggaccccaggaagacgttccccaaggcggtgttcggcgccgtcgggctcgtcgtcggcgcgtacctcattccgctgctggctggtaccggtgcgctgccgtcggagacggcggccgagtggaccgacggcttcttctccgaggtcgggcagcggatcggcgggccgtggctgcgcgtgtggatccaggccgccgccgccatgtccaacatggggctcttcgaggccgagatgagcagcgactccttccagcttctcggcatggccgagatgggcatgatccctgccatcttcgctcgcaggtgaagtctgcggctccgacctgaaagaatcagtgtgcagaggcagctttcaatcgaacgaaaaactgaatcttttttgtgaactggtgctgatgaacgcaggtccaagtacgggacgccgacgttcagcatcctgtgctcggcgaccggggttgtgatcctgtccttcatgagcttccaggagatcatcgagttcctcaacttcctctacgggctgggcatgctggccgtgttcgctgccttcgtgaagctgcgcgtgaagaacccggacctggcgcggccgtaccgggtccccgtcggcaccgcgggggccgccgccatgtgcgccccgcccgccgtgctcatcgccaccgtcatgtgcctagcgtcggccaggaccgtcctcatcaacgccgccgtggtcgtcgccggcgtcgcgctgtactacgtcgtggagcaggccaagaggcgcccgtgggccgagttcttggcgcccgtgccgcccgctgacagctcccacggaccagccacggcgcctgatgacgccgacgccgccgacctcgaggatgtccgcgccgggctgctcgcgggcgagccggccgacgaagaaggcagcaaggtcgagtactcaagactggagattcgtgcatgaacccgtttgccgttctgtgtacagtaattccagcgaatacatggcgaatcattgtgtgaaattcagaggaggaggtcaggtgatcgatcgcgctcacaagaagattcagaactgcaaaccgactactagataagtctgaaccatgaatcggagaagtgagaacagatctcaaattgtagaagctgtttttgttttgaccttttaagtgtagtgtgatgccaggcgaggtggtgccggtttgagaagaagctgtatttttccagcaagggggtcagataggttgtactgtacttgcattgagtcaacttgataattcagtaaagtaaccagcatagaaaatctgtgtcgtaactacgcagaaa

SEQ ID NO: 88298 - DNA, 2083 bp, Zea Mays
tttatttattttatatgacgcatagcagtttttaaaaacaatgccctaaaattcttgactgacaatgactaatgcgctatagtgatggcctaatacggcacgtgcggacgtgccaagctgacacaacaagtgacaaccagcgaggcagcgaaccgcaagaacaactcccagttcgctacgcgctcaccgaacctgacgttcaggacccacaagctggtgacacattaacccaccaaatagcgtcacccaccactgttcgtcgtccgcaaaccaataatttggggagaaaattcccaattacggcgggcaaagagagtgatagagaggaaatattttttctctctctctccaatttttcacccccaattctgactcgccagcggcgccaccatctcgccggaatcctagtcgaggtgttggtagcgtcgggccgtggtcgggagcccgcttgtcgcggcgagctcgaccgccgcggatcgctggagcccgtgggcggcggcggcggaggctagggtttgctgctctacccggagcagctagcgggccagatcgtccggccggcggggctgcatatattttgtgcctttcgccggcgagatatcgatgcagccgcggtcgaagaagttcggccgcgtggacacggtccagctcaaggcgcagatcgtgaggcggctggggccccagcgcgccgagctctacttccgcagcctcaccaagttcctgggctgccagctcggcagggacgagttccagaaggcctgcgctgctgcattggggaaggagaacgtcaggctgcacacatccctcgtccagtccattctccgcaacgcgtgcgtgtcggacgggccgccgccgagcgcgcaggccgccaccggaaactcgcagacgagcacggcggtgtccaatgggacgctcaccagtggcttaccgccgccggtgacgagagcgaggccgcccctgactaagtggtccggtgataagccgagcccgattgggaagtctcctctcggtcatcgtccggggactgcgcgggagttcgtgtcggctgggactgggagcaaagctttgcaggaggttgtctccgtggaggatggcgaggaggtcgaccaggcccgtggtggtagtggtagtccagtctgcgtgcagagccgaagccccatcaggcccccgctgggcgttctaaaggctcaggatcctgagccttcgacgtcggacgtgtgctacaacaacggtgagctgccagattctcagtcactgtcgaagctacttgacgaaaggttgaaggctcaaggtctcagcgtacccaaagagtgtgctgatgtcttgaactctgggttgaatgcatacatgagccgaatgctgaaggcatgtctaggcgttgcgaaagcaaggggaagagtcagcaagacgacgcgccaagcgaatggccgtggccgtggccgtgctgttgcttcagtaaatagtgggctgatcaacggctctcctttggaaccaagctgctgctaccaggcttcgttgctcgatctctcgacggcagtgctatcaaatgctcggttagcggggcgcgtggagatccgcgagaagatttcttcccatctccacagcagataagggagcggctagtttccaccacgttttttttttttggcgaacagtatagtggactgatcgagtttaggatgagaggcagagtgtggtttgactgtagggctgggtagtgtgtactcccccatggctgggtgagggtgattcttcttaggatgcggtacatgatagtgagcttcatttagctgtgattgtttacaaaaaataatcgtagtaaaagattctgggatgtgtcttagcttcttttcacaccttataacaccgatttgttatcatgttgtgcctgtacagagagaatcaggtaccatgtgttagaacatgttgctgttggattaacttggattcgttgccttttcactggtgagtggcgaggtctattttgttgtctggccagccagatcactggtttgtttatttttcttgattgcaaatcgtcgtgtgtaagaaccacgtccagaggcattaacctatttcatag

SEQ ID NO: 88299 - DNA, 1200 bp, Zea Mays
tctggatctggtccggcaggtgttggtagcgtcgggccgtggtcgggagcccgcttgtcgcggcgagctcgaccgccgcggatcgctggagcccgtgggcggcggcggcggaggctagggtttgctgctctacccggagcagctagcgggccagatcgtccggccggcggggctgcatatattttgtgcctttcgccgccgcggtcgaagaagttcggccgcgtggacacggtccagctcaaggcgcagatcgtgaggcggctggggccccagcgcgccgagctctacttccgcagcctcaccaagttcctgggctgccagctcggcagggacgagttccagaaggcctgcgctgctgcattggggaaggagaacgtcaggctgcacacatccctcgtccagtccattctccgcaacgcgtgcgtgtcggacgggccgccgccgagcgcgcaggccgccaccggaaactcgcagacgagcacggcggtgtccaatgggacgctcaccagtggcttaccgccgccggtgacgagagcgaggccgcccctgactaagtggtccggtgataagccgagcccgattgggaagtctcctctcggtcatcgtccggggactgcgcgggagttcgtgtcggctgggactgggagcaaagctttgcaggaggttgtctccgtggaggatggcgaggaggtcgaccaggcccgtggtggtagtggtagtccagtctgcgtgcagagccgaagccccatcaggcccccgctgggcgttctaaaggctcaggatcctgagccttcgacgtcggacgtgtgctacaacaacggtgagctgccagattctcagtcactgtcgaagctacttgacgaaaggttgaaggctcaaggtctcagcgtacccaaagagtgtgctgatgtcttgaactctgggttgaatgcatacatgagccgaatgctgaaggcatgtctaggcgttgcgaaagcaaggggaagagtcagcaagacgacgcgccaagcgaatggccgtggccgtggccgtgctgttgcttcagtaaatagtgggctgatcaacggctctcctttggaaccaagctgctgctaccaggcttcgttgctcgatctctcgacggcagtgctatcaaatgctcggttagcggggcgcgtggagatccgcgagaagatttcttcccatctccacagcagataa

SEQ ID NO: 88300 - DNA, 987 bp, Zea Mays
ggcgcgtgcaaaatttttaatccctcctccccccctagtgtctactactactctactagcgacggaacggaaactcggaaaggcaccccatgcgcgttggatggaggagccctggagagtggagatggtgtttataaatccgctcctcctgccaccccaaggtttcagaaacccaccaccgcaacacctgcgctccggcctgctctctctttcaaacagcttcgtgtgtcgttgcgccgcgcatagttccagcgccagctcggcactgaagaatctggtgaccggccgggatcgagagccaagctcgagcaggaacggagagcgcgcggatatatatagctatgatgatgatgatgatggacaggcagctcgtcaggcaatgcgacatggaggtcatgaggatggccatgctcaagcacgaagagaccttccggcagcaggtaaagcgcgcgccgagaaacttcggcttcttcttcttctttctcctgctgtccttcacaccgtcgctacttgtctaatatatttcacacatcatcctggaaaggaagagaagtagaaactgctgctgctactgatcgatcgtggaatggattatcgccattgttcttggcaactaaccgtcttatcgtctgatcaggttcacgagctgcaccgcctgtaccgcatacagagggagctgatgagcgacctaataacgacccgatacgacgacgagccgctgctgctgacgaccgccggccggcgcagcaagcagccgcgccgggcgctggacctgcagctgccagccgacgagtacatcgtcagcgccgacgaggagtcggacgccgccggcgcggagctggagctgacgctggccgtcggcgggcgctgcgcagccggcggcggccggcgcaagagcaacaggcgccggaggcaattagcagagcggcagcagcgcgacaacaacgacgccgccgccgccggcggcggctcctcgccgttcgggtc

SEQ ID NO: 88301 - DNA, 1295 bp, Zea Mays
ggcgcgtgcaaaatttttaatccctcctccccccctagtgtctactactactctactagcgacggaacggaaactcggaaaggcaccccatgcgcgttggatggaggagccctggagagtggagatggtgtttataaatccgctcctcctgccaccccaaggtttcagaaacccaccaccgcaacacctgcgctccggcctgctctctctttcaaacagcttcgtgtgtcgttgcgccgcgcatagttccagcgccagctcggcactgaagaatctggtgaccggccgggatcgagagccaagctcgagcaggaacggagagcgcgcggatatatatagctatgatgatgatgatgatggacaggcagctcgtcaggcaatgcgacatggaggtcatgaggatggccatgctcaagcacgaagagaccttccggcagcaggttcacgagctgcaccgcctgtaccgcatacagagggagctgatgagcgacctaataacgacccgatacgacgacgagccgctgctgctgacgaccgccggccggcgcagcaagcagccgcgccgggcgctggacctgcagctgccagccgacgagtacatcgtcagcgccgacgaggagtcggacgccgccggcgcggagctggagctgacgctggccgtcggcgggcgctgcgcagccggcggcggccggcgcaagagcaacaggcgccggaggcaattagcagagcggcagcagcgcgacaacaacgacgccgccgccgccggcggcggctcctcgccgttcgggtccgactgctccggcgcgagcgccctgtcgtcgccgccgccttcgtcggccgagtactactccgacgacgggccggcggcggcggcgtgccagagggccgttgcgttcgaccttggaggagaaggcgacggcgtgatgaggcagcagcacgcgccgtggctggcgcagtgccagcagtacctcagcctgaggatgacatgagtgaagctgcaggcctgcagcgcgctgctcgccgccgtccatgtcgatgtccatgtcgctagctgtaccaggttgcgtttgtgttgtagcttgtaggagcagcagtacgtactagccactagtgttttttttatctatctattccttttttttttgccctttgtgtttgctatatgtcctagccgtggccaatggagtccgggaagaaggcctgcagttaatgagtgcatcctaatcctgattcctgatccaaagatgttaattgatcatggctatatagctaatgagttcatcctgattgattaa

SEQ ID NO: 88302 - DNA, 2950 bp, Zea Mays
gcttcacgcagtcggcgcctccactctgctccctcgctcgccgtcttcttccatccaggcccctcagctttccctgtttcccatatattctcgcgcggctccacgctctcgctctccacactccacaccgcagacgcctggggggcgctcctactcctcctctagggaaggaggggctcgaggttccaccaattcgccgacaggtcccttgcgtgccatccccgccgcgcgcgcagctccagaggcctccatcccatccatggacgccaagaggcagggcttcttctccgcgctgcgggaggaggtggcgcgcgggctgtcgccggggcgcgcgcggcggcggtcggcgtccaacgccgcggaggtggcggcggcgctgcgccgcctcgggggcggcggcgaggcgctcgcgccgctcatggagggcccggatccggaggcgggccccggcgcgacctgcggcggctccgcgaggaaggaaggcgggtgggggcggtgggtgcgcggccagctccagctcacgcgcgcgccggcgctggaggccggggccggagctggctccggcgccgccgccgccgccgccgccgccggcaggcgcaacgacctcaggctgctgctcggcgtcatgggcgcgccgctcgcgcccgtgcacgtctgcgccgctgagccgctgccgcacctcagcatcaaggacacccccattgtaagaaactacgaaccagagctcttccgcctacatactccatgcctcttccgcctgcgtgctctactgctctcgctctagattggaccccaaccgcaaccgggtggctgctcggtgaattccggaaccgaaaaaaggtgaccttttggggggaggggttgcggttgcggcgtcgagatttgggttctcggtagctaaaatgcgcctccaatccagctgctgtcttcttctcctgagcttccctgctccagtttgccgtccgaagcttttgtccccatgtcccatgtctactactctgacatctcgctcggcagtcggcaaaccttgttgcctgggctctctatggtaaaaattgggggcatccttgatgtgatgcgttttggagagttcttgcatctctcctaaaccacattgcggctgtaaaggtggcttcccttacctgttttgacatgacaggcaacggacggatgtttcccgtaaccgtttcctgtttttttcccaaagaaaatacatttgctgtaaatttcggtttttttattagtgcgtattgtaaccgtataactcatggcgtattgtacgcgcgcgcgcaggagacgtcgtcggcgcagtacatactgcagcagtacctggcggcgtcgggcgggcagaggctgctgtcctccatccgcaactcgtacgccatgggcaaggtgcggatggtggcgaccgagttcgaggcgggcggccgcgtcgtccggaaccgcatggcggcgcagcgcgccgagcccgggcgcttcgtgctgtggcagatggcgcccgagatgtggtatatggagctggccgtgggcgggagcaaggtgcacgccggctgcaacggcaagctcgtctggcgccacaccccctggctcggcgcgcactccgccaagggccccgtgcgcccgctccgccgcgctctgcagggcctggacccgctgacggcggcgagcatgttcgccggcgcgcggtgcatcggcgagaggaaggttaacggggaggactgcttcatcctgaagctgagcgcggacccggagactcttcgggcgcgcagcgaggggctggcggagatcatccggcacgtgctgttcggctacttcagccacaagtccggactcctcgtgcacctggaggactcgcacctgacccggatccagtccgccaccggcggcgacgcggtgtactgggagacgaccatcagctcgtccgtcgaggactaccgcgccgtggacggcgtggtggtggcgcacgccgggcggtccgccgtgaccctgttccggttcggcgaggcggccgtggggctgggccacaccaagacccgcatggaggaggcgtggaccatcgaggaggtggcgttcgacgtccccggcctctccgccgactgcttcatcccgcccaccgacgtcgggcccggctccgtcagcgaggccgccgagctcccgcggggcgagcggagcaaggccgccgccggcctcgtcctcccgtgccaccgcgctagggtcgccgcgctcgagaaggccgacgacggtggcgtcgcgtggagcggcgccctgcagctcgggtgcaagtgattcgtggtaccccgtgctctctcgcagccgtcttgcatttcctgactgactggttttggtaggagacacagaggtaaggtcaggaggaggacttggaggagctttaccattccaagtttccctctgtaaataggaagctcacatcgccttccgtatccctgcctcgtctcgtccggagatctggtagtaggtagtctttgtctgtaacgctgtgtcggcacctcgaggacgaagatccaggggagcggggtgtttgtgtttcttctccgtccagccatatggtatggatcctagtgggcggcggtgcttcttcttctcttctgtcgtagccaaaactaatcatctgaggctagtgaggaagaagggtttcctcgcaggcaattgagttctgtcgtcgtgtacgtggagtctgattagcagcagtccagtatgcttggttggcgagtcaaactaactttttttaggggggagggcgcaaattatgtagtgacctgcctgtgggtggtcctggccgcggggtggtccgtccggtcaggctgtgtaccctttttccttcacatctctctttatttattagtacgatgagatggtgtggttatgttctacacaagttttatgtaagccaaaacttgtatgaaatatcatggtttgagtttgctttttt

SEQ ID NO: 88303 - DNA, 311 bp, Zea Mays
cagtctcactctgtcacccaggctagagggcagtggtgtgatctcagctcactgcaacctctgcttcccaggttcaagcgattctcctgcctcagcctcctaagtaactggaactacagacatgtgccaccacgctcggcttatttttgtattttagtagagacggggtttcgccatgttggctaggctggtctcgaactcctgtgattcatagtgttcgccccgccttggggccttccaaagtgctgggattataggcatgagccactgcgcctggccctgatttaaatttttcatggaagtataaaaat

SEQ ID NO: 88304 - DNA, 1058 bp, Zea Mays
ccccctcacacttctccctcgctcatcactcatagtcacacagtcacactacagagcccagagccctagtgtcctcccctcccctccccatggcccctcaccgcctcctccagcttctactgctcctcgccgccgccatgaccaccgcccggtcccagacccagtcaccagccgccgcgccatccacctcaccctcctctaccgccgccgccgccccaagcccctcatcctcctcctccccgccgccctccaaggacacccacatctccacctcgcccgccgcgtccccgtcctcgtcccacgccggcgccaagctcacctccccggccgcctcccccgcgcccacccactccccgaccccaccgacgccaccgccgtctccgcccaccccagcccccaccagctcctcgccgccgcccgcattgccgcccccggccgcggcgccggcgccggcgcccgtgggcgcgagcgcccctccgcccgccgcgtcctccccgccggtcccagcgccgacgctcgcccccgcgccgtcgtcgtcccctccggccccggcgcccgtcctcgcggcgcccgcgcccgcgcccagcaagaagccgacgccgacgaagaagaagcacgcgccagcaccgctcgcggccgcgtccccggccaccggcaccggcaccggcgtgggcctcgcccccggccctggcccctccaccgccgacatgatgagcggagcggcgcggggctgcggcgggtgggcggcgacggcgacggcggcgctggttcttctggccgcgtcgctgacggtgggtccgatggtggcgtgatggatggtagagccacctgtcagggtcgagagagtggtgggttgatgtgatgggatctgcatgggtagtacgtgcattggttcaaacacgctgtattttgtgctactgccgcacgtcacgttattattctctgcgtggagttgacgcccagaatatatagtaccaccactattatattttgtttgctattgtacaacattttcatgcttgattacttctaccgtgcctatgatggtcatttgcttc

SEQ ID NO: 88305 - DNA, 2429 bp, Zea Mays
aaagcaaagcatccgaaacggctgaaccgaggcgggcacgtgccaaccacgtgccttacccgccccgcccgcgtcgtccaggtccaaggtccaactcgcgacgcatctcgatggccgccaccgacgacggtgccgtggactccgcctccgccgcggccgcggccagggccgtcgaggaggcgcgcgcgctgctccccgccccggcgccggactacgacgacgaggatctcgaggagcgcgcgtacgaggcggctgagaaggtcatcgtgtccatctcgggcgggccggacccggaggacgtcgacggcgatggcgacggcgcggagctctgctcgtcctcggggtcgtcaccgccgcccttctcgtggcggaagctctggctcttcacgggccccgggttcctcatgagcatcgcgttcctggacccgggcaacctcgagggcgacctccaggcgggcgccgtcgccggggacacgctgctgtggctgctcatgtgggccaccgccatgggcctcctcgtgcagctcctcgccgcgcgcctcggcgtcgccacaggccgtcacctcgccgagctctgccgcgacgagtaccctgactgggcgcgccgcgcgctctggctcatggccgaggtcgccatggtcggcgcggacatccaggaggtcatcggcagcgccatcgccatcaagatcctcagccgcgggtacctgccgctctgggccggcgtcgtcatcaccgccttggattgctttatttttctttcgctcgaaaactatggggtgaggaaactagaagctgtatttgcacttctaattacaactatggctgtctcatttgcatggatgttcacagacactaaacccaacgggaaagacttattgattggtattttggttccaaaattgagctcaaggacaataaggcaagcggttggggttgttggctgtgtaatcatgcctcacaatgtgtttcttcattcagcactagtgcaatcaaggaaaatagatcaaaataaggaatatcaagtccgtgaagcattgagatactattcaatagagtcaacaatagcattagttgtctccttcatgataaatctctttgttacaacagtttttgcaaaaggattttatggaagcaaggaagccggtaatattggtcttgaaaatgctggacagtatttacaagagaagtttggtggaggattttttcctatactgtacatctgggggattgggcttttagcagctggacagagtagtactataacaggaacttatgctgggcagtttataatgggcggatttctgaatttaaggttaaaaaaatgggtcagggcactgatcaccagaagcttcgcaattgtgcctactataactgttgctttgttcttcgacacatctgattctgcactggatattttaaatgagtggctcaatgtgctccaatcaattcagatcccttttgcactcattccactcatcaccttggtttccaaggagcaagttatgggagtcttcaaaataggccctaacacccaagctgtaacctggactgtagccactctgctgatcactatcaacggctacctcttgatggatttcttctcttctgaaatccgaggtcccctatctggctcgcttctctgcgtggcggtcctcatttatgcctcgtttgttctgtatctcatattgcggggcaccgagctgtccgagaagattgccaaagcgatccgcggcagtttttcatgacaatagtcatcagttttggtcttacatagtgacaagaagtttctcagacagaagagacacgtatcgggagatactaccacacccggtctggtgactgcggactggatactacagcacaccggcatacactgtacagtgattgcttggaagggtccacccatcagttgctgcgaggagcttgcaagcctgtagcagctgctcgttgcatctgctccaggccggaagtaacacatagagatgaacgaattgctgatgttgtacgtgaacattcagagaagacaggttctctttgcaatcaactctcttttttttaaccagtgaagtaaccagaggaagaggacgttgggaatggaagaactggaagtcatttgtattctgtttaatttgcacaggagggtatgtgctcaaccatttttcagggaagccgttggattacaggggtgtttgaatgcactaggaagctaatagttatcggctaaaattagctaaagatatacaaacaaaactattagctattttagtaaattagctaatagttagctagctaattccactagcaattttttagccaactaattgtacgtgatttcattgggcttagagcaactccaacaacaccactaaatgtaatagccaaaatcttagaaataaaataggatccttgattatatgattttatgacta

SEQ ID NO: 88306 - DNA, 1689 bp, Zea Mays
atggacaacagtgcgtactactgctactgctgccttctagctcttcttccacctctatactttctcgtcaagttctggtggagaacttcctgtgcacgtcgtagccatggactccggctccctccaggcccatggcagctccccatcatcggcagcatccaccacctccgcggctccctcgtccaccgggccctgcgagacctgtcgctccgccacggcccactcatgttcctcaggctcggcgaggtgccggtggtcgtcgcgtccacgccggacgccgcgaaggagttcatgaagacccacgacgccaccttcgcgacgaggccaatgaccctgagcgccaaggtcttcgcgaaggacgggccggggatcgtggtggccccgtacggcggcgaccactggcggcagctccgcaagatctgcatcgtggagctcctcagcgcccgccgcgtccggtcgttcgggcccgtgcgcgaggaggaggcggcgcggctggtccaggccgtcgccggcgcctcgacgcggcgcgcgccggcaccggcgccgctcgtcgacctcggcaggctcgccgccgtgtacgtcgccgacgcgtcggtgcgcgccatcgtgggcaggcggttcggggagacggacgctctgctgcgcttcgtggacgagagcgtcagcctggccggcgggttcacgcccgtcgacctgttcccgtcgtcgctgctcgttcgcgtgctcaccttgcgccggaccgtgcgcaggctggagcacttccgcgagtccttgttcggcttcatggatggagtggtgcgtgagcacctcgagaggaagcagtcatcacgtggtggaggaggaggagaagaagaagaagaagctgacatggtcgacgttctcctccggatccaacaggagggaaacctaaagttccctctcaccatgcgcataatcgaagcagtgatatttgtgagtactattattgatctcatcgcagggggtatcgagacagcgtcatcgacgctgcagtgggcgatggcggagctgatgcggaaccctgccgccatgtccaaggcgcaagccgaggtcaggggagtctacgcggggcagacgaaggtaaccgaggaccgactaggcgagctaccctacctgcagctggtgatcaaggagaccttgcggctgcacgtcccggggccgctgctgatcccgcgggaatgccaggagcactgccgcgtgctcggctacgacgtgcccaagggcgccatggtgctcgtgaacgcgtgggcgatcgcccggagcccggagtactgggaggagccggacgcgttcgatcccgacaggtttgccggtgacgcggcgagggatttcaggggcaacgacttcgagttcataccgttcggcgctgggcgacggatctgccctgggatggcgtttgggctcgccaatatcgagctcgggctggccagcttgctgttccatttcgactggagcctgccggagggcgtcgttccaagtgagatggacatggctgagaccatgggaatcactgctaggagaaaggcagacctcctgctgtccgctactccgcgtgtcgtcccacgcccgagttaaattcatggttcccgtacaatttagaaccaatgaacttctcttgcttgcctctgaaaaaaaactaataataattgtgttgactgtttggttcgcttc

SEQ ID NO: 88307 - DNA, 609 bp, Zea Mays
atggagcgaggagacgaggcatcgtcagtagtgagcaaggccagcacagcagagcagcgactcaccagggagcagcacggcgacggcgcggcgtggctgaacctgacgctgggcgcgagcgaatcgccgtcgccgtctccgtccccggacgccgcgagctgctccgcggactccgagtccgggtccgggtccgggtccgccgccaagccgcccccgcacaaggtgttctcctgcaacttctgcctgcgcaagttcttcagctcgcaggcgctgggcgggcaccagaacgcgcacaagcgggagcgcagcgccgccaagcgatcctcgtaccacgcgcagcgggtggtcgtgggcggcctgccgctgcacgcgcacgccgccctcatgcgctccctccgagccaacccggcgccggcgccggcggtcaggacggcggcgaggttcctcgagggcggcgtggcggcggcggcctgggcaacggtcccgtgcgaggaggcgccgagctcggcctggcctgggagcttcaggctgagagcgccgcactcggagtatgagcaagcgtgtgagccgattcagccgagtaagatcgacttggacctcaggctctga

SEQ ID NO: 88308 - DNA, 693 bp, Zea Mays
attatttcaagagacaacaggtaaggtacatgtacagcactacaggcccaaaatgaagagaaaaaaaatcccagaccgttgaaaccgaacctaaagaacatcaatcaaacaaacaatacagcagcagaaacaacctgccgcacgacatggaaacaaggactcaacacccactgttgacaaagaacaaatgcatcgatcatgttcaagcagacaacagggtctggacgaactgaatagcttcagttctgcgtgactgaatagcttcagttctgcttcacccaatccttatttattcttcggggggaaaagaaccgcatccggctactcatgttgaagcagacaacacggtctggacgaactcccggggccgacagactgccgccaacggcttggccatgggcatggacagcccaacgccttcggccatgtcaacacacccaccgacctcccagtcgaagcactgcaggagagccgccagagtcaagctgaggagacgcaaggccatcccttccccagggcagcgcctccgtccaagcccgaacggcagcaagggggcggcgaccgtggcagtggcgtccaggaaccgctccggcctgaactcctcgggggcctcccacagcctggggtcccggtggatgagccaggcgttcaccaggaccatggtgccgcgccggacgcggaacccgcccacgg

SEQ ID NO: 88309 - DNA, 305 bp, Zea Mays
cattccacccacatgctatggcaaacattaacgtcttcttgcaacatcaacaattgttgccattctacctgcaggctgtggcaaacattgccttcttacaacaacaacaacaattgctaccatttagccaactagctctaacgaatcctaccaccttattgcagcagcccatcattgatggtgccatcttctagatttttttttataatttatactgtaataataaagttcttgtgctgatatgtgcgacctctcagtaatccataaaacatctctagtattgtcctttgtccatttttatttga

SEQ ID NO: 88310 - DNA, 723 bp, Zea Mays
atgggagccaagatttttgccctccttgccctccttgctctttcagcaagcgctgctacctcgacttttattccacaatgctcacaacaatacctctctccggtgacagccgcgggatttcaatacccaactatacaatcctacatggtacaagaggccatccaagcaagcatcttacggtcattagcattaaccctccaacaaccatatgctctattgcaacagccatccttagtgcatctgtatctccaaagaatcgcggcacaacaactacaacaacagttgctaccaacaatcaatcaagtagttgcagcgaaccttgctgcttacctccagcaacaacagtttcttccattcaatcaactagctggggtgaaccctgctatctacttgcaggcacaacagctactaccatttaaccaacttgtcgggagcccttatgccttcttactgcaacaacagcttctgccattccatctgcaagctgtggcaaacattgttgctttcttgagacaacaacatttgttgccattttacccacaagttgtgggaaacattaatgccttcttgcaacagcaacaattgctaccattctacccacagaatgtggcaaacattgttgccttcttacaacaacaacaattgctgccatttagccaacatgctttgacgaatcctaccaccttattgcaaccgcccaccattggtggtgccatcttctag

SEQ ID NO: 88311 - DNA, 345 bp, Zea Mays
atggcagccaagatctttgccctccttgccctccttgctctttcagcaagcgctgctacctcgactattattccacaatactcacaacaatacctctctctggcgacagccgcgagatttcaatacccaactatacaaccctacatgctacaagaggccattgcagcaagcatcttacagtcattagcatttaccctccaacaaccatatgccctattgcagcaaccatccttagtgcatcagtatctccaaagaattgcgacacaacaactacaacaacaattgctaccaacaatcaatcaagtagttccagcgaaccctgctgcttacctccatcaacaatag

SEQ ID NO: 88312 - DNA, 252 bp, Zea Mays
atggaaagggatgagggagagaggagcagggaggacgctcggtcatgggagacagagaaggagcacgcgcaggaagatgaggagctgcggctgggcgctagaaggagcagagggaagggtggccagcgccatgggagatggcagaaggaggggcgcgcgtgggagcaccagggcgcgcggatgccagagcgcgcggctgggagagaagatgaagacagcggccagatttttccttgctacgcgagcggatga

SEQ ID NO: 88313 - DNA, 865 bp, Zea Mays
agattttgagtcggcatatatctatatttcaaataagtatcggtcattatatttatatgtgaatagcgacgcttcgtcggtcggcaattctcgctaatagcatctcatcgttagtcggaataaagaccaaagaccacagtcgccgcgcacccacgctcgtacactcagctgccgctgcgccaaggagaagctgtgcgcggtccaggcacaggtgcagggtgaacaggaggcggcgacaacactccagaggagggtggatgagctagagagcggcggataggagagggccggtgtgttggcggtggagggcgtggagctgcgcagggcaaacactgtgctagaggagaacaacagggagcttgccttgaggctgcaggacgcgatcgagcaggctactgcatctgcctccgctaatctagctcctaaggttcgacatgccccgtgcctaccatcactctcgatttgaagaagagtctcaagattttgcaggcacttcaagcgggcaggaaagtctaaggcccttactaattacttccaagagggaggtcctagaggtagcaagcagatcgtggtggtacctatggatgagcgctatagcaagatcaaaagttcttgtggatggatgttattttgttttgtatttctcgaaaagagaaatttgcaagtgaacttaaaattgtgaagccacatgttctcatatgtggttgtactagctagtatctctgaggtttaacaagtcaaacttagggttgttgtctgcttattttgatctttattacgacaagagcaaacttgtgacctttatgtatgaatgcagtacaattgttattgccatgaatgaaaatatgagctatgtttgaccaaa

SEQ ID NO: 88314 - DNA, 726 bp, Zea Mays
atggcagccaagatttttgccatccttgccctccttgctctttcagcaagcgttgctaccgcgactattattccacaatgctcacaacaatacctctctccggtgacagccgcgagatttgaatacccaactatacaatcctacaggctacaagaggccatcgcagcaagcatcttacggtcgttagcattgaccgtccaacaaccatatgccctattgcaacaaccatccttaatgaatctatatctccaaagaatcgcagcacaacaactacaacaacagttgcttccaataatcaatcaagtagttgcagcgaaccttgctgcttacctccagcaacaacaatttcttccattcaatcaactagctggggtgaaccctgctgcttacttgcaggcacaacagctactaccattcaaccaacttgtcaggagccctgctgccttcttactgcagcaacagttgcttccattccatctacaagttgtggcaaacattgctgctttcttgcaacaacaacaacaattgctgccattttacccacaggttgtgggaaacattaacgccttcttgcaacagcaacagttgctaccattctacccacaggatgtggcaaacaatgtcgccttcttacaacaacaacaattgctgccatttaaccaacttgctttgacgaatcctaccaccttattgcagcagcccaccattggtggtgccatcttctag

SEQ ID NO: 88315 - DNA, 648 bp, Zea Mays
atggcggttcttgacgcggcggtgacgccgtcgccgagcggcagggcggacgcggcggcggcggaccaggtcgccacgacgagcggctgcggcggccgcgcggcagaggaggcggaggcggtgctgctgcagcaggagcatgacggccaagggcgcgcgaagcgaaagcgctcgaggcgccgccgcgaccgcgacggccagcagcccaaggagccgaccacccaggaggagtacctggcgctgtgcctcgtcatgctggcgaccggccgccgcgacgccgacgccgacgccgcggttccgccgcaggaccacgcgtgctccgtctgcggcaaggcgttcccgtcgtaccaggcgctgggcggccacaaggccagccaccgcgccaagccctcgccctcgccttctccggcggcggcgctggcgccggagccgggcgcagaagacggggaccgccacgacgagaagaagccggcgcagccgtcctcgtcgtcggctggctccagacccgcggcggcggcgcacgagtgcaacgccgtcgccttcgacctcaacctgcctgcgctgccggacaggtgcgcgggcgtggacgaagacgaggtgctcagcccgctcgcgttcaagaagccccgcttcatgatcccggcctag

SEQ ID NO: 88316 - DNA, 2081 bp, Zea Mays
actccagcccgcggtccagcccctgtccccgtcacctcctctgctccgtagcgccgccatccgtggcggcggcaatctaccgaacaccgtgcgtgcgtgtgttgccgcaatggcctcgcaccacctcgccagccccgccgcggccgcaacctccgccgccaccgtctccagggctctcttcaagcatgcctacactaaaccctcttactcccttctccacgccccgctcctccgcgccgtcgccgcccggcccgcgctcctctccgccgccaccgcggtctccactacggcggcgcccgcggccgcagctatggacaacgtggaggagtgggggctgaggccgctggccgaggtcgacccggaggtgtacgacctaatcgagcgcgagaagcggcggcagcgagcgggtatcgagctcatcgcctcggagaacttcacctcgctcgctgtcatggaggcgctgggctccccgctcaccaacaagtactcggagggcatgccgggggcgcgctactacggcggcaacgaggtcatcgacgaaatcgaggagctctgccggacccgcgcgctcgccgccttccacctcgaccccgcccgctggggcgtcaacgtgcagccctactcggggtcccccgccaatttcgcggcttacacggggctgctccagccgaacgacaggatcatggggctcgacctgccgtccgggggccacctcacccacgggtactacacggcgagtggcaagaagatttctgcaacctccatctacttccagagcctgccgtataaggtgagctccgacaccgggtacgtcgactacgataagctggaggaaaaggccatggatttccgccccaagcttatcatctgtggcggtagtgcgtgccctcgggagtgggattacgccaggttcagggccatcgcagacaagtgcggggccatgttgctctgcgacatggctcatatcagtggtctcgttgctgcgcaggaggctttggatccttttgagttctctgatgtggttaccactacgacccacaaaagtcttcgagggccaaggtctggtatgattttctacaggaagggcccaaagcctccaaaaaaaggccagcctgagggtgctctgtatgactacgaggacaagatcaactttgctgtgttcccgtcactccagggggggcctcacaatcaccaaattgctgctctagctgtagccttgaaacaggccatgtcacctggattcaaggcctatatccagcaggtcaaggcaaacacagtttcccttggtaaccatttgatgagtaagggctacaagttggttactgatggaacagagaaccaccttgttctctgggatctgcgccctcttggcttgactggcaataaagttgagatgctatgtgacctatgcaacattacactgaacaaaaatgctgtctttggtgacagcagtgcattatcacctggtggtgtgcgcattggtacacctgctatgacctcaaggggtttggttgagaaggacttcgtgcagattgccgagtaccttcaccgagctgtgaccatctgcttgagcatccaggcggagcatggcaagattctcaaggacttcaagaagggcttggtgcaaaacaaggacatagagaacctgagggcggaggtcgagaagttcgccacttcatttgacatgcctggcttcagggtgtctgacatgaagtacacagactagactgctgctgacttgggtgcaaaccgttgctcctgttacagtaacactggcaggctggtgcaatgcaaaccgttcttctgttacggtaatattaacgcctctgaaatgtcacgtgaatggtggtaaacctgaatttcacacgactagagggatggtttactttctattcagtgctctgccattctgttggcctgctattccgtcggtctattttgttggaactgataataatatgtttagagaataatgattgagaaagaaaatggcattgcactggagataattctgcttagctcggccttccagaagctctatgataaaccccccttgatttgttagttggcttgatatgaca

SEQ ID NO: 88317 - DNA, 2199 bp, Zea Mays
cgcggtccagcccctgtccccgtcacctcctctgctccgtagcgccgccatccgtggcggcggcaatctaccgaacaccgtgcgtgcgtgtgttgccgcaatggcctcgcaccacctcgccagccccgccgcggccgcaacctccgccgccaccgtctccagggctctcttcaagcatgcctacactaaaccctcttactcccttctccacgccccgctcctccgcgccgtcgccgcccggcccgcgctcctctccgccgccaccgcggtctccactacggcggcgcccgcggccgcagctatggacaacgtggaggagtgggggctgaggccgctggccgaggtcgacccggaggtgtacgacctaatcgagcgcgagaagcggcggcagcgagcgggtatcgagctcatcgcctcggagaacttcacctcgctcgctgtcatggaggcgctgggctccccgctcaccaacaagtactcggagggcatgccgggggcgcgctactacggcggcaacgaggtcatcgacgaaatcgaggagctctgccggacccgcgcgctcgccgccttccacctcgaccccgcccgctggggcgtcaacgtgcagccctactcggggtcccccgccaatttcgcggcttacacggggctgctccagccgaacgacaggatcatggggctcgacctgccgtccgggggccacctcacccacgggtactacacggcgagtggcaagaagatttctgcaacctccatctacttccagagcctgccgtataaggtgagctccgacaccgggtacgtcgactacgataagctggaggaaaaggccatggatttccgccccaagcttatcatctgtggcggtagtgcgtgccctcgggagtgggattacgccaggttcagggccatcgcagacaagtgcggggccatgttgctctgcgacatggctcatatcagtggtctcgttgctgcgcaggaggctttggatccttttgagttctctgatgtggttaccactacgacccacaaaagtcttcgagggccaaggtctggtatgattttctacaggaagggcccaaagcctccaaaaaaaggccagcctgagggtgctctgtatgactacgaggacaagatcaactttgctgtgttcccgtcactccagggggggcctcacaatcaccaaattgctgctctagctgtagccttgaaacaggccatgtcacctggattcaaggcctatatccagcaggtcaaggcaaacacagtttcccttggtaaccatttgatgagtaagggctacaagttggttactgatggaacagagaaccaccttgttctctgggatctgcgccctcttggcttgactggtatgcatagcaagattcttttgttttcctttttggcgaggagcatagcaggattcgatggcatgctttggctttcccttagcaggctgtacaaacttgctataaaattggtttatcaaaattgcaggcaataaagttgagatgctatgtgacctatgcaacattacactgaacaaaaatgctgtctttggtgacagcagtgcattatcacctggtggtgtgcgcattggtacacctgctatgacctcaaggggtttggttgagaaggacttcgtgcagattgccgagtaccttcaccgagctgtgaccatctgcttgagcatccaggcggagcatggcaagattctcaaggacttcaagaagggcttggtgcaaaacaaggacatagagaacctgagggcggaggtcgagaagttcgccacttcatttgacatgcctggcttcagggtgtctgacatgaagtacacagactagactgctgctgacttgggtgcaaaccgttgctcctgttacagtaacactggcaggctggtgcaatgcaaaccgttcttctgttacggtaatattaacgcctctgaaatgtcacgtgaatggtggtaaacctgaatttcacacgactagagggatggtttactttctattcagtgctctgccattctgttggcctgctattccgtcggtctattttgttggaactgataataatatgtttagagaataatgattgagaaagaaaatggcattgcactggagataattctgcttagctcggccttccagaagctctatgataaaccccccttgatttgttagttggcttgatatgaca

SEQ ID NO: 88318 - DNA, 3135 bp, Zea Mays
ctttgcttcttccaccactgaccagcgggtcccgcctcgccggtggagttttcagggagcttcttctgcccgccggcgcgatgatcctgtcggcgctcacgacgtcggtggggatcaacctggccctcaccgtgctcctcgccgcggcctactcgttgctccgtcgcaggccaccgtacgtcgaggtgtactccccgcgccggccctacgcgccgctcgagccgtggctcgctgcggcgtggcgccgtgccgaggaggacatccacgccgccgcggggctcgatggcgtcgtcttcatccgcatcttcgtattcagcatcagggtgttcgcggcggccgcggtgctcggggtcggcgtgctcctgccggtgaacttcctcggtgaccagctgcgggagatcgacttcaccgacctgcctaacaaatccatcgatctattcagcatctccaacgtccaggacggttccagcaaattgtggcttcacttttcagctgtgtatatcataactggaattacatgctacctactgtatcatgagtacaaatatatctctggcaagaggctagagtattttatgatctcaaagccattacctcagcacttcacagttcttgttcgagctattccagtatctgatggtgtttcagtgggtgatgctgttgataagttttttaaagagtatcatgcatccacgtacttatcacacacaattgttcgtcaaactggcaaacttcgccgtcttctgaacgatgctgagagtatttgtacaaagcttaccaacttaaaccatgtccgacggtcaactggagatcctccaagaaaacttggattatttagcagaaatgatcttgttggagaataccagaaaaggctggaagaccttgaagagaatgttagaatggaacagtcagatgctactaggagacaggaaattcctgctgcctttgtttcattcagatctcgatatagcgctgcaaatgcagtttacattagacagtcagacaacccaactgagtggcaaactgaggaagctcctgatcctcatgacgtttattggcctttcttttctacatccttcatggaaagatggattgccaagtttgtagtatttgtagcttcagttctcctgatacttgtctttctcctagttgtggcatttgttcaaggactcacctatctggaacaactagagaagtggttgccttttctgaggaacatactggaaattgctgttgtgagtcaactggttacaggatatcttcccagtgttattcttcacgttctttcatcttgtgtgccctcaataatgaagttattttcaactatgcaaggatttgtttctgttagtgggattgagcaaagtgcttgcaataagatgcttcggtttacaatatggactgcgttctttgccaatgttctcactggttcagccttagttcaattcgagattttccttaatccaaaggagctaccttcaaaacttgcagttcttgtaccagcgcaggcctctttctttattgcatatgtggtcacatcgtggacaagcataacatctgaactcactcaaattactgctcttttctgtcatctgtggggaaagtgtgcgaagtgttgcaagcgggattactccaaagctccatcaatgccttattatagtgaaattccacggattctcttgtttgggcttattggactcgcatattttattgtagccccccttatcctaccatttgtattggtctacttctgccttggctacttcatattccgtaatcagctttttaatgtatatgcgccaaagtatgatactggagggaaattttggcccgttgtgcacaacacaacgatattctctctggttgttctgcatataattgctattggagtatttgggataaagaagcttccccttgcgtccagtttgctacttcccctaccaccgctgacccttctgttcaacgaattctgccggaacagatttctgcctatctttgaagcatactctaccgagtcattgctaaagaaagatagagaagaacagagcaaaccagatatggcggagttcttcagtaatcttgtaacagcttactgtgacccagctctgaaacctttccaacgggcttctaactccgacgaacgcaccgcgccgctcttggcctctctgtctagctccagataagctgtggatggcagctgactccgctgtgtgaatttcgatttgattttggtgtttagatacggctagtagcataggtataattttatgctacattgtaagagtagaacttttgacagacatatagtttcttattgttgttgtctgttgtgcaattttttgcccttctggtgtgggggggagttcgttgtacatatgtgaatgtacatgatattttgtgcacttctcagagatgaattgctcgttttatgatgtgttggcaacgcaaacttatgcatcgttcgttcatgggttgtacggtaaactgcttgtaccttcagaattttcatcaacttcatttttaattcgagtaaactgctatgcatgtgaacatgtgaaccttttgcttcggttttcacattatgcatcctatgggcttgtttgccatttggagcatctgtgatgacgagcaactgctttactctatttatttgttttctttgtgctctacttgacatttttttgggaggccactatcatatagctgtcgctgtcaaagggttttgttttctgaaatctcaaatggtgtgagaaaatcatcacgtggaagcctgtcagcctgtggcgttgctacctggtttatatacgctgagaccattagacgcgctagttacactgactctactctgaaagtgtctcccgccgctggttgtttacctggttttaaatgtgatccaaaaagattcgcttgcacagctcgatcctctgagaacgacagcaggtgatacattaaaaattactacctccgttttcaaatattacctccgttttcaaatatttgtcgtcagatagttcatttttaactaaataacgacagataaaaaagaacggagagaataaataaaaaagaacggaggaagtatatcactgtactgattttacagcaggtaatccatcaacttttgaaaaaaaaaacaca

SEQ ID NO: 88319 - DNA, 2626 bp, Zea Mays
ctcccttccccaaaacaagaactgtcaatgcatgcagtccatccagccctctctctctcatcagccgtcctgcccagcccagatccaccccatcaaccagcaggtccagtccagccatccaactccagcacagaacgagaacagcaccactgctgctgtactgcttgctgttcgcctcccagcagtggaacaccagcacttccccttcagcgtccagccgtcgaccgagcacacggccagagcggtgcctcgcttctgctttggacgcttgtgatccagtagagtaaccaggaaggaagcaaatcaacacggctgctaaaaagaaaccggcgattaaaccaggtgtaaagtggtagtactagcctactaggtgttttcgaattcgcaatcttctcctgatccccccccccccccccccccgcaggccgcaaggctacaaaatcccctgcttgtcctgttgcgccccgccgccgctgggttccgagggagggccagccgtagaaaggagataagaagcgagaagagagcacaggcagagggagtgagggaaaaggcgagagcgtagaaagcagtccggtcggagaagcggaagttcgcgttgctttgctgatccaatgggggagaccaacgagctaccgccgccacccgtggccgcgccgccgcccatgatgccgatgcagtccatgatggtcggcgcaggcgccatccacccgccccacgagcagttccaccatctcaactactgcgtccactcaaatccatcctgggttcaggtggcagcacttgcattccttcactatcttgtgatgttgggttctaccgtcatgcttgcaacagctattgttcctgcgatgggtggtaacgctggtgacaaggctcgagttattcaatcgttcctctttatgagtggcataaacacactgctgcaaacacttattggaacgagacttccaacagttatgaatgcctcttttgcatttgttgtcccagtgctgtcaatagcaaaagagattgaatcaaataacttcctgaatgatcatgagagatttaaacacacaatgagaacagcacaaggagctctgattgtggcatccatcctcaacatgattcttgggttcagcacgatatggggggcatatgccaaaaagttcagtccggtgataatgacccctgttgtttgtgttgttggtcttggactattccaacttggctttccccaggttgggaaatgtgtggagattgggcttccaatgctaattcttgcggtggttgtgcaacagtatgtgccaaattacttcagttatatccatcaacgggtcaccttcttgtttgagaggtattcgttgcttctttgtatcggcatcgtgtgggcctttgcagctatccttactgctgcgggtgcatatgaccatgcttcacctaagacacaacagcactgccgcactgataagtctttcctcatgtcatcggcaccatggattaaaattccattaccattcgaatggggtcctccaatcttcactgctggtcattcatttggaatgatgggtgctgtacttgttgcagccttcgagtcaactggagcacactttgctactgctcgtctagcgggtgctacaccacctccagcttatgtccttagtcggagcgttggcttgcagggtattggaatgttcttggaggggatctttagtgttccagcaggttcatctgtatcagttgaaaacattggcctccttgggctgacaaaagttggaagtaggagggtgatccagatatcaactgggtttatgatattcttctccatatttgggaaatttggggccttctttgcatcgatcccactgccgatctttgcagcaatttactgcatcttgttcggcattgtagctgctgtgggagtctcgttcatgcagtttgccaacaagaactcgatgaggaacatctatatcatcggactctcgttgttccttggcatctcggtccctcaatacttcaacggatacacttcttcagctggcggccacggacctgcccggacaaatgctggatggttcaacgacattataaacaccgtgtttgcttccgggccgacggtggcgctaattgtcgcttctgtcctggacaacacgctggagttcaggggctacgaggccgaccgggggctctcgtggttccagccgttcctgcgccgccataagggatactcggaccccagaaacgaggagttctacagcttcccaatcagcgtctatgacgtcatcccagaccgatttcggcgctgactccaaatgaccgctgttaccccgcagctgtgcatgtaaatccccgtgagtcttgttagtcttactcctgtgacttgtagcggctggttctagggggatatgggtaaaagaatgcttagggcaattgcttggtttgactcttttcgggataagaaacgggttacatgataatgtagagctctgtgccggatacattggttttgggaagggttacagaagaatactagcaccttacatgttgatgggcatttagttgaaggcattggctatttgtttttttgcccaatatatggctgttggagcttgatctgctgactgggaaaagggggcagtactttgga

SEQ ID NO: 88320 - DNA, 2546 bp, Zea Mays
ctcccttccccaaaacaagaactgtcaatgcatgcagtccatccagccctctctctctcatcagccgtcctgcccagcccagatccaccccatcaaccagcaggtccagtccagccatccaactccagcacagaacgagaacagcaccactgctgctgtactgcttgctgttcgcctcccagcagtggaacaccagcacttccccttcagcgtccagccgtcgaccgagcacacggccagagcggtgcctcgcttctgctttggacgcttgtgatccagtagagtaaccaggaaggaagcaaatcaacacggctgctaaaaagaaaccggcgattaaaccaggtgccgcaaggctacaaaatcccctgcttgtcctgttgcgccccgccgccgctgggttccgagggagggccagccgtagaaaggagataagaagcgagaagagagcacaggcagagggagtgagggaaaaggcgagagcgtagaaagcagtccggtcggagaagcggaagttcgcgttgctttgctgatccaatgggggagaccaacgagctaccgccgccacccgtggccgcgccgccgcccatgatgccgatgcagtccatgatggtcggcgcaggcgccatccacccgccccacgagcagttccaccatctcaactactgcgtccactcaaatccatcctgggttcaggtggcagcacttgcattccttcactatcttgtgatgttgggttctaccgtcatgcttgcaacagctattgttcctgcgatgggtggtaacgctggtgacaaggctcgagttattcaatcgttcctctttatgagtggcataaacacactgctgcaaacacttattggaacgagacttccaacagttatgaatgcctcttttgcatttgttgtcccagtgctgtcaatagcaaaagagattgaatcaaataacttcctgaatgatcatgagagatttaaacacacaatgagaacagcacaaggagctctgattgtggcatccatcctcaacatgattcttgggttcagcacgatatggggggcatatgccaaaaagttcagtccggtgataatgacccctgttgtttgtgttgttggtcttggactattccaacttggctttccccaggttgggaaatgtgtggagattgggcttccaatgctaattcttgcggtggttgtgcaacagtatgtgccaaattacttcagttatatccatcaacgggtcaccttcttgtttgagaggtattcgttgcttctttgtatcggcatcgtgtgggcctttgcagctatccttactgctgcgggtgcatatgaccatgcttcacctaagacacaacagcactgccgcactgataagtctttcctcatgtcatcggcaccatggattaaaattccattaccattcgaatggggtcctccaatcttcactgctggtcattcatttggaatgatgggtgctgtacttgttgcagccttcgagtcaactggagcacactttgctactgctcgtctagcgggtgctacaccacctccagcttatgtccttagtcggagcgttggcttgcagggtattggaatgttcttggaggggatctttagtgttccagcaggttcatctgtatcagttgaaaacattggcctccttgggctgacaaaagttggaagtaggagggtgatccagatatcaactgggtttatgatattcttctccatatttgggaaatttggggccttctttgcatcgatcccactgccgatctttgcagcaatttactgcatcttgttcggcattgtagctgctgtgggagtctcgttcatgcagtttgccaacaagaactcgatgaggaacatctatatcatcggactctcgttgttccttggcatctcggtccctcaatacttcaacggatacacttcttcagctggcggccacggacctgcccggacaaatgctggatggttcaacgacattataaacaccgtgtttgcttccgggccgacggtggcgctaattgtcgcttctgtcctggacaacacgctggagttcaggggctacgaggccgaccgggggctctcgtggttccagccgttcctgcgccgccataagggatactcggaccccagaaacgaggagttctacagcttcccaatcagcgtctatgacgtcatcccagaccgatttcggcgctgactccaaatgaccgctgttaccccgcagctgtgcatgtaaatccccgtgagtcttgttagtcttactcctgtgacttgtagcggctggttctagggggatatgggtaaaagaatgcttagggcaattgcttggtttgactcttttcgggataagaaacgggttacatgataatgtagagctctgtgccggatacattggttttgggaagggttacagaagaatactagcaccttacatgttgatgggcatttagttgaaggcattggctatttgtttttttgcccaatatatggctgttggagcttgatctgctgactgggaaaagggggcagtactttgga

SEQ ID NO: 88321 - DNA, 2543 bp, Zea Mays
ctcccttccccaaaacaagaactgtcaatgcatgcagtccatccagccctctctctctcatcagccgtcctgcccagcccagatccaccccatcaaccagcaggtccagtccagccatccaactccagcacagaacgagaacagcaccactgctgctgtactgcttgctgttcgcctcccagcagtggaacaccagcacttccccttcagcgtccagccgtcgaccgagcacacggccagagcggtgcctcgcttctgctttggacgcttgtgatccagtagagtaaccaggaaggaagcaaatcaacacggctgctaaaaagaaaccggcgattaaaccaggtgccgcaaggctacaaaatcccctgcttgtcctgttgcgccccgccgccgctgggttccgagggagggccagccgtagaaaggagataagaagcgagaagagagcacaggcagagggagtgagggaaaaggcgagagcgtagaaagtccggtcggagaagcggaagttcgcgttgctttgctgatccaatgggggagaccaacgagctaccgccgccacccgtggccgcgccgccgcccatgatgccgatgcagtccatgatggtcggcgcaggcgccatccacccgccccacgagcagttccaccatctcaactactgcgtccactcaaatccatcctgggttcaggtggcagcacttgcattccttcactatcttgtgatgttgggttctaccgtcatgcttgcaacagctattgttcctgcgatgggtggtaacgctggtgacaaggctcgagttattcaatcgttcctctttatgagtggcataaacacactgctgcaaacacttattggaacgagacttccaacagttatgaatgcctcttttgcatttgttgtcccagtgctgtcaatagcaaaagagattgaatcaaataacttcctgaatgatcatgagagatttaaacacacaatgagaacagcacaaggagctctgattgtggcatccatcctcaacatgattcttgggttcagcacgatatggggggcatatgccaaaaagttcagtccggtgataatgacccctgttgtttgtgttgttggtcttggactattccaacttggctttccccaggttgggaaatgtgtggagattgggcttccaatgctaattcttgcggtggttgtgcaacagtatgtgccaaattacttcagttatatccatcaacgggtcaccttcttgtttgagaggtattcgttgcttctttgtatcggcatcgtgtgggcctttgcagctatccttactgctgcgggtgcatatgaccatgcttcacctaagacacaacagcactgccgcactgataagtctttcctcatgtcatcggcaccatggattaaaattccattaccattcgaatggggtcctccaatcttcactgctggtcattcatttggaatgatgggtgctgtacttgttgcagccttcgagtcaactggagcacactttgctactgctcgtctagcgggtgctacaccacctccagcttatgtccttagtcggagcgttggcttgcagggtattggaatgttcttggaggggatctttagtgttccagcaggttcatctgtatcagttgaaaacattggcctccttgggctgacaaaagttggaagtaggagggtgatccagatatcaactgggtttatgatattcttctccatatttgggaaatttggggccttctttgcatcgatcccactgccgatctttgcagcaatttactgcatcttgttcggcattgtagctgctgtgggagtctcgttcatgcagtttgccaacaagaactcgatgaggaacatctatatcatcggactctcgttgttccttggcatctcggtccctcaatacttcaacggatacacttcttcagctggcggccacggacctgcccggacaaatgctggatggttcaacgacattataaacaccgtgtttgcttccgggccgacggtggcgctaattgtcgcttctgtcctggacaacacgctggagttcaggggctacgaggccgaccgggggctctcgtggttccagccgttcctgcgccgccataagggatactcggaccccagaaacgaggagttctacagcttcccaatcagcgtctatgacgtcatcccagaccgatttcggcgctgactccaaatgaccgctgttaccccgcagctgtgcatgtaaatccccgtgagtcttgttagtcttactcctgtgacttgtagcggctggttctagggggatatgggtaaaagaatgcttagggcaattgcttggtttgactcttttcgggataagaaacgggttacatgataatgtagagctctgtgccggatacattggttttgggaagggttacagaagaatactagcaccttacatgttgatgggcatttagttgaaggcattggctatttgtttttttgcccaatatatggctgttggagcttgatctgctgactgggaaaagggggcagtactttgga

SEQ ID NO: 88322 - DNA, 2071 bp, Zea Mays
gagggaaaaggcgagagcgtagaaagtccggtcggagaagcggaagttcgcgttgctttgctgatccaatgggggagaccaacgagctaccgccgccacccgtggccgcgccgccgcccatgatgccgatgcagtccatgatggtcggcgcaggcgccatccacccgccccacgagcagttccaccatctcaactactgcgtccactcaaatccatcctgggttcaggtggcagcacttgcattccttcactatcttgtgatgttgggttctaccgtcatgcttgcaacagctattgttcctgcgatgggtggtaacgctggtgacaaggctcgagttattcaatcgttcctctttatgagtggcataaacacactgctgcaaacacttattggaacgagacttccaacagttatgaatgcctcttttgcatttgttgtcccagtgctgtcaatagcaaaagagattgaatcaaataacttcctgaatgatcatgagagatttaaacacacaatgagaacagcacaaggagctctgattgtggcatccatcctcaacatgattcttgggttcagcacgatatggggggcatatgccaatccggtgataatgacccctgttgtttgtgttgttggtcttggactattccaacttggctttccccaggttgggaaatgtgtggagattgggcttccaatgctaattcttgcggtggttgtgcaacagtatgtgccaaattacttcagttatatccatcaacgggtcaccttcttgtttgagaggtattcgttgcttctttgtatcggcatcgtgtgggcctttgcagctatccttactgctgcgggtgcatatgaccatgcttcacctaagacacaacagcactgccgcactgataagtctttcctcatgtcatcggcaccatggattaaaattccattaccattcgaatggggtcctccaatcttcactgctggtcattcatttggaatgatgggtgctgtacttgttgcagccttcgagtcaactggagcacactttgctactgctcgtctagcgggtgctacaccacctccagcttatgtccttagtcggagcgttggcttgcagggtattggaatgttcttggaggggatctttagtgttccagcaggttcatctgtatcagttgaaaacattggcctccttgggctgacaaaagttggaagtaggagggtgatccagatatcaactgggtttatgatattcttctccatatttgggaaatttggggccttctttgcatcgatcccactgccgatctttgcagcaatttactgcatcttgttcggcattgtagctgctgtgggagtctcgttcatgcagtttgccaacaagaactcgatgaggaacatctatatcatcggactctcgttgttccttggcatctcggtccctcaatacttcaacggatacacttcttcagctggcggccacggacctgcccggacaaatgctggatggttcaacgacattataaacaccgtgtttgcttccgggccgacggtggcgctaattgtcgcttctgtcctggacaacacgctggagttcaggggctacgaggccgaccgggggctctcgtggttccagccgttcctgcgccgccataagggatactcggaccccagaaacgaggagttctacagcttcccaatcagcgtctatgacgtcatcccagaccgatttcggcgctgactccaaatgaccgctgttaccccgcagctgtgcatgtaaatccccgtgagtcttgttagtcttactcctgtgacttgtagcggctggttctagggggatatgggtaaaagaatgcttagggcaattgcttggtttgactcttttcgggataagaaacgggttacatgataatgtagagctctgtgccggatacattggttttgggaagggttacagaagaatactagcaccttacatgttgatgggcatttagttgaaggcattggctatttgtttttttgcccaatatatggctgttggagcttgatctgctgactgggaaaagggggcagtactttgga

SEQ ID NO: 88323 - DNA, 1029 bp, Zea Mays
ctggattctctcgaagtttcttccttttcgagaggtgggagagaagagacgcccgcagcggcacgagcttctgaattcctgtttttttgttcctggttttttgcttttgtttctgttcttgttcttgtgtgcgggtttggtttggtttccgtgcgccttttctctttattctagtgcgccgatgacgtgaggcgccgggttttcaatacttgcatccttttcgctgcatttgtttagcgggagttcttcgaacaagcagcgctgccgctgcttgcgcgaatctttggagtgaagctccccgtcacatcagtcctcttcttccccggtcgtcgtcctatgcttgtccctgtctcggcaattctgggatactaaagaggaatcggtgaaggtccggtcttcgattccccgagatttgcatctgaatcttcttcttcttcttctcttttgcctccatggagtctcttgctgcgtgccactccatcgagcgagtctagcgcgcgcgacacagtagcagcagcaaagcagtccggtcggagaagcggaagttcgcgttgctttgctgatccaatgggggagaccaacgagctaccgccgccacccgtggccgcgccgccgcccatgatgccgatgcagtccatgatggtcggcgcaggcgccatccacccgccccacgagcagttccaccatctcaactactgcgtccactcaaatccatcctggggtaagggcatgagcagaggcaccttgacatgctttattttgttgtacgtaatagattagaatcatggagctcagtgcttctgtgtgtatataaatgggtaatgtttgctctgttcttgtaaatggtgcttcttgttattcccttaacatatctggatatagagtcaggaagctcaatatttttatgtgtgtatataggcaacgtttgctctgttcctgtaaatggcatttcttattatcccctgatatatctgggtagtaattttgactatgtcggttgaaagatttgatgttttgttgctggttaga

SEQ ID NO: 88324 - DNA, 2456 bp, Zea Mays
cttgtgtgcgggtttggtttggtttccgtgcgccttttctctttattctagtgcgccgatgacgtgaggcgccgggttttcaatacttgcatccttttcgctgcatttgtttagcgggagttcttcgaacaagcagcgctgccgctgcttgcgcgaatctttggagtgaagctccccgtcacatcagtcctcttcttccccggtcgtcgtcctatgcttgtccctgtctcggcaattctgggatactaaagaggaatcggtgaaggtccggtcttcgattccccgagatttgcatctgaatcttcttcttcttcttctcttttgcctccatggagtctcttgctgcgtgccactccatcgagcgagtctagcgcgcgcgacacagtagcagcagcaaagcagtccggtcggagaagcggaagttcgcgttgctttgctgatccaatgggggagaccaacgagctaccgccgccacccgtggccgcgccgccgcccatgatgccgatgcagtccatgatggtcggcgcaggcgccatccacccgccccacgagcagttccaccatctcaactactgcgtccactcaaatccatcctgggttcaggtggcagcacttgcattccttcactatcttgtgatgttgggttctaccgtcatgcttgcaacagctattgttcctgcgatgggtggtaacgctggtgacaaggctcgagttattcaatcgttcctctttatgagtggcataaacacactgctgcaaacacttattggaacgagacttccaacagttatgaatgcctcttttgcatttgttgtcccagtgctgtcaatagcaaaagagattgaatcaaataacttcctgaatgatcatgagagatttaaacacacaatgagaacagcacaaggagctctgattgtggcatccatcctcaacatgattcttgggttcagcacgatatggggggcatatgccaaaaagttcagtccggtgataatgacccctgttgtttgtgttgttggtcttggactattccaacttggctttccccaggttgggaaatgtgtggagattgggcttccaatgctaattcttgcggtggttgtgcaacagtatgtgccaaattacttcagttatatccatcaacgggtcaccttcttgtttgagaggtattcgttgcttctttgtatcggcatcgtgtgggcctttgcagctatccttactgctgcgggtgcatatgaccatgcttcacctaagacacaacagcactgccgcactgataagtctttcctcatgtcatcggcaccatggattaaaattccattaccattcgaatggggtcctccaatcttcactgctggtcattcatttggaatgatgggtgctgtacttgttgcagccttcgagtcaactggagcacactttgctactgctcgtctagcgggtgctacaccacctccagcttatgtccttagtcggagcgttggcttgcagggtattggaatgttcttggaggggatctttagtgttccagcaggttcatctgtatcagttgaaaacattggcctccttgggctgacaaaagttggaagtaggagggtgatccagatatcaactgggtttatgatattcttctccatatttgggaaatttggggccttctttgcatcgatcccactgccgatctttgcagcaatttactgcatcttgttcggcattgtagctgctgtgggagtctcgttcatgcagtttgccaacaagaactcgatgaggaacatctatatcatcggactctcgttgttccttggcatctcggtccctcaatacttcaacggatacacttcttcagctggcggccacggacctgcccggacaaatgctggatggttcaacgacattataaacaccgtgtttgcttccgggccgacggtggcgctaattgtcgcttctgtcctggacaacacgctggagttcaggggctacgaggccgaccgggggctctcgtggttccagccgttcctgcgccgccataagggatactcggaccccagaaacgaggagttctacagcttcccaatcagcgtctatgacgtcatcccagaccgatttcggcgctgactccaaatgaccgctgttaccccgcagctgtgcatgtaaatccccgtgagtcttgttagtcttactcctgtgacttgtagcggctggttctagggggatatgggtaaaagaatgcttagggcaattgcttggtttgactcttttcgggataagaaacgggttacatgataatgtagagctctgtgccggatacattggttttgggaagggttacagaagaatactagcaccttacatgttgatgggcatttagttgaaggcattggctatttgtttttttgcccaatatatggctgttggagcttgatctgctgactgggaaaagggggcagtactttgga

SEQ ID NO: 88325 - DNA, 2172 bp, Zea Mays
ctttttatttgccgttactacgccaccctgaaatccgagtgattaataggaagcttccaggaaagaggtggagcttcttaggtttataattcgattcctctttctctcgttgcagcagtccggtcggagaagcggaagttcgcgttgctttgctgatccaatgggggagaccaacgagctaccgccgccacccgtggccgcgccgccgcccatgatgccgatgcagtccatgatggtcggcgcaggcgccatccacccgccccacgagcagttccaccatctcaactactgcgtccactcaaatccatcctgggttcaggtggcagcacttgcattccttcactatcttgtgatgttgggttctaccgtcatgcttgcaacagctattgttcctgcgatgggtggtaacgctggtgacaaggctcgagttattcaatcgttcctctttatgagtggcataaacacactgctgcaaacacttattggaacgagacttccaacagttatgaatgcctcttttgcatttgttgtcccagtgctgtcaatagcaaaagagattgaatcaaataacttcctgaatgatcatgagagatttaaacacacaatgagaacagcacaaggagctctgattgtggcatccatcctcaacatgattcttgggttcagcacgatatggggggcatatgccaaaaagttcagtccggtgataatgacccctgttgtttgtgttgttggtcttggactattccaacttggctttccccaggttgggaaatgtgtggagattgggcttccaatgctaattcttgcggtggttgtgcaacagtatgtgccaaattacttcagttatatccatcaacgggtcaccttcttgtttgagaggtattcgttgcttctttgtatcggcatcgtgtgggcctttgcagctatccttactgctgcgggtgcatatgaccatgcttcacctaagacacaacagcactgccgcactgataagtctttcctcatgtcatcggcaccatggattaaaattccattaccattcgaatggggtcctccaatcttcactgctggtcattcatttggaatgatgggtgctgtacttgttgcagccttcgagtcaactggagcacactttgctactgctcgtctagcgggtgctacaccacctccagcttatgtccttagtcggagcgttggcttgcagggtattggaatgttcttggaggggatctttagtgttccagcaggttcatctgtatcagttgaaaacattggcctccttgggctgacaaaagttggaagtaggagggtgatccagatatcaactgggtttatgatattcttctccatatttgggaaatttggggccttctttgcatcgatcccactgccgatctttgcagcaatttactgcatcttgttcggcattgtagctgctgtgggagtctcgttcatgcagtttgccaacaagaactcgatgaggaacatctatatcatcggactctcgttgttccttggcatctcggtccctcaatacttcaacggatacacttcttcagctggcggccacggacctgcccggacaaatgctggatggttcaacgacattataaacaccgtgtttgcttccgggccgacggtggcgctaattgtcgcttctgtcctggacaacacgctggagttcaggggctacgaggccgaccgggggctctcgtggttccagccgttcctgcgccgccataagggatactcggaccccagaaacgaggagttctacagcttcccaatcagcgtctatgacgtcatcccagaccgatttcggcgctgactccaaatgaccgctgttaccccgcagctgtgcatgtaaatccccgtgagtcttgttagtcttactcctgtgacttgtagcggctggttctagggggatatgggtaaaagaatgcttagggcaattgcttggtttgactcttttcgggataagaaacgggttacatgataatgtagagctctgtgccggatacattggttttgggaagggttacagaagaatactagcaccttacatgttgatgggcatttagttgaaggcattggctatttgtttttttgcccaatatatggctgttggagcttgatctgctgactgggaaaagggggcagtactttgga

SEQ ID NO: 88326 - DNA, 456 bp, Zea Mays
gttggccgcaattttacacaccccaaggtctcgcaaatcaggttgcggtcctcgtaccaaccctggccatgttcggttcggttgcctatcgcctcctcctgctcctcttccgccgccgccgctgccgctgctccctaggtgaacccgtcgtcgcctcgcctgggcccacaacgccctcctccgcctgtgagcaaggcacccctctcagtcttgtgcagggcgagttgctgccatggcggttgttttttgcgggcacgagctctgcccgcctccagtcttggatgtcgtggccaggtgcctacttccccctccctccctccactcgagactccacgtcgccgccacacgacactacgcatccgctcttcttcctcccctcgtctcggcggctagcgtccgctccctcgacgcctccgtccatgcccggctccagcactcgctggctccccgagggag

SEQ ID NO: 88327 - DNA, 324 bp, Zea Mays
atgactcggcggacggcggaagctcggcggtcggcgtgtcgcgctcgcggacggatctgctcggcggacggtgaagccggaaggcacagcagctcggcggacggagggacagggacaggcggacagcggctcgaccggcgaacggaggcacaggggcaacggcgcgtgcttcggccgagcggacggcgggctgaggtgcggagctgctcctgctcgccttctcgggccgtcgggcgaacggcggacggcgcgccagagtcgcggagcggctcggtccgaggctccaagcccgagcggacggcggacggcgggcggagcgcctga

SEQ ID NO: 88328 - DNA, 807 bp, Zea Mays
aagcgtgttcatttgtctgttgctgaaaggctgcttaaagaatttgcttgttcgatatgtcgggcggtgattaaagaaccacttacgactccatgtgcccacaacttttgcaagacttgtttgcttggggcatatgatagccagtcttctgtaagggaaagaagctgtggtggtcggactctaagggcacagaagattgtgaagacgtgcccttcctgcccaactgacatctgtgacttcttagagaatccccagatcaaccgagaaatggagttgattgagactttgcaacacaaggctgttgaagaagccaagatggcttcagatgatgctgaggaatgtggtgatggtgatttggaggaaaatgatggtgatttggtgaagggaggtagtggtttgaatgagggagagcaagacagtgcagacgctgatgcttgtaactggtttgaacgagggctcgatcggagcaggaagattgtggttgaaatcaaggaggaaggaaaagatgataaaagagtgtatgtgtgggttctcttcttcctcacgccaacaccaacgccggccagttttcgccaacagcagcggcaccttcttcctcacgccaacaccaacgccggccagtttccggcaacagcagcgacaccgcagctgacacagctcctaacagagaccggaggcatgcaggggcaattaaaatcaaaatgcagtgctacctcagaatggactataggagagcagttagaatctggcatcctgaagacttgcacaacattatctgcttctggattttctaaagggtatccctga

SEQ ID NO: 88329 - DNA, 1425 bp, Zea Mays
ccgagctccgacacagccgtcgccctgagcccgtcatccatgctcccttccatccttctccccaccagcacaaccacaccccctctcccccctcgccgcctccccagaccccaacacgtcctccccgaccacaatgaccgctccccgaccgtggtccctgctgacaaacccaagctcatcggggagaagagcaacgggggcgcagaggcttgcctacctatatcgtcggggccctatggagatccagcaccaccggggctaggcaactccaaggtggagaaggtgcagagcgaggaggcatgggatctattcaccgatcaagcgagcaatgaaggctgggccaggtatcggcgatgccctcggcgacatcgaaatctactccgcggccaccggcgagcccgtcctgttcagagacctgtgggactaggacgagaatcagagagctgtttagatgactggagttcacattcatcttctgctggcaacccagacataccatatgtgttttctccaagtcatcaattgtgactgatgtatgcaaggagattcttggctgctacaggatgttacttggcattcctgatctgttgaatcaaccaaacatgtcaattctgaagcaacttttgcagactttacaaccaactgaaaattttgatgatgttctttctaagttccaatcatctcttggtccttgcaatgttgattacctatattgtggagcatgtaaaatgttggaggatattatggattcagtgtcctcattttcataccttttgccttctaatgtgttaattactatacaatcaattgtaaattctgttgttgtgttgttggacaaatccggggaaccaaatgggaaaaatatacacatgggatgctccaaagcaatcatttcctttctgtgaaagcgtcttggatactcagctcataagctgctcagtgctgatttccctagcgaagatgttggaaaggatggcagagtaaaggtgatcttatacagaagatattgcaaatatacctcaggaatagtgactctacttcagatctacttgctaagataggtcgtgaattgcctaaggtgggtcatctcttcttctcgagtgatgctctcgagttatgcatatgccaccactctgccttaaaaagaacatctggcatcattctgaatccagccgaggagtgagcataaaaggtttagcaattcacaaataatctatgttcaatgggcatgagtgaagaataattagtaagtgcttttcactgctgacttgatagcaaagtagtgtaaaaataatggtaaaagtggttacgccttataaactgggacgaagggagtactgttatattagcaagtacaaaagcattccccgctaacattgtttgtgtattagaagtgagcagtctgtgaaatagaaagtgacatcc

SEQ ID NO: 88330 - DNA, 535 bp, Zea Mays
aaaactgcttctctcgcgcagcagagcaaccgcgccaggcttcttctccaggtccgcgtgtgagaatcgcagcctctgttcatctcccaaatttcaaaccatctcctaccaacgtcgcgaagacctgggatccatggcgcccttgcagcagaccagccggtcttggcaccccaacccctgcggctcccctgccatccgtgtcccctgcgttctagggtggtcgtcccgcgttgttgccgtcgaggtgagctccctccttctccctcccctcctcttctcctcgccctgttctcttgcggccagcagcttgggcacggcggccagcggcacgacccggatagcccccataccccccttcgtgcagctggccgagcggccatgggcccccacgcgtggccaattccccacgctagatgctaggcccctgcttgccctacagccaaatcaatttccccatcaccttgctgctcgtggatgccaggaggaagaaagagaattgttcattcacacaaaatccctcaagtctgatctgttg

SEQ ID NO: 88331 - DNA, 3824 bp, Zea Mays
gcgcgaaaccacacgcggcggccgcctcctccaccacgccgatggcgacccctcactcacccagacccagctgaacaactccctccaccaagcacacgcaagcaggagaaggagcaggagcaggagcaggagccgagggcggcgacagagaatagaggtagaggaaggcgatcgacgaggagctcggtctcacctgctagcggcggcgaccatggaccggatgctgctcgaccagctggccggcgaggccctgcgggaggtgctgcacgcggtgcagggcaccctgttctgccgctccaccgccgagcgcctgcgccggagcgtcgagccgctgctgccgctcgtccagggcctcggcccgcacagcacccagcgctccgcgggggagctcggcgagctcgcggcgcgggtcagggaggcgctcgacctggcgcgccgcgccgccgcgtccccgcgctggaacgtctaccgcgccgcgcagctgtcgcgccggatggaggcggccgaccgcggcatcgcgcgctggctggagcgccacgcccccgcgcacgtcatcggcggcgtgcgcaggctccgcgacgaggccgacgcgcgcatcggtcgcctcgagcgccgcgtcgaggagatcgccgccgccaccgcgcagccgccgccccccgccctctccgtccccgtcgcgccgccgccgcacaagggcgtgcccatgccgatggaggcgccgctcgctaagcccgccttcgtcgctatgacgaaggaggtgccgcagcacaagggcatggctatgtcggagccggtgccggcgaaggcggcgcccgccaaagccggggtgatggccatggacatcgccgacggacacgaagacgcggaggggatggttggcggcggcgtcaaggtggccaaggaaaaggtgaaggagatggttatgagcggcggcggcagctgggaggtggtcgggatctccggcatgggcggcagcggcaagaccacgctcgccatggaggtcttcagggatcacaaggtccgagcctacttcaacgacaggatcttcttcgagacgatctcgcagtccgcgaatctggaggccatcaagatgaagctgtgggagcagatcagcggcaacatggtgctgggtacatacaaccagatcccagaatggcagctcaagctaggaccaagggaccgaggacccgtccttgtgatcctcgacgatgtttggtctctcccgcagcttgaggagctcatcttcaagttccctgggtgcaagaccctagtcgtatcaaggttcaagttccccacgctggtgaaacagacgtatgagatgcagctgctagacgaggcggcggctctgtccgtcttctgccgcgctgcgttcgaccaggagtgtgttccgcagaccgccgacaagagattggtcaggcaggtctctgcagagtgcagaggtctccctctggctctgaaggtcatcggcgcgtcgctgcgcgaccagcctccgaagatttggctcagcgccaaaaaccggttgtctcgaggagaggccatttctgactgccatgagaccaagcttctggagaggatggcggccagtgtcgagtgcttgtccgagaaggttagggactgtttccttgacctgggctgcttcccggaggacaagaagatccccctcgacgtcttgatcaacatctggatggagatccatgaccttgatgagccagatgcttttgccatcttggttgagctttcgaacaagaaccttcttaccctcgttaacgatgcacagaacaaggctggagatctgtacagtagctaccatgactactcggtgacacagcacgacgtgttgagagatcttgctcttcacatgagcgggcgtgacccgctcaacaagcgcaggcggttggtgatgccgagaagggaagaaacacttccgagggattggcagaggaacaaggatgctccgtttgaagctcagatagtctccattcatacaggcgaaatgaaagaatccgactggttccagatgagcttccccaaggcagaagtgctgatcctcaacttcgcgtcgagcctgtactacctgccgccgttcatcgcgacgatgcagaacctgaaggccctggtgctgatcaactacggcagcagcagcagcagcgcagccctggacaacctctccgccttcaccacgctgagcgggctgaggagcctgtggctggagaagatcaggctgccgccgctgcccaagacgacgatcccgctgaggaacctgcacaagatctcgctcgtgctctgcgagctgaacagcagtctaagagggtcgacgatggacctgtcgacgacgttcccgcgcctgtccaacctgacgatcgaccactgcatagacctcaaggagctgccgccgagcgtctgcgagatcgggtccctggagaccatctccatctccaactgccacgacctcaccgagctgccatacgagctggggcggctgcgctgcctcagcatcctccgcgtgtacgcctgcccggcgctgtggcggctgccggcgtcggtgtgcagcctgaagcggctcaagtacctggacatctcgcagtgcatcaacctgacggacctccccgaggagctcggccacctgacgagcctggagaagatcgacatgcgcgagtgctcgcgcctcaggagcctccccaggtcgtcgtcctcgctcaagtccctcggacacgtcgtgtgcgacgaggagacggcgctgctgtggcgtgaggccgagcaggtcatccctgacctccgcgtgcaggtggccgaggagtgctacaacctggactggctcgcggactgatgtctcgttcctggatggatgctgcggcgtccaaactgaccttgtacatatgtgatgttgcttccccccaaaccgagcgtagggaaactcatcaatccacctgccaattttgacgtgttcagtcagtgttcgtcatgcatccatccactctttattcttgggtggcaaagcctccccttcatccaaaatacaaatgcacacaaaacaaataaccacagaaaacacaactgtacaaaaggctaaagatacaacattccgatttttcagctgcagcaatgccagcaaagagaggccaagcagggttctcaaaatgcaggaactacataggtacacagtggatagctgtacagtaacgaactaaggatcaacggttagaatcagcaatggcgtcaaaacgatcaccatgcaacagcttgaacaccgatcacttcttaagcttgagctgttcgtccagagcatcagcgagtacttcttaaacatgacctgatctacagtttccaccccaaccgttcgtggttacgtttcacatactatcactccactgctcccgatgtcgaggactcgaggtccaggtccatgtcgtcgtcaaggacgtcgtcgatgcacagaaactgggtcgtccagcgggcgccatcggccggcactgttgtctccgccatgctctccgactcctcgtagttcactgtgccgtcgcccatgaggtcagctgggaggttcctgacgaaccaaggatgactctttatctcaggcatcgtcgtgattctctgcaaagagcatgcgttatggcacatcgatctgaaagttctgaacaatcaaagtgactgacgctgcaaaggggaataagctagtatggcatcattcacatctgctgggttggccaaaaaaaaaaccttcgcattctggagatacgcgggcgtagtcaggaaccgcgtaccgaacacccagtatattattctgcaaattggcatcggcatttagatgactagattttggatat

SEQ ID NO: 88332 - DNA, 2865 bp, Zea Mays
gtttgcaagctctctctctcccccaccccttttcatgattctgacatagtttctttttttctacagcctacttcaacgacaggatcttcttcgagacgatctcgcagtccgcgaatctggaggccatcaagatgaagctgtgggagcagatcagcggcaacatggtgctgggtacatacaaccagatcccagaatggcagctcaagctaggaccaagggaccgaggacccgtccttgtgatcctcgacgatgtttggtctctcccgcagcttgaggagctcatcttcaagttccctgggtgcaagaccctagtcgtatcaaggttcaagttccccacgctggtgaaacagacgtatgagatgcagctgctagacgaggcggcggctctgtccgtcttctgccgcgctgcgttcgaccaggagtgtgttccgcagaccgccgacaagagattggtcaggcaggtctctgcagagtgcagaggtctccctctggctctgaaggtcatcggcgcgtcgctgcgcgaccagcctccgaagatttggctcagcgccaaaaaccggttgtctcgaggagaggccatttctgactgccatgagaccaagcttctggagaggatggcggccagtgtcgagtgcttgtccgagaaggttagggactgtttccttgacctgggctgcttcccggaggacaagaagatccccctcgacgtcttgatcaacatctggatggagatccatgaccttgatgagccagatgcttttgccatcttggttgagctttcgaacaagaaccttcttaccctcgttaacgatgcacagaacaaggctggagatctgtacagtagctaccatgactactcggtgacacagcacgacgtgttgagagatcttgctcttcacatgagcgggcgtgacccgctcaacaagcgcaggcggttggtgatgccgagaagggaagaaacacttccgagggattggcagaggaacaaggatgctccgtttgaagctcagatagtctccattcatacaggcgaaatgaaagaatccgactggttccagatgagcttccccaaggcagaagtgctgatcctcaacttcgcgtcgagcctgtactacctgccgccgttcatcgcgacgatgcagaacctgaaggccctggtgctgatcaactacggcagcagcagcagcagcgcagccctggacaacctctccgccttcaccacgctgagcgggctgaggagcctgtggctggagaagatcaggctgccgccgctgcccaagacgacgatcccgctgaggaacctgcacaagatctcgctcgtgctctgcgagctgaacagcagtctaagagggtcgacgatggacctgtcgacgacgttcccgcgcctgtccaacctgacgatcgaccactgcatagacctcaaggagctgccgccgagcgtctgcgagatcgggtccctggagaccatctccatctccaactgccacgacctcaccgagctgccatacgagctggggcggctgcgctgcctcagcatcctccgcgtgtacgcctgcccggcgctgtggcggctgccggcgtcggtgtgcagcctgaagcggctcaagtacctggacatctcgcagtgcatcaacctgacggacctccccgaggagctcggccacctgacgagcctggagaagatcgacatgcgcgagtgctcgcgcctcaggagcctccccaggtcgtcgtcctcgctcaagtccctcggacacgtcgtgtgcgacgaggagacggcgctgctgtggcgtgaggccgagcaggtcatccctgacctccgcgtgcaggtggccgaggagtgctacaacctggactggctcgcggactgatgtctcgttcctggatggatgctgcggcgtccaaactgaccttgtacatatgtgatgttgcttccccccaaaccgagcgtagggaaactcatcaatccacctgccaattttgacgtgttcagtcagtgttcgtcatgcatccatccactctttattcttgggtggcaaagcctccccttcatccaaaatacaaatgcacacaaaacaaataaccacagaaaacacaactgtacaaaaggctaaagatacaacattccgatttttcagctgcagcaatgccagcaaagagaggccaagcagggttctcaaaatgcaggaactacataggtacacagtggatagctgtacagtaacgaactaaggatcaacggttagaatcagcaatggcgtcaaaacgatcaccatgcaacagcttgaacaccgatcacttcttaagcttgagctgttcgtccagagcatcagcgagtacttcttaaacatgacctgatctacagtttccaccccaaccgttcgtggttacgtttcacatactatcactccactgctcccgatgtcgaggactcgaggtccaggtccatgtcgtcgtcaaggacgtcgtcgatgcacagaaactgggtcgtccagcgggcgccatcggccggcactgttgtctccgccatgctctccgactcctcgtagttcactgtgccgtcgcccatgaggtcagctgggaggttcctgacgaaccaaggatgactctttatctcaggcatcgtcgtgattctctgcaaagagcatgcgttatggcacatcgatctgaaagttctgaacaatcaaagtgactgacgctgcaaaggggaataagctagtatggcatcattcacatctgctgggttggccaaaaaaaaaaccttcgcattctggagatacgcgggcgtagtcaggaaccgcgtaccgaacacccagtatattattctgcaaattggcatcggcatttagatgactagattttggatat

SEQ ID NO: 88333 - DNA, 1734 bp, Zea Mays
atgagggaggtggtgacggtgcaggtcggcggtttcgcgaacttcgtcggctcccacttttggaacttccaggatgagctgctcgggctcgccgacgaccccggcgccgacccggtattcaggaccgccgcgctcgacatggacgtcctgtaccgcgccggcgagacacaccagtatagtggtgatttaattctgagtgatgagagagcacaaatccgtaacagtgtgataggatcatggaatcttgtgataactggtctcagttgttgcaggtctggaaaggtaacaaaatcagtagcaaaacctcatgagcgaaacttgttcctacaaagtttatctgaagaagaacagaacccaagctctagcgatggccaaaacaatgctagtgttgaagataaggacctggtcgcaaatctggagaatggagtcaaattttggactgattattcaaaagttcagtatcaccctcagagcttatatgagttgtatggatcatggacagactttgacaggtttgataactatggaactgcaaaggaggtggtttcagaatggtcccaaatggaggaaatgaatgagaggctaaggttctttgttgaagaatgtgaccatatccagggtatccagtttcttgtggatgattctggaggctttgccagtgtagctgcacagtttttggagagtattgttgatgattacacaaatacccctgtaatgctgtattgtgtgcggaatccagactcctatgggtcttccagaaatcagtgtgaaaccatcataagatctttgcatgatgctgtatcgttgtcgaaactttcatactactgcaatctgatgatgttgcattcttcacctcaaataactcacacacctactgttggcgaatgcaatgctcattctattataacccagccctatggttacttgtcacctttgctttctataaaagatgagaagcacttccactccagtgccatttgtgcagcagcaatgcattcattatctattccattcaggctacaacacgtgggcccggcctcagattcagcgcattcatctggtaagcttgatattggtgagcttgtgcacatattatctgatcaagggaggcagaacatgatcactgcgctggatgtagcaatgcctgccccttctttgacagatagaacagatttgaggaacatacagaggagcttgcattctctgacacctgaaatcagcgacgaggatgaagatccttacgctgttgaatccatggtggttcatggagtcctagatgcaggcgggaaaagggcttccatatctcaggtgaaggaatccatctgttcagcactggaaggcagggcgacgaaacccaagttctcccacctctcggtatcgcggtgccccctcccaatcccgctcccgttcccgtcaatcttcagcagcagtgttggccagcagggcgagatcctcggcaccagccacgcaggagcccggccaaagggtccgcttgccgtcggctcggtgccgatggcagcgcgcctgaggtcgagcagcgccatagcgccattcatcgagaggaggtcggcgagcctccagaggctcggtgtcgccaggggcacgctgggctcgcaggtcctccacgactggggcttcgggagggaggaggtcgaggacatggctgagcacctggcgaagatgttgcgcccgttttacccggaaatggacctgacgtcggattctgatgattag

SEQ ID NO: 88334 - DNA, 791 bp, Zea Mays
ttttgtggattggatgatataatgatgaaacccataaataataatgataaaattacaaatgactcatttattaatataacagctgatcggacgataattactgcaggcaggaaccactggagacgagggactgacgactctcgccggcgccgcgacatcgacttgtgtcgtcaccctcccaccccaatttccccgcagcttccttccagtgtcgctgccgcagtcatcactctgcagtcagtctgcacccctccctccctccctccttccctccctgcctgttggccgcggctcgcgggaaccaacaccccatcgccacgccgatcccccaccgaccagccaagccgctacaagtcagccgtgccccgcacgcgtgcacctgattggtgcttggccggccggctgacccacccggggcggaaggaggaaggaaggaccggagaagctgcttccttgccgtcgcccagggggacagggtaagcaaaggagcgggatggagagctacctggaggagcggttcggcggtgtgcaggccaagaactcctccgaggaggcgctccgccgctggcgccgcctctgcagcgtcgtcaagaaccccaagcgccgcttccgcttcacggccaacctcgagaagcgcggcgaggccgaggccatcaagcacgccaaccacgtgcgctccccctcccgattccacttactcccccttccctttcctctcttgttccatcctacgatgccgccgcttagtcccgccgggatccgcggcaacgtagcccgtgggatctggacct

SEQ ID NO: 88335 - DNA, 2110 bp, Zea Mays
ttttgtggattggatgatataatgatgaaacccataaataataatgataaaattacaaatgactcatttattaatataacagctgatcggacgataattactgcaggcaggaaccactggagacgagggactgacgactctcgccggcgccgcgacatcgacttgtgtcgtcaccctcccaccccaatttccccgcagcttccttccagtgtcgctgccgcagtcatcactctgcagtcagtctgcacccctccctccctccctccttccctccctgcctgttggccgcggctcgcgggaaccaacaccccatcgccacgccgatcccccaccgaccagccaagccgctacaagtcagccgtgccccgcacgcgtgcacctgattggtgcttggccggccggctgacccacccggggcggaaggaggaaggaaggaccggagaagctgcttccttgccgtcgcccagggggacagggtaagcaaaggagcgggatggagagctacctggaggagcggttcggcggtgtgcaggccaagaactcctccgaggaggcgctccgccgctggcgccgcctctgcagcgtcgtcaagaaccccaagcgccgcttccgcttcacggccaacctcgagaagcgcggcgaggccgaggccatcaagcacgccaaccacgagaagctgcgtgtcgctgtgctcgtctcaaaggctgcactgcagtttctacatggcctcacccttcgaagcgagtacgtcgtccctgaggaagtcaaggctgcagggtttcagatctgtgccgacgagctggggtctattgttgagggtcatgatagtaagaagctcatcacccaaggtggagttgatggaattgcggaaaaacttgcaacttcgaagacggatgggctaagcacagccgatgatagtattaagcgcaggcaagacatatatggagtaaacaggttcacagaaagtgaggtccgtagtttctgggtgtttgtatgggaagcgcttcaagatacaactcttataattcttgctgtctgtgcgttcgtatcgctggttgttggcattgtggtggaagggtggccaaaaggtgctcatgatggtcttggaattgttgcaagtatcctcttggttgtgtttgtcactgcaacaagtgactaccggcagtcactgcagttcaaggacctggacaaggagaaaaagaaaatccatgtacaggttacaaggaatggttttaggcaaaggctatcgatatatgatcttcttcctggtgatgttgtccatttagcaattggggatcaggtccctgcagatgggctcttcatttatggattctctctgttgatcaatgagtccagcctaactggtgaaagtgaacctgttgctgtaaatgaagataaccctttccttttgtctgggaccaaagtacaagatggctcctgcaagatgctggtaacaactgttggcatgcgcacccaatggggaaaactgatggccactctcagtgaaggcggcgatgatgaaaccccactgcaagtcaaacttaatggagttgcaactattattggccagattggattattttttgctgttataactttcattgtcctgtcgcaagggctattcagcaagaaataccatgagcagatgcttttaagctggtcaggagatgatgcattggagctgctggagcattttgctattgcagttactattgttgttgttgctgttcccgagggattgccgttagcagtcacgctgagtcttgcatttgccatgaagaaaatgatgaatgacaaggcacttgttcgccacttagctgcatgtgagactatgggttcggctactaccatctgcagtgacaagacaggaacactgacaactaatcatatggccgttgttaaggcctgcatctgtggaaacatcaaggaagttaatggttctcagaatgcatccaagttacgctctgagcttccagagattgttattaaaactcttttggagtctatatttaacaatacaggtggtgaggttgtaattaaccaggatggtaaatatcagatcctgggtacccccacggagacagctttactagagtttgcattgtcacta

SEQ ID NO: 88336 - DNA, 1603 bp, Zea Mays
gctcaatggtattattgatagttttgctggtgaagctcttagaacattatgccttgcttataaggatatggaagaaggtttttccaacgcagaccatataccgctacaagggtacacatgcattggaattataggtataaaagatcctgtccgcccaggggtgaaggagtctgttgctacttgccgggctgctggaattatggtgagaatggtcacaggagataacataaatacagcgaaggcaattgctcgtgaatgtggtatacttactgaagatggcatagctattgaaggaccagagttcagagagaaaagcctagctgaactccttgaactggttccaaaaatacaggtaatggcccgatcatcaccacttgacaagcatacacttgtaaagcatttgcgcacaacattcaatgatgttgttgctgttactggtgatggaacaaatgatgctcctgcattgcatgaagcagatattggacttgcaatgggcattgctgggactgaggtggcaaaagagagcgctgatgttataattctggacgacaacttctccacgattgtaactgttgccaagtggggacgatctgtttacatcaatattcaaaagtttgtgcagtttcagctgactgtcaatgtagtggcactgctagtgaacttctcttcagcctgctttacaggaaatgcaccactaacagctgttcagcttctttgggttaacatgatcatggacacccttggcgcgcttgccttagccacggagccacctaatgatgacttgatgaagagagagccagtaggaaggacagggaaattcattacaaatgtgatgtggaggaacattcttggtcagtctttctaccagttctttgtgatgtggtatctccaaacgcaagggaaaaatttctttgggcttgaaggctctggtactgatattgttctgaatacgataattttcaactcattcgtcttctgtcaggtgttcaatgaaataagctctcgggagatggagaagatcaacgtgctcaagggcatgacaaggaactacgtgttcatggctgtcctcagcagcacggtgatcttccagttcatcatggtgcagtttctaggagagttcgccaacacgacgcccctgaccatacaccagtggctagccagcgtgctcctcggtctggccgggatgcccatcgctgccgccgtcaagctgatcccagtcggctcgtcatgataccattgaagattgctgctgcctgggatgggaagcacggcatgaaaagcgtcaggctgtccaagctgcatggtattcggtggagctgagctctctctctgtctctctgtgtgcgtaaacttttggaatgcacggagggcaggctagggaaatggagcagccgctgcagtttgagaagttttgtagcctggaaatgtggctagattgcctcggacctgtaagaaacatcgtgtttgttggcgccgggaaaaaagcagctagctgtggtggtggtgcagcagagttgttagattgacttcgaaatggaatttagactgcaggatatttatggtggatgaatggacggaaaacatggttcgttggttattttta

SEQ ID NO: 88337 - DNA, 204 bp, Zea Mays
atggaacagggaaagggttgcattggatcctccttccctgatcctgaagaaaaaagcagagcaacaagtgctggcatggcccagccgcagccagaactgaatgagtggcattcaaaatctgcagcggccagcggaactgatcaagaaacctacagggatgtcgcgacatacacacacacactcacacaggcaggcaaagcttga

SEQ ID NO: 88338 - DNA, 378 bp, Zea Mays
atgcgggtggacgcgggaggagaagcaggggagaaagtccaagggcgtgacggcgcccatgcgccacccgagcgtggacagcaccagcagctccatccgccggatggacgccgagtcgaagtcgaagccgccggcgtggaactccgacagcgccggcgcctggcactcctccatcttggcggccacggacacgcacgcaacggacagcagctgcgccgcccacggcatcgtctccctatcgatgcgtcgccggaggaggaagctatcgaagtaggagatggcgaggtacgccgtccggtggccgaagccgaagcacccgcgggtctgcagaatccacttgacggcggcgaggcgagcttggcggaaccactcctctga

SEQ ID NO: 88339 - DNA, 1075 bp, Zea Mays
tccgcggcgcgacccggtccgagcagtccctctctctctctctgctctgctccgctcgacaagcactgtgactctgtgagcgacactactgcacaccgccaccgtggccggccggcgtccgctgcgctatatgtatacaagcagctagcaccaagcagcacggctctccaactcacagtgccacaccggcaggcaaggcatcgtcgaccgacggcgcgccgcagcagcagcttctagctccaaaccgaaccaacacgtgctatccaccatggaggcgccgctgcaccagttccccttccccgtgccgccgccgccgcagccgcaggacgcgctgctgcagcaggcggtggcggcgcgcgcgctgatgatggccgggaaaagggcgccgctgcaggctaccgcggcggcgggacgggagcagtgcccgcggtgcgcgtcgcgggacaccaagttctgctactacaacaactacaacacggcgcagccgcggcacttctgccgcgcgtgccgccgctactggacgctggggggatccctccgcaacgtccccgtgggcgggtccacgcgcaagcgccagcgcccggcgcggcccacccgcgccatggccgccgccgccgccacggcggctacgcaaacggcaacaacgaccgcctgcagcccgttcgccgtctctccagcaacaatgctgatacagggcgcggcaggcggcggcctcctcgtcagctcgctgctgctgggctcggcgtccgcgtcaccgctgctcgcgctcggcacagcgccgctgctggaaggccggcttggcttcgacctcggcctcggggacgcagcagcgctagcagccgccgacgggactcctggcgacttggctcaccaccaccagccgctgacgctgggcgccgggccgctcccgtggcccgcagcgacgatcttggagggcgaccgcgtggagacgacgacgtggaaagcctctgctgacgtgttccccttcccgccggcggccgcgctgtggcaggagctcgcgccggcggtggaggccggtgggctgcaccacggtgccccgcacctgctcctgtga

SEQ ID NO: 88340 - DNA, 1034 bp, Zea Mays
gcctgctcggtccctggtgtcagcgacggagacgtctcccgggctcggttatacacggcccggcggcccgcgggaaggcccagattaaaataaaaagagcagcggagcggagcatgctcttcattccttcactgccagtcttgcatcccgtccccgtccgcgccggccgacgccgccttttcgtccccgcgtcagcgtcgcggctccactgagcgtgcgtgtcaccggcgggaggcaagggcaggcggtggtggcgatggcgtccgctgacgcgcgcttggcggggatcgcctcctccatccgcgtcatccccgacttccccaagccagggatcatgttccaggacatcacgacgttgctgctcgatcccaaggcgttccgtgacaccatcgacctctttgtcgagcggtacaaggaccaagggatcaccgtggttgctggcgaggtgatctccgaagagtattctttggaatatggaactgacaagatagaaatgcatgtcggagctgtacaggccaacgaccgggctcttgtagtcgatgatcttattgctaccggtggaacactatgtgcagctgtcaaacttattgaacgtgttggagcaaaggttgttgagtgtgcttgtgtcattgaattgccagaactgaagggccgagacaagcttggggacaggccagtttttgtccttgtggaagcagacgcctgagcggaacttgggacttctcagagagtttggcgccgtcgatgctccctctctggagacaacacagtttcccatgttaccatgttggctattttctggctgacgcgtaataaagttttattccaaattgtgatcccctgaatgatttgtcaatgtagacatgattgctgatctttgtaaactgtggcttatgttttgtcaaaatggttctaattattcacatcaattaaggataaatcctgattggagcttgttgtttgttctagtaatgttgctttattgctttgtttgtgcaaccattgatgaaataaagttgccatcgcaataactg

SEQ ID NO: 88341 - DNA, 1132 bp, Zea Mays
gcctgctcggtccctggtgtcagcgacggagacgtctcccgggctcggttatacacggcccggcggcccgcgggaaggcccagattaaaataaaaagagcagcggagcggagcatgctcttcattccttcactgccagtcttgcatcccgtccccgtccgcgccggccgacgccgccttttcgtccccgcgtcagcgtcgcggctccactgagcgtgcgtgtcaccggcgggaggcaagggcaggcggtggtggcgatggcgtccgctgacgcgcgcttggcggggatcgcctcctccatccgcgtcatccccgacttccccaagccagggatcatgttccaggacatcacgacgttgctgctcgatcccaaggcgttccgtgacaccatcgacctctttgtcgagcggtacaaggaccaagggatcaccgtggttgctggtgttgaagctagagggttcatttttggtcctcctatcgctttagccattggcgcaaaatttgtgcctttgaggaagccgaagaagttgccaggcgaggtgatctccgaagagtattctttggaatatggaactgacaagatagaaatgcatgtcggagctgtacaggccaacgaccgggctcttgtagtcgatgatcttattgctaccggtggaacactatgtgcagctgtcaaacttattgaacgtgttggagcaaaggttgttgagtgtgcttgtgtcattgaattgccagaactgaagggccgagacaagcttggggacaggccagtttttgtccttgtggaagcagacgcctgagcggaacttgggacttctcagagagtttggcgccgtcgatgctccctctctggagacaacacagtttcccatgttaccatgttggctattttctggctgacgcgtaataaagttttattccaaattgtgatcccctgaatgatttgtcaatgtagacatgattgctgatctttgtaaactgtggcttatgttttgtcaaaatggttctaattattcacatcaattaaggataaatcctgattggagcttgttgtttgttctagtaatgttgctttattgctttgtttgtgcaaccattgatgaaataaagttgccatcgcaataactgaataa

SEQ ID NO: 88342 - DNA, 296 bp, Zea Mays
agccaccgccccagcctgcggcggcgaggaagatgctccggcggatatgatggaacgcctcttccgatctccgccgccgtcgtcccggtggccgggggcgtcggcatgtgcctggtccaagaacttaacttgctctgtgattctgtgaacttgatagattctccaagcagctacactacagatatgtatggacgggcaattttctaccgaagttttggacagagaaagtggacaccgcatctgccagccatagcttcctaagcgcctgtttgaatctcggactgaagtttagtacg

SEQ ID NO: 88343 - DNA, 696 bp, Zea Mays
ggacgcgttacgaattttcgggacaggtgatgccggggtagttgggattaattggtgtgattcatttcacaaacaaatccctttactatacatgcgttttattactgtatgcattttattaaggtatgtattttataaaggtatgtgtatgtatattgtataatagagagcctgcagtggcacaacggcctgccgttttcacgcactatattctagggccacacatgactctttatctctggataaagatatttcgggagcaaacgtgcctcgtcagcaggagcctgtgaattaatattgttcatgctttattatatttttttccctcgaagatcatatctctaccgctttaaagcaccgattttcgtgcatcacgcatgaagcacgtaggtatattccccacacgtggcacggcgctcgcacatagcaccgcatcactagtcgaagaaggatgaggatcgcccggacgagctattaaaaacaggatcagactccttttcaattcataactttctcaggcttttagttaagataaaatatagtatctgctcttatcaatttagtatccgatatgtggaccatatgttcgctttgatattaaatttatttttttacgagtatcaaatatgattgtatgctgtcacggcgtgcgagcattgttaatagtgagatccacactattattgcatgctaagc

SEQ ID NO: 88344 - DNA, 207 bp, Zea Mays
gtgtttattattggagctacaaacaggcctgatatctttgaccccgttctgctgaggccagggcgtcttgaccagctgatctacattccacttcctgctgagtagtctaggctccagatcttcaaggtctgccttaggaagtcccctgtggcgaaggatgtggacttgaatgctcttgctaagtacacgcaagggttcaatggagca

SEQ ID NO: 88345 - DNA, 705 bp, Zea Mays
agtgctctagaccacagatgtgcttcttttgttactaaatctgaatgacaactcattttcttttctgttgaaggtggttgatccgttgatggtttccttcccatggagactattgaagaaaaactgagagatttagctacgagctgtattcaggactgccaagggaacccacttaccaatctggcctggtgaagtgcccttatgcacaaagtaatggcggccacacatcgttttgtgtgatcaaccagcatggtcgggatggaattaggcatctggaagcatttgcctttccatttgctctatcagtatcccttgcgcaatatatttataatttcaaagtgtgtgttttttctttcctaaagttagaccctgtttaaaacctctaaagctaattgttagccaactaataagttgttagatggttttagctgggttgaggcagctaacagctaatgactatttgagaggtatagctaacaattagtgggtccattatctgatccgttttaaacctttcagttaattatagatgccaactattagttttagaggtttggaacaggaccttagtctgtctgccggtgtacggattttgtgtaatgaaacatgtgagagtgcaaaacacttaaatttctatgcttcatgtacctgcgaatgtcgctggggtgaagaaacattggaaaaggaatgaaaactatagcacta

SEQ ID NO: 88346 - DNA, 1410 bp, Zea Mays
ctcctccacgcgtgggtgtggaagcgacggcgccgacgctattcacaacggcaacgcgtcccttccaacgccggccgccgccatcttcatcagccaccttttctcatgtgagtcatccttccctttcttcccttctctcccatgtcagtgtgcctctctcccctttctccaccgctcgttccgctcccttgttggctacagttggagaataggacgagcgtgacctcggcgtcaggttccccgaccagcggccacgcctcgagtgcatcgccttctacgtcgaccccaccaagcactaccccttcacctgcacatccccctgcgagcttcttgggtacatggcgcacaaccatgctcaccaagacaaaggccaagaccatggggtgggaactgatctgtgtccatggacatggtgatttgatagcattttgggggagaaataaaaaaaagtttcactgctgcatccgtgacaaataataatatccttcaattcagaggtacagatcgtcatagctagttatttaaaacggattcatgggaggggtaactagtcttatacaaatacgtatatagtgtatgaaatctttgctattggacaaagttgaatgatctgcacgcccatgagtcagaaaagcactaggcagcccagatcgacctcatgtggtgttcagcttggcgagggtgcgttgcaaggccttcacgctcactgataacgtttttctgcctataccttccttgagtttagtttcagtttcagctaacttttagtttcagtttcagctagctttcagtttcactagcaacgtctttctgcctgtaccttccaaactttcaggttcttctggctgctcttaccccaccagtgcaaggtacgaggcgagcttaaattaaccgtacaccatgatccatgtagtgtgaaccatgattcatgtagtgatccatgaactataaattcatttgttcagtgtgtttattgtcagttcagctacatatattgcaatggcgcgctttgtaacacagtgaattgatgaacaaatatgagctaatgttacactacagattgacacattcacttgcatgcagaacaaggaagtggtgttgcaaagaaactgtgtttgatttttgctgtaacttgactgaagaaacatctctgtttatcatctcccaaacatatagctatatgctcagtactgctcatttttttttgcaatggcaatgagatgtgttagtgcttaaaagtgttagctttgatctattgtgatgtaaacttcattatgtttcctgcatttgctttgatctactgtgatgtaaacacgatttatgttggttctgctatcttttggatgtaatcaaactattattttgctttgttgttgttctgattcaaactattcatgcttgttctgcttt

SEQ ID NO: 88347 - DNA, 852 bp, Zea Mays
agcttcttgggtacatggcgcacaaccatgctcaccaagacaaaggccaagaccatggggtgggaactgatctgtgtccatggacatggtgatttgatagcattttgggggagaaataaaaaaaagtttcactgctgcatccgtgacaaataataatatccttcaattcagaggtacagatcgtcatagctagttatttaaaacggattcatgggaggggtaactagtcttatacaaatacgtatatagtgtatgaaatctttgctattggacaaagttgaatgatctgcacgcccatgagtcagaaaagcactaggcagcccagatcgacctcatgtggtgttcagcttggcgagggtgcgttgcaaggccttcacgctcactgataacgtttttctgcctataccttccttgagtttagtttcagtttcagctaacttttagtttcagtttcagctagctttcagtttcactagcaacgtctttctgcctgtaccttccaaactttcaggttcttctggctgctcttaccccaccagtgcaagaacaaggaagtggtgttgcaaagaaactgtgtttgatttttgctgtaacttgactgaagaaacatctctgtttatcatctcccaaacatatagctatatgctcagtactgctcatttttttttgcaatggcaatgagatgtgttagtgcttaaaagtgttagctttgatctattgtgatgtaaacttcattatgtttcctgcatttgctttgatctactgtgatgtaaacacgatttatgttggttctgctatcttttggatgtaatcaaactattattttgctttgttgttgttctgattcaaact

SEQ ID NO: 88348 - DNA, 3626 bp, Zea Mays
gctcagctgctctgctggggaggggaggggcggaaagagaagagaagaggaggggagtcaaaaaaaaaatttctttgttgtgtttccctgcttttgttttgcctcccccaccccttgtttgatgatgctgtgttcttttctttaatttgagttcttgatcctgccaaaagcaaaagccctcacacccttctgctcgcaaaggcgagggctgtgtcctgccgcttcaaaccctccccacaaagctcggatttctgtctgcagtttccttacctctgaatcccgttccctccacgaaaacctcggatttccacgcccagtgttccaccaccgcaaagatccagtttttttcccctcccgaagccgcagtttccctgcgcgagctggtctggtccaagaacacacaccaaaaatctctctccccattgcgcacggaaatctcgggggggaggggtttccccgccccatgcttcagtccgtccgttgatccagaccgccacgccaccgggtttggtagctgcgggttttttccgcccgggagccgggagcggcgtcgtctcgatccgaggcccatgcatctgtcgctatggaagccgctgtcccactgcgccgccgtcctcctcgccaagaaccaccggcgccgcggcggcgggggcggcagcaacggccgccgtgacgactcgtccgccttcctccggcagctgcgggacgcgctggacgcggcgtcggaggacggctccctctgcccgccgccggacgccggcggcgccgacgcggacgcagccgtgtcgcgctcccgctccctggcacgcctgcgcgcgcagcgggacttcctccgcgccacggccctcgccaccgccgccggcccgttccggtccctctccgacctcccgctgctgccccacgccatcgccaccttcctcgccatgtacccggactacgcctccaccgccgacgtcgaccgcctccgcgtcgaccattactcccacctcgacgcccccggcgccggcagggtctgtctggactactgcggcttcggcctcttcgactccggctgggactcctcgtcctcatccttcacattgcacgagctcaacgccaatctgagcaaccacgcgctctatggcggcgctgagcccggcaccgtggagaatgacatcaaagagcgcatcttggagtacctgaacgtgccagccagcgagtatgcgctggtgttcacggtgagccgtgggtcggcgttccggctgcttgctgagtgctaccccttcgagaccaaccggaggctgctcaccatgttcgaccatgagagccagtcggtcaattggatggcgcagagtgcgcgggcaaagggtgccaagacgcgcactgcatggttccgctggccaacactgaagctttgctcaacggagttgcggaaggagatcgtgggcaagaagaagggccggcgacgggatgccgcggttgggctgtttgtcttcccggcgcagtctcgcgtgaccggtgccaagtactcctaccagtggatggcgctggcgcagcagaatgggtggcatgtgatgcttgatgctggtgcacttggccccaaggacatggattcactgggtctctcgctattccggccggacttcattataacttcgttctacagggtctttggtgcagacccaactgggtttggttgccttctgatcaagaagtcagtaattgggacactgcaggggagaaacgggtgtaatgcatcgggaatggtgaggattgttccggtgtttccacagtatctcagtgactcggttgatggctttgatgcattcgatgggtttgaagatgatccaggcgttgacaaagatgaaaagccctcttctaatgctcaaaatgggtcgcagctgccggcattttcaggtgtctacacgtctgctcaggttagagagacttttgagagtgatcctggtcgggacagcagctcggacagggatggggcaagcaccatctttgaagaaacggagagtgtctctatgggtgagatcatgaggagtccagcattcagtgaggactgttcatcagagaactctttctgggtagatgttggccatagcccattggggtcagagaagtctggtcagttcaagaaagggaaactgggttcaccattaccatcttcttggtttaatggaagaaagtgtaacaagaggatgtccccaaacttaagttccaggatatctagaagtccactttatgatggtcatgtgatttcctttgatgcagccgtgctatcagtctcgcaagatgcagactgcctcaaggaagaccctgaagaagaaaattttgagaatgggcggagagctcatttcaggcaggttagtgaaattcaagaggagccagaggccgaagaggtggcatgccaacgtgctatgaatggtggcgcggagcacaaagaaagcgcaataagaagggagactgaaggggagttccggctactgggaggtagggatggcaacaacagatttaccggggggcgactcttcggtgttgaagagattgatggaggtttaagcatggggcgcagagtttctttcagcacagaagctaatatcattgctgacaggctgaatcgggcctcagatgctgctgaagcttctggatatacattccctggtgatgatggttgtgcaagtgatggatatgatgatgctcaggactggggcaggagggagccagagataatttgcaggcacattgatcatgttgatatgatgggactcaacagaactactcttaggttgagatacttgatcaattggctcgtaacttcacttttgcaactgaagttatcagactcaaaaggtggcgatggagtccctcttgtacacatctatggccccaagattaagtatgaaaggggagcagctgttgcttttaatgtgaagcaaaatgatggaacatttgtgaatgctgaagttgttcaaaagatcgctgagaaaaatggcatatctgttggcattggttttctcagtcatataaaagtagacatgaagcagaaacagttaaatggcacgctcgatataccggaggcttcattttataagaatggacgcagagacaataaaaaggtgaccataagagttgaagtcgtgactgcttcacttggcttccttactaactttgaagatgtttacaagatgtgggcttttgttgccaagttccttgatccttcatttcttgaaagtgaacgccttaccattgctgctgaccactcagaagggcaaacttgagcatgacatgtagcatagcaacaaaaaatgagagggaggtgatttctcctgttgaagcatatgttgtcttttatgctttcaaggggtaatcagtagtggatttagcagatttgtttattctttgcctagttccttgatatgggtcatatgacttgtttttgttcatctagagtttgcgcaactcaactatgtaccagcagctcatcagtagagctctttcccacggaacaatgtgtgtaaagcagctcaatggaaatgaaatagtttgagtgattttgtccaagttcaatttagtcaaatactcaacctcagatgtgtgttcgtaatgtggtttttacatcttcagctaacatttcattt

SEQ ID NO: 88349 - DNA, 704 bp, Zea Mays
caacctccgcgcagtcgtcgtccacacttgcccgcctggataaggatacgaagtccaaatcctcatccgaccggttccctacttccctcaaaccacgtcctctgcaacgagcgcgccctacgcgacggcgttccctcggctacctctacctcctggacatgccaccctcctcccggcctccttcgcctcaaccctaaccccgcaccttcgaacccattgctgctcccctctctccccggctctaatccgctcctaacttccgccttgtttgctgcaaggaggcgtgcgcgacctccagttccaatctgagcgactttggtggcatggacttcctgttcaccatcgccggcttcctcaccatcatcagctttggtggcggacatgagaggagagaagaatccttcgaggtgagctgactattcattacgctgatagtgtttctattaattccaatgtcgttcagttggatgcaattccaactagggtttggatttgaggttctgttctgctacatgtgtatgtgtctatattttttcttcctctacaacttgccccttttgatccgacctacaagaagaaaacgaagaaaattgtcatccaaaaactttctgttggagtggacaggcttgcagagaagacaaacactggtagtcgtagaacccaatgaaattaacttcactagaataaagaagaaaaggaagaaa

SEQ ID NO: 88350 - DNA, 1614 bp, Zea Mays
caacctccgcgcagtcgtcgtccacacttgcccgcctggataaggatacgaagtccaaatcctcatccgaccggttccctacttccctcaaaccacgtcctctgcaacgagcgcgccctacgcgacggcgttccctcggctacctctacctcctggacatgccaccctcctcccggcctccttcgcctcaaccctaaccccgcaccttcgaacccattgctgctcccctctctccccggctctaatccgctcctaacttccgccttgtttgctgcaaggaggcgtgcgcgacctccagttccaatctgagcgactttggtggcatggacttcctgttcaccatcgccggcttcctcaccatcatcagctttggtggcggacatgagaggagagaagaatccttcgaggtggatcttgatttaactcttaatgagcttggagatggggaggacactcaagaacaccaggcgatccatgcacaaattatcaggaagggtggtgggaagtgttccacttgccaccaattctcatctctcacctctctatcacatgaaccaacatatttctacaatgtggacattcctctcgagtcatcaaaggtataatctatttttatctggatcactgcaccaattgaaccaaatcacagttctaagaactcttttcccattgagtaaaaaagaaagagttatctgagcttccttctctaacttggtacatgcacccttcatgatgagtgagctcatgcatgtcattcgttatactgtaggtatgccaacttgccaagttggttttgatatttatcttatttgtttatatgttgatggctccctataacttacattcttacatttttaatgttgacatttaggatctgaagaaaaggagaaagaactccatgctctgaagtgcctcgcggttgagtcagaacaaggcacagatgggtgcgacagagctgtgggatctcttggcctccggctcagagcaattcgtggagatgtacagggtgtatcaacacctcaggctgaagaactggtttgtaaggtcaggactgcagtacaggcagactttgttgctcactgtcatcgtccgacactagtgcactcgtagttcgtggaggttgtggctccaaaagggaaagcattcggcaccaggtgtgcccgcatgaaggtttggtctgaactattatgtgcgctttgggactcttcaagtgtggccaagatgttacttcttaccattagcaccaagagctacgagctagaatccttggattgtttggagcagatgattgttcatgagaggacgatcacaagatggataccacaaccgtgtcgtgagcaacaagacaaaccatgcagagaagaaaccaaaagggacatgcaaagacaaaaatcctgcagagaagtattaagcaacgaacagagcatacaagtgtgggggtggtgtagtgtttatctattggacgtagtgcagagctttacagttatttctagcttacttatctacaaactgaaatcttaactaaagagcttcctatttctgtatagtcatgttgatgaacgtgaataatgcaattctatggtaccaatttgttgtgattctcattgacttttc

SEQ ID NO: 88351 - DNA, 1363 bp, Zea Mays
caacctccgcgcagtcgtcgtccacacttgcccgcctggataaggatacgaagtccaaatcctcatccgaccggttccctacttccctcaaaccacgtcctctgcaacgagcgcgccctacgcgacggcgttccctcggctacctctacctcctggacatgccaccctcctcccggcctccttcgcctcaaccctaaccccgcaccttcgaacccattgctgctcccctctctccccggctctaatccgctcctaacttccgccttgtttgctgcaaggaggcgtgcgcgacctccagttccaatctgagcgactttggtggcatggacttcctgttcaccatcgccggcttcctcaccatcatcagctttggtggcggacatgagaggagagaagaatccttcgaggtggatcttgatttaactcttaatgagcttggagatggggaggacactcaaggtgcatttcatttgtctgaataacaccaggcgatccatgcacaaattatcaggaagggtggtgggaagtgttccacttgccaccaattctcatctctcacctctctatcacatgaaccaacatatttctacaatgtggacattcctctcgagtcatcaaaggatctgaagaaaaggagaaagaactccatgctctgaagtgcctcgcggttgagtcagaacaaggcacagatgggtgcgacagagctgtgggatctcttggcctccggctcagagcaattcgtggagatgtacagggtgtatcaacacctcaggctgaagaactggtttgtaaggtcaggactgcagtacaggcagactttgttgctcactgtcatcgtccgacactagtgcactcgtagttcgtggaggttgtggctccaaaagggaaagcattcggcaccaggtgtgcccgcatgaaggtttggtctgaactattatgtgcgctttgggactcttcaagtgtggccaagatgttacttcttaccattagcaccaagagctacgagctagaatccttggattgtttggagcagatgattgttcatgagaggacgatcacaagatggataccacaaccgtgtcgtgagcaacaagacaaaccatgcagagaagaaaccaaaagggacatgcaaagacaaaaatcctgcagagaagtattaagcaacgaacagagcatacaagtgtgggggtggtgtagtgtttatctattggacgtagtgcagagctttacagttatttctagcttacttatctacaaactgaaatcttaactaaagagcttcctatttctgtatagtcatgttgatgaacgtgaataatgcaattctatggtaccaatttgttgtgattctcattgacttttc

SEQ ID NO: 88352 - DNA, 1296 bp, Zea Mays
caacctccgcgcagtcgtcgtccacacttgcccgcctggataaggatacgaagtccaaatcctcatccgaccggttccctacttccctcaaaccacgtcctctgcaacgagcgcgccctacgcgacggcgttccctcggctacctctacctcctggacatgccaccctcctcccggcctccttcgcctcaaccctaaccccgcaccttcgaacccattgctgctcccctctctccccggctctaatccgctcctaacttccgccttgtttgctgcaaggaggcgtgcgcgacctccagttccaatctgagcgactttggtggcatggacttcctgttcaccatcgccggcttcctcaccatcatcagctttggtggcggacatgagaggagagaagaatccttcgagaacaccaggcgatccatgcacaaattatcaggaagggtggtgggaagtgttccacttgccaccaattctcatctctcacctctctatcacatgaaccaacatatttctacaatgtggacattcctctcgagtcatcaaaggatctgaagaaaaggagaaagaactccatgctctgaagtgcctcgcggttgagtcagaacaaggcacagatgggtgcgacagagctgtgggatctcttggcctccggctcagagcaattcgtggagatgtacagggtgtatcaacacctcaggctgaagaactggtttgtaaggtcaggactgcagtacaggcagactttgttgctcactgtcatcgtccgacactagtgcactcgtagttcgtggaggttgtggctccaaaagggaaagcattcggcaccaggtgtgcccgcatgaaggtttggtctgaactattatgtgcgctttgggactcttcaagtgtggccaagatgttacttcttaccattagcaccaagagctacgagctagaatccttggattgtttggagcagatgattgttcatgagaggacgatcacaagatggataccacaaccgtgtcgtgagcaacaagacaaaccatgcagagaagaaaccaaaagggacatgcaaagacaaaaatcctgcagagaagtattaagcaacgaacagagcatacaagtgtgggggtggtgtagtgtttatctattggacgtagtgcagagctttacagttatttctagcttacttatctacaaactgaaatcttaactaaagagcttcctatttctgtatagtcatgttgatgaacgtgaataatgcaattctatggtaccaatttgttgtgattctcattgacttttctacata

SEQ ID NO: 88353 - DNA, 1531 bp, Zea Mays
ccgcctggataaggatacgaagtccaaatcctcatccgaccggttccctacttccctcaaaccacgtcctctgcaacgagcgcgccctacgcgacggcgttccctcggctacctctacctcctggacatgccaccctcctcccggcctccttcgcctcaaccctaaccccgcaccttcgaacccattgctgctcccctctctccccggctctaatccgctcctaacttccgccttgtttgctgcaaggaggcgtgcgcgacctccagttccaatctgagcgactttggtggcatggacttcctgttcaccatcgccggcttcctcaccatcatcagctttggtggcggacatgagaggagagaagaatccttcgagaacaccaggcgatccatgcacaaattatcaggaagggtggtgggaagtgttccacttgccaccaattctcatctctcacctctctatcacatgaaccaacatatttctacaatgtggacattcctctcgagtcatcaaaggtataatctatttttatctggatcactgcaccaattgaaccaaatcacagttctaagaactcttttcccattgagtaaaaaagaaagagttatctgagcttccttctctaacttggtacatgcacccttcatgatgagtgagctcatgcatgtcattcgttatactgtaggtatgccaacttgccaagttggttttgatatttatcttatttgtttatatgttgatggctccctataacttacattcttacatttttaatgttgacatttaggatctgaagaaaaggagaaagaactccatgctctgaagtgcctcgcggttgagtcagaacaaggcacagatgggtgcgacagagctgtgggatctcttggcctccggctcagagcaattcgtggagatgtacagggtgtatcaacacctcaggctgaagaactggtttgtaaggtcaggactgcagtacaggcagactttgttgctcactgtcatcgtccgacactagtgcactcgtagttcgtggaggttgtggctccaaaagggaaagcattcggcaccaggtgtgcccgcatgaaggtttggtctgaactattatgtgcgctttgggactcttcaagtgtggccaagatgttacttcttaccattagcaccaagagctacgagctagaatccttggattgtttggagcagatgattgttcatgagaggacgatcacaagatggataccacaaccgtgtcgtgagcaacaagacaaaccatgcagagaagaaaccaaaagggacatgcaaagacaaaaatcctgcagagaagtattaagcaacgaacagagcatacaagtgtgggggtggtgtagtgtttatctattggacgtagtgcagagctttacagttatttctagcttacttatctacaaactgaaatcttaactaaagagcttcctatttctgtatagtcatgttgatgaacgtgaataatgcaattctatggtaccaatttgttgtgattctcattgacttttc

SEQ ID NO: 88354 - DNA, 1427 bp, Zea Mays
ctctgtccttagcgcagaagcatcaccctatcttcttcctcgacgccccctgctcctctctctaccgagctcccattctccacggcgtttggcagcagagagcccttctccccagcaggagcagggcctccatggcgtccgacccctctcctttctcctccccgctcggagctctgccatagcgcacacaaatcccttccccctccattcctaggcgcaggaagttctcccccacgccgtccagctccaggccggatccaattcgtgctatccctgctcgtccagaatttcttgccccaagtccggcaatcccctcgccgtggatttcctcgagcttgcctccccatggtcgccaaccatcctgccccctgcccctggtgcgctgggcgcctagtgctctgacctcgacggccaccctcctctctgctcgagcaatgctagggacgtgtggcaagcccttgttcccagcgtcgcgcccttgcctccatcaacactaagaccccggtagcgcctgccatggtcgccgcaggtctctgctccttccccaagctcgccctcatctcccaggtcgccactttcctctccctgcccacatcatcggattctgctcgctgcgtgcttgccggcatgtccgggcgtggccctgcagattcatcataggtacctcctcgaactcctccacactggttgtggacggcattggtatccctctgctccagcagcgttgcggcgccccgagctcctcctccgcgtgctgccatggtcggggtcagtctcatccgacaacgccatgacttccactccgctctgtggcgagcagcccctgcaccatccatgctcgtcgtgtgttcgagagttcacgcgcaagtctctgcgtggtggccgtgtcgctgcaagcttgtgccacgcacccgggcatcgtgtcgcaccaaatagcagcagcaacacaccctcaagcctcgcattgaacctgctcgacgaaaagcgcagcaagctgcgtgtcgttcatccctgcagcaacaccattcttcacttcgcgtcatacatcgcatagccttcatcgctgcacattgtccgcatcggcgcagcagccctcccgttcattctccactcccctcgtcgcgtgtcatcaatctcgtgcttgctgcgcatcccatcctcgtcgtcgtcaaaacccttgctagatgttgccactgcacctcgcgcgacgcatgattcggtgaaacacctaaaaccgtggaggcatgcgcgacacgagtcagtcaggttgttcgcattgagtgattcacgatttgttttatttacatatttggtcgatgatgtgcatgtgtttatatgtgtgtgaaaatatatttgtatgaatggacgcgtgtagagaagaaaatgaagtagaaaagaactcggatatttttattttgataggaaaa

SEQ ID NO: 88355 - DNA, 1911 bp, Zea Mays
aagaaaataggagcagcttcacctcggaagctcagactcagtaggatgcaacaagaacatgcccaaccttcagtaactctctctctctctctctctctctctctctctgtgatcgtacgaaacatttgtgctgctgtgtgactgcattttggcagatggttggtgcgaaggggtgtgagagatgcagggactggcaggagcactactactgggagcatatggatgcgagcaagatccgcttcttcaggtgcatgacaggagactttgctcatcgcattgtatgctgtgagtgatataaagatcttaatctcatgtccacttgccgagcttcagtttctttatcaaaaaatacggcagcaactctacatggcctaataactgaaagcaaattcagttaaactaccccattattatagtacaagaaaagaaaatttcccttcagttctttttccgtcaaaatatttgttcttttctagggttcacaagattactacagttagttgattacaaaacgatatttgccttgttactacactaccgtcatctgaaaactaaccatgcaagcaaagagcaatcacttttctgatgtcatcttcagagcgtgccagagaagttcgcaaagaacttcaaggggcagatcaccgaagagtttcacctgaaatcacctagcagcgctgagacatggcacgtcggtgtagagaagcatggcgacaaactattcctcgtgtcagggtgggagaatttcgccaaggctcatgagctggaggagaacgatctcctgctcttcgcttgctctggaaactcttcctttgaggtcctagtcttcggagcaagtggctgtgagaaagtgtcatccctgtttggcagtggacttggtccggacatgggcaaacaattcaatgatgtggtgcgtcgacatggtgtgcatcactctgtgactgtgagtgattctgaggataccgttgcgccgtcccagctggttcgatcccctcgtaacgccttgcctttgaaggaacccagtgggaaggctagaccaagtaaatatgaatcaccaaactccagcaacttcatcgtcaggcatgtggcaactggcaaagagggcactgatgatgagtatgctaactcaaactactactattcgttgtctgccaatcgactaggagacgaggaaaaggaagaaataataggtttggctccccatccgaccgaacaatcctgtatttgtgacccttctgaggaaaaaccatgttcagcgcagaaacaactgtctgatcatcccaagcaagtttgctgctgatcatcttggggaaagagcgcacaacatcatacttcgtaggccgaacaggaaggagaaatggcatgtcagctactatcactcacgccacacccggtgtttccagaacttagcgctgttcaagttcacgcgcgagaacaagcttcacgagggcgacatctgcgtcttcgaactgatgaaaggcgagaggagagtgacgatgaccgtccatgtcgtcagaaaggccaatggccggttcattctggtagtctgatctgacgcagtgcacctgtactgttgtagtttatgcagtgtgtagtgtgtaggggtactatgcaggggtagcattgcaaactggaagtgcctagtgatgcttgcaaggaatgcaactgcggttttgtgtcatgtaaggtagcttcctgatcagcagcatggcaagtagaacaaggtgtggcttgtgtgtaatatagaagtttctaggaaaatgttacactggcttatgcttttgtgcctgcttcagatctcccatctggtacagcagtgcttttgaacttcagaagtattatttcaaggaggaaaaagggattgttggttggtctacctgagttggatattaaataaattaaatgtaattaata

SEQ ID NO: 88356 - DNA, 1476 bp, Zea Mays
aagaaaataggagcagcttcacctcggaagctcagactcaatggttggtgcgaaggggtgtgagagatgcagggactggcaggagcactactactgggagcatatggatgcgagcaagatccgcttcttcaggtgcatgacaggagactttgctcatcgcattagcgtgccagagaagttcgcaaagaacttcaaggggcagatcaccgaagagtttcacctgaaatcacctagcagcgctgagacatggcacgtcggtgtagagaagcatggcgacaaactattcctcgtgtcagggtgggagaatttcgccaaggctcatgagctggaggagaacgatctcctgctcttcgcttgctctggaaactcttcctttgaggtcctagtcttcggagcaagtggctgtgagaaagtgtcatccctgtttggcagtggacttggtccggacatgggcaaacaattcaatgatgtggtgcgtcgacatggtgtgcatcactctgtgactgtgagtgattctgaggataccgttgcgccgtcccagctggttcgatcccctcgtaacgccttgcctttgaaggaacccagtgggaaggctagaccaagtaaatatgaatcaccaaactccagcaacttcatcgtcaggcatgtggcaactggcaaagagggcactgatgatgagtatgctaactcaaactactactattcgttgtctgccaatcgactaggagacgaggaaaaggaagaaataataggtttggctccccatccgaccgaacaatcctgtatttgtgacccttctgaggaaaaaccatgttcagcgcagaaacaactgtctgatcatcccaagcaagtttgctgctgatcatcttggggaaagagcgcacaacatcatacttcgtaggccgaacaggaaggagaaatggcatgtcagctactatcactcacgccacacccggtgtttccagaacttagcgctgttcaagttcacgcgcgagaacaagcttcacgagggcgacatctgcgtcttcgaactgatgaaaggcgagaggagagtgacgatgaccgtccatgtcgtcagaaaggccaatggccggttcattctggtagtctgatctgacgcagtgcacctgtactgttgtagtttatgcagtgtgtagtgtgtaggggtactatgcaggggtagcattgcaaactggaagtgcctagtgatgcttgcaaggaatgcaactgcggttttgtgtcatgtaaggtagcttcctgatcagcagcatggcaagtagaacaaggtgtggcttgtgtgtaatatagaagtttctaggaaaatgttacactggcttatgcttttgtgcctgcttcagatctcccatctggtacagcagtgcttttgaacttcagaagtattatttcaaggaggaaaaagggattgttggttggtctacctgagttggatattaaataaattaaatgtaattaata

SEQ ID NO: 88357 - DNA, 1591 bp, Zea Mays
aagaaaataggagcagcttcacctcggaagctcagactcagtaggatgcaacaagaacatgcccaaccttcagtaactctctctctctctctctctctctctctctctgtgatcgtacgaaacatttgtgctgctgtgtgactgcattttggcagatggttggtgcgaaggggtgtgagagatgcagggactggcaggagcactactactgggagcatatggatgcgagcaagatccgcttcttcaggtgcatgacaggagactttgctcatcgcattagcgtgccagagaagttcgcaaagaacttcaaggggcagatcaccgaagagtttcacctgaaatcacctagcagcgctgagacatggcacgtcggtgtagagaagcatggcgacaaactattcctcgtgtcagggtgggagaatttcgccaaggctcatgagctggaggagaacgatctcctgctcttcgcttgctctggaaactcttcctttgaggtcctagtcttcggagcaagtggctgtgagaaagtgtcatccctgtttggcagtggacttggtccggacatgggcaaacaattcaatgatgtggtgcgtcgacatggtgtgcatcactctgtgactgtgagtgattctgaggataccgttgcgccgtcccagctggttcgatcccctcgtaacgccttgcctttgaaggaacccagtgggaaggctagaccaagtaaatatgaatcaccaaactccagcaacttcatcgtcaggcatgtggcaactggcaaagagggcactgatgatgagtatgctaactcaaactactactattcgttgtctgccaatcgactaggagacgaggaaaaggaagaaataataggtttggctccccatccgaccgaacaatcctgtatttgtgacccttctgaggaaaaaccatgttcagcgcagaaacaactgtctgatcatcccaagcaagtttgctgctgatcatcttggggaaagagcgcacaacatcatacttcgtaggccgaacaggaaggagaaatggcatgtcagctactatcactcacgccacacccggtgtttccagaacttagcgctgttcaagttcacgcgcgagaacaagcttcacgagggcgacatctgcgtcttcgaactgatgaaaggcgagaggagagtgacgatgaccgtccatgtcgtcagaaaggccaatggccggttcattctggtagtctgatctgacgcagtgcacctgtactgttgtagtttatgcagtgtgtagtgtgtaggggtactatgcaggggtagcattgcaaactggaagtgcctagtgatgcttgcaaggaatgcaactgcggttttgtgtcatgtaaggtagcttcctgatcagcagcatggcaagtagaacaaggtgtggcttgtgtgtaatatagaagtttctaggaaaatgttacactggcttatgcttttgtgcctgcttcagatctcccatctggtacagcagtgcttttgaacttcagaagtattatttcaaggaggaaaaagggattgttggttggtctacctgagttggatattaaataaattaaatgtaattaata

SEQ ID NO: 88358 - DNA, 1508 bp, Zea Mays
aagaaaataggagcagcttcacctcggaagctcagactcagtaggatgcaacaagaacatgcccaaccttcaatggttggtgcgaaggggtgtgagagatgcagggactggcaggagcactactactgggagcatatggatgcgagcaagatccgcttcttcaggtgcatgacaggagactttgctcatcgcattagcgtgccagagaagttcgcaaagaacttcaaggggcagatcaccgaagagtttcacctgaaatcacctagcagcgctgagacatggcacgtcggtgtagagaagcatggcgacaaactattcctcgtgtcagggtgggagaatttcgccaaggctcatgagctggaggagaacgatctcctgctcttcgcttgctctggaaactcttcctttgaggtcctagtcttcggagcaagtggctgtgagaaagtgtcatccctgtttggcagtggacttggtccggacatgggcaaacaattcaatgatgtggtgcgtcgacatggtgtgcatcactctgtgactgtgagtgattctgaggataccgttgcgccgtcccagctggttcgatcccctcgtaacgccttgcctttgaaggaacccagtgggaaggctagaccaagtaaatatgaatcaccaaactccagcaacttcatcgtcaggcatgtggcaactggcaaagagggcactgatgatgagtatgctaactcaaactactactattcgttgtctgccaatcgactaggagacgaggaaaaggaagaaataataggtttggctccccatccgaccgaacaatcctgtatttgtgacccttctgaggaaaaaccatgttcagcgcagaaacaactgtctgatcatcccaagcaagtttgctgctgatcatcttggggaaagagcgcacaacatcatacttcgtaggccgaacaggaaggagaaatggcatgtcagctactatcactcacgccacacccggtgtttccagaacttagcgctgttcaagttcacgcgcgagaacaagcttcacgagggcgacatctgcgtcttcgaactgatgaaaggcgagaggagagtgacgatgaccgtccatgtcgtcagaaaggccaatggccggttcattctggtagtctgatctgacgcagtgcacctgtactgttgtagtttatgcagtgtgtagtgtgtaggggtactatgcaggggtagcattgcaaactggaagtgcctagtgatgcttgcaaggaatgcaactgcggttttgtgtcatgtaaggtagcttcctgatcagcagcatggcaagtagaacaaggtgtggcttgtgtgtaatatagaagtttctaggaaaatgttacactggcttatgcttttgtgcctgcttcagatctcccatctggtacagcagtgcttttgaacttcagaagtattatttcaaggaggaaaaagggattgttggttggtctacctgagttggatattaaataaattaaatgtaattaata

SEQ ID NO: 88359 - DNA, 1077 bp, Zea Mays
cgatctcaacatccatactgtcacacaggagccggcgagcgatggagaagaagaagaagagcagggccagggcggcgacggagacaggctcgccgccggttccagctactgctgctactactactcgaggtcttccggcaccctcctgactggtggtgaacgggatcagatgcggagtctggtgtcggttcagccaggcaatccggcgttcgtgactgtcctcatgaagacccatgttgggcacaagaacagcatgctgaccgtccaccatggatttgcggcggagcaccttgaggggagatcgcatgaggtcctgctgctgaggccaaacagggaagagaggtggtgcgtcaggtactaccacgcgagccacaccagaggcttcaactgccgccgctgggtcaagttcgtccgtgaaaacaggctgcgcaaggaccacgtctgcgtcttcgagctcatcaaaggcgccacgaggacgacgatgcttgtccatgtcctcaggaaggctgatggacggcttgcgctggtggcctaagctcatgcatgtgccatgttgcaagtgccgtgcaatatgtacccacgtacgtatgtgtgcctctacccttgctatgaacctatctatggggtaaatgatgtcatcatccacaactcatgcacaaataaacttttggcatgaaaagagatatgagacggtaggtgcatctctaaggaggagcattacaacacagattaagtcgccaatgatttcattcaaaaatgtcaacatcttgtgcaaacatcatttaactcatgtgaaaccaacattaaaattattcgtcaatagctgttttaaacaccaaaaccatgccatgtaacgttaaaattattaagtcttctcgaaatcctaacgaggaaactagctattgttgggtaatttcttcgaactttgctgtggaagaaatgccataatagcttttattcccccaaaagacacatcatttatcctttcgaaaggatgggatctacacaacagattcaagtacctgcaacatagcagcagcatatggtaagcgaaggcttaggaaatttaaagctcac

SEQ ID NO: 88360 - DNA, 975 bp, Zea Mays
ctcctctaacttggaaccaccaagaagctcagctcaccgtctgcaaacccgttgggagctaccatgagcggcacgaccggcggcgtcgtgggtgtgcagacgacggcggcggcggttcctgatctctcactccacataagccctccgtcgccgccaccggccggcggcgtcgaggcgctgccggagccgaggctgctgctggggctggggctggggccggggccggggctggagctcgacgacgacgacgacgccgtggcgacgaagaaggtggacgacgacgacgacgcggccgcggcggcgcgggagcacaaccttcacgcgcagcggctccggctgcagttgcaccagccgagccagacggcccacgggttcaagaagagctcgtcgggcaccgctgccggcggcgggaggagaagctccagggcgccgcggatgaggtggaccaccgcgctgcacgcgcacttcgtgcacgccgtcgagctcctgggcggccacgagagagcaacaccgaagtcagtactggaactgatgaacgtaaaggatcttacactagcgcacgtcaagagccacctgcagatgtacagaacagtgaagggtagtacagacagatcatgtgtagcagcagcaggccatggcggccatgccggagacatggtccttctcagaagaagaggcgctggtgaaggggacggcggctactacgatgttcccatctgcaacaaaaacccagtgaacaccaccgtcgaccctactttcttcaacaacaacaacagcaacattactgataggttcgcattgctgcattaatttaaatctcttctcagattaagttattattctagtatgtaccaccaataaacaagtacttcattttctcagattaagtaaacaagtacttacatagctgctagctcatgcatgtactccaagtctgagtatttatatggacgcatgtcttcatttctttgttcc

SEQ ID NO: 88361 - DNA, 587 bp, Zea Mays
gacacacagacacagacacggacacagcaaccaacaagtcgtccaacgtccaggcttttctgttttgtttctctctcacgcaagtcgcaaagcaaagcgtcccccaccatggcttccacgacgacgacggcatccaacaacctggcgggcgtgtggctcggcgagctctcgtcggcgctgcatgggacgtggcaggcggtggccgtggccgccacccacgggctcggcgaggacgacgacccgcggctgccgtgccagcagcagcagaggccgtggcgaggcgacgacaggagcagcagcaacaacaaggcgttgcgaggagccgcggcggccgggacggacaggcgggagggggacgtcgcgaggtgcggcggcgccatgtccgacaccacgctctacctcctcctcgaccggttcgcgcccagctgagcgggccccttgctcacccgccgctgccgccgccgccgccgcgatcgatcggcgcgtgctgtactgtacaggcggaataactgcacgtctgcacgccatggtttctgtaaataaatgctgtatataaactgcaatggcatcttgtgttgctttctgaa

SEQ ID NO: 88362 - DNA, 1247 bp, Zea Mays
aggaatattaaaatcgtcgcagacacatacctttccccagaagccagacaccttatcgtaccaatagaaccccgggcggagcctagacggcgggcacgggcacccctgcagcaccacgagctcctcaggcgacagcttggagccgttgacgtacacgtcctccgcccgcagctggtttgccgcgcattcccgttcactcctcatgaccagctccacctctgctgcgctgagaagccgccggagcacgcgcgaccctcgccccagcgcgtcccgcctggactcggccactggccggccgatgcactccaggcacttgcgcccctccggcatggagcccatcgcccggagcacgcaccccacgcagtaccgcgcgccgcaggcgaggcacgactccttgtcgcggccccagaagccgcctccttttccgcacctgtagcagccgcgggtcctgccgcccctccagtgcgcaggggagagggagccgctcgactggccggcagcagcacggggccgagtctcccctgcgtcggcatcgtcgtcgtcgtcgtcctcctcctcatactcgtcctcgtcatcagaggactggaggagggagccgctggtctcggcgaaggtgaccacgggcgggtggtggcgaggcttcagcggcagcgcctcggagccgccgtcgccgtcgccgtcgcctgcggcctcgtcgtcggagggggaagaggggagctcggcggagtggtgcgcggcagcgtggtggttctcgatgacggaggtgggggaatccaccacagctcctcccccggctggcgcggggacggcggagcggggcgccgggtgggcgtgcgcgtggatggcgttgcagagggaggacggggtgagcgggcgaacgacggggagtggagacgaggaggcggagggggaggccgggggcgaggaagacagcgcggcgagcgggatgcgggagaggtcgagcgggatggcgcgcgggagcgtgtaggggagtggcgggccaacgtactccgccgcgaaagagtagtcgctggctccagcggccatggccggaaacggctgcagcggcgaggagagcagtgaacaggaggcggcggctagggtttcgggagaggcatgggggtgggaaaccctagacgaggaggggaaagcaggatgggggaggagtagctgctttttggagcatgcgcgagggagcgagacgaaagggaggagagatggagaaggcgactgcttttgcctgtgaa

SEQ ID NO: 88363 - DNA, 1056 bp, Zea Mays
acatacctttccccagaagccagacaccttatcgtaccaatagaaccccgggcggagcctagacggcgggcacgggcacccctgcagcaccacgagctcctcaggcgacagcttggagccgttgacgtacacgtcctccgcccgcagctggtttgccgcgcattcccgttcactcctcatgaccagctccacctctgctgcgctgagaagccgccggagcacgcgcgaccctcgccccagcgcgtcccgcctggactcggccactggccggccgatgcactccaggcacttgcgcccctccggcatggagcccatcgcccggagcacgcaccccacgcagtaccgcgcgccgcaggcgaggcacgactccttgtcgcggccccagaagccgcctccttttccgcacctgtagcagccgcgggtcctgccgcccctccagtgcgcaggggagagggagccgctcgactggccggcagcagcacggggccgagtctcccctgcgtcggcatcgtcgtcgtcgtcgtcctcctcctcatactcgtcctcgtcatcagaggactggaggagggagccgctggtctcggcgaaggtgaccacgggcgggtggtggcgaggcttcagcggcagcgcctcggagccgccgtcgccgtcgccgtcgcctgcggcctcgtcgtcggagggggaagaggggagctcggcggagtggtgcgcggcagcgtggtggttctcgatgacggaggtgggggaatccaccacagctcctcccccggctggcgcggggacggcggagcggggcgccgggtgggcgtgcgcgtggatggcgttgcagagggaggacggggtgagcgggcgaacgacggggagtggagacgaggaggcggagggggaggccgggggcgaggaagacagcgcggcgagcgggatgcgggagaggtcgagcgggatggcgcgcgggagcgtgtaggggagtggcgggccaacgtactccgccgcgaaagagtagtcgctggctccagcggccatggccggaaacggctgcagcggcgaggagagcag

SEQ ID NO: 88364 - DNA, 295 bp, Zea Mays
aatgtgttgtgtatgcatgcaggagacgcccaaaggctcgtaaaacatggcagcaatcgaaaaaattcattaatttctattgggaaaactatgatgtgtaaccaaacaaaataacaaggaagttagtatcaccttctagagacgtcaactaatgcattgttcagttaggtggtaattttagtcttttacacaaagtttattgcaatttaatggaacatcggtgctaataataaatcaaaagatactttgcttgcaatttatggtcttttctgactatcagtacactcaaactttt

SEQ ID NO: 88365 - DNA, 384 bp, Zea Mays
agacaaatacagaaaagggctggcctggttaaaaaacggctcaggttagcaagcagcctggcctgcttcacgtttgagagaaggtggcttcgaacgagacctgatcgtttccttcgtcctggggcctgggcgacttgctcaatgggagttgacaggacagatcacggccagccagtcaggtcgctgtgacgagctgtacaagaggcgatgatgcggctcaggcagatttatatcggaggagatgaatcgcgttggctcttcactcggtcctgtttcttaactgatgtaaattttagcttgtttttaactagaggaacgatgtaagtttaaccagacgaataaaacaactgtgtatgctctgcttccaatccagttattagctgc

SEQ ID NO: 88366 - DNA, 830 bp, Zea Mays
atgtctgggatggcatttgatgattcacctgcccaagtgaatgttgaaggagatgtttcagagaaaaaagtagaagttcaagaccagaatgaagtgggtgggatgccctcacgacaagaggaggaggcagcaattaagaaaaagtatgaaggaatattgcccagaaagactcctgcttatatctaagattcttagctaagggctggcatgatgcatctgtcaacaagatcaccagttttccacgctgttgaatcgcagcacaagtttactatgtctgggatggcatctgatgattcacctgcccaagtgaatgttgaaggagatgtttcggagaaaaaaagtagaagttcaagaccagaatgaagtgggtgggatgccctcaagacaagaggaggtatagcagacaaatacagaaaagggctggcctggttaaaaacggttcaggttagcaagcatcatggcccgtatccagaaggtagcttcacgtttgagagaaggtggcttcgaacgagacctgatcgtttccttcgtcctgggcgacttggctggctcttgctcaatgggagttgacaggacagatcacggctagccagtcaggttcgttgtgatgagatccagaagcaagcagcatggctcgatgtgatgagctgtacaagaggcgatgatgcgttatcatctcaggcagatttatatcggaggagatgaatcgcgttcgcgtggctcttctctcggttctgttttactgatgtaaattttagcttatttttaactagaggaacgatgtaagtttaaccagaccaataaaacaaccgtgtatgctctgcttccaa

SEQ ID NO: 88367 - DNA, 520 bp, Zea Mays
tgccccgcgctccccgttccccttcctcgctccccaccagtccgtcccatccctcgcctgccttcgcacgggtgcgccgcccgctcgacagccacgccgcgccgcgccgcgccgctcagctgcccggcacccgcccttcctcgccgagctcgggatcgacgtctcccgcacctcctccgcgcccgttccgggctccgcatccggcctctcccccgtccccaaccccattccgcagcaggcgaccagcacaacatctcgaatcccccgcctcgcattcggctcgccgtcgctcctcctccgcgtcccgccaccctccgcacgcacaagtttactatgtctgggatggcatctgatgattcacctgcccaagtgaatgttgaaggagatgtttcagagaaaaaagtagaagttcaagaccagaatgaagtgggtgggatgccctcacgacaagaggaggaggcagcaattaagaaaaagtacggaggttttatacccagaaagactccatttatatcttaaa

SEQ ID NO: 88368 - DNA, 1203 bp, Zea Mays
tgttcagcttgattcgttttatttagtgaaatgtgatatatgctctcgtccttttgctctttcagcaaggtggtgttcccaacaagcctaaaggtcctcttgaggcactccgacccaagcttcaggtagcaacttctactcacatcagatgcatgatagtctattcagttcaagcacgggcgcatggctgaaaaaaaccccaggccttttttatcgtatgatatccacatgatagtctattcagttcaagttccacatatagtaatcatgtgtcgtgccctaattgctttgctatgtcacaccaagttaattatttcttgactcaaacgtttccgcaccaattccgctcccagcctacgcaacagaatgcccgcgcccgccgaacttcatatgcgtctgcggacagtgacgacactttgaatctgtcccccgaggatctggtcccgcaaggagaacccagccagcagggagaaccagtcgaggacaagaacaaggaataaacacatgcccagcatagctactgtactgtaccccttttcatacacaagatgccattttccgccgtcgcacaaaaaaaaaacttcttttgccttggtaataagcgtgttgattcggttccggcccaacggtcccggtgaggctgaggttgagacacgtgcagcttgaactgcatgtgagatgtggtatccgctgcactgggctgttgggggtccttgggatgcatgaacaaataaacaatgatgcttgcgatgtttacattgctgtacctggacctgtgttacctctatgcaaacacatgcaaatccgatggtccgagactcgaaactctcccgttgagctgaaggagttgctgtactaataataatgaagattttttttttgttctgatgttgcctatagatgcatcgcaatgctttcttttatttgcaccctgtgcatgttattattattcgcctgcttggctgtcggggtactggttggtgcgtttttctctgtaaatgagttctgcgcccctatgctggttaacaactagtgtattacgcgcgcccttgctcgcgtactgaacaacagtgtgaaataataattttatgagcatgttgaattagatatcgtatcacggtcatatgtacaatggaaatagtagttatgaagcaaataattacataagtgcatatccaaacttaagtagattgtagttcttac

SEQ ID NO: 88369 - DNA, 3099 bp, Zea Mays
atgggaaaacacaagaagctgctccacttcctgcggccggacccggcggcagcggcgccggcgccggccaagtcctcgtcgacaacgtcggacgacgaggaaaacgacgacgcctactactactgctacggcgcgggcgacacgtcgtgttccacgccgacgactccgagcacggcggcgtcgccgtactccgcgtccccgtggacgcagctcccggggctcggccaggacgccctcccccgtggcgcgggcgcggtgaccgggctcctcggctcgctcgtcaaggagggcgggcacgtctactcgctggcggcggcgggggagctgctgtacacgggcacggactcgcggaacgtgcgggtgtggcgggaccggcgcgagcagggcgggttccagtcgggcagcggcctggtgaaggccatcgtggtggccggcgacggccgcgtctacacggggcaccaggacgggaaggtgcgcgtgtggcggcgcgcggagggaggcggcgacgaccgtcccgccgccgcgcaccggcgcgtggggtcgctgccccggctccgggacgtgctgcggagctcgctccgcccgtcgcagtacgtgcggacgcggcggcaccgcagcgcgctgtggatgcggcacacggacgccgtgtcgtcgctcagcgtcgacgccgcggcggggctcatctactccgcgtcctgggaccgcaccttcaaggtgtggcgcgcgtccgactcgcggtgcctcgagtccgtgcacgcccacgtcgacgccgtcaacgcggtcgccgccgcctccttcgacgcgctcgtgctcacgggatccgccgacggcacggtcaaggtgtggcggcgcggggcgcggggcgacgggaagggggcggcggggcacgtggcacaccatggagcgcgtgctgcgggagggcgccggcgccgtcaccgccatcgccgtggccgtggagggcccgcgtcgtgtacgtcggctcctccgacggggcgtcgcgcactggcagtggcggcgggggcgcggccccccggcgccgcgcccaggaacggcggcgcgctgcgcgggcaccgcatggccgtgctgtgcctcgcggtggccggccgcgtcatcgtcagcgggtccgccgaccggaccgtctccgtgtggcggcgcggggagggcgccgaccactcgcgcctcgccgtgctcacgggccacgcgggacccgtcaagtgcgtcgccatggaccaggaggaggaggagggcactgacgacggctcagcccctggccggtgggtcgtgtacagcggcagcctcgacgggctccgtcaaggtgtggcgcgtctccgactcggacaggggcagcggcggcatcgcggccgacctgacgacggcgacgacctccgcgcgcttctggaaggcgtcctcgccctcgccgctgcgatcttggacgccctacgcggcgaacgccggagccggagcacatgggcgcggcgtgatgagcggccaatgccgtggctggctgggtgtggtggcggtctggggtactgttcaccccttaccgccgcagcggtcgccgctatccgcctcccctcgccgccgccctcttctctctcacgccagatgcagggcgtcactgtgcactccccctccacttcttcgcgcggaagaatccgcccgcggcacggaccggaagcttcgcggtcgtcttctctcctgttcgaggcgactgcgtttcggcgattcgcgacgaggcgatggcgattcgggcgcgctagggagccggtccgcgtcggagctgtggacgacgaagccgaggtggtcagcaaggtgctccgttcaagaccgaagacgaagagggcgcaaatccggctccctccagcacagttacgaatggcatcctcgaaagaagacaccatgaagtctttggttaaagtacttgtcgactgtgccgaggatgccacaaaatcccttcgtggattagtagatcatgcattagaccacatgcatgacgaagagatattagctagaaccctctttgccatgaaagaaaaacttgatttgcttcaccaagatgccttagaggcaaaagtccaagcttttcctgaaattgctaagtacgagggggatgacataagtgttcaaccgacatctccttcgacccctccaacagatactgaaccatctgtcgacgaagaggagttctactgcccggatgcgatgtcgaatccgtcaaatgcccagcaatttcctccaccaccacccttatggccaacaggttacatgcagcagaatccagtcgattgcaacatgatgggaaacattaattttcctagtcctggtcaaggtccaactacaatgtgggcgccaattcaggcagggaacactagttcccaatcaaccatgatccctgcttcccaatctgcactatattggaatcactacatgaattttgtgaggaaccctcttggctcggtgggaatgagtccatacacggattcatatccaccttcactatcaagtacaccgttgcagggttctaatactataccacaaatgcctgtaaacttggagtcagatgctgaacacagtgttcaggacatcaatagtcctgagaaaaatgcacctccagttcaaaaacaaaagaaatctaaggaacaaaactttacagccccagaagacagactcctttgtactacttggttgcaaataagtagtgaccccattgtgaatactgggcaaaggagggagggtctctgggccagaattgaaaaaagagcactcagtagccgatgggacaagataagggctgatgtcagtaaattctctggatactacgcgagagttctacgagaaaaacaaagtggtctaagtgatgacgataagacatcgaaggcagccacattgttcgctcatgaggagggcaaaccatttcattatatgcactgctggcatcaactgaagggggaacccaaatgggagagcatatgtcaaggacactcttttagaggattacatgcaagatcaattccttcgtcggggtgtccatcagtgcaaacaccggagactgacagtggatccgctggactctcaggaaaaaaggccccgtggccgtga

SEQ ID NO: 88370 - DNA, 2766 bp, Zea Mays
atggttctcgtggaggccctgcgcgcgcggctgctggccgcgttgcggccgtggctggcggtggaccccgcggacctgcgtgtggagccaggcctcttcgctcgcgcccgcgtcgtcgcgcgcgggctaaagctcgacgtcgccgcgctcaacgccgccgccggggcgggggagtccccgtcctggcctgccacgttcgaccgcgcggccgccgccgaggtcgagctcgccgcctcgccatgggccgcccccgcgatcgacgccgtcgtgcgcggcgtggacgtcgcgctcaccctcagggagcctgcgccgaggaagcagcggccagactataaggagtgggtatctgaggagaagaagcgagtgcttgcatcattggaccctcagggtgagatgttgcatgagatgatcgaaagtgtagttcactccctggaagataagttcacttcagtgttttcgactctccttctgaactgtggtcaggtgcggtttgacgatgtcatgatacaaattcgataccttgatgactcccatttttttgtactgaggacaaccgacttacggttcggccctgagcctgttttccgcagcactctgttcagaggactagttgggtctttaattccatccagaaagaagaataaattgtctgttaaatgcgctgaatttgaattcctgatgaaggagaatgattctgtagattgcagtgcatctttcactggcgtatctgcttcagtcagattggataatttgcaactttctgcctttggcattcatgttcccaaaacttgctggaaaatttcaccaaagtttgctccttctttgctggtgatattggatattgcaaaccaaaaggaagattatgcagttaggaacggcagagagctttggaaagctgctgcacaaaaggttgacaattcagtagtgtgccaaaggttttctttaagaaaagccgtaagctgtgctgctttctggcggagctatgtccatgcttatgtattgttgctgacattagcagggtatccctcagacaagattgtagtaaggaactgtggcagggtatcaaggaacaagaaatttttgggtactattagacatcaatggaaaactgttgttgatctggaggataagattcctgtagaagctattgctagagcacggcgtgctgcacgttcaaaactgattgtatcacagcaactgaaaaagcaggaatcatcaaaagcagttctggtttctttcttgttgaaaattcttatgcccttcttatgtttatggaggtttcttgtgttcatatggaggccagtgtgggcgatgatgggccctagaaacaaggcatcatatgcatatttttttcctggttctacttatgatgttgacatggagcttcatgtcagcgtacaccttggggaactgtctgtaaccttgttaccgttcgttgattgtttcactgatatgaaaggatcagacagaagaaacactcagaatgagttagcttcagtgcatcttgtaatgaagtcatcatgtttactttactcagctggttgcaccacacaatcattttatctagttctcggggaactgaagacatgcctttccagtgtcccaaagttggtacaagcagatagtaacaacagtccaaggaggagttcatcttttggaacatcagagttcatcaaggacactgactctaggataatcctctggtgtgactcagctagtatgagtccattctcccgacaacaagccgacagatctctttacttcaatgatgatttgtccactgcccttataaagagtgatatggatgagttatggtcaaattggatgataattagcaatgcatacaatgaatcgggtgtgattcatcatgaaaaaccttctattatttttgaattcaaatcttttctgattgatccttacataagtataagtggttaccaacaatgtagattcacaattgggagactaaaccttgatttggattatttatgtgtttcatcaacttatctgctgtacagacagttcatgcaccacaaacaggcaaaagaaccaactgaaagatcagctgatttttcgaacaatgatgatacccatctagactctacaagtggagttgctgacaaattgagatcatcaaatcatagaataaaggttgcaatgttggatgtgattccagaaaacactcttcgtattgtagcactggttactggtccaagtatacggttattttttgataaatataatatgttgcaaaatagcaaagacgtatacaagcccttgctttctcagatgaatagccggtcctgcatagttttcagtctagcatatgtggaatgtgctctttggccagcatcgctttcttcaactcctccaatagcaaattttcataccaaagaatcacataaaacatttgttagtgcgaaggagccccaagaacatcatcagctacaaatagaaagtagtgcaaggaatgtttatccagggcatgttatgcttgatgctcgcttcatctttgctggtttaactcttctgatagataatctagatgcaaaccagcagtctcacatttgcggaccgctgtcatgcagtttcctgatttcagctagcaggaactatgtctattccttcttcggggtgagaaacgtcatctcaactaacttagaaggaaagatcattggtttcctagctttcttctgcatggatgaactcttcatggtttgccaggtatgcactgttactaaccttggattagagggagtacaatca

SEQ ID NO: 88371 - DNA, 446 bp, Zea Mays
tccctcctggagacgggggtctcgctctgtcgccccaggctggagtgcagtggcgcgatctcagggtccaatgcaaggctaagccctcccgaggttcacccccttctcctaccctcagccttcccgagttagctggggatacaggcgcccacaacccgtgcccgacggagtctggcttagtcgcccggcctggagtgcagtggccggatatcagctcactgcaagctccgccccccaggtttacgccattctcctgcctcagcctcccgagtagctgggaccacagacgcccgccacctcgcccggctagttttttgtatttttttagtagagacggggtttcaccgtgttcgccaggatggtctcgatctcctgacctcgggatccgcccgtctcggcctctcaaagtgctgggattacaggcttgagccaccgcgcccggccaa

SEQ ID NO: 88372 - DNA, 1602 bp, Zea Mays
gtgaaacaccataagagctggagatccaacacacaatgtatttctcttttgtctttatgtgcaaagaacaatgaaggcaaagagttggcccttagtttttctcaaggatcagatttcgttgaaatttcttctgatgttgacaagctgtgttcaatttggagcacagtttctctaagggttgatagttctgaggatgacagtgatgatggaaaaccttacaaggttataccaagaagttcgtaccatcttgtcaacaagaaaaacaactatggcattgcatttgttgatggcttgctagagtttgtgaaaaagccgggaaatccatttaaagtgcaggtttttgatgaatctattttttctgatgcttcaagacttactgttaaccatatgaaatgggacaattatacttacttggatgtggacgatgatgtgcctttttctgtgagggatagattggcaagtggtgcaagttctcaacatgtaatcatcaatgttgacaagattgtttttaccatcactcatgaagtctctgatactgatatttttttcccacttgtccaaacctgcataagtgatatccgtgttgttacgcaaatatttccatctaaaatcaggattctaagttcattcaaagtctcagcgcagtatttcattgcacgaagaaatctgtgggaagaactcatctctcctatcacctcctatacattctttcgatttaagttttttaccccagatccagttactaagtatggaaagacggccatgcgtttcttctttcaattaaagcaggtggatgtatttattaatgagctttcatttgacatccttctatatttggttggaaagttaaacttgatgggtccatatgctgtcaaaagctcggctatctttcctaactcctgcaagcaggagagggctgctcgtcttcaaactcgcgagctcgcccttgcgcgtgcccgcgatgctgaacgcgaggcggctgaggccaccaaggagcgcgacgcggccgccgcccgcatccgcgacgctcttgcccgggccgcccaggcccgcgcctctgctgatcctttggacgaggagatagagaacagctcaaggctggcacttgtgtgtcattttaaagataatggggatgcactaattcctgggcaacagtcaacttcagttttcttgagccacttaacatttgatgataatatttcacatgatcaaatggtttctatttgcttactcaaggaaggtgtattttcaactattccaatcagcatttctctccacgagtctggtatttttgcatggagaacccgtgtgtcaccagtcaaagacctgacaaccttttctggaccatttattgtggtcaaggtgtctcatagttctgaggaaggcttatctctttcagttcaacctttggttaggatccataataagagtgactttcctcttgaactccggtttcagaggccaaacaaagctagtgaagaggctgcatttgtcacagttagaagtggagatatggtcgatgaatctactggagtatttgacgccatggatttgtctggtggaccaaaaagagcattgatgtctctagctcttggcaagtaa

SEQ ID NO: 88373 - DNA, 97 bp, Zea Mays
gattcagttgattcagatgtattacaccctcaagagtcagaacagtatgcttgggatgatttaagttcaccgcgcaaactggttgtccgaattgttg

SEQ ID NO: 88374 - DNA, 2434 bp, Zea Mays
atggagcggtgggagattggaggtcgaggcttgaagcgcgacgaacgccgagccggcgccgtagttgacggcgcagcccacaggggcggccggctagatacacctgcattgcgtgaaattaaaatagataaaatcagcccatggaagccatttttgaagatgcgccaaaatagcaggcttaatctggatttctcattcagtggtggactcaattcgagaaaacagagatttgatgaatcatttggcttgagagtgttcaaaattggctacgaagtgtatgccgatggtttaacaagagttttacgaatttgtgaacatgcagataatcccaaaattgagaaaattcaatggccaatagcaaatatacagttcagaatttcttatgtgtgtattcatcttcttgacaaggaccagaatggggaaaatgtccaattgccatctacaattttagcagcaagacttcagcatgtttcttctgattcagttgtcacaaatagattcaagcaagtatctgttgcaattcattcattgaatgtggatgaaaaatgggaaggggcttcaattgggacaattcttaggaggaacaagcttcaggatgctactctcgatgaaaatattcttcgtatgatctttgtactgaattcaactgactccagtgtcaaacaaatacagtattgtgccatcatcctacagcctgttgatcttaagattgatgaggaaacgttaatgaagctagtaccattttggagagcatctcttgcaccttcaggcacgacaagcacacaattttatttcagacgttttgaagtacatccaattaagatcatagcaagctttcggcctggtggccgacgcacaacatatagttctgctcaagaggctctgagggcactacttcatagtgttataaaggtgcctgaaattagcaactcagctgtggagctcaatggggttctcctaaatcatgctttagttacatttcgtgagctacttctaaaatgcgctcagcactactcatggtatgtattaagggcaatttatgtaacaaagggaagcaaattgcttcctccatcttttgcctcaatttttgatgactctgcttcatctgttcttgatgtcttcttcgacccttctgatggatcgctcaacgtccctggccttaccataggcatgtttaaatttataagcaagaacatgaagtcgggtggtttttctggaacaaaacggtaccttggtgatctcgggaaaactgttaaaactgcaagttcgaacgctctctttgctgctgtcacagaaatttcagatagtgttgttagaggagcggaaacaaatggtttgaatggcatggttactggtttccaccagggcatgttgaggttggcgatggagccatctgtcttagggcaggctataatggagggaggtcctgacagaaagatcaaacttgatcatagccctggacttgatgagctatacattgaagggtacctgcaggctatgttggatgtcatgtataagcaagaatacctccgtgtcagggtgattgatgaccaggttatactgaagaatctaccaccaaatagcgccctgataaacgaaatcgtggacaacgtcaaaagctttcttgtgagcaaggcactgttgaaaggcgattcttccacagttcgaccgatgcgccatctgcgaaatgaacctgaatggaggattgccccaacggtgctcaccctctgcgagcacctttttgtgagcttcgctgtgcgtgtgctgcaccgggaagccagcaaggccatcgctggagtcatgtcgagagtgaagaaaccgaccggagaggaggtcgaaggcgactcgcccgcatctggtggcgtcctgtgtaagcggaataggctgtggactgtcgggaggtttgccgtctcgggcatggtcgcctatgtagatggccggctgtgccggcacatacccaaccccatagcccggaggatcgtcagcgggtttctactgagcttcatcgaaaacaggggcaacgaataagcgggcagccggacaggtgataaaagggctcgccttctgccacctgctaataaggcgtaccatggaccatggtaaataggcgtgcacgttgtacaaagaaccgaggtgtggtagtgctcttgagccgtaaccgatctctgcatagagctgtgcatcaattttgaccgccttcaggcccacgtttggtgtacagaaacactgggacagtaattccgcagatgctacttcctgcctacatttcgttgacatggactcgtgcttagagtaagtttaatagtccacaacgagccttttcacataacaaactcggttagaggccctttcacatagtctatctatatcatcttattatacttgttctacatgcaaagtgataaatagcatggctatgataaacgtatggagc

SEQ ID NO: 88375 - DNA, 486 bp, Zea Mays
atgaactccggcaagccattccccctgcttgctgtggactttcccatgatcagggtgagaccacatgccgggcctatttggttcgtggctaaatgcaccacactttgcctaagccgccacggtaatgatctttcccagctctcctgcatgctaggcgactgggcactcgacttcccacacaactggcttggacatgattggagcgaggcagccgatgtttatactcagcagggagacgagtccgcgccctgtggagctatctcaagattgcggcagagattgcggagaatcagttgtaacggacttgattggagctcggactctgaagaagaaattggccagagtgccccatatgctagcgatcaggagaatacgaataatctgatgtcagcccttacctcacatggcggcaagcaaataaacaaaacaaaaagggatgtgagcatgggcatgggcatgggcatgggtcgtgcggtgaggatgtga

SEQ ID NO: 88376 - DNA, 2500 bp, Zea Mays
ccactgaaaagtgttgctatggatcctacaaatttgttgcatctgaagactgtcccatctgagaatggactcaaactggttgaaaattcaagcgacaatctacaggatttggcttgtgaaagcccccttgctggaaaagtcaagttcatgtgcagctttggtgggaaaatcttgcctaggccaagtgatgggaagctcaggtatgtcggcggggagacacgcctcatctcgataaccaggaacttctcgtggaatgaactagtgcagaaaactctcacaatctacagtcagcctcatatcatcaagtatcaacttcctgacgaggatctggacgccctcatttctctttcgtgtgatgaggatttccagaatatgatggaagaatactgcagtcttgaaaaggccaatggctctgttagactaaggatgtttcttgtctccctcaatgaatgtgaagattcgtcattggacgcaaagagcttggagagtgaaccagagtatcattttgttgttgctgtgaacaatcttgcacatttgggccggagcattagtggcaacaatttaatgagccagccgagccatcaattggatccttctccacactcctttagagactcacctgtctgtcaagccaatacagaagttaaagccaaagattctgttggagcaactctcaatgaatcttcctctcagtttttccttgctccatacacacaacaattggtggtcgagccatcgacaactccgtccccaagtttaagtcagcagaggaccatgaaacaatctaggaagcaaccccctgcagatgaattgacaacaaaccaagaacatgtgagtagaagtgaagtttccagtagctcaaatttgaaaaccatgcttccgaaccatctagataagaagcacaatgatgcggacaagggtattggaactggatctcccttgaaacatcttcacattcgaaggcaggtaaaagattgggctggaaatggtattgacttgattccacataccaactatgatgtttctactccagtggaagcgtccttatattctgaaaaggttatcatgcatccagaaaatgcaggagggacatctgggctgcaggaacatgccggtcaaattctaggcatgccccatgccttctcagatcctttactaaagaatcttaatgacttgcctgcatcgaatttgtcattacctgctggttcttacataacccaatcattttcccagaaaatatgccatactaatgagttggagagaacaataagtaggactgggccagcttttgaatgtgtcaaaccccctgacattgcccgtgcagatgaatcaaattatcttgtttctaatcatattgaccaaaggtacaatcaaggaattattggcccagccagttcacagccaccagtatattaccaagatgaaagtttgtcaagtaatgtgacacaaaaatgccatgatggttatcatgtagttcaacagcaggataagttttttcatcaggataaaagcgcagggttaatttacaacgcacatggtgcaaagttgccctcagataatttagatgctctagaaagttcagttccaaagccgatgcatgctactgatcattccctttcatatctccttaatgtatcccaaggagacaattcagaaagtggatcacatgtagagaaactgaattcagggcctgttactaaagattatggaactactggctatgtgcatggaactgataaggttgctccaaatcctcaggatctgttgcatataaagtcttctgaagcttttatcacgcaaagatcaatgggcaatggagaatctggtgtatatcagaatgataatttgcacaagtcatcagtgctacatactgggctgattgatactgatccaagtgtgaacttgcacgacaatggtggcctctctgtgtcttcgtctcaaaatccagttgtggactgtgtttctaggagagaggatccccttcgtgattggggcaatatcgcctgcagtgaaggaataattggatgtgaccataccaccaccgataatgaacacataaagctagcacacaggctgcacgataatgttcaaatgaatgtacctgtcatagttgaggacgtgactgataatgtgccttcaggcattccatcatcgagaccagttgttcctcaggttgtaatggcagctgaagaacaccaagaggtgattctttcatcacagaaggatgacgatagtaggaccaacaggccagagttagctaatgaggatcatgatggagttgccgatggatccattagcgatgctgtagttgctgaacttgaagccagcatgtatggattacagatcattaaaaatggtgacctcgaggaactacgtgaactgggatccggaacatttggaactgtatactaatggaaagtggcgaggaactgatgttgctatcaagcgcatcaagaaaagctgttttgctggaagatcatcgaacaagagaaacttgtga

SEQ ID NO: 88377 - DNA, 810 bp, Zea Mays
agcggcaacactctggtttctggggggggtccgcggcactcttccatggatggcaccagagctactgaatggcagcagcagcaaagtctctgagaaagtggatgtgttctcttttgggatagttttatgggagatcttgactggtgaggaaccgtatgcaaatatgcattgtggtgctatcatagggggtatcgtcaataacacactccggcctccaatacctgagaagtgtgacccggactggcaaaagctgatggagcaatgttggtcggcgaaccctgacgcccgcccctcattcaccgaggtcaccgacaggctccgagccatgccgccggtgattcaggcgagagggggacaggctccggcaaccagatgatgaggtgttataaacatcagccagcagattatttttagctgcaatcagcttctgcactgaccccgcgagtctcctatgtgtgcatagagtatatatatacatgtactggtcacggtgtgtattctatcctgacgtaaatatgcttcttgtgtacatccttttttgcaccccatgttgagggcttctggtgtaattacatgtatctgagtgaaaaaaaaagagtagcacaggcgggttgctgtggccacacgtcaacaatttttctgtgtaggttgtgagggtctgccagatagatgtatggtagaccactcaagctttttggtgggccgtgggttgtaaaaatatgagcttggaacctgtaattatgtgcaacagatgctggaatgctggctatgctgatataaacttcgtttggtttttgtatcaaatgacaa

SEQ ID NO: 88378 - DNA, 597 bp, Zea Mays
ctctctggagctagcgcatgtcgtcctccatggtgcccaagaacccgccgcccccgaccgggtacgatggcgaaggcggcgtcgaggcggcgccggtgacgagctgcctgtacctgcggcccggggcgggggcgctggacagggacgccgtgctgcgccgcatccgccaccggaggcgccacagccgcctccgcgacacgctgcgccccatggtgctgcaggcgcagccggcggagccggacggcgccgaatggcgcctcccgtggccgctcgacgacgccttctcggcgccgtagcttttgtgaaatagaatcactagtcgctcgtctcttgtgcccgcagattaagcaaatgccatgccatggatgatcgcctcttgttgtgtacatcgtcaagaacaggtgcagattaaataatcatctgtagtatgtgagctactgtactgcaaggatggagccatgcatatggaaggattgttttgggagcgcctttgtataattgcttgcatgcttggtgttttatgaatcatgctcaagtaattaaacaaagcatgtctgtattaaatgtttacttgtgttctgggttcatttttttttt

SEQ ID NO: 88379 - DNA, 1029 bp, Zea Mays
atggtcaagccgccgccgccgccgcccacctccacctgtacctccgacaccccgctacccaccccagggggcctcctcggctcgctctcctcctccgcgcactccctcctcgccgcggcgcgccgctccccggtcaccaccctggtcgccgccttcttcctcctcgcgctcttcatgtacggcgaggacgtccgcaccatcgccgagctttccatcgacgactacctctaccccgacgccgacttctacaacgtctccgccctcccgcccctcgcgctgcccccggccacctgcgacctctcccgcggccgctgggtcttcgacaacgtctccctcccggcgtatcgggagaaggactgcaccttcctcaccaagcaggtcacctgcctcgccaacggacgacccgacgatctgtggcagtactggaaatggcagcccaacgagtgctccctccccacgttcgacgctcggaggttcatggaggcgatgcgcgggaagcggctcatgttcgtgggggactcgctcaaccgcaaccagtgggagtcgctggtgtgcttggtgcagcccattctgtcgaagggcaggaagaagatcgtcaagcggggctccctcactgtattccacgccaaggagtaccgcgccaccctcgaattctactgggcgcccttcctcgtcgagtccaactccgataaccccaagatccacagcatcgagcaccggatcatcaggcccgagcggatcgaggggcacgccaagtactggagaggcgtcgactacctcatcttcaacacctacatctggtggatgaacacagccgacatgaaagtcaggagaccaaattcgaggtattggtctgaacatgacgaggttcccaggattgaggcgtatggactggtgttcaagacgtggtctgattggctcaatgacaacatcgatcctgaccgcacacttgtattcttcatgacaatttctccactccacatcagcccacataactgggggaacccggacgggatcaggtgcgtgaag

SEQ ID NO: 88380 - DNA, 1697 bp, Zea Mays
atggtcaagccgccgccgccgccgcccacctccacctgtacctccgacaccccgctacccaccccagggggcctcctcggctcgctctcctcctccgcgcactccctcctcgccgcggcgcgccgctccccggtcaccaccctggtcgccgccttcttcctcctcgcgctcttcatgtacggcgaggacgtccgcaccatcgccgagctttccatcgacgactacctctaccccgacgccgacttctacaacgtctccgccctcccgcccctcgcgctgcccccggccacctgcgacctctcccgcggccgctgggtcttcgacaacgtctccctcccggcgtatcgggagaaggactgcaccttcctcaccaagcaggtcacctgcctcgccaacggacgacccgacgatctgtggcagtactggaaatggcagcccaacgagtgctccctccccacgttcgacgctcggaggttcatggaggcgatgcgcgggaagcggctcatgttcgtgggggactcgctcaaccgcaaccagtgggagtcgctggtgtgcttggtgcagcccattctgtcgaagggcaggaagaagatcgtcaagcggggctccctcactgtattccacgccaaggagtaccgcgccaccctcgaattctactgggcgcccttcctcgtcgagtccaactccgataaccccaagatccacagcatcgagcaccggatcatcaggcccgagcggatcgaggggcacgccaagtactggagaggcgtcgactacctcatcttcaacacctacatctggtggatgaacacagccgacatgaaagtcaggagaccaaattcgaggtattggtctgaacatgacgaggttcccaggattgaggcgtatggactggtgttcaagacgtggtctgattggctcaatgacaacatcgatcctgaccgcacacttgtattcttcatgacaatttctccactccacatcagcccacataactgggggaacccggacgggatcaggtgcgtgaaggagacgcttccgtaccagaactacagccagccgctggacctgtaccacgacatgcggatgcacgacctggtggtgaaggtggccagcgccatggcgaaggtgccagtgacggtgatcaacatcaccaggatgtcggactaccggaaggacgcacatacggggctgtactccatccggcaagggaagctgctgacgccggagcagaagggggacccggagaagttcgcggactgcatccactggtgcctccccggcgtgccggacgtgtggaaccagatactctacacgaggatcctttccaaaccgccttcttggggttcttctaatgttagccccttatctccatcccagtccctgcctccccggtgaggatcacaagcagggaaggcagggtctttttctaccacagcctaagcctaggaaaagcgtacggtttttcgttctctttctcctcctttttagtcggtagggtaggttgagtgaaggttagagcaaaagggaaatggagggggaggttactaatggcatggcatgtaggatctttgaggtgtagatgagctgtgagttttgccaattgagcaaacagcagctagctcgtagacagttgcgctatgcacatgtatgtatatatatatatatatataatataaagccttcttcctgctgta

SEQ ID NO: 88381 - DNA, 1778 bp, Zea Mays
atggtcaagccgccgccgccgccgcccacctccacctgtacctccgacaccccgctacccaccccagggggcctcctcggctcgctctcctcctccgcgcactccctcctcgccgcggcgcgccgctccccggtcaccaccctggtcgccgccttcttcctcctcgcgctcttcatgtacggcgaggacgtccgcaccatcgccgagctttccatcgacgactacctctaccccgacgccgacttctacaacgtctccgccctcccgcccctcgcgctgcccccggccacctgcgacctctcccgcggccgctgggtcttcgacaacgtctccctcccggcgtatcgggagaaggactgcaccttcctcaccaagcaggtcacctgcctcgccaacggacgacccgacgatctgtggcagtactggaaatggcagcccaacgagtgctccctccccacgttcgacgctcggaggttcatggaggcgatgcgcgggaagcggctcatgttcgtgggggactcgctcaaccgcaaccagtgggagtcgctggtgtgcttggtgcagcccattctgtcgaagggcaggaagaagatcgtcaagcggggctccctcactgtattccacgccaaggagtaccgcgccaccctcgaattctactgggcgcccttcctcgtcgagtccaactccgataaccccaagatccacagcatcgagcaccggatcatcaggcccgagcggatcgaggggcacgccaagtactggagaggcgtcgactacctcatcttcaacacctacatctggtggatgaacacagccgacatgaaagtcaggagaccaaattcgaggtattggtctgaacatgacgaggttcccaggattgaggcgtatggactggtgttcaagacgtggtctgattggctcaatgacaacatcgatcctgaccgcacacttgtattcttcatgacaatttctccactccacatcaggcgttgtgtgattaacatggtatatgaaaatcgagtgccggtctcgctaacacttgtctacgttcttttctatgaaaacagcccacataactgggggaacccggacgggatcaggtgcgtgaaggagacgcttccgtaccagaactacagccagccgctggacctgtaccacgacatgcggatgcacgacctggtggtgaaggtggccagcgccatggcgaaggtgccagtgacggtgatcaacatcaccaggatgtcggactaccggaaggacgcacatacggggctgtactccatccggcaagggaagctgctgacgccggagcagaagggggacccggagaagttcgcggactgcatccactggtgcctccccggcgtgccggacgtgtggaaccagatactctacacgaggatcctttccaaaccgccttcttggggttcttctaatgttagccccttatctccatcccagtccctgcctccccggtgaggatcacaagcagggaaggcagggtctttttctaccacagcctaagcctaggaaaagcgtacggtttttcgttctctttctcctcctttttagtcggtagggtaggttgagtgaaggttagagcaaaagggaaatggagggggaggttactaatggcatggcatgtaggatctttgaggtgtagatgagctgtgagttttgccaattgagcaaacagcagctagctcgtagacagttgcgctatgcacatgtatgtatatatatatatatatataatataaagccttcttcctgctgta

SEQ ID NO: 88382 - DNA, 2542 bp, Zea Mays
aatgagggcccaaaagatatggtttttgcagggttagtttcttgaccatatacgctacacgtcctctctgactgactaaacaagctttgtttccattccaatcatccatataaatgatgactagctaaggaagcaagcaatcgagacgctactgcttggcgcaagtagacgacgaccggcacagtgaactggctacctacaatcctacatgcaccaccagctcctcctcttcctcttcttgctcctcctcgatgcaacaaccttcgcggcgcccgccgggccgtgcaaccgtcggtgcggaagcacgaccgtgccgtacccgttcggcttctccggcggcggggcctgcccgatcctcctcgcctgcaacgccacggcgtccacggcgctcctcccgcgcagcacggccgccgccgccgcgtcgtacccggtgcaatcgttcgactccgcggcatccaccttcctggtctccctcgtgccgtcgtgcggccgcggcgtggccgaggccagggcggcgctgggaggcgccggctacggcgtgtcgtcccgcaccgggctgttcctccgcggcggctgcgggcgcgcggcggggtcgaggtcgccgagcgactgcaacgtcccctcgggcgtcatggccgccatcctccgcacggtgcagtgcggcggcggcaacgacagctcctggacgtgcgtgctgtccgcgccgccggcccccggcagccccgccgcggcgagaggccagggccagttcatgcgctgggacgaggtggccgccgccgggtgcgaggacgcgctcacctcggccgtgtacgcgtactcgccgcagggcgtcccgtccatccagttcggcatcgcggagatgggctggtgggtcgacgggagatgcggtgacggaggcggcggcggcggccggtgcgcgcggaacgcgacgtgccacgacgtgcagacgcccggcggggcctgggggcaccggtgcgcgtgcgtggacgggatggccggagacgggttcgccgccgggcaagggtgctactacgacggcgctccgagagagcgttccgcgaagaagattgtcctcgtagttgcagcaggtgttgcggcgagcgtggcggcggccaccggcgcgcttctgctgtgctggctgcagtgccggcggcgcaaggccgggcgctcggcgtcggagcggctggcggcgatgcggctgctgtcggaggcggcgacgtcgagcggcgtgccggtgtactcgtacggcgagatcgcgcgcgcgaccaactccttctcgcacacacaccgcctgggcacgggcgcgtacggcaccgtgtacgtgggcaagctcccgggcacgggcagcgcgccggcgctggtggccatcaagcgcctgcgccgacgccaccaccacgacgaggacgaggacgcggctgcggaggcggcgctgctgctgaacgagatcaagctcatctcctccgtgagccacccgaacctggtccgcctcctcggctgctgcctcgacggcggcgagcaggtgctcgtctacgagtacgtgcccaacggcacgctctcccagcacctccactccgcgggcgccagcaccgggggccgcggcgcgttgacgtggcgcgcgcggctcggcgtggcggtggagacggcgggcgccatcgcgcacctgcacggcatgcggccgcccatcttccaccgcgacgtcaagtccagcaacatcttgctcgacgccgcgctgcgccccaagctggccgacttcggcctgtcccgcgccgtggaccgcctggaggccgcgcgctcgcacgtgtccaccgcgccgcagggcacacccgggtacgtggacccggagtaccaccagaacttccacctctccgacaagagcgacgtgtacagcttcggcgtcgtgctgctagagctcgtcaccgctatgaaggtcgtcgacttcgaccgcccgcccgccgaggtcaacctcgcctccctcgcgctcgaccgcatcggcaagggccaggtcgccgagatcgtcgacccggccctccttggcgccggcgaggactgggtcatgggctccgtccgccacgtcagcgagctagccttccggtgcctggcgttccagaaggacgtccggccgtccatgcgcgaggtggccgccgagctgcagcggatccggtccgccgccccggacggcgccgatcccgaggagcccgcggggtctaggctccggcctgtgagtatgatggacatccagatcgacgtgagcttgggcggcccggacacggcggcaaagaaggcggcttcgcccgtgtcggtgcaggaggtgtgggtcagcgaccggagctcgccgtccaccaacggctccatgccgcgctttgctgcgtagcttaagctagctagctcttgtacactgatgagaaaaaccaatgtaatttagcaaaaaaaaagaacattttttgtctagtaaaattttctctataaaaaaaccactgtacaagatgccatccattgttgtaacggaaacgtaatttactgtatagcattaccttaaattccc

SEQ ID NO: 88383 - DNA, 1738 bp, Zea Mays
attctcaatcttattttttttctgacagctatgcacaaaatagcttcacattgtggaattcgatgtctcgtgtggatatccagatttgatgatctctgctctgcaagggacaagggagtgggggaaaagaagtgtgagatccctgcaccggtagaatggaggtcagcgttccataaataaaaccaccgcaccaaccagcgcgagaggtgagtggtgcgggtgcgtggccgctcgcaggcccccggtgcaccgcatcgcgctcaaccacgtccacggacgcatcatgccgccccgctgctgcctcgctttctccagcagcggcagcggctcttgccgccgcgccatgtgctcgcatccacctccgactcctcctgcgcactgacccgcccagccacaggaaccaagacactgccgtcatgcgcgcgccgcccaggcggccgtcccctgctcctgcgcctgctccgtgcgccgccagctcgccgccttctccctacgcggcgttcgcgtcgccgggtcctggcccggtgttcgcgggcggtggcggcgccggaccgagcctgagcccgccgctgatcgcgatgctagcggtggtgggcgcggcgctgctggtggtgctgtacgcgcggctggtgagccgcgtgttccgcgcggcgcggcggcggtggaggcggcggcgccgcctccggctgctgctgatcccagggtccccctcggcgcgcggcggggacgactcgttcgcgtccttcaccacgtacgacaactactaccacaccttctcgccctactgcggcctggacgccgccgccatcaagtcgctcccgtcggcgcagtacccgggcggcggcggcggcgcgtgcagggagtgcgcggtgtgcctgctggagttcgcgggcggcgacgagctccgcgcgctgccgctgtgcgcgcacgcgttccacgccgactgcatcgacgtgtggctgcgcgctcacgcgtcctgcccgctgtgccgtgccgccgtggcgctgctgccgccgcccgtcgcgtcgccgctgcaccgcgccgcgcgccgggtgcggcccagcctggacgacctcctcttcttccacccggtgccgcagccgcagacgctggccgagcagcagcagcagcagcaggcggagatcgcgccggccagcccggaccagcagctgctctccgcggccgccggcgccagggacttcctgctcaagcgctcctactccttcggcttcgagcgcaacctcgccgtggaggcgtcgtcccctccgtggcgctaccgctcggttgtcgccgcaaccgacggtggcgcggcctcccgcggccgcggcttctggagcaagcgctggccatccccgttcggcggcggatccgcggccgcccgcgtcttctccttccggtcgtaccgcggcgcggcgggcaagccgtccccgttgtcccgccggtgccgcggcgggagcggcttcttcatgtcgctggcgtcggagccgccgtcggtgctggccgcggcgaggcggagccgcgcggccgccgcgtccagccggctccggtgcggggaccccgaggcgctgctgtcgccggaccggctggctgagccgctgaggcagcggctgtgactgtgactgtgactgtgtgcggatctcggtctcgctggccgctcgtggtggtgggcctggcgcctgcgtggagacgagggcgggcagtaatggcgcgataaatgcgacgccctgccacggtttta

SEQ ID NO: 88384 - DNA, 110 bp, Zea Mays
cgaagcgattgttctgctgcgtcttgggtctccgatgggcactccgctcttctgagtctccactctccaccggggttgtttcatagaaatttgcatcccattcgatgttg

SEQ ID NO: 88385 - DNA, 1640 bp, Zea Mays
ccgattctcctttcttgcccgcctcacttctgagttccgactctggagcggagcggcagccaaatctcgaccacgtccggcaaccgcgccccctcggctttgcgcccacaccaagccaccctctgttctcctcttccgtggcggactagcggcgcactggtgtggtgctcctccaagctctggtctgctccgcgccccgcctccccgtcgaccggcgactttggccccggcccccgggctaggaagcgagttcaccggtggatccgcgcgtgtccctccctgttacctgcgggtcgccccagccggccacccgcgcccccgcaccctactgacttgggcttgctgtatagcacggaccagatcaagggtcgtcgtcgaccacgtttgaggcttggccatgcctttaaatatagatattgatctgttcaagctggatattgatgagctgatagctgattattccaaggagaactgtacatcactcttcgaattcaaacgagtatggatgggcaagaaattttcttatatctatgaaggcagacctaagacaaactcaggtttattcatgcagtccctctttctgcattgtattggtcatttgacttctcaaagttcactgcaccaaagattggctgggctatactgcctttactgtctgtatgagtgccagccatacaagccgcagttcaagatttacttgtctcttgaggagtgcaggcaactgaaggatatcgttgttatggcgaagcaaaatggactgcagctcgtgcctgcacttgtcaaaaggatgctggataaagacatgtttttgtttggctacatgaatttgatcaacgacaacggggacaagcaggtcgaggaattgaccgcattgcagaacaagcaagtaaaatttgcatgtgacaagttatttgcaaatagccaagcagaaagatatatgcacatggacttgggtgctgagttcgagcttgataccatcaaaaaattgtcaaaggagtatgcagaagcaaaggaactggcccttgcagaggcaagccaaactgtcgaagttgaagatgctaagcacctccttcagagtgagaggctgttgggcgacaagatagatgaagtcgtcaaagaatgggatgtccagaaggaggggttctacgagagaactggattatcctcatcccctggtgaccagctcatggcggtcgacaacgatgaatcaggagctcaatgtcacaaggatggatcctgtggcgatcagctcatggcggtcgacaatgatgaatcgggagtacaggatcacgaggacctcgacgacgacgacgatggctttgccgagttagaactgctgctagagtgaagaacatatacaagtctgtaaactcttactaccgccgtataaccgtgtaatcagaacaccgagagatgtaatcctcgctcgtctttactaggctctcctttttagttgccagaccttctgttcatctacactggctgcagtaactgtacattgaaataatccagttcgccagcctatgcgggggagagaaaaaagaggtgaccttgagtaaaaatgtacatgaacagtgacgagaaaaaacgctggctgcagtaactgtacattgaaacggtagtgtgccagagtaaaaaaa

SEQ ID NO: 88386 - DNA, 1748 bp, Zea Mays
ccgattctcctttcttgcccgcctcacttctgagttccgactctggagcggagcggcagccaaatctcgaccacgtccggcaaccgcgccccctcggctttgcgcccacaccaagccaccctctgttctcctcttccgtggcggactagcggcgcactggtgtggtgctcctccaagctctggtctgctccgcgccccgcctccccgtcgaccggcgactttggccccggcccccgggctaggaagcgagttcaccggtggatccgcgcgtgtccctccctgttacctgcgggtcgccccagccggccacccgcgcccccgcaccctactgacttgggcttgctgtatagcacggaccagatcaagggtcgtcgtcgaccacgtttgaggcttggccatgcctttaaatatagatattgatctgttcaagctggatattgatgagctgatagctgattattccaaggagaactgtacatcactcttcgaattcaaacgagtatggatgggcaagaaattttcttatatctatgaaggcagacctaagacaaactcaggtttattcatgcagtccctctttctgcattgtattggtaggtgctggcttcctgaaagagcatattcctgaactgaatccacacttaccgataatcctttttgtggtcacagctgaactattttccacttaattttgtgtccaggtcatttgacttctcaaagttcactgcaccaaagattggctgggctatactgcctttactgtctgtatgagtgccagccatacaagccgcagttcaagatttacttgtctcttgaggagtgcaggcaactgaaggatatcgttgttatggcgaagcaaaatggactgcagctcgtgcctgcacttgtcaaaaggatgctggataaagacatgtttttgtttggctacatgaatttgatcaacgacaacggggacaagcaggtcgaggaattgaccgcattgcagaacaagcaagtaaaatttgcatgtgacaagttatttgcaaatagccaagcagaaagatatatgcacatggacttgggtgctgagttcgagcttgataccatcaaaaaattgtcaaaggagtatgcagaagcaaaggaactggcccttgcagaggcaagccaaactgtcgaagttgaagatgctaagcacctccttcagagtgagaggctgttgggcgacaagatagatgaagtcgtcaaagaatgggatgtccagaaggaggggttctacgagagaactggattatcctcatcccctggtgaccagctcatggcggtcgacaacgatgaatcaggagctcaatgtcacaaggatggatcctgtggcgatcagctcatggcggtcgacaatgatgaatcgggagtacaggatcacgaggacctcgacgacgacgacgatggctttgccgagttagaactgctgctagagtgaagaacatatacaagtctgtaaactcttactaccgccgtataaccgtgtaatcagaacaccgagagatgtaatcctcgctcgtctttactaggctctcctttttagttgccagaccttctgttcatctacactggctgcagtaactgtacattgaaataatccagttcgccagcctatgcgggggagagaaaaaagaggtgaccttgagtaaaaatgtacatgaacagtgacgagaaaaaacgctggctgcagtaactgtacattgaaacggtagtgtgccagagtaaaaaaa

SEQ ID NO: 88387 - DNA, 1981 bp, Zea Mays
cgtttcgcggccagtctgggtcgttgagcggcaagtcgctgtcgagaagtgagcaattgcaggagtcttgcaggttcttccggcggggtcggacgtgaatccgggctccggccagcacggggaggatgatggacggatcgaggcagcagcggcagaggaggggatcgccagcgccggggaggccgcgcaccgtgccgatcgccgtcacgccggagggcttctggtgctgcccgtcccccgccgcgctgcacaagagcctgctcaagaacccgcaccaccaccaccaccacaacgccaagcaggcgccgacgcctaaaaccccctcggcccctccgtccagagccccctcggtccagaccgcgacgtccgtgaccgacgacgtcgacgaccccgcgcccgccgtggccgaccaccaccacagccaagcggccgccgaggctccggcgccggccacgccaccacagcacaaggtctgcgtcgggttcgggcggccggagaccagcgacctgacggtggtgctgtacgggaaggagggcgtcgcggtcagcatgagcgtgcacagggacgtgctcgcccagagcagcgccttcttcgcgcggcgcctcgccgccgacggccagccctgcgtggagatccacgactgcgaggacgcggagatctacgtggagacggtcggcctcatgtactgcgacgacggggccaacaagcaccggctgctcaagcagagcgtcccgcgcgtgctccgcgtcatgaaggccgccgacgcgctcggcttccccgcctgcgtcaggtcctgcctcgactacctggaggccgtcccgtgggccggggaggaggaggagcgccgcgtcgtgtcctcggtccgccgtctccagtgcacggacggcgccggagtcagcccgctgctgaggagggtcgcctcctccgactccggctgtctgagaccgcccgccgacacgttcgcgcacataacggagatggtgctggcgagcaccgacgagcggggccggcgcgagacgaaagccctggtcttgagcctcctgaaagacagcactcgcggccacgtcggcggcggcgccgacggatcaccaccaacaccgggcatctcctcttccgagacgttgtacggctcgtgccggggctgcctggaccggctccggcggctgctcgcggaagcttcgtccgagccggcgtactccgccgccgtcgcgcggcggatcgcgctggaggccgacaacctcgtgtggctggtggagatgctggtggcgagccagcgcgcctgcgacggcttcgtggcgctgtggtcgggccaggccgagctggccgcgtcgcacgccggagcgccggcggcgtcccgccacgctgtgagccgcgtcacggcgcgcctgttcgtcggcgtcgggagaggggagatgctcccgcctagggacgcccgcctgcggctcctccaggtctggctgcagccgctcatcgacgactacgcgtggctgcagcgcgccggcggatcccggccggcggcgttcgacaggaggctcgtggaggacggcatcgggcagacgatcctgacgctgccgctggaggaccagaggtccttgctgctggcgtggttcggcaggttcttgaagctcggcgacgattgcccgaatttgcagagggcgttcgaggtgtggtggaggaggactttcgtcaggccgtatgcatgttcttcgtcaggctgattctgacgcgggtgatattttgacatcagatcagatagaagctcagcctgaaatgctagcggcactagcttagctgttgatcatagattgtttgggagaaaccctttctgaatgttgagtgtattgtcttcgttagtccatctgacatgaaagttggcaagaatttggctgtgtgtttttgttctcagcagcattaacattaggtgggtctactcggatagtaatgaattcttgaatggaaaaagatattacttgctcatgtt

SEQ ID NO: 88388 - DNA, 674 bp, Zea Mays
agagaccaaaagggttatgttgactcaacatcatctagctccaagaagcggaagaaagagtggaaaggaatgaagacttcatcaagtgacccgcttcttgatgtgttcaatgaagtgagtggtgatctcaaggttgccactatgtcaattggaaaaatggcgcaagctatggatcgtgaggcatccaaccaagagaaggcaagagatgaggatccacaacaaaagctaagagagaaggcgatcaatgaggtctggagacttgaatttactggctcagaagttatcaaagcagctggtgtgtttgtcaggatgccagatcaaatgggtatgttgtttgcacttccagaaccactgaggagggaatacattgtcgacatgctacgtgatgaagcagcaaggagagagagagagaggtcaaagtgaaggtgctggtctagatgttgaatgatggagctttggaagttgctgttggtttggttggtctcaatctgtttacctttagtgttcttcatatgttgctgttgaatgacggtgaatgatgataaaaactgaatttttatgatgttgaatgttgttgaatgttcacgaatggtgttgaatatggtattgtatctatggtttgttgaatgtcggtacctttcaatatggtaaaaactgaatttttatgagttttg

SEQ ID NO: 88389 - DNA, 393 bp, Zea Mays
atgtgtatgacgaaatccctcgacaaagccaagtgctggggtaaccgcactgccgctctcaatgcctctgccgccttggtgaggccaacaaggagtgtgaggaggcgctccagattcatctatcctacggccaacaaggtgaatggattgcttgggtcttgggctagccggcacaaagattccttctcggatctcaagcaacttccagactgcagggaaaacaagctgtcaaatattgagataattgtagcagacatcagtaagtttgagcacatgaaaaactacaagtcgcttcttaagaagatatccaggtggatgaaagaggatggcctactattcgttcaccgcgcctgccataaaacatttccatatcactttgaggtagaagattaa

SEQ ID NO: 88390 - DNA, 2362 bp, Zea Mays
gcgtctcccccccgcacgctcctcctcatccggcctcgcgagcgcgcgagggagacgtcgctgtgccagcgcgaggcggacgtcacctcacctccccgccccgcgtagcttttctgacccggatgctacgctgcgtctccactactccgcctcccgccctgccgtccatgtcacgcctcggctccttcctttcgcctcccgactcctgcctgctgccccttgtcctcttccccacctcctccggaatctggccgcgcacctactcgtcgccctctcgttttcccgtctccgctttctttatcctgcgggcggagcgggtagggtggggcggtcgttgctctcggatcaagagaaagggaggaaaaaaaaacagcgctttctttctgtggccggcggttcgcccgtcgctcactggctgaagcggctgcacccgcgccctcttgctgtgtggccactggccaagcgggacacggaactcgagctccgtttggggattccggatcacttcgaggctaaagggattctgatcatcacttaagctcaagatcatgagttggttaaacaaaatttttaagggttcagtaaacagagtttcaaggggtcactatgatggagactggcatgaaggtcattcatctgatcacaccagagatacttacgatgacagtgataatgaagatatagatcgtgccattgcattatcgctagctgaggaagatcataataagggaaagtcggtggctattgatactgactataatctggaggaagatgaacaacttgcacgggctctgcaggaaagcctgaatgcagagtctcctcctcgacagaatgttcctattgaggatgtgccagtgcctcaatggaatattcctgttgagcgggtgcctcctcgacagtatgttccagcaaatgaaccaaccccacatgtttacccacggggtggatccaggatttgtgctggatgccaaaacccaattggccatggacgtttccttagttgtatggattcagtttggcatcctcaatgcttcagatgttttgcttgcaacaaacccatatcagagtatgagtttgctatgcatgatgatcagccataccacaaatcctgctacaaagagttttttcatccgaaatgcgatgtttgcaacaactttattccaacaaatagagatggcctcattgaataccgagcacatcctttctggatgcagaagtactgtccttcccatgaagatgatggcactcctcggtgctgcagttgtgaacgaatggagccaagggagatcaagtacataacattagatgatgggaggaaactctgcttggaatgtctcaattctgcagtaatggattctccagaatgtcaacatctttacatggatattcaggaattttttgaaggtttgaacatgaaagtagaacagcaaattccattacttttggttgagaggcaggctcttaatgaagccttggaagccgagaaaaatgggcaccacctaccggaaaccagaggtctatgcctttctgaggagcaagttgttagaacgatcttaaaaagaccacagattggaccaggaaacagaatcttagatatgattataggaccatacaagctgtctcggcggtgtgaagtgactgcaatccttatattatatggtctgccaagattacaaactggttccattcttgcccatgagatgatgcatgcatatcttcgtctcaaaggattccgaaaccttagtattgaggttgaagaaggcatctgccaagttctatcccacctgtggttagagtcggaaatcatcgctggttctagtagcaacgttgcatccagttcagaagcatcatcatcttcgtcatcctcagctcctacctcttcaaagaagggtgcgaagaccgaattcgagaagaagcttggggcattcatcaagcaccagatcgaaacggattcttccgaggcatacggaggtggttttagagctggctatccggctgttgagcgctatggcttgaaaagaacccttgatcatatgaagttgacagggtctttcccatattaaagcaacagaagtaaaggagggggctttcttccagttgtgaggatacactccacattggaggttttggtttgggttatacataactgatatgcataccaaacgaggggaattgtctgtaaatcaggagaaccctctgctgcgcggaaacttattgcaaactgtctttttataggaaaacgatacatgcaagttttcagacagggaacttgagaggatcatatgtaatttttgggcacttgtttttgactcctttggttatcaaaaacaaggcaacataataagattgaaatttatcttca

SEQ ID NO: 88391 - DNA, 2263 bp, Zea Mays
actccgcctcccgccctgccgtccatgtcacgcctcggctccttcctttcgcctcccgactcctgcctgctgccccttgtcctcttccccacctcctccggaatctggccgcgcacctactcgtcgccctctcgttttcccgtctccgctttctttatcctgcgggcggagcgggtagggtggggcggtcgttgctctcggatcaagagaaagggaggaaaaaaaaacagcgctttctttctgtggccggcggttcgcccgtcgctcactggctgaagcggctgcacccgcgccctcttgctgtgtggccactggccaagcgggacacggaactcgagctccgtttggggattccggatcacttcgaggtcacgaggtgtatgccctttgctaatactgtagtacagaaacggctaaagggattctgatcatcacttaagctcaagatcatgagttggttaaacaaaatttttaagggttcagtaaacagagtttcaaggggtcactatgatggagactggcatgaaggtcattcatctgatcacaccagagatacttacgatgacagtgataatgaagatatagatcgtgccattgcattatcgctagctgaggaagatcataataagggaaagtcggtggctattgatactgactataatctggaggaagatgaacaacttgcacgggctctgcaggaaagcctgaatgcagagtctcctcctcgacagaatgttcctattgaggatgtgccagtgcctcaatggaatattcctgttgagcgggtgcctcctcgacagtatgttccagcaaatgaaccaaccccacatgtttacccacggggtggatccaggatttgtgctggatgccaaaacccaattggccatggacgtttccttagttgtatggattcagtttggcatcctcaatgcttcagatgttttgcttgcaacaaacccatatcagagtatgagtttgctatgcatgatgatcagccataccacaaatcctgctacaaagagttttttcatccgaaatgcgatgtttgcaacaactttattccaacaaatagagatggcctcattgaataccgagcacatcctttctggatgcagaagtactgtccttcccatgaagatgatggcactcctcggtgctgcagttgtgaacgaatggagccaagggagatcaagtacataacattagatgatgggaggaaactctgcttggaatgtctcaattctgcagtaatggattctccagaatgtcaacatctttacatggatattcaggaattttttgaaggtttgaacatgaaagtagaacagcaaattccattacttttggttgagaggcaggctcttaatgaagccttggaagccgagaaaaatgggcaccacctaccggaaaccagaggtctatgcctttctgaggagcaagttgttagaacgatcttaaaaagaccacagattggaccaggaaacagaatcttagatatgattataggaccatacaagctgtctcggcggtgtgaagtgactgcaatccttatattatatggtctgccaagattacaaactggttccattcttgcccatgagatgatgcatgcatatcttcgtctcaaaggattccgaaaccttagtattgaggttgaagaaggcatctgccaagttctatcccacctgtggttagagtcggaaatcatcgctggttctagtagcaacgttgcatccagttcagaagcatcatcatcttcgtcatcctcagctcctacctcttcaaagaagggtgcgaagaccgaattcgagaagaagcttggggcattcatcaagcaccagatcgaaacggattcttccgaggcatacggaggtggttttagagctggctatccggctgttgagcgctatggcttgaaaagaacccttgatcatatgaagttgacagggtctttcccatattaaagcaacagaagtaaaggagggggctttcttccagttgtgaggatacactccacattggaggttttggtttgggttatacataactgatatgcataccaaacgaggggaattgtctgtaaatcaggagaaccctctgctgcgcggaaacttattgcaaactgtctttttataggaaaacgatacatgcaagttttcagacagggaacttgagaggatcatatgtaatttttgggcacttgtttttgactcctttggttatcaaaaacaaggcaacataataagattgaaatttatcttca

SEQ ID NO: 88392 - DNA, 2211 bp, Zea Mays
atgtcacgcctcggctccttcctttcgcctcccgactcctgcctgctgccccttgtcctcttccccacctcctccggaatctggccgcgcacctactcgtcgccctctcgttttcccgtctccgctttctttatcctgcgggcggagcgggtagggtggggcggtcgttgctctcggatcaagagaaagggaggaaaaaaaaacagcgctttctttctgtggccggcggttcgcccgtcgctcactggctgaagcggctgcacccgcgccctcttgctgtgtggccactggccaagcgggacacggaactcgagctccgtttggggattccggatcacttcgaggtcacgaggctaaagggattctgatcatcacttaagctcaagatcatgagttggttaaacaaaatttttaagggttcagtaaacagagtttcaaggggtcactatgatggagactggcatgaaggtcattcatctgatcacaccagagatacttacgatgacagtgataatgaagatatagatcgtgccattgcattatcgctagctgaggaagatcataataagggaaagtcggtggctattgatactgactataatctggaggaagatgaacaacttgcacgggctctgcaggaaagcctgaatgcagagtctcctcctcgacagaatgttcctattgaggatgtgccagtgcctcaatggaatattcctgttgagcgggtgcctcctcgacagtatgttccagcaaatgaaccaaccccacatgtttacccacggggtggatccaggatttgtgctggatgccaaaacccaattggccatggacgtttccttagttgtatggattcagtttggcatcctcaatgcttcagatgttttgcttgcaacaaacccatatcagagtatgagtttgctatgcatgatgatcagccataccacaaatcctgctacaaagagttttttcatccgaaatgcgatgtttgcaacaactttattccaacaaatagagatggcctcattgaataccgagcacatcctttctggatgcagaagtactgtccttcccatgaagatgatggcactcctcggtgctgcagttgtgaacgaatggagccaagggagatcaagtacataacattagatgatgggaggaaactctgcttggaatgtctcaattctgcagtaatggattctccagaatgtcaacatctttacatggatattcaggaattttttgaaggtttgaacatgaaagtagaacagcaaattccattacttttggttgagaggcaggctcttaatgaagccttggaagccgagaaaaatgggcaccacctaccggaaaccagaggtctatgcctttctgaggagcaagttgttagaacgatcttaaaaagaccacagattggaccaggaaacagaatcttagatatgattataggaccatacaagctgtctcggcggtgtgaagtgactgcaatccttatattatatggtctgccaagattacaaactggttccattcttgcccatgagatgatgcatgcatatcttcgtctcaaaggattccgaaaccttagtattgaggttgaagaaggcatctgccaagttctatcccacctgtggttagagtcggaaatcatcgctggttctagtagcaacgttgcatccagttcagaagcatcatcatcttcgtcatcctcagctcctacctcttcaaagaagggtgcgaagaccgaattcgagaagaagcttggggcattcatcaagcaccagatcgaaacggattcttccgaggcatacggaggtggttttagagctggctatccggctgttgagcgctatggcttgaaaagaacccttgatcatatgaagttgacagggtctttcccatattaaagcaacagaagtaaaggagggggctttcttccagttgtgaggatacactccacattggaggttttggtttgggttatacataactgatatgcataccaaacgaggggaattgtctgtaaatcaggagaaccctctgctgcgcggaaacttattgcaaactgtctttttataggaaaacgatacatgcaagttttcagacagggaacttgagaggatcatatgtaatttttgggcacttgtttttgactcctttggttatcaaaaacaaggcaacataataagattgaaatttatcttcatctttaaa

SEQ ID NO: 88393 - DNA, 1705 bp, Zea Mays
gatccttccgccgcctccccctcctgacagagcagaggcagagctgaggcccggcctggccgggcttcggcggcccagcccaaataacccgacgggtccgcatcctgagctccgcctccacacaccttggcacctcgccctcgcctccagctccgcacgtcccgtcgcccgcttccacctccacgcgacgcgacggctcgccttcacctcctcgccgccagacgcgcccgccgccacccagcgagccggcagccgcccgctatcccaggcttcgttttcttgttggctccgccactgtgacagatggctgcggggggcgggcggtgcttgctcgccttggcgctcgccgccgcttggatctccggcgcggtggtcgccgcctcatcgtcgggtgagcaggtacgtaaggggtggatgggcgctcctggttcacgccaattttactcgtgcgcagtttttgtgcggaaattatgatctttcgttgattcggatttgctagagccggggccgtgatgcgcgttcatgtatagtgtctggaaagggctacggaaagcgttcgtttttagctcatgctgaattttaccgtacctgtaagctgaaggcggaagccgcacacccgtcaaatgcatgccctgctctagaacgtacattggtggtgcacatctggacaccttgacgggccagcttgctcagcgtcgtgacatagtggaaatgtctgattctggtgaattgtgcaaaggacttgctgatgatgtcgaagttcctatgctttcaaaactacgccggcaactggttggtaaaggttctcaccgccgtttagtctattctgtggattttggtgcccatgaaggtgctatggttaatttccttgatcactacgatgcccatctggtgatatttgaaaaacttcctgatggagtgtttgccgacccatttgagctacagcattttgttgagcgcaaagttttcgttgatgttgctgtttttggagacgccaaccttgaactgcccacagctctatccaatgggtcatctgttgagatccattttgatctcaggcgaatcatttcaatcaactgtaaccttgtaatagagatgcctctccatgctagatacccgcctcttgatgccagtggctatgccacagtggagtttggtagcgcagatctattcctccgctacagaaaaaaggacatccattctggttcctgtctttgggtgatcaataatctcaaagctgcacccctggagaaagctgcatggcgcataccctgtggagacgaggcccacataggatttgtatctagcatcacgtttctttcagctcttgtttgctccatgtccattgtcttggcttctctcattttttgacgtcttagggtcctatcagaccttttttttgtttacataaatactgaagtgcgagacaggagaattctcttcatgcatccacacatccttgcaaatgacaacccagttgccattaattttgctagctttagtggagtctttgcaagttccattgaacggagttgccaacttcgaatcacatacagaccagaaccagataagggtgttcctctttgtgatggaaaaaggagtcccaaaagaaaaatcatctacttcaagttcggtttgtgctcatgagtcatgaggcagtcagagccagaagctgaatgccaccatcatcttggaagaaggcaag

SEQ ID NO: 88394 - DNA, 1507 bp, Zea Mays
gatccttccgccgcctccccctcctgacagagcagaggcagagctgaggcccggcctggccgggcttcggcggcccagcccaaataacccgacgggtccgcatcctgagctccgcctccacacaccttggcacctcgccctcgcctccagctccgcacgtcccgtcgcccgcttccacctccacgcgacgcgacggctcgccttcacctcctcgccgccagacgcgcccgccgccacccagcgagccggcagccgcccgctatcccaggcttcgttttcttgttggctccgccactgtgacagatggctgcggggggcgggcggtgcttgctcgccttggcgctcgccgccgcttggatctccggcgcggtggtcgccgcctcatcgtcgggtgagcaggaaggcggaagccgcacacccgtcaaatgcatgccctgctctagaacgtacattggtggtgcacatctggacaccttgacgggccagcttgctcagcgtcgtgacatagtggaaatgtctgattctggtgaattgtgcaaaggacttgctgatgatgtcgaagttcctatgctttcaaaactacgccggcaactggttggtaaaggttctcaccgccgtttagtctattctgtggattttggtgcccatgaaggtgctatggttaatttccttgatcactacgatgcccatctggtgatatttgaaaaacttcctgatggagtgtttgccgacccatttgagctacagcattttgttgagcgcaaagttttcgttgatgttgctgtttttggagacgccaaccttgaactgcccacagctctatccaatgggtcatctgttgagatccattttgatctcaggcgaatcatttcaatcaactgtaaccttgtaatagagatgcctctccatgctagatacccgcctcttgatgccagtggctatgccacagtggagtttggtagcgcagatctattcctccgctacagaaaaaaggacatccattctggttcctgtctttgggtgatcaataatctcaaagctgcacccctggagaaagctgcatggcgcataccctgtggagacgaggcccacataggatttgtatctagcatcacgtttctttcagctcttgtttgctccatgtccattgtcttggcttctctcattttttgacgtcttagggtcctatcagaccttttttttgtttacataaatactgaagtgcgagacaggagaattctcttcatgcatccacacatccttgcaaatgacaacccagttgccattaattttgctagctttagtggagtctttgcaagttccattgaacggagttgccaacttcgaatcacatacagaccagaaccagataagggtgttcctctttgtgatggaaaaaggagtcccaaaagaaaaatcatctacttcaagttcggtttgtgctcatgagtcatgaggcagtcagagccagaagctgaatgccaccatcatcttggaagaaggcaag

SEQ ID NO: 88395 - DNA, 1605 bp, Zea Mays
gatccttccgccgcctccccctcctgacagagcagaggcagagctgaggcccggcctggccgggcttcggcggcccagcccaaataacccgacgggtccgcatcctgagctccgcctccacacaccttggcacctcgccctcgcctccagctccgcacgtcccgtcgcccgcttccacctccacgcgacgcgacggctcgccttcacctcctcgccgccagacgcgcccgccgccacccagcgagccggcagccgcccgctatcccaggcttcgttttcttgttggctccgccactgtgacagatggctgcggggggcgggcggtgcttgctcgccttggcgctcgccgccgcttggatctccggcgcggtggtcgccgcctcatcgtcgggtgagcagagccggggccgtgatgcgcgttcatgtatagtgtctggaaagggctacggaaagcgttcgtttttagctcatgctgaattttaccgtacctgtaagctgaaggcggaagccgcacacccgtcaaatgcatgccctgctctagaacgtacattggtggtgcacatctggacaccttgacgggccagcttgctcagcgtcgtgacatagtggaaatgtctgattctggtgaattgtgcaaaggacttgctgatgatgtcgaagttcctatgctttcaaaactacgccggcaactggttggtaaaggttctcaccgccgtttagtctattctgtggattttggtgcccatgaaggtgctatggttaatttccttgatcactacgatgcccatctggtgatatttgaaaaacttcctgatggagtgtttgccgacccatttgagctacagcattttgttgagcgcaaagttttcgttgatgttgctgtttttggagacgccaaccttgaactgcccacagctctatccaatgggtcatctgttgagatccattttgatctcaggcgaatcatttcaatcaactgtaaccttgtaatagagatgcctctccatgctagatacccgcctcttgatgccagtggctatgccacagtggagtttggtagcgcagatctattcctccgctacagaaaaaaggacatccattctggttcctgtctttgggtgatcaataatctcaaagctgcacccctggagaaagctgcatggcgcataccctgtggagacgaggcccacataggatttgtatctagcatcacgtttctttcagctcttgtttgctccatgtccattgtcttggcttctctcattttttgacgtcttagggtcctatcagaccttttttttgtttacataaatactgaagtgcgagacaggagaattctcttcatgcatccacacatccttgcaaatgacaacccagttgccattaattttgctagctttagtggagtctttgcaagttccattgaacggagttgccaacttcgaatcacatacagaccagaaccagataagggtgttcctctttgtgatggaaaaaggagtcccaaaagaaaaatcatctacttcaagttcggtttgtgctcatgagtcatgaggcagtcagagccagaagctgaatgccaccatcatcttggaagaaggcaag

SEQ ID NO: 88396 - DNA, 828 bp, Zea Mays
aagagaacacgcgcggcacgggcgcaccgcgcaccccgaccccgcacaccgacgacgaagagaggagaggaggcggagctcgagcccaaccgcgcaactcacttccccgtcgcgatttgcattgccctcctcttggcccccgatctcgccgtgccctacccccagcctcgctccgccgccaccagagagatagcgccccccattcccacaatctaatccttccgtccctcgaggagccgagccctccgcgcggccgtgggatggggcggtgacaacaccggtgagtggcgtggggcagggagccggtggcgagggcatatcatggtgcagtgcctggacggggtgaggcagctgctcgcggtcctgctcaagtgctgcgacgtcgagctcaagcagccgcccgggctcgaggaccctcaggttctcgcgagggagaccgtcttcagcgtgagcgaggtcgaggctctgtacgagctgttcaagaagataagcagtgctgtcatcgatgatgggctgattaacaaggaggagtttcagttggcactatttaagaccagcaagaaggagagcctgttcgcagaccgcgtatttgatttgtttgacacaaagcacaatggaattttaggatttgaagaatttgctcgtgctctctcagtatttcatcctaatgctccccttgatgagaaaattgacttttcattccggctgtatgatctcaagcagcaaggctacattgagagacaagaggttaagcagatggttgttgctacacttgctgagtcaggaatgaatctttcagatgaaattgtagagagtataattgacaag

SEQ ID NO: 88397 - DNA, 198 bp, Zea Mays
atggcgacggcgaatctgaggcggcggcggctcaatcgggggcagcggcagctgaatggtggggagagaggcaacctagggttgccagaggaaggattatatgggctggctggtgggctgggcctcctaccccttccttctccttttttctttttctttttttctttttcttcctcctccatggggctgttttgctga

SEQ ID NO: 88398 - DNA, 563 bp, Zea Mays
ttgcttttgctatatttggacagggacatcaccacaacatttccaagctttgtctttcactcccaagttgatgataactgattttcatgggattattttggcaagaagtattagaagatattctcgtggggttctgatatggttttctttttcaattattgggttgttggattgactgagatcgtagtgctcataagtatgttggatgttggattcgagaactcaaatcttttgtcaaccatgtttctttcatttgcatgtctggatgcgcttggaaaatatatgtagtatatgtccaaagttttcctttttttttgttatttttggctggcccgcaatcggatccagttcttagaagcttctgtcttttgtacaggttagaaagtgttttgaggactaatattgtgcttagacctctttttagacttcaatcgtagctcgagcagattttttttttaggtgtgtacttgtgtgcttccatttgtttttgagatatgcatgtgttttatctccaattcattctttctcccgttacttctcaaaacattttagtttccgagtat

SEQ ID NO: 88399 - DNA, 1344 bp, Zea Mays
caaagactcaacacaagcaccccctcgccgcagtcccgccgttacatggcccgctctgttcccctttccggcgcccgcgacggactgcgacgagcggatagatagatctgtgccccgtccctgtctcgccatcctcctttctcctcctccactccatatcgagcagagcgaatccttagcggggaagtctttccgagctcggggagtggggtttaaaacgcggctcgacaaaaggaaggccacactcgctgctgctgctagtcgcttgctttcggtggcgagcgtctcggtaaagcggcgtcagcgtcggaggcagcggcagagactggacttgctagctgcgcagtgtagtgttgtgctaccttggagacaggatcctgttgcaggtatcagggcttcttctttcttgtggttctttggtgcccatggtttttccggctcccattctcccgtccctgcttttgcattcccaccagtgctctgttccttgcgaagatgtgaagcgattttttgcaaagatatgataagcggcgagtgatgctttcacgcacaagcgagaagcgagatgcctgaaatctgaaaacaattgcagcatatgaggcgccgtgatttctttaacacgcgcagccgcaagaaacgggagtaccgttttttcctctctagttgttgtgacatggactcataattgatcagtgtgccccaacataagagcgaaacgtgactgagtttgccagctccaccttcatccactgtggtcgctcgtgtgcaaatgcccgcattggaggattgctcacggatatgcttctggtgatgggcaacccggggcgctcgcggcagttgtcaacgctggttgcttccgccgccatcttgctgtcactatctgcattgccaatttgttggccctacacctacgaacaagatggtatgcaacatccttttttgtttgttgccactgtttttccaagattcagtattcagcaggccatcagggtcgcatcgccacgggcgagcttcgtgacagcgctgcgctccctgggccagaacgtggacgaggcggaggcgcgacgcttcctggaggacgcgggcgtcgccgcgggcgccggcgacatcgaccttgcggcgttcctggccgtggcggcgcgcaagatgggcgccaggcagtcggaggcgcgcctcgccaagtgcttcgacgtgttcgacgacgcctgcagcgggtccatccccgcggagcagctgcgacaggtgatgctagtggtcgacgccgcgcttcgcgccttgcccgttcgacaaaatgccgagccatgtggacagcccatgcgtctagtcacgactcgttcaggttga

SEQ ID NO: 88400 - DNA, 1834 bp, Zea Mays
gacgaggtaggcttttaggcggctacgatccgatttgtacgcctcaactagacctcactcgtacgccgccgccccctccaccgccgtcgtgcgagagggaggagggagctctggacctccgtggggcgtggaggagtgggacgacgcacgcggaggcagccccggtcggttgctgctgtatccgtccaggatcgggggaattccaggaggcaggaaggaaagttggagtgctacatagctgagtaccacaggtgatagattgatggctggcgctttggctgaggacaatgctggggatggtagatcctcatcaactgaagagatgtcaagtgatgaccagattcattccgagaatcctctatctgagtggaggtccagtcagcaagttgagaacagagtaccgcccaccttacggatttacttgggcaatgatgatgatgatgattttagttatggacctaggccttctgaactttatggaaagtttacatggagaattgattatttctcccaaatcaacaggagtgagctaaggagcacttcatttgatgtcggcgcatataagtggtatatattaatatacccgcgaggatgtggtgtctgcgatcacctctctctctttctttgtgctgaccataataagctactcccaggatggagtcactttgcgcaatttacaatagctcttattaataaagaccctaagaaatctaagtattctgatacactgcatcggttttggaagaaagagcatgattgggggtggaaaaagtttatggagctgtcagaattacacgatggctttattgttcaggatgctcttaccatcaaagcccaagttcaagtcattagggagaagatagaccgtccatttcgttgccttgatggccagtaccgaagggaactaattagggtgtatctatcaactgtggaacaaatttatcggcgttttattgatgaaaaaagaaggatgttcagcaggctgattgaggataaactcgggtggtccagtttcagtggattctggctagcaatggatccaagtgtgcgtcggcacatgacacgggaaaagactgaaactatattgaaagttgtagtgaaacagttctttatagagaaagaagttacatcaaccttggtatttgactcgctatatagcggacttaaggcacttgaataccagagcaacaacaaaaaggggatacctaaaataacagaggcagatgctcggagcactccaatggtgcttattgatcaagacatgtttgttttggctgatgatgcgctactgttgtttgaaagagctgcattggacacacaatcacaccaaccattgcccaaaaaagatgataaaggatcaccgaaccgtacaaaggatgacacctcaagtgacgagtttgacaaagattctattgagcgtgatgatagatggcttgaagagctaggctgcaagacactggaactttttgccgtaactcatatattcagccgagcagaagcggcgtaccaagaagcgatggctttgcagctccaagaggaactcattcgtgaagaagcatccgagcgagctggaactgaacttaagccaaagcgtcgtgctgctgataagaaaaggcgtggcaagaacatgtgaagtgttatattttctttttaaaaaactagcaataattcatcggatgctaggctatttcccctcattttttgtgaacagacatatatatgccgccgttcgtagattctagtctcgtgcattccctttgagaatgtaagattgaagtgtgtttttccattggttgatctcaggtttatatacatgttattaggctgggttcaa

SEQ ID NO: 88401 - DNA, 221 bp, Zea Mays
gttgactttctggcgccaaggatggactttagttcgttatatatttatcttttatcctgtaagacttccgctatgtaataaatactctgattatattgtgacatttatctctatgcactctgttgtctcttttggcgcatgtatgagatgcacccgactttgtcccttaaatctgggtgtgacaatagcatgggtttattttagataatacataatcatga

SEQ ID NO: 88402 - DNA, 3057 bp, Zea Mays
atgcgccggtacggggacgcacggaggggcggagaaggtagagcaggcagggcgggcgtggacgcctcgacacgacagcttgggggcatcttgggcgcggacccagggaggcagagcaggaacgagtggggcgcgcacggacttcccgacgtctcggtggacgcggactcggtgggaggacgacggttgtctcggtgggggaggacggcgacaatctcgggagagggcgaggggcagcgcgatagctgtctcgggagatgggaccaaggacacggtttcagtggattctggttagcaatggatccaagtgtgcgtcgacacatgacaagggaaaagactgaaactatactgaaagttctagtgaaacaattctttatagagaaagaagttacatcaaccttggtaattgactcactgtatagtggacttaaggcacttgaataccagagcaagaacaaaaagggcatacctaaactaacagagacagatgctcggagcactccaatggtacttattgatcaggatatgtttgttttggctgatgatgtgatacttctgcttgaaagagctgcattggacacactgccacaccaaccattgcccacgaaggatgataaaagttcacaaaaccgcacgaaggatggcaactcaggtgaggagtttagcaaagattctattgagcgtgatgatagacggcttatagagctaggctggaagacattggagctttttgccttgactcatatatttagccgaatagaagtggcacatcaagaggctgtggctttgaagcgccaagaggaactcattcgtgaagaggaagcagctgggctagctgaaattgaacttaaggcaaagcgtagtgctgctgaaaaggaaaaacgtgccaagaaaaaacaggcaaaacagaagaaaaatagtcgaagaagtaataaagggaagagtggcaagtctgacatcaataaggaaatacttatgtacagcagtccttcaggtgatagaatcctggatgatttttctggacaaacggaagaaatgtcctcaaatgctgacaaccctgaagaagtttctgatatatctgacagcagagacgataattcagatgcgcttcatgttgatattgaagaccgtgaaagtagccctgttaattgggagacagatgcttcagaaactcaagctactgtgcctggaagtagtgaggtgcaaaatgaccatgcagggaagaggacctctactgtagatgatagctcatcgacttgttcatcagactcagtcccttcagttatcgtgaatggatcatatacaggaggtgcctggacaagcgtcagatccttatccaataggggaaacaaccggaggaataaggatactgaagcacgggcagcacttgcacaaggtggatcaagttcagcgcataatggttttataggatctggcggcagtgcctctggccactcaaaggaaagatacgaacctgaggatgataaagttgtcatgcagaggaagcaacatgcacggcacattgatgtcattagcccctctaagtcaagaatggcagtgtcttcattttcttctgtgagccctgttaagaagcaacctaacttgtctcatcagccaaaatttttgctagaaagcaccaatagttcaaatcaccgtgcaagcgaagtttcaggcgccgtgactgccactacaacagcaggtgcctcttcaaccctggcagctcagttagtttcaaataaaggacctgtatccagtgctgcaacccggaatgagaagccagttctagttacaaataaacccctgcaggttcttgtaccatcaaaatctgaagcgcagaaacaggcttccctaactggcagcgcaagcactcaggtcgtttcggtatcaaggcccttgagtgccccgcaagtccctgcagcaaaacaaagtgtgccagccacaacagctcagaacgcacctcttctttctcgctcagtgagtgctgttgggcggttaggaaatgagccctccgccaatgctcctagcttcattccccggtcacgaacctatcgcaatgccatgatggagaaaagttctggtggcgtaagcagtctcacacatcagcaaggttcatctgagcaggccgtcgcaccatcccaatcgatgtttacatcgcagccttccattctgtcatcggagaccttgtctatgaaagaggaaacgtcgttgagacctgggtttacatttggaaccgtaaagcccgagtcactgaacccttaccagggcagagaagagaactcactgcaagcgagcagcagcagcagcagtgactgtacgccatcgagttcgaacatcagaagtgagatcgcgaagctcagtttgaacggaagatcacggagcaagcaactcctgtctgaaatctctaccagatttactccctaccagccacaaggcttggtagctgacgagttcccacacctggacatcatcaacgacctgctggatgaggagcagagtgacaggagaagggttcttcagcctggtttcgtccagcaattctctgtgcataacggcgtcagcgcgcctgattatggcttgttcagtgagccgtacctgttcgaccggtccgagcagtactttgacgaggagcctccaaggttctacagtccattgagcagcgctcctcggaggatgagggaccggagctactcgcacttcgatctcccttcatactccaggagcagccagcttgatggtctattgatgagccagtggccgccatacagccgcgccgacctcgccatgcctggttttgggtcagacacaggtggctactcctatcagccgcagggtttcccgagtccagcgagtgcagcaagcagatacccgtcgtatcgccctgccaatgggcattgagagttttagcgattgcaattggtaataatgtgtggtggagtccatgctgctcgcttctgagctgagtgtaattgtaatagtccccccatagcagtgatataaagaatggttcctctgttttattcaatccatagttatatcatttgcctctctttttctata

SEQ ID NO: 88403 - DNA, 821 bp, Zea Mays
atcagcttgaccaatagccatggcgagatcccgagagtcgaggaaggcagagagcgccaccggggatcgccgtcgatgatctacgcgtacaccgccgcctgggtcccgtcgtatgacttcggggattcacaccggtgcatcgtgtgcgcccgtggcatcgttttgcgaggaaaagtagtggatcgcggggagttgctcaccgaacttcaagaagcaccacggaagcgcgctacaccgtggccggggacttctgtgccagcaaccacggtgagaacctcctctgccaactcgcgttagtctttgcttcgcataggtccggtaggattagaagcttgggggcgggtgcgcggaaccgggtgctccggtatggcgccgccgtgaggtgtgcgcgcaccgccgcctggtctcgctgggtggagaatatgtgccgctggccattggctgttggattggtcgccaacggtgtggaacagagagctatggtaaaatcctgtgcgtagatcggcaaagcaaggatgtagattagaagcatccatacccattcgtgatattaaatcagagccgttggttggtagttgggatgatcagatttgcgggtggcgcagcgcaatctcggccatggatcagagatccgagggccagcattttcgtaccaggtcatgtatggcacgatctaatcgtggtcgtgggatttggatcctatggatctaatcggtcgaaaccccttcgccatgctattttttagaagaaaccccgatgagtgattaaataaaacccgcagtccatagctattataaaatcattacaagctagtcctttta

SEQ ID NO: 88404 - DNA, 617 bp, Zea Mays
gccatggcgagatcccgagagtcgaggaaggcagagagcgccaccggggatcgccgtcgatgatctacgcgtacaccgccgcctgggtcccgtcgtatgacttcggggattcacaccggtgcatcgtgtgcgcccgtggcatcgttttgcgaggaaaagtagtggatcgcggggagttgctcaccgaacttcaagaagcaccacggaagcgcgctacaccgtggccggggacttctgtgccagcaaccacgtgttggggatcttcttccccgccgaaggtcatcaaggcaaaaacaccttcagcaagataatacaaaggcatacgcgacatgacgatgcgaaagaaagccgaagctatggctgaagaagcttcagcttagtattatgacgaagctgaaggtcgtcaccgactcaagggaaaaataatgtttagtccttgatcactcgcattatgattgcatgtaaatgtcagggatataaatgtaattgtgtctgagccgcgtcccacacctataaatagatgaacagtaccctcgtactgttcacgctggattgtaatctctctcgcgtcatctttgcattatcaccttctggcgaaccaaaggtattcttgtatt

SEQ ID NO: 88405 - DNA, 2245 bp, Zea Mays
ggcggcgatggccaaccacgagctggtcctcggacacgggcaggacgcggagctggcgctggggccgaaccaccacgacttcggccacagccacgacctcgacctgggcggccacgcgcacgaccacgagctcgtcctgggccagtcgcacgagcacgaccacgagctcgttctgggccaatcacatgagcgtgaccacgagctcgtgctgggccagtcgcacgagcacgacgacgagctcgtcctcggccaccaccacgatgatgaccaccagctcgtcctcgggcacgaccatcaccaccaccatgacgagctcgacttgtcggagagccacgagctgacgctcgccgagacgcaccacctgggtgttgaccataatctcgaccagctctcgctcgagcaggctcacgagctcgcgctgcagccacacgacttctcccagggtcctctcgcggtcgctcctgtcgtccagtcgcggaccatggtcgtgagccccgagttccagctcgcagtggggcaggagttccccgatgtgatgagctgccgcagggccatccgcagcaccgccatcgcctgccacttcgagatacagacggtcaagtccgacaagacccggttcaccgccaagtgcgccgccgagggctgcccgtggcgcatacacgcagcgaagctcgccggcgtgcccaccttctccatcagaaccatccacgacacccacagctgcgtggggatcagccatctcggccaccagcaggcgtctgtccagtgggtcgcaaccaccgtcgaggagaggctacgcgagaacccgcagtgcaagcccaaggaaatcctggaagagatccacaaggcccacgggatcacgctgtcctacaagcaagcctggagaggcaaggagcggatcatggccgccgtccgagggtccttcgaggaagggtaccgtctcttgccggagtactgcaggcaggtggaaaggacgaatccaggaagcatagctcgagtctatggaaacccagacgacagttgcttccggcggctcttcatatcgttcaacgcatcgatctatggcttcatcaacgcgtgccgcccgcttatcgggctcgacaggacccttctgaagaacaagtatcttggcaccttgttcctcgccactggtttcgacggggacggcgatctcttccctctggcgttcggcgtggtcgatgaggagaccgacgagaactgggtgtggttcttgtccgagctgcacgagttgctggagaagaacacggagaacatgccgaggctcaccatcctgtcggacaggcagaagggcatcaccgacggagttgaattcaacttcccgactgcgttccatgggtactgcatgcgccatgtgagcgagaccttcaagaaggagttcagcaaccccgtgctcgtcaaccttctctgggaagccgcccacgcgctgaccgtgatagagttcgagacgaagctgctggagatcgaggacatgtcgcaagaagctgccgtttggatccggcacctgccgcctcgtctctgggccacggcctacttcgaggggacgaggtacggtcatctgacggcgagcatcacggagtcgctgagctcttggatattggacgccgctggcctccctgtgacccagatgatggagtgcatccggcgccagctgatgacctggttcaacgagcggcgtgaggcgagcatgcagtggagcacgatcctggtgcccgccgccgagcgccgcgtgcaggaggccatcgagcgcgcgcgcgggtaccaggtggcccgggccaacgaggcggagttcgaggtcgtctcggctcacgaggggacgaacatcgtggacatccgcaacaggtgctgcctgtgccgcggctggcagctctacggcgtgccgtgcgcgcatggcgtggcggcgctgctctcctgccggcagaacgtccaccgctacgccgagagctgcttcaccgtggcgacgtaccgcaagacctactcgcagaccatacacccgatcccggacaagacgctgtggagtgagacggcagatcaagatcaaggccaggatggcgaggtcaaggcggagatggtcatcaatccacccaagtcgcttaggccccccggacggccgaggaagaagagggtaagagcggaggaccgtgggcgagtcaagcgcgtcgtccactgcagccgctgcaaccagactggacacttcagaaccacatgtgctgttccgatatgaaca

SEQ ID NO: 88406 - DNA, 405 bp, Zea Mays
atggacttggtgctacataaaaataggagtaaaatgggtcccaaccttccctgttcggctgagggtggtctgaatttggttgtagtgtctgcagttcaatcagtgctgtttttactaaactctggtgaaccatcacttgtgttctgtgatttcagtcttgggttgctataccaagttggtagagctatgcttaaggatcaagttttgttaaccaaggttgacctgttgacatatggaattaaatatcagctctggacccatttaagtctgccctcggtggcgttcctacctgctcattcttctatctacagaagtgagcaggtcagtgaagctcacaccatttactacttgaactctaccactattggttgcctagaactaggtgtgaaatttgctcaaacatag

SEQ ID NO: 88407 - DNA, 1915 bp, Zea Mays
aaaaccaggccgcacgagcacactctctcctctcgctcgcgtccgcacaaatcccgtgctcccccgtctgaaaaccctccccacctccggcggcggcggcggcgctggcgaccgggtgtcttctccggcgagtctcccccctagtaacaagaaaatatggatgtacctgttgatgaccctgtggagaacctcactggaagtcctagtacccttggcaatgaggaagaagccactacttatgctaatgtgcaagatcagtccaaggaagaaccagaaaagctttacgaggaacccaaagacccaatgcaagacgagttgggtaaccaagggcatgtgagcatgaacaatgaagatgtgggaggccagaacaaagtggaccaagctacccccacagagcacggcgaggaagctggggtgaagcagcatgatgctacagttcctgatgacaagaaatggcctgggtggcctggagagagtgtgttccgtatactggttcctaccacaaaggtgggtgccgtcattgggcgcaaaggggatttcatcaagaaaatgtgtgaggaatcaagagcccgcatcaaggttcttgagggaccaccagctgtgccagaaagagctgtaatgatttcagcaaaggatgaaccagacacagagctacctccagctgttgatgggttgcttagagttcatagaaggataacagatggtttagaaactgaaactgatcagcctcaacgagctactgtcaacactgggccgacaaggctactggttccagcttcccaagctggcagcctaattgggaagcaaggagcaactattaagtcaatacaggatgcttcaaagtgcgttctccggattgttgagaatgttccacctgttgcattaaacgatgacagagttgtagagatacagggtgaacctcatgattctcacaaagccgtagaactgattgcaagtcatttaagaaaatttcttgttgaccgcagtgtcctccctttgtttgaaacacagattaaagcacacaatatgcacagagagcaacctatgcctcctccacaggcatggggcccccctcctccgtcaccctggggtcatccaccaccaaaccttcctcctggtggcccaggttatgttgggaacccacactacatgcctccacggccacaagagaactattatcctcctcccgatgtgccccctgtagaaaagcagccacactatggaatttcttcatatggacgagatgcacctccaagtgctcccccagggaatcaaaaccaagcacatgggtcatctcaggtgacacacagcatgcaagttcctctttcctatgctgatgctgtgataggggcagctggtgccagtatcagctacatccgcaggcatagtggagcaactataagtattcaagaaggcgctcctggcgagatgacagtggagattacaggaagtgcttcacaagtacagactgctcaacagctaatcaagggaccaccagccccaggtccacacggtcaaccagtggacacgggttacggctcgtacccaccttacggtggagcatcctatgggtctcctccaggtgctccagctccagcgcctcacaacggtggaagttatggtgctgcaccatactcgtcgagctatggatactaatccggagcaagagcttgcctcagacttagggaaggagggttatcgttatggttttgtttgctagtctattcatctgttgagaactcaagattgttattgttaggacgtgtgaactttggtgttctaggctgctttcagacgccagtgtcgatatactctctttgctttattgttgcggaatttatcgtaatatgttattttaatgttcaagaaaaaaccaacaaaaaaaaacatctataattccaatgctatttttttc

SEQ ID NO: 88408 - DNA, 1277 bp, Zea Mays
aaaaccaggccgcacgagcacactctctcctctcgctcgcgtccgcacaaatcccgtgctcccccgtctgaaaaccctccccacctccggcggcggcggcggcgctggcgaccgggtgtcttctccggcgagtctcccccctagtaacaagaaaatatggatgtacctgttgatgaccctgtggagaacctcactggaagtcctagtacccttggcaatgaggaagaagccactacttatgctaatgtgcaagatcagtccaaggaagaaccagaaaagctttacgaggaacccaaagacccaatgcaagacgagttgggtaaccaagggcatgtgagcatgaacaatgaagatgtgggaggccagaacaaagtggaccaagctaccccctcctccgtcaccctggggtcatccaccaccaaaccttcctcctggtggcccaggttatgttgggaacccacactacatgcctccacggccacaagagaactattatcctcctcccgatgtgccccctgtagaaaagcagccacactatggaatttcttcatatggacgagatgcacctccaagtgctcccccagggaatcaaaaccaagcacatgggtcatctcaggtgacacacagcatgcaagttcctctttcctatgctgatgctgtgataggggcagctggtgccagtatcagctacatccgcaggcatagtggagcaactataagtattcaagaaggcgctcctggcgagatgacagtggagattacaggaagtgcttcacaagtacagactgctcaacagctaatcaagaatttcatggctgaagcttctccccagggaccaccagccccaggtccacacggtcaaccagtggacacgggttacggctcgtacccaccttacggtggagcatcctatgggtctcctccaggtgctccagctccagcgcctcacaacggtggaagttatggtgctgcaccatactcgtcgagctatggatactaatccggagcaagagcttgcctcagacttagggaaggagggttatcgttatggttttgtttgctagtctattcatctgttgagaactcaagattgttattgttaggacgtgtgaactttggtgttctaggctgctttcagacgccagtgtcgatatactctctttgctttattgttgcggaatttatcgtaatatgttattttaatgttcaagaaaaaaccaacaaaaaaaaacatctataattccaatgctatttttttctgtgcggacattgaaaag

SEQ ID NO: 88409 - DNA, 1985 bp, Zea Mays
aaaaccaggccgcacgagcacactctctcctctcgctcgcgtccgcacaaatcccgtgctcccccgtctgaaaaccctccccacctccggcggcggcggcggcgctggcgaccgggtgtcttctccggcgagtctcccccctagtaacaagaaaatatggatgtacctgttgatgaccctgtggagaacctcactggaagtcctagtacccttggcaatgaggaagaagccactacttatgctaatgtgcaagatcagtccaaggaagaaccagaaaagctttacgaggaacccaaagacccaatgcaagacgagttgggtaaccaagggcatgtgagcatgaacaatgaagatgtgggaggccagaacaaagtggaccaagctacccccacagagcacggcgaggaagctggggtgaagcagcatgatgctacagttcctgatgacaagaaatggcctgggtggcctggagagagtgtgttccgtatactggttcctaccacaaaggtgggtgccgtcattgggcgcaaaggggatttcatcaagaaaatgtgtgaggaatcaagagcccgcatcaaggttcttgagggaccaccagctgtgccagaaagagctgtaatgatttcagcaaaggatgaaccagacacagagctacctccagctgttgatgggttgcttagagttcatagaaggataacagatggtttagaaactgaaactgatcagcctcaacgagctactgtcaacactgggccgacaaggctactggttccagcttcccaagctggcagcctaattgggaagcaaggagcaactattaagtcaatacaggatgcttcaaagtgcgttctccggattgttgagaatgttccacctgttgcattaaacgatgacagagttgtagagatacagggtgaacctcatgattctcacaaagccgtagaactgattgcaagtcatttaagaaaatttcttgttgaccgcagtgtcctccctttgtttgaaacacagattaaagcacacaatatgcacagagagcaacctatgcctcctccacaggcatggggcccccctcctccgtcaccctggggtcatccaccaccaaaccttcctcctggtggcccaggttatgttgggaacccacactacatgcctccacggccacaagagaactattatcctcctcccgatgtgccccctgtagaaaagcagccacactatggaatttcttcatatggacgagatgcacctccaagtgctcccccagggaatcaaaaccaagcacatgggtcatctcaggtgacacacagcatgcaagttcctctttcctatgctgatgctgtgataggggcagctggtgccagtatcagctacatccgcaggcatagtggagcaactataagtattcaagaaggcgctcctggcgagatgacagtggagattacaggaagtgcttcacaagtacagactgctcaacagctaatcaagaatttcatggctgaagcttctccccagggaccaccagccccaggtccacacggtcaaccagtggacacgggttacggctcgtacccaccttacggtggagcatcctatgggtctcctccaggtgctccagctccagcgcctcacaacggtggaagttatggtgctgcaccatactcgtcgagctatggatactaatccggagcaagagcttgcctcagacttagggaaggagggttatcgttatggttttgtttgctagtctattcatctgttgagaactcaagattgttattgttaggacgtgtgaactttggtgttctaggctgctttcagacgccagtgtcgatatactctctttgctttattgttgcggaatttatcgtaatatgttattttaatgttcaagaaaaaaccaacaaaaaaaaacatctataattccaatgctatttttttctgtgcggacattgaaaagaaacttgctttataaagctgttttc

SEQ ID NO: 88410 - DNA, 154 bp, Zea Mays
tttcagttagagcactcgttcatccattcatcttctagatcacttgtcaagattgcaggtatcattaacacagaatgctttacacagaatgcagcagcggttgttcgcttcctcttgtcagtccctgcctctcaccccttcgtcaggctcgccg

SEQ ID NO: 88411 - DNA, 283 bp, Zea Mays
ctattcgttgccagtcgtgcgagatccaatccgccaatcggcgcgccaccatggacaaagaaaagcagtatgtcgccgtgagtgaaaccatgtccatcctttgatttggcctagcgaatcagaccgatggtgaagcacaaggagcgggggaggtgtgtgtggggattcctaaccgtggggaggcccaaatcaaccacaatttctcgacggagctgggaaaccgccgccgtgccgcatgatgtcggtattgggcctctacgacatgcgattcctaggtatgaag

SEQ ID NO: 88412 - DNA, 1097 bp, Zea Mays
atgaactacccagcagatgctgcggcggatccgtggtgctgctacagcaacaacgccggcgaggctgccgccgccgccgccgtgcccacttcgggcgagaccagcagcttcttcgccgacatggttgccgcggactactccacagacgatctctttgagctggtgttgaaacaagaagggcatgaaggcggcgcatcaggtccgacgcagccggcagtttcttgcgtctggtcatcgtcgtcgaggtttagcaagccacccgatgtacagttcgacccaccgtcggaggacgagatggcagggtggctctacaccatcgtcaaaggcgaccaacgtgtctgtaatgatgatgatgatggtcgccgaccggtggctaacgatgatggtgccgaggatgcagtaccggtgatagggacgtccacggtgacgacggataagaaagaaaaggttccatcgatgacgatgacgacgacaacagataaggagatgagaaagacaccgggaggaggatcttccaggaggtctcaccacggggaagcacacaacctgacagagaagagacggaggcacaagataaacgagaggctcaagaccctgcagcagatcgtcccggggtgtagcaagtccaaccaagcctcgacgctggaccagaccatccactacatgaagtcgctgcagcaccaggtgcaggcgatgtcgtccgccggcctgctggcaccggcggcggcggcgtaccccgccgtcgtgcagccgcggtgcgtgcctatggggacgccgccgccggtgccgtccgtgccattccaagccgcagctccgacgacgacggtcctcggcggctaccaccctccgtcatcgcctgctgccaccatggtgcccttcggaacgacggccgtgcttcagctgccgcattaccctggcgccgctgcggccgtgatggtgcctgtggcgcccctgtacccggcgcggcggcggctcctgcaataagcactgcagcagcgcctggagatgccatgtctggcaaccatgtccatggatctggcagcacaagcagcagcaaagggaagggcagtaacagcctgtgtgtgcgagtgatatag

SEQ ID NO: 88413 - DNA, 305 bp, Zea Mays
gtccatcctgtaccaccaccgtcgtgatcggagcacgaaaccaagccgagcgaacaccagtcatcaagcgggcgagtcgtcgtgaaagagagaggcgccgccgtgggtgggatcgccgattcgttgatgttgggaatcccggtgcgagcctgggagcgtcaagaaaggcttgaggaatctgcagggcgtgtcgtcgcgcggggagattgtcctgaccccgggaaattcctctccggggatcggtatcgcggcttagccgccgtgtgccggcgatgcgagtctgcgcttcatggctgtcggtgagg

SEQ ID NO: 88414 - DNA, 2460 bp, Zea Mays
atgatgatgacagaggaagatgaaagaggcaaagaaattgaaaagatggctggaagccgttttactcaaaatggatcaagcagtactcagatatacgcacaaatgacgctgccatatgtttcaaaccagggtggatacatggatctgatgatggaacagatacgtaactcgcaaggagaatcagtgagtgaactaggcaatgaaatgcaaagtgccctatgcacacaaaatgaaaccatgaacaaaaacctactagtggccccatgtgagacatacacacaaatgattcttgaggaggactcaatgcttgcaaatgcagacatatccaaggttggatacatggatctgatgatggaacaaatatataactcgcaaggagaatcagtgagtgaagtaggcaatgaaatgcaaagtggcctatgcacacaaaatgaaacaatgaacaacaacctactaggagaaccatgtgagacatacacacagatgattcttgaggaggactccctgcttgcaagtgcagacatatccaaggagatatttggggaatgcaatgaagctgatacatctaaatatggggaagcagtataccacagggatctctttgagataatgcatgtacaacaactaactgaatgtgcgcaaaatgatgatggaaaagaaactaaaacatcgagtgctagtgcaaactttgatgatgcagatgctgaaacaacaaatgcaggagatgaagagttaacagaggatcagattgatgccttcattatgagtgagcagatagctacaacagaagggaacaatgcatcaatagacagcaaatacacacctcaagttgggatggaatttaagaccaggggagatgcagagcacttcttattcttctatggttttttggctggttttaaaccagcaatcacccacagtttcaggacttccaacaaaaaaagaagcaatgaagtaacaaaagtggagttgaaatgtaacaaacatggcaaaacaaaaaagacaaaccagcaggaacaagatatttgcatagaaaaaaagcgctgcgagaaaggcccaaaaaggaatacaaatgtccaagttaaaacagattgcagagtattcatggttataaaggaacatggacaaaaatgggtgatcgataagttagacttggaacataatcatgagctcagaccagcagacagcaacaacatgtttagtgggcataagtacatgacagatatggaaaaaggaattataagaacattgaaccacaacaacatacctacacggaagatgatagctatattgtcttatctgagaggaggaatgccagaggactttgaggacatagttaactattcactaactgtatctgaatttgagagggactggaagcaaatggttgaggactaccatctagaaaacaacaagtatttcagcaaaatgtgggaaacaagagccaggttcataccggtatatttcaaaaatgacttcttcccattcttgcaaagcacaggtagaagcgagggaacaaactcaaggtttaaagacaatgtgacttcgacttatagtgtgatcagcttcttgcgtgagtaccaaaggattgtggagcaagtgaatgtgtcggaggagtatgaggataatgaaagcaatcgtaaacgtccaaaagaactaatgtttggatatacaatagagaggcaagcacaagaagtctacaatagaaacatattcaagaaattccagttccagttgcaatcaacaccaaggctaagttacagcagaacatctaatctgcatactttcgaggtgtatccaaaatcaaaccaagaagaaaagccacataaattaaggaggtaccttgttatggctaacctaacatatggaatggaagagttcacttgtgtatgtggcaagtttgacaaggatggcattttatgctcccatatacttaaagtgatcattgaagaagggctcacgaaaatcccagagcaatacatactgaacaggtggaagaaaaaacagaaacaaatagatggaccactgttgcgtgcatcaatgccaacccacccagtgctaagacacaacctattgagccggaaagtagcattactcacatcagcagcagcaaaaacagagaaaactatggagtttatatgtgaagaattagacaaactacaagaaaaggtttgccaaatgctatcatctgaagaagatgtaatagcaggaccttcgacaggacgagagaaggaagacaatgctgcaaaacatacaggaccagtagttgaaaatctgcataaccctgaagcagttaaacagaaaggaaggccaaaaaaacctacaaggttaaagccactagtggaggaaatccacatcaagatgaagaaggcagagcaaaagaaaaacaagaaaacaagcaatgcagcagcaagcccacaaggaaaggagaagaagaagatgaaaagaacagcaccttga

SEQ ID NO: 88415 - DNA, 563 bp, Zea Mays
cttggccgtcgcccccctgcccatctcctcctctctcaattcagcccccaaaccctagccgccccccccccccctcaatcccctcctcccacggagccaatccttgccgctcggatcgtcgtctcgtggtgcgattctccaaccgttttggtggagggaagaagggaggaaggaaagggggagaacccaaggtggtggacttccagatcgttcttagggattttgcccaaacttcggtgaaggcacctaatttctgctttggggaataaaggggatgtagcagcacgaccactacacctttaataaaggaaccaccatttaataatgttgataatcagagttggacaagtctagtgaattgctttgttcttggttgagcgtttattttggggtgggctgagtttcttatcccatttgttttacttcagttgggtcataattaggttttaccacttttgcattacagtttctactatgtgaattatatgtctttatatcttgtatgagcttcatgtttcccctccttgttatgctagttttcaaaggaggtgctgccggatttt

SEQ ID NO: 88416 - DNA, 581 bp, Zea Mays
attacaacttacatctgcatgtagcttgaatatacgtgcatgccaagaaacactactgcaaagactacagaagaagacatcaatacttaaaattcattctgcaaacgatggtgatgtgttctcgtccgcccggaagaactcaccggggccgcctccttctactactacttgctgccatcttcatacttgcttccgggagcggaccacgcagctcggttactacagctcgtcctcctccggtatatcgctggcctccatgaaatttgatatgcacatgctacacactactggagaaagtgcaatatgtactagttagcaatgcaactggctacagtaccaacgatgtggatatctataactaaaaacccaaatcattagtccgagttgtatagatcatatactaaatagtgaactttagtacttgtttttggcttgaatatgtactaaaggatccgtttttagtaccagttctattagaaaatagtaattacatgtatagagtagttggcaccgaccgatcgtaattcactatgaaatagtaattgcccagcttacaatagaatgcacattttgtttaataa

SEQ ID NO: 88417 - DNA, 1641 bp, Zea Mays
ctatctaaacgaaatttagtcagaatcgtaaacttcggattttccgtttcgtgattcagaaaatagagtgtgtagccgtttgccgtatagcatgtcgaccctttgtttatcgctaaaaatcttaattcaaaaaatatatgcgattcacttgtataaaaaaagaaaagaaaaaaaaaatatcccagccgaccctatccgctcagccgcccctctccctccctgattttttccagccacgtgctcctctctgccggcgccccatctcctctgctcgccggttccctttccccaagctcaagttcctatgggtcttcccccagccgcgcattcctccagctcgcggagctccctggctcgcccctccacgcaccacttcgagctctcctccaagctgttgcgccctagacttctctccctccctccccttttccctgctgcgcgcgtcggatcccagcttgtggagctcccttccgctcccagcttcctctgccggcgcccaagcttctagtccttcaatccgtgtcgcgcccctctctgcttgcctcaccctgctccctggtgccagagcttcctttgcgcggcatggccgctgcgcccgaggtcgcgtgctccaccgtgtcgagctcgcccctgcgtgcagctccccatctccatggccatcgctgcccctgcttttctctctctctctctcctccatggccatcgttgcccctgcttttctctctctctctcctccatggccgcgtcttgccgaggaccctgctgcagcttgctcgccgcgtgctgccctgcgcgctcgcagtgggcatttcccgtcgtgcccgcggtctccccgcccgcgacgcccggtgttttccccagctcggatcttgttagccgccattctctggaaagtgtgtcggtcggcgtcgtggagttttgtttagtcggcttgtcgtcgaccttgccggttgttatcattcctcgtcgcgtggtgtgtgcagcaacgtcgttgattcctccgtggtgcttgtcaacgaacttcgattcatcgattcctcgtcttcggttcagctcatgtatgcatgtcgaacgtgttcgccgcttgaccctatgtctctagtgttcgtgacctcaccgtcgtcggagtcctcactagattcgtgtcctcgctagagctcgcgctaacctgctcgaccacacctcgccagctcgctccagactcgctctcgtcatcgttccgtgcatcatcaataaaaacaagagtcgggtgaagacgaagctagcagcgtgatattcaccaagtgctcgacacaagggctaaaccagaatccttgttgtgttcacggaaaacacgtcagatttagaatggtatgccaattcatatttctgttagcttaattattggtttgatgaatagattgtgtacataagtatgaagtggtcgtgtcacgcgaaactcaagtttaaaataattattgtgtgaggagtggttaagtgaataataagtctagtgtctcgctcataaaactgataaatgtggtcatggttaaattaaatggttgttaaaatgtatcacgggttgtatgtgttgatgctcataaatgtagagttgacacatcgtctttgtatgatgaagcatatgtttggggtgttaattat

SEQ ID NO: 88418 - DNA, 1560 bp, Zea Mays
gctccttatccttatccgccgtgggattttttttggccgtcgccccagcctgtcttccacctccatctctccctcgtggccatggtgagctcccctgcgacgcgcctccacgtcacaggccagctcggcctcctccctagcaccgtcccatttcctccctgcaccggatcccctttcccctgcgtgccggactttcctccactcctccatccatggctctctgctgcttttactccctcccctgttcgcccatggaagtcgcgcccttgccaagctccctccgcgccgtggtgctccagctcggcctgcttcccagctcgctcggccgaagcgccctgctcgccctcctgcgtcgcgccctggccccttctctgcgcgctcctccaagccggcgtcctctgcacgccatggccgccgcgccccgggtcgcatgctccaccgtgccgagctccctagcgcttgccctgccctctgccatggacgtcgtcggccttgactccctctggctgcggcatccgtcttgctccctgctccgaccaatccgcctaggttcgaccatggcacgccgcggccgtgtggaaatgtggcggatcgaggaaagccttcgtgttctccctgctctgcgatgccgaggtccctcccttggttgtgctcagctccagctccgtgccttgtccctggttgcgcgcgtgctcgccagtctttcctgtgcgcgctccacctcgtccatggcgtcgcggccttcttgcccgccagcacgccctctcggttcgctcggcctcaatctccatcgcgccgcgctcctccccctgtccctgctacactgtcggcaactccctgtttcccctcaatctccatcgcgccgcgctcctccccctgtccctgctacactgtcggcaactccctgtttccctggtgtcgcgcgcgctcttggtccttgcgagtccaccttggtccgccagcgacacccgtgtcggctctgtaatgcttgtacgcgtctgtccacgtcgctggcagctcggtctctacgtgtgtcttcctcgacatctcgacaccggaactccatcatgtctgtatgtgtgtggaagaatggagtcgatggagaagaaagcgaagcccgtgtggttcttgcgttcatctggtgtggaattggagctatggttgaagaagaaaatgaagtccgaaagcgacgcttgtcatgaacctcgtcgtcgacccacgttgtatccacgacgtgctcgtcgactccgatgatctgttttccaattgcgtgctgcctacgtcgattttcagaactccttgtcgtgctcgaccctattgtcgtcgttccgtgcgtcatcaagaaattccaagagtcaggtgaagacgaagctaatagtgtgatgttcacaagtgctcgacgcaagggccgaaccggaatccttgccgtgttcacgtatagcgcgtcagatttagttatgggtaagctgattcatattttgttagcttaattattggattgatgaatggatgcgtctagtattattgaattagttcgatgaatgcgatgtgattattttc

SEQ ID NO: 88419 - DNA, 390 bp, Zea Mays
tggcagatggcggcccggcaatggtgaagtgttggctgcggcggcgccacccgagcctcggcgaaggattccgagaagtccggcaaggagtcagggcgactacctaacccggcgctgttggtggagttctgttcaaccgtccggtggcttgccagagctctccacggccatgggagcggcggcttggcagcagcaccgcaccccggcgaggcatccaccgccccccagctgccggtcgagtcggcagcggcgcccaggcgagggagggacgagccggggaggacgacaatgagctacaagcaggcagggcaagcgtagggcgcaatccaggggagacgcgcgcaaccggagttaagcagagggcaggggcatgacggaggagctttccat

SEQ ID NO: 88420 - DNA, 123 bp, Zea Mays
gtttttttaatttaattttagctaggcgtgggatgcacgtgggaatgggaataggctttgtgggagggggaatgagaaagacacgtgatagccgggaatggaaatgtgaatgggctttgcagg

SEQ ID NO: 88421 - DNA, 3317 bp, Zea Mays
atgtgtccatgccgtacttgcctagcgttgtgcttgtgcatggccacgatcctcctcttagggccatgccaatgggtaggcaccgccgccgcaacgacaacagccagccaggcggtgactgtgacagatactgccagcagtagtgaccgagaggcgctgctgtgcatcaagtcctacctgtcgcatcgcaacggcagcggcggcgccctggctacatggggcagcaacaacggctcgctggacgtctgccggtggcagggcgtgcggtgcaagcggcggcaagacagcggcggcggcggcggcgctctccgagtcgtcacaggcctatccctcgaaggagaaggcgtggccggccagatcccgccgtgtatctccaacctcacctacctcactcggatccacctgccattcaactcgctcggcggcgcgctacctccggagataggccggctccggaggctccggtacgtcaacctcagctccaacgccctcaccggcgcgatcccgaccgagctcgcctcgtgctcggccctccgcgtcgtgtctctcaagaaaaacaacctcagcggaggcatccctgctgctctcttcaaaaactgctattcgatccagaaggtcgatctccgcatgaacaacctcgacggcccgatccctgatctgctgccgtaccatagctctactgatactagtagtagtctgcaactacttggcctcacccagaacaacctctccggcgagataccgtcttccgttggcaacctctcctcgcttgtttacttcctggctgctcagaaccttctgaccggcagcatcccaggtagcctggcatcgttagcgagcatccaagtcattgatctcacctacaacaatctgtcaggcaccgtgcccagctccatcttcaacctctcctcgcttatatacctgggcttgggagacaacggttttgtaggggagctgccggcgacgatgggcaaccgtctcccaaacatccagggtcttatactgtcggcgaataatttctacggagagatccccaaatcgatagcaaatgccaccaaccttgtggacatatacatgcaggagaactcgctcggcggagtcatcccctccctgggaaccctacgaagcctgcagaccttgttcctgtacaacaacaagaagctggaagccggggacgactgggcgttcctctcctccctagcgaactgcccgcagctgggtttcttggtcttggacaggaacaggctgcagggacctcttcccagctcagtggccaacctgtcacaaaacctgaaagagtttgtccttggctcaaacctcatcacaggtgccatcccatctgggatcggcgacctggctaacctttccgtcctctacctagacaacaacatgctatctgggcacatacctgcttccattgggaagcttcgcagtatgtttgctctcaacttgtccaagaaccggctgtccggagaaatcccagcatccataggcgacaactgggctcagttgaccgagctttacctgcaagagaacagcctcagtggagccataccagcagggctagctggatgcagaaacctgctggcactgaacctctcgtccaacgccttttctggacctataccggaaggcctcttcggtagactggaccagctgaactggtaccttgacctgtccaagaaccagctcgcaggctccatcccagacgaattcagcaacatgatcaacctcgaatccctcaacatctccagcaacagcatctctggtaaaatcccctccactctcggctcgtgcgtgctcttgcaggctcttcgcctggaagccaactccctggacggtcaaatcccgtcgtctcttgccaccttgaaaggaatcaaggagctcgacttctctcgcaacaacttgtctggtaaaattccagagtttctggaacagttcgatagcttgcagtacctgaatttatccttcaacaatcttgacggccctattcctacgcaaggcgtcgtctttggcaatgccacaagcaggcttttcctccaggggaacccgaaactgtgtgcagaaactatagcagtgctaggcctcccactctgcagggctcaaaacccgtctgcaaggaaccgattcctggttcggttcttggctgttctgttgccttgcgtagttgtggtttcccttctgtctgtcctgttcttgaagaggtggagcagaaagccgcgtcccttccacgaatcctccgaagagtcattcaagatggtaacctacagtgacctaagcatggcaaccaacggattttcacctggcagcctgattggttcggggcagtctagctcagtctacagaggttcgttaccgtcgaaaactgatgacgtccatacgatgattgccgtcaaggtattcaagctcggtcagtccagttcgtcgaaaagctttctagccgagtgcagagcgctaagaaacacccgccaccgcaatctagtgaaggtgatcaccgcgtgctcgacgtgcgatcctttcggtaacgagttcaaggctctggttctagaatatgtgccgaatggcacccttgctgaccacctccacgccaagtaccccggctatggtgatggtgctcgtctaagtttaggcgacaggattggcatagcggctgatgtcgcttctgttctagagtaccttcatgtctggagtgcgcctcccatggctcactgcgacatcaaaccaagcaatattctcttggatgatgacaacgttgcccatgtcggagactttgggctggcgcggttcctccaacatgcttcttctgcttgtgctgggggccatcgcaacgcaacaagctctgttggagcagcaggatccgtgggctacatacctccagagtatggaatgggaagcagaatatcaactgagggggacgtatacagctacggcattgttctcctggaaatgctcaccggcaaaagccctaccgatgaatcgtttcacgatggcttcaccctacacaaatacgtcgaggaagcactgccacggatcggcgaggttctggacgctgatctcagtgaagaggaacgacgagccagcaacactgaggtgcacaagtgcatttttcagctgctaaaccttggattactgtgctcccaagaagcgccaaaggatcgaccaagcatacagtatgtatacgctgagatagttcaagtcaaggaacacttcggttcctgtagtgtaaaggaaacgtgacagattttaggttccctttggaaaagcaatggattagagctgactatgaattacaatcctacatgaattgagaatgcagg

SEQ ID NO: 88422 - DNA, 1728 bp, Zea Mays
acactctcctcgcgtttcccgccattaactctgcaacctattctcttcctcgcgaaaccgcttccttcgattcattccccctctcccctctccaagacccaaaaccctaacccctacgacccccgtgaccgccgccgccgtcgatgcctgcgctctccgacgtcgcgcttcaggctgccatcgccggcaacctccgcctcctgaagctggtggcgagcaagatgaatctgcgcgaagcgaaggacgccgctgggcggaacgcgctccacctggccgcggagatgggccgtcttgaggtttgcaggttcctggtggaggaatcgggcttcgaggtgaacttcgcctgcgccgaaggcgggtcgccggtccactgcgccgcggccgggggcagcgagagcgtcttgggctaccttctcgaccacggtggcgaccctgtgatgccggactccatgggctccactccactgcatgatgcggcagaggaagggcattgtgcggctgtgaggatgctgctgtccaagggtgtcgatgtggatccacacggctgtcgtgggacgccgctgcacttggcctgctccaatgaccgggatcaggttgttaggatcctgctggaacatggcgcagatcccaacaaagttgtcggtcatgtcctcccaccactcatgatggcatactgtggcggttctttgagatgcatgaagctactgattgaggctggtgcggatgtgaacttgattgctccttctggagtaattttggctcaggcagtttgtgatgggtcaactgagattgtcaagtttttgctagaggttggagctgatcctaacattcctgatgaggatgggaaaatcccgatcatgtacccagcatttaatgggcatcgggagcttgttgaaattctatttcctaagacaagaccagtttcatctttgccagactggagcgttgatgggattattagaagtatgaaagatctgtttttcaagcctcaggatgcagctgtggtggaaaaaaagatagctgatgcgaagtcacaagggaaggaagctttcgcaaggggagagtaccctgcagcagtatacttctataccatggtactagagaacgaccttgatgctactgcgtttgccaaccggagcctgtgctggttgcggctgagggagggggccaaggctctgttagatgctcaacagtgcaaaatgatacggcctcgttggtcgaaggcatggtatcgcgagggcgcggctctcagcttgctgaaggactaccaaggggcagtcaacgcgttcacggaagcattgaaactggatcctgcaagtttagagatcaagaaagccttaagggaggccaccgattccctggcgaacgttggccgctccggagaacagaacccatgagctgctgctgcatccatgtgctttatctcacgttaagaatcctctaacactatgtggctcagcctcatattatatgttgatatatgtcgccttaacgcactgctggagatactagtttcgatctcagcctatatgttttgctccttcgggatgcagcctaagatacatgtggcaaccaagtgaggttgggcagggtagcatatctatggactggttgaactattatatgtatctggatatctaagtgcacctgttgctcctagtaaagttgcagttctaatgaccccttcgtcaaattcgattgggtgcacacttgcaggtttgccgattc

SEQ ID NO: 88423 - DNA, 1509 bp, Zea Mays
caattaccctgtttctatttaatatgctgtcatgatcacaagtgacaattctctaggctggtgcggatgtgaacttgattgctccttctggagtaattttggctcaggcagtttgtgatgggtcaactgagattgtcaagtttttgctagaggttggagctgatcctaacattcctgatgaggatgggaaaatcccgatcatgtacccagcatttaatgggcatcgggagcttgttgaaattctatttcctaagacaagaccagtttcatctttgccagactggagcgttgatgggattattagaagtatgaaagatctgtttttcaagcctcaggatgcagctgtggtggaaaaaaagatagctgatgcgaagtcacaagggaaggaagctttcgcaaggggagagtaccctgcagcagtatacttctataccatggtactagagaacgaccttgatgctactgcgtttgccaaccggagcctgtgctggttgcggctgagggagggggccaaggctctgttagatgctcaacagtgcaaaatgatacggcctcgttggtcgaaggcatggtatcgcgagggcgcggctctcagcttgctgaaggactaccaaggggcagtcaacgcgttcacggaagcattgaaactggatcctgcaagtttagagatcaagaaagccttaagggaggccaccgattccctggcgaacgttggccgctccggagaacagaacccatgagctgctgctgcatccatgtgctttatctcacgttaagaatcctctaacactatgtggctcagcctcatattatatgttgatatatgtcgccttaacgcactgctggagatactagtttcgatctcagcctatatgttttgctccttcgggatgcagcctaagatacatgtggcaaccaagtgaggttgggcagggtagcatatctatggactggttgaactattatatgtatctggatatctaagtgcacctgttgctcctagtaaagttgcagttctaatgaccccttcgtcaaattcgattgggtgcacacttgcaggtttgccgattcatctaaagctttaatctgatcagtttcaacccctctggtcggtttctccatgttcttgttctggtcttcactccgcagttcttcagcatctgccgatcgatatgattgtttctgtgggctgagctattttccatttaatctggcaggtaaagaattagtcgatgccgccactcggtttctgttaatacaaaacatgctccaccattctgctgctgggataaaagggcaccaacaatgcctgccaaaaaaacaaaacccgaaatacccgaatctggaatacctcaacttgaattttgttctagaatttcggatggtatcttgtaaaaaaaaattggatgtataattcgggtaccacaatcttgtacctaaaatatccgaagtacctaaactttcatgtgttaattatatcaaagtttgtatgaacatgtatttgcagaa

SEQ ID NO: 88424 - DNA, 258 bp, Zea Mays
actatttttaaaatctgttttatgtttcctggaaacgatttgcaccggcggttttattacgtcgaccgccagtgcaaatcgattttcactggcggttttattacgtcgaccgctagtgaaaatcgattttcactggcggtcttcagttacccgcctgtaaaaatgatgatttttactggcccctagcactggcggttacgttaaacgccactaaaaataggtttacgaccgccagtatagatcttctctgtactagtg

SEQ ID NO: 88425 - DNA, 581 bp, Zea Mays
ctgctgctgacgcggaggggccggacgagggcggcggcggcgtacccgaagatggcgcggccgccgatcctgtccgtcgcgctgccgtccgacaccggccgcgttctcagcatccagtcccacaccgtctgggggtacgttggcaacaaatcggccgtcttccccctgcagctcctcggctttgatgtggatccaataaactctacagtttttctaaccatacagtgatacaggtacgctatattgtgttcagaaactcatgtgcaatttccttgggaaacttaaatagttcatggtacatgttatctcagggtacccaacatttagaggtcagcaagctatcaacgttatattgttatgatatttggagtttatatggtcaaatgatactaggattgtttaatatcttttatttagttacataggcccggtttcctttttaaatactatgctacaagttgttgacaaattacgatcagtcaatcctgaccttgtatacgtttgcgacccagtcctaggtgatgaaggaaaaactatacgttcctcaggagctaacatctgtttatcaacagaaggtgatt

SEQ ID NO: 88426 - DNA, 1139 bp, Zea Mays
ggtcgaggcagtcaaaaccctcgacgcggaccgcggcgggctggaacgcgaaccgggcgcgggcgcacccgttgccgccgcgcggcgacatgggcggcgccgccgacggccggtgcacggccgccgccgccaccggcatgggcacgggcaggggcgggcagtccacgccgaaccggctgtcgtggaccaccgggttcgacgcccgccgcggcggcgagccgcagaacagcggggacgccgccgacaggccgctctcctctccctgccaagaccaagttcggacacgtcagcgccatgtactaagtagaagcgacgaaaagaccttcgagaggggcagatccggggacgaggtagcaaaaaaaaaagatgtcccacctttgacaggaggaggtcgagcagatccatgccggcgtcgccgccctggtggcaccgcaggggcgccgcggggcgccgcggcttggggcagaagagcgggctcttggcgtcgccggcggcgggcgcggccacggcgagggggctcttcacggcggcggcggcgaagtggctcatgctttctcgcgttattttttgtttttttttctctctggttagtcgattagatctagaatccctttatacaaaccctgcaggaacaaaaggacgacgcaagaactggttaggtgcgtcagttgagcgggcaggaagaagagtaaagttgagatgtttcttcagcagttgtgcagatctgagtttggagaggacaaaacaggaggaggggcaaaaaaatgacgaatcttcagacagatttgtgcgagaaagcatgttatttagacatgagaccagcgttggggagatctgtggccactggccttgccaaaaaaaaccaaatctttcagcaaggcacaggcacaggcacgtaaataggtacgacgaacccgtgcaagaacagggacagatctgagctacataaggggtggagagcacaggcgagaggggcgtcatgtttacctgaagctttgcctccggatttctctcctctcctctctcctcgggtagagagcgaggaggaagaaggctgccagaaactattgttactcctaccaagaaaacaaaacaaaacaagaaaaaataaagctcggagcctcgagtggggagggagc

SEQ ID NO: 88427 - DNA, 2231 bp, Zea Mays
tccctccctctatttccccaccccatcctcgcctcccaatcccaatccgtccctaccccagctcagctcagcccagctgcccctcccctcctccccactccccagcgccagatctcccgccatggcctccgacgcccccgcccccgccgccgcgcagcccaagcgccgcggcagctataactgcggccgatgcgggctacccaagaagggccacgtctgcaccgtccccaggctggccgccgccgggggcggcgacaaggcgggggagcagcagccgccgccacccccgccgcagaccaagccgcggcgcgcgctgcagttcgacgacccgccggccgcgtcggacgtgttgctggacgccgtgccgctggcggccgcggcgccggggaagaaggcgagggtggaggccgtggacgtggaggaggaggaggatggcggcggcgactacgacccgccgccgctggattggtgggtcgaggcgggcgcggggcggcgggcgcccggggaggtgctggtggaggtgctgcggcgcatgcccccgcgcgccgtggcggccgcggccggtgtcagccgcggctggcgcgaatgcgcgcgccgcgtctggagggccgccgaggaggtccgcctccgcgccgccggggtcgggcccgtcggcgcgctcatggcgcggtgccccgcgctcgccaggctcgtgctccgcatggacagtgatgttgatgccacaatgctggcatgcattgcattttcctgccccaatttacagtccctggatatcagcatggccaatagcgcggtcaacaggataactggggatgagctatctaggtttgtttcagagaagcgatctctgtcagttcttaaactagatggctgcagcagccttggttttctcaacatcagctcttcaagcctctcaacactttggatgtcaggtctttgttcccttaccaaggcggtcatgaactgcccaaatctgaccgagctatcactggacttccccaaacagaataacgattccaccgacctggctgctctaattgatagtctgggccgcacgtgcccaaacttgagaaacatgcacgtctcgtcgatccgcttatgcaacgaagccgtgtttgctctagaaagcgccaatctcaggggcctatgcatgctgtctttggttctaggttcaaaaataacagatgcagctgttgcatctattgttcgttcatactcaagcttggagctgcttgatttaagtggatctggcattaccgacaacgggcttgggatgatcagcaaagcattccctgacaccctaacacgcctgctcctggctctgtgccccaacatcacgtcgtctggtgtccaggtggctgcagcacagttgccgctcctccgtctcatggactgcggcaacagcatatgcgccaacccccagcctgaagctgggagatcctacttcggcgacctgaccggcgggatcaagttctgctctaagttacctgtccagaagaagcagcagcagcagcaggctgcctgccagaagctgatcataaagcacggcgccctgaagaagctcagcctgtggggctgttcagcgatcgacgccttgtacgtgaactgcccggagctggtcgatctgaacctcaacgcgtgcacgaaccttcatccagagcggctgctgatccagtgccccaagctgaaggacgtgcacgtcagcgggtgccgcgacatgctgatcggcgccgtcaggaaccaggtcctgaacgagttcgcggccgccgagccccggctgccctgcaagcggctggccgacgggtcgaagcgcgtgcacgtgccccacttcatgatcgagcagctggaggagcaggagaaatggggcgggccgcggaagagccagtgcaccgtccacctcacataggcagataggctaggccggccgctgggcgctggcgagtgctactgctggcctgtgaagtgaggccctggtagtcggcggcgcccgcgtcctcgccgtcgaggagctgctgcggcgtcgattcagcgagcctctagacccccctgtatgttccatccagactagagtgccatgatccttctgttcatgctgtgtgtgtgtgtgtttaatctgtggagtctgtaggataataacggggtgcaatgcaaacgtgcccgactcctgtactttgaaaccgtattttgctcttgttcatctaggacaataattgccttcggttttccccaga

SEQ ID NO: 88428 - DNA, 431 bp, Zea Mays
aaatgattgtggtttttttgtcgcaaacttcctccgctactacgattttgatgatggcgacttatcagaattttatactccggatgaaccaatggaccaacgtgcctttgttctgcattaccttacttttcatcgcaacaacatggttgccccccttcctgcagaactgctgcctttcaagtattctccaaggagacgccgctgtttgaaagccaagacttagatagcatagctgaacatgattccctgtgggatccacaaaactgtttatgttacttgttaagtcacttatgtcaggcctatgatcatgtgtttgatactccgcgtgccacttatgttcaatgtgtctaatgtctatgctacttcgcatcagtttctatctgaagtgtgtcaaacataattgttaccagaatgtctatttatgttttctg

SEQ ID NO: 88429 - DNA, 1408 bp, Zea Mays
acacgcacagcggcatcaccagctacagctagcatagcaaggaccacgacgtgccgacggcagagaagcgcaactcaactcgtcgggcttcctttttcccgttctttgaggcgcaaaggaaaaaccaagcaagagggagaaggctacctaacctagctagctaaggacgagcaatggaggtggccgcagcagcgagctacagctactacggcttggaggcggccgacgacgacgtcgacaacctcagggccacggagctcaggctcggcctgccgggcacggaggcggcggaggaggaggaggaggcccggcaggcccagaaggtggcggcgccgccgccgtccacgcccaggggcaagaagcgcgacggcgtcagcggcgggatcgacgccgcgccgccggccgccaaggctcaggtggtggggtggccgccggtgaggtcgtacaggaagagctgcttccagcagcagcaggcgggcgccaagggcaagccagcggcggcggatgagggtgctccgggtccggcgggcggcggggtgttcgtgaaggtgagcatggacggcgcgccctacctcaggaaggtggacctcggcacgtgcgggggctaccgccagctgcgggaggcgctggaagccatgttcctctgcttctccgggccgggctcgggcgacgcgtccggcggcggcggcggcggcagcccctccgacttcgccgtcacctacgaggacaaggacggcgacctcatgctcgtcggcgacgtgcccttcagcatgttcatcggcacctgcaagcggctgaggatcatgaaggggtctgaggccagactaggcctcgggtcagccaagaacaacgactgagggagagggagacgacgaccattgtgcagacccgaccgagatccacgcacacggcggcttgtgcacgcgtgagcgggggattgttgtgcgtccgaggcatggggtagtatgggcttgtgttgtaccatcccctcctcgtctgccatcaatgagaagatgaagctgcttgcttggattggaacgaggggacggagatggagagagatagaaaagctttaatttgtgcatccaaccaagtggagtggagtggaatgatgtgtggtcgctttgttcttttgttttttttttattttgtggtactagtagggggtgttagcaacacaaaaggagtggagttgaatctccatgcacgcgtgtctgtacaaaagctaaagatcactcttctttccctgtcttaagttacatatctctattacttattaagttagcaatagtagcctgcctttttgtgttctgtcattctgcgatctcagccgtccattctaccgttctacaatctcagccgtccaatcccgcacaccagttttccgcgcgcagaaaaaaaaatcaaa

SEQ ID NO: 88430 - DNA, 1211 bp, Zea Mays
tcaccagctacagctagcatagcaaggaccacgacgtgccgacggcagagaagcgcaactcaactcgtcgggcttcctttttcccgttctttgaggcgcaaaggaaaaaccaagcaagagggagaaggctacctaacctagctagctaaggacgagcaatggaggtggccgcagcagcgagctacagctactacggcttggaggcggccgacgacgacgtcgacaacctcagggccacggagctcaggcccggcaggcccagaaggtggcggcgccgccgccgtccacgcccaggggcaagaagcgcgacggcgtcagcggcgggatcgacgccgcgccgccggccgccaaggctcaggtggtggggtggccgccggtgaggtcgtacaggaagagctgcttccagcagcagcaggcgggcgccaagggcaagccagcggcggcggatgagggtgctccgggtccggcgggcggcggggtgttcgtgaaggtgagcatggacggcgcgccctacctcaggaaggtggacctcggcacgtgcgggggctaccgccagctgcgggaggcgctggaagccatgttcctctgcttctccgggccgggctcgggcgacgcgtccggcggcggcggcggcggcagcccctccgacttcgccgtcacctacgaggacaaggacggcgacctcatgctcgtcggcgacgtgcccttcagcatgttcatcggcacctgcaagcggctgaggatcatgaaggggtctgaggccagactaggcctcgggtcagccaagaacaacgactgagggagagggagacgacgaccattgtgcagacccgaccgagatccacgcacacggcggcttgtgcacgcgtgagcgggggattgttgtgcgtccgaggcatggggtagtatgggcttgtgttgtaccatcccctcctcgtctgccatcaatgagaagatgaagctgcttgcttggattggaacgaggggacggagatggagagagatagaaaagctttaatttgtgcatccaaccaagtggagtggagtggaatgatgtgtggtcgctttgttcttttgttttttttttattttgtggtactagtagggggtgttagcaacacaaaaggagtggagttgaatctccatgcacgcgtgtctgtacaaaagctaaagatcactcttctttccctgtcttaagttacatatctcta

SEQ ID NO: 88431 - DNA, 1491 bp, Zea Mays
tcaccagctacagctagcatagcaaggaccacgacgtgccgacggcagagaagcgcaactcaactcgtcgggcttcctttttcccgttctttgaggcgcaaaggaaaaaccaagcaagagggagaaggctacctaacctagctagctaaggacgagcaatggaggtggccgcagcagcgagctacagctactacggcttggaggcggccgacgacgacgtcgacaacctcagggccacggagctcaggcccggcaggcccagaaggtggcggcgccgccgccgtccacgcccaggggcaagaagcgcgacggcgtcagcggcgggatcgacgccgcgccgccggccgccaaggctcaggtggtggggtggccgccggtgaggtcgtacaggaagagctgcttccagcagcagcaggcgggcgccaagggcaagccagcggcggcggatgagggtgctccgggtccggcgggcggcggggtgttcgtgaaggtgagcatggacggcgcgccctacctcaggaaggtggacctcggcacgtgcgggggctaccgccagctgcgggaggcgctggaagccatgttcctctgcttctccgggccgggctcgggcgacgcgtccggcggcggcggcggcggcagcccctccgacttcgccgtcacctacgaggacaaggacggcgacctcatgctcgtcggcgacgtgcccttcagaccactttggattcataccattactatctcacttacatgtgggttcacatgagtcaatgacatgtggggtccatggtatatatctaaaatttggatcttttaatggtatagatccaattgttcctttttttttctccgcagcatgttcatcggcacctgcaagcggctgaggatcatgaaggggtctgaggccagactaggcctcgggtcagccaagaacaacgactgagggagagggagacgacgaccattgtgcagacccgaccgagatccacgcacacggcggcttgtgcacgcgtgagcgggggattgttgtgcgtccgaggcatggggtagtatgggcttgtgttgtaccatcccctcctcgtctgccatcaatgagaagatgaagctgcttgcttggattggaacgaggggacggagatggagagagatagaaaagctttaatttgtgcatccaaccaagtggagtggagtggaatgatgtgtggtcgctttgttcttttgttttttttttattttgtggtactagtagggggtgttagcaacacaaaaggagtggagttgaatctccatgcacgcgtgtctgtacaaaagctaaagatcactcttctttccctgtcttaagttacatatctctattacttattaagttagcaatagtagcctgcctttttgtgttctgtcattctgcgatctcagccgtccattctaccgttctacaatctcagccgtccaatcccgcacaccagttttccgcgcgcagaaaaaaaaatcaaa

SEQ ID NO: 88432 - DNA, 700 bp, Zea Mays
aacagtgtcgccactcgccacagagcgctccatcaacacgaccgccggtataaacgcagcccccctccggcctccaccaaggccaacattgctcaggctgctcccaactcccatcctccccctcccggagtacgaagtactagaaagagagcggctttcctctaagaatggcgggtggcggcgccggcgacgacgacgtggtggtggtgagctgcggcggcagaggcggcggcgaccccggcgcatacgccgcggtgctcaagaggaagctcgacctgtactgcgccgccgtcgccaaatccatggtgtggttcctcctcctcctacccctccaaagattagacttttctaggcctatttgagtattggttgtgtgattgtgccttgtgtgcttcgatgtttcagtttcatctctagcttaatttcgagtcacaatggtaggaattgcatgtttttcagttatttccccccttcattttggggaggggagttttactgcaatttctagtttttggaaatcacaagcagcagaagaaaaagtcggttgctttatttgaggactctggaaaatgttgaattgattggtcggtatgcttgtcgtgtaatcctacgctgccattcttaagccagggctacataaaaactcacagtagattttagcacccaccaagcaccaacagatagaaagaaagaaaaaaaa

SEQ ID NO: 88433 - DNA, 908 bp, Zea Mays
aacagtgtcgccactcgccacagagcgctccatcaacacgaccgccggtataaacgcagcccccctccggcctccaccaaggccaacattgctcaggctgctcccaactcccatcctccccctcccggagtacgaagtactagaaagagagcggctttcctctaagaatggcgggtggcggcgccggcgacgacgacgtggtggtggtgagctgcggcggcagaggcggcggcgaccccggcgcatacgccgcggtgctcaagaggaagctcgacctgtactgcgccgccgtcgccaaatccatggtgacatagatggggcaagcctagttacaaactctaatgtcatagaagatgatgattttcaaggcaagccaaccaacagtggcacatcaaaggaactgtcagacgatgatggtgaccttgaagagaatactgaccccgctaacgccaagaagatgaggagaatggtgtcaaaccgggaatcggctaggcgatcaagaaagaggaagcaagcacacttgaccgatcttgaatcacaggtttccaggttaacgtctgagaatgcatctttgctgaagcgactggctgatatgactcagaaatacaaggacgcttccgttgacaataaaaatctaacagttgatgttgagactatgaggagaaaggttcgttcgtcttgaatgcatcacagacctttttcttcttttttttgttgtacgagaactcttaactgcatccatttatcgatcataacatttttactgggctctgtgtatactcaccgtaatcaacgtttacatctctctagatggctgcaaagggcagtgaaagtaatatgattgttcatagttcttattttagaacctgcaagttcagttttagtttctaatggtttttaactgcaca

SEQ ID NO: 88434 - DNA, 1320 bp, Zea Mays
aacagtgtcgccactcgccacagagcgctccatcaacacgaccgccggtataaacgcagcccccctccggcctccaccaaggccaacattgctcaggctgctcccaactcccatcctccccctcccggagtacgaagtactagaaagagagcggctttcctctaagaatggcgggtggcggcgccggcgacgacgacgtggtggtggtgagctgcggcggcagaggcggcggcgaccccggcgcatacgccgcggtgctcaagaggaagctcgacctgtactgcgccgccgtcgccaaatccatggaagctaaatcacaagaacattcgttgggctaccccaactcacaagcttcagatgcttcgcaattgatttctcaagcttcctttgatggtgacatagatggggcaagcctagttacaaactctaatgtcatagaagatgatgattttcaaggcaagccaaccaacagtggcacatcaaaggaactgtcagacgatgatggtgaccttgaagagaatactgaccccgctaacgccaagaagatgaggagaatggtgtcaaaccgggaatcggctaggcgatcaagaaagaggaagcaagcacacttgaccgatcttgaatcacaggtttccaggttaacgtctgagaatgcatctttgctgaagcgactggctgatatgactcagaaatacaaggacgcttccgttgacaataaaaatctaacagttgatgttgagactatgaggagaaaggtgaacatagccgaggaagctgtcaggaggctaactgggatcaccctcatgctaccgaccgcttttgagaagcccacgagcagcgcgcccctgtcatcatgtccatctgatgcagcttctgcttctgcttctgccgccattgaagacagcgtgaagcatttcctccaggcgccacttgaaaacagtgggatcatcccaaacgcagcagtttttcagaccaagccagcttctctgcaccgtgttgctagcctggagaacctgcagaagaggatcgtcggggatgcaatgtattccgagaccgcgtcaacgacattctcagatcctgaagctcttgccgataggtaaaggttgctcctgtcctgtgatgaacagccgtgtgatgctctagcggcctaagtgcttctggtaatggaagttgtagcacccatgcgcctgggtggggtctacacagtgatttgtacactattttgaaggttaataataattgttgagaaatgatctcatccctttgtacctatataagtaaagtattccattaataaagagaatagagttttcactcttc

SEQ ID NO: 88435 - DNA, 1232 bp, Zea Mays
aacagtgtcgccactcgccacagagcgctccatcaacacgaccgccggtataaacgcagcccccctccggcctccaccaaggccaacattgctcaggctgctcccaactcccatcctccccctcccggagtacgaagtactagaaagagagcggctttcctctaagaatggcgggtggcggcgccggcgacgacgacgtggtggtggtgagctgcggcggcagaggcggcggcgaccccggcgcatacgccgcggtgctcaagaggaagctcgacctgtactgcgccgccgtcgccaaatccatggtgacatagatggggcaagcctagttacaaactctaatgtcatagaagatgatgattttcaaggcaagccaaccaacagtggcacatcaaaggaactgtcagacgatgatggtgaccttgaagagaatactgaccccgctaacgccaagaagatgaggagaatggtgtcaaaccgggaatcggctaggcgatcaagaaagaggaagcaagcacacttgaccgatcttgaatcacaggtttccaggttaacgtctgagaatgcatctttgctgaagcgactggctgatatgactcagaaatacaaggacgcttccgttgacaataaaaatctaacagttgatgttgagactatgaggagaaaggtgaacatagccgaggaagctgtcaggaggctaactgggatcaccctcatgctaccgaccgcttttgagaagcccacgagcagcgcgcccctgtcatcatgtccatctgatgcagcttctgcttctgcttctgccgccattgaagacagcgtgaagcatttcctccaggcgccacttgaaaacagtgggatcatcccaaacgcagcagtttttcagaccaagccagcttctctgcaccgtgttgctagcctggagaacctgcagaagaggatcgtcggggatgcaatgtattccgagaccgcgtcaacgacattctcagatcctgaagctcttgccgataggtaaaggttgctcctgtcctgtgatgaacagccgtgtgatgctctagcggcctaagtgcttctggtaatggaagttgtagcacccatgcgcctgggtggggtctacacagtgatttgtacactattttgaaggttaataataattgttgagaaatgatctcatccctttgtacctatataagtaaagtattccattaataaagagaatagagttttcactcttc

SEQ ID NO: 88436 - DNA, 2183 bp, Zea Mays
aacagtgtcgccactcgccacagagcgctccatcaacacgaccgccggtataaacgcagcccccctccggcctccaccaaggccaacattgctcaggctgctcccaactcccatcctccccctcccggagtacgaagtactagaaagagagcggctttcctctaagaatggcgggtggcggcgccggcgacgacgacgtggtggtggtgagctgcggcggcagaggcggcggcgaccccggcgcatacgccgcggtgctcaagaggaagctcgacctgtactgcgccgccgtcgccaaatccatggtgacatagatggggcaagcctagttacaaactctaatgtcatagaagatgatgattttcaaggcaagccaaccaacagtggcacatcaaaggaactgtcagacgatgatggtgaccttgaagagaatactgaccccgctaacgccaagaagatgaggagaatggtgtcaaaccgggaatcggctaggcgatcaagaaagaggaagcaagcacacttgaccgatcttgaatcacaggtttcaattgtgttagaatatagatgagtgctcaagttaatatccaactaaaatgaatatactcgtgctaattaccgcacaactctccaggtttccaggttaacgtctgagaatgcatctttgctgaagcgactggctgatatgactcagaaatacaaggacgcttccgttgacaataaaaatctaacagttgatgttgagactatgaggagaaaggttcgttcgtcttgaatgcatcacagacctttttcttcttttttttgttgtacgagaactcttaactgcatccatttatcgatcataacatttttactgggctctgtgtatactcaccgtaatcaacgtttacatctctctagatggctgcaaagggcagtgaaagtaatatgattgttcatagttcttattttagaacctgcaagttcagttttagtttctaatggtttttaactgcacacaaaaggtatggcagcattttcatttgattttctgaaattctgcataccttctacaagtgtgataggaataatttagttccttggttttgttttcttgcagtatcatttcagaaattttatttccttgtattatatatatatatatatttaaagaataacagtgttctcttacaggtgtgaggagttgtaaaacgaaacaaaacattaaaagcgcacataccatgccgcaatgcgccaagtgtgtgtcccattaagcctgtggggtgttgcccttgccttgccttgtggatgggctgctctatctcaaatgataccgagaggagtccaaacagaatactaccatacaaacatttcttaatgcttgtgtgtgagtatatgcacaactctgtactcttgtatcattagtaaaactgtgtttttttaaatatccatgctgaagggttctaacataatcatgttaagtttttatgaaaaaaatttgcttaaactatgactgttccaatcagttttttacctaaagaaggtattcacaagaatcttggcatttaacagacctgcacaccttgactttatgaaaagggacatgtcttcaggaacacagtactgttttaattccaggtgaacatagccgaggaagctgtcaggaggctaactgggatcaccctcatgctaccgaccgcttttgagaagcccacgagcagcgcgcccctgtcatcatgtccatctgatgcagcttctgcttctgcttctgccgccattgaagacagcgtgaagcatttcctccaggcgccacttgaaaacagtgggatcatcccaaacgcagcagtttttcagaccaagccagcttctctgcaccgtgttgctagcctggagaacctgcagaagaggatcgtcggggatgcaatgtattccgagaccgcgtcaacgacattctcagatcctgaagctcttgccgataggtaaaggttgctcctgtcctgtgatgaacagccgtgtgatgctctagcggcctaagtgcttctggtaatggaagttgtagcacccatgcgcctgggtggggtctacacagtgatttgtacactattttgaaggttaataataattgttgagaaatgatctcatccctttgtacctatataagtaaagtattccattaataaagagaatagagttttcactcttca

SEQ ID NO: 88437 - DNA, 2094 bp, Zea Mays
aacagtgtcgccactcgccacagagcgctccatcaacacgaccgccggtataaacgcagcccccctccggcctccaccaaggccaacattgctcaggctgctcccaactcccatcctccccctcccggagtacgaagtactagaaagagagcggctttcctctaagaatggcgggtggcggcgccggcgacgacgacgtggtggtggtgagctgcggcggcagaggcggcggcgaccccggcgcatacgccgcggtgctcaagaggaagctcgacctgtactgcgccgccgtcgccaaatccatggtgacatagatggggcaagcctagttacaaactctaatgtcatagaagatgatgattttcaaggcaagccaaccaacagtggcacatcaaaggaactgtcagacgatgatggtgaccttgaagagaatactgaccccgctaacgccaagaagatgaggagaatggtgtcaaaccgggaatcggctaggcgatcaagaaagaggaagcaagcacacttgaccgatcttgaatcacaggtttccaggttaacgtctgagaatgcatctttgctgaagcgactggctgatatgactcagaaatacaaggacgcttccgttgacaataaaaatctaacagttgatgttgagactatgaggagaaaggttcgttcgtcttgaatgcatcacagacctttttcttcttttttttgttgtacgagaactcttaactgcatccatttatcgatcataacatttttactgggctctgtgtatactcaccgtaatcaacgtttacatctctctagatggctgcaaagggcagtgaaagtaatatgattgttcatagttcttattttagaacctgcaagttcagttttagtttctaatggtttttaactgcacacaaaaggtatggcagcattttcatttgattttctgaaattctgcataccttctacaagtgtgataggaataatttagttccttggttttgttttcttgcagtatcatttcagaaattttatttccttgtattatatatatatatatatttaaagaataacagtgttctcttacaggtgtgaggagttgtaaaacgaaacaaaacattaaaagcgcacataccatgccgcaatgcgccaagtgtgtgtcccattaagcctgtggggtgttgcccttgccttgccttgtggatgggctgctctatctcaaatgataccgagaggagtccaaacagaatactaccatacaaacatttcttaatgcttgtgtgtgagtatatgcacaactctgtactcttgtatcattagtaaaactgtgtttttttaaatatccatgctgaagggttctaacataatcatgttaagtttttatgaaaaaaatttgcttaaactatgactgttccaatcagttttttacctaaagaaggtattcacaagaatcttggcatttaacagacctgcacaccttgactttatgaaaagggacatgtcttcaggaacacagtactgttttaattccaggtgaacatagccgaggaagctgtcaggaggctaactgggatcaccctcatgctaccgaccgcttttgagaagcccacgagcagcgcgcccctgtcatcatgtccatctgatgcagcttctgcttctgcttctgccgccattgaagacagcgtgaagcatttcctccaggcgccacttgaaaacagtgggatcatcccaaacgcagcagtttttcagaccaagccagcttctctgcaccgtgttgctagcctggagaacctgcagaagaggatcgtcggggatgcaatgtattccgagaccgcgtcaacgacattctcagatcctgaagctcttgccgataggtaaaggttgctcctgtcctgtgatgaacagccgtgtgatgctctagcggcctaagtgcttctggtaatggaagttgtagcacccatgcgcctgggtggggtctacacagtgatttgtacactattttgaaggttaataataattgttgagaaatgatctcatccctttgtacctatataagtaaagtattccattaataaagagaatagagttttcactcttcat

SEQ ID NO: 88438 - DNA, 1428 bp, Zea Mays
attgctcaggctgctcccaactcccatcctccccctcccggagtacgaagtactagaaagagagcggctttcctctaagaatggcgggtggcggcgccggcgacgacgacgtggtggtggtgagctgcggcggcagaggcggcggcgaccccggcgcatacgccgcggtgctcaagaggaagctcgacctgtactgcgccgccgtcgccaaatccatggaagctaaatcacaagaacattcgttgggctaccccaactcacaagcttcagatgcttcgcaattgatttctcaagcttcctttgatggtgacatagatggggcaagcctagttacaaactctaatgtcatagaagatgatgattttcaaggcaagccaaccaacagtggcacatcaaaggaactgtcagacgatgatggtgaccttgaagagaatactgaccccgctaacgccaagaagatgaggagaatggtgtcaaaccgggaatcggctaggcgatcaagaaagaggaagcaagcacacttgaccgatcttgaatcacaggtttccaggttaacgtctgagaatgcatctttgctgaagcgactggctgatatgactcagaaatacaaggacgcttccgttgacaataaaaatctaacagttgatgttgagactatgaggagaaaggtgtgaggagttgtaaaacgaaacaaaacattaaaagcgcacataccatgccgcaatgcgccaagtgtgtgtcccattaagcctgtggggtgttgcccttgccttgccttgtggatgggctgctctatctcaaatgataccgagaggagtccaaacagaatactaccatacaaacatttcttaatgcttgtgtgtgaacatagccgaggaagctgtcaggaggctaactgggatcaccctcatgctaccgaccgcttttgagaagcccacgagcagcgcgcccctgtcatcatgtccatctgatgcagcttctgcttctgcttctgccgccattgaagacagcgtgaagcatttcctccaggcgccacttgaaaacagtgggatcatcccaaacgcagcagtttttcagaccaagccagcttctctgcaccgtgttgctagcctggagaacctgcagaagaggatcgtcggggatgcaatgtattccgagaccgcgtcaacgacattctcagatcctgaagctcttgccgataggtaaaggttgctcctgtcctgtgatgaacagccgtgtgatgctctagcggcctaagtgcttctggtaatggaagttgtagcacccatgcgcctgggtggggtctacacagtgatttgtacactattttgaaggttaataataattgttgagaaatgatctcatccctttgtacctatataagtaaagtattccattaataaagagaatagagttttcactcttcat

SEQ ID NO: 88439 - DNA, 2124 bp, Zea Mays
atggaggagagcgacgcggcggagggggtggcggtgcagctgatcgacggcgagggcgagttcgcggccgagggggcggagcggttcatggcggccgccggcgtcgccgggtgcgggctctcctacgccgtcgtctccatcatggggccacagagcagcggaaagagtaccttgttgaatcaattatttggtaccaattttagggagatggatgcattcagaggaaggagtcaaactactaaaggtatctggatagcacgctgtgttggtgttgagccttgtactgttgtattggatcttgagggtaccgatggaagagagagaggagaggatgacactgcatttgagaagcaaagttcgttatttgctcttgcaatttcagatatagttctaattaacatgtggtgccatgatattggccgtgagcaagctgccaataaaccactcctaaagacagtatttcagactccacttgaacatctagaaccagttctaagggaggatatacaaaagatatggaactctgttgccaagccagaggcacacaaagacacccctatcaatgaattcttcaatgtgcaagttactgcattgtccagttttgaggaaaaagaggaccagtttagggaacaggttcaacaacttaggcagagattttcaaattcaattgcaccaggaggtcttgcaggtgatagaagaggagtagttcctgcttcaggttttttgtttagttcacaacagatttggaaagttatccgagagaacaaggatcttgatcttcctgctcacaaggtaatggttgctacagttcgatgtgatgaaattgcaaacgagaagtttggatgcataacctcagacacagaatggttggatgtggagagtgctgtccaatctggtccagtacctggttttggaaaaaaacttggcaatatcgtcgacgttcacttgcaagagtatgacaaagaagctgtctattttgatgaagctgtaaggaaaggaaaacgacagcatttggagtccagaatactgaatcttgtccaacctgcattccagaaaatgttgactcatctgcgtgtgaaggctctagaaaaatttaaaactggtcttaattcatctttggagagtggaaaaggattcgcagtatctgctcgagacaatactgaatgctctctcaaagaatttgaacaaggctgtgcagtgtttagccatgacaaggattcaattccaagggtctggacaggaaaggaagatgttcgtgcaatagcaaaggaagctcgatctgcggctctcaaacttctgtctgtaatggcggccattcgctgggatgacgagccagataggattgaaagcatcctcacttcaacacttctggaaggctctgttgtatcaaagattgcaagtgctgcttctgctgatccacttgcttctaccacttgggaagagattgctccaaagcatacaatgattaccccgtctcagtgcaagtcactgtggaaacaatttaaagcagaaactgagttcacgattacacaagcagtatccacacagcaagctcacaggcgcggtaatagtaaactgcctcctccttgggcaatcgtggccattgctattcttggtttcaatgagatcatggtgcttattaggaatcccatttatctgttcttgctatttgtgggctacttgatggtcaaagctttggcgatgcagctagatgtcagcagagaattccagaatggagtggttcctggaataatctctgtgtcggtgaagctcctaccagcgatacagaacctggtgaacaaagtggcagccgagcagcaagctgagcaccagcagcagcacccgcaccctcaccctcacactcaggccccaggacccccacagccacagatgcagccgccgccgctgctcctgagcccgagaagccccatgagcgagctgcggaggctgcacatgccgcgcagcccgcgcagcccgcgcaaggtggcgtcgccggcgccatcctcgtcgtcgtcatcgtctgccgtgtcgtcccctaggcacgttggcgaggaccagaagccaagaccaggggcagtcggggcgcctgagaacgaggccaccgtcgccgactcgatagtgtga

SEQ ID NO: 88440 - DNA, 369 bp, Zea Mays
atgctcctttcccaatctgctccagcacctcatactgatccatcctctcggggtctgcagctcacacacagacacaacaagcttttctcctttcctttctactgtcctgagccaccagagagatccgggacgaagcgctccgtggcccggagctcggagggcggctccggcgggggggacggcgtcacgcgcgaagatctcgcggcatttggtcctagaccagatagacgcggcgtcggcggcgggaagcgcgaggggacgaggcgagaaaagtggggtggggtgggttcaaactcgccgggagctccctttccaatccaatccagtccagtcccgccctatatagcctcccaaaggcaatggggatga

SEQ ID NO: 88441 - DNA, 348 bp, Zea Mays
atgaggaagcaaaactatgaacatggtacacatgcgcattatataatgattgaagttgagaagattgttcgatttgacatgaggctagccaatgaggatgttgggatgcttgcatttacctcggaacaaattccagcacctttccttctccctaaaatgaggaaatctttgactgtaaaggatccagagaagtatgagttcaagccgaagcagctgttgaaacagattgccaccatctatgtccatatcttaaggggtgacaaggaatctgtcttcccatctgcaatctcgaaagatggcagagcatacaacgatcagagtcctccaacagagaaccggcagctctag

SEQ ID NO: 88442 - DNA, 628 bp, Zea Mays
ctgacatcaacttgtaaatatttttttctaagaactggaaagcaacgagaccgaagattaccgtctggaattttacatgcgaaaaatttgcagacgaggaacacaagagttgcctacgtacgatttacatcttaagaccttactttactttagggtaggaaaaagaacctccgacgtaactaagatcagtccagtaattaaattatttacctaggacgccacgtcacgtcagtcgtcgatggccttggccctcatgcagcaggacgggccgcgggccttctgcttgggccgccggctgtcgcgccgccgcccgtacaggtactccacaagctgcacccgcgaccgccgctgcacctgcacggtggtgctcgccgccgccgccttggccgcgcgccgcgccgcgcgctcctcctcgtgccgcagcagcgcgtgctggaaccgctgcagctccagctccagccgcccggccttgtccgacatcttgcgcacgcgctccaggatcttgcgctggctccggctgcgcaggtccacgtcgccgccgccgtcgcccgccgacgtgaactcctccgccttcttcaggagcttagcgttcgcgtcgaccagctccgcgatggcgccctccgcgccg

SEQ ID NO: 88443 - DNA, 579 bp, Zea Mays
accgaagattaccgtctggaattttacatgcgaaaaatttgcagacgaggaacacaagagttgcctacgtacgatttacatcttaagaccttactttactttagggtaggaaaaagaacctccgacgtaactaagatcagtccagtaattaaattatttacctaggacgccacgtcacgtcagtcgtcgatggccttggccctcatgcagcaggacgggccgcgggccttctgcttgggccgccggctgtcgcgccgccgcccgtacaggtactccacaagctgcacccgcgaccgccgctgcacctgcacggtggtgctcgccgccgccgccttggccgcgcgccgcgccgcgcgctcctcctcgtgccgcagcagcgcgtgctggaaccgctgcagctccagctccagccgcccggccttgtccgacatcttgcgcacgcgctccaggatcttgcgctggctccggctgcgcaggtccacgtcgccgccgccgtcgcccgccgacgtgaactcctccgccttcttcaggagcttagcgttcgcgtcgaccagctccgcgatggcgccctccgcgccg

SEQ ID NO: 88444 - DNA, 1843 bp, Zea Mays
atccctctctagtctctaccctttccgcctcggcacctccccacccctctcgccttcgcttcgtcgccacggcgagccccacgccgccgatcggggcgccgccagcggcggcggcgcccgatccgatggaagcggaggtggggccgccgaatccgccgcggccggagccagccggatcggagcccgacgacgcgcgcctctccccgcctcctcctgctcctgctccgccgcctccgcccccgcctcctcccgccgccgaggctgccgccgcgcccaccgcctccgcggccttctcgctgcaggctccagctccggcgccggcggaggcgaacggcagctccgacaggaagaggaggaggaaggcggaggacggggacgggtgcaagacctgcagctgcaagaagtccaggtgcctcaagctttactgtgtgtgctttgcttctgggttacattgtactgaatcatgtggatgtgaaccttgtcataacaagccacaattgcaaggtactctgcggatggcaacagttttacctctgaaacctgtccaaacattcgaagctggccaagatatagtggaacaagtcataaggtctcctatggatcttattagaagaaaatgcacatgcaagaagtcaggctgccttaagaagtactgcgactgctaccagggaggggcaggatgctccatcaactgtaaatgcgatgattgtagaaacccatttgggagaaaagtcggcgttattttggacggtaaaagcagtcttactgcacctatactgcacgaaagaaacgggactgaagttgactcaagcgacgaggaagacgacttctacatgaatcgacagctctccccaatacctccgtctccggtgtctagggagtcttcgttccaacaggagactctagtcggcgtcgaggtccagaccatgaacgggcacctgtaccccaaaccactgacccaggtgcgccccgagccgtcgtcctggcagctctcccggaggcccatcgaggaaccgcgcggggagatatggcgcttctcgaggaggccgagcgaggacgggacctctgatgccatggaagtgcacgccgtcgccccgagagagagcaagaaggcggcagaggtccgcggggacaggttcggcatcccgcggtgcatcgaggtgatgagcgccatggcggagctgtcgccggtggagaagtcgctggcgcccgacgtcttcttggacgcgagcaaccgggagatcttcctctcgctgagtgtagatattaggccaatctggctgaggcgcaagatgaagagccttgtctagctagacgctacaacagagatagcctgaggaattttcgtcgtcggcgtatacctaataaacccgtgctgtactgtagatatataatatatgtgccttagattcagagttgagttctggaccgatgggtgtaatataccttagtgctaatttatggtgcatgctgttatattggagttcttcctatggtaagttcgttatgatttcagctagaagtttaacagtaaattatctctctctctcttccttggatagatatgttcatgaacctgtttctgacgtgcaaggtgtcattgactgttgactttctcattccatttggccaatggtcgcagtgtttcttggtgcccatagcctgatattaaaccatgttagggcttgttcggtttcttctcaatccatctggattgagtgagatttggtaggtttaaatctcaaacaagtcaaactttttcttatttttttccaatttcattcaatccatgttgttggtcacttgttcttaaatactatgaatcaagaacaatacaacacaa

SEQ ID NO: 88445 - DNA, 2672 bp, Zea Mays
cccccatctcgcatctcgcgtactatttccacaattccaccgacccgtcgtcgcgccactccgtcttgctcaacaccagtcaccactgctctccaagcctccaccagcgtccagccgaaccatcgccaccgcaggatggcctcccgcctcctcctccacctccacctgcgccgccgcgggcgcgggatcccgggctgccccgtgcccgcgctacccctccacgccgcgcggctcctctcctcctccccaccaaccgcagctgcggcctcgtcgtcggcggcgggcggcgggggcatcgagaaggtgctggtggcgaaccggggcgagatcgcgtgccgggtcatgcgcaccgcgcgccgcctcggggtcgccaccgtggccgtgtacagcgacgccgaccgcggggcgctgcacgtgcgcgccgccgacgaggccgtcaggatcggcccgccgcccgcgcgggagagctacctcaacgccagggccatcatcgaggccgccctccgcaccggcgcccaggctatccacccgggatacggtttcctttcagagagtgctgatttcgcgcagctctgtgaagccgaggggctcaaattcattggaccaccagcatctgcaatccgagacatgggcgataagagtgcatccaagaggatcatgggtgctgctggcgtgccgctggttccagggtaccatggggctgaccaggacgttgagctgttgaaactcgaagcggataaaatcggttatcctgttttaatcaaacccacccatggtggagggggcaaggggatgagaatagtcgaaaggcctgatgaatttgtggattctgtactgagcgctcaacgggaagctgcagcatcgtttggtgtaaacacactattgattgagaagtatattactcaaccaagacacgtagaagtccaggtatttggcgaccaacatggaaatgcgatatacctttatgagagagactgcagtctacagagaaggcatcagaagatcatcgaggaagctccagctccaaatgtgccagctgagtttcggtctcatattggtggagctgctgtatctgcagcaaaggcagttggttactacaatgctggaacagtggagtttattgtggacactctttctggagagttctacttcatggagatgaatactcgactccaggttgaacacccagtgacagagatgattgttggtcaagatcttgtggagtggcaaatacgtgttgcgaatggagaacgactaccattatctcaggagcaggttccattaaatggacatgcatttgaagcacggatatatgctgaaaatgttccaagagggtttctccctgcaacaggaaccttacatcactaccgaccagtcccttctgacccaactgtaagagttgaaactggagtcgaagaaggagataccgtcagcatgcattatgatccaatgatagccaaacttgtagtatggggtgaaagtcgcacggctgcactagtcaagctaaagaagtgtttatcaacctttcagattgcaggtttgccaaccaatgttgatttcctccaagaactcgcaagccacagtgcctttgaaaaaggcctagttgacactcacttcattgaacgttataaagatgaccttttgagtatttctacaaagtcctcaaaagaatctcatggtgtagctgagcttggtgcaattttggctgctgcatgcatttgcaagaaggaacacattacatctaaagaatcactacgagccaacaagtcactatctgtatggtacaataatccacctttcaggatgcatcactttgctaggcatcccctggatcttgagttggaagagaatgatggattcagtgagaaacttcttaaactgttcattactcataagtttgatggaagctacttcatcgagacagaagatggcacttctggtttagatgtcaaagttgatcacaagggtgaccacgattttcgtgtggatgtttctggtctgcaaactgatgtgactctagcatcttattcaaagggaaacagcaaacacatacatgtctggcatgggaatcatcaccaccattacagacagactgtaagagctgagcatgcagttgaagatagctcccaacctagtcatgcttctgaagggaagtcgcatccaaaagggagtgttctggcaccgatggctggcttggttgtgaaagttttgcttgaagacggggctcaggtggacgcagggcagcctgtcatggttatggaagcaatgaagatggagcatgttgtgaaggcgcctcgtgccggatacgtgagtggcctgaaggttactgcaggccaacaagtttttgactccagtgtccttttcacaatcaaggacagctctgcaaactgagatggagcgatcactgccctagagtagttgcactgcaactgcatcaagcacccagcggatgctcgtccagatagagaagcgaaggaaataaactgctgggttcgtctgcgggcaatccaatccggcagggcaagcagacggcgcatggtgtttcccggcttgatgcgaatccatcatccgccgcaacaattccattgcgtagtgtacacgaacatgaaactgtaccacgctgagcaagaggaattcttgtttgatttgtgcaatgaaataagttgattcca

SEQ ID NO: 88446 - DNA, 2919 bp, Zea Mays
cccccatctcgcatctcgcgtactatttccacaattccaccgacccgtcgtcgcgccactccgtcttgctcaacaccagtcaccactgctctccaagcctccaccagcgtccagccgaaccatcgccaccgcaggatggcctcccgcctcctcctccacctccacctgcgccgccgcgggcgcgggatcccgggctgccccgtgcccgcgctacccctccacgccgcgcggctcctctcctcctccccaccaaccgcagctgcggcctcgtcgtcggcggcgggcggcgggggcatcgagaaggtgctggtggcgaaccggggcgagatcgcgtgccgggtcatgcgcaccgcgcgccgcctcggggtcgccaccgtggccgtgtacagcgacgccgaccgcggggcgctgcacgtgcgcgccgccgacgaggccgtcaggatcggcccgccgcccgcgcgggagagctacctcaacgccagggccatcatcgaggccgccctccgcaccggcgcccaggctatccacccgggatacggtttcctttcagagagtgctgatttcgcgcagctctgtgaagccgaggggctcaaattcattggaccaccagcatctgcaatccgagacatgggcgataagagtgcatccaagaggatcatgggtgctgctggcgtgccgctggttccagggtaccatggggctgaccaggacgttgagctgttgaaactcgaagcggataaaatcggttatcctgttttaatcaaacccacccatggtggagggggcaaggggatgagaatagtcgaaaggcctgatgaatttgtggattctgtactgagcgctcaacgggaagctgcagcatcgtttggtgtaaacacactattgattgagaagtatattactcaaccaagacacgtagaagtccaggtaagattcaattgatattggacctgccacagtccttcatacaattggaaacctgcagtaactctttgttgtcttcccttgtactgcattaatgtttgaaggtatttggcgaccaacatggaaatgcgatatacctttatgagagagactgcagtctacagagaaggcatcagaagatcatcgaggaagctccagctccaaatgtgccagctgagtttcggtctcatattggtggagctgctgtatctgcagcaaagttggttactacaatgctggaacagtggagtttattgtggacactctttctggagagttctacttcatggagatgaatactcgactccaggttgaacacccagtgacagagatgattgttggtcaagatcttgtggagtggcaaatacgtgttgcgaatggagaacgactaccattatctcaggagcaggttccattaaatggacatgcatttgaagcacggatatatgctgaaaatgttccaagagggtttctccctgcaacaggaaccttacatcactaccgaccagtcccttctgacccaactggtgaaatatggacataccctatgaccaattatattactagttacatttcagtgttgcacaattaacatattcttcctcagtaagagttgaaactggagtcgaagaaggagataccgtcagcatgcattatgatccaatgatagccaaacttgtagtatggggtgaaagtcgcacggctgcactagtcaagctaaagaagtgtttatcaacctttcagattgcaggtttgccaaccaatgttgatttcctccaagaactcgcaagccacagtgcctttgaaaaaggcctagttgacactcacttcattgaacgttataaagatgaccttttgagtatttctacaaagtcctcaaaagaatctcatggtgtagctgagcttggtgcaattttggctgctgcatgcatttgcaagaaggaacacattacatctaaagaatcactacgagccaacaagtcactatctgtatggtacaataatccacctttcaggatgcatcactttgctaggcatcccctggatcttgagttggaagagaatgatggattcagtgagaaacttcttaaactgttcattactcataagtttgatggaagctacttcatcgagacagaagatggcacttctggtttagatgtcaaagttgatcacaagggtgaccacgattttcgtgtggatgtttctggtctgcaaactgatgtgactctagcatcttattcaaagggaaacagcaaacacatacatgtctggcatgggaatcatcaccaccattacagacagactgtaagagctgagcatgcagttgaagatagctcccaacctagtcatgcttctgaagggaagtcgcatccaaaagggagtgttctggcaccgatggctggcttggttgtgaaagttttgcttgaagacggggctcaggtggacgcagggcagcctgtcatggttatggaagcaatgaagatggagcatgttgtgaaggcgcctcgtgccggatacgtgagtggcctgaaggttactgcaggccaacaagtttttgactccagtgtccttttcacaatcaaggacagctctgcaaactgagatggagcgatcactgccctagagtagttgcactgcaactgcatcaagcacccagcggatgctcgtccagatagagaagcgaaggaaataaactgctgggttcgtctgcgggcaatccaatccggcagggcaagcagacggcgcatggtgtttcccggcttgatgcgaatccatcatccgccgcaacaattccattgcgtagtgtacacgaacatgaaactgtaccacgctgagcaagaggaattcttgtttgatttgtgcaatgaaataagttgattccatcaccgttccatttctcataattagtaataataatgaataattagtaataatataatgaggaatgtgttt

SEQ ID NO: 88447 - DNA, 2536 bp, Zea Mays
cgccactccgtcttgctcaacaccagtcaccactgctctccaagcctccaccagcgtccagccgaaccatcgccaccgcaggatggcctcccgcctcctcctccacctccacccgcgctacccctccacgccgcgcggctcctctcctcctccccaccaaccgcagctgcggcctcgtcgtcggcggcgggcggcgggggcatcgagaaggtgctggtggcgaaccggggcgagatcgcgtgccgggtcatgcgcaccgcgcgccgcctcggggtcgccaccgtggccgtgtacagcgacgccgaccgcggggcgctgcacgtgcgcgccgccgacgaggccgtcaggatcggcccgccgcccgcgcgggagagctacctcaacgccagggccatcatcgaggccgccctccgcaccggcgcccaggctatccacccgggatacggtttcctttcagagagtgctgatttcgcgcagctctgtgaagccgaggggctcaaattcattggaccaccagcatctgcaatccgagacatgggcgataagagtgcatccaagaggatcatgggtgctgctggcgtgccgctggttccagggtaccatggggctgaccaggacgttgagctgttgaaactcgaagcggataaaatcggttatcctgttttaatcaaacccacccatggtggagggggcaaggggatgagaatagtcgaaaggcctgatgaatttgtggattctgtactgagcgctcaacgggaagctgcagcatcgtttggtgtaaacacactattgattgagaagtatattactcaaccaagacacgtagaagtccaggtatttggcgaccaacatggaaatgcgatatacctttatgagagagactgcagtctacagagaaggcatcagaagatcatcgaggaagctccagctccaaatgtgccagctgagtttcggtctcatattggtggagctgctgtatctgcagcaaaggcagttggttactacaatgctggaacagtggagtttattgtggacactctttctggagagttctacttcatggagatgaatactcgactccaggttgaacacccagtgacagagatgattgttggtcaagatcttgtggagtggcaaatacgtgttgcgaatggagaacgactaccattatctcaggagcaggttccattaaatggacatgcatttgaagcacggatatatgctgaaaatgttccaagagggtttctccctgcaacaggaaccttacatcactaccgaccagtcccttctgacccaactgtaagagttgaaactggagtcgaagaaggagataccgtcagcatgcattatgatccaatgatagccaaacttgtagtatggggtgaaagtcgcacggctgcactagtcaagctaaagaagtgtttatcaacctttcagattgcaggtttgccaaccaatgttgatttcctccaagaactcgcaagccacagtgcctttgaaaaaggcctagttgacactcacttcattgaacgttataaagatgaccttttgagtatttctacaaagtcctcaaaagaatctcatggtgtagctgagcttggtgcaattttggctgctgcatgcatttgcaagaaggaacacattacatctaaagaatcactacgagccaacaagtcactatctgtatggtacaataatccacctttcaggatgcatcactttgctaggcatcccctggatcttgagttggaagagaatgatggattcagtgagaaacttcttaaactgttcattactcataagtttgatggaagctacttcatcgagacagaagatggcacttctggtttagatgtcaaagttgatcacaagggtgaccacgattttcgtgtggatgtttctggtctgcaaactgatgtgactctagcatcttattcaaagggaaacagcaaacacatacatgtctggcatgggaatcatcaccaccattacagacagactgtaagagctgagcatgcagttgaagatagctcccaacctagtcatgcttctgaagggaagtcgcatccaaaagggagtgttctggcaccgatggctggcttggttgtgaaagttttgcttgaagacggggctcaggtggacgcagggcagcctgtcatggttatggaagcaatgaagatggagcatgttgtgaaggcgcctcgtgccggatacgtgagtggcctgaaggttactgcaggccaacaagtttttgactccagtgtccttttcacaatcaaggacagctctgcaaactgagatggagcgatcactgccctagagtagttgcactgcaactgcatcaagcacccagcggatgctcgtccagatagagaagcgaaggaaataaactgctgggttcgtctgcgggcaatccaatccggcagggcaagcagacggcgcatggtgtttcccggcttgatgcgaatccatcatccgccgcaacaattccattgcgtagtgtacacgaacatgaaactgtaccacgctgagcaag

SEQ ID NO: 88448 - DNA, 586 bp, Zea Mays
agttgttgcttcaaacggccccaccaaactggccgcgacctttttttatttttatgtagagagcaacgtttcgcacgttccttgtgtcagcttctcatggagtcatggatggaatccctacgactagaaaagttgtgtttccttccttccaatgcagtcctagaactcagctgaaatccaaatgcacccctttttccaaattttcaggacagctctgcaaactgagatggagcgatcactgccctagagtagttgcactgcaactgcatcaagcacccagcggatgctcgtccagatagagaagcgaaggaaataaactgctgggttcgtctgcgggcaatccaatccggcagggcaagcagacggcgcatggtgtttcccggcttgatgcgaatccatcatccgccgcaacaattccattgcgtagtgtacacgaacatgaaactgtaccacgctgagcaagaggaattcttgtttgatttgtgcaatgaaataagttgattccatcaccgttccatttctcataattagtaataataatgaataattagtaataatataatgaggaatgtgtttattttaccaa

SEQ ID NO: 88449 - DNA, 1727 bp, Zea Mays
aattgtccttctcgtaattattgccggcaattccgactcctctgacaatccatctaccacgcgcggccaaactcctgttcttccacctgctggctgctcctgcctcccctgcgccccaaacccacccgcctcgccgtccccgcaggccgcagcctgctctcggctcccgccgccgtctaccgcgtcctgcggctgcggtgttgcgtcacctcgggttcgccttaacttccacaatcctcgccgtcctggtgctccgccgcccctccctttgtactcgcgctggagctgcagatccaccgcgacctggcgaccaattcctcctcccgctgaagaattggcgaccttggcctccgcccccgcggcgcggaggagtcaactgtggtagcaaccaccgcggaggctgcaagccttcggtaagggaggaaagttgacttgttggaagccggtccagggccgcgatgacgtcgaccgccgccggcgcgtcgtcgtcggcggcgaagagcgagtcctacctgcgggccgacaagatcgacctcgagagcctggacatccagctggagaagcagctggccaagacctgggagaagcacaaggggtcgtacaaccaggggcccagggaggactgggagatcgacctcgccaagctcgagattcgctacgtcatagcgcagggcacctacggcacggtgtatcgcggcacgtatgatgggcaggacgtcgcagtaaaactattggattggggtgaagatggctttgcgtcagaaactgaaactgccacactgcgagcatcatttaagcaggaggttgctgtctggcatgagctcaaccatccgaatgttacaaagtttgttggtgcatcaatgggtactacagaccttaagattccagccaatagttctaacagtggtgggcgcactgagctgccgccaagagcatgttgtgttgtggtcgaatatctcgctggaggatcactgaagcagtatttaataaagaacaggcgaaggaagcttgcatacaaggttgttgttcagatagcactggatcttgccagaggattgaactatctacattcaagaaagatagtacatcgggatgtaaaaactgaaaatatgctgctcgatacacagcgaaaccttaagattgctgattttggtgttgctcgtgttgaggctcagaatccaaaggacatgacaggcgcgactgggacacttggctacatggccccagaggtgcttgaaggcaagccatacaacagaaagtgtgatgtctacagttttggcatatgcttatgggaaatatactgctgtgacatgccatatccagacctcagttttgcagacgtctcgtccgccgtcgttcaccagaacctgcggcctgacatccctcgctgctgcccaagcccaatggcgaacatcatgcggaagtgctgggacgcaaacccggataagcgccctgacatggacgacgtggtgcggttcctggaggccctcgacacgagcaagggcggtggcatgataccagaaggccaggcaggcgggtgcttgtgtttcttcagagcccgtggtccttagaaccaaccaaccctttccagccatcctctacttgtctctgccctactacagtattggagccagatgtaggcctttgttgttcatcggataggggattgcagataacttgatgacaatctttgtgattggttgacacttgttatacgttctatagtg

SEQ ID NO: 88450 - DNA, 1882 bp, Zea Mays
aattgtccttctcgtaattattgccggcaattccgactcctctgacaatccatctaccacgcgcggccaaactcctgttcttccacctgctggctgctcctgcctcccctgcgccccaaacccacccgcctcgccgtccccgcaggccgcagcctgctctcggctcccgccgccgtctaccgcgtcctgcggctgcggtgttgcgtcacctcgggttcgccttaacttccacaatcctcgccgtcctggtgctccgccgcccctccctttgtactcgcgctggagctgcagatccaccgcgacctggcgaccaattcctcctcccgctgaagaattggcgaccttggcctccgcccccgcggcgcggaggagtcaactgtggtagcaaccaccgcggaggctgcaagccttcggtaagggaggaaagttgacttgttggaagccggtccagggccgcgatgacgtcgaccgccgccggcgcgtcgtcgtcggcggcgaagagcgagtcctacctgcgggccgacaagatcgacctcgagagcctggacatccagctggagaagcagctggccaagacctgggagaagcacaaggggtcgtacaaccaggggcccagggaggactgggagatcgacctcgccaagctcgagattcgctacgtcatagcgcagggcacctacggcacggtgtatcgcggcacgtatgatgggcaggacgtcgcagtaaaactattggattggggtgaagatggctttgcgtcagaaactgaaactgccacactgcgagcatcatttaagcaggaggttgctgtctggcatgagctcaaccatccgaatgttacaaagtttgttggtgcatcaatgggtactacagaccttaagattccagccaatagttctaacagtggtgggcgcactgagctgccgccaagagcatgttgtgttgtggtcgaatatctcgctggaggatcactgaagcagtatttaataaagaacaggcgaaggaagcttgcatacaaggttgttgttcagatagcactggatcttgccagaggattgaactatctacattcaagaaagatagtacatcgggatgtaaaaactgaaaatatgctgctcgatacacagcgaaaccttaagattgctgattttggtgttgctcgtgttgaggctcagaatccaaaggacatgacaggcgcgactgggacacttggctacatggccccagaggtgcttgaaggcaagccatacaacagaaagtgtgatgtctacagttttggcatatgcttatgggaaatatactgctgtgacatgccatatccagacctcagttttgcagacgtctcgtccgccgtcgttcaccagaacctgcggcctgacatccctcgctgctgcccaagcccaatggcgaacatcatgcggaagtgctgggacgcaaacccggataagcgccctgacatggacgacgtggtgcggttcctggaggccctcgacacgagcaagggcggtggcatgataccagaaggccaggcaggcgggtgcttgtgtttcttcagagcccgtggtccttagaaccaaccaaccctttccagccatcctctacttgtctctgccctactacagtattggagccagatgtaggcctttgttgttcatcggataggggattgcagataacttgatgacaatctttgtgattggttgacacttgttatacgttctatagtgatgtgaataccagtgaggagtccataatacagagttatttcaaccagttcatggttgcatgctcttaatggtttgtttgtggaaatcacatactgggccatcattgattaactgggagaacatatgtgatacacgcattcgccatcgttttctcg

SEQ ID NO: 88451 - DNA, 81 bp, Zea Mays
atggcggctgagccgggggtacgcgtgtggttcccacgccgcgatgatcgacaccccaggcacaagcacaccacaggatga

SEQ ID NO: 88452 - DNA, 2196 bp, Zea Mays
ccctccatccatttgaatctctccccctccccgatcatcgcaggccgatcgatcggcggctgcggcggcgatggggcggaggaatgacgacatcgactggaagagcgtgtttctgtcctacttctctcatggcgcctcctccgaccccgccgcgacgcgggcgtcgggcgtcgcgatggcggcgtcatcggacgacgacgagcgacggcgggggtctccgggcctccaccaacggtccgaggagccgcgcagcgagctggagcggcgcttcggcaagtgctgccgccccggcgcgcaggttgatggcggggcgcaggcgcagcactgccgagtcacccgtgcggcggccaaggctgctgttggtttgggaccggatgtttcttctgcttctaacgttgtatatgacctcagtccaataaatgatgacaaagaaggggaacatgtccatgacaaaaactattctaagttatctcccaagtttagcgagaagaagaattatggccaggtacccttgagcaaacagaaaagtcaaggccatggtggaaaaaggaaatctataccggtggccaagatttactcaagccaaccaaattcaacaactcatgccattgatttaaaggagcctgatcatcaaagttcacttcccagtaaattctctaagaggaggaagcaacaactccaaaaatcatcttctatttattctcgaaagtgcaatcctatcgcatgcaacacgttgttcagtggtcatgagaacaaaagagatcgtatagttcaagatgtggttctattggatgatgaagatatcgaacctaaggaagaagtaaaacttgagatgtctgacagactgaatgaaccaaagatctactacccatcaagagatgatcaagaagttgtcgagctcaccagatctgatatcagatgtcttgatcctgaagtatttttgtcgtcacaggtgatcaatttctacatcaagtacatcaaaatgaccagattgtgcgatgaaaatttcagagacaaattctacatatttaacacatacttctatggaaagcttgaggaagcattgcgtcggccgcgtgacttcccaaagttgagaaggtggtcgaaaggtgtcaatatattcaataacgcatacatcatcttgccgatccatgggaaggagcactggagcttggtaatcatttgccttcctccaaaagagaggacttcttcagaaccgatcattatacttcatctggactccttaggcatgcatcccagcactaagatcttgaacacggttgggaggtaccttgaaaaggagtggcgcttcttatccgttgcatggccgtgtcttctgaatgatatacgcaaggaagctgtccaggttccgcagcagaacaatgcgtacgactgcggtatcttcatgctgtattacattgaacagtttataaagaaggcaccggcaaggttcaccaccgataaacttggcatgtttaatcgcagttggttcaagcctgaagaagcatccggtctaaggcagagaataagagagctactgctgcaagagtttggaagtgccaggccggatgaagctgcatcagaggcagatgttgctgctaagagaaaagaaggcatcagtgctgcagagtggaacgaggaggaggcaggccgtgtcgtatcagaatcagactcatgttcatacggcgccggagacgaaaaaggtacagtaaaggcagattctggcagcgcagaagctgagaaagaaggtgggctggttgtgactgcatcatcgcagaaaagatcgaaggggacggcggaggaggaggaggaggtccgtggtagtagcatgccagtcccggatgcagtttgtgagatcactgggaccaaggtgtggatcaagagggtctacagacgaacagggtggccacctggaaattggtgctggagcagtggcggatccagcagggatgcacgcagggcgttcatagaacaattctctcgaaagtagttagaactaagagcacagatgttggtttgctatcctgaggcgcctgttgttgacactggctagacgatgcttccaggtcggtcgggcacctgcagttgtcatcaacctctcgataaaccgataactttagcaagtgctgcatatactcctgcaagtgctgcattttgttttttataatggaaacaagagttccagcttttcgcaca

SEQ ID NO: 88453 - DNA, 1290 bp, Zea Mays
gctgccgccaaggaccagcgccttacgattgaggctacagcacgtcgtgccgaagacagccgctgcgccgaggaaggtcgcctccgtgctaccgctctggacgcatatgagcgtgcccatgaggccctctgggcgcaggccactgccgtcgtcaacgtgaaggcgctcatccctgtccttctcgatcaggcgacaaatacctacaccaagtggcgtggcatgttcctcactgtccttcgcaaatatgccctgactcgtcacgtccttgaagatgaagcgttcccgtcgcgcccggcatgggttcaagccgattgctgcgtcctgacatggatctacagcaccgtctccggcgacctgcagcaatctctgatgatgcggcagggccccgctcacggggcgtggtgctacctcgaggacgagttcctcggccagagggagtctcgggcgcttttgctcgaaacaaaattccgcaacttccaccaagagtccctgagcatcaccgactactgccaccagctcgaatcgatggcggcttcccttgccgagttcggcgatcccatcggcgatcggcagatggtcctcatgctccttcgcggcctcagcggtaagttccgccacatggtgtccatcctcaagatgcacaggtcgttccccacgttcgcagaggcacgagcgcacctgctgttggaggagctggaaatcgacgcacgacctctgtccccgccatctgccctcgtcgctgcaacgccgcgacctacggctcccgaggctccagcacctccacgtccaggggcacatcctccaacacgcccctcggtgccaaacggccaacgtaacggccatcgtcgcggccgcggtggacgcaacagccagcaccagggccaaccaacgcctcctggtgccggacagggaggtgcacccccccgacatgcatctgtccttcgcgcatccttgggctggcattgtacggctgtggccatacgatcagtccgggcgcccaccaccgcctccagcattcaacgcagtaccacagtacaacgcctatggcggtttctacggcgctccatcccctccgtatggtatgcactacgggggaactggagcccctggtttccaggcgcccgcaccggcgtaccaagcggtgccctggaaccccactcacggaggtgcatggcatcaggacacccttgcacactctttcaacaccatgaccctcaacccgtcgaacgctacttccgagtggtatgccgactccggtgcaggatcgcacatgacctcggacgctggtaa

SEQ ID NO: 88454 - DNA, 3462 bp, Zea Mays
ctataacatcttatatttaaaacttcgttctacaaacaactgcagtttcacatcacatattgtattttataaagacgtcccccatcctgcatctgcaaaggccgcccactaccctctccggctctccgctaacaaaatctagaaccctctgaaccctccacattcctccagatcgaataataacctagctctgcacaccgcccagccaccagtggcagcaggagcaggggtcggaacaagatggtggtgacggcggccggcagcgcggaggaggctgtgcggcggtgggtggacgccgccggaggacgcctcgtcctcgacggcgggctggccacggagctcgaggccaacggcgccgacctcaacgacccgctctggagcgctaagtgcctcctctcctccccgcacctcatccgcaaggtccacatggactatctggaagctggcgcaaacattataatcacagcatcgtatcaggccactattcaagggtttgaatcaaagggtttttcaaaagaacagagtgaaaacttactaacaaagagtgtcgagattgcactggaagctcgtgagatgttcttgaaggaacatctggagaagtccactcctatacagcacccggttctggtcgcagcgtctttagggagttatggagcttatcttgccgatggctccgagtacagtggggattatggtgaagctggtacgaaagagttcctgaaagatttccatcggcggaggctccaggttcttgcggaagcaggccccgatttgattgctttcgaaacgattcccaacaaactggaagctgaggcgtatgtcgaacttctcgaggagtgcaacatcaatatccctgcatggttttccttcaactcaaaagatggagtgcatattgtgagcggtgactcgttaatcgaatgcactactattgctgacaagtgtgcaaaggttggtgcggtcgggataaactgcacacctccaagatttatccatggactgatactctccattcgaaaggtcacggacaagcccattctgatatatcccaacagtggcgaaagatacgatggtgaaaaaaaggagtgggtggaatccactggtgtgtcagatggtgattttgtttcttatgtgaacgagtggtgcaaagacggggctgtgcttatcggtggctgctgcaggacaactccaaacactatcagggccatacacagaactctgaacaaaagccccaacaagcagcagttacctgctgtagaataagagctgtgctctactctgatgcgcccgccttcctcctagcagtacctcgaggctataactccatgattccgtaaccgtacgtgttcgttctcttgcaaacgagatgtttgtaaataacgctgtatttctgggttctgagatatgcaacttggatggaggtacaaccggtgaaggggggtgaggaagcagcaacaatggtaagagttctactactgagtgggggaaaaacaacttgcggctgggttagtgaagcttagtagctaccactattcaagagttaaagggagttcgtatgacagttcctctggagatgttatcttcaaagtcttatatcactgctacttgtgagctgtgttaaaacctatatatataagttttgtttgacgtgactgcattaaagatagtacaccaagcttctccagttctcctagctatgtatgttcttgtccattcctccgcttccacaattctaagcaataaattaagggctagcttctccagttctcctagctatgtatgttcttgtccattcctccgcttccacaattctaagcaataaattaagggctagtttaggagccacaaactggagggaattagagggattaaaatccctagcttatttaattttgaattagttgaataactaggagattttagcccctccaatcctcttcggtttttgaactcctaaactagctctaagggtgatgagatgtgacaatttattaggtagcgacaactaaaaaaaaacggagggagtataaggttgtatggttctggggctgtctttcgttgtcctgtaatcgaacacattataagtgtctagctgggatatgctgtggcggcagtttataagatgtagcgagttagaccctatttgtttcggattataatctctttaaattatataatttagtgtaaataattcagtaagtaaacaaatacctagattatggttttagattatataatctaaaactcagattataataatctcataatctactcaagagtagcttatttgagattatttttggcaaaagtcccactacccatagttatataaatagaaattataatatatgatatcttttttcctcacatcgaataaataaataagggtacccttgtatttgtaaataatctatatttttataatctagactaccaaatatatacatgtagattataacctgtctaaattataatctagattatataatctataaattgaaacaaacatacccttagcagccgtttcatccatcgatccatcaccaatgcccaataatgtcgtcgttgggccggcgtctcgtctccggcttcatcaacgtcgcgcggcgggcgaacagcagccacgcatgcatgcgccggatggacgcctattcacttcgctagcaggcgatcaaacccggcaggcgcggtcactactagctatttcgccgtcggcggccgcaggtggcagggcccctctacggctctaccccaacgggaacgacaccgaccaccgtgggttcgtgcccgccgacctcacgctcgcactcgacggcagtggtctgccagaggccacggccacgtaccgcgtgagcatcctcgattacgccaccaacccgttaagtggcagtggatatcgagccagctcaactcgttatagctcgttatactaacaagctaaacatctggctcggctcgactcgttagaaagttcgagccagctcgttaggctcacgagctacacgattaaatacaaatatatatatatatatatatataaccgaaaaatcatattttaagtgtttaacactacaaaccctaaacttttataatattattatcatatcatcgtcctagcttctaacttttaatattaaattaaataaccaaatatgtattaacctacatatttacaaacccttattataataagatagcaacaagcatcattataaagcaatttatcatccattccacaaacatttaacatttcatcgcacaacactaatatcatatgctgctagaaacaaagttcacaaaatcataaccaataatcaaatattaaatatacaatgtaggtatgtagccatgcaataatacaaatatttaagcacatggcacgtctacacatgtccatatcatagatcataactacgagaaaacaagactatgagagatgagacgacaccaacgactagacaaact

SEQ ID NO: 88455 - DNA, 1918 bp, Zea Mays
gtattttataaagacgtcccccatcctgcatctgcaaaggccgcccactaccctctccggctctccgctaacaaaatctagaaccctctgaaccctccacattcctccagatcgaataataacctagctctgcacaccgcccagccaccagtggcagcaggagcaggggtcggaacaagatggtggtgacggcggccggcagcgcggaggaggctgtgcggcggtgggtggacgccgccggaggacgcctcgtcctcgacggcgggctggccacggagctcgaggccaacggcgccgacctcaacgacccgctctggagcgctaagtgcctcctctcctccccgcacctcatccgcaaggtccacatggactatctggaagctggcgcaaacattataatcacagcatcgtatcaggccactattcaagggtttgaatcaaagggtttttcaaaagaacagagtgaaaacttactaacaaagagtgtcgagattgcactggaagctcgtgagatgttcttgaaggaacatctggagaagtccactcctatacagcacccggttctggtcgcagcgtctttagggagttatggagcttatcttgccgatggctccgagtacagtggggattatggtgaagctggtacgaaagagttcctgaaagatttccatcggcggaggctccaggttcttgcggaagcaggccccgatttgattgctttcgaaacgattcccaacaaactggaagctgaggtctactattttgcgatccgagtcttttgccttgcatttctatccattcttaggaaacagtttctgattgttggcaactttgtcttttttaggcgtatgtcgaacttctcgaggagtgcaacatcaatatccctgcatggttttccttcaactcaaaagatggagtgcatattgtgagcggtgactcgttaatcgaatgcactactattgctgacaagtgtgcaaaggttggtgcggtcgggataaactgcacacctccaagatttatccatggactgatactctccattcgaaaggtatccctagtatccaccacactttgcacagtattcaccgcatgtttggccccgccctcggttatggatgactgttccacttatccctgcggagtgcatataccatggtctccattcttggtttaccttggcacgaatcactgtgttggagatggggaaggctgctgttatgtttttacctggataacttttgttgcgttaccacaggtcacggacaagcccattctgatatatcccaacagtggcgaaagatacgatggtgaaaaaaaggagtgggtggaatccactggtgtgtcagatggtgattttgtttcttatgtgaacgagtggtgcaaagacggggctgtgcttatcggtggctgctgcaggacaactccaaacactatcagggccatacacagaactctgaacaaaagccccaacaagcagcagttacctgctgtagaataagagctgtgctctactctgatgcgcccgccttcctcctagcagtacctcgaggctataactccatgattccgtaaccgtacgtgttcgttctcttgcaaacgagatgtttgtaaataacgctgtatttctgggttctgagatatgcaacttggatggaggtacaaccggtgaaggggggtgaggaagcagcaacaatggtaagagttctactactgagtgggggaaaaacaacttgcggctgggttagtgaagcttagtagctaccactattcaagagttaaagggagttcgtatgacagttcctctggagatgttatcttcaaagtcttatatcactgctacttgtgagctgtgttaaaacctatatatataagttttgtttgacgtgactgcattaaagatagtacaccaagcttctcc

SEQ ID NO: 88456 - DNA, 1707 bp, Zea Mays
gtattttataaagacgtcccccatcctgcatctgcaaaggccgcccactaccctctccggctctccgctaacaaaatctagaaccctctgaaccctccacattcctccagatcgaataataacctagctctgcacaccgcccagccaccagtggcagcaggagcaggggtcggaacaagatggtggtgacggcggccggcagcgcggaggaggctgtgcggcggtgggtggacgccgccggaggacgcctcgtcctcgacggcgggctggccacggagctcgaggccaacggcgccgacctcaacgacccgctctggagcgctaagtgcctcctctcctccccgcacctcatccgcaaggtccacatggactatctggaagctggcgcaaacattataatcacagcatcgtatcaggccactattcaagggtttgaatcaaagggtttttcaaaagaacagagtgaaaacttactaacaaagagtgtcgagattgcactggaagctcgtgagatgttcttgaaggaacatctggagaagtccactcctatacagcacccggttctggtcgcagcgtctttagggagttatggagcttatcttgccgatggctccgagtacagtggggattatggtgaagctggtacgaaagagttcctgaaagatttccatcggcggaggctccaggttcttgcggaagcaggccccgatttgattgctttcgaaacgattcccaacaaactggaagctgaggcgtatgtcgaacttctcgaggagtgcaacatcaatatccctgcatggttttccttcaactcaaaagatggagtgcatattgtgagcggtgactcgttaatcgaatgcactactattgctgacaagtgtgcaaaggttggtgcggtcgggataaactgcacacctccaagatttatccatggactgatactctccattcgaaaggtcacggacaagcccattctgatatatcccaacagtggcgaaagatacgatggtgaaaaaaaggagtgggtggaatccactggtgtgtcagatggtgattttgtttcttatgtgaacgagtggtgcaaagacggggctgtgcttatcggtggctgctgcaggacaactccaaacactatcagggccatacacagaactctgaacaaaagccccaacaagcagcagttacctgctgtagaataagagctgtgctctactctgatgcgcccgccttcctcctagcagtacctcgaggctataactccatgattccgtaaccgtacgtgttcgttctcttgcaaacgagatgtttgtaaataacgctgtatttctgggttctgagatatgcaacttggatggaggtacaaccggtgaaggggggtgaggaagcagcaacaatggtaagagttctactactgagtgggggaaaaacaacttgcggctgggttagtgaagcttagtagctaccactattcaagagttaaagggagttcgtatgacagttcctctggagatgttatcttcaaagtcttatatcactgctacttgtgagctgtgttaaaacctatatatataagttttgtttgacgtgactgcattaaagatagtacaccaagcttctccagttctcctagctatgtatgttcttgtccattcctccgcttccacaattctaagcaataaattaagggctagcttctccagttctcct

SEQ ID NO: 88457 - DNA, 518 bp, Zea Mays
gcagaagtaacaaattggctactattacctaaatctgacttgaaaccgcgagattgacaatgatgcccagttcgagcctttcattgcgccacaggtggacaacgaatagggaccttcacgcaaacacacacacatacataaatccacagctagccacatcggcgtctgataagaaattaaacagagcgaggactgcaagtatcaccagtggggacgcaagacgcgacaaggccgttggaataatgacagttccgagggtcaggcgtttcatcgaacatctggcggctgaagcgaggacgacatcgaatcccaagagacggacagtgcgtcgacggccgagtctcacatttagccggacaagtggcacacgaggcgcgacgggaaggagtttgacgcgtcaagtctaaagaaagcgcgacatcaacgatgctgcaagcagtgcttgaagtcgaaaatgcacgacaaaggagacggggacagccactgtacaacaccatggaacttggtgcggccatagc

SEQ ID NO: 88458 - DNA, 2533 bp, Zea Mays
ttggttgactctgaacttgtagttgtagctgcgtctattatgaagatttggtctctgcatgtgtgcacactgacacaggacaccgagtcctgctcctgcatcgtgctggaactggacagctcaaaagccacctggatcccctacaattcctcatcgagcggcggctgacgaggagcagaaagcaagggtacggtgtccccgtcccctgcggccatggcatcctgccttctcctcctcgccgccttggccatcttcttcgtcgcggccgccgggcagaacaacagtatcatggagccgtttaatccgtcctgctcgtcgacggacaactacaccgacggtagccagtacaagaagaacctggaccagctcctggccgcgctccccgcggcggccgccgacaacggctggttctacaagggcagcgccggggcggggcccgacgaggcgttcggcctcatcatgtgcttcgcggaccgcaacgcgacgcagtgcctcgactgcctctccagggcgccagccggcatcacgacggtctgcgcgggcagccggaacgtgagcgccgcgtacgacgcgtgcgtgctccggtactcggccgcgccgatccccgccaccgcggacctcaacgccgccttcgccgtgcacgagaccatcgtcggcgtgcctgtgacctcggaggctgtgcgggacgcctgggtgccgctgatgagcaagctctcgggcggcgtcgccaacacgccgctgcggattttcaacagcagcacgccgtactcgggcgcgggctcgcaggagatgtacgggctggcgcagtgcaccagggacctcaacggcagcgagtgttctaactgcatctcgggctacgccacgaggctgggggagctgttccccaataacacgggaggctccatcaagggctacagctgctacctgcgctacctggtggccccgatagacatcactctgccgccgccgccgacgccgacgtcttcgccgccagctccaaaagcgtcgaagacagggatcgtgattggcgtgtcggtcggcgccgtctccgtcctgatcatcatcggcgtcttctccatatggctccttcgccggcgacggaagaggaggcaggctagaatcctcgaggaagcgagggagcaagagctgggagagggagggttcttcgacgagcagccggagctggaagacgagttcgagagagggaccgggccgaagcggtttcgctacggcgagctcgccgtcgccaccggcaacttctcggacacgcagaagctcggggaaggcgggttcgggtcagtgtacaggggattcctcgaggacatggatctccacgtcgccatcaagagggtgtccaaggggtcgaaacaggggaggaaggagtacgcctcggaggtgaggatcatcagccggctgaggcaccgcaacctggtgcagctcatcggctggtgccacggcggaggtgagctcctccttgtctacgagctgatgcccaacggtagcctcgaccatcatctctacagcagcagccacggcggtctgctgccgtggccggtccggcacgagatcgtgctggggcttgggtcggcgctgctgtacctgcacgaggagtgggagcagtgcgtggtgcacagggacatcaagccgagcaacgtgatgctggacgcgtccttccacgccaaacttggggacttcgggctggcgaggctggtcgaccacggccggggctcgcacaccaccgtcctcgccggcacgatggggtacatggacccggagtgcatggtcaccggcagggccaacgccgagtcggacgtctacagcttcggcgtcgtccttctggagatcgcgtgcggccggcgccccctggtgcctcgccacggcgaggacgtgatccacatcgtgcagtgggtttgggaatggtacggcagaggagccatcctcgacgccgccgacgcacggctcaatggcgagctcgacgcccgggaggtggagacggtgatgctcgtcgggctctggtgcgctcaccctgaccggagcctgaggccgtccatcaggcaggccgtcaacgtgctgcggttggaggcgcccctgccgagcctgccggcgagaatgccggtggcgacctacatgccaccgcctgatgctttgtactacacatcttcggtcacgacaggcggcagcagcacgggcaccggcaccactcggtcaagcacaacagagacaagtaccctgctcaaatgaccacagatcggtgcttctgcacccgaggattttgaatgtctgtagatatgtacatttatgtgcatataagtatagttagctcacatacagcagacaaactttagcattattaatcaaccaagacgagagatcaaggggagttatcttataattcagtgcatgtgacagtttttctgttgcagcttttacagtgaaggccaaaaggcttcgcttccccagccttacatccaagcatccaaccaacctccatagaatcacagcacggggcaaatacaatcaagaggtcctctat

SEQ ID NO: 88459 - DNA, 3486 bp, Zea Mays
atggagaaggcttttgagaaggaggagtgtatgatgctcagttggatttgtttgggtccaatttggtggaggcgcagttccatggacgagccacgacgtcggctcatggtgaggcactacgacgggaatggcgacatcttcgatgagcagcctgtctttgatgaggggcctgtgttcgttgaggagcctctcatcgatctagagtcgagcggcttcgagagctatgcgcccttcaactattctttctattgcttgagtcatgtcatcgatgttatggcatcgaaggttgctaccctggatgaggtgcctcctgctgctgtggtttgggatggagactcgctggctggacatggcttgcaaggtgtttcgttggagaagttagttgagatgccatttcaagatgagcagtcgagggtgaatccagtggggtcaattggagctgcagatgaagtgttcgatgaattgtttgaagatgtgatttgtaatgagaacatgctacatgacttcaattcacataatgatttgcggcaacaattagctaatgatcaagtgttccatgcaaggtctgacaatgagattcgggatgaggaaactgggcatgatgatttgttggatcagctagaatcaaatgggatgatgtctcaaccagaatgcactggagctcaagctgaaataatagaagaaaagccaccaaaagcagatgagaatcatgttcttgatgacagacagcttcagcctcctattctagaagcgtctccgtcttgcaatacagttgaaatgcaaaatgtcatgcagcatgaagcttcagcttcaagtcaaggctccctaacttcttttgagggtgaattaacatcatatggggacagtgttcaggctattggagaacatcagcttgttgtatcagaagagtctctagaggaatgcaaaagagatgatgtcaaaagaaacatacaggatgtagttgcaatagacatggcaaatgttttaaaaaggattttaaggaactctgatggaacaaatttggaagctatcccacggcagcaaagggatctaagaattgatcggtctcattggaatgataatgaaagaaacagcatcgagcaccaccgagtcgaagatccctctggagaggaggacctgcagccacaagcggagatggtggagtcgatcgagttggagtccgctcctccaactctcgtcgtctacgaccgctacgacaagccaaaccgcaatgagatcatcgaggtgctcgcgttactagagtacaacgaggcggctcgcatcaccgatgcgattgaaggacccacccgtgaggtcgccagcaggaccgctgcgctggagcccgtcgactaccgccgacgccaggtgctaaccatggcaggcgaggtcgagcaggaaccaagggatggcgttatcaacaaggtggaggccgaggcagcatgtgaattccttggagacgcgatcgactgctccaactctgaagacccctccgacctcgccatcgtcctggtcctcgccgacacgctcatcgacggcaacgagctcgaccacccatcgaaatccagggaggaggtccagcttccacgcgcggtgtacttcgcacccgacaacgacaggtacatggtccacgtaggcacctcctctaggaccggcgactgcctacgctggatggagccattattttccaacccgcgcgagaaggtccatgacgggctcgttggcgagatagagtggtcccgcgtagtccgcttcctccactcctccttgccatcaccacaccaggcggaggtggtggagtcatccgagtcggagtctctgcgtcctcccggcgtcgtcgacaaccacgtcgagcccaacctctacagtttcatcccgctgatcttcagcaccaagaaagccatagaggaggaggtacccgtcgacatgcccaccaagtgtttgatgaaagtcctcaaccggcgcacctactccgtccccaacctcaggaggaaaaggatgatcgtgtactgcatcccagagggtactggatcctgtccggctcgccaatcaactggaaaaagtattggaaaggggtgggagcggacgaaggaggatgtagctaacaaatgtacccatggctactacactgttggaaagggaattgtgctggtagcaaacaattttggtgatgacctctttcctggcagcaatgagatcaaacaaccatggcctccacctctggagttagcgtgcttggattggaacatcatggtcttctctgtgtttcgtgcttccacgaccctcttcatcgaccttgactcagctggctttggcactggtctcgagctgtggtctagcagggccagcgacaagaacaagttcatggttgaacaactgcataggaacaagatgtccaatagggccacccatgggtgttatgcctgttggcggccaattcaccttcatggacaggataccatttgttctagctgcaatgatggttttatccaggaaagcagtgagatgggtggcgtactgaacacttatggtctcattgaaccggactttgaagagcatcgagccaaaagaattggaatgacggacgccatatctgcccttatccagcaacagatggcagaaataggaagatatagtttgtttgatatacatggtagacaagggacttgtactgcacatggaaagaggtcaactgctattcatactctcataatgggtgcatcccttctcctgcagttggtagtagtgatgtcaatattatcatgaggggaggccctagagttcacgttgtccatccaaatttcagtagtctagttgttggttcaagtctggaagctctatttgagcatctactactccaaaacgatcgtcaaggcacacctcctgctccacagtcagctattgactccatgtcgattgggtacaataccaccatatcagtgccacaaatgcatgcagtttgcctggagctcctcgagaagaatcttcagccaggaatgcgagctctcaacgttggttcatggattggtgtggccgctgacctagcttgttccttctggtctaggtgctgttaccagtgtccaaggcaatttcatagtctttgtttagaatcctagtggttatgcaaatcacagcttggggacaagttgtatttcaagcggtggggaatgtcagcatattgccacatgggatctgtgacaggtgacaaatggacatcttcagctataaaaggagaccgattcaagctatgggggtatcaaatattgagaagaaacacatatccatctctattctcatttccctgtgttctagtgttcatcttctctgtctagaaatctatacttctcttttcccttcctctcacatgtacccggattctcttatattctagtactttgctgccggtggttgaattgagatattagtgttgctaacagatagttttgggggaaaaccttggaaaagtctgtaaatatacatctattttat

SEQ ID NO: 88460 - DNA, 1017 bp, Zea Mays
aagcgctttgttgctagatgcacaacgtgtcaaaaggctaagtcgcggttgaatccacatggtttgtatatgcctctccctattccttcggttccatgggcggatatttcgatggactttgttttgggattgcctcgaacgaagagggggagcgatagtgtttttgtggtggttgatcgtttttctaagatgacacattttataccttgtcgtaaaacgatgatgccgttcatattgctaacctctttttcaaagagattgtacgcttgcatggtatgccttctactattattttagatcgtgatgcaaagtttttgagtcacttttggcgtacactatggaacaaattggggacaaaattgctattttctactacttgccacccccaaacggatggacaaacagaggttgtgaatcgcacattgtctacaatgttgcgagcgatattgaagcacaaattgaagatggagcgtgtacatagtgatgctaaggagggtgctgattttattttgaaattgcatgcttcaactaaagagaacatagaaaagatgaccgagaaatataaacttgctggtagtcaaggtagtaaaacttgaaccgggtaatttagtgtggttacatttacggaaggatagatttcaagatttgagaaagtctaaattaatgccccgtgctgctggaccatataaaattttggagaagattaatgacaaggcatataaacttgagttgccccccgagtttgggattagtcccacctttaatatttcagatttaaagccatatttgggagaagaagatgagcttgagtcgaggacgactccacttcaagaggggaaggatgatgaggacatcactcccatggatacaaacaacactcctcaagttgactccccaattactcgcgcacgctctcgacaactgaatttacaggtgatctcgttcctaagtaattattcttgtgcatttgagagtagtatgctacctaatgatttaattgtacttaggaatgaagga

SEQ ID NO: 88461 - DNA, 332 bp, Zea Mays
aggtgtcagacggaagcgggggaccaagccggagatcttcatcgcccaattgtgccgctggggtgactggagcatggtgaatcgctcgccggtgacgcttcgccgccacgatgcgtgggcagagacttccgcggcataacccaccacgagcaagccactgaggacctaggtgtttagcaggtggataattctgagcaggagctcgttgaaggcaagttgtgcccttgaccacttttatttacccaataatgttctctataatcattatgacatgattaggcttaattttgatgggacccaataggtcaccctagtctgctttatcttgtgcc

SEQ ID NO: 88462 - DNA, 974 bp, Zea Mays
aggtgtcagacggaagcgggggaccaagccggagatcttcatcgcccaattgtgccgctggggtgactggagcatggtgaatcgctcgccggtgacgcttcgccgccacgatgcgtgggcagagacttccgcggcataacccaccacgagcaagccactgaggacctaggtgtttagcaggtggataattctgagcaggagctcgttgaaggcaagttgtgcccttgaccacttttatttacccaataatgttctctataatcattatgacatgattaggcttaattttgatgggacccaataggtcaccctagtctgctttatcttgtgccttgatcaccactgaactttttaggtagtcttgctattgctatatatggttttgggtattgagataaatttgacacaccatcatcctttattattattgttgattatttattgttcatgataagattactgtgtttattggaacatggagaaccacccgagaaaacagtgctaccacaagggtgaaatgggacacccttggccaagtaattacctgaaaggggcaagcggggaggcgtcactgcagagtatagggagatgaacgggttttcttgaatccgtagcgggttttctcccatgcttccttcttcctgaatcctagggtttagggttttctcctatgattccttcttcctgaatctgtagcgggttttctcgaactagtggaactttggaaaggcctcgtagtgctaccctgtctcgtctcctcggtagagatgaacaggaagtcgcgatcccttggcaaatgggtaacattacttgtgtgtaaagatgtgcaacctctatagactgtaaaactggtatatcagccgtgctcacggtcatgagcggctcggacactcacatgattaatttatggaagttaaatttaatttgtcatttgcatcgcattgtggttattattaattttgatctaccattac

SEQ ID NO: 88463 - DNA, 3397 bp, Zea Mays
ccaaaaccctactactctgtcgagccagcgccgtctccctcccccactccattcccactcggacttggaccccaaaaccctagcggctagcgcctcctcgccgtcaccgccatgatcaccggcggccagagctacgtctcggcgccgccggccttctcggccgacgggcgcctcctcctcgtctgctccggtcgcgccgtctccgtcttcagcaccgccaccgccatgctagtgtcggagctggaggggcacgagggggacgtcaccgccgtggtggtggtggcgccgccagcgcaggcgaccgcggcggccaagcttgcgagctactgctggacggcggggctcgacggggtgctcatctactgggacttcttggccgcggaggtgatgcggaaggtccaggttgggctccccgtccactccatggtggttcctgacatatataggacctcaaaaggagttgaggtgtcgagcccctttgcattcatctctgtggaggatacgagtaagctggcaagtgaaccaaaagcgctgtgtgggcagatgagagtttatgacctgacaaaggggcgccaagtgggtggcctcctggccgagacacgtaaaccagaaaagatcgttgcaagtagttctggagaattcttgggcattacaaataaaagaaagctccatatatggcgcataccaacaaaagatttcaagcctgacaagataaggaagataaagctccggcacaccaaacacttgaccactctggcattccatccaactgagagaactgtggctggtggtgatgtaacagggcggatcctgatttggagatgttttggaaactcaaagttctctgaaagtagtgtacagtcgaaagaggatgacggaagggatggtgttaggggggatgatgatgcagacacttgcacaacatggcattggcactcaagcagtgtgaggtttctcaagttttcttctgatggagcatacttgttttcaggtggtttggagggagttattgttgtgtggcaactagatactggaaagagaaggtataaaccacgtctggggtctcctcttttgttctttgtagattctccagattcttccatttcctgcgtgtcatgtacaaataaccaagtctatcttctaaaaatgcctaatatggaggtcatgagatctattgctggaatcaagctgccaattgcttcaccaaacttgggcggatctaatcgggctgtgtatggatttgattatactaatagacttgttgctataccaactgaagattactgcatacagttctacaatttgtttgagaacgctgaggtttcagaggtgcaagtgtgtgagaggaatttccagcctattgatgatatcactatgtacatttccatggtttcattgtcaatcgatggcgatttgatgtgcaccgtggatgtcaaacttcctgaagaaggtttaggtggtcttgttacattgaagttttggaatcatgggtcaagagctggacattattttttgtccaccgtcatttatgagcctcacagtgatgatggggtttcttctgttgcattccgcccaggaagaaatatggccgttagctcttcttttggtggtaactttaaggtttgggtccagagtttgtcttcacaatcaaatgatgaaagaaattgttctggttggagatgccaatcagttggctcatacaagaagaaacctatgacatcagcagccttctcagccgatggatctgttcttgcagttgcagctgagagtaccatcacattgtgggatcctgataataatgcgcttgttggtgtcattgcagaaacactatcgccagtgacaaatctttctttcgttgggacatcagtgtttttgatgtctctatgtcagagttcaagaccacagattgctctatggaatgtttcaaatctttccatgcagtggtcttacagcatttatgcagaagctgcatgctgttcgccagatgggagtgaatttgcagttcttgctcttcttagttgtcctgatggagaagcatcaacacaacaagatggagtaattcttctttttgatgcagaaagctcaaaccccattgcctcctggtcggtaaagaaggcatcgggtggcagcatttcttttgtaaaaggtgacgtccctttggatgcaaatgctgatagttcgagagacaaagagccaatgttgcttgtttatgtaaatggttctcatgaatacgccatctttgatccccgggagagtgaggaggtggtcattagcaagaacaagcacaagaagattcaagctgaggaacctgcaccaatcggctacgcttctatttacggagagcttacaaaactggagccaaagaaagaagtttcagatgttccattcgtcccttcggacaggccttgggaaaccatattcagcgggtcgtctcatgttctcccgcctctcacaaaactatgctctgcattcttgtcatcgctgctggagaaacggcctgttgcaaacgagtgagccgccctagaacattgtcctctcatacaacggtaggtatactcgccagttgcagaatggaaatgcggaaggaaatccgtccgtgacgatgcatatgcccacttgaagagttcagagatgctgggtgatgccatctgaggttggttatggttatacagatatcacacggcccacgaggatcattttgcagcgatactcgacggccaacctactgatcgcagcaattttgttttcttctccgcttgacatgtaatcctgacagtaaaactagaaaatcttagtgtgctttatctgatgcgatgacgcggtgctcgttgaggtgctgcgactgtttggctattgagctgtctacggcacaaccgcatttcttttgtactattttgtttttttttcaaagaaagctcacgcttggatatctgaagttgataagctttgttactgggatccctgaatattgtatgttaggctgactcgagcagttcaccagaatgtagtttgaatatggatattagtatgggtaagctgctggagatagtcttagatacaaactaagcagtccagcaataagttcttcgtgagttgcactctgttgggcctagagatggcaatgggtacccgctacccgaaacccggtgggtttttgctctattagggtatgggtttgggtcaatttatgtacccacgggtttgttaatgggttcaaatggaaacccaacgggtacgtgggcataggtttgttcttccactacccatactcgcaaacccatgggtttttaaaatccgccttaaaatcaacatttcttataaatatgtatcataatattattaattgaatatgttctaattgaaataaacttcatgtaacaaattttaagctaaaatt

SEQ ID NO: 88464 - DNA, 1473 bp, Zea Mays
atgttacttggcattcctgatctgttgaatcaaccaaacatgtcaattctgaagcaacttttgcagactttacagccaactgaaaattttgatgatgttctttccgagttccaaccatctcttgctccttgcaatgttgattacctgtattgtggagcatgtaaaatattggaggatattatggatctagacaaatctggggaaccaaatgggaaaaatatacacatgggatgctccaaagcaatcattccctttctacgaaagcgtcttggatactcagctcataagctgctcagtgccgatttccctagcgaagatgctggaaaaggatggcagagtaaaggtgatcttatacagaagatattgcaaatatacctctggaatagtgactctacttcagatctacttgctgagataggtcgtgaattgcctaagcacgaggagaacacagggagtttaaacaagacgatcaaacaagcactgaaggctagaggatcagttgatactattcttcaagagattcagaaatcagtggatgcatttgtctctctaataggaatgtgcaagtcccacgaaaaggtttctatgcatgcaatggcagttaaacatggggggaaatttattgacacatttctgaaagccttcaactttctagagagacatttcaagcaacataatgacaccatagttaaaatggtaagggttagtcatgttccttttggtatcaccgttgaattacaatggctggtcagtgtcgctgatgaaattatgctaatacagctaaaacaactccagaaaggaacaagaataatccaatccatatgttcagatgctaaggtcaaggcgctgctacacagctgctccgccgagaaggaattccagatgggcaatttgaagcacaagtacttgcaaggccatgtggtgagctctcaggcgtatgggaacgtggatgaggaagatgaggagcagacggagatcgactccgaccttccagctgatgagcacgataatggcaatgccatggaggaggatgttgtggaaggaacatctctggttatctggagttggcggtggccttttcattcatggttgcctgcactcatcctcggagggttgcagcaatgtcggtctccaggggaagtcgggaagagggcttacactacagcagccgaatcaaacgaagatgacgagcggcgggaggatgatggaaaggaggatctccaggaaggtgcagcagcgaccatcgtcatcaggatctccaggaaagtgcaacagcggttgtccaccatcgggatccttgtggtcggggccctgccatggggatcagaccgcatgcaggcgcacagatcagagggccagcacgcgaggacgatgcgggatgcaggttctgggagcccagatccgtgggagaggcagcgggctggtgatgggaggatgaggcggctagcggggtcagtggcaatgagaggttag

SEQ ID NO: 88465 - DNA, 556 bp, Zea Mays
gagcatccaccacacctgcacctccgtttgttttcgccccgagcggcgttcgccacggcgcgctatgccgctacgctcttcagtgagggattccttcctccgagcagcagccaatcgtcgtcaaacagcagtctgacacaggggcggactcaccacccagacacctggcctgggggctggctcgtcggctgcaatggacggctgcaatggacaagagcaggtaagtattgtacgcagaagcaaacagcacagggcgcaagcactgacgtggaggatcacagcataataatcgtctagacttgaagttgcatgacatttttttagtttttcccctgttgtgtgaaactctttagagatgtcaactcattagcttttttgaacaacggcatttgcagttgctggcaaatcctaattactctgaccatttctggttgtgcactgaaatgtgtttgttttttagtatatttttgttgctataaattcttcattcattctgtatttttgttcgtgtgagtctatagtgactaaattatgtatttgttcgtgtgagtaaaga

SEQ ID NO: 88466 - DNA, 228 bp, Zea Mays
atggggattccaaatgccaaagttttaccagtcccagttttggcacggccaaccatgtcccttccttgcattgctggctcaaggacagctctctggatggggaacagcttggtgatgcccttgctggcgagcctttcgacgatcttggacgagatcccaagcttggcaatctcgagcccctccgccgctgcgccgccgccggccgccgccctcttgtcctcctcgtag

SEQ ID NO: 88467 - DNA, 199 bp, Zea Mays
agggagcggggcccgccgggccaccgcatccagcgccgccggctgctgctggagcagcgcggtcgcgagcgcggacacggcgcgccgccgaaggggcgccgcgcggcggaggacggcgtacatggctgtaccgcttccgcgtcggcggcggcggcggcgctgggtttagggttttgggacgggagtgtgggaagggggg

SEQ ID NO: 88468 - DNA, 1284 bp, Zea Mays
tttgccctcccgagtcctgactctatccgtgtctagtgtcttccgtctcgatcccgcgggtgggactcgccggcgacaaaaacgaaaagcgacttgccctccgcggcctccggccttcccactccactcgccctcctctcctagcgtcggtgagccggtgcgctgcagtccccgctccccttccgcgtcgccgcgatggaggtcttccgggagcacggggacgacggagtgccctaggattccatcacgccgccaagcatcagtcccgcagccagggatttcttctccgaccccgaccttcatgtgagtcgcggccttcctcctcgaagcggatccggcggattggaggggccaaccatagcagggctttggagactgcccagatgaagagtagatttcttgttctctgtgccattgtctgcgtcatggctcagatgggagatgccaatgtcgtgctattggggaataatctgaccttgtcctttgctgatattgaggcaagcttttctccaggagtgaaaggatcaggagtcaatggcatagtttatgcttctgaacctttgaatgcctgcagcccgttaacaatcaaggcagtcaagggcccgccatctccctttgcattaattgtaagaggcggatgcacgtttgatgagaaagtgaaaaatgcacaggatgctggattcaaagctgcaattgtgtatgacaatgaaaatagtggggtcctggtttcaatggctggaagctcaagtggcatacacatatacgctgttttcgtttcgaaggcctcaggagaggtgttgaagaaatcttcaggacatactgatgtagaggtgtggatactacctacattcgacaactcagcctggtcgatcatggcaatctcattcatatcgctgcttgccatgtctgctgtattagctacgtgtttctttgtgagaaggcatcgaataaggagagaccaccctagaatcccagaagctagagagttccatggaatgagcagtcagttagttaaggctatgccaagtcttattttcacgaaagtgcaagaagataactgcacatcatcgatgtgtgccatttgtttggaagactacagtgtcggagaaaagctcagagtgctgccttgtcgtcacagtatgtcatttagctccttacattttttttatattatgctactgtaatagtatgatggcttgggactctaccacatccaactggtctgctatactgtacttttcactcttctgatttgggatgaaaaccttgtgcaagatttttatg

SEQ ID NO: 88469 - DNA, 1734 bp, Zea Mays
tttgccctcccgagtcctgactctatccgtgtctagtgtcttccgtctcgatcccgcgggtgggactcgccggcgacaaaaacgaaaagcgacttgccctccgcggcctccggccttcccactccactcgccctcctctcctagcgtcggtgagccggtgcgctgcagtccccgctccccttccgcgtcgccgcgatggaggtcttccgggagcacggggacgacggagtgccctaggattccatcacgccgccaagcatcagtcccgcagccagggatttcttctccgaccccgaccttcatgtgagtcgcggccttcctcctcgaagcggatccggcggattggaggggccaaccatagcaggtacttcttgcgggtgtaagcatttcgctgcacttggagacgcttatttggagtatttgaagtatgagttggctctctgtcctgtcagttatgtgcctgtgcttcataaaaaagagctacattttcttctactagggctttggagactgcccagatgaagagtagatttcttgttctctgtgccattgtctgcgtcatggctcagatgggagatgccaatgtcgtgctattggggaataatctgaccttgtcctttgctgatattgaggcaagcttttgtgagtcctgcactccttacaatcatttaattttgtctgatcaattgctagcattggtgcccacttaatctaaaactttttgtttgcatggtttgcttatatgctcaatttaggtgttatgtttgaccttcttctttcttacactgtagattagctgattcatggtgtgccttggcttttttataccttttctgacttgcttgtgtacacttcatttttttcttactctcttattccttttcacattcatcaagtattttattttccttaacgattcaaacatgccatttcaattggattacagctccaggagtgaaaggatcaggagtcaatggcatagtttatgcttctgaacctttgaatgcctgcagcccgttaacaatcaaggcagtcaagggcccgccatctccctttgcattaattgtaagaggcggatgcacgtttgatgagaaagtgaaaaatgcacaggatgctggattcaaagctgcaattgtgtatgacaatgaaaatagtggggtcctggtttcaaaattgttgcagtggctggaagctcaagtggcatacacatatacgctgttttcgtttcgaaggcctcaggagaggtgttgaagaaatcttcaggacatactgatgtagaggtgtggatactacctacattcgacaactcagcctggtcgatcatggcaatctcattcatatcgctgcttgccatgtctgctgtattagctacgtgtttctttgtgagaaggcatcgaataaggagagaccaccctagaatcccagaagctagagagttccatggaatgagcagtcagttagttaaggctatgccaagtcttattttcacgaaagtgcaagaagataactgcacatcatcgatgtgtgccatttgtttggaagactacagtgtcggagaaaagctcagagtgctgccttgtcgtcacagtatgtcatttagctccttacattttttttatattatgctactgtaatagtatgatggcttgggactctaccacatccaactggtctgctatactgtacttttcactcttctgatttgggatgaaaaccttgtgcaagatttttatg

SEQ ID NO: 88470 - DNA, 2373 bp, Zea Mays
tttgccctcccgagtcctgactctatccgtgtctagtgtcttccgtctcgatcccgcgggtgggactcgccggcgacaaaaacgaaaagcgacttgccctccgcggcctccggccttcccactccactcgccctcctctcctagcgtcggtgagccggtgcgctgcagtccccgctccccttccgcgtcgccgcgatggaggtcttccgggagcacggggacgacggagtgccctaggattccatcacgccgccaagcatcagtcccgcagccagggatttcttctccgaccccgaccttcatgtgagtcgcggccttcctcctcgaagcggatccggcggattggaggggccaaccatagcagattcgaaattttctagctcagcaccataaaagggcagacccagtgtcggaggatctcacatgagtggattctgggtaagggataaaccaagggaaagtctttcccccacaaatgcggagaggctgttttgaacccgtgacctggtacttcttgcgggtgtaagcatttcgctgcacttggagacgcttatttggagtatttgaagtatgagttggctctctgtcctgtcagttatgtgcctgtgcttcataaaaaagagctacattttcttctactagggctttggagactgcccagatgaagagtagatttcttgttctctgtgccattgtctgcgtcatggctcagatgggagatgccaatgtcgtgctattggggaataatctgaccttgtcctttgctgatattgaggcaagcttttctccaggagtgaaaggatcaggagtcaatggcatagtttatgcttctgaacctttgaatgcctgcagcccgttaacaatcaaggcagtcaagggcccgccatctccctttgcattaattgtaagaggcggatgcacgtttgatgagaaagtgaaaaatgcacaggatgctggattcaaagctgcaattgtgtatgacaatgaaaatagtggggtcctggtttcaatggctggaagctcaagtggcatacacatatacgctgttttcgtttcgaaggcctcaggagaggtgttgaagaaatcttcaggacatactgatgtagaggtgtggatactacctacattcgacaactcagcctggtcgatcatggcaatctcattcatatcgctgcttgccatgtctgctgtattagctacgtgtttctttgtgagaaggcatcgaataaggagagaccaccctagaatcccagaagctagagagttccatggaatgagcagtcagttagttaaggctatgccaagtcttattttcacgaaagtgcaagaagataactgcacatcatcgatgtgtgccatttgtttggaagactacagtgtcggagaaaagctcagagtgctgccttgtcgtcacaagttccatgcagcttgtgtggacttgtggctaacttcttggagaacattctgccctgtatgcaagcgagacgcgacgagtggagtatcagaacttcccgccacagaggctacccccttgctttcttctgctgtccggttaccttctcagccatcttcattcaggtcgagcgtggcagcctccccacccaggccgataagccggcatccttcatcgcactcggtttctcgtgcttactctgtctctagtaccccccactcccccaaccccttcagatctcacacaaacttacctggggtcatccatgcaagcagaagcaccacagaccttgcaaacatgtcgtctccccaccctcgcatctcacacttgtcgtcgtcgacacactccctcgtcggcagccacctatctccaccaatcagcataaggtatccattgccccattctcggcatgaatcgcccagtccacacgtcagttcgccctacatctcaaattctggctacggttcttcaagctactactaccttggcggctcgagccagcacgggtcgtacctgcggcggtgtggagagtcagggccaagcctgtctaccatggtccctcggtcatcgcagcagcagttccagtcagaggcaaacgtggccgcaggcgcgtcgtctgcccagtcctcacggcagtcctacctgcgacgctgtggcgattcagacgccagcttgtctgacatggcgtcagcccagtcgttgccggggtgctgaggcagatgtgcactacaagatgcggcttgacctgtgcatacaatgaggcttgcagcgtcacataggtggggaacatgtatagcatagactttatgatcctgttcttgtctgtgagtggtatatggttctttttttgtgccttttattgtgtgcatctgacgtgacaggagcctgttgaagttgattctgttaacattttagtccgc

SEQ ID NO: 88471 - DNA, 2299 bp, Zea Mays
tttgccctcccgagtcctgactctatccgtgtctagtgtcttccgtctcgatcccgcgggtgggactcgccggcgacaaaaacgaaaagcgacttgccctccgcggcctccggccttcccactccactcgccctcctctcctagcgtcggtgagccggtgcgctgcagtccccgctccccttccgcgtcgccgcgatggaggtcttccgggagcacggggacgacggagtgccctaggattccatcacgccgccaagcatcagtcccgcagccagggatttcttctccgaccccgaccttcatgtgagtcgcggccttcctcctcgaagcggatccggcggattggaggggccaaccatagcagattcgaaattttctagctcagcaccataaaagggcagacccagtgtcggaggatctcacatgagtggattctgggtaagggataaaccaagggaaagtctttcccccacaaatgcggagaggctgttttgaacccgtgacctggtacttcttgcgggtgtaagcatttcgctgcacttggagacgcttatttggagtatttgaaggctttggagactgcccagatgaagagtagatttcttgttctctgtgccattgtctgcgtcatggctcagatgggagatgccaatgtcgtgctattggggaataatctgaccttgtcctttgctgatattgaggcaagcttttctccaggagtgaaaggatcaggagtcaatggcatagtttatgcttctgaacctttgaatgcctgcagcccgttaacaatcaaggcagtcaagggcccgccatctccctttgcattaattgtaagaggcggatgcacgtttgatgagaaagtgaaaaatgcacaggatgctggattcaaagctgcaattgtgtatgacaatgaaaatagtggggtcctggtttcaatggctggaagctcaagtggcatacacatatacgctgttttcgtttcgaaggcctcaggagaggtgttgaagaaatcttcaggacatactgatgtagaggtgtggatactacctacattcgacaactcagcctggtcgatcatggcaatctcattcatatcgctgcttgccatgtctgctgtattagctacgtgtttctttgtgagaaggcatcgaataaggagagaccaccctagaatcccagaagctagagagttccatggaatgagcagtcagttagttaaggctatgccaagtcttattttcacgaaagtgcaagaagataactgcacatcatcgatgtgtgccatttgtttggaagactacagtgtcggagaaaagctcagagtgctgccttgtcgtcacaagttccatgcagcttgtgtggacttgtggctaacttcttggagaacattctgccctgtatgcaagcgagacgcgacgagtggagtatcagaacttcccgccacagaggctacccccttgctttcttctgctgtccggttaccttctcagccatcttcattcaggtcgagcgtggcagcctccccacccaggccgataagccggcatccttcatcgcactcggtttctcgtgcttactctgtctctagtaccccccactcccccaaccccttcagatctcacacaaacttacctggggtcatccatgcaagcagaagcaccacagaccttgcaaacatgtcgtctccccaccctcgcatctcacacttgtcgtcgtcgacacactccctcgtcggcagccacctatctccaccaatcagcataaggtatccattgccccattctcggcatgaatcgcccagtccacacgtcagttcgccctacatctcaaattctggctacggttcttcaagctactactaccttggcggctcgagccagcacgggtcgtacctgcggcggtgtggagagtcagggccaagcctgtctaccatggtccctcggtcatcgcagcagcagttccagtcagaggcaaacgtggccgcaggcgcgtcgtctgcccagtcctcacggcagtcctacctgcgacgctgtggcgattcagacgccagcttgtctgacatggcgtcagcccagtcgttgccggggtgctgaggcagatgtgcactacaagatgcggcttgacctgtgcatacaatgaggcttgcagcgtcacataggtggggaacatgtatagcatagactttatgatcctgttcttgtctgtgagtggtatatggttctttttttgtgccttttattgtgtgcatctgacgtgacaggagcctgttgaagttgattctgttaacattttagtccgc

SEQ ID NO: 88472 - DNA, 2232 bp, Zea Mays
tttgccctcccgagtcctgactctatccgtgtctagtgtcttccgtctcgatcccgcgggtgggactcgccggcgacaaaaacgaaaagcgacttgccctccgcggcctccggccttcccactccactcgccctcctctcctagcgtcggtgagccggtgcgctgcagtccccgctccccttccgcgtcgccgcgatggaggtcttccgggagcacggggacgacggagtgccctaggattccatcacgccgccaagcatcagtcccgcagccagggatttcttctccgaccccgaccttcatgtgagtcgcggccttcctcctcgaagcggatccggcggattggaggggccaaccatagcaggtacttcttgcgggtgtaagcatttcgctgcacttggagacgcttatttggagtatttgaagtatgagttggctctctgtcctgtcagttatgtgcctgtgcttcataaaaaagagctacattttcttctactagggctttggagactgcccagatgaagagtagatttcttgttctctgtgccattgtctgcgtcatggctcagatgggagatgccaatgtcgtgctattggggaataatctgaccttgtcctttgctgatattgagctccaggagtgaaaggatcaggagtcaatggcatagtttatgcttctgaacctttgaatgcctgcagcccgttaacaatcaaggcagtcaagggcccgccatctccctttgcattaattgtaagaggcggatgcacgtttgatgagaaagtgaaaaatgcacaggatgctggattcaaagctgcaattgtgtatgacaatgaaaatagtggggtcctggtttcaaaattgttgcagtggctggaagctcaagtggcatacacatatacgctgttttcgtttcgaaggcctcaggagaggtgttgaagaaatcttcaggacatactgatgtagaggtgtggatactacctacattcgacaactcagcctggtcgatcatggcaatctcattcatatcgctgcttgccatgtctgctgtattagctacgtgtttctttgtgagaaggcatcgaataaggagagaccaccctagaatcccagaagctagagagttccatggaatgagcagtcagttagttaaggctatgccaagtcttattttcacgaaagtgcaagaagataactgcacatcatcgatgtgtgccatttgtttggaagactacagtgtcggagaaaagctcagagtgctgccttgtcgtcacaagttccatgcagcttgtgtggacttgtggctaacttcttggagaacattctgccctgtatgcaagcgagacgcgacgagtggagtatcagaacttcccgccacagaggctacccccttgctttcttctgctgtccggttaccttctcagccatcttcattcaggtcgagcgtggcagcctccccacccaggccgataagccggcatccttcatcgcactcggtttctcgtgcttactctgtctctagtaccccccactcccccaaccccttcagatctcacacaaacttacctggggtcatccatgcaagcagaagcaccacagaccttgcaaacatgtcgtctccccaccctcgcatctcacacttgtcgtcgtcgacacactccctcgtcggcagccacctatctccaccaatcagcataaggtatccattgccccattctcggcatgaatcgcccagtccacacgtcagttcgccctacatctcaaattctggctacggttcttcaagctactactaccttggcggctcgagccagcacgggtcgtacctgcggcggtgtggagagtcagggccaagcctgtctaccatggtccctcggtcatcgcagcagcagttccagtcagaggcaaacgtggccgcaggcgcgtcgtctgcccagtcctcacggcagtcctacctgcgacgctgtggcgattcagacgccagcttgtctgacatggcgtcagcccagtcgttgccggggtgctgaggcagatgtgcactacaagatgcggcttgacctgtgcatacaatgaggcttgcagcgtcacataggtggggaacatgtatagcatagactttatgatcctgttcttgtctgtgagtggtatatggttctttttttgtgccttttattgtgtgcatctgacgtgacaggagcctgttgaagttgattctgttaacattttagtccgca

SEQ ID NO: 88473 - DNA, 2229 bp, Zea Mays
tttgccctcccgagtcctgactctatccgtgtctagtgtcttccgtctcgatcccgcgggtgggactcgccggcgacaaaaacgaaaagcgacttgccctccgcggcctccggccttcccactccactcgccctcctctcctagcgtcggtgagccggtgcgctgcagtccccgctccccttccgcgtcgccgcgatggaggtcttccgggagcacggggacgacggagtgccctaggattccatcacgccgccaagcatcagtcccgcagccagggatttcttctccgaccccgaccttcatgtgagtcgcggccttcctcctcgaagcggatccggcggattggaggggccaaccatagcagggctttggagactgcccagatgaagagtagatttcttgttctctgtgccattgtctgcgtcatggctcagatgggagatgccaatgtcgtgctattggggaataatctgaccttgtcctttgctgatattgagctccaggagtgaaaggatcaggagtcaatggcatagtttatgcttctgaacctttgaatgcctgcagcccgttaacaatcaaggcagtcaagggcccgccatctccctttgcattaattgtaagaggcggatgcacgtttgatgagaaagtgaaaaatgcacaggatgctggattcaaagctgcaattgtgtatgacaatgaaaatagtggggtcctggtttcaaaattgttgcagtggctggaagctcaagtggcatacacatatacgctgttttcgtttcgaaggcctcaggagaggtgttgaagaaatcttcaggacatactgatgtagaggtgtggatactacctacattcgacaactcagcctggtcgatcatggcaatctcattcatatcgctgcttgccatgtctgctgtattagctacgtgtttctttgtgagaaggcatcgaataaggagagaccaccctagaatcccagaagctagagagttccatggaatgagcagtcagttagttaaggctatgccaagtcttattttcacgaaagtgcaagaagataactgcacatcatcgatgtgtgccatttgtttggaagactacagtgtcggagaaaagctcagagtgctgccttgtcgtcacaagttccatgcagcttgtgtggacttgtggctaacttcttggagaacattctgccctgtatgcaagcgagacgcgacgagtggagtatcagaacttcccgccacagaggctacccccttgctttcttctgctgtccggttaccttctcagccatcttcattcaggtcgagcgtggcagcctccccacccaggccgataagccggcatccttcatcgcactcggtttctcgtgcttactctgtctctagtaccccccactcccccaaccccttcagatctcacacaaacttacctggggtcatccatgcaagcagaagcaccacagaccttgcaaacatgtcgtctccccaccctcgcatctcacacttgtcgtcgtcgacacactccctcgtcggcagccacctatctccaccaatcagcataaggtatccattgccccattctcggcatgaatcgcccagtccacacgtcagttcgccctacatctcaaattctggctacggttcttcaagctactactaccttggcggctcgagccagcacgggtcgtacctgcggcggtgtggagagtcagggccaagcctgtctaccatggtccctcggtcatcgcagcagcagttccagtcagaggcaaacgtggccgcaggcgcgtcgtctgcccagtcctcacggcagtcctacctgcgacgctgtggcgattcagacgccagcttgtctgacatggcgtcagcccagtcgttgccggggtgctgaggcagatgtgcactacaagatgcggcttgacctgtgcatacaatgaggcttgcagcgtcacataggtggggaacatgtatagcatagactttatgatcctgttcttgtctgtgagtggtatatggttctttttttgtgccttttattgtgtgcatctgacgtgacaggagcctgttgaagttgattctgttaacattttagtccgcaccatgcgtccatgccagtttctccctagatttgctactctactaccatgcacacatttgaacgaggcagtgctcagctgcatgcatctgatgttaatgttgtgctgctcgctcagtgagcatgaagagatgg

SEQ ID NO: 88474 - DNA, 1005 bp, Zea Mays
attttttcagcctgagcgtggtgacgcaggcaggaatgggtcccgactcccgacggatcagggaaatccccggcgagcagaacagcaatggagcgtcatcgaccggtcagtcggtcacgggcggagtttaaacgccacggagcagcggcggagagacgacgacagcacagtacgcggtgagcccgagtagtccatctccatccgtcgctgcagttgccgctgttcctctgcggcgctggccgccggccagcgccattgatcagtgtaattattactagctcgccagcgttgacttgacaggcctgaaatccgtccacctcgtcagatcggagttgcaggtccaggtgtcactcacgctaacggatgattgtgaccaggatttggtggtgggatctctggggagaaacctcttcctattcaaaccctagggatctcatctaaatccgctggtcactaaatcagtcctaaatgatgctaaaatgttaaattttccgtggttaggattaacctttgcaggtcacacaatgacacaaaagatcacaaagattcaatgataacagcagtagtaatagggttaagtctcacacataaacagacagcaggggcattgttctccaactcccgatccaccacagtagacttaggccataaacagacagcaggggcattgtctcgagcagttgtagcacacaggtgcaacggaaagcaactagtaatacgtagtcggataggataggataaaggcggcaaccgatctagcgctgccgagcgaggcacgaggctgtgaacgtcaagagcggaggagcatcagatgaaggtccagttgacgaacatgagcgccaggcactgcggcgcgccgtcgtcgcccaccaccttccacgccaccgcctgctcgtacgacgcctgccgccccatgctcgacctgcacacgccgccggggaggtacgccaggccctgctcacaaagggtcaaaggcaaggcttttacctacttagccacacccac

SEQ ID NO: 88475 - DNA, 1065 bp, Zea Mays
attttttcagcctgagcgtggtgacgcaggcaggaatgggtcccgactcccgacggatcagggaaatccccggcgagcagaacagcaatggagcgtcatcgaccggtcagtcggtcacgggcggagtttaaacgccacggagcagcggcggagagacgacgacagcacagtacgcggtgagcccgagtagtccatctccatccgtcgctgcagttgccgctgttcctctgcggcgctggccgccggccagcgccattgatcagtgtaattattactagctcgccagcgttgacttgacaggcctgaaatccgtccacctcgtcagatcggagttgcaggtccaggtgtcactcacgctaacggatgattgtgaccaggatttggtggtgggatctctggggagaaacctcttcctattcaaaccctagggatctcatctaaatccgctggtcactaaatcagtcctaaatgatgctaaaatgttaaattttccgtggttaggattaacctttgcaggtcacacaatgacacaaaagatcacaaagattcaatgataacagcagtagtaatagggttaagtctcacacataaacagacagcaggggcattgttctccaactcccgatccaccacagtagacttaggccataaacagacagcaggggcattgtctcgagcagttgtagcacacaggtgcaacggaaagcaactagtaatacgtagtcggataggataggataaaggcggcaaccgatctagcgctgccgagcgaggcacgaggctgtgaacgtcaagagcggaggagcatcagatgaaggtccagttgacgaacatgagcgccaggcactgcggcgcgccgtcgtcgcccaccaccttccacgccaccgcctgctcgtacgacgcctgccgccccatgctcgacctgcacacgccgccggggaggtacgccaggccctgctcacaaagggtcaaaggcaaggcttttacctacttagccacacccacaccgtcaaggctacgtacgagcaggcagagttagtagcggtacctgcagcatgatcttgg

SEQ ID NO: 88476 - DNA, 1072 bp, Zea Mays
gtaccaccgttttttccttctctatgaaagtctgaaaatagctagtgcggagcgtgcctctgcggtccgataggcgggttcgcatccggccatccgatactgtgccagtgcggccgcgcggcggcggagcaaccacgcgcgcagaccgccgtcgccacctcctccctccctccgctccccggcgtgcgtccgatccaccaggaatcgaaggctcccacacgccccaacgcgatgctgcgcaacttcccgcaggcccggaggctcctcaggtgcggcgcgcgccctccatccatcgccggcggcggttcctcggcctgcccaccttctctgctcgcccttgccgacggtatctgatattctgatcctgcgcccgtgcgggcgggtggttgggcgcaggcggatggggttcgagaaggaggacgcctacttctggaagcagatgggcaaggccatgctctgcacgtacacgctcttcggcgtcgtctggctctggaacgagacgtcgccgctcgggtggtggacgctgaagccgcgccccaaggaagaaagagagatggcacacctctatgagcgcaggaagttcccgtaccctggcgatgatgaggcggtcgaggagtttgtaaagagcggaggtgctcttggaaccacaattggacccaggggattcgctgacgccaatatggattctgaaaacatgcagaagcagctgcagtctaagaagttcgagcaggaagcacagaaactgtggattcggatgaggaatgaggtcgtacaggagctccaggagaaggggtttgatatcgagtgaatttgaaaacctgcagtatggtcggcgctgaggatgttaaaacttaaaaccacttgccatctaaattggagaactgtataacttaggaataaaagagtttgtagctatctttttaactaactatctggtgcattcttggtgctgctagattgtaccgaaaataatttttgctgtcttgtggagaacagaggatctcatttgaatatttgatcctcttttaatgtttcttattgcctgatcatcacaaaattgtgcttctggaaa

SEQ ID NO: 88477 - DNA, 945 bp, Zea Mays
gtaccaccgttttttccttctctatgaaagtctgaaaatagctagtgcggagcgtgcctctgcggtccgataggcgggttcgcatccggccatccgatactgtgccagtgcggccgcgcggcggcggagcaaccacgcgcgcagaccgccgtcgccacctcctccctccctccgctccccggcgtgcgtccgatccaccaggaatcgaaggctcccacacgccccaacgcgatgctgcgcaacttcccgcaggcccggaggctcctcaggcggatggggttcgagaaggaggacgcctacttctggaagcagatgggcaaggccatgctctgcacgtacacgctcttcggcgtcgtctggctctggaacgagacgtcgccgctcgggtggtggacgctgaagccgcgccccaaggaagaaagagagatggcacacctctatgagcgcaggaagttcccgtaccctggcgatgatgaggcggtcgaggagtttgtaaagagcggaggtgctcttggaaccacaattggacccaggggattcgctgacgccaatatggattctgaaaacatgcagaagcagctgcagtctaagaagttcgagcaggaagcacagaaactgtggattcggatgaggaatgaggtcgtacaggagctccaggagaaggggtttgatatcgagtgaatttgaaaacctgcagtatggtcggcgctgaggatgttaaaacttaaaaccacttgccatctaaattggagaactgtataacttaggaataaaagagtttgtagctatctttttaactaactatctggtgcattcttggtgctgctagattgtaccgaaaataatttttgctgtcttgtggagaacagaggatctcatttgaatatttgatcctcttttaatgtttcttattgcctgatcatcacaaaattgtgcttctggaaa

SEQ ID NO: 88478 - DNA, 612 bp, Zea Mays
ttgacatcaagctctctggttgtgaaagaaattggagtgggtttgaagggatacacactaagaagagaaataggctgactacaacccgcctcaacaagttggtctatattcagttcaataacaggctgatgaataacagagaaaagattaagtcaaagaaaatcactgatgttctcttgtctagtgatacaactgaagctcaaggttttctccaagagggtggagatgattgtgcacaagttgtctttagagatgaggaggaagatgagatggaaggtacagggataccttggtctgttattggagaggcagtgggagcagaagaacagtttgagcctcgtagaagtgcaagagtgagagagctctatgaaggagaagagtttgagtctgaagaagaagaagagtatgaagatgaagatttgtgctacagtgaagatgaaatatgatctggaccatctccatctagtagtgaagccttttgtgatgccctggtcttatgaactgcagctgtgtcactttgtgtctgtgtgtcttcttttgtgtgagacctgaactaagaactatgtgcttgtgttgtcctttatttataaattgtgttctgcacttgtatta

SEQ ID NO: 88479 - DNA, 1105 bp, Zea Mays
ctttcccacttccccttttttgcccgcccgctacccaaccgccgccgcggttctcgctgccagcgacggacgggccacaccgcgcaggggctcagccccgccacccaccttaaccccgccgtcgggaggcgtcgtccccggcccggcccggcccggccctcgccctctactgcaactggactggcgcgtagacctgtccccgccacgagatcgttccgccctatgtcggtgaagatgctctttgcatagctcaagctgcaatctgatggaccctgatgacaagaagtttggaaatggaccaagggagctcactggtgctgttgatttgatcagccactacaaactgctgccacaccatgatttcttttgcaagaaacctttgccgctggcaatatcagatacacattatcttcacaatgttgtgggagacactgaaattcgcaaaggagaaggaatggagttagatcaacttgttcataatgcatatctgagggataaacctgcttatattcagccctttgatatggaaactctggggcaagcgttccaacttcgagaaacagctcttgtggatttgccttctactgaaaaaggtataccgactatttcgggtaaaccaaaaagtgagtccaaggacaaagagaagaagcataaaaggcacaaagacaaagacaaggaacacaagaagcacaaacatcggcataaggatcggagtaaggacaaagataaagacaaagacaaggataagaaaaaagataaaagtggccatcatgaaaagaagaggaagcatgagggaacagaagattcagtagatgtgcataagcacaagaagagtaagcacaagagctccaaaaccgatgagatggggaatggagttagttaacacttcctagctctacctccaatccttgtaatttgctgttaaaacttaaaaggagacagacggtctctgctatcaaaaccctgtgcagaatagtggtccttccaggtggaggttaggggtggggcaattagaggagggcggtgggtggaggcgctgtcctccggctctcgctgaaagtaatagagaaaaacaaatgaaatggtacacaacataaccagtagc

SEQ ID NO: 88480 - DNA, 1638 bp, Zea Mays
gtcgccgctggtataattataaagcgcccgcgccaccaactcccttgtccgcacgccgcgaccgccggaaacctcactcctcgtcctcgctcggagacacggcaagcgagtcctcctcactcacgcaaacacacgccgtgccgcgagcgcacgagacaaccgagcggagctgccgcctgcccgccagtgccagccatggacgccgcggtgcgcgtccccccggcgctcgggaacaagacggtgaccgaggtgacgccgccgccgccaccaccggcgggggaggagcggctgtcggacgccgacacgacggcgtcgtcgacggcggcgcccaactcgagcctcagctcggccagcagcgccgccagcctgccgcgctgctccagcctgtcccgcctctccttcgactgctctccgtccgcggccctgtcctcttcctcggcgtcggcgtcggccgcggcgccgctggggccgcgggacttcaggctgctgcgccgcgtgggcggcggcgacgtcggcaccgtgtacctgtgccgcctcagggcgccacccgcgcccgcgcccgtctgctgcctgtacgcgatgaaggtggtggaccggcgcgtggcggccgcgaagaagaagctggagcacgcggcggcggagcggcggatcctgcgggcgctggaccatccgttcctgcccacgctcttcgccgacttcgacgccgcgccgcacttctcctgcgtcgtcacggagttctgccccggcggggacctccactcgctccgccaccgcatgcccaaccgccgcttcccgctcccgtcagctcggttctacgcggcggaggtgttgctggcgctggagtacctgcacatgatgggcatcgtgtaccgcgacctcaagccggagaacgtgctgatccgcgcggacggccacatcatgctcacggacttcgacctgtcgctgcagtgcacgtcgacgccgtcgctcgagccgtgcgccgcccccgaggcggcggcggcgtcctgcttcccggaccacctgttccgccgccggcgcgcgcgactccgccgtgccgcctcggcgcggcggccgccaacgaccctggtggcggagccggtggaggcgcggtcgtgctcgttcgtgggcacgcacgagtacgtggcgcccgaggtggcccgcggcgggccccacggcgcggccgtcgactggtgggcgctcggcgtgttcctgtacgagctcctgcacgggcgcaccccgttcgcgggcgccgacaacgaggccacgctccgcaacatcgcgcgccgcccgctgtccttccccgctgccggcgccggtgatgccgacgcgcgcgacctcatcgcccgcctcctcgccaaggacccgcgccaccggttggggtcccggcgcggcgccgccgacgtgaaggcgcacccgttcttccgcgggctcaacttcgcgctgctccggtcctcccgcccgcccgtcgtccccgccgcgtcgcgctccccgctgcaccgctcgcagtcctgcagcgcggcgcgcacgagagcgtcgaagccgaagccgccgccggacacccggttcgacctgttctgacacgaccgttgccggcgtcacgcacgtgcgtgttgacctagttgcatcactcgccattgt

SEQ ID NO: 88481 - DNA, 294 bp, Zea Mays
atggcgttagaagcacgggttgaacgtccacacggcgctctggttgtacaggatggcctcgaactcggtgaggttggaggagatggtggtctcgcagcacccagtccccgtgcacgccgcaccgtcgtcggacgtgccgccgatgccctggcagtaggagtagcagccagcgacgtagaggtcggagctgtcgtgcttgtagccgccgatgatcgtgaagcggttgcgggcggtggaggggacgaacggcgtgtcgtccaggacgaaccaggtcctgtcgtggtccgtaaatga

SEQ ID NO: 88482 - DNA, 2700 bp, Zea Mays
caaagcaaaaacaagtagcagcaagagaagctagctatctagctagcagccaggaggacaaagtcagcgtggtccattccaagcgcgtgtggtacggtctccgtacggccgagatcgagcaggggcgaggcgcgtacgtgcgtgtgtgtgcccgccggccggcatggcgaaggtggcgtcgaacggggcgttccagggcgacaacccgctggacttcgcgctgccgctcatcatcctgcagatctgcctcgtcctcgtcgtcacccgcggcctcgcctacctcctccgcccgctccgccagccccgcgtcatcgccgagatcatcggaggcatcctgctgggcccgtcggcgctgggccggagcaccaagttcctgcacaccgtcttcccgccggcgagcatgacggtgctggacacgctggcgaacctcggcctgctcttcttcctcttcctcgtggggctggagctcgacatcgccgccatccgccgcacggggaggaaggccctggccatctccctctcgggcatcgccctcccgttcgcgctcggcgtcggcacgtccttcgcgttccgcgccaccgtcgtcaaggacgcccgccacgcgccgttcctcgtgttcatgggcgtcgcgctctccatcaccgcgttcccggtgctcgcgcgcatcctcaccgagctcaagctgctgaccaccgacctgggccgcctggcgctgtccgccgccgcggtcgacgacgtcatggcgtggatcctcctcgccctggccatcgcgctctcgggctccggctcgccgatcgtctcgctgtgggtcctgctaaccgccgccgcctttgtcgcagccgccttcttgctcctcaaaccggcgctcgcgtggatggctcgccggtgccgcgacggcgagcccatcaaggagctccacgtctgcgcgaccctcgccatcgtcctcgccgccgggttcgtcaccgacgtcatcggcatccacgcgctgttcggcgggttcgtcgtcggcgtggtcgtccccaaggacgggccgttcgccggcatgctcatcgagaaggtggaggacctcgtctcggggctcttcctcccgctctacttcgtctccagcggcctcaagaccaacgtcgccaccatcagtggcgccaagtcctggggcttgctcgtgctcgtcatcgccaacgcgtgcattggcaagatcggcggcgcggtcgccaccgccctgctcgtcaagatccccgtccgcgaggcggtcaccctcggcttcctgatgaacaccaaggggctcgttgagctcgtcgtgctcaacatcggccgggaccgcaaggtcctcaacgacgaggcgttcgccatcatggtgctcatggcgctcttcaccaccttcatcaccacgcccatcgtcatggcggtctacaagcccgcgcgcccgtcggtgccgtacaagcgccgcaccgtggactgcgcgcccggggacgcggcggcggacggcgagctccgcgtgctcgcctgcttccacaccagccgcagcatcccgacgctgctcaacctcgtggaggcgtcgcgcggcacggggcgccgccgcctcgtcatgtacgccatgcacctggtggagctctcggagcggtcgtcggcggtcaccatggtccagcgcgcccgccgcaacggcttgcccttcttcaacagcgccgacagggaggggcagatggtggtggcgttcgaggcgttccagcagctgagctccgtgagggtgcgcgccatgacggccatctcggacctggacaccatccaccgggacgtcatcgacagcgccgccggcaagcgggcagccatcgtcgtcatgccgtaccacaaggcgctccagcaggacggatccttccagtcgctcggctcggcgtaccacgccgtcaacaagcgcgtgctccgcgaggcgccctgctccgtcgccgtcctcgtcgaccgtggtctcggtggccccgcgcaggtgtccgccaagaacgtgtctttctccgtcgcgatgctcttcttcggcgggcccgacgaccgggaggcgcttgcctacgtgacgcgcatggccgagcatccgggtgtcgccgtcacgctggcaaggttccgcccgcactccgacgaggagagcgccgacgacgaggcggcggtcgacgctttcaagtccaaggtcgacggcatggtgaaggatggatcggtgcacttcgaagagcggcaggggtacaccaaggaggaagtggtggagaccatcgactcgctgtccaaggtcaacgtgttcgtggtggggcggatgccgccgacggcgccgctggtggagaatcccgacgagctgggccccgtgggcagctacctggcgtcgccggagtccaggacgtcggcatccgtcctggtcatcaagagatacgacccggcgacgaacccgaaaagcaagaggttcgaccccagcgcgaggccgccggcagcgacggaggaggacgtgctggacgaggagatgggcagcagatccactgtggtgcccgtgccgtggtcgccgatgaacgacgtggcctaagcagagcacgacgtacccaagtgttaccttatttagctctgtttctttccacaagtggaggtatgatgcgacctcagtgttactactataactgttattatcatctggatttgcacatagaaatatatatatggacatacttagcagag

SEQ ID NO: 88483 - DNA, 1725 bp, Zea Mays
atggcgcccagcagccgaccccactcacagcttgcagccgcgcccacgaccagcacgccaagcgcgaatctcgcccaacttcgagcaaccacattcccagcaggctcgctaacgtgcagttgttgtggcttgcaggggaagggtacgggcagcttcagcaagcgccggaacaagacgcacacgttgtgcatcctctgcgaccgccacagtttccacctccagaagagcacctgctcctcctgcggttaccctgccgcccgcatccgcaactcaagttttggaaagagaaaacacgggtttagccagttccgggcgtttttttacggagtaaccggcattcttcttattatggatcagataggatacaatgctggtcgcacaccattcacagacatctcaaacaccatcattacaggtaatcaaaatgaatcgaactcgcttggaccaattgtcgatgctaaggaatgtaagaggcaaagggatagggaaagatatgttgcgatgactgttgaagaaaagaatgagaaaaataggaagcgtcgtgaagcacgtcaacgaaataaaggactatcgatagagccactctcatccagagaagacgctaatacagaccaggcatgtgaggtggttagctttccagatgactgtagcaccattgatttcacaaatttgtcaacacaagacattgcagacgaacaagtaaatctggatccagatgatgacagcgattggttgcataggaatgagacatttcaggcaaacaacattgtcacaagtaaagaccttctaacaccaggttatgtgcatgaaactgttgataacatacctaagcatactatgaaaagggccgcctactttagcgagcggtacaaaaacatgacttccgtcgagagggagtctagacgtgtacgccttaggttgtataataagacaccaagacggaaagatgctaacaaagagtgcaacagaaaacgtagagcactgcgggctaacactttgaatcaggagtccatcgccatggaggacccagtatatacccctgaggttgtacgtcctacaacatatggaattgaaccatatagatcctcagttaccacttgcgactgggttatccctgaattcgtcatgacacctttcctaccaacttcaacatgtactaagaacatccttagtccgactaaacgtgtgagtgcaggcatggttaaacaaggagtagaccatacacatacgaagccaaagttcatttccaatggtgatgatgatgagggtgtcatattcgaagaggatgaggatgatgatgagaacgatggatacctattcgttgggcaatgcgcgtacctcaatttgtattatgataccacgacttatataactacacatgatgagaccgacgaggacatcgagatcgatggtactcaagatgaatctactgccactgatttgcctggcctgtacgacaaagtgtatagtaacgtgcctgaagaaacacatatgttgaagtctgtccgcaaatgcggttattgcactgcgaagaagtttgagtatgagccacctgggttttgttgtcgtggtgggaaggttgagctagccccactggagacccctccccagctccggaagttgtgggatagtacagactctgatgctagacactttcgtgatagcattaggtttttaatggccatttctctttcacttcactgtattgttgcctcgatagtatga

SEQ ID NO: 88484 - DNA, 1218 bp, Zea Mays
atcagatagcgcgctcccagtcccagtccatcatcggacacacctgctctcggctcgtggttcgcggcttcgcgcacgcgcagcaatggcgctccggccgcagctgcttcgcctcctcctcccatcgcctccccaccggaaccctccgcctccgccctcctccccgtccgtcgcacccattggccgccgcaccgccgcagcagccgtcctcctgctcgccgcgggcgtctccgccccgcccccgcgcgccgcccgcgccgagcccgacggcgaggacgtcgacgaggcccgcatcgtccgcctattccaggaggcgtcgccgtcggtcgtgttcatcaaggacctcgtcgtcgcggggccgcaggggcggagagttggtgaggatgaggacggggacgaggagggcggcggtgctaaggtggagggcacaggctcgggattcgtgtgggactccacgggccacattgtcacgaattaccacgtggttgcgaagttagctggagacggatctgcatctcatcgctgcaaggtgtttttggagggttctggtggcaaaagttactcaaaggaagcgaggctaatagggtgtgatccagcatatgatcttgcggttctgaaggtttggaatttcattatctgtggctcaagttctggtgatgtcaaattggttcggagctgtggtctttgagttcaagattagtgctgcagatagatgctgacagggaccagctgaggcctgctctgattggcacatcacggagtttgcgagttgggcaaagctgctttgccattgggaacccttatggatatgaacacactctaactactggggttattagtggattggggagggaaataccatctcccaatgggagagcgatccgtggggctatacagacagatactgctataaatgctggtaactcaggaggcccacttattgactcttatggccatgtaattggtgtcaatactgctacattcacacgtaaaggatctgggatctcgtccggggtgaacttcgccatccccatcgacacggtggtgcagtcggtccccaacctgatagtgtacgggacctccgtgagcaacaggttttattaactgtgttgtacatcatcatgatccgttccagtgcgtgtcctcactctgtctttgctacgctctcgttactccatatatgcgtacttgtgtgtgttaattactactactcatttg

SEQ ID NO: 88485 - DNA, 1140 bp, Zea Mays
atcagatagcgcgctcccagtcccagtccatcatcggacacacctgctctcggctcgtggttcgcggcttcgcgcacgcgcagcaatggcgctccggccgcagctgcttcgcctcctcctcccatcgcctccccaccggaaccctccgcctccgccctcctccccgtccgtcgcacccattggccgccgcaccgccgcagcagccgtcctcctgctcgccgcgggcgtctccgccccgcccccgcgcgccgcccgcgccgagcccgacggcgaggacgtcgacgaggcccgcatcgtccgcctattccaggaggcgtcgccgtcggtcgtgttcatcaaggacctcgtcgtcgcggggccgcaggggcggagagttggtgaggatgaggacggggacgaggagggcggcggtgctaaggtggagggcacaggctcgggattcgtgtgggactccacgggccacattgtcacgaattaccacgtggttgcgaagttagctggagacggatctgcatctcatcgctgcaaggtgtttttggagggttctggtggcaaaagttactcaaaggaagcgaggctaatagggtgtgatccagcatatgatcttgcggttctgaagatagatgctgacagggaccagctgaggcctgctctgattggcacatcacggagtttgcgagttgggcaaagctgctttgccattgggaacccttatggatatgaacacactctaactactggggttattagtggattggggagggaaataccatctcccaatgggagagcgatccgtggggctatacagacagatactgctataaatgctggtaactcaggaggcccacttattgactcttatggccatgtaattggtgtcaatactgctacattcacacgtaaaggatctgggatctcgtccggggtgaacttcgccatccccatcgacacggtggtgcagtcggtccccaacctgatagtgtacgggacctccgtgagcaacaggttttattaactgtgttgtacatcatcatgatccgttccagtgcgtgtcctcactctgtctttgctacgctctcgttactccatatatgcgtacttgtgtgtgttaattactactactcatttggagctgggcaa

SEQ ID NO: 88486 - DNA, 932 bp, Zea Mays
ctccttccgacctcgccgcctccctccctaaactctaaaccctccaccagccgaagctactgccgcggccgcagcagaggtcgcgacgacgaacgctgaagaagcgccggcgagggagagtcctttactttttcctatgctgtagcaaaacaagcctataccatcttccaaatatactcgttccgtgccggcggcctcccctcctacgcccctgtcgattcttcaatcttcaccaacgtctgcgcgtagcaggctagcagtcggcacggcttcctcagatctgccggacgacttgttgttcgtcaccgactcaccagcaaccaatgtcggccatcagccggcagcaggggaagctgggcggagggtcattgcggcacggcgtccaggcgtacagcaggcaccagcaacagcccatggcaaacgccgcagatgaccctatggtagatgaagccggagtagaagatgccttcacacatgagatcaccgattatttgtacgtccctagataccatgtgttgagttggatggaaactgtggaggggatggtggccggtgtggcggcgcttccgccggtgtatttgatactgaacagagatcttcttgagacgggatggggatggaagaggctggtgccctacagacctggttatgttgagtggcatgtgttcaagaaataccttggggactatttcgaccataatcgtgaagcttttctttgtgccgagcagaagcctgatccatttggatggattattgctgaaaagagtgccctgattgctgcagccaaattgtgcctcaagatggagaaggcacttctcaggtactgtgctagctttctcactcctgacgacaaaaggctgatcctcgggatcaaggaccaggcaaagcaaatgatccaatcagaggtagtgcagagaaacctgtgaagcagc

SEQ ID NO: 88487 - DNA, 2746 bp, Zea Mays
ctccttccgacctcgccgcctccctccctaaactctaaaccctccaccagccgaagctactgccgcggccgcagcagaggtcgcgacgacgaacgctgaagaagcgccggcgagggagagtcctttactttttcctatgctgtagcaaaacaagcctataccatcttccaaatatactcgttccgtgccggcggcctcccctcctacgcccctgtcgattcttcaatcttcaccaacgtctgcgcgtagcaggctagcagtcggcacggcttcctcagatctgccggacgacttgttgttcgtcaccgactcaccagcaaccaatgtcggccatcagccggcagcaggggaagctgggcggagggtcattgcggcacggcgtccaggcgtacagcaggcaccagcaacagcccatggcaaacgccgcagatgaccctatggtagatgaagccggagtagaagatgccttcacacatgagatcaccgattatttgtacgtccctagataccatgtgttgagttggatggaaactgtggaggggatggtggccggtgtggcggcgcttccgccggtgtatttgatactgaacagaggtgcgattttcttttatatttcttccggttcatgttctccttgtgtggctggtgctggattcaaccgatctagggaagagatgttagttgatttgctgtaaaaatcaatatgttaacagagatatatgatacatgctcctgcttgctcatgatgccggtttggtgccaaggctatcttcttgagacgggatggggatggaagaggctggtgccctacagacctggttatgttgagtggcatgtgttcaagaaataccttggggactatttcgaccataatcgtgaagcttttctttgtgccgagcagaagcctgatccatttggatggattattgctgaaaagagtgccctgattgctgcagccaaattgtgcctcaagatggagaaggcacttctcaggtactgtgctagctttctcactcctgacgacaaaaggctgatcctcgggatcaaggaccaggcaaagcaaatgatccaatcagaggtgcttcaagcaatggttcaaatgggtgtccttgttcctactggagatatgactgttgtcagaagaaccgctcaatttttccttaatagctttcaagagtgcctaacagcacaaaggaaggagagagaaatggcaaccgcagaactgggtttcaaaaagcaattaactaaggaggagaagtttgaaaagaggaagcagagacttgctacaatcggagaggatcttttggcgattgctgctgatcaaccatttcgcttccctgccacatttacatttgtggtcagagcattctcaggtgtgtggagagacatgtgtattcctcctatgacgaattcctcaggctccatgaaggtaagcctgtcttaatgggcttgattgttgaacctgacttagtacttttatccatgtcacgacattgaaccagacagtcactcatgtccttaggatattaacggtatacatcaacaattcattctattttaattgcttgcaaaacttttttggcccttcaaatgagttccacgcatcaagaagtcaagattccaggaggcctaaaataggagaggagggcgcagcttgattcaatccatgtcaagtcaaaggctgctgcgaagtttgcacatgcaagtagaatttagatggtgaggttttgtctctgttcccatttttataacgactaggtgtttgaattcctaagattaaagtttatgtagattcttatttgtaattagatctctgttaggcatctaactgaataaatgatctcctaaagaattgacagattccatcactgagcagcccttcgccccggtggctgcggtgtcgcactggctgacacctgctcgcagttgcattacaagttttactgactatgtattttcaggtttattcaatttcggttctaatgcttctgacagcagttgtatcagtcctcttgttcagcttacatgtatccctcgcatccttccttggatccacataagtgttaataataattttgttgcatctcctctgctgatcagagctttcaaactcatgacagaataatgtactaaacttcagtttggtgtctatctcagtgtacctacactcagttggaaaacttcaaccacactgcaacaaggtttataaaaggtttgctatcaggaaaaacaaatttatgggctcaaacaaagtgtgatagtgaaagtcattttgcttccagcttaagaaccaagccaagaaaacagatatcaactgtgacgccacactcaaaagcttgtttggtgggagggacaaggttgggatgctggagatctccaagcttttgagtcgtggcttcccgaaaatctccaagcttttgtggtccatggagccagggatggctctttggtaaaagacttcgttgtggatggcctcttttatggtccatgttaagtcccaagtcccactaggtggttaagcagaaaaatcttgtgatggcattaagactttcagactttgtttttgggtctgatgcatgtaaaaaggattcccagtgtttctgttgctcttgcgatcctgtgaggacacatatgagagaaatatttagtttgttgatggcaaatcttgtcttatgttcatgtctgtgcctatctgatcaagcgttatgatatgatcccatgcgtggtactgtgttctttagagatg

SEQ ID NO: 88488 - DNA, 2734 bp, Zea Mays
ctccttccgacctcgccgcctccctccctaaactctaaaccctccaccagccgaagctactgccgcggccgcagcagaggtcgcgacgacgaacgctgaagaagcgccggcgagggagagtcctttactttttcctatgctgtagcaaaacaagcctataccatcttccaaatatactcgttccgtgccggcggcctcccctcctacgcccctgtcgattcttcaatcttcaccaacgtctgcgcgtagcaggctagcagtcggcacggcttcctcagatctgccggacgacttgttgttcgtcaccgactcaccagcaaccaatgtcggccatcagccggcagcaggggaagctgggcggagggtcattgcggcacggcgtccaggcgtacagcaggcaccagcaacagcccatggcaaacgccgcagatgaccctatggtagatgaagccggagtagaagatgccttcacacatgagatcaccgattatttgtacgtccctagataccatgtgttgagttggatggaaactgtggaggggatggtggccggtgtggcggcgcttccgccggtgtatttgatactgaacagaggtgcgattttcttttatatttcttccggttcatgttctccttgtgtggctggtgctggattcaaccgatctagggaagagatgttagttgatttgctgtaaaaatcaatatgttaacagagatatatgatacatgctcctgcttgctcatgatgccggtttggtgccaaggctatcttcttgagacgggatggggatggaagaggctggtgccctacagacctggttatgttgagtggcatgtgttcaagaaataccttggggactatttcgaccataatcgtgaagcttttctttgtgccgagcagaagcctgatccatttggatggattattgctgaaaagagtgccctgattgctgcagccaaattgtgcctcaagatggagaaggcacttctcaggtactgtgctagctttctcactcctgacgacaaaaggctgatcctcgggatcaaggaccaggcaaagcaaatgatccaatcagaggtgcttcaagcaatggttcaaatgggtgtccttgttcctactggagatatgactgttgtcagaagaaccgctcaatttttccttaatagctttcaagagtgcctaacagcacaaaggaaggagagagaaatggcaaccgcagaactgggtttcaaaaagcaattaactaaggaggagaagtttgaaaagaggaagcagagacttgctacaatcggagaggatcttttggcgattgctgctgatcaaccatttcgcttccctgccacatttacatttgtggtcagagcattctcaggtgtgtggagagacatgtgtattcctcctatgacgaattcctcaggctccatgaaggtaagcctgtcttaatgggcttgattgttgaacctgacttagtacttttatccatgtcacgacattgaaccagacagtcactcatgtccttaggatattaacggtatacatcaacaattcattctattttaattgcttgcaaaacttttttggcccttcaaatgagttccacgcatcaagaagtcaagattccaggaggcctaaaataggagaggagggcgcagcttgattcaatccatgtcaagtcaaaggctgctgcgaagtttgcacatgcaagtagaatttagatggtgaggttttgtctctgttcccatttttataacgactaggtgtttgaattcctaagattaaagtttatgtagattcttatttgtaattagatctctgttaggcatctaactgaataaatgatctcctaaagaattgacagattccatcactgagcagcccttcgccccggtggctgcggtgtcgcactggctgacacctgctcgcagttgcattacaagttttactgactatgtattttcaggtttattcaatttcggttctaatgcttctgacagcagttgtatcagtcctcttgttcagcttacatgtatccctcgcatccttccttggatccacataagtgttaataataattttgttgcatctcctctgctgatcagagctttcaaactcatgacagaataatgtactaaacttcagtttggtgtctatctcagtgtacctacactcagttggaaaacttcaaccacactgcaacaaggtttataaaaggaaaaacaaatttatgggctcaaacaaagtgtgatagtgaaagtcattttgcttccagcttaagaaccaagccaagaaaacagatatcaactgtgacgccacactcaaaagcttgtttggtgggagggacaaggttgggatgctggagatctccaagcttttgagtcgtggcttcccgaaaatctccaagcttttgtggtccatggagccagggatggctctttggtaaaagacttcgttgtggatggcctcttttatggtccatgttaagtcccaagtcccactaggtggttaagcagaaaaatcttgtgatggcattaagactttcagactttgtttttgggtctgatgcatgtaaaaaggattcccagtgtttctgttgctcttgcgatcctgtgaggacacatatgagagaaatatttagtttgttgatggcaaatcttgtcttatgttcatgtctgtgcctatctgatcaagcgttatgatatgatcccatgcgtggtactgtgttctttagagatg

SEQ ID NO: 88489 - DNA, 1740 bp, Zea Mays
atagaccccgcgcatggacggcctccatccactccgcccagcacccgcacctcgtcagtcgtcaccgagaagcagaagcagcagctgctgcctgctggtcgttcgttcgcctcgttctctccgcctccccccaccccccgcctcgcttcctcctccgcgcttccttcgccgaggcgtcagcgtcagcgagggcgtataaagcgctccccctccgcgcgcgtccgcacaatcgccaccgcctctccgctcctcgacaagaccaatggcggctgctgcgtcctccgctctgcacgccgttggcgccgtcgcctccgccaagcctagatccgtcgcccccgcggtggcgacgaggaggagcgtgcgcgtggcgcccgcggccaagcgaggaccaggctcgggaggaggcaggctcgtggctcgcagcgccgttgcagccaaggcggatgaggcggccgcggcggcgggatccaagtcaggcggccatgagttgctgatgtttgaggcccttcgtgaagccttgatagaagagatgaatttggatccaacagtgtgcgtcatgggtgaagatgttggtcattatggaggttcatacaaggtgaccaaagggttggctgagatgttcggagatctccgggtccttgatacccctatcgccgagaactccttcactggcatgggagttggagcagcaatgaaggggctgaggcctgttgtggaaggcatgaacatgggtttccttctccttgcctacaaccagatctcgaacaactgcggcatgcttcactacacctcaggcggccagttcaagatcccggtcgtgatccgaggccccggcggtgtcggtcgccagctcggtgccgagcactcgcagcggctagagtcgtacttccagtcgattcctggccttcagatggttgcctgctccactccttacaacgcaaagggcctgatgaaggcggccataaggagcgagaaccccgtggtgctgtttgagcacgtcctcttgtacaacctgaaggagaaaatccccgacgaggagtacatctgctgcctggaggaggcggagatggtgcggccaggtgagcacgtgaccatcctcacgtactcccgcatgaggtaccacgtgatgcaggctgccaagacgctggtgaacaaggggtacgaccccgaggtcatcgacatcaggtcgctgaagccgttcgacctgcacacgatcgggaactcgatcaagaagacccaccgcgtgctgatcgtggaggagtgcatgcggacgggcggcatcggcgccagcctgcggtcggccatcatcgacaacttctgggactacctggacgcccccatcatgtgcctgtcgtcgcaggacgtgccgaccccgtacgccgcgacgctggaggacgccaccgtggtgcagcccgcgcagatcgtggccgccgtcgagcagatctgccaatgatcagtgatatcatggctttgttgagtacctgatctgtggagtcagattaccgtggttttgtttctctgtcgcatcgcgactgtcaccgtgccttagacaagacatgtttttgtattttgcaacgcagaagccatactcgtactggatgccgtttgtgggtggcctatttgttcattgtgcaaagttggatgccatactcgtacactattattatcaggtttcagcattcgtttgtactttgtagcagcgccgtgttgcgctgtcggcatgacgttgaattcactcct

SEQ ID NO: 88490 - DNA, 1829 bp, Zea Mays
gtcagtcgtcaccgagaagcagaagcagcagctgctgcctgctggtcgttcgttcgcctcgttctctccgcctccccccaccccccgcctcgcttcctcctccgcgcttccttcgccgaggcgtcagcgtcagcgagggcgtataaagcgctccccctccgcgcgcgtccgcacaatcgccaccgcctctccgctcctcgacaagaccaatggcggctgctgcgtcctccgctctgcacgccgttggcgccgtcgcctccgccaagcctagatccgtcgcccccggtacttgtactccccccccgaaagctaatctgcttaccctgtcgcctccgccgcgccgcgccaaccggcgggtgactgccctgaccgatctgcgtcgctcgtgcagcggtggcgacgaggaggagcgtgcgcgtggcgcccgcggccaagcgaggaccaggctcgggaggaggcaggctcgtggctcgcagcgccgttgcagccaaggcggatgaggcggccgcggcggcgggatccaagtcaggcggccatgagttgctgatgtttgaggcccttcgtgaagccttgatagaagagatgaatttggatccaacagtgtgcgtcatgggtgaagatgttggtcattatggaggttcatacaaggtgaccaaagggttggctgagatgttcggagatctccgggtccttgatacccctatcgccgagaactccttcactggcatgggagttggagcagcaatgaaggggctgaggcctgttgtggaaggcatgaacatgggtttccttctccttgcctacaaccagatctcgaacaactgcggcatgcttcactacacctcaggcggccagttcaagatcccggtcgtgatccgaggccccggcggtgtcggtcgccagctcggtgccgagcactcgcagcggctagagtcgtacttccagtcgattcctggccttcagatggttgcctgctccactccttacaacgcaaagggcctgatgaaggcggccataaggagcgagaaccccgtggtgctgtttgagcacgtcctcttgtacaacctgaaggagaaaatccccgacgaggagtacatctgctgcctggaggaggcggagatggtgcggccaggtgagcacgtgaccatcctcacgtactcccgcatgaggtaccacgtgatgcaggctgccaagacgctggtgaacaaggggtacgaccccgaggtcatcgacatcaggtcgctgaagccgttcgacctgcacacgatcgggaactcgatcaagaagacccaccgcgtgctgatcgtggaggagtgcatgcggacgggcggcatcggcgccagcctgcggtcggccatcatcgacaacttctgggactacctggacgcccccatcatgtgcctgtcgtcgcaggacgtgccgaccccgtacgccgcgacgctggaggacgccaccgtggtgcagcccgcgcagatcgtggccgccgtcgagcagatctgccaatgatcagtgatatcatggctttgttgagtacctgatctgtggagtcagattaccgtggttttgtttctctgtcgcatcgcgactgtcaccgtgccttagacaagacatgtttttgtattttgcaacgcagaagccatactcgtactggatgccgtttgtgggtggcctatttgttcattgtgcaaagttggatgccatactcgtacactattattatcaggtttcagcattcgtttgtactttgtagcagcgccgtgttgcgctgtcggcatgacgttgaattcactcctgcacctgaattttgttggttatattttagatttttt

SEQ ID NO: 88491 - DNA, 700 bp, Zea Mays
caaagggttggctgagatgttcggagatctccgggtccttgatacccctatcgccgagaactccttcactggcatgggagttggagcagcaatgaaggggctgaggcctgttgtggaaggcatgaacatgggtttccttctccttgcctacaaccagatctcgaacaaccaggtgagcacgtgaccatcctcacgtactcccgcatgaggtaccacgtgatgcaggctgccaagacgctggtgaacaaggggtacgaccccgaggtcatcgacatcaggtcgctgaagccgttcgacctgcacacgatcgggaactcgatcaagaagacccaccgcgtgctgatcgtggaggagtgcatgcggacgggcggcatcggcgccagcctgcggtcggccatcatcgacaacttctgggactacctggacgcccccatcatgtgcctgtcgtcgcaggacgtgccgaccccgtacgccgcgacgctggaggacgccaccgtggtgcagcccgcgcagatcgtggccgccgtcgagcagatctgccaatgatcagtgatatcatggctttgttgagtacctgatctgtggagtcagattaccgtggttttgtttctctgtcgcatcgcgactgtcaccgtgccttagacaagacatgtttttgtattttgcaacgcagaagccatactcgtactggatgccgttt

SEQ ID NO: 88492 - DNA, 164 bp, Zea Mays
aatacatgcatgaattaaacatgatctaatgcatgcacataaatttaggaaagatatgtgtgacagtttctatttttaaatgctttattttctccataaatttagtatcgctacaacagccatgcagctagacgcgtaaggaccattttatgatatatactgag

SEQ ID NO: 88493 - DNA, 351 bp, Zea Mays
atggggcgagggagattcaacctgggacaccaagagagggatgctgaggatctcatggccaccgacgccggagagctgtctagctattggggaggagctgccacgaccgaggagctgcgttgtggcaagggattccttgctcccagcagcttgggcagagataggacgctaacaagaccccagattgacagcgacggttgctgccaagttgacagacaccagatgagaatgaggattcaatactttattgggcaagcggttgagagctcctcacacagccagagaacaaccgtgtcgccatcgtcttcgtcgtcgtcgtctgctccagctgaagatcctctgcctgcctga

SEQ ID NO: 88494 - DNA, 227 bp, Zea Mays
tcatttcatatccgtgaacccataaatgatatacaaaatacgataatgagcgacacaatgatggtcaggatgttaaaaagatacatcattcatgtcgcacacatcaatcaagaacgatgtcataaatataacaaagatgacagatgccatgccataaatcatgtcaatatatgtgcatgctgaaccaataacagaaaacacaattgaaaaaacaaaatcatcagaac

SEQ ID NO: 88495 - DNA, 1853 bp, Zea Mays
gtaaaatttagtaatctgttacattcagattcagatacaagttgttcataattaaacaatatagatataatcataaaaacactaaagaattgaaactaccacaagcattgtttatcatgagattgtaacccaagagcaagatcaggttgtggacacggagaatagtagctaatagtaatgttctggaaaacttctccaaccgcctcttgtatataagatggtggcaggctcagattttctgagatgatgcacaacaatttgttgagaaaggtccttcatgctgtggctgtattttgcaatagtatctccgtaaaaggtacatggtgttatctcccgtgttataggtaaaattaacatgctgaatatggacatagatggaaacatgatgcttaaatatcttgttcttagtaagatgatcactcataggtttcataatgatcatacaattagattctccagactataataacatattcaacagtcatccatgtctagtatgttatcaaagaaaccaatgcaaggttgtcatactaaagagtctatatttggatagaaattcaaaaattaaaatcagaaaaattaaacatcttatgtgctttagtattcttggttagttagtcctctaggctgtgcccacatgagtacatgacctgaataggctgaatctcatgaagacaactcaatgctccacaaaccactttctacttgtctccacatccgagcataaatccgtacatgtattatgcttatcagctctaccctctcattcctgtacgattttggcatgaacagacctgcattcagcaattcgtgtctcgtccggagatgaactgaaaaaaagacaggatattcatgaatcacctgcaccatggacaaagtcggggccagcgggcgggaatcacagcaggactccgggaagcctagtaatgggccactcttacagtggatatacaatgggaatatcgaggaatctattgccatggaaaataagatacaagatttacaggcacaactaaagataaggatcgatcgtgctaacctagtgcatgatcaagggcttgtcgctgaaatccaccaacggcttgggcacactgagcgtcaacaggcgcaggcggatgccgaagcctctgacgagaatgcgggccttcatggctgcaacaaccctcctcccaacatagtcaaggccacaaggatttacatttaaacacaaatataggcacaaggaggccgaatcgcattgcgttacctttgggatgccgagtcgttgaaggtggaggtggggcggaagccgagaacgccgaccgcagcagcttgctgggtatctcatcgggtggctttgacttcgaggcggtcaggatggagttggacgtcgtggtgggtgtcgagcctgcgtcgaaggataagtggtccgtggaggcctgaccgaagctacagatcgcgacctcggaccactcctccgaggacgtcctcggggagaagcccccctaatagtcgaagacgcctcttgccgcgacaccaccgtcgtcgaagaaggagcggcaggagtcgacggcgtcgaagtagatggagttgaccatcttgtacatcttatcgcctggcgcagccccgcacggcgccacagccttccgtcgtcggccccactgggtgatgctactaggcgagcgccgggagggaacggtaggatggcggcggcttgggcgtgaggggatgagggcggctagagatccgggatgggatgacgagctattagattagggttgcaaatagctgacatcatgttgtgtggccctttaggtgcgtctgaatccctggtcacttggggtatattgttggaccgagaataccgaccagag

SEQ ID NO: 88496 - DNA, 336 bp, Zea Mays
atggacaaagtcggggccagcgggcgggaatcacagcaggactccgggaagcctagtaatgggccactcttacagtggatatacaatgggaatatcgaggaatctattgccatggaaaataagatacaagatttacaggcacaactaaagataaggatcgatcgtgctaacctagtgcatgatcaagggcttgtcgctgaaatccaccaacggcttgggcacactgagcgtcaacaggcgcaggcggatgccgaagcctctgacgagaatgcgggccttcatggctgcaacaaccctcctcccaacatagtcaaggccacaaggatttacatttaa

SEQ ID NO: 88497 - DNA, 1018 bp, Zea Mays
tatatatcaaaactatcaatgtgtttctgctatgattatttgtcgccaagaaacataggagcagcagtacagatagacgaagatgaatatttctgtgggaatccattcatatggatccaccttataaaagcattatttggagaccataaattacatttgcattacatcttgcactgtaacaactcagattggtcaaccatggccaattcctaaaaacgaacttcctggttccccctacgatgtatctaatgaattaaataaggaactgaaatttgtaccagataaggatcgatcgtgctaacctagtgcatgatcaagggcttgtcgctgaaatccaccaacggcttgggcacactgagcgtcaacaggcgcaggcggatgccgaagcctctgacgagaatgcgggccttcatggctgcaacaaccctcctcccaacatagtcaaggccacaaggatttacatttaaacacaaatataggcacaaggaggccgaatcgcattgcgttacctttgggatgccgagtcgttgaaggtggaggtggggcggaagccgagaacgccgaccgcagcagcttgctgggtatctcatcgggtggctttgacttcgaggcggtcaggatggagttggacgtcgtggtgggtgtcgagcctgcgtcgaaggataagtggtccgtggaggcctgaccgaagctacagatcgcgacctcggaccactcctccgaggacgtcctcggggagaagcccccctaatagtcgaagacgcctcttgccgcgacaccaccgtcgtcgaagaaggagcggcaggagtcgacggcgtcgaagtagatggagttgaccatcttgtacatcttatcgcctggcgcagccccgcacggcgccacagccttccgtcgtcggccccactgggtgatgctactaggcgagcgccgggagggaacggtaggatggcggcggcttgggcgtgaggggatgagggcggctagagatccgggatgggatgacgagctattagattag

SEQ ID NO: 88498 - DNA, 369 bp, Zea Mays
atgaccaagtttgaaaaagagaaagattggagagtttgcaacaaaccttgctgctcatcgtggaagcgcggatgccgtggtaggtgggaccggggcggtgggctgaagcgtcggcgctggggctgcgggctcccaggatgccgcctctccggcggtggcggcagcggcgaccagtgcctcacccaaccacggggaggcggcgggaatggcataaaccttattgacttcactgattctacagcatcttacaaagaaacaattgaaaaacaggtcatgctactgctgctgctgctagtggtgatggtgcagctacaacacactgccgctgaatgtgattatttctcaagtactattcaagcacaaatctaa

SEQ ID NO: 88499 - DNA, 603 bp, Zea Mays
tccatcgcggcgtccaccaccgtataccccggcgccggcctgggccccgcaaccggcgccggagacgcgaccgcggccgtgggcgtcccgggcgcggatggggacggggatgcagacggggacggggacgccgtgggggtctcgctcccggacccgctgccgccgcgcgcgtcggagtcggagtcggactccgtcgccatgcgtgagtccacgtccatcgccgccagccaagcctcgcctcctgctgctcctagggtttcgcgagctgagcacgggggtccccacgcgcgcgcacgagctcagcctcgggtaactgccgccctaggaggcggtcgagctttcggaggccggcgcggtagccatcacacggagatagcccctaggcttgaccgctcgccggcggcggcgaggcgtggttgtggcgctccgcgacgagcaaggctcgggacgggtcgaggcgaggcgatggggtcgcgaggagtcgggcgggaggtaagcgaagaggcccctgggagatttgggaattgcgcgggcgagtggtggtggtgaggatgggggttgtgggggaggctggaagtgggagtgtgaaatgcgggggaggtg

SEQ ID NO: 88500 - DNA, 596 bp, Zea Mays
tggtgctctttatcgtagcagctggtgcctggtggttcggttaggtgcttccctcgtcaacgtcagacgcccccacttccgccagcaacaacaccagcagcagcacgatgatgagcttcaggagcagcagccacgagggcttcggcttcggccacgccgccgccgcggccagcggagcgccgctgccgtggtgggcagggccggccccgatgctgagcggcgagccgctggccctgtcgccggaggcccactgccgggacggccgcatccaggccccccagggacctcccgtgccgtcggtcaaggctcctgtactggcaccccagcagccgcctccgctgccggagagggggatccctgagctcctcaacctctccgtggatcctcaaggtaaagggaagaaaggatctgatcactctgccactattgctttgcaatcaccatttgcaatatacaatgctcattttgagctgggccttggtcaatcaatgatttccgctgataattcttatgctgatcaacactatggcctgctttctccttatccagtgggtgcaacgcctgggaggtcgtctgcttatacccactgaaatagg

SEQ ID NO: 88501 - DNA, 1136 bp, Zea Mays
tgtgccccgtgccaaaagcagagagggaaaaataggctggtcaaaaggcagggaagccatatctccatgagtcacgccatcagcatgcactgcgtcgcccgcgaggctctggcggacgcttcctgaacacaaagaaagaatccagcgggaaggatgctggtggtggcagcaaggcaatgttcagcaaccccctcatgcgccaggtggcgtctccaagctcagagatccagcagtcagacctgggcaacccgagcagcgtgtccagcctgtcgggttcagaggtgtcaagcatgtacgaccatgaagacgcgggtcactgccacggcttggatcaccccttcttcacccggctcccgagcatcatggacggcggcgagcacggggtcatcgtcggcaaccccttcaagtgggcagcggcctctgaagtctgctgcgacctcctgaaagcatgactagaggggttaccggacggccaaacgctaggagctggtgactgctggcggtttccagctccgggtcaggggttgtccctccctccgtttggctcccggtaggcaaatcattcttggctgaaggcaacgtgagcgttccactcgtcccacctatttctcctggaaactctggctcctagtttctgggatcttgtggtgagtgcaacatcccttgcctaaaaaaacaaaaaaaaatcactagttgattgtactatctaccaacttctaaatggtttcaccttagctttctgaataataaagcctgaaacttcggactcgtctgaagtttcagaggtactggagttctgctatgtatggattctgttaagcgtcaagactaaggttctgttggtgatgaattgtagtgtgattggagcttgggtggtcttgattcctactttgtaatgtgctgaaagcttgtgctagagtaatgtattggaactggagcttggtttgtattttgctttttgtgccatggctttggagttgtggctttttgtgccaggaaggattctgtttatgaccggcctttgcagattagttcttgaactaaactgaatgggaactcagctaaaaactgagctgtttgaatgcttgttttgcagcgggtcacatgatcaaaagtgaaaaggcactgttgcttgt

SEQ ID NO: 88502 - DNA, 1146 bp, Zea Mays
atgccatgcaacatatcttctgttgtcttctaccgctacatccatgttaccgccttcatgatgcagccatatctccatgagtcacgccatcagcatgcactgcgtcgcccgcgaggctctggcggacgcttcctgaacacaaagaaagaatccagcgggaaggatgctggtggtggcagcaaggcaatgttcagcaaccccctcatgcgccaggtggcgtctccaagctcagagatccagcagtcagacctgggcaacccgagcagcgtgtccagcctgtcgggttcagaggtgtcaagcatgtacgaccatgaagacgcgggtcactgccacggcttggatcaccccttcttcacccggctcccgagcatcatggacggcggcgagcacggggtcatcgtcggcaaccccttcaagtgggcagcggcctctgaagtctgctgcgacctcctgaaagcatgactagaggggttaccggacggccaaacgctaggagctggtgactgctggcggtttccagctccgggtcaggggttgtccctccctccgtttggctcccggtaggcaaatcattcttggctgaaggcaacgtgagcgttccactcgtcccacctatttctcctggaaactctggctcctagtttctgggatcttgtggtgagtgcaacatcccttgcctaaaaaaacaaaaaaaaatcactagttgattgtactatctaccaacttctaaatggtttcaccttagctttctgaataataaagcctgaaacttcggactcgtctgaagtttcagaggtactggagttctgctatgtatggattctgttaagcgtcaagactaaggttctgttggtgatgaattgtagtgtgattggagcttgggtggtcttgattcctactttgtaatgtgctgaaagcttgtgctagagtaatgtattggaactggagcttggtttgtattttgctttttgtgccatggctttggagttgtggctttttgtgccaggaaggattctgtttatgaccggcctttgcagattagttcttgaactaaactgaatgggaactcagctaaaaactgagctgtttgaatgcttgttttgcagcgggtcacatgatcaaaagtgaaaaggcactgttgcttgt

SEQ ID NO: 88503 - DNA, 914 bp, Zea Mays
atggaaggtgcgacctctgcacccaactctccagggaaggcatggtctactctccatggcctcccgcaatcaacggtctctcaccccaccacgacgaccctgccctggctccccatggaaggccatggaaggtgcgatcgagccccagctcaacatggaaggcgcgatccactctcctcgccccatcatcggcgtccactatccatcaaagagtcccgccttcccagtcccccttccccacagatggtcggtgaacccatcgccaccgtgccaacggggcccgaatccgtggccgaggccgaccgcctcctggcgctggctgagtcggagctctccgcgggcaggctccgagccacgcgcaggcacgccctccacgccgcccgcctgtacccgacctccccgcgcgccccggtagtggccaccaccgccaacgtgctcctcgccgacgcctcctcccaccacgccgcgctgctgctgcccgagcccgacgaccccgacgcctcaccgctcttcgcctccgagctccgccgccacttcaaatcgctcgtcaagtccctccgcgtcggcctcaacgccgccaccgcagccgcctacccctccgtcgccgccgccgccgaggaggcactcggccacgccaccgaggcctacgaggcgctcaccacccctacccctgggaccttctggaccgcctgcgccgggtgccgcctcctccacgagttcgagcgcaagtatgtgggatactgagtgcaattaaggttcatcaagtgaaatttagatactgagtgcgatttcggtttcagctctggaaattgttgatcaattaattgtgggggggggggaagtgtctctacttccttcccggttggtcaaggcggacaagcggtcgttggtctggtatccccttcctgtgtcct

SEQ ID NO: 88504 - DNA, 707 bp, Zea Mays
gtatgtctttacttgtacaatttagtatgtaccatgcttgacaaattcttgacatgcattgtggtgaattttgcagctgtgcaagacagggatcacaaattcttgacaaaaacagtggaagaagcataccgaggagtcgattgcggtgacggaggtccatttggagtagttgtcgtccgcaatgatgaagtggtagttagctgccataacatggttctgaagcacactgaccctactgcgcatgctgaagtaactgcaatttgagaggttgcaaaaagttcgggaaaatcaagctctctgactgcgaaatttacgtgtcctgcgagccatgcccaatgtgctttggtgcagttcatctctcccgaatcaagaagctggtttatggggccaaggcggaggctgccatcgccattgacctgcaatgcactactctcttatgatcatgtgtgtactgccacattctgatatgagtactcaactttaaattaatcaatctactgtaagtcacaacttttggataaaatttcttcctagatgaaccacttccagagttccagatacttactcttaccgagatgggactgggcagaagagagttatccatgttaatttctaacaaatgatgaacatgcttattatttgcttgctcattatttgcttcctcggagttttttatatgtggactgtacaatgaaaacacaacctat

SEQ ID NO: 88505 - DNA, 79 bp, Zea Mays
ttgtgttctatctttgtctgtatcgtcatcagaagcctctgttaatttcttccttgtttagatccggccgcattttctc

SEQ ID NO: 88506 - DNA, 810 bp, Zea Mays
acaaaaagatctaaaatacagaaaaaaaaagttgtccggaacctacgaggaaggcttaggcgttttcctcgttcgctcgccgcggcgtcggacgatgcctctggggctgacgctggggtcgctggggcgggctatgcggcagaagcggccgtcctcgctcgacatcctctcctccaagcgggcgccgcgggactactacaagggcaagaactgcaagcccaccgggttccacacgcgcaaaggcggatacgtggttgtcgatgaaaagctgccaaggttcgcagttcctgacaatgactcatttcaaggtaactggcccctttttttctggtccacacttcacactttcacgacttcagagtttagacagcatcacaacctgttacgttggctaaggacgaggttgaggtccagtcctcgccatgaaccggatgccatgtgtgggcgattgcagctgaagccgttcgtgtcgcagtgcaccagggacctcgcagcgtcgacgacatcctcggcctctctaacttcagcacagactactgagagcaggagctgattgtcatcggactgctctagccatttgcaggaagcgagcgaccaagccttgcagtattgcggctacgttttcctggagagtgcccgtgttcagaggattagtcattagtgtcggcgtcttagcagctacaggtggtcatttcagatgtatttttctctctctctctctttatcttgtgtaagggcaaacatgtggcgtaaggccctgtcggccctgtctgttttcttccagaattatataatctaacttatagatta

SEQ ID NO: 88507 - DNA, 648 bp, Zea Mays
acaaaaagatctaaaatacagaaaaaaaaagttgtccggaacctacgaggaaggcttaggcgttttcctcgttcgctcgccgcggcgtcggacgatgcctctggggctgacgctggggtcgctggggcgggctatgcggcagaagcggccgtcctcgctcgacatcctctcctccaagcgggcgccgcgggactactacaagggcaagaactgcaagcccaccgggttccacacgcgcaaaggcggatacgtggttgtcgatgaaaagctgccaaggttcgcagttcctgacaatgactcatttcaagtgcaccagggacctcgcagcgtcgacgacatcctcggcctctctaacttcagcacagactactgagagcaggagctgattgtcatcggactgctctagccatttgcaggaagcgagcgaccaagccttgcagtattgcggctacgttttcctggagagtgcccgtgttcagaggattagtcattagtgtcggcgtcttagcagctacaggtggtcatttcagatgtatttttctctctctctctctttatcttgtgtaagggcaaacatgtggcgtaaggccctgtcggccctgtctgttttcttccagaattatataatctaacttatagattacataa

SEQ ID NO: 88508 - DNA, 582 bp, Zea Mays
acaaaaagatctaaaatacagaaaaaaaaagttgtccggaacctacgaggaaggcttaggcgttttcctcgttcgctcgccgcggcgtcggacgatgcctctggggctgacgctggggtcgctggggcgggctatgcggcagaagcggccgtcctcgctcgacatcctctcctccaagcgggcgccgcgggactactacaagggcaagaactgcaagcccaccgggttccacacgcgcaaagtgcaccagggacctcgcagcgtcgacgacatcctcggcctctctaacttcagcacagactactgagagcaggagctgattgtcatcggactgctctagccatttgcaggaagcgagcgaccaagccttgcagtattgcggctacgttttcctggagagtgcccgtgttcagaggattagtcattagtgtcggcgtcttagcagctacaggtggtcatttcagatgtatttttctctctctctctctttatcttgtgtaagggcaaacatgtggcgtaaggccctgtcggccctgtctgttttcttccagaattatataatctaacttatagattacataa

SEQ ID NO: 88509 - DNA, 411 bp, Zea Mays
atggccatcgtcgccgtggccttcctgctgcggacgtgcgtccgcagcgccgcgcccgcgacggcggcagcgcgcgcgcggcgggaggaggagggcaccgccgtggacgtgggcgcggacgtcgaggcggggctagacgaggccgcgctcaaggcgctgcccgaggtggtgtacggcgaggagaaagcggagaggaagactgcgacgacgaccgccgccaccgggacgacgacgtgctgcgcggtgtgcctgggcgagtacgccagcggggacgtgctccgcgtgctgcccgagtgcgcgcacgccttccaccagctgtgcgtcgaccgctggctgaggctgcgcccgacgtgccccgtctgccgctcgccgccggtgcccagcccggccgcgacgcctacccagctctag

SEQ ID NO: 88510 - DNA, 1239 bp, Zea Mays
ggatgatgatggtggtggatacaggatacatgtacggcggcgacagcagccatacaaaaaaaaagagctcaaatgcagagcctaattaccaacatgtcacccagcagcgtcagactgactaatcaacatgcttaccgatccatcagattacaatgcgaatgcaaatgtttgttcctacatgagatacacggtgctggaaggggtgttccgttccggcctcagatgcacttcacgttgagtgcccgttgttcacgttgttcacgggctggctgctctcctcgcttccgcctttgtcggcagcggtgttctctagtggagcggcgtctggctcggctccaggcgcggcatcagtggcggcagcatctgccttggtcccgggtgctggatcagcggcggcagcatctgatttgatttcaggcgctggggcgagaacagcagcaggctcggcaactgattcggtctcaggcactggggcaggaacagcagcaggctcggcaggagcaggggctgagttctcagttgggttgcttactggagctggagccacagcttcaggctcatctggcttggcatcttctttcttctcctccgattgcgcaagaggagctacaacagcttcagctggtttctcagtttctttctcatcttcttccattggcgccggagcaggagtatcgtccgccttgtctgcagccttctcagcgtcatcagtttcagtaggagcttccttcgcctcttcagcaggcttcatctccacgtcagtctcctttgtgccatcttcacttggggcgtcctggccggtttcagcatctttggcttcttcagtttcaggggcttccttctttccctgcctacccttcctaccactggagttcctgctgcgtttcgggatcttctcgccctctgggctatcaaaaaccttgactttctcgctaatgcgagcagaacgccttggggtatcacctgtttgcaaagcattttagatggagaagacaaaatttctaaagccatccacatttctattagagccagagatttgaagaaataacaaggagtggtagtcaaaggtatctaccagttccccaatcaaaatctgaagcagcagggcctccagggtgtgcctttaggtattggcttagttgcctcttgttcttaatttcctcgccagttggcgaaacaaaaacaatctcggatcttccccctctctggggagtaaactgtaacattgaaaaagaagga

SEQ ID NO: 88511 - DNA, 2376 bp, Zea Mays
ggatgatgatggtggtggatacaggatacatgtacggcggcgacagcagccatacaaaaaaaaagagctcaaatgcagagcctaattaccaacatgtcacccagcagcgtcagactgactaatcaacatgcttaccgatccatcagattacaatgcgaatgcaaatgtttgttcctacatgagatacacggtgctggaaggggtgttccgttccggcctcagatgcacttcacgttgagtgcccgttgttcacgttgttcacgggctggctgctctcctcgcttccgcctttgtcggcagcggtgttctctagtggagcggcgtctggctcggctccaggcgcggcatcagtggcggcagcatctgccttggtcccgggtgctggatcagcggcggcagcatctgatttgatttcaggcgctggggcgagaacagcagcaggctcggcaactgattcggtctcaggcactggggcaggaacagcagcaggctcggcaggagcaggggctgagttctcagttgggttgcttactggagctggagccacagcttcaggctcatctggcttggcatcttctttcttctcctccgattgcgcaagaggagctacaacagcttcagctggtttctcagtttctttctcatcttcttccattggcgccggagcaggagtatcgtccgccttgtctgcagccttctcagcgtcatcagtttcagtaggagcttccttcgcctcttcagcaggcttcatctccacgtcagtctcctttgtgccatcttcacttggggcgtcctggccggtttcagcatctttggcttcttcagtttcaggggcttccttctttccctgcctacccttcctaccactggagttcctgctgcgtttcgggatcttctcgccctctgggctatcaaaaaccttgactttctcgctaatgcgagcagaacgccttggggtatcacctgtttgcaaagcattttagatggagaagacaaaatttctaaagccatccacatttctattagagccagagatttgaagaaataacaaggagtggtagtcaaaggtatctaccagttccccaatcaaaatctgaagcagcagggcctccagggtgtgcctttaggtattggcttagttgcctcttgttcttaatttcctcgccagttggcgaaacaaaaacaatctcggatcttccccctctctggggagtaaactgtaacattgaaaaagaaggaatattagttcatgcaatcagatgtccccataaaacatacattcactaatgaaagaaatgagtgtctagtaacagctctttgcaatgccgtgcaaaaagaaaaagagaagcattcctttgaaatatcaggaaaaaattaaggaaacacatgaacatgctaccaggaaaataatgctttgtggaacagtactagcctcggtaccatctaatgtttgggtgctcatctatcatccagaggattacatattgaaaagcagaggcaccacaaattgagagaactgctggctccaccaccaggtagtcagtaacaccaagtgggaaaactatactgatgtgaatattgcgaagcagaacagctaggacacaggtgggacagtaaaagatgtggttggagacagtggaatccatacttgccaatttactgctaagtatgcatcacaatcaacaaagaagaactagaatgttgcactgttacatagatacaactcttggctttcaccaccataatcagtgcagtcttcctctcacatgaactagactggaagtatgctaactgtgccaagtactagctactgctctcacaggaatagaacttgaaaggaggcacaacatagtctaaaaaggaggcatttcagatgttagtgatcctaacaagtagttagattattttgcagtgcagtcaatgtgactcaaatgtggcaaaaaagaatagctacagtaatgggaattcggatacataattagccagaaaccaatttcaatccactcaagttcagcaagaaaaaaaaacagcgattacaaatgaatattaatgtgaaacttatgggactgctaagttagcagagataatcggctgcagactctctgaaatcagttttcgccagcagcttttgtttcttcttttctgtacagtgtatctccttttttatatatttattaatatataccacagtagggggtttcccttactgtttacaacaacaacaacaacaacaaagcctttttgtcccaagcacgttggggtaggctagagatgaaaccccgtatgaaaacctcagagctcaacccccaaagaacagaaaagggaaacaaaggcaaaggagaaccgaaaacaacgaaacggggaaacacataaaag

SEQ ID NO: 88512 - DNA, 1121 bp, Zea Mays
aattttgcactcccacccctccatttttcccagccgccaccttctttcttccctgcctcttcttcttcacggcagcaacagccaccagcgacgccctccctgctccatgggcgcgggtctctctgctccaaccatggccacccagcaacagcgccattcttccccctcggctccctgggatgcagcaccacgccatcgcgggagcagggcccccatgggagcgcccccttatccacgacgtcggcagcagggagctttttcttccccgtgcgcaggagctccatggccgagctcacccaggccccaatgcctctgctcggtcgcagctctgcaggctctctccaccgcgcctgctccttcctcggcgcgctgaagctcctcagccatggcgcccaagcccttcttcttcctctgcccaacgccccctcttctccactgcgttaagagcagggagcctttttctcccctgcgcgcagggagcagttcccttggccgacgccctctgtggcagccatggcacctccctccctctctgctcgtgcgcaggaaacccctcaagcgcagggaagaacaacagcccacccttcaaaacaccaagcagcggcagcaacctccatggcgcccctgcttccctcccatagctgagcgcccttgctgttctcttcaatgccccttggctgttcgacggaatacccgtgagaaataatgtgttgtgcacagccccgtccgctatgccgtcgaccctcgctagtggtcgacgccgcgcttcgcgcttggcccattcgacgaaacgccaagccttgtggacagcccatgttactagcctcgattcgtccaggttgttcacttggtattttgtggattaatctatttaagccttggtcgatgttgtgcatgcgtgtatatgtgtaagaaaatgtattggtatggattgaagttcgtggcgaaagaaaaagaagtagaaaagaactcaaatgtttttatatttcgataggaatttatgcgatgtggttggatgtgtgcgatttgtagtttgtacaattatattttttgtcgatgtggtgtacattggtgttggagtgtgtgtgggtataaaatgttttggttatatgtcgtagcaa

SEQ ID NO: 88513 - DNA, 1217 bp, Zea Mays
aattttgcactcccacccctccatttttcccagccgccaccttctttcttccctgcctcttcttcttcacggcagcaacagccaccagcgacgccctccctgctccatgggcgcgggtctctctgctccaaccatggccacccagcaacagcgccattcttccccctcggctccctgggatgcagcaccacgccatcgcgggagcagggcccccatgggagcgcccccttatccacgacgtcggcagcagggagctttttcttccccgtgcgcaggagctccatggccgagctcacccaggccccaatgcctctgctcggtcgcagctctgcaggctctctccaccgcgcctgctccttcctcggcgcgctgaagctcctcagccatggcgcccaagcccttcttcttcctctgcccaacgccccctcttctccactgcgttaagagcagggagcctttttctcccctgcgcgcagggagcagttcccttggccgacgccctctgtggcagccatggcacctccctccctctctgctcgtgcgcaggaaacccctcaagcgcagggaagaacaacagcccacccttcaaaacaccaagcagcggcagcaacctccatggcgcccctgcttccctcccatagctgagcgcccttgctgttctcttcaatgccccttggctgttcgacggaatacccgtgagaaataatgtgttgtgcacagccccgtccgctatgccgtcgaccctcgctagtggtcgacgccgcgcttcgcgcttggcccattcgacgaaacgccaagccttgtggacagcccatgttactagcctcgattcgtccaggttgttcacttggtattttgtggattaatctatttaagccttggtcgatgttgtgcatgcgtgtatatgtgtaagaaaatgtattggtatggattgaagttcgtggcgaaagaaaaagaagtagaaaagaactcaaatgtttttatatttcgataggaatttatgcgatgtggttggatgtgtgcgatttgtagtttgtacaattatattttttgtcgatgtggtgtacattggtgttggagtgtgtgtgggtataaaatgttttggttatatgtcgtagcaaggttgccttcacgttttggtaagcaaatatgttgtgttgtttaatgtgatgagtaaattggaaatacatgggatgcgaggatttaattagtgcacg

SEQ ID NO: 88514 - DNA, 932 bp, Zea Mays
gctgcagacctgcattgttgcctcctcgctccccgcctcgatctccaccaccatagccaccgcgcgtgcccatggactataggcctatagctagcacccgcgacctggcagatgacgatgaggaggctccttcggtgcgtgtccacgggggcgtgtagcgtggtgccgggcgtcgtggcagattcgatgccggcgttgccggtggccactagtggggcacgtgccggtggaggtcgacgcggagggggggatacacaacggttagtcgtccctgtcgatctgctctgctacgtcgcgtcgcgcaggagtacgggtacgtgtgtcaggggctgctccacatcccctgcctcgtggcgcatttcgccgcctcctcggcacgcttgtagggaccgccgccgtcgccgaccccgacggtgggctcacgctcgcttgcttcgtcgcagtcgtctgatactatgaggccgtggtggaggaggttacagcggcagcggtggacaatttggctggttggatcttatttgtgcgctcgtattgtgtgttttatgtagagccagtaggacgtggagggtcgctcttagtcgtcaagagggggcaccacgacaggtggtggcgggcgcgggggtggacacgaaggcaattgggtttgccctgacgtgagttacacaagaacaacttgatcatgctaaagaagcaaccaaatctgcaattttgatgaacttggatcaagggtacaatgttcttgctcctaatcaaatcctaattgtatgacctgtttccctaaagtgttctttacagtacatacttttcctattttgtaatccatagcatctaaagataaagacaagtttaaaataggagatgtgactaggttgattattattgaaacaatgttcactctccactattatggtgaattgttaaatgtatttaca

SEQ ID NO: 88515 - DNA, 1127 bp, Zea Mays
caatcatggggcatttcccctctctccagcacattgctgcttccacagttccacacacataaggccaccacagcaaataaaggcactgctgcactctctctctctctctctctctctctctctctctacgcgaaaagaaaagaggaaagtgggatagctcaatctctccttccaccgtctctcagttctcactctagcgctctctctctccacatatatatcagtaggatggatgtgcaaacctagcttgttgctgcctttctagctgagaactgagctgtagctgttggtacggttttcctcctcgctcttcttctccttcttcttgctgctggttgccgggagctgagatcgatcgagagcactgctgttgttcgtgcggccggaggcggcggcgcgcggcagggggcggagacgacgaccgatcggtcagaaggaatgtcgtcggcccaaatcgcgccggcggaccatgtgtgctatgtgcactgcaacttctgcaacacagttctcgcggtaagctaagatcaggatcgatgaactctctgcctggctggctggtggtagtggtactggtacctagctagctgctactttccctttttctctgcctccctaaatctgctttcgagatttatgcgcagtgatgaattgactgccgcgcgcctccgtacccatgcaccctcatcgccacgcagttatattggcctgttttctttcccacgatttgttttctacctgcgctcttccaaattggtttaggcttgggggtcgccccggccccttctctcagttaaccgaaaattaaagaggcagtaaatcggctttttcttcacgagatctgcctagcatgtcgtctgctttcttcgattcaatttcttcaaatctagttccgaattttctcttttgaagctcccatcctttttctgttcttcaaatttcttgttcctttggaaaggatgttttctgctgtttgagggccaggtacatggaccgatcagtttgctagctagatatgtaattcgatttaaatatgtacttctggaagttctctagattttgttttggttgctctgtaatgtacttctgtgtatgatatttctttgggtgtacaacaaaattcctgcatt

SEQ ID NO: 88516 - DNA, 1397 bp, Zea Mays
caatcatggggcatttcccctctctccagcacattgctgcttccacagttccacacacataaggccaccacagcaaataaaggcactgctgcactctctctctctctctctctctctctctctctctacgcgaaaagaaaagaggaaagtgggatagctcaatctctccttccaccgtctctcagttctcactctagcgctctctctctccacatatatatcagtaggatggatgtgcaaacctagcttgttgctgcctttctagctgagaactgagctgtagctgttggtacggttttcctcctcgctcttcttctccttcttcttgctgctggttgccgggagctgagatcgatcgagagcactgctgttgttcgtgcggccggaggcggcggcgcgcggcagggggcggagacgacgaccgatcggtcagaaggaatgtcgtcggcccaaatcgcgccggcggaccatgtgtgctatgtgcactgcaacttctgcaacacagttctcgcggtgagtgtcccggggaacagcatgctcagcatggtgacagttcggtgtgggcactgcacaaatctactgtcagtgaatctgagagcactcatgcactcagtcccagaacaagatcagctccaggagaacatcagggtccatggcacgttgcgtgagcatcatcagtgcggcggcggccaccatctggagctgggctcttcgtcgtcctcaaggttccggctgccgatgatgatgtcgtacgcgccgcagaacgagcacttgctgcaggaacagacactgaacaacgctcgtccggctcctgagaagaggcagcgggttccgtcggcgtataacagattcatcaaggaagagattcgcaggatcaaggcgaacaaccccgacattagccacagggaagccttcagcacagcagccaagaactgggcacattatccgaacatccatttcggcttaaactccggccgagagggtggcaagaataagctcgtggacgaggctgtcgcggcggtggcggtggctccgaagaagatccaaggtttctactgatcgatgccggtcgatcgagggatcagcgctcgtcgtcatcaactggccggccgggtgtggaagaattaataataccacacaaattataaatgtactgtgatgagtaaattaaagagttatagtggggaatgaagggagagagagatatatagcaatacgtatattaccttaccttattaatgagtgcaaaaaaaacacttgtgaaggtttctactgatgcatgagtgggaagtgaagcatcatacaatcacatgaattatattactactggcatggtgggcgccatgcatggtttaaattaaccgagaagacgacttaataaatcattatttgaccta

SEQ ID NO: 88517 - DNA, 1475 bp, Zea Mays
cctctctccagcacattgctgcttccacagttccacacacataaggccaccacagcaaataaaggcactgctgcactctctctctctctctctctctctctctctctctacgcgaaaagaaaagaggaaagtgggatagctcaatctctccttccaccgtctctcagttctcactctagcgctctctctctccacatatatatcagtaggatggatgtgcaaacctagcttgttgctgcctttctagctgagaactgagctgtagctgttggtacggttttcctcctcgctcttcttctccttcttcttgctgctggttgccgggagctgagatcgatcgagagcactgctgttgttcgtgcggccggaggcggcggcgcgcggcagggggcggagacgacgaccgatcggtcagaaggaatgtcgtcggcccaaatcgcgccggcggaccatgtgtgctatgtgcactgcaacttctgcaacacagttctcgcggtgagtgtcccggggaacagcatgctcagcatggtgacagttcggtgtgggcactgcacaaatctactgtcagtgaatctgagagcactcatgcactcagtcccagaacaagatcagctccagcaggagaacatcagggtccatggcacgttgcgtgagcatcatcagtgcggcggcggccaccatctggagctgggctcttcgtcgtcctcaaggttccggctgccgatgatgatgtcgtacgcgccgcagaacgagcacttgctgcaggaacagacactgaacaacgctcgtccggctcctgagaagaggcagcgggttccgtcggcgtataacagattcatcaagtgagctcgctcgatgatcgacgacctcctcagatcagcagcttacgtttggttcattctaccaaataattaaacgctgtgtacgtgtgtgcagggaagagattcgcaggatcaaggcgaacaaccccgacattagccacagggaagccttcagcacagcagccaagaactgggcacattatccgaacatccatttcggcttaaactccggccgagagggtggcaagaataagctcgtggacgaggctgtcgcggcggtggcggtggctccgaagaagatccaaggtttctactgatcgatgccggtcgatcgagggatcagcgctcgtcgtcatcaactggccggccgggtgtggaagaattaataataccacacaaattataaatgtactgtgatgagtaaattaaagagttatagtggggaatgaagggagagagagatatatagcaatacgtatattaccttaccttattaatgagtgcaaaaaaaacacttgtgaaggtttctactgatgcatgagtgggaagtgaagcatcatacaatcacatgaattatattactactggcatggtgggcgccatgcatggtttaaattaaccgagaagacgacttaataaatcattatttgacct

SEQ ID NO: 88518 - DNA, 1384 bp, Zea Mays
cctctctccagcacattgctgcttccacagttccacacacataaggccaccacagcaaataaaggcactgctgcactctctctctctctctctctctctctctctctctacgcgaaaagaaaagaggaaagtgggatagctcaatctctccttccaccgtctctcagttctcactctagcgctctctctctccacatatatatcagtaggatggatgtgcaaacctagcttgttgctgcctttctagctgagaactgagctgtagctgttggtacggttttcctcctcgctcttcttctccttcttcttgctgctggttgccgggagctgagatcgatcgagagcactgctgttgttcgtgcggccggaggcggcggcgcgcggcagggggcggagacgacgaccgatcggtcagaaggaatgtcgtcggcccaaatcgcgccggcggaccatgtgtgctatgtgcactgcaacttctgcaacacagttctcgcggtgagtgtcccggggaacagcatgctcagcatggtgacagttcggtgtgggcactgcacaaatctactgtcagtgaatctgagagcactcatgcactcagtcccagaacaagatcagctccagcaggagaacatcagggtccatggcacgttgcgtgagcatcatcagtgcggcggcggccaccatctggagctgggctcttcgtcgtcctcaaggttccggctgccgatgatgatgtcgtacgcgccgcagaacgagcacttgctgcaggaacagacactgaacaacgctcgtccggctcctgagaagaggcagcgggttccgtcggcgtataacagattcatcaaggaagagattcgcaggatcaaggcgaacaaccccgacattagccacagggaagccttcagcacagcagccaagaactgggcacattatccgaacatccatttcggcttaaactccggccgagagggtggcaagaataagctcgtggacgaggctgtcgcggcggtggcggtggctccgaagaagatccaaggtttctactgatcgatgccggtcgatcgagggatcagcgctcgtcgtcatcaactggccggccgggtgtggaagaattaataataccacacaaattataaatgtactgtgatgagtaaattaaagagttatagtggggaatgaagggagagagagatatatagcaatacgtatattaccttaccttattaatgagtgcaaaaaaaacacttgtgaaggtttctactgatgcatgagtgggaagtgaagcatcatacaatcacatgaattatattactactggcatggtgggcgccatgcatggtttaaattaaccgagaagacgacttaataaatcattatttgacctacc

SEQ ID NO: 88519 - DNA, 1027 bp, Zea Mays
aaaagtagggctagaaaagctatatatacctggcgtgaaatctcactccagtcctctctcgatctaccttgatctttgatttcatttgtttctcaattctttgttaatttatatggctaatcgtacagtgttttgcaggtgagtgtcccggggaacagcatgctcagcatggtgacagttcggtgtgggcactgcacaaatctactgtcagtgaatctgagagcactcatgcactcagtcccagaacaagatcagctccagcaggagaacatcagggtccatggcacgttgcgtgagcatcatcagtgcggcggcggccaccatctggagctgggctcttcgtcgtcctcaaggttccggctgccgatgatgatgtcgtacgcgccgcagaacgagcacttgctgcaggaacagacactgaacaacgctcgtccggctcctgagaagaggcagcgggttccgtcggcgtataacagattcatcaaggaagagattcgcaggatcaaggcgaacaaccccgacattagccacagggaagccttcagcacagcagccaagaactgggcacattatccgaacatccatttcggcttaaactccggccgagagggtggcaagaataagctcgtggacgaggctgtcgcggcggtggcggtggctccgaagaagatccaaggtttctactgatcgatgccggtcgatcgagggatcagcgctcgtcgtcatcaactggccggccgggtgtggaagaattaataataccacacaaattataaatgtactgtgatgagtaaattaaagagttatagtggggaatgaagggagagagagatatatagcaatacgtatattaccttaccttattaatgagtgcaaaaaaaacacttgtgaaggtttctactgatgcatgagtgggaagtgaagcatcatacaatcacatgaattatattactactggcatggtgggcgccatgcatggtttaaattaaccgagaagacgacttaataaatcattatttgacctacc

SEQ ID NO: 88520 - DNA, 282 bp, Zea Mays
atggcgagatgctcagcgagacggacagaccaactagcacaagaaaagctctccaccggcgaggtaggagagaaggaggatgaccgatcctgcgagctagaggagaaacgacaaggggagagcttgccgtgcacacagagggcgatggtacggacagggaacgcgcggccggccgagacacagagacaacgcagaggtgttggtcggaccatagccagggcgaggccggtgctggcagaggagggaggagaaagacacgcggccaagggcgagcgcatgtaa

SEQ ID NO: 88521 - DNA, 605 bp, Zea Mays
atcgatctatctatacccgtatatcgtcgttgaagctgtgcggctgtggtccggtggaagccagctgcctagcggaaggtcggcggcggcccgcctcgctgatcgcgatggagcggcggagcagcagcggcgcggggagctgcctggggctgctggcggtcgccgtggtgtcgacgagcgtcatcctcgtctcctaccgcctccaccgccgcctggaggcggacctcagggtcatgatactcggcgaaggcgacggagccgcggaccagggccggcgccgcacgaagaagaacaagaaggtgcgcttcgcggccgacgtggcggagccgtcgtccagccgagaggagtaccggcggcggcgggcgtcgacggcggcggcggtcacccgagcaagatagcacgccgccgccgcgcgtcagcctgacttgtggtgcatggctgtgtagcttgcgtgacgtggcggcatgcacgttcagctgccgtacgtaagccgttgcggtttccgtgggctgtgtgtgcttgttcagtgcgaatcgacgcgtgtgcttgcatgccgtatgagacaaacaaacggaaacaaacaaactcgatctttccaggctccg

SEQ ID NO: 88522 - DNA, 112 bp, Zea Mays
caatctttggcacaaattaagacttagaggatatgtgttggacacttaatcaccaaaatactttagaaatggcccaagggcacatttccctttcacatagcacaacaaagac

SEQ ID NO: 88523 - DNA, 200 bp, Zea Mays
atacctttctcaaccttttggctaagatcaagtgtagtatctgttcttatcagtttaatatcttatatgtgaaccatgtgttcactttgatattaaatttattttttgtaggggagactcaccacagtggcttgccactggagttttcacgtgtcgcacgggcgttgcactacagcccgtacgtgcctggcgcgccccaa

SEQ ID NO: 88524 - DNA, 999 bp, Zea Mays
gtttgcactgttgccagggcgtttgcttttctatgcctctttgcagcactgaagtggagcaggctactgaggacgaccttattgaactttcagaaatcgaaaggcgcaatgtcggacaggcactccatttggatgctttatctgacgtggataacaccacgcagtcgctgctttcgtttactggcaacgagaacgttcatggcctatacgacgttctattgaattacaagtccttgctgaattcattatctgctgtggatgtcccagtcttgtattcaccccagccatttcaaaatggctgtctacacatcccagaggtgaagtgtagggagatgaggagagcagacatgtcatccggcgggttcgacacagaacagggatccgcatttgcgtcgacggcaggcaacgtatgctacagcatggaagtaaaggacgcggttctgccgccatgggtggtctctgggctgtgcgccgccatgagcttggacgcgaccagctttgatctgacgatcgccacggagccgtcgtcgatgggcttgaacgtggctctcgactccatgggcaccaccaccacggatgtccagcctgaaggatccaccccctccagctgctctgcgcccacgacgcccttggtgggtgccgttcctgacgcggccctcgtccctgccctgcactccgcctcgctgcgccgcctcacctacacggacggcggcgggtacgttgcgcacacaaccgtgtgagcgcctctgagcttgagagcccggccctcctcggtatgcgcagcgcagcgcaggcttgttcttttgagaatttggagcctgccctggcctttgtcgtacaaggacgacgtgtcgttacacgcttggttgggttggatggtaactaaactatgaggccagacttcttctggtggtctggaaaaggaacacttatgcttgaactcggtgtgtgctttttgcctggtcgtactgtcgttcaaagttgggaccgttcttacct

SEQ ID NO: 88525 - DNA, 753 bp, Zea Mays
ttaaaatgttttgtttctgtattagtgcagtggaaaggaggttacattgaactgcgcaccatcctttagactgaattgcgtaattgcaaagtttggttttttttggtttaatataaaaaaaatctgatcctctgaacctactatgcatctctcaggtgaagtgtagggagatgaggagagcagacatgtcatccggcgggttcgacacagaacagggatccgcatttgcgtcgacggcaggcaacgtatgctacagcatggaagtaaaggacgcggttctgccgccatgggtggtctctgggctgtgcgccgccatgagcttggacgcgaccagctttgatctgacgtacgtacgcgcaaccactcccccgccggacactgactctagttctgcgctgagcttttgtcgtgggttctctcgcaggatcgccacggagccgtcgtcgatgggcttgaacgtggctctcgactccatgggcaccaccaccacggatgtccagcctgaaggatccaccccctccagctgctctgcgcccacgacgcccttggtgggtgccgttcctgacgcggccctcgtccctgccctgcactccgcctcgctgcgccgcctcacctacacggacggcggcgggtacgttgcgcacacaaccgtgtgagcgcctctgagcttgagagcccggccctcctcggtatgcgcagcgcagcgcaggcttgttcttttgagaatttggagcctgccctggcctttgtcgt

SEQ ID NO: 88526 - DNA, 2564 bp, Zea Mays
attcgttcctcgcacccttccactttccgcgtctgcgctcggccgcccatgagcgcctgcgggggcaccatccccgcgtcgcgcttcctgcgccgccgcgccgccgtgcgggacctgggcggggacgcggccgccggcgacaccgacgccttctgggccgccccgccccgcctctacgacttctcccagcagcagcagcagcagcacacggcccaggccgcgcggcgatcgccctcgccggcgccgaccagcccgtgcctcctcgcccggaagcggcaccagcagtccccgtcgcctcctccatccccgcggcgctcgccttcgtcgcccgggacctgcctgctctccgccctgcaccgcacctgcgtgggctggggcgtcaccaggcgcgccgagtaccccagacggcaccgcccggtttctcccgcggcttgtgggcaggttacggggatgcacacgcacgggcgggcggcggctcggtgcgtggacgaggacgaggagagcaccagcaagaacagcaagtgcctgttggccgtgggcaagaacgagctggaggaggaggtgggtcaagaccacgagagctgcctgcaccgccgccgccgcgccaagaaggccccgtgggccgtcaaggaggagcaggagacgtcaggtgaggcggcggaggagggcgccaagcgcgccaagaggaccccactgaagcatgaggcggcggcggcggcggagagcaagcccgccggcgccgccaccgccaccgccactcccgactccggctcgccacgcggcaacggcaaggtcgaccggtgggcggcgtggcggtacgcggcgggcgaggcggcgctggccaacatcctgcgcgagcgcggcgccaccgccggcaatcccacgccgcgggccgtcctgcgggcgcaggcgcgccgcttcatcagcgacaccggcctgctcgacaacctcctccgccacgtcgccgacaaggtccccgccggcaccgctgaccgcgtccgccgccggtataacccggccggaggcatggagtactggatcgagccggccgggctggcggccgcgcggcgggaggccggcgtcgaggacacgtactgggtgccgccgcccgggtggaagcccggagaccccgtgtcgccggaggcccgcacgctcgaggtgcagaagcaggtggaggtgctcgccggggagcttgccgtcgtaaagaggcaaatggagcagctcgactccaatctggtgcaaatgagcaaggaagcctacatctcatggaagataggtagctactctctttggtgtcaggggtatgactgtatggtcaaggccaatggcaagctggaaaaagaggtgctgtccttggaggagaagtatgagactgcggcacaggtgaatggggagctgaaagagctgctgctgctactgaaggataagtatgatactgtgcttgagaagaatgagaaactggagggccagatggttgctctgtccacttctttccagtccatgaaggaagagttgctcctgcagagaatggaagaacaccctctgctgatgctagcgcaagagccttgggaaggtgacaagcgagaagccggtggtgcgaacaaggctttggtggtgtgtgcaggcgaccagctggccggcgctgatgccttcgatggcagcttcagcagcaaccacagtgcctatggtgacgagaagatggtgctgaggaaacgtatctgcgtgcgggagggagcatgccagtggcctaggtctgctacttccagtggcgctacggctggcagccctggggacctgccggagccgctgacaccgggtgcggatctgatcgtcactgacttcgacaccatgatcgatagcctcgcgctaccgtccatggaggagtacctacaggtcgatggtctccccacgccgacgtctgcctcgtccaccaccgcatctcccaagctccagctcctcccctcaccagcctcgccgagccaggtccagcctctgccgtcaacaaccatggtcgtgggcgacttcaacatgcagctccggcacatggacacgtcgtcgtcgtcgtcatcaggaccgtgcggtgccaaggcgctgaagctcgacgccggagctggaggtggcgaggttggcactgagctggtcctggcgacccccacctactgacgagttcttataaatggacagatgaccactgaagttttgcctcacctcacctcaccgccattaacccatcgtcgcctcacatctgagaacatagcacacatgacaggatagctgcagattacctacccttttacctttgctttaattgtcagtcagtagccgtcactagtctcagttggaacttacttgcaggtgggtttacttacagctgagcaccatgttgctgctgcttaatccctacagtagtttgtacttttggttggagacatttgtctgccactctgttgaagccaaatgctcatcaggagctggcatctgtagtgccgccgccaccttttgtcttgcctttgtttgcttgatggtttcttgacccagctatgactgtatgcttgattttgcca

SEQ ID NO: 88527 - DNA, 363 bp, Zea Mays
atgtggtactgtagcttcgacctcctcctaacggtgttctgcacctacctgtggctgctgtacgggtccctctacctgtggcgccggctccgcgcatgctaccagcacgcggtcctccgccgcggcctcggctacgcgaccgtcggcctcggcgtcttcctgtcggcgatcttcctgtacagcttcgcgagcgtcatcccgctgctgcaggccgtcggcgtctggctcttcgcgctgctcgtagcgtactgcctctaccgggtcattgtgctgcacatcgaggaggaagaggaggagaaggagggcgccgtgctagtagcacagccccacaaacacgctgtcgtcatcaggcctctagtttga

SEQ ID NO: 88528 - DNA, 195 bp, Zea Mays
gtctggcgggcacgggtagagcaaaagtgcaagatttttgcttggattcttctacaggacaagctccttactgctaacaatcttgccactcggggttggccgcaccaaccaaactgctccctctgcaatggtcccttggagaccggccctcacctctgtttgcattgcccttttgcccgtgcggtgtggcatcag

SEQ ID NO: 88529 - DNA, 658 bp, Zea Mays
acaaaatacataagaattacctacattagatataatatgaaaagattttgacaaaatggcgaaccacgcacaacctatgaccagaatagctcaagcgacaaaaactgaaatatgtgaatatatatgacttatctatatcattcatcaggacaaaacatcatctacttgtagtagaaagacaaataataagaaacaaagggcatatacagaacaaagatgcaagcaaagcaagcaagcattgtactcgacagggactttgttagctacggcgtatggcttgctgctgcctgctatacacaacgtcagatgagcagcgtccacggagacctattgcgtctgacggagagggcccgcgtgtcggcacgtaggttggccagctgacgaacgggtccagtcggtcagggtacggagagcgagcgcggtcgcgtgctgccccgtgggccccacatgtcggctctgtttcccaggtttgggccacgtatggctaggatttggtgggccggccaggagaagcagcccaatctctggttttcttcattctgttctttttctctttttattctccaaatttaagtgttcaaatgaatttgaatttctagtttgaatctcagattttcagatacctactaaaatgatactattctcacttttgtgatca

SEQ ID NO: 88530 - DNA, 600 bp, Zea Mays
aagagcgtaataccctccttcctaggatgactttgtatatggatgagattacagtcggtgattactggactgaggggatgctaatgagataaaaatagatggggtcccccttggccttatatacacaaccatgggcgtcttcccgcacaagtatcgatcgcagtcttcctacttatcttctaattagtagcaaacatcttttactatctcgaggaaaatccggcgttttcatgccgagatatccccgtcgttttagttaggatgtcgggcacgggaacaaacagacccgacatatccacgtctatgccgcgactagcttggacgtgggcctctttcgcctctagattggcctgctttcattgtctttgttcgtctggcccatgatgggacgcttgagaggggcaactgtcacgtggccccgagcgaagttttcgcccttgtgtggatccgaggatatccatctcccacagctctaccatgacaagataggtggattggcaggtgttttggtttccttcaatatttcaaagtctatatctcctgcatcaaaatttctttataagagaagcacacccagtaatgcatagtagcattttggat

SEQ ID NO: 88531 - DNA, 2818 bp, Zea Mays
accccacccccaaaaccacacgaacccagagagtggattataaataagccctcccaaaccccttccatttcccgtgctcctctcctcctcctcacctatcatcgccgctgcgccgtctcctccgctcccgtcgtccggaaagatggcgtcccacattgttggataccctcgcatgggccccaagagggagctcaagtttgcacttgagtctttctgggatgggaagagcaccgctgaggatctggagaaggttgctaccgacctcagggccagtatctggaagcagatggctgatgctgggatcaagtacatccccagcaacactttctcgtactatgaccaggtccttgacaccactgccatgctcggcgctgtccccgaacgttactcatggactggaggagagattggatttgacacctacttctccatggccaggggcaacgccactgttcctgctatggagatgaccaagtggtttgacaccaactaccactttattgtccctgaattgggcccaaacaccaagttctcctatgcttctcacaaggctgttaacgaatataaggaggctaaggcgctcggtgttgataccgtgccagtacttgttggaccagtctcgtacctgttgctctcaaagcctgccaagggtgtggagaagggattccctcttctttcccttcttagcagcatcctcccagtctacaaggaggtcattgctgagttgaaggcagctggggcttcatggattcagtttgatgagcccactcttgtcctcgaccttgattctgacaaattggctgcattctctgctgcatacgcagaacttgaatctgtactttctggattgaatgtgcttgttgagacttactttgctgatgttcctgctgagtcctacaagaccctaacatccctgagcagtgtgactgcttatggttttgatcttgtccgtggaacccaaactcttgggcttgtcacgagtgctggtttccctgctggaaagtacctctttgctggtgttgtggatggacgcaacatctgggctgatgatcttgctacatctctcagcactctccagtctcttgaggctgttgttgggaaggacaagcttgtcgtatcaacttcctgctcgctcatgcacaccgctgtggatcttgtgaacgagactaagcttgacagcgagattaagtcttggcttgcttttgctgcccagaaggttgttgaggttgatgctcttgctaaggcattggctggtcaaaaggatgaggcttacttcgcagcaaatgctgctgctcaggcctcgaggaaatcctcaccccgtgtgaccaatgaagaagtccagaaggctgctgctgctctcaagggctctgaccaccgccgtgggaccaacgttagtgctagattggatgcccagcagaagaagcttaacctccccatccttcccaccactacaatcggttcgttcccacaaaccgttgagctcaggagggtccgccgtgagtacaaggcaaaaaagtgagttgtcatttaatacctagcttcacttgtctgtattttggctggttttcttattggagattcacatcgcaggatctctgaggaggaatacgtcactgccatcaaggaggaaatcaacaaggtcgttaagcttcaagaagagcttgacattgatgtgcttgtgcatggcgagcctgagagaaacgatatggttgagtacttcggtgagcagctctccggttttgcgttcactgccaatggctgggtgcagtcttatgggtcaaggtgcgtcaagcctccgatcatctacggtgacgtgagccgccccaaccccatgaccgttttctggtcgaagacggcacagagcatgacgtctcgcccaatgaaggggatgctgactggcccagtcacaatcctcaactggtccttcgtccggaatgaccagccgaggtttgagacttgctaccagatcgctcttgcgatcaagaaggaagtcgaggatcttgaggctggtggtattcaggttatccaaatcgacgaggctgcactgagagaagggctgccgctccgcaaggctgagcatgcattctacttggactgggctgtccactccttcagaattaccaactgcgagatccaggacaccacccagatccacacccacatgtgctactccaacttcaacgacatcatccactcgatcatcgacatggacgcggacgtgatcaccattgagaactcgcggtccgacgagaagctgctctccgtgttccgcgagggcgtcaagtacggcgcgggcatcggccccggtgtctacgacatccactcccccaggatcccgtcggctgaggagatcgccgaccgcatcgacaagatgctggcggtgctggacaccaacatcctctgggtgaaccccgactgcggcctcaagacccgcaagtacacggaggtcaagcccgccctgaccaacatggtctccgccgctaagctcatccgcacccagctcgccagcgccaagtgagcaccttttttttgcctttttcgtttccgaggagggcgtcgtcgatgccaatttgtttccaataaacagggctgtgcccgccgttctgttgtactccgtctgtggttaggttagtagttttcttgatctcgcccccacgcggtacctgttttactactctctgtttggtggtttctgaggaagttgcccgtgtacttgtatcgtaaaaaccgagtgggacatctgcatcgtttcatctgccaccactcccccgaggtgtgctgtttcacggctcaaagaaagatgtcgtatcggcaagct

SEQ ID NO: 88532 - DNA, 3383 bp, Zea Mays
accccacccccaaaaccacacgaacccagagagtggattataaataagccctcccaaaccccttccatttcccgtgctcctctcctcctcctcacctatcatcgccgctgcgccgtctcctccgctcccgtcgtccggaaagatggcgtcccacattgttggataccctcgcatgggccccaagagggagctcaagtttgcacttgagtctttctgggatgggaagagcaccgctgaggatctggagaaggttgctaccgacctcagggccagtatctggaagcagatggctgatgctgggatcaagtacatccccagcaacactttctcgtactatgaccaggtccttgacaccactgccatgctcggcgctgtccccgaacgttactcatggactggaggagagattggatttgacacctacttctccatggccaggggcaacgccactgttcctgctatggagatgaccaagtggtttgacaccaactaccactttattgtccctgaattgggcccaaacaccaagttctcctatgcttctcacaaggctgttaacgaatataaggaggctaaggcgctcggtgttgataccgtgccagtacttgttggaccagtctcgtacctgttgctctcaaagcctgccaagggtgtggagaagggattccctcttctttcccttcttagcagcatcctcccagtctacaaggaggtcattgctgagttgaaggcagctggggcttcatggattcagtttgatgagcccactcttgtcctcgaccttgattctgacaaattggctgcattctctgctgcatacgcagaacttgaatctgtactttctggattgaatgtgcttgttgagacttactttgctgatgttcctgctgagtcctacaagaccctaacatccctgagcagtgtgactgcttatggttttgatcttgtccgtggaacccaaactcttgggcttgtcacgagtgctggtttccctgctggaaagtacctctttgctggtgttgtggatggacgcaacatctgggctgatgatcttgctacatctctcagcactctccagtctcttgaggctgttgttgggaaggacaagcttgtcgtatcaacttcctgctcgctcatgcacaccgctgtggatcttgtgaacgagactaagcttgacagcgagattaagtcttggcttgcttttgctgcccagaaggttgttgaggttgatgctcttgctaaggcattggctggtcaaaaggatgaggcttacttcgcagcaaatgctgctgctcaggcctcgaggaaatcctcaccccgtgtgaccaatgaagaagtccagaaggctgctgctgctctcaagggctctgaccaccgccgtgggaccaacgttagtgctagattggatgcccagcagaagaagcttaacctccccatccttcccaccactacaatcggttcgttcccacaaaccgttgagctcaggagggtccgccgtgagtacaaggcaaaaaagatctctgaggaggaatacgtcactgccatcaaggaggaaatcaacaaggtcgttaagcttcaagaagagcttgacattgatgtgcttgtgcatggcgagcctgagagaaacgatatggttgagtacttcggtgagcagctctccggttttgcgttcactgccaatggctgggtgcagtcttatgggtcaaggtgcgtcaagcctccgatcatctacggtgacgtgagccgccccaaccccatgaccgttttctggtcgaagacggcacagagcatgacgtctcgcccaatgaaggggatgctgactggcccagtcacaatcctcaactggtccttcgtccggaatgaccagccgaggtttgagacttgctaccagatcgctcttgcgatcaagaaggaagtcgaggatcttgaggctggtggtattcaggttatccaaatcgacgaggctgcactgagagaagggctgccgctccgcaaggctgagcatgcattctacttggactgggctgtccactccttcagaattaccaactgcgagatccaggacaccacccagatccacacccacatgtgctactccaacttcaacgacatcatccactcgatcatcgacatggacgcggacgtgatcaccattgagaactcgcggtccgacgagaagctgctctccgtgttccgcgagggcgtcaagtacggcgcgggcatcggccccggtgtctacgacatccactcccccaggatcccgtcggctgaggagatcgccgaccgcatcgacaagatgctggcggtgctggacaccaacatcctctgggtgaaccccgactgcggcctcaagacccgcaagtacacggaggtcaagcccgccctgaccaacatggtctccgccgctaagctcatccgcacccagctcgccagcgccaagtgagcaccttttttttgcctttttcgtttccgaggagggcgtcgtcgatgccaatttgtttccaataaacagggctgtgcccgccgttctgttgtactccgtctgtggttaggttagtagttttcttgatctcgcccccacgcggtacctgttttactactctctgtttggtggtttctgaggaagttgcccgtgtacttgtatcgtaaaaaccgagtgggacatctgcatcgtttcatctgccaccactcccccgaggtgtgctgtttcacggctcaaagaaagatgtcgtatcggcaagctaaatgctccactgtgtgcaactatatacacttgcattgccaggttttttcttcttccagttggttgcattcagatggtttgtggtagatcagcagggtactctgttttgttacatatttagctttggccattgacatggtgtacaacagacgtttagttaaaacaccacatagttacaagcgacacacactgttcattgcaaggtgcgccatacggccgcgatgaccccagcgagcacggccaccgccgccgcagcgttcaccagcagctgccgcgccggctccggcctcacggtctccgtcgtctgagcgtgactcggcaccgctggcgatgccccagcttggctgtccttcttgggtcgcttctcatccctagcggctttgtccaccaccttcgtgcctctcgctccaccgcctagctcttccgcccgtttcgtggcgttggtctcttgcggttgcggttgcttctgcctcttcttcggctgttcctctgcaccatgaggcggcgccggcgccggagaaggaggcgagacagggaccggcggctgccacgaccacgggggaggagtcttcggcccaggagcagcacccggcgtctggtgtggcggtggcgattgtttccgttcctcggtgccggcctc

SEQ ID NO: 88533 - DNA, 3327 bp, Zea Mays
cccaaaccccttccatttcccgtgctcctctcctcctcctcacctatcatcgccgctgcgccgtctcctccgctcccgtcgtccggatggcgtcccacattgttggataccctcgcatgggccccaagagggagctcaagtttgcacttgagtctttctgggatgggaagagcaccgctgaggatctggagaaggttgctaccgacctcagggccagtatctggaagcagatggctgatgctgggatcaagtacatccccagcaacactttctcgtactatgaccaggtccttgacaccactgccatgctcggcgctgtccccgaacgttactcatggactggaggagagattggatttgacacctacttctccatggccaggggcaacgccactgttcctgctatggagatgaccaagtggtttgacaccaactaccactttattgtccctgaattgggcccaaacaccaagttctcctatgcttctcacaaggctgttaacgaatataaggaggctaaggcgctcggtgttgataccgtgccagtacttgttggaccagtctcgtacctgttgctctcaaagcctgccaagggtgtggagaagggattccctcttctttcccttcttagcagcatcctcccagtctacaaggaggtcattgctgagttgaaggcagctggggcttcatggattcagtttgatgagcccactcttgtcctcgaccttgattctgacaaattggctgcattctctgctgcatacgcagaacttgaatctgtactttctggattgaatgtgcttgttgagacttactttgctgatgttcctgctgagtcctacaagaccctaacatccctgagcagtgtgactgcttatggttttgatcttgtccgtggaacccaaactcttgggcttgtcacgagtgctggtttccctgctggaaagtacctctttgctggtgttgtggatggacgcaacatctgggctgatgatcttgctacatctctcagcactctccagtctcttgaggctgttgttgggaaggacaagcttgtcgtatcaacttcctgctcgctcatgcacaccgctgtggatcttgtgaacgagactaagcttgacagcgagattaagtcttggcttgcttttgctgcccagaaggttgttgaggttgatgctcttgctaaggcattggctggtcaaaaggatgaggcttacttcgcagcaaatgctgctgctcaggcctcgaggaaatcctcaccccgtgtgaccaatgaagaagtccagaaggctgctgctgctctcaagggctctgaccaccgccgtgggaccaacgttagtgctagattggatgcccagcagaagaagcttaacctccccatccttcccaccactacaatcggttcgttcccacaaaccgttgagctcaggagggtccgccgtgagtacaaggcaaaaaagatctctgaggaggaatacgtcactgccatcaaggaggaaatcaacaaggtcgttaagcttcaagaagagcttgacattgatgtgcttgtgcatggcgagcctgagagaaacgatatggttgagtacttcggtgagcagctctccggttttgcgttcactgccaatggctgggtgcagtcttatgggtcaaggtgcgtcaagcctccgatcatctacggtgacgtgagccgccccaaccccatgaccgttttctggtcgaagacggcacagagcatgacgtctcgcccaatgaaggggatgctgactggcccagtcacaatcctcaactggtccttcgtccggaatgaccagccgaggtttgagacttgctaccagatcgctcttgcgatcaagaaggaagtcgaggatcttgaggctggtggtattcaggttatccaaatcgacgaggctgcactgagagaagggctgccgctccgcaaggctgagcatgcattctacttggactgggctgtccactccttcagaattaccaactgcgagatccaggacaccacccagatccacacccacatgtgctactccaacttcaacgacatcatccactcgatcatcgacatggacgcggacgtgatcaccattgagaactcgcggtccgacgagaagctgctctccgtgttccgcgagggcgtcaagtacggcgcgggcatcggccccggtgtctacgacatccactcccccaggatcccgtcggctgaggagatcgccgaccgcatcgacaagatgctggcggtgctggacaccaacatcctctgggtgaaccccgactgcggcctcaagacccgcaagtacacggaggtcaagcccgccctgaccaacatggtctccgccgctaagctcatccgcacccagctcgccagcgccaagtgagcaccttttttttgcctttttcgtttccgaggagggcgtcgtcgatgccaatttgtttccaataaacagggctgtgcccgccgttctgttgtactccgtctgtggttaggttagtagttttcttgatctcgcccccacgcggtacctgttttactactctctgtttggtggtttctgaggaagttgcccgtgtacttgtatcgtaaaaaccgagtgggacatctgcatcgtttcatctgccaccactcccccgaggtgtgctgtttcacggctcaaagaaagatgtcgtatcggcaagctaaatgctccactgtgtgcaactatatacacttgcattgccaggttttttcttcttccagttggttgcattcagatggtttgtggtagatcagcagggtactctgttttgttacatatttagctttggccattgacatggtgtacaacagacgtttagttaaaacaccacatagttacaagcgacacacactgttcattgcaaggtgcgccatacggccgcgatgaccccagcgagcacggccaccgccgccgcagcgttcaccagcagctgccgcgccggctccggcctcacggtctccgtcgtctgagcgtgactcggcaccgctggcgatgccccagcttggctgtccttcttgggtcgcttctcatccctagcggctttgtccaccaccttcgtgcctctcgctccaccgcctagctcttccgcccgtttcgtggcgttggtctcttgcggttgcggttgcttctgcctcttcttcggctgttcctctgcaccatgaggcggcgccggcgccggagaaggaggcgagacagggaccggcggctgccacgaccacgggggaggagtcttcggcccaggagcagcacccggcgtctggtgtggcggtggcgattgtttccgttcctcggtgccggcctc

SEQ ID NO: 88534 - DNA, 802 bp, Zea Mays
ggtattgttaacgagacatttttttatatattattatgtggtcgtgacacagattcctgatctctgttgcaagatcccgttttcaatactcccttctttcagcatgaccttaatcatatcgttctcatcaataaacatctgtattccttgttacaatagttgacatggtatttctgactgtaattctatttatggcacagaaagatggcgtcccacattgttggataccctcgcatgggccccaagagggagctcaagtttgcacttgagtctttctgggatgggaagagcaccgctgaggatctggagaaggttgctaccgacctcagggccagtatctggaagcagatggctgatgctgggatcaagtacatccccagcaacactttctcgtactatgaccaggtccttgacaccactgccatgctcggcgctgtccccgaacgttactcatggactggaggagagattggatttgacacctacttctccatggccaggggcaacgccactgttcctgctatggagatgaccaagtggtttgacaccaactagtgagtcctttgcctgctaccaatggtaattttagtttgagcttttgtatttaatattttttgctgacaaactttgttctacttttacagccactttattgtccctgaattgggcccaaacaccaagttctcctatgcttctcacaaggctgttaacgaatataaggaggctaaggcggtatgatacactcattatatttctgttgtctcagtttaatgtgtcagcctactgtcctaatgttaatttc

SEQ ID NO: 88535 - DNA, 3753 bp, Zea Mays
aagatggcgtcccacattgttggataccctcgcatgggccccaagagggagctcaagtttgcacttgagtctttctgggatgggaagagcaccgctgaggatctggagaaggttgctaccgacctcagggccagtatctggaagcagatggctgatgctgggatcaagtacatccccagcaacactttctcgtactatgaccaggtccttgacaccactgccatgctcggcgctgtccccgaacgttactcatggactggaggagagattggatttgacacctacttctccatggccaggggcaacgccactgttcctgctatggagatgaccaagtggtttgacaccaactaccactttattgtccctgaattgggcccaaacaccaagttctcctatgcttctcacaaggctgttaacgaatataaggaggctaaggcgctcggtgttgataccgtgccagtacttgttggaccagtctcgtacctgttgctctcaaagcctgccaagggtgtggagaagggattccctcttctttcccttcttagcagcatcctcccagtctacaaggaggtcattgctgagttgaaggcagctggggcttcatggattcagtttgatgagcccactcttgtcctcgaccttgattctgacaaattggctgcattctctgctgcatacgcagaacttgaatctgtactttctggattgaatgtgcttgttgagacttactttgctgatgttcctgctgagtcctacaagaccctaacatccctgagcagtgtgactgcttatggttttgatcttgtccgtggaacccaaactcttgggcttgtcacgagtgctggtttccctgctggaaagtacctctttgctggtgttgtggatggacgcaacatctgggctgatgatcttgctacatctctcagcactctccagtctcttgaggctgttgttgggaaggacaagcttgtcgtatcaacttcctgctcgctcatgcacaccgctgtggatcttgtgaacgagactaagcttgacagcgagattaagtcttggcttgcttttgctgcccagaaggttgttgaggttgatgctcttgctaaggcattggctggtcaaaaggatgaggcttacttcgcagcaaatgctgctgctcaggcctcgaggaaatcctcaccccgtgtgaccaatgaagaagtccagaaggctgctgctgctctcaagggctctgaccaccgccgtgggaccaacgttagtgctagattggatgcccagcagaagaagcttaacctccccatccttcccaccactacaatcggttcgttcccacaaaccgttgagctcaggagggtccgccgtgagtacaaggcaaaaaagatctctgaggaggaatacgtcactgccatcaaggaggaaatcaacaaggtcgttaagcttcaagaagagcttgacattgatgtgcttgtgcatggcgagcctgagagaaacgatatggttgagtacttcggtgagcagctctccggttttgcgttcactgccaatggctgggtgcagtcttatgggtcaaggtgcgtcaagcctccgatcatctacggtgacgtgagccgccccaaccccatgaccgttttctggtcgaagacggcacagagcatgacgtctcgcccaatgaaggggatgctgactggcccagtcacaatcctcaactggtccttcgtccggaatgaccagccgaggtttgagacttgctaccagatcgctcttgcgatcaagaaggaagtcgaggatcttgaggctggtggtattcaggttatccaaatcgacgaggctgcactgagagaagggctgccgctccgcaaggctgagcatgcattctacttggactgggctgtccactccttcagaattaccaactgcgagatccaggacaccacccagatccacacccacatgtgctactccaacttcaacgacatcatccactcgatcatcgacatggacgcggacgtgatcaccattgagaactcgcggtccgacgagaagctgctctccgtgttccgcgagggcgtcaagtacggcgcgggcatcggccccggtgtctacgacatccactcccccaggatcccgtcggctgaggagatcgccgaccgcatcgacaagatgctggcggtgctggacaccaacatcctctgggtgaaccccgactgcggcctcaagacccgcaagtacacggaggtcaagcccgccctgaccaacatggtctccgccgctaagctcatccgcacccagctcgccagcgccaacggttgcggttgcttctgcctcttcttcggctgttcctctgcaccatgaggcggcgccggcgccggagaaggaggcgagacagggaccggcggctgccacgaccacgggggaggagtcttcggcccaggagcagcacccggcgtctggtgtggcggtggtgctggggccggcggggatggaggccgacgcgacggtggcttaggataagtacgtggcggctgtggcggggacggagagcgacgcggtggtggcggcggggacggaagccgacgcgacggtggcttaggataagtacgtggcggctgtggcggggacggagagcgacgcggtggtggcggcggggacggaagccgacgcgacggtggcttaggataagtacgtggcggctgtggcggggacggagagcgacgcgacggtggcggcggggacggagagcgacgcgacggtggcttaggataagtacggggcggctgtggcggggacggagaccgacgcggtggtggctgcggggacggaggccgacgcgacggtgacttaggataagtacggggcggctgtggcggggacggagaccgacgcggtggtggcggcggggacggaggccgacgcgacggtggcttatgataagtacggggcggctgtggcggggacggagagcgacgcggtggtggcggcggggacggaagccgacgcgacggtggcttagtataagtacgtggcggctgctgggacggagagcgacgcgacggtggcggctgggacggaggccgacgcgacggtggcttaggataagtacggggtggctgtggcggggacggagaccgacgcggtggggacggagaccgatgcggcggtggcttagggtaagtacgtggttgtggtggcggcggttcaggagcaggaatggaaggttctgggcgcgatgggtgccgacgtggttgaggtggtagaggaggcgcctgcgttggcgatgggttctggcgtgtcagcggcggcggttcaggagcaggaacggacggctctggcggcgatggacgccggcgtggttgttgttgtggaggaggaggaggtggcgacggcgacggagtcggcgagtgcgacagcgcggcgacgatggggagcgtgatgatgagcttctcgccctcgaacctggcgcggacgccgtcggagtcgcagttgtcggggaggcggaggtccttcttgaacctggcccaccggccgcccctggcgggtcgctcgccggtggcgcgcagcacgccgtggttgtccacctgcaccctcacctggtccttgcggaaccccggcagcgcgatctccaccacgtcctgctcctcccctgccagcttccactccacctccgggtcgaagtcctcgaacacccgcgccgccgcgcgctgccgccggtccatgcctgcctatttcctcgccgccggagaccgaagctgctcgccc

SEQ ID NO: 88536 - DNA, 2376 bp, Zea Mays
gaaaaggattcccagtttagtgtattttcctatgccataagcagagctcggtgttgataccgtgccagtacttgttggaccagtctcgtacctgttgctctcaaagcctgccaagggtgtggagaagggattccctcttctttcccttcttagcagcatcctcccagtctacaaggaggtcattgctgagttgaaggcagctggggcttcatggattcagtttgatgagcccactcttgtcctcgaccttgattctgacaaattggctgcattctctgctgcatacgcagaacttgaatctgtactttctggattgaatgtgcttgttgagacttactttgctgatgttcctgctgagtcctacaagaccctaacatccctgagcagtgtgactgcttatggttttgatcttgtccgtggaacccaaactcttgggcttgtcacgagtgctggtttccctgctggaaagtacctctttgctggtgttgtggatggacgcaacatctgggctgatgatcttgctacatctctcagcactctccagtctcttgaggctgttgttgggaaggacaagcttgtcgtatcaacttcctgctcgctcatgcacaccgctgtggatcttgtgaacgagactaagcttgacagcgagattaagtcttggcttgcttttgctgcccagaaggttgttgaggttgatgctcttgctaaggcattggctggtcaaaaggatgaggcttacttcgcagcaaatgctgctgctcaggcctcgaggaaatcctcaccccgtgtgaccaatgaagaagtccagaaggctgctgctgctctcaagggctctgaccaccgccgtgggaccaacgttagtgctagattggatgcccagcagaagaagcttaacctccccatccttcccaccactacaatcggttcgttcccacaaaccgttgagctcaggagggtccgccgtgagtacaaggcaaaaaagatctctgaggaggaatacgtcactgccatcaaggaggaaatcaacaaggtcgttaagcttcaagaagagcttgacattgatgtgcttgtgcatggcgagcctgagagaaacgatatggttgagtacttcggtgagcagctctccggttttgcgttcactgccaatggctgggtgcagtcttatgggtcaaggtgcgtcaagcctccgatcatctacggtgacgtgagccgccccaaccccatgaccgttttctggtcgaagacggcacagagcatgacgtctcgcccaatgaaggggatgctgactggcccagtcacaatcctcaactggtccttcgtccggaatgaccagccgaggtttgagacttgctaccagatcgctcttgcgatcaagaaggaagtcgaggatcttgaggctggtggtattcaggttatccaaatcgacgaggctgcactgagagaagggctgccgctccgcaaggctgagcatgcattctacttggactgggctgtccactccttcagaattaccaactgcgagatccaggacaccacccagatccacacccacatgtgctactccaacttcaacgacatcatccactcgatcatcgacatggacgcggacgtgatcaccattgagaactcgcggtccgacgagaagctgctctccgtgttccgcgagggcgtcaagtacggcgcgggcatcggccccggtgtctacgacatccactcccccaggatcccgtcggctgaggagatcgccgaccgcatcgacaagatgctggcggtgctggacaccaacatcctctgggtgaaccccgactgcggcctcaagacccgcaagtacacggaggtcaagcccgccctgaccaacatggtctccgccgctaagctcatccgcacccagctcgccagcgccaagtgagcaccttttttttgcctttttcgtttccgaggagggcgtcgtcgatgccaatttgtttccaataaacagggctgtgcccgccgttctgttgtactccgtctgtggttaggttagtagttttcttgatctcgcccccacgcggtacctgttttactactctctgtttggtggtttctgaggaagttgcccgtgtacttgtatcgtaaaaaccgagtgggacatctgcatcgtttcatctgccaccactcccccgaggtgtgctgtttcacggctcaaagaaagatgtcgtatcggcaagctaaatgctccactgtgtgcaactatatacacttgcattgccaggttttttcttcttccagttggttgcattcagatggtttgtggtagatcagcagggtactctgttttgttacatatttagctttggccattgacatggtgtacaacagacgtttagttaaaacacc

SEQ ID NO: 88537 - DNA, 1707 bp, Zea Mays
catacgccatccagattcaacgaacgccgtcggcctccgctccgtgccacgtcccgtgcaccagccatccccgtgaggccctcacctgcagtgacacggtccaccttggaccaggcgccccgagctgttcctctgcgacagcaaccttgcgtgcataaagccagccaccagccaggcagccgccatctccagcggcttcttccaaagctccaactccgacgagaaccgccactcctcgaaatctcgaaggattttctgcggcgaaccccttcgtgacgtgacccaatgggagaggcctcgccgtcgatcgccaaggacgtcaccgagttgatcgggaacacgccgctggtgtacctcaacaaggtgaccgatgggtgcgtcggccgcgtcgccgccaagctcgagtccatggagccctgctccagcgtcaaggataggattggctacagcatgatcacggacgcagaggagaaagggctgattactccaggcgtgagtgttctgattgaaccaactagcggcaacacaggcattggactggcctttatggctgctgccaagggctacaaacttacactcacaatgcctgcctccatgagcatggagaggaggatcatattgaaggcttttggtgctgaacttgtccttactgacccactcttgggaatgaaaggagctgtcaagaaagcggaagagatacaagcaaagacacccaactcgtacattcttcaacaatttgaaaatccagctaacccaaagattcactatgagactactgggcctgaaatctggaaagctacagcaggaaaaattgatggccttgtatctggtatcgggacaggaggtaccatcaccggtactgggcgatacctcagagagcaaaatcctaatgtcaagctctatggtgtggagccagtggagagtgctgttttgaatggtggaaaacctggaccacacaagattcaaggaattggagctggttttatccctggagtcttggatgttgatctccttgatgaaactctacaggtttcaagtgatgaagctatcgagactgccaaggctcttgctctgaaagaagggttgttggttggaatctcttctggtgcagctgcagctgcggcagttaggcttgctaagaggccagaaaacgccggaaagctatttgttgtcgtgttcccgagcttcggcgagcgctacctctcatcggtgctgttccagtccatcaagaaggaagcggagagcatggtggtcgagccctagagcacaaaattctgggcttctggcaaactatttcctgagacgttcaccatttccatcacagaaaaataaagctcgggtgccttctgttgatttcgacgtacatttccctgccgatggtgtccagcccactgttgtcgctggagaacacgtcgtttttagacttgtgatattttactactgttttgacactcgttgtatttctgtatatcgcgtcagactgtgaaataaaagcagtacagtgtgtttcttgcatggatggtttgctgtgggggttatatatatatatatatatatatatatatatatatatatatatatatatatatatatgtatgtatatgccgtcagagaattgcattgaagaatggccagtgacgctcacgcggagctgaactgagcagcactgatgtgcttggtcattgacttgctgcagcaaaaaaaaaa

SEQ ID NO: 88538 - DNA, 1272 bp, Zea Mays
gccatccagattcaacgaacgccgtcggcctccgctccgtgccacgtcccgtgcaccagccatccccgtgaggccctcacctgcagtgacacggtccaccttggaccaggcgccccgagctgttcctctgcgacagcaaccttgcgtgcataaagccagccaccagccaggcagctccaactccgacgagaaccgccactcctcgaaatctcgaaggattttctgcggcgaaccccttcgtgacgtgacccaatgggagaggcctcgccgtcgatcgccaaggacgtcaccgagttgatcgggaacacgccgctggtgtacctcaacaaggtgaccgatgggtgcgtcggccgcgtcgccgccaagctcgagtccatggagccctgctccagcgtcaaggataggattggctacagcatgatcacggacgcagaggagaaagggctgattactccaggcgtgagtgttctgattgaaccaactagcggcaacacaggcattggactggcctttatggctgctgccaagggctacaaacttacactcacaatgcctgcctccatgagcatggagaggaggatcatattgaaggcttttggtgctgaacttgtccttactgacccactcttgggaatgaaaggagctgtcaagaaagcggaagagatacaagcaaagacacccaactcgtacattcttcaacaatttgaaaatccagctaacccaaagattcactatgagactactgggcctgaaatctggaaagctacagcaggaaaaattgatggccttgtatctggtatcgggacaggaggtaccatcaccggtactgggcgatacctcagagagcaaaatcctaatgtcaagctctatggtgtggagccagtggagagtgctgttttgaatggtggaaaacctggaccacacaagattcaaggaattggagctggttttatccctggagtcttggatgttgatctccttgatgaaactctacaggtttcaagtgatgaagctatcgagactgccaaggctcttgctctgaaagaagggttgttggttggaatctcttctggtgcagctgcagctgcggcagttaggcttgctaagaggccagaaaacgccggaaagctatttgttgtcgtgttcccgagcttcggcgagcgctacctctcatcggtgctgttccagtccatcaagaaggaagcggagagcatggtggtcgagccctagagcacaaaattctgggcttctggcaaactatttcctgagacg

SEQ ID NO: 88539 - DNA, 1929 bp, Zea Mays
cgagctgttcctctgcgacagcaaccttgcgtgcataaagccagccaccagccaggcagccgccatctccagcggcttcttccaaagctccaactccgacgagaaccgccactcctcgaaatctcgaaggattttctgcggcgaaccccttcgtgacgtgacccaatgggagaggcctcgccgtcgatcgccaaggacgtcaccgagttgatcgggaacacgccgctggtgtacctcaacaaggtgaccgatgggtgcgtcggccgcgtcgccgccaagctcgagtccatggagccctgctccagcgtcaaggataggattggctacagcatgatcacggacgcagaggagaaagggctgattactccaggcgtgagtgttctgattgaaccaactagcggcaacacaggcattggactggcctttatggctgctgccaagggctacaaacttacactcacaatgcctgcctccatgagcatggagaggaggatcatattgaaggcttttggtgctgaacttgtccttactgacccactcttgggaatgaaaggagctgtcaagaaagcggaagagatacaagcaaagacacccaactcgtacattcttcaacaatttgaaaatccagctaacccaaagattcactatgagactactgggcctgaaatctggaaagctacagcaggaaaaattgatggccttgtatctggtatcgggacaggaggtaccatcaccggtactgggcgatacctcagagagcaaaatcctaatgtcaagctctatggtgtggagccagtggagagtgctgttttgaatggtggaaaacctggaccacacaagattcaaggaattggagctggttttatccctggagtcttggatgttgatctccttgatgaaactctacaggtttcaagtgatgaagctatcgagactgccaaggctcttgctctgaaagaagggttgttggttggaatctcttctggtgcagctgcagctgcggcagttaggcttgctaagaggccagaaaacgccggaaagctatttgttacgtttggggtgggtggggggcaaactcagtggtttcgtcaacgcaacatcattggtgcagcgcttctcagtgatggttttagtgaatttttgagtcctgaattgggctgtgacttctgatggccctaactgtttggctggaccgagaaaattgggcccaagttcttcgcagcagccggctgataagttgagcggaacaggccccaacttttcaggcgactagactagactatccatcagttaaaaaaactaaattgtatattcctttgacgcccagttttacttgaatttcagagattttttatttccaaattgtaaaaaccaatctgttcctcaacgcaggtcgtgttcccgagcttcggcgagcgctacctctcatcggtgctgttccagtccatcaagaaggaagcggagagcatggtggtcgagccctagagcacaaaattctgggcttctggcaaactatttcctgagacgttcaccatttccatcacagaaaaataaagctcgggtgccttctgttgatttcgacgtacatttccctgccgatggtgtccagcccactgttgtcgctggagaacacgtcgtttttagacttgtgatattttactactgttttgacactcgttgtatttctgtatatcgcgtcagactgtgaaataaaagcagtacagtgtgtttcttgcatggatggtttgctgtgggggttatatatatatatatatatatatatatatatatatatatatatatatatatatatatgtatgtatatgccgtcagagaattgcattgaagaatggccagtgacgctcacgcggagctgaactgagcagcactgatgtgcttggtcattgacttgctgcagcaaaaaaaaaa

SEQ ID NO: 88540 - DNA, 1843 bp, Zea Mays
cgagctgttcctctgcgacagcaaccttgcgtgcataaagccagccaccagccaggcagccgccatctccagcggcttcttccaaagctccaactccgacgagaaccgccactcctcgaaatctcgaaggattttctgcggcgaaccccttcgtgacgtgacccaatgggagaggcctcgccgtcgatcgccaaggacgtcaccgagttgatcgggaacacgccgctggtgtacctcaacaaggtgaccgatgggtgcgtcggccgcgtcgccgccaagctcgagtccatggagccctgctccagcgtcaaggataggattggctacagcatgatcacggacgcagaggagaaagggctgattactccaggcgtgagtgttctgattgaaccaactagcggcaacacaggcattggactggcctttatggctgctgccaagggctacaaacttacactcacaatgcctgcctccatgagcatggagaggaggatcatattgaaggcttttggtgctgaacttgtccttactgacccactcttgggaatgaaaggagctgtcaagaaagcggaagagatacaagcaaagacacccaactcgtacattcttcaacaatttgaaaatccagctaacccaaagattcactatgagactactgggcctgaaatctggaaagctacagcaggaaaaattgatggccttgtatctggtatcgggacaggaggtaccatcaccggtactgggcgatacctcagagagcaaaatcctaatgtcaagctctatggtgtggagccagtggagagtgctgttttgaatggtggaaaacctggaccacacaagattcaaggaattggagctggttttatccctggagtcttggatgttgatctccttgatgaaactctacaggtttcaagtgatgaagctatcgagactgccaaggctcttgctctgaaagaagggttgttggttggaatctcttctggtgcagctgcagctgcggcagttaggcttgctaagaggccagaaaacgccggaaagctatttgttacgtttggggtgggtggggggcaaactcagtggtttcgtcaacgcaacatcattggtgcagcgcttctcagtgatggttttagtgaatttttgagtcctgaattgggctgtgacttctgatggccctaactgtttggctggaccgagaaaattgggcccaagttcttcgcagcagccggctgataagttgagcggaacaggccccaacttttcaggcgactagactagactatccatcagttaaaaaaactaaattgtcgtgttcccgagcttcggcgagcgctacctctcatcggtgctgttccagtccatcaagaaggaagcggagagcatggtggtcgagccctagagcacaaaattctgggcttctggcaaactatttcctgagacgttcaccatttccatcacagaaaaataaagctcgggtgccttctgttgatttcgacgtacatttccctgccgatggtgtccagcccactgttgtcgctggagaacacgtcgtttttagacttgtgatattttactactgttttgacactcgttgtatttctgtatatcgcgtcagactgtgaaataaaagcagtacagtgtgtttcttgcatggatggtttgctgtgggggttatatatatatatatatatatatatatatatatatatatatatatatatatatatatgtatgtatatgccgtcagagaattgcattgaagaatggccagtgacgctcacgcggagctgaactgagcagcactgatgtgcttggtcattgacttgctgcagcaaaaaaaaaa

SEQ ID NO: 88541 - DNA, 1708 bp, Zea Mays
cgagctgttcctctgcgacagcaaccttgcgtgcataaagccagccaccagccaggcagccgccatctccagcggcttcttccaaagctccaactccgacgagaaccgccactcctcgaaatctcgaaggattttctgcggcgaacccgtacgtttcctatcgctgttctcgcttgttcgctggggaatcaaaccaaatcactgttggtgtttctatcttggatataagttctcatccccttccccccatccgccccttggatttgcagcttcgtgacgtgacccaatgggagaggcctcgccgtcgatcgccaaggacgtcaccgagttgatcgggaacacgccgctggtgtacctcaacaaggtgaccgatgggtgcgtcggccgcgtcgccgccaagctcgagtccatggagccctgctccagcgtcaaggataggattggctacagcatgatcacggacgcagaggagaaagggctgattactccaggcgtgagtgttctgattgaaccaactagcggcaacacaggcattggactggcctttatggctgctgccaagggctacaaacttacactcacaatgcctgcctccatgagcatggagaggaggatcatattgaaggcttttggtgctgaacttgtccttactgacccactcttgggaatgaaaggagctgtcaagaaagcggaagagatacaagcaaagacacccaactcgtacattcttcaacaatttgaaaatccagctaacccaaagattcactatgagactactgggcctgaaatctggaaagctacagcaggaaaaattgatggccttgtatctggtatcgggacaggaggtaccatcaccggtactgggcgatacctcagagagcaaaatcctaatgtcaagctctatggtgtggagccagtggagagtgctgttttgaatggtggaaaacctggaccacacaagattcaaggaattggagctggttttatccctggagtcttggatgttgatctccttgatgaaactctacaggtttcaagtgatgaagctatcgagactgccaaggctcttgctctgaaagaagggttgttggttggaatctcttctggtgcagctgcagctgcggcagttaggcttgctaagaggccagaaaacgccggaaagctatttgttgtcgtgttcccgagcttcggcgagcgctacctctcatcggtgctgttccagtccatcaagaaggaagcggagagcatggtggtcgagccctagagcacaaaattctgggcttctggcaaactatttcctgagacgttcaccatttccatcacagaaaaataaagctcgggtgccttctgttgatttcgacgtacatttccctgccgatggtgtccagcccactgttgtcgctggagaacacgtcgtttttagacttgtgatattttactactgttttgacactcgttgtatttctgtatatcgcgtcagactgtgaaataaaagcagtacagtgtgtttcttgcatggatggtttgctgtgggggttatatatatatatatatatatatatatatatatatatatatatatatatatatatatgtatgtatatgccgtcagagaattgcattgaagaatggccagtgacgctcacgcggagctgaactgagcagcactgatgtgcttggtcattgacttgctgcagcaaaaaaaaaa

SEQ ID NO: 88542 - DNA, 1698 bp, Zea Mays
cgagctgttcctctgcgacagcaaccttgcgtgcataaagccagccaccagccaggcagccgccatctccagcggcttcttccaaagctccaactccgacgagaaccgccactcctcgaaatctcgaaggattttctgcggcgaaccccttcgtgacgtgacccaatgggagaggcctcgccgtcgatcgccaaggacgtcaccgaggtgggtgccgccacccatttcgtcccgatttccgccgccttctttcgtggggcagattcggttatttttcgggtatggtcctgtagaagctaaatcttttgtgatgcctagttgatcgggaacacgccgctggtgtacctcaacaaggtgaccgatgggtgcgtcggccgcgtcgccgccaagctcgagtccatggagccctgctccagcgtcaaggataggattggctacagcatgatcacggacgcagaggagaaagggctgattactccaggcgtgagtgttctgattgaaccaactagcggcaacacaggcattggactggcctttatggctgctgccaagggctacaaacttacactcacaatgcctgcctccatgagcatggagaggaggatcatattgaaggcttttggtgctgaacttgtccttactgacccactcttgggaatgaaaggagctgtcaagaaagcggaagagatacaagcaaagacacccaactcgtacattcttcaacaatttgaaaatccagctaacccaaagattcactatgagactactgggcctgaaatctggaaagctacagcaggaaaaattgatggccttgtatctggtatcgggacaggaggtaccatcaccggtactgggcgatacctcagagagcaaaatcctaatgtcaagctctatggtgtggagccagtggagagtgctgttttgaatggtggaaaacctggaccacacaagattcaaggaattggagctggttttatccctggagtcttggatgttgatctccttgatgaaactctacaggtttcaagtgatgaagctatcgagactgccaaggctcttgctctgaaagaagggttgttggttggaatctcttctggtgcagctgcagctgcggcagttaggcttgctaagaggccagaaaacgccggaaagctatttgttgtcgtgttcccgagcttcggcgagcgctacctctcatcggtgctgttccagtccatcaagaaggaagcggagagcatggtggtcgagccctagagcacaaaattctgggcttctggcaaactatttcctgagacgttcaccatttccatcacagaaaaataaagctcgggtgccttctgttgatttcgacgtacatttccctgccgatggtgtccagcccactgttgtcgctggagaacacgtcgtttttagacttgtgatattttactactgttttgacactcgttgtatttctgtatatcgcgtcagactgtgaaataaaagcagtacagtgtgtttcttgcatggatggtttgctgtgggggttatatatatatatatatatatatatatatatatatatatatatatatatatatatatgtatgtatatgccgtcagagaattgcattgaagaatggccagtgacgctcacgcggagctgaactgagcagcactgatgtgcttggtcattgacttgctgcagcaaaaaaaaaa

SEQ ID NO: 88543 - DNA, 1587 bp, Zea Mays
cgagctgttcctctgcgacagcaaccttgcgtgcataaagccagccaccagccaggcagccgccatctccagcggcttcttccaaagctccaactccgacgagaaccgccactcctcgaaatctcgaaggattttctgcggcgaaccccttcgtgacgtgacccaatgggagaggcctcgccgtcgatcgccaaggacgtcaccgagttgatcgggaacacgccgctggtgtacctcaacaaggtgaccgatgggtgcgtcggccgcgtcgccgccaagctcgagtccatggagccctgctccagcgtcaaggataggtagtgcttctgcatgatcacggacgcagaggagaaagggctgattactccaggcgtgagtgttctgattgaaccaactagcggcaacacaggcattggactggcctttatggctgctgccaagggctacaaacttacactcacaatgcctgcctccatgagcatggagaggaggatcatattgaaggcttttggtgctgaacttgtccttactgacccactcttgggaatgaaaggagctgtcaagaaagcggaagagatacaagcaaagacacccaactcgtacattcttcaacaatttgaaaatccagctaacccaaagattcactatgagactactgggcctgaaatctggaaagctacagcaggaaaaattgatggccttgtatctggtatcgggacaggaggtaccatcaccggtactgggcgatacctcagagagcaaaatcctaatgtcaagctctatggtgtggagccagtggagagtgctgttttgaatggtggaaaacctggaccacacaagattcaaggaattggagctggttttatccctggagtcttggatgttgatctccttgatgaaactctacaggtttcaagtgatgaagctatcgagactgccaaggctcttgctctgaaagaagggttgttggttggaatctcttctggtgcagctgcagctgcggcagttaggcttgctaagaggccagaaaacgccggaaagctatttgttgtcgtgttcccgagcttcggcgagcgctacctctcatcggtgctgttccagtccatcaagaaggaagcggagagcatggtggtcgagccctagagcacaaaattctgggcttctggcaaactatttcctgagacgttcaccatttccatcacagaaaaataaagctcgggtgccttctgttgatttcgacgtacatttccctgccgatggtgtccagcccactgttgtcgctggagaacacgtcgtttttagacttgtgatattttactactgttttgacactcgttgtatttctgtatatcgcgtcagactgtgaaataaaagcagtacagtgtgtttcttgcatggatggtttgctgtgggggttatatatatatatatatatatatatatatatatatatatatatatatatatatatatgtatgtatatgccgtcagagaattgcattgaagaatggccagtgacgctcacgcggagctgaactgagcagcactgatgtgcttggtcattgacttgctgcagcaaaaaaaaaa

SEQ ID NO: 88544 - DNA, 1551 bp, Zea Mays
cgagctgttcctctgcgacagcaaccttgcgtgcataaagccagccaccagccaggcagccgccatctccagcggcttcttccaaagctccaactccgacgagaaccgccactcctcgaaatctcgaaggattttctgcggcgaaccccttcgtgacgtgacccaatgggagaggcctcgccgtcgatcgccaaggacgtcaccgaggtgaccgatgggtgcgtcggccgcgtcgccgccaagctcgagtccatggagccctgctccagcgtcaaggataggattggctacagcatgatcacggacgcagaggagaaagggctgattactccaggcgtgagtgttctgattgaaccaactagcggcaacacaggcattggactggcctttatggctgctgccaagggctacaaacttacactcacaatgcctgcctccatgagcatggagaggaggatcatattgaaggcttttggtgctgaacttgtccttactgacccactcttgggaatgaaaggagctgtcaagaaagcggaagagatacaagcaaagacacccaactcgtacattcttcaacaatttgaaaatccagctaacccaaagattcactatgagactactgggcctgaaatctggaaagctacagcaggaaaaattgatggccttgtatctggtatcgggacaggaggtaccatcaccggtactgggcgatacctcagagagcaaaatcctaatgtcaagctctatggtgtggagccagtggagagtgctgttttgaatggtggaaaacctggaccacacaagattcaaggaattggagctggttttatccctggagtcttggatgttgatctccttgatgaaactctacaggtttcaagtgatgaagctatcgagactgccaaggctcttgctctgaaagaagggttgttggttggaatctcttctggtgcagctgcagctgcggcagttaggcttgctaagaggccagaaaacgccggaaagctatttgttgtcgtgttcccgagcttcggcgagcgctacctctcatcggtgctgttccagtccatcaagaaggaagcggagagcatggtggtcgagccctagagcacaaaattctgggcttctggcaaactatttcctgagacgttcaccatttccatcacagaaaaataaagctcgggtgccttctgttgatttcgacgtacatttccctgccgatggtgtccagcccactgttgtcgctggagaacacgtcgtttttagacttgtgatattttactactgttttgacactcgttgtatttctgtatatcgcgtcagactgtgaaataaaagcagtacagtgtgtttcttgcatggatggtttgctgtgggggttatatatatatatatatatatatatatatatatatatatatatatatatatatatatgtatgtatatgccgtcagagaattgcattgaagaatggccagtgacgctcacgcggagctgaactgagcagcactgatgtgcttggtcattgacttgctgcagcaaaaaaaaaa

SEQ ID NO: 88545 - DNA, 849 bp, Zea Mays
atggcccagtattgcctgggcaataccttgggccggcccactaatagaatagagattagggttcgtcacggcgttccgcacagccgcactgccagcgtcccgcacagctgcctgctcggccgcaggccgctcctgccggtgctccagcctccaggcctccagccgctcggagcctcggactcgtcacgctccagccgccagctccggtgctccgctgatctgcttgtccggttgaccggttgtcttgtcccgccggcggccggctgcgggctgcttgccgcttggtcccgccgaggcgccgacccgcatggccgcacggctgccgcctgccgctgcttcctgcttggccgcacgtctgcttgtctagttgtctgcttggctgattgcttaatgcttagtgcttctagttgtctgcttgcttcgtgcttctatgcttctagttgtttgattgtgacttgtgagacttgtgagcagagcatagaaaggtcaaaggtagctcatgagtatttatttgattacccgcatttaaagagctatttcagtcaagcttctagtggaagtagactaagcactcgcgctgatggagtttgcaatgaacccagaatacaagttggagtccaagagaataatagtgaagatgccaatggtgaaaatgttaatggtcaagtcgaaggtataaatcagttcaacccggatcacattatttctgatccgggactttgtattccaatggattcttttgctcctaatattagagatgatgttagaagggctttcatagctaaagattttattcgccatatgacatttggttgtaaatggattgtaatcaagatgactattaaataa

SEQ ID NO: 88546 - DNA, 1170 bp, Zea Mays
ctcttgtcactcatttcacttcttattccgattcaagaaggaatgaattcacgtacaaaagaaatgaaccgtgtctatataattatgtaacaggggaaaaaaaaggagagcgaataaagcaaattcggtcgggtttctcgtttcaggggagacaattcgtgctctactgtctacaatgctcattgctccacctggaagtctagacgcaacggagctctctgctgtgctacctcctacctacctgccctgccttgctgaatcggagcattagcattaccaatggacggaactggaactctcccaagtcccaactgagctggagaaagcaacgcagagcacggccagcgccagcgccggcatcttcccggtgacgaggccagcgaggatgatctgcagtcggcaccaacgcaccaacgcgggaaacggtaatgcgcatccgcgtcgacggtggagcgacctggcggcggtggtgtgggctcggcggtagcagcaactacggcaggctccacgctttggatcgcccgggcgtctccgggtgtgctcgtgctcgcgtgcgtcgtcgccgtgccgggaatccgtgccgcggagcgtcttgccgtttcgcaacttgttggcgagtagcgcgcagcgatctcctgctctgttttagcttgagattgttactggccgacaacttgctggtggccgcggaccagagccaggcgccatcgattgcttcggacggactcgatacaggacagcgccaccgacgccagcgtggccgcggccaccagctgcttgctccagatcaccaccagcgaagaccaagaggagccctggcggacgctgaagcccgcgcctttggatgggcgtgccggtgccggtgccgccgcgtcgcgagccaccgaaagcttgcgcctttgctggggctccgcggcagcggcgcggcgcctcttcctggtgttcctgatgcggccgtggttcttgacgacgatgtccgcgagggaggtcgggaagccggtctggaccgggagaggccccggcgggcgcattgacgcgaggaggcggcgcaggcggcctgcgccgccgggcgcttcagcgggatcgttggcatcgccggcggctgccgacgccggcgagcattggagacgtggcgtcagcggcgaggctttgcgcgtccgcgttgctggc

SEQ ID NO: 88547 - DNA, 1392 bp, Zea Mays
actttttgctcagcgtcacccggccgccgccacagctgttgcccagccgcttgagcaggcaaccagaccggccgccgccacagctgctgcccagccgcgagcaggcaagcaggccgtccagctccgaccagccgcacgagcagcaagcaggccgcccagctccggccagccgcacgagcagccagccgcacgactagtgcacagcagacagcaccggcaagcagccgagcagctgcttctcatccggcgccaggtccagtgcgcgcgcgccttatctgctgcagctgcttgccgtcctcgtccgtcgtccctcggcaccggcaggtccagactgacgctgcgctcagtttgaagctcctccatggtgtcggactgggacagcgacagcgactgtgaagtacgcatgattgattatcctcgcgagcgtcgtgctggtgctgctactcaggcagagaaaggaaaggctatggtcgatgccggtacatcttcaagtgttgctggtgtgatggtgatggatcgatatgggaaaccagtgaagttaaatggaccaattgatgtgacttggagccatggtgagccatatcctgggcctcatggggctggctttaagtgtttttattgtttgaccaccaaaaaaggcggggggtgtctcgattaaaagagcatctaggtcatatatctgggagtgtggaggcatgccgtaaagtgccaaatcatgtgaaggacctaatgtctcaaaaagtaacagatgggagaattaggagggcacatggtaagaagcttcgtctgtttgttgaaaaggaggtttctgcaacaagacaaggttatcgaagtgcaataattcctcttgatgaacaagcacagattgatatggcaatgagaaattcattgagggattctttttccacaatggaacgtgatagttgtccaccttttggtaagtcaacgggtagtgcaagtggagctgcaagttgtccaaaatggcaagaaaaccgaagttccaacatgttatgacaatggccataaagaaactttcaagctcatcttcaaaggcttcagctgcaattgatcaatatactttcttcagaaagcaagctgggttatttggaggagaagaggctaaagattcagcacttaatggccgcgcaagtgcagctgattggtgggatcaatatggtggagactatccagaattacaagagtttccacgtcgtattgtttctcaatgcatgtcctctagtggttgtgaacgtaattggagtaccttcgctttggttcataccaaattgaggaatcaattgagttatgataagttgcataaactggtttatgttcactacaacttaaagttgtgcattcaacattttgaaactgatatggaaagtcttgaac

SEQ ID NO: 88548 - DNA, 99 bp, Zea Mays
caagatgaacgagtagcgcctctccgtccaagatcaaaaaggcagaagaagctctccatcaagggcctgtacatgcttcagaaggttaagtacatctaa

SEQ ID NO: 88549 - DNA, 193 bp, Zea Mays
cagaaatcatgcagtgcagggctttggcgacatcacatggcggactggcgacgccgtgtatacaccgacgaggaattacctcgccaccacacactctcgaagcttggaaacacgacggaagcgatccccatggtccggcgaagccccctggagtactcccgcaggcaggcccgcgacgccggcgtgctcaact

SEQ ID NO: 88550 - DNA, 788 bp, Zea Mays
gcaaaccgagttccttcttcgcttccgccagcaacgcggacgagcaaagcctggccgcgtgacgccacgtctccgatgatcgccggcgtcggcagccgctggcgatgccaacgatctcgctgaagcgcccatccggcggcggcgcaggccgcctgcgccgcctcctcgcgtcgctgcgcccgccggggcctctctcggtccagaccggcttcccgacctccctcgcggacatcgtcgtcaagaaccacggccgcatcaggaacaccaggaagaggcgccgcgctgctgccgctgccgcggagccccagcaaatgcgcgagctttcggtggctcgcgacgcggcggcaccggcgccggtgcgcccaggcataggcgcggtcttcagcgtccggccggggctcctcgcggtctgcggcgccgccgtggcgctggcgctggtggtgatctgctggagcaagcagatggtggccgcggccacgctggcatcggtggcgctgtcctggattgagtccgtccgaagcaatcgatggcggccggagacgaatgctgaggtgcatttgcgcgggcgcgtctcgccgatccgggaggtggcggactcgccgaagtcgcgccgcgccgggtgcgagtccgagcccgacaacgtaggcaacgacgccgcctcgctctggtccgcggacacaagcaagccgtcggcgaataacaatccgaagctgaaacagagcaggaggtcgctgcggaagctactcgccaacaagttgcggagcggcaagacgctccgcagcacgaat

SEQ ID NO: 88551 - DNA, 893 bp, Zea Mays
ctcctccacactacaaacgcattaagctcttagctagccctagccacgtacccacacatcgtagacaacgcaattagctaggaatagcatccatggcgtccggggctgctgcttcctcggccctcttgctcctcgtcgcggccttggtggccaccagtgcgagggcggccacattcaccatcaccaacaactgcggctcgacggtgtggccggcggccaccccggtgggcggcggcacgcagcttgaccccgggcagacgtggaccgtggacgtgccggcggggacccagtccggcagggtgtgggggcgcacggggtgctccttcaacggcggcagcgggagctgccagacgggcgactgcggcggcgcactctcctgcacgctctcggggcagcctcccatgacgctggccgagttcaccatcggcggcggcggcagccaggacttctacgacatctcggtgatcgacggctacaacctggccatgctcttctcgtgcagcaccggcgtgaccctcaactgcggcgggcccagctgcccagacgcctacctgtttcccagcgacaacaccaagacccatgcctgcagcggcaacagcaactaccaggtcaccttctgcccgtgagatcgcgcgtgcgaggcaggcggcagtgtggccggacgacgatgcaatatgcaatgcatgctccagccaacttctttgtttgcgaataataagtatgttgtttgtcctagtttgttattagtggagaaataaaaaaaagtagacaatcgaataagacgatgatgttcacccgttagataatgtaacttcgatgagtttgatctatatatatgtgcttgcaaaacatagaggacgtgtatggtctgagaactttccgtttaatgcatg

SEQ ID NO: 88552 - DNA, 185 bp, Zea Mays
gccaacggtcagttggaccaacggtcggccgcgcaatccgcgcgtgacgcattgccgggccaacggtttgaagggggcaccggactgtccggtgtgcatcggacagtgtccggtgcgccaacggatccaaatcgccaacggtcagctgcgccaaaacaggaaagaaatccgcaccggactgtccg

SEQ ID NO: 88553 - DNA, 1617 bp, Zea Mays
tttttacaggatcacctattcaccccccctctaggtgctctcagttacaagcgtcaggttcctaaatggagacaagaagatgccgagaagaaggctgcagggttgccgacgctgtccgagcaacttggtgaaaggacagctaattggatccgtgctagaaaaccaagggaaactgagtctgctgtatcttctgatgatcccactatcgaagaagtggtaaaaaatatatatgcaattgcagctaagcagagccaaggaacatttaagccgcaaagggagagagacattctaacggctggtctcggtaaccctgagcatcctggtcgtgtacgaggaatctcatctaaggaaggatggaaggaaggattcggaccacaatgggaaggtctgtacaagaaacgtgatcgatacaaggaagagatggcgaattattttaaggaggaggccaagaaagagttcaaaggcataatgtctgaaatgctatcgaatcctcctctagaattgatgcagcaattggcgagtgcgatgtctgttcaacagatgaccactccacagatgcaaataattccagcagctcaaccgctggcttccaccgagggtacgaccatcccaagctctatcgcgtcaacgggaaataaggtccgctatccagttgatgacatcacaaggcctgtggcatgcacactagttataagatatggtattaacaatcagcgtacaaagaaagtagccacaggccttgcgatcccaggacgcaagttccatggaaacgacattccagaagaatattgtagggtagaagtgacgacagtcgtccaaggatccgaggacgacatgctagacatacctgggcccgaaggtatcgagacacttggacaagctatcaagaattttatcctttggcctcgaagggatgtcgaattggttgatccaccacgatagccgtcgtcgcaggcccaaccgtctccgccttctcaaattgttgttcctattgtacatccatcatcacctcctcaaacttcacatgctgctcctcatcctctttctgaccctccttctcctcatcctcatggtggcccaccgtctccgccacatacatcgcccttcagggttccaccttctccacagcaatcaagggatccacgaccatcaaagaaatctaaagtttctataccaaaattagtgtccccattcgacaagaaaaagaagagtaaatccactgctggcacagctcgtcttttgaaagggattggacggagcctcacgtcagacactgttgatttggccgatctcgaggagtccgcaaaaaaggctgagacaatggccgcaaagataaagaagccaactaaggcagattataaaaacgtgcctaaaaaatatgtgccgcgtagaccactactcacttttgagaaactaaggaaggttccggctaatattaaaaggttgcatgattggtacatgcgggcatcttcagttggcatcgacaccatcagtgtcaatataccagcccatgcttttattggttcaaatcaaaatgcctttgttgcattcgaggacatgtggttaatgatgaaccttcagagactcgacgtgcaacttgtaaccatatttgcattg

SEQ ID NO: 88554 - DNA, 375 bp, Zea Mays
atggaaccactcactctaccagcaaacgggaaagagactccgcctaccccgattctggtcgccctcttcccctctgctgaacccgtcccgaacccacacttggcaccatgcggcaccgtggtgacgcagcaacctcgccctagtttgttgaaccctaaacgctccagtcccgatcgtgctcgcctctatgctactcgctgtaaaaggggcgaaggttcgaaggagcaccttaccggactacgtagcctagtccccaatgatgcgcgcagctggcttcatgatccccgattccccgcgagcttctctggacgcggtaggctggcgacgctggcagggccgttcctgacatttaaggtgcccacgacaagattataa

SEQ ID NO: 88555 - DNA, 2207 bp, Zea Mays
tctagcagatttgttcgagtacacgaggggatatatgttggcggcggccagtgtgtacgctggactacgtgatgatcggccatcatctaggagttgtcgcttgggtgtacatgtatccatcttgctcgctgaggccttgcttggggtgctgataactgtacattttgttgtggttcaagtccttacttttgcgccggtggttgccatagttctttcattgtccaggctaattgcaaacaactatggcaatgttggtgacgatgctgccaattcagcaaagctcaaggcatccctgcagattttctactctctcaccctggtgcagattaatgccttctacttctggaagatgctggtccttaggaagaaacattgtgcgtctgctgtggccaagaagtgcagatttggggagtggggcttccgcttggtttggtcatacattgaagaaaccaaaaccatgctcgagagagacggggcagtgctgcggggcagaaacctgatcaccttcgcagttggcttgctcggctccgaatcgctgcacgaccgtcgttctgcacttcgcatgctggacacgttcgtcggagacaaggtgtcagtagcaccctgcctgctgccttgcaggggtccccttgagaacctcatggaagcgctcgaggtgggcgatggcgagaccagggagcgtgccgctaggatcgttgcggctcttgctggcgatctccgccgcatcgatcagctccccagagcattgcatcacatggcttcactgcttcaagcctctgattatcggttccccagacccagaactacaactgcaactgatgcaagaacaacgacgacaagcatgcaagaacaacgacaacgacaagcagcagagagcaagcgcgggaggtttgggctgctattctgggcgatcctgtcttgtctcaacttctgggaagtcttggcgaaagagaaaaaggaagacaccttcccctctggcggcggaccaaagcagctcgtctctcaagggctgcttatcgttgagagactcgctcggcacccagcaaaccgtgcccagatatgcaacaacagcgtcctgctctcaaagctcacagcgcccctattctcccatgctttcctcgacaccgcggagcacggcagaggatgggttgttggcatgttagccacgtcgctgaggatcataaccaggctgcttattagggctcctggagaggccagcagagggctgcgtgacgggatcacaagcaacgcacaggcggtctctaacctgtccagggttctggaggaggaggacgacgccaagtttggcccggaactgaaagcagctgccgttgacatcctagcagaactagcgttgccttcatcagacaggtcttccacctcgaggttgggcaaggctgacatcgtcagggggctgtggtgcatcttccttgttcaagtggacgatggcgttgacggcagcaacactcagggagaggaacagcgacagcaggatagcacactgaggaagaaagctagcgaagcactggcacagatgctgtctgcagaactgcgtcatgttgctggccggcttactgacatgctggctaaaagtaagggctccacaagtcgagtaaggacagcaagaaccctcgagtgcttgtgttcacatatttctacagaacatggacagcctccaagactggatgctattgaaatgctgacaaaggttcttcagctgatactacggatcccatgcgaatcaaacaagctggagacggctgacgaggagcagcaagaagaagaggaattcctggtcgccttgctatcacttgccgtggtgatatgtgacggcatggtcgacgaacatggcttcagctgtgctgcgccccctcaagacatggtgccgctggtgagaaagcttaaggacataatacaggctaacaacacaaccacggtcgaatgcctgcggacagtgaagcttacctgcaagctggtcgtttcaatggcacagctcaagcccatgtgcatcaaagatttcacagagcacaatttcatggatgtactcttggagtctttgaagacgttgtcagatctcgataactgcctcgtattatttgaggtcgataatcattatcaggtgacaaagactgataagccactggtttcacttgtgaagaaagctcatcaactcttctaaaaagcaacgagaacaacccggtaatgtg

SEQ ID NO: 88556 - DNA, 864 bp, Zea Mays
ctctacccggccagacttctccttttcggatcatataaaccatcacctacgtacaccaagaaatgtcgtccatgcatctctacctcgatcgtcagtccagcttgtggtcgacgtactacgtcatcctaggttaaatttccaccgtcgtcagccacaatatggctgccatgctcgtccgctcgtcgccttgcctcctcctcgtcgccgtcatcgcgttgtgcgcgtcgtcgtcctgtgtgcttgttgtgccggcggcggcgaccatggctgagaacgccgtgcagcagcccgcgatgccgtcgtcgccccagcagccgggcctagctgctactaccgcaggcaagcactgatcagcttaactcgcaactgcttctgcagttcgccacttcaacgagaggatcgatccaccaccgctcgccggccgacgtgtctaatatatacgaataaaataaaatgtgctgcatggctgcaggtcagacgaccaccgccacgccagatgcatcgtcgtcgacgtcagccgcggtggcggcgctcccaccgtcggcgccgtctggaaccgcaaccgccgccaccgctccgaagaagttcccgcaaccgagccccggcggcgtgggcggcgggccgtaccagcagccaggcggcgtgggcgggccgtaccaaccaggcggcgtcggcgagccgtaccagccaggaggcggaggccacggcgagccgtacctgcccgcggcggaggtggcctcggcgctgccggtgccgacgcccgacgagctgcccagcggggccagcctggggttcggcagcaacggtggcctcgggttcggcggccccggcgacgagtgctgcggcggcccgggaggctacggc

SEQ ID NO: 88557 - DNA, 1118 bp, Zea Mays
gtccatgcatctctacctcgatcgtcagtccagcttgtggtcgacgtactacgtcatcctaggttaaatttccaccgtcgtcagccacaatatggctgccatgctcgtccgctcgtcgccttgcctcctcctcgtcgccgtcatcgcgttgtgcgcgtcgtcgtcctgtgtgcttgttgtgccggcggcggcgaccatggctgagaacgccgtgcagcagcccgcgatgccgtcgtcgccccagcagccgggcctagctgctactaccgcaggtcagacgaccaccgccacgccagatgcatcgtcgtcgacgtcagccgcggtggcggcgctcccaccgtcggcgccgtctggaaccgcaaccgccgccaccgctccgaagaagttcccgcaaccgagccccggcggcgtgggcggcgggccgtaccagcagccaggcggcgtgggcgggccgtaccaaccaggcggcgtcggcgagccgtaccagccaggaggcggaggccacggcgagccgtacctgcccgcggcggaggtggcctcggcgctgccggtgccgacgcccgacgagctgcccagcggggccagcctggggttcggcagcaacggtggcctcgggttcggcggccccggcgacgagtgctgcggcggcccgggaggctacggctggttcggcgggcccggcggctttggccccggaacctacggatacagtgggcccctctactggggggcggcgccggcagcggcggggtcctttggacgcgtcaccaacgtcctgctgcctctcgtcgtggcttatgtttcttcatgcgttttcgcttagcttttactgtactatttttactactatggccccctatagcaaggctctagcttgctccggctctggcttctctggtttattggcttctctcgacgagccaaagctgttttgtattttcgtttggcaaaatagctcctcctgtgtttttcgaatcgtgtataaggaaaatgtccatagtacctatgcctcgtttatttagttgtacacatataaggagcatatatattattacgtatgaatattacgacattaaacatagtcatatgagctatataatattgcgtcctactttctt

SEQ ID NO: 88558 - DNA, 1390 bp, Zea Mays
caacaattggaaagcaacacagattcaatgctataatgacctatttatttcattgtctccacatcaaaacatgcatggcacttgatagaggcagattactgataaccagaagcacacgatggcgccacctgaatttattctttcagtttgttactcattaactttaatcagcaacacctcttgtttatacaaaggtttgctccggttagcactgaatcatttacaggttcataaatcacaacagcctccaatccaacccttcgtttccacaggtgacagacaatcaaaaccactttttgctcagcagtttcgaaacggtcaagtctgtgtcgccgaatccatccataacggccttcgcggagtgaaattcggctcttgcggtaaagctgggggggagacggagacatgaactttgtaaacgacaagcacaggtatcatggccgagatatgcaagttacacggcagacagggccagcttacctgcttcgaacaactatgcatggcatgccaatgcgttcggctgcaaggacaccagattggctgcccgcaacaaggatgcagctttgcacgtcgcacccaacgtattctgaaccagctcggagagcagctattaccttgtcagagctggtaacagtgacaaggtcaaaattagacaatattcttttagggaggtatggagattatgcacattcagtgttagcgacaacctttcggatgctgtgatgtcaacactaagttttaggatcgatgcaaccttttctgcaatcctctgcttctctgcagaagctgtgggaacagaacgtttggaaataacagcaaaatgaccattaaactcaaagcaaagactatatagaacaggctgcaagtttttcaatcagtcatactcaccagccttctgggcttccctgacaagttgctcatccaaaccggatgtgactcctttaccaagaacaagttgcccataaaagctttcttcaacctcaacgtttccaacaatctttatttttgagattctttcgggacctaacttcatagctatagatctagagtcacatagaaaagaaatgagaacacagtattttttatgccatctatccttaggaaccatagtagtatgttaaacttgatagaataccattggcacattagtttgaaacaaattacaataccagacagtagttatttttaacataaaccataccttgaaatcttttctccatttctcccatatgcagccaatatggccaaaggaacaccttcaccaagtgcatcgtcaatgaacctttaaatgatttcattcacagaatcacatacaagacaatttaaagttcacgaacgagtcattcatatcttatggcaagcaaagagtacagaacagagaccaaagctg

SEQ ID NO: 88559 - DNA, 1287 bp, Zea Mays
aaccagaagcacacgatggcgccacctgaatttattctttcagtttgttactcattaactttaatcagcaacacctcttgtttatacaaaggtttgctccggttagcactgaatcatttacaggttcataaatcacaacagcctccaatccaacccttcgtttccacaggtgacagacaatcaaaaccactttttgctcagcagtttcgaaacggtcaagtctgtgtcgccgaatccatccataacggccttcgcggagtgaaattcggctcttgcggtaaagctgggggggagacggagacatgaactttgtaaacgacaagcacaggtatcatggccgagatatgcaagttacacggcagacagggccagcttacctgcttcgaacaactatgcatggcatgccaatgcgttcggctgcaaggacaccagattggctgcccgcaacaaggatgcagctttgcacgtcgcacccaacgtattctgaaccagctcggagagcagctattaccttgtcagagctggtaacagtgacaaggtcaaaattagacaatattcttttagggaggtatggagattatgcacattcagtgttagcgacaacctttcggatgctgtgatgtcaacactaagttttaggatcgatgcaaccttttctgcaatcctctgcttctctgcagaagctgtgggaacagaacgtttggaaataacagcaaaatgaccattaaactcaaagcaaagactatatagaacaggctgcaagtttttcaatcagtcatactcaccagccttctgggcttccctgacaagttgctcatccaaaccggatgtgactcctttaccaagaacaagttgcccataaaagctttcttcaacctcaacgtttccaacaatctttatttttgagattctttcgggacctaacttcatagctatagatctagagtcacatagaaaagaaatgagaacacagtattttttatgccatctatccttaggaaccatagtagtatgttaaacttgatagaataccattggcacattagtttgaaacaaattacaataccagacagtagttatttttaacataaaccataccttgaaatcttttctccatttctcccatatgcagccaatatggccaaaggaacaccttcaccaagtgcatcgtcaatgaacctttaaatgatttcattcacagaatcacatacaagacaatttaaagttcacgaacgagtcattcatatcttatggcaagcaaagagtacagaacagagaccaaagctg

SEQ ID NO: 88560 - DNA, 751 bp, Zea Mays
ctgtctctaggtttcaatttttttgggtgggggttcaaattaattgtggtttcacacatttttctaatgccatgtttgaacagatctcatgtatattggatttgtgttccagctccaaatacttgtcaagaacagaaatcactgcaataagttgtgagtagtaaaaaaaagggacaatgcttaagttgcatgaaaactagatgagtataggtgaagcaatgcatgtgttagatgctactagttgctatgctaacctattgaaatagatttcaatggggtcacctttttgggagtttctttttctttgtttgcctaaatacctagtagatataattctttatggttgactgtagcctcattgtttttgactagtagattaagatgtatgatccagcatgtttctgcatctaaacatttgtatcatttcaagtgattgaacaatcgtagctttattgcttatttcagtatgtggtgcttctctgatgatagcatcgaaatattgatgaggcaatcgcttcctgaagttgatatgttatatcatcaacacttcttccaaagtcaaaccagccacggctttctaacctcttgtaatatgttttctgccttctcaggcaagttcacgctgggagaaaagacaagccaaagtcctggagaaggtaagaaggcggatgagccaagatgattccagaaagggtggctcatggagtgacatctggggagcaccaacaagatacgagaagaacggtaaagc

SEQ ID NO: 88561 - DNA, 934 bp, Zea Mays
agaagcaccattttttccttaagattaacttagaataaagcctgacgggggtaacagcatccatcgatccgcagtccatgctgtttgatgcatgggtctgctgaaaccgaggatgaacacagcactaacaactgacacagagcgaccttgcaatcaaaaacacagatgggcaacaacaaacacgacacgaacgaagataaaccctctggactagggtaaacatcacggtagcgaacaggataacttggccgcgcgggccccaccgctcagttcctccagttcccgtcggagttgccgtagccgccgccacggttgccaccgccgtagccgccgccaccaccaccgtagccgccgccgccaccgtagccgccgccaccgccgtagccgccaccgccatcacggcgcccgccaccgccgtagccgccgcctccacggccaccaccgtacccaccgccgccgcctccacggccgccgcgggactgggcctcgttgacggtgatgttgcggccgtccagctccttgccgttcatgccctcgatggcgttccgcatcgcctcctccgtggagaaggtgacgaagccgaagccgcgggacctctgcgtctcccgatcgaggatgatctgcaggggagaggggaaggagggacagatccgggtgagggtgtgtcaggacaggtcagatctggacgaagccatggacggatctgggacgggaacggaccttggactcgaggacctcgccgtaggtgctgaaggcgttgtggagggagtggtcgtccgtggcccaggcgaggccgccgacgaagcagcggtactcaacatccgacgccgccatctcgatccgctcacccacgaacccgaaccccggagaacctcacgaacccgaacccgaaccggagggggaggagaagccaacccacctctaagaaagcacg

SEQ ID NO: 88562 - DNA, 1198 bp, Zea Mays
tgtagatggataagaagaccaaggttagagtttgtgttgctgctgcacataagttactgtcaatgatggctatgattattcattctagaaaaagaaaacgaaatgcaaggaggacagggattacctatgcaccaatgcatgaaagggatataactagaattgaatatctcaacacaaagatttggagggatgacacaacatgtataaacatgattagaatgaaaagggcttgtttctttcacctaactaaacattttagagagcgtggtttacttcaggacactatccatatgtgtgttgaacaacaagtggccatgtttctaaatacaattgggcataacctttgaaataggttgattggcacgaattttggtagatctggggaaacggttagtcgctatttcaataaagttcttcgtgcaattggtgagctatggggggaactaattagaccaccttcattggacactccaaccaaaatatcagggaactacagatgggatccgtactttaaggattgtattggagctattgatggcacacatgtaagagccactgttcctagagatatggagcaagcctttcatggtaggaagtcctacgcgactcaaaatgtaatggcgactgtagattttgatctacgcttcacttatgtgttggctggttgggagggaacaacacatgatgctaatgtattacgagatgctttagaacgtgtgaatggctttcgcgttccacaaggtaatagtttcacttatgtccttgtaaatgacaatgtttatggaattatgaccataatatatattaatattattattatattataggtaaattctaccttgttgatgcgggatatggagcaaaaccgagattcttgcctcctttccgtggtgtgagataccatttaaacgaatggggcaataatcccgtacaaaatgagaaagagttgtttaatctaaggcactcatctcttcatgtcacaattgagcatgcattcgggtcattgaagagaagattcaagattttagatgatgcatctcctttcttcccttttccaacacaagtcgatattgttgttgcttgttgtatcattcataatttggtcatacaagatgggagtgatgattttattatacaagattctaattggcctagtcatagccatgctacatctttagttggccaagcaagtgagcat

SEQ ID NO: 88563 - DNA, 632 bp, Zea Mays
gcagccccttctccctgtttcctgtacgtgcgcaggggcagaaactccatggccgccgagctccattcctccaagctggcggctccttcccatggacagcttccctcccctgcgcagccgttccaagctccctcaacgccggtgctccctgctctcctccccatgggcgcgtcccctgcaggcgagcagcggattccctgtcccagcggcctccagggcgcgagctccatctcccagcagccactcccatggcgtgctgctccagtcggtctccttcctccctctgtcccttgccgcaggagcagcagctcctcctcccatggtcggcctcccttctccccctcggctccttcctctaggccgagctcctatgccaggaacgactgctccacttgaccgctgctccatttttttccctcactctgctctctcggctgctggcagccatggcgcgacgcctctgctccttctctctaccccacaaaacagccagcgcgcaggagcttcttctccatggacgccgaccaggctggtccctcgcctctgctcttccccgtggtcgcggttctgcgcagagctgcgagcaggagcacgccatggccggatctgccccctccatggacgccccttgc

SEQ ID NO: 88564 - DNA, 630 bp, Zea Mays
atataaatactcgatctattatatatgaatagatcttgtatgagcatgtatagatgtgtctttgagatattggaggaacacaaaggagagaattgcttcagttatatcgtgatcaacatgccgcgttagaatatatactattataatgtgttatctaaaatatgaggacacccattcagttggcacattgacgttgtgtgcatgcaccacaattgcaacattgacgatggagctcaataccaccacacgtgatgtcatggacgaagttgtcgtccaagcacatgatgattattctttcctcgctcatcgatcgatttttgtatattgtgtttttcttggtggttccctcattgcttggaagattaagaagcagttagcagtttccctgtttgagtacagaggttgagttgtgtgctattcctcttgctacggtagaggtgacttgggtatggtggttgcttgttgattttggtgtttctgtgtctatattgacacccctttgtctagcagtattggttctattagtacttcttgtgatccaataatcattattggttctattagtattggtcgtgatccggtaaagcatgagcttactaaacatattaaacatattggtgtttatgctta

SEQ ID NO: 88565 - DNA, 297 bp, Zea Mays
atggagcagagcaacactggcggaagacctcaactccgggaaagaaaccagggcgacccggtcaccaatcaaattcgacgaggccacgaagacacgcggattctaccgtgggtaccccacaacgaccagccgaggcccaggcactggttggttgagagtgtaggcaacgttggccatggcggcgactggaacgcgatcacaccaatccaagcaatggatgcgttctgtgttttcgtgcgggcaacagtaggaaaggggagggagccgcagggcgtccgggttttatccccaggatga

SEQ ID NO: 88566 - DNA, 393 bp, Zea Mays
atggggctggggagcgagcgggacgcagagggcagggccgagcgccgtggcgagctggaagtgcgcgcggccaccagagaagaagctgcgcgcggcaaggagctggggccaagcagccgccatggggaagcagagcagccggtgaccttccatgggcggcgtctacggagaggggcggcaggggaagggcagagggagctcgggaatggagcgcgtgctagcaggaggagcggccggggctggggcgagccaggaatggagctcatgccggcgaggaagaagacgcagggtgccgtgggagctcgtagggagcgagaggagcagaacacggtgggatatttgaaaaatcccgggcgggacgcaggggattctgcgatggacagcgaggcttga

SEQ ID NO: 88567 - DNA, 1496 bp, Zea Mays
atggagaagaagtaccgcggggatggccggagctcggatgatgcagatcggtcaggcggtggcgtgggtcgtcagctggaggcggccaccaaagggttcgcgctggaggcgaagatcggggagggcagcttcggcaccgtgtaccggggcaagctccccgacgggcgcgaggtggccatcaagtgcggcgagttaggcccccgcgcgctccggttccaggagaaggagagcgcgttccggtcggagctggtgttcctgtcctggctccaccacaagcacctcatcggcctggtgggctactgtgaggaggcggaggagcggctgctggttcatgatgtttcccatcctctgctcaaaagtcttggcgtgaagaatctcccagctgtaattggccgaactgtgaatggtgaggagctccttctgaaggatggcatttcgatgaaagatctcagatctggtgtcaaggaattgaagacactgctagatagttttgagaagaagaataagaagttattatcgaatctagctaataagaaaccttccggtcaatgggaagaaatcaagaagattcctctgctcacagcttccaactttgaggaaatctgtggagagaagactctaatatctaagaagactctgataagggggcagaactataattccagaaatgttgtctcctatgctttgctggataaggacaaacaatctgcattcctgtcatcgtttgacaagtctggatacaggtcatctgacaagctgctcatcgcctacaaggaacccattattattatgttattattatttagaactgaaggaagatttggatgcaatgtttcccatgtgaatacatacagtggaattgcaggaaaatcaatggataagtttggtgcattgatatcatctttcagataccccggcccccgtgccagtggccttcgtgctcctttaaaggatgtgaaaaacacactttctgtgagatctattcttaaagctcaagaaaaaggcacattcagacgcacagcaaagaaaacagttatgcagagagcgacaactttaaatgcattttacaatgggtacatatgcattgcaaattctgacctcgcatgatgttggtgcatgttcaatcagatcctgctggacgtctggttatcacaggggatccagagcagcctgataatccttggaggatcactccgttcaagaatgtggtggtcaacttgccatcaagaatcaatcctcaccaaacatccgctgttatcacgcatgggtttatgtcagttctgttgaggaaataggatttcatttgagcagatacatgatgtcaagctgacttagcagaacccttctgtggtttgatgctggttgctggtgttgtgatctgttgccaccttgtttattgttacagtagtgccataaaattagctggttcatgtgtgtattccagtttcgtagagaaaggagatgttggtcgtagtagggctaatttgacagtatga

SEQ ID NO: 88568 - DNA, 2542 bp, Zea Mays
aaattcttcgaccactgccgcaaggaaggcacctcccttccccctctcttcaccgccgccgggaaggctacagcttccactccaatccttgtctccacttgcccgcgattcctctcaccctcggctcactcactcatccttgtatccacttgtgtatccgcggcagcggcggcggcggcggcggcctccactgcactccgtccggtctactccctgtccctgggcccgacgtttcgtcggtgaatcctcgagctgctgccgtcacgtatgaggaactggagcgtcggggccgttgcggccttcgaatttgcgctctggagctccgtctggtgcttcctggtcgtctccgtcaccagtttctgagccgggatcctactcctcttctcgcgctactatcagtgcagtgcagtaggccactggactgctgtcgtgccggggtagttgcggccaaaggaacaagccaccttctccgagttggaattaggtgcggccctccgcatcaaaagggctcgtttggtgggaactttcgcttgcctactcgctgctgcctgcttcggtggtcctccgtgacggggattgctggaattggggttggaaggacattctgactgaattgctcgagtgaggggtggggttttggcgcccgttgcttgaggatggaggagaggccatcgtccgaggcaggcgcgggcaactcgagggccgaggacgacttcaggagctgctgcggggatgaggaagagtgggaggacacggaggagtcgttcacggccggcgtcaccaagggggagctggacgaggcctctgtgcgtctcttcttcaagggcgtgtcgagccctgaggcggaggggaagaagctgtctgggatcggagtcgtcatggagaggtcgcccggggtgcctgttcttaaggtgcagaagaagctggatttctatgtggaggagctcgtggctgatcacctcgccctcatggatgggctgcttgtcgcactgcagaatgggatcaggaagatcttcgcctttactaattcggagaagctctactttcagatagcagaagctgaaattcttgaagaccagcttttggtagctctaggacacaggattcttgaactggtggataagttggaagactttgatttgatattgcttcctagctttgaactagagaggcccttgcagttggctaaagaagctataggcatcagatatctgtctccctacgaggttggtacctgcccgatttgccgtgaggagaaactaggttctcagatgatcaaggcaggttgttctcacacatattgctataattgcctgactgggtatgttgaagagaagctgctgacctcgaagctgcctataaggtgtccacaattaaggtgtaaatacattatttccgctagtgagtgcaactcgttccttccagttagcagctatgattccctggagagagcatttgcagaagctggcacctcaggaatggaaagattttattgtccctttccaaactgttcagtgctgttagaccttagtcagcacttctctagggcaagttcatcaagccagtcagatctcagttgtgtcgagtgcccagaatgccatagagatatatgtatcaactgtggagtgccgtggcacatcatgatgggctgtgatgagtaccagagcttgcccgctgaggaaagagatgctggagacctatctttgcatcggcttgcacagaacaataggtggaggcgttgccagagatgtcgacgtatgattgaactgacacagggctgcttccatatgacttgctggtgtgggcacgagttctgctactcctgcggtgctgactacgctagcggcgttcaaacgtgccaatgcgtgttctgggacgacgaagccatggagccctcctccgccgcacggtccacccaagcagcgtccgagatctgggcgtgggacacatttgactgcatgccgaccgccgtggagggatactcggagcaggagagagcgcagctggcactcatccagaggttcctcgccggggggttcagcctgggtgagaacccctgccagtcgccgccccgctgcgccgactcctacatcgtcgacaccatgaaggacctccaccagctcccatggctcgagcggttcgtgtcggtgatcagcgacacgtacaacgatgactacatgcagtgaagggagggagggagggagagacagttatagatagcagtaaaagaaacggcacatactgagtcctccattcagaataatttgtttccatgcccctgtaggcaattggcgcagggaaaaatgatatgctttcatcatgaatacactggtgttgtttcctccattgtatggtaaccttcggcttcggtgctagttgtgcatgggcacaagagttctccattttatatgattatgtccttatttctttaaagtgagtgtaatctctctctctatatgtatatcttcagagctttctgaaattactcgttttgaatcaaatcagcagcatgagcaactgcctggatgatgcctccgtttat

SEQ ID NO: 88569 - DNA, 279 bp, Zea Mays
atgggagccaagctgtggtaccgctcctgccccgccgtgtcccatatctcgaacttgaccgtctcgtcgttcaccgccagggtctgcgagaagaaagccgcgccgatggtggattcctggaactcgacgaactggcctttcacaaaccggaggaccaggctggacttgccggcgcccacgtccccaagaagaacctgggcggggtacaatagaaccgagcagaggaagcaagcgcgtgtcagcgtccgcagggtcgccgtacaaagaaacaaaccctaa

SEQ ID NO: 88570 - DNA, 2415 bp, Zea Mays
ttattatctttctccttcttccccctcccctcgaccctctcagcctcaccaggatcagctttgttgctgcggaggcaatccctgtcgcctgctccctccccatgagagtaccacgccacgcacacccttcaggaacgccgtaagctgaagctttcagtcggctgctgaaacctcgttcatcagtcagtctccaaggcggttcgatcgtggtggccatcatcagccgagcggccagagctgcacgatggctacctactactcgagccagggcagtgaaagggagccgtcgcagaacatgtactccagagaccccggcaatggcaccgcgtcctaccctcctctgccgtcggctctggggaacttgctctacttgaacagcccggcttctggcgggccgtacacggatttcggcggcgtccagcaggactgcatcgagatgcctgaacctggacatccttcggtgatgtcccatgactcgtctgccagggagatcgagcccgacatgctggggcagcagcggcgctcgttcggcctagccagaggcatgaaggacgaggtgctgatgcgcatgatggatggatcaggatcacatagcagcgcagccgatgccatccatgacgacgccccgaatggcatacagctcgatttcggcgttctgggcagccacggcccgccggcgcagggcggccaaggctccttgtctctgagcctcaacacgcacatcatggcgcctgccttgccgtactggcctgtcgtcaaggcagacatgctgtcgccgcactcctacgaccatggctgcggcggcggcagcggcggccttggctcggagccgtcgcgggcgatccggaactcgaggtatctgaaggcggcacaggagctgcttgacgaggtcgtcaacgtctggaacagcatcaagcagaaggcccagaaagagcaggtggaggcagggaagacggaagggaaggagaacgagggaggagggcccaagagtgagggtccgcaggagtctggcgccaacgctgcaccggagctttctactgccgagaagcaggagcttcagaacaagatggcgaagctgatggcgatgctggacgaggtggaccggaagtacaagcactactaccaccaaatgcagagcgtggtctcgtccttcgacatggtagcgggggctggagccgccaagccatacaccgcggtggctctgcagacgatctcgcgccacttccggtgcctcaaggacgccatcaacgaccagatcagcgtcatcaggaagaagctcggggaggaggagagctcgtccggcagggagggcaggctgacccgtctccgctacatcgaccagcagctcaggcagcagcgggcgttccagcagtacggcatgatcccgcagaacgcttggcggccacagaggggccttcctgagaactccgtcaccattcttcgtgcttggctcttcgagcacttccttcacccgtaccctaaggattctgaaaagctgatgctggcaaggcaaacaggcctgacgaggagtcagatttcgaactggttcatcaacgcccgcgtccgcctctggaaacccatgatcgaggacatgtacaaggaagagaccggagacatcgagcaagactccaactcctcctccgacaacgcgccagcaggaagcaaggccaagacggcgtcttcgcgagacaaggaggaccacctggcgagaagctgctgcacgccgcgggccgtctgcgagagcagcagccagctgagcgagccaccaggaggagccagcatgagggccatgagcgtcgccgccgccgccgctggagcgcccatggggttattccagaacgagcctggccacgaccacgaccacgacgacagcttcatgagcctgatgctcaaggagcagcgaccgaacgacggcggcggcggcctcctcctccaccacagcgccgtggcgcagcaccaggacgagaacgcccggttcatggcgtaccacctggcggagctgggcaggtacggcaacggcaacgtgtcgctcaccctggggctgcagcgctccagcagcagcctctcggttccgcacgctcagcagagcttccccggtgtcggaatcggtgtcggagacgacgacatctacaatgccaccgccgctcctctcggtgtcagcgtggcgtcgccggactacgagtccatgagccagatggatcagcggcaacggttcgagcagtcgccccttctccatgattttgtggcgtgattgttcgtttgcctatactcactctccgttccaaatcgcaagacgtttttttttttggcttttctaaatccatggcctttgctatactaaatataagatatgtgtttagatatacccaaaacgttttataatttggaacggaagagagtacctcagatgattat

SEQ ID NO: 88571 - DNA, 120 bp, Zea Mays
ctataacttcaagagaaatgaagtttggacactggtgccttgtaacaccctaaaaggtcaatcatgcgaaaatgaggaaaattctccggaggtttttaaatcaaaacacctttccttgag

SEQ ID NO: 88572 - DNA, 657 bp, Zea Mays
gatccactctcccacctgcgctgcgcctcctcggtctctccttccacctccacacctaccgcggctcctctcggttcttccaatccaattaagaaacaaactacaaccaagcagatacagcatctacgaacgaaatggagctgccgcagggccacgagaagccgccgcccgccgccaacggccggggggcgtggcgcggcggcgcgtcgtcgtcgtcgtcctcctccgcggcgaccccgcccaaggtgtaccgcgtggagccccgcgagttccgggacctggtgcagaggctgaccggcgcgccgccgcccacggccttgcggcggccgcagcagcagcaccagcaccgcgcggccgtcgtggcgccggtggtgcatccgcagcccgtgcgcgccggcggcggcggcggcggagagcagctggcgtacggcgcggcggcgccgtggtcgttctcgttcccgatggccggtggcggggtggaggcggcggcgcagccccagcacggcgctttcctctagccgccgcccgtggtggcgtggtgctgtgctactgcgctactcatgcatgcacggtggacgctgcatcgtcgtcacaaagagatgacctgatcaatctctccttttgtaataattacaataattaccctgcatgtacgta

SEQ ID NO: 88573 - DNA, 291 bp, Zea Mays
atccactctcccacctgcgctgcgcctcctcggtctctccttccacctccacacctaccgcggctcctctcggttcttccaatccaattaagaaacaaactacaaccaagcagatacagcaccgcgcggccgtcgtggcgccggtggtgcatccgcagcccgtggtggcgtggtgctgtgctactgcgctactcatgcatgcacggtggacgctgcatcgtcgtcacaaagagatgacctgatcaatctctccttttgtaataattacaataattaccctgcatgtacgta

SEQ ID NO: 88574 - DNA, 422 bp, Zea Mays
atgtcaacactcgccgccgccgcctcctcctcctcctcctcctcctcctccgccacctcctcgccgcggtgcgtccccttcgctttccgccgcggcgccgcgaggaggcgtctgccggccccaggcgcaggcggctgcggcaggccgctgtgccgccccgccgaggccctcggcgggggcatccagagcgccttctttgcgtccctggaccgctgctcgtgcgtcgagatccgcaccaaatcgttcaaggaaccggagccggacgccgtgccccttgtgccgccgccgccgccccacgacgacagcagcagcgccgccgccgcgggaagtggatggaggaggagcgggtccgccgccggcaagccgcgccgtgggctcggctgctgcacgcccactacagacacctaatcgtgcatgcatgc

SEQ ID NO: 88575 - DNA, 603 bp, Zea Mays
gcttccatggcccaccagcagcagcagttccccacgctgtcggagtgggaccccaccctcgacctcgaggctctcctctccgacatcggcttcggcctcctcggacctgacgaacccaccacacccgcgtcggcgtcggcgtcgcccacggacgcgaccacctcagccacgccgccggagcacgacgcgtcggcgtcgctgacgtccgcgggacctgaagcagccgccgccgacgagaacgagctggcggagcggcggcggcggctccgccgcaggatctcgaaccgcgagtcggcgcggcggtcccgcgcgcgcaagcagcggcacctggaggagctccgcgggcgcgccgcccgcctgcgcgccggcaaccgcgacctggccgcgcggctcggcggcgcgcaggcccgcgccgcgctcgcccgcctcgccaacgcccgcctgcgcgccgaggccggcgcgctcgcccgccgcctctacgctgcccgccgcgccctggcgctgcgccaggtctacgccgcgtccggcggctccttcgacctgcaggtgctcgcctcgctcatggcgtagcgggccgtagcccgcgcgggcatctctgaggaa

SEQ ID NO: 88576 - DNA, 669 bp, Zea Mays
atgggccaccgccgtctcttcgttctctcgctggggctggctcatcttctcctcatcgccaccgcgcacgccggaggcggccatgctcgaggcgccgccaccgacgatgctgtcgcccaccagggcttcaaggctagatatgctagcgatgtgacatggcagcatgagcagggcatgagcatggtcgggtcgaggccgccgagctgcgcggggcggtgctggtggtgcggcgcccgccgctgcgaggccgtgcaggtgcccatcacgccgcagcagcaggacaagagccgccgccacgggaagagcggcggcggcggcggcggatcgataccgtcgtcaacaagagatggcggccgaggaggagcgtcgtcgtcctacgacgaccgctccaactacaagccgctcagctggagatgcaggtgcggcggtggataggatagctgatgtatatatatggatgaaccttgcagcttaattagtcgtatgagcttgatgggcatgcatggacgacggatcgtcatcagagcgcgtcttggcttgcagtgtggtgtgttgatcttgcatcgatcaatccattttctttcctgttgcggtgtgaatatagtagaagtcgctgctaaatatgcgtcttcaaaaataaattaaagaaaaggaaaaacccgtttatcg

SEQ ID NO: 88577 - DNA, 227 bp, Zea Mays
agctgcgcggggcggtgctggtggtgcggcgcccgccgctgcgaggccgtgcaggcatgcatggacgacggatcgtcatcagagcgcgtcttggcttgcagtgtggtgtgttgatcttgcatcgatcaatccattttctttcctgttgcggtgtgaatatagtagaagtcgctgctaaatatgcgtcttcaaaaataaattaaagaaaaggaaaaacccgtttatcg

SEQ ID NO: 88578 - DNA, 1096 bp, Zea Mays
ggatttggatccactttgccatcaggcgcgcctcgttctttcttctccgccggctgcatccacaccagacaccacaccacgttgctctcaccggtggaaggaagtggaagtagaaggctggaagcggaagcattcgatttccatcgtggggcatggcggcggaggggaagaggaagggcgtcccggcgctagggtggtggctgatgctagtcggctccctccgcctcgcctccgtttggttcggcttcttcgacatctgggcgctccgcgttgccgtcttctcgcagacggagatgactgatgttcatggccgtacttttggtgtctggactcttttgacctgcaccctgtgcttcctttgcgcactgaacctggaaaataggcctctgtacctggccaccttcctatcattcatctacgctctcggtcatttcctcacggaatacttgatataccacaccatggctgcagcaaatctgagcacagttggcttctttgcaggaacgtcgataatatggatgcttctgcagtggaattctcatgggaacccccggggttcctatgctgggaagcagtcatgactgatgctcgggttgttcgcttgatgtggtctgggcccgctaggggaagaaggatggttgaagaaagctcgctggaaagccgcctgatgatggctctgcgtcatttgtacttcagttttcaacttttcatcatgttatttcgttgcatgagacgttcgtccgactgagcagggagatttccgaacagttatgccactggctgggaatgagaatttttgaacactgaactccggctgaatcatgtagtcaggagctgtaatagcattcagatagtcaccggttgggagctgagatgccaataaggcggcgggtatagaaaagaggtgggcgtatcatgtgctttcgttgcagccaaagggtgtatgtactctgaaacttttgttgtactgatgctgcatcttttgttcttgaaataaaccgtacattagtacagtagagtcgataaagtttttatgtattgcgatgattgttcaatcactttatttttttttacctcatgttcagttacttttttt

SEQ ID NO: 88579 - DNA, 1169 bp, Zea Mays
tccgctttgtctcagcctctctctcccgtactgcttctcctctacctccgccgccagccagccactgcctcgattcgctcccctccggccctcctgtcgcgcgcgctctgcctcgctggcgccacggtcgcccgcgccggcaggctcgctgataggctcgagtccctcgacgccatcgcctagattgtctactagctggcccccgctcgccgcgaggtggtgcttgcggaggtggcggcgatcgtgcctgcatggtgctcgacaaaaaggtgctctacgagacgacatctgcttccgcgcgcacaagctcaccatgcacaacttcggtgacgtttagccacctcatctccgccaccatgagcggcgtcacctgctgcctttgcttctccggtcagctcaactccgatctccgtaggctagccgtcaacctgatcccattcccgcgcctgcacttcttcatggtcggcttcgcgccgctcaccttccgggggctcctagaaatatcgcgtcctgactgtgccagaactcccaaaatagatatgggatgccaagaacatgatttgcatcgtggacccgcgccacggtcgctacctgacggcgtccgccatgttctgcgacaagatgagcagcagggaggtggacgagcagatgcttaacgtgccaaacaatgactcctacttcgtggactcgatctccaacaacgtccagtccacggatgtgcctcttttgagagtgaattatacttttactcaattaggatatgtgtttctttggatctttgtttgattaatgatttttttggatgagagtgtggctacaggatgaagcaatgcagtttttgatggaacgcacatgtgcagtatacaaatggaccatcaggttgcggagcattccattattccaaccttattccagagtagttctgtgcactttaaagcctaacgtttgtggatccagaaaagaagcaaattttgtatgtatatatgtgtagatccaggtgatcgctattgttagcttttgtttacaatggttgccacccaaaaaagttgtaactcgctcatttctagacttgtgaataatgttgttagcactatgtttgcttttgcagtgacactacctgacgcttgtaatgttgtttggtcgtgaactgttgccgcgctatgtaaaga

SEQ ID NO: 88580 - DNA, 1127 bp, Zea Mays
acctgcaccagcctcgcccgcccttcgctcgccgccgccatggggaggggaaagttcaagggaaagcccaccggccgccgcaacttctccacactagaggagatcggtgacgagccgtgcgatccaggagacgatgcgggtggcgtccatcctgtccttcaccttccgggaggccgtggaggacgtggagtaccaagggtacctgatccccaagggctggaaggtgttgcccctgttccggaacagccaccacaaccccgaccacttcccctgcccggacaagttcgacccttcccgattcgaggttgctcccaagcccaacacgttcatgccgttcatgccaaaatgcttctgaatagtgggattctttcttgactagtgaagacaaaaggtacaattcaaccaacaaagagtagggataaagtcaatcatagcattggatcatctaaaaattatatttatatggatggtcaaatgtgagattgaacatgagagagactgcaaatttgtctaatgcaaaaaaatcattgataagtcaaaccttcagataaagtcagttgtggcattggatcatctaaaaattatatttatgttgaagctgagaaggaggctcatgtcaaagaaattatctaatgcaaaaaaatcattgataatttcttggatgtatattgattggcttattagatggatatcggcccagtttatttttcattttttctatagctgttagaaatttactttgctcatagttcatactataattaatatgagactcttgttttgtggtccaagtgttcaacgctcagggtgccttggaagtacgctagcttgttgtcatgaagaagtcattcaagttccttccaggtgttctggacaaagaaagcttgtaccttaaaacaggaggatacaagaagctggagtggttgtctgaaggcttttgaactgcttgaagcattagtgtagctttggtgcttttgtgactgatcggctctggagcagctagagtgatatagttgtgggcttttgaacaatagttggagtgatatgaaacattagtgatctagttatgaatgatattataattgtgatgcttttgtgaatatataattgtggttcttttgtgttta

SEQ ID NO: 88581 - DNA, 81 bp, Zea Mays
catgagggcacaaacacatggtacagatctcataaccaaaaattgctaatcaacaaactaaaacacacagtacaaaatagg

SEQ ID NO: 88582 - DNA, 1811 bp, Zea Mays
cacgcgccgtccttttctcccctctatatggcaagtggacaccgacaggcagcactgtccgtccgcttctctctccccatctccatctgcaatcctcgctcgcccacactcggcagccatggcgtcgtcgcgcaccggagccggagccggcggccgtgtggtggtcttcccgttcccattccagggccacttcaacccggtgatgcggctggcccgcgcgctgcacgcccggggcctcgcgattaccgtcttccacagcggcgccctggacccggccgactaccccgccgactaccgcttcgtgcccgtgaccgtggaggcggacccgaagctgctggcgtccgaggacatcgccgccatcgtcaccacgctgaacgccagctgcgacgcccccttcagggcccgcctctcggcgctgctggccgccgaggggagggacagcgtccggtgcgtcttcaccgacgtcagctggaacgccgtgctgacggcgtccagcgacctcggcgtgcccgcgctcggcatgatgacggccagcgccgcctcgttacgcgactacatggcgtaccgcaccttgatcgacaagggctacctgccggtgaaagaggagcgcaaggaggatcccgtacccgagctacccccgtacctcgtcaaagacctgctccgggtcgacacgtccgacctggaggagttcgccgaactgctggcccgcaccgtcacagcggcgcggcgcgcctcggggctcatcttcaacaccttcccgctgatcgagacagacacgctggccgagatccacaaggccttgtcggtgccggtgttcgccgtcgccccgctcaacaagctggtgccgacggccacggccagcctgcacggggtggtgcaggcggaccggggctgcctgcagtggctggacacgcagcagccgggctccgtgctgtacgtcagcttcgggagcatggccgccatggacccgcacgagttcgtggagctcgcgtgggggctcgccgacagcaagcgccccttcgtgtgggtggtcaggcccaatctcatccgcggcttcgagtccggcgcgctgcccgacggggtggaggacgaggtgcgcggccgtggcatcgtcgtcgcctgggcgccgcaggaggaggtgctcgcgcacccggccgtcggcggcttcctcacccacaacggctggaactccaccgtcgaggccatctcggagggcgtgcccatggtctgctgcccgcggcacggggaccagttcggcaacatgaggtacgtgtgcgacgtgtggaaggtaggcacggagctcgtgggggaacagctggagagaggccaggtcaaggccgccatcgacaggctctttggcaccaaggaaggggaggagatcaaggagaggatgaaggaattcaagatcgctgcggccaaaggcatcggcatcggcgtcgacgtcgacgaaactgcgtcgccccgcacggatttaaccgatttggttgatctcataaaatccttctgagctcatgacgatcgatctgttgggtgatgcctactctgtccatcgtgctcgacttgtcttcctactactgtaccactgtctgtgctcactttcacgttcctgacggtgttgtgttctagtgtatcattgtgcgatcagttccatgttcttggccatgttttagaataaaacagaaaacttgtgttcttggtgtaccactgtgctcactttcatgttcttgacggcgagttggaataaaacaagacttgtgtcatggtgtaccattgccatcattttcatgttaatataaagatttgacgcaaga

SEQ ID NO: 88583 - DNA, 3508 bp, Zea Mays
atggcggacgcgggggtgacgggggtgctggccaagctgggtgagctggcggcggaggaggcgacggcgctgctgcgcgtggacgccgagatccgggcgttgcggcggaagctggcctacctgcaggcgctcgtacgcggggccgaccgccagcgccgcggccgcgcaagcgagctgctcctgctctggctgcgcgagaccagagaggttgctttcgaggttgaggacgccgtcgatgagttccacctccgcgtcgaggcctgccgccccggggcccggtggcgccggcgccgcagatggtggtggggctggcaccgcgacgccgtcagcctcgtccaggacctcgccacgcagatgatttgttttggcgcattcttcttgaaatccatcaatgcggaaaaagaaaagaaatgcataatacatgaagtctatatgagggaaatatatgctgagtacgaaatggggttttttgtacgtcatgggctgtcaaatcaaatatctaagatcaatgaaaggattgatgagcttaaccagaacaaggaaacatatcaaattgaaagttctccttctgaaatttggagttcttcatcggttgaaatggatcctgagtggtacgaagataaatatgttataggctctagagaacgtgaatttgctatccttaaggacctaatcatcaacaaagagggagatatgcctcaccgggctgtcatctctatttttggggagcgtggcattggaaagactacacttgcaaaacaactgtacaatgacccagatatcataaaacactttgaggtccatgcatgggtatgtcttccaccacatgtcaggttcagggactatgttgagattatgcacatgcaggtcaacccacagattccagaagcttctgagaaaaatgataatacaacatttgcactcggtaacgaagaaaccactgatatggaattcaaccttcggcagaaccttgagaacaggaggtacctagttgttcttgatggtttagtcagcattagtgactggaactcattatttgctgtgctgccacataccaatgccaatggcagccggatcttacttaccacacatctcaatgtgaaggaaatcaatcacatcgacccacagatagctcctgtcaagcttccttatcttgacgaaaaacatggagaggagttattttgtcaaagagtttttgggacaatagaacctccacaaatttataggagcaaggtttactataaaaaagttcacaatatatcaacaggtctacccctggcaattactgtgcttgcaggaatattacgatcaaagtttatccccatggagtgggatgtcatattcgaacaactcgagtccaatggccagccaaaaccggttagaagcatatggtctttggcttttgatgacttgccacactacctcaagtcatgtttcctatacttggcgtccgtttcagaaaatgttattctttacccagatcgtttggtgcgtctgtggattgctgaaggttttgttatgcccaagaaagcagaaacactggaggacgttgggtttgactatctaaaagaactggtcgcgagagggttagtccaggtcgtgcagaaggatgctggtggatccatcaagctggtagccatccacaatctgctccatgcttttgtggagtctgaagcacaggactctagtttccttgaaatccaccatcatgctaatgttgtaaacccaaatgcagtgcggcgccttgccatacaaaactatgtggatgcatatgtccacattcctaatgtgttccccaagctgcgttcgcttctctgtgattttgcagaagaccaacaacgcggtagctcaagctctggagagctgcaacctcagtcgttatggggcaatcttgcagagttgtgttcaagagcctgtggcacttcggagaatgttggctcaagcacattgcatgggctccacttcttacagggctccaggtacctacgagttgttgacctgtatggtcttaagacgcgaaagctgccagatgagatcggcagcataatccacttgaggtaccttggcatcaggaacagcaacctggtggaactcccctcatccatctacaagcttgacagtctccagacgttggatgtaaggaaaacaaacgtggcgaaagccgtcgatgagttctgggacatcgaagcactacggcatgtgctcgccgagaaaatgattttgcccgattgctcagtagttcccttgaataatttgatgacactcaacggtgtggtgccttgtggtccgtgggatgaaaagagctgccccttgaacagtatgatttatctccgatccttgtccctgtctgacatttcagcagcccataccgccgcgctttcagcagctctgaggaaaatggaattccttttgtacctgaacctgtcaggtgaatttctcccgtccagcatgttcaccagctcaagcatgcgccgtctccagaccctcatcctgcatggtaagttacaagggattaatgatctgccgagcgacgaccgctatgtcctaccaaaccttaccatgctctatttgcatggatctgaggtgtctcagcagtttgtgcacaagcttggtacgcttccgtgccttgttgagatggagctgtcagctgtttcgtacagtgagggtgagatgaaactgttcttggacggattcccaagcctagcaaggctgaagctcaagaacgtgtctatgttacaggaggtagagatacgtggaggggccatgccaatgctttccatcctagccatgtatgattgcgacagcttgaagaccttcaagaacctgaatagcttggaacaccttcaagaagtggcgatctacaatacgccgccggagattgttgataacataaagcttgaggacgagaagcttttcagcaagatcaaactcctgactaaccccatgatgacagcagaccgagactttccaggtcatgttgtcagaatgagaattaaaatgttggatgaaccggctcatgatctacgtgtcgcagtggcctctgaaccacattgcagtgacatggagggtgattatcatggtgaaaggaaagcaacagaccaagtacactacggccctggtctgttataaataaatattggagttggtcaataattcaggaaaaatctgcagtgttttgcagcacataataattgtttgtgagtagcagccagtgatcggcggccgggagagcagcgaccccccgaaaaaaaaagtcactagtaagaaatgttatgctatcgtggcataacatgttgttatcattttccttttcgttctgaacttgttaaatgtttcctgccctcaagtttgtttcgaataagatcactggtggtgccctgtatcccagttttcaggttctagtttggatattacagtcttaattatcttttcagtttggacattgtaataagaatcatgaacttgtcaactttgaaaggctctgatcactggtggtgctctgtatccc

SEQ ID NO: 88584 - DNA, 136 bp, Zea Mays
aattttagctagacgtcggccgtacgggggaatgggaatgagctttgcggggagggggaatgagaatgatagatatagaatggtggcagaacatgggaatggactatgcgcggggaggagggaatcggaaaggcag

SEQ ID NO: 88585 - DNA, 93 bp, Zea Mays
agggcacttgttttgttcacagtatatcaaaatataaagtacaatgatattttgccaatattgttgcaatcatacacaatttttttgacatga

SEQ ID NO: 88586 - DNA, 96 bp, Zea Mays
gccgcaacggtttcgctcgtcccaacaaaattcgtgcatggctgcccctatggtagcgtgtgttgctggctccatcgattgaatatatcaaaatgg

SEQ ID NO: 88587 - DNA, 2223 bp, Zea Mays
gcaagagagccaatctggcttccgcccttaactccatcaacaccgtgtatgcggatgtgtataacactgtgtagatatggagtctcctgtagatagagcacgccagacccatccatcctcgtcgcttatttatacggccgacccgaatcaatatggaaggagcggccgaccataagcggcaggtggacgacaagccgccgtacgccgccgtggacgacaccatgaccaccaccacgaagaagatggtggaggagcagctctcagacgacgccggcggcggcggcgagctgccagagcagaactaccgtggatggaaggccatgccctacgtcatagggaacgagacgtgcgagaagctgggcaccatcggcaccacggccaacctgctggtgtacctcaccaccgtgtacggcatgtcgggcgccagcgccgccaccctgctcagcctctggtcgggcaccgtcaacctggcgccgctcctgggcgccttcctcagcgacacctacatgggccgctacgccaccatcgccttcgcctccatggcctccttcctcggcatgatcgtcctcaccctcaccgccgccgtgccgtcgctccaccctgccgccaacagcagcaccaccggcggcccctcgtccctccagatggccgtgctcctcgcctccttcgcgctgctggccgtcggcgccggcggcatccggccctgcaacctggccttcggcgccgaccagttcgacccgcgcaccccagccggccgccggggcatcaacagcttcttcaactggtactacttcaccttcaccatcgccatgatggtctccgccaccgtcatcatctacctccagagcgacgtcagctgggcgctggggctggccgtgccggccacgctcatgggcctctcctgcgcgctcttcttcatgggcacgcgcctctacgtccgcgtcccgcccgagggcagccccttcaccagcttcgcgcaggtgctcgtcgccgccgcgcgcaagcgacgcctgcccgcgccccgcgccgacctctacgacccgccgcaccggagcagcctcatctccaagatcgcgtacaccgaccagttcctgtgcctcgacaaggcggccgtgcgcacccctgaggacggccccgcccccaacccctggcgcctctgcacgctgcagcaggtggaggaggtcaagtgcctggcgcgcctgctccccgtctggtcctccggcatcgtctactacatcgtgctcaccaacctcggcaactacaacgtgctccaggccatgcagaccgaccgccgcgtcggccgcgggggcttccacatccccgcgggctccttcgtcgtcttcaacatgctggcgctcaccctctggctccccttctacgacggcgtgctcgtgccggccatgcagcgcctcaccgggcgcgagggcggcatcacccagctgcagcggatcggcacggggatcgtcctctccatcgtcaccatgctcgtcgccgccgccgtcgagcgccaccgccgcaggctcggcgactccgcctcctgcttcctgctcgtgccgcagcagatgctggccggcctgtccgaggccttcggcatcatcggacaggtcgacttctactacaaacagttcccggagaacatgcgcagcgtcgcgggggccatgctcttcctggcattcgccatcgccagctacgccagcggcctcatggtcagcgtcgtgcaccggaccaccggaggccccgacggccgccccgactggctggcgcaggacctcaaccagggccacgtcgacctctactacctgctcatagccgccatggcggcggtcaacctagtctacttcgtcgcctgcgcgcgctggtacaggttcaagaacccggccgccgccgacgtcgagcagctggagctggagttagagggaaaggccgcagcgcctcctgtctgaatactgaagagctattttcttttcttcctcctcatcaatcaaaaaggaaaaaaaaggagaaaaaaacgaacttgccgtgcggtgcagggtgcgaagaaaggtactactacttgtagtaaagactaaagagtactaggtagaatagacgcataattaaacgccataaagggagggagggagggagacagtacacagtacaggttgcaatccaaattcaaaatcatgtactatattattgcttgatgactcctccatccatatgatatcaacatgattagca

SEQ ID NO: 88588 - DNA, 2142 bp, Zea Mays
cctcctagctcgctcctcctcttcttctcctctttcttctcgaaccatcatcatatatatatagaatcaatatggaaggagcggccgaccataagcggcaggtggacgacaagccgccgtacgccgccgtggacgacaccatgaccaccaccacgaagaagatggtggaggagcagctctcagacgacgccggcggcggcggcgagctgccagagcagaactaccgtggatggaaggccatgccctacgtcatagggaacgagacgtgcgagaagctgggcaccatcggcaccacggccaacctgctggtgtacctcaccaccgtgtacggcatgtcgggcgccagcgccgccaccctgctcagcctctggtcgggcaccgtcaacctggcgccgctcctgggcgccttcctcagcgacacctacatgggccgctacgccaccatcgccttcgcctccatggcctccttcctcggcatgatcgtcctcaccctcaccgccgccgtgccgtcgctccaccctgccgccaacagcagcaccaccggcggcccctcgtccctccagatggccgtgctcctcgcctccttcgcgctgctggccgtcggcgccggcggcatccggccctgcaacctggccttcggcgccgaccagttcgacccgcgcaccccagccggccgccggggcatcaacagcttcttcaactggtactacttcaccttcaccatcgccatgatggtctccgccaccgtcatcatctacctccagagcgacgtcagctgggcgctggggctggccgtgccggccacgctcatgggcctctcctgcgcgctcttcttcatgggcacgcgcctctacgtccgcgtcccgcccgagggcagccccttcaccagcttcgcgcaggtgctcgtcgccgccgcgcgcaagcgacgcctgcccgcgccccgcgccgacctctacgacccgccgcaccggagcagcctcatctccaagatcgcgtacaccgaccagttcctgtgcctcgacaaggcggccgtgcgcacccctgaggacggccccgcccccaacccctggcgcctctgcacgctgcagcaggtggaggaggtcaagtgcctggcgcgcctgctccccgtctggtcctccggcatcgtctactacatcgtgctcaccaacctcggcaactacaacgtgctccaggccatgcagaccgaccgccgcgtcggccgcgggggcttccacatccccgcgggctccttcgtcgtcttcaacatgctggcgctcaccctctggctccccttctacgacggcgtgctcgtgccggccatgcagcgcctcaccgggcgcgagggcggcatcacccagctgcagcggatcggcacggggatcgtcctctccatcgtcaccatgctcgtcgccgccgccgtcgagcgccaccgccgcaggctcggcgactccgcctcctgcttcctgctcgtgccgcagcagatgctggccggcctgtccgaggccttcggcatcatcggacaggtcgacttctactacaaacagttcccggagaacatgcgcagcgtcgcgggggccatgctcttcctggcattcgccatcgccagctacgccagcggcctcatggtcagcgtcgtgcaccggaccaccggaggccccgacggccgccccgactggctggcgcaggacctcaaccagggccacgtcgacctctactacctgctcatagccgccatggcggcggtcaacctagtctacttcgtcgcctgcgcgcgctggtacaggttcaagaacccggccgccgccgacgtcgagcagctggagctggagttagagggaaaggccgcagcgcctcctgtctgaatactgaagagctattttcttttcttcctcctcatcaatcaaaaaggaaaaaaaaggagaaaaaaacgaacttgccgtgcggtgcagggtgcgaagaaaggtactactacttgtagtaaagactaaagagtactaggtagaatagacgcataattaaacgccataaagggagggagggagggagacagtacacagtacaggttgcaatccaaattcaaaatcatgtactatattattgcttgatgactcctccatccatatgatatcaacatgattagca

SEQ ID NO: 88589 - DNA, 1776 bp, Zea Mays
gggcccagttatcaaggtgattgtgtgaagtgtagagcgcccacctccgtcagctgggcacacgtagatatagcagtagcagcagcggagctgttcgacgaaatgccgccatggccgccgtgtctccagcctaccctcaccaccgctcgccgcgccaccgtattctccaggacgagatgtctctcttctacccccgcctctcctacctacgagcaggagcttggtgtcatctcgtctgtgcaggggcagcacgaggaggagccatcgttggtcgttgtggggggcggcgcggcgggcgtgtacgcctccataagggccaagacccttgctccgcacctcaacgtcgcggttgtggagaaaggcaggttcttgtccaaggtcaagatctccggcggtggccgctgcaacgtaaccaatggccatcaccttgagcccatgggactggcgagaaattatccaagggggaacaaggagctccgaggatccttctttaccgctcacggtccgcaggataccatgcgctggttcacagatcacggtgtaaagcttaagacggaggacgatggcagagtcttccctgtcactgacaattcagcttcagttgtagactgtctactgaacgaagcaagaaggcttggggtttctctgcaggccggcaaaactgtgtctagtgcatctgttgctcaagacgggaagtttgttctcaaggtggagaagcgtactgccgatcttgttgattatatcaacgctaattacatcttggttgctacaggtagcagccaacatggctattcaatcgctgcacaactcggtcattccattattgcaccagttcccagcttgttcacatttaaaatcgcagacaagcggctggctgatctcgccggggttacatttccaatagtcaaagcaaaactgaagctagatggtgttcaaaaaagtgttcccgagttaactcagactgggcctatgttagtaacacactgggggcttagtgggcctgttgtgctgcgattgtcggcatggggagcacgtgagctacatcagtgcaactaccaaggaaatcttatggttgactttgtacctgatattcatatcgaggacgtgaagcgcgtcctattccactacaaagatcagcatgcgaagcacaaagtgagtaacacgttccccacggagtttggcctggtgaagagattttggagattcctgctagaacaggagagtttaaatggtgatacacactgggcctccatgccaaataatcatctaaacgcagtggccttccggttgaaacaatggacgtttgaggttgttggaaagggccaatttaaagatgaatttgtgactgcaggaggtgttccaattacagagatatcgcttggcactatggaaagcaagaaacagccaaacctgttctttgcaggagaggttcttaatgttgatggggtcacaggcggattcaattttcagaatgcatggaccggtgggtatatagctgggacaagcataggcacattggcatcgactagcaatctcccagagcagcagtcatgtttccagttgtaactgggagtttcagagaaggaaatggattgagttatgaaagagactcctcagatcatctgggaatgattcagggataccaacaagtttgcaatcaagataaggatattccaagatgaccaggatcagggagctacaattgctactgaattgtaacactaacctaagatggggtacatatgacaagaccgcacgattttggttacaatctag

SEQ ID NO: 88590 - DNA, 394 bp, Zea Mays
aggaagggagcttacaaaatacataatagaattatgcaaagtagttacagctagatatatacacttcatttgattagctcacgttaatcattggcttatttataaatgtccacccactatatgatgaccaaactccattattataaacttattttgtttgtgcatttttgctattttagagttatcagtttatccttgagttctaaaattttgaccattggatttgtatatcagtcacttaattttaaccatctgttcatttggaccaacagttaatgctccacccttgcccaacattcttggcctagtgcatgtcggtaactataaacaacacatgcactttgtagttatgaaatcagatttaaatgatgaacgatcaaacaaaatactgata

SEQ ID NO: 88591 - DNA, 1998 bp, Zea Mays
catttaataccccgaacggaggttcaaacattcgatgtgatagaggctaaattttagcaggggcaaaccaaacaccccctaagtttattcggcaggccttccatgctcaccaatgcattgcctgctacaactacaagtttattcgacaggaatttgatttcaaacaacggcaaaatgaaatcaataaaaggaggaggagaagaaaataatgcaggacgtggagagtggagcaggtcaaccacccagaccactgcaccgcaggctccatcccaaagtactccaaatcaaaagagccgcccggcacaacaagctgccacctggggcccccaccacatccacctccggcgaggcgatgaagcccatcgcccactcactccacgccgccgtcgaccgccgctggctgctccctctggccgttggctccgcgctctcgctcctcctcctcgtcgccctcaccaccttcccctcgccctccgcgccctcctcctcctcagcgctcttcgtggagcacaagctcgccccctccccgccgtcccccgccgcctcgctgccccgcatcgccttcctcatctccggatccgcgggggacgcctccgcgctccgccgcgtcctcctcgcgctctaccacccgaggaaccgctacatcctgcacctcgatgccgaggcgcccgactccgaccgcagcaacctcgccgccgacctcgcctcccaccccgccatcgccgccgcggccaacgtgcgcgtcgtcgaccgcgccaacctcgtcacctaccgcgggcccaccatggtcgccaacacgctccacgccgccgccgccttcttgtggggcgacggcgcctcgcactgggattggttcatcaacctctccgcctccgattacccgctcgtcacgcaggatgatctgatacacgtattctccaagctgccgcgcgatctcaacttcatcgaccacaccagcgacattggatggaaggagtttcaaagggcaaagccggtcatcattgatccagggctctacatgaagaagaaagccgatgtgttctggattccgcagaggcggagtgtgcctacagcattcaagctcttcactggttctgcctggatggcactgtccaggccctttgtggaatactgcatatggggctgggacaacctacctcgcacagtgctcatgtactactcaaacttcatctcgtcgccggaaggatacttccacaccgttgtgtgcaacgcggaggagttcaagaacacgacggtgaaccacgacctgcactacatctcgtgggacaaccctccgaagcagcacccgcactacttgacggcggaggacctggaccgcatggtcgccagcgacgcgccgttcgcccgcaagttccacgaggacgacccggtgctggacaggatagacgaggagatcctgggccgcggcgcggacgtgccgactcccgggggctggtgcgctgggacgcgggagaacgggagcgacccttgctcggtggtcggagacaccgggcttgttgtgcctggccgtggagccgcgcggctgcagcggctggtcacgtcgttgctgtcggaggagaagttccacccaaggcagtgcaagtaaacctgtgcttctacgttgctgttgtactaccacacccacactagtcgtctgtctgtagagccctccctccctccgcattacatgtacttgatcgtccggccatgttgtgatcaatatattttagcttagtttgagctgtccatgttgtgatggacgccgtcgcagcttgataggaattgctgacgacttatttgttcagacatctgaatatctgaacatctgaatgttcagatagcaagtggtagactggagatagcaacatttggaatggaaggatatgcatgcatgggtgagattgaatcttaggacagaaggagggattgtcgcctcaacaaggcaagtcgttatccaacgaactaatcaaagggggatttggtggtgggattgcgact

SEQ ID NO: 88592 - DNA, 780 bp, Zea Mays
atggcgcagccgccgccgccgccggagatggagagacctgctgcttccggggcgctcatctacgccatggtggcgcggggcacggtggcggtggcggagcacacgtcctacacgggcaacttccgggacatcgccgcgcagtgcctgcacaagctgccggcggggaacaaccggttcacctacacctgcgacgcccacaccttcaacttcctcgtcagcgacggatacgcatactgcgtcgttgccaccgagtcggctgggcggcagatccctatggccttcctggagatgataaaggaggaattcaacaggagatattcaggtggcgaagcaggaacggctacagccaacagtctcacccgagatttcgggcccaggcttagagaccagatgcagtactgcacggatcacccagaggaagtgagcaagctgtccagagtgaaggcccaggtggatcaggtgaaaagcatcatgatggaaaacatcgacaaggcctttgatcgcggacagcagatcgacgggcttgtcacaaggacggagcagctccacgacgaggcggcaaggcgtgcagctgcggcgcaggatgtggtaccagaacatgaaggtgaagctcatcgtcctcggcgtcgtggtcgcgctcatccttatcatagtcctctcaatttgccatggcggatgcagcaagtgattatttttttttttaaaaaatgtgctggtgctggtcttttgctcgctacctataaacatatctaatttagagattctacttttttactatat

SEQ ID NO: 88593 - DNA, 471 bp, Zea Mays
attattattattattcctcattgcggcaatgcggctgtgcatgctttgatcaacacttacaggcccaggcttagagaccagatgcagtactgcacggatcacccagaggaagtgagcaagctgtccagagtgaaggcccaggtggatcaggtgaaaagcatcatgatggaaaacatcgacaaggcctttgatcgcggacagcagatcgacgggcttgtcacaaggacggagcagctccacgacgaggcggcaaggcgtgcagctgcggcgcaggatgtggtaccagaacatgaaggtgaagctcatcgtcctcggcgtcgtggtcgcgctcatccttatcatagtcctctcaatttgccatggcggatgcagcaagtgattatttttttttttaaaaaatgtgctggtgctggtcttttgctcgctacctataaacatatctaatttagagattctacttttttactatat

SEQ ID NO: 88594 - DNA, 262 bp, Zea Mays
gcagccaccgccgccaccgagcccactgccaccgccaaggccaccgctgccgcccagacccgatcctgagccgccaccaaggccgccgccaccgccaaggccgccgccgccgccgagaccaccaaggccgccgagacctgacccgccaccaaggcctgatccgcctccagcaccaccaagcggtccaaaccctccgagtccaccacctacgacacctccgaggccgccgacaccaccgccaatgcctcccgcaacgcctccg

SEQ ID NO: 88595 - DNA, 910 bp, Zea Mays
gaacaaaccccgcacgactcgttctcattccactctccaacgcgcaccgggcggtttttcgttcctttctttttttttcccctcttccccttccccttctccttccagcggcgctcaggccaccgccggccaatcccatcacccgccggatagggatcgacccgttcgttgattggcgcgcgcctgcgatcgatcgattggattgcagggttagggcggccgccgtcgagatagatcgatccatccatcgatcgaattggttttgttggtggatcggagatattcattcgggtccatgggtcggctgctgctggtgagcctcccggcgacgggcgccgtcatctaccgctgcaagcactgcgacacccacctcgcctacgacaccgacatcatcgcaaggacgttccgctgcaagaacggcaaggcctacctcttcaacaggatcgtgaatgtgaatgttggtacgaaggaggaggaccggatgatgacgacgggcctgcacaccgtgtgcgacatcttctgcgtcgcctgcggagccatactcggctggaaatacctcgtcgccttcgacaagagccagaggtacaaggaaggcaagttcatcctcgacaggtccaccgccttggcagccgctcctggtgatgccgctgctgaccaccaccaccaccacgctcgcgtagcaagctccgatgacgaagatgaccatatgtgaatgatgatgatgatgaatgtcatctgcattgcattcaccataatcccttgctatctgtaaatactctactccgcttgttgtagtcgttcgtcgtaaagcacctatatgtttccatttgttcaacctatcagactatgatatgatcagcaagtaaggtccatttgtttggatgcagcgacagttacaaacagatctcca

SEQ ID NO: 88596 - DNA, 522 bp, Zea Mays
cagcaacacacagctacgatacaatacatggcggcgacgacgacggcgagcatgatggcgcgggtggatcggctggacctgctgctgggctacctggaggagatgcaccgcaatggcaacggcaacgctagtccccctagtgctacaaccgcatcatcaccctccacccttgccgccggcggagtccatctcatcagcagtgacgacgacgtcgacgtcgactcctccgccggccccagcacgccgacctggcgccggccgcggcccgccaaggaggtgctggaggaggcgcaggccaaaggaagcctcatcgaccgcatagcctctctggaacaccgtgtgctcaagatggaagaggacatggaggtcacaccagctaacacggacaaggctagccaacagccgagagcgacgatgatgatgagcaagaacgacgatccaagcaggaagaagaagaagaaggggctcaagagcttggtcaagtcctgcctgcgtcatcagaggcaacctcaaaccttttag

SEQ ID NO: 88597 - DNA, 1400 bp, Zea Mays
gggtggtgtggatcatcagaagcgcatccaaggtcaggtcaggtgtgtgggggcatggcatggcaggtatggaggagttgctgacgctgctgttcaacgcgctgctgctggtgttcgtggtgaagctcttgctggccttgttccacaccaagatcatcgtcatcctcctctacatcctcgtcctcctcttcgccatgctcctctccggcagattccccgattgtcttcgattgattgatctgttggattggattggatctgaaaggagccggaaatggggaaaaatgaggagtaagaagagaaaagggagcgccgccgcgagggaaagggccaaggaaagggaaggctcttcttttgccctcccagcgaaaccaagccccgttctggaagggaggcggagacctttcgttgcacagcacagcacagccaccgtgtaactgccggaacacggatggggatccgccgttgcattctctcttctccacaccataagcaggacaccgatgctatttccactacaccataagcagtgatggtatcatagtttctcattcagccgcacccctttcactctactggttatctttttttcctcctataagccgcgatgttaatgttgtgaggtaatgagaatcagaatcaaacatgcagctataaacggtaaaaggagagaaatcataatcaaagcatggccaattcccactagtccttaggcatacataatgcatagccataaactgaactagttttttttccctggcatccacagctttatttagcaacaattaaaatctctaaactaagatttgcttaagaaaagcagccatactcaaaaagcttaacaaaagacagtatgccattattttttcacatcttcatgtacaaaagcttgtatcatccattagttaagtttaccatgtgtttagaatataggctgcattgctgcaatattaagagagagagagagaaggcgacgatgtaccttaatgagttgggtaaagctattaagtgattcatatgcttgagagtctggtacagagctttcattttcttttgtactgtataggatagtttgttttattcttgtttgctttcttcttcttctgcaatttttcagcctaacttttttttttgttttgatccactcttttgcttttctttctccttcagtccagctacatgtttgaatggttcagttaaactaaatgattcttcaacgctaggcttgctagcatccacattaggagttcctcgggtttcttcttcttccccttgcttactcactctatgaagtgcctcttccacaagcaagtagcagtcttcatattcagcagctcttgaagctagtggaagaagtctttggcaaggatttttttttacccaagtgtggcatctaaatt

SEQ ID NO: 88598 - DNA, 554 bp, Zea Mays
atggcaggtatggaggagttgctgacgctgctgttcaacgcgctgctgctggtgttcgtggtgaagctcttgctggccttgttccacaccaagatcatcgtcatcctcctctacatcctcgtcctcctcttcgccatgctcctctccggcagattccccgattgtcttcgattgattgatctgttggattggattggatctgaaaggagccggaaatggggaaaaatgaggagtaagaagagaaaagggagcgccgccgcgagggaaagggccaaggaaagggaaggctcttcttttgccctcccagcgaaaccaagccccgttctggaagggaggcggagacctttcgttgcacagcacagcacagccaccgtgtaactgccggaacacggatggggatccgccgttgcattctctcttctccacaccataagcaggacaccgatgctatttccactacaccataagcagtgatggtatcatagtttctcattcagccgcacccctttcactctactggttatctttttttcctcctataagccgcgatgtta

SEQ ID NO: 88599 - DNA, 390 bp, Zea Mays
atggcggcgcaggcgcgtggtccattttgtggccgcggccatgccggcccctgcgcgggcaacagcccgacagtgcgcggcacagatcgtaaccaaacagatgactatgacaaaaggagcagaaactttgggaagcaattggcaataaagcaacaaaaggcaaagaactctctttgtttgattgctatggtcaatatggacataccacttacatttgtttactatgaaactcgccgtgacggcatgcctgctctggcatacaagcatacaactcttacggctggtttggtgagcatacaagcatacaactcttacggctggtttggtggacagggaaatgaagaggatccatggcccatggagaggaatatccttactattcaaatttga

SEQ ID NO: 88600 - DNA, 729 bp, Zea Mays
atgggcatggatacgggtaagaaatctcgcccacggcgggtaacaggttgcccgatatccgcggatatcctgcgggtacgggcacgggtcgaaaattttacccgcaagctctcgcgggcacggaaacggaacgacaaacatcagtatgatatacaaaatttgtaccttggaacattagcagggcagaggagcacgtcggggcttcgaccacggcgtcgtaacgacaagggagaagatcacgacgcgagcgaacttgacgcggagcagcgtacgaaggagaagcgacacttggcacagcttcagacgtcaggcgcacatggctcgaccacgcaacagttagtgatgatgacgaacttggacgatggcaacggctttccagcgtcgcgaacagagggtgcacatgaacagcgagctcggcgagactttcggcgccacgaacggagggcatacgtcgagctggcagcaagtaacaggcgatgcaaaaaggagaagcgagcaggggatatggctcggttgaggtgggggaagaagaccgtgatcttgcattttatacagcagagagaagcgagggcgtcgagaaaagagatcgctgctgccattaatggcgtgcaagagaagaaaaagtctgatgatcgtggaaacaaatattggaaagataaaaggaattcaagtacaagggaagtagatctaaagagggagagactttttgcatcaaattcagcagtataa

SEQ ID NO: 88601 - DNA, 312 bp, Zea Mays
atgacaaaccatactataattgagtgcactgcagaactcattgacaagaatcagaccagcagcgggcagcacagccaagaaggcattgtaggccgaatcgaggtcgaagttgagctgccaggcctgctgctcggtgagctcatccgcgaccctgggttagaccatggattccctttcgaacaggtggatggcaaggtggatggaatgctatatttgttgaaaatggaagttacatgtggttggatcgaaggtatttctcacattgagatcaaggaatcaaaacttataggacagaggtatttctcacattga

SEQ ID NO: 88602 - DNA, 190 bp, Zea Mays
atgtatcaatgcatcgttgtacaccaatgcatcattcttttactattatttacattcttaatcagcttacgtaccacaaaatctcatttgttctctactccatttgtgcatgttcacattccaatttgaatcttcgacaacttatttcaataatttcagactttcattcagaacaagtatgtttttcaag

SEQ ID NO: 88603 - DNA, 111 bp, Zea Mays
ttgattcaaaaaaagatttgctccattaatattaagaactgttggagatacacagctttaacttccaaaacttgtttaccaactctctaaaaaaatttagggaactaaatt

SEQ ID NO: 88604 - DNA, 255 bp, Zea Mays
atgacgcttgacggcgtccaggcagcacccaacccgtcgcgggtctctagatcgaagatccacagtccatcggccctgtgcaagaataatagaatgggggagaagaacggggaggcaggccgcccaaccaacaaatcaagaagggaaggaggtggattacctgagaagaagtctggatctgaggtcggaagctacgaggtggtcatcgccaaacacttgcatcagttcagcacgcccaaaccttgttgcgattaa

SEQ ID NO: 88605 - DNA, 1314 bp, Zea Mays
atgtccaagttcgatcggcaagcagatggcgtcttggagcctttccaagctaagcatgtcttaacagggattaatcttgaatgtttagctgccattcttcaaaagaaagaaagccactatgacttggatgtatacgcttatgtaattcgtcaagtctattgggattacacaggtaaggttggtgctgctgatacagatggagttgatacggcataccgcctagtcgcagatcacatgagaatgatcgctgttactaatgcacccggttctcaacttgggttaggaaatgaaggtcgcgagtatttcctgaagtgtgctgataaacaggctgtgaagtatggctatcaagtacttaagataaatgaagaggattacgacattgttgttgatgcaattcttctaaatgaacctgatttatgtaccgagcttgaaaaagaaataatcgacagaatagtcaaagatgaagtgatgatctacaaaaagactaaagcagagttgcggaatcaggaacagccgtttgatatggggaaaaagaagaaaaggaacaaaaatgtccctgctgttgtgtggtatccgacaagggttatcgaatttcttggtcggcgcacacccattatcctcaaggaaaaggatacacggtgctccctagtagcaatatgtttcaccctcacttcatggagcttattggaaatgcctaggacagagttcattcacttcttgttcctgtgccactgcaggcaacgttctcctgcttggagagaaaataaccctcgatttagatatcaagaaagtgttggagagccatctcatccatcttgtccagaggcctcttttgtgtggcaatacacaaatgcaggcatgcaactgtatatatgcaagtgttttgaaaatgaatgtccattaactcaaaagctaagctattgtccacttatactgcagttggaacagaacttggaactatcagagttcaataaacaagttcttggtgtattgccgaagcttacatgcagcttatactttgatgtgacattttctagctcttgtggcttagagaagacctttgaaactgcactgtttggttttcttggtgtccctctacgccatggctggttggtagatccccagggccctcagctaacccgatatggattctcttccttacataatgacctcagagcgttacaacctactgtcctgatctggaatgaaaacttaattacaatatctaagtttgaagacaaaatatatgtgttgctgaacgatttgtccttgttgagaactgaaaccgatgctgtgtgggaaaggttaacgcag

SEQ ID NO: 88606 - DNA, 696 bp, Zea Mays
tctaagattcaatcagtactgccactgacgaaaactgaaagaaagaaaaggataaaagagaagatggatctgaagaagaaagagaaggatagtaacaaggacaaagatgatgaggataccaaggataaagatgatgggaaagaagaggatagtaacgaggacagagatgatgaggagaccgaggagaaagatgatgggaatgttgcccctcaaacctatttcttgcagggcaggcatatcaacttgaatgttaggcctatcaattttcttggactatctacccatgttatccaccagataaatgatggcccatgcgcccttattgcagcaatgttctattctcagggggacatctcttttgaaccacatgaaactgtggtgtcaatggagtatctacttggccttgtcctcgctcttcttggaggaagtgtgaaaatgcaggactattctgatgaaagaaaaagtcagatattgaatgtggtgaagagtctggccggagggtttgatatggatgttatcttcaccagaacggatggttttacaatgactccagagtggttgcttctggattgcttagatctcaaccttcgacatggttggattgctgctaggatcaatggagtattaaattctctagtcactgattctaattatttagaaactcgtgtagtttggcagacgcttgacgggatgtag

SEQ ID NO: 88607 - DNA, 117 bp, Zea Mays
gttaatagaaggagaaactcctttcaaaacatagtcatttcgatgcttccagatagaccaaacaacaagaatgctgagggaatttattccttttttctgccgcttccttactctttt

SEQ ID NO: 88608 - DNA, 657 bp, Zea Mays
gagcatctacctcattcatgaagccaaattctaaagggattacaccacatgatgacggattatattcagactgcaggctgacacaattgtgttcaggacccgatgcagctcttttgaactgcgaagactgaaattgtgtttatttttcagagagatggttatggttctcactttattcctacagaagaggatacatcgcatgagaagtctgtgcctggtcctcaatttattcatgaaacatgagaaacatcatttgaggatttttttcaggtacctggcaatgagttctctgaagctaaaactatatttgttgatggtacttccttagagattgctgataccacaaagataggaagagttttttgactggatctattgcaagaaatgattttttctcataacacgggattaagttggaatggacagtttgacattagtacaatagttgtcattgatggggtccgtgctgaaatccgcgcaccctattgtgacaagttctctgaaaaggcaaaattcaatgactactccagttacattcacaatattattgagctatatagaataaaatgggttggtctgccggcattttttacccacttggcctataagttgtcagaacctccctgcagacctttattgtgtagcccacaacaactt

SEQ ID NO: 88609 - DNA, 88 bp, Zea Mays
ttcatctgtcataagatggtcacagcatacagttgtaaggtcttcgagatacattgagctcagaagattcagaagatccaattctgtt

SEQ ID NO: 88610 - DNA, 1746 bp, Zea Mays
tctccatccttcccttcgttcgtgctcttcttcttgttattccgtttatcggtctggcgcagaaagaaacaagagatgagatctagtctgctaccggagtccccgtacgtacccagtgctccgcggcttcggcaggggtgctgctggctgcagacgctgatctgtatccaccggccaccgccgttcgtgtttctccatgtaaacggtggaggattttgtgtctgttggctgctgcttccaatgcgctccacgagagacgagaccctctctgccagttcccttgtgtttcaaaacatagctcgagttcaaattgcttatttagtttcttttttctcttcttacttattgacaacttgttcacagggttcatcagcagaagctgcttgctccgccgccgccctcttcctcctctactgcaccagcttgtactgctgtagttccagcaccaccacattctcctcctgctcctgttacctcagcaccagcttctcccctgcaccttctgcagcagctccagatactaaagatgaaccattgcaagataaaacagttgaagaaagtacagatgttgtgactggaaacatatctggttttcctgccagccaatttgatcatagtgcatgggcatacaagggtgccatggtcaggaatatgccagatgacccgtcccagtcacaacatctcgttcaagaagatttagttgatgtatttgacattttggatgacctgaagaatgaccctgtacagcgtgatttgttgaaagaagtcgagaaacacgatgtaaagaatgtttctacatttggttctactgaaaggagcatccccctgtcccaaggtttcacgatgccccggtacgttgtacctgatgacactgacattcagtacacacctcctcagccacgagcgacacgttctcaagctcaacctctgaaatcttcgctccgtaccaatgagactaggcagattaggaaaggccagaagaagctcaagaagtcgcctaagaaagtctcccaagatgttgagcttgatgacaatggtttccccatcatcgactttgctgctctagaccgttttgatcctcctccacatcttgccgtggatgttgagagttatggtggaccagctgcctcagtggctgcaaagcaggcagctttgaggatggtggcagaaattcttgagaagaggattgctcacccacagttgacatactttacatatgttgaaaagttccttcctgaggatgatccagaagatgtgattgctttggagtacaacctaattggcagtaagcagatttatgaagcatgtgcagatggcgaaatgagaagcaatgaccaagtgtactactacaccatctgcatagctaatgaagacaagctcttcaggaccgaagctgccgattacagaattttccttcctaccaatctgtcattcgcttgggtgatcacccaggccgtcgtcggtgcaagtcgccggagcaacgctgttaggcttgagcacgaacgcggcgtgaccgacaagctcggtgaggtggagcacgatgagcgagacgggacctcaacgcctccagtaggtcgatcagcggcgccgatgggcatgccgccggggagcgccagccctagcatcatgggcccgatcatgtacttgaacccgatctcgtccgtcaccagcgccgcgatgacgacgacaaaggaaccctccgacaacagtgaccccgtcggcgggcgcttgtacgcgatgtactga

SEQ ID NO: 88611 - DNA, 87 bp, Zea Mays
tttttttttcgaaaaacgcaggagaactgcgcctcattatattaagaagcaattttgaagttgtgaaacacctatgtcaattcaagc

SEQ ID NO: 88612 - DNA, 544 bp, Zea Mays
agactcacacactccctgaagaagagggggaagataaaagtggactgcagagtgccaaggatagctatagaagatgtcagggatgctgaagaagagcaggcagtgaactcgtttcgggaggttttgtttgctagggacttgctactagtcaagcatgataattaccacacgatgcttagatttttaaaagcgaggaagttcgattttgaaaaagcagcacagatgtgggcgaacatgctgcagtggagaaaggagttcggtacagacacaatttttgaagattttgaatttcatgaactagaggaggtcctgcaatattatcctcatggttaccatggggttgacaaggaaggaaggcctgtctacattgagttgcttgggaaagttgaacccaacaagcttatacaaatcacaacagttgagcgctatattaagtatcatgtacatgagtttgagagagctttccgggagcaattccccgcatgctcaatttctgccaaaagacatagatactacaacgacgatattggatgtccacggtgtg

SEQ ID NO: 88613 - DNA, 692 bp, Zea Mays
accttttccttccccgccggccgccgcgcagcgcgagcggagtcgccctctccagtagagtaggagtgacgtctctacctatccacctcagccccctcttttcattccccacccgcgccgcgcgagcggagtttcgcagcacgctgcggctcgcttcgccagaattcctggcgagggtacagaattccgcatcgaaacggaagggttccgctcaccgagaaaattggcctcaatcgcgcgtccgtcctcagcgtcgatgccaaggagggaacaacaactggggtttcagcaaaggattggacaaacacaatattggcacttgtgtctcctaattccaaaccggaggacttcaaccgcccagttctttgtgaaattgttgatgatgatgatggctccatggctttgttaccaaaactgcaacaatttgcaaagagggagaacctgaagataatatcaattgcagacctgataagcgaggggggcaccgacacgaagccacgagatggtttggagagaaacagttgaagcatctcccgcggaggttcacactggtccctctccgcgccgaagcacaacgagactgctttctgctcttcaccacctgccagccatcctcctgaagaccccaggtgtacttggaaaaaaatgaatgattgtacttggagtcttggatgtgaaatttttttatgata

SEQ ID NO: 88614 - DNA, 659 bp, Zea Mays
ttttcactcatgcagggtgatgttggggatggacaagagatcttagtacgagtgcattcggagtgcctaactggggacatatttggatcagcgagatgcgattatgggaattaacttgctctggcaatgaccatgattgagaaaactggccggggtgtagtagtctatcttcgtggccatgagggtaggggtattgggctgggtcacaagcttcaagcatacaacttacaagatgatgggcgcgatactgtcgaggcaaacttggagctagggctgcctgctgactcgcgggagtacggtataggtgcacagatattacgccatcttggtgccaggaccatgcggctgatgactaacaaccctgccaagtacactggactcaagggctatggtttaagtgtccttggtagagtgccattgctaacaccgataaccaccgagaataggcgctatatggaaacaaagcgattgaagatggggcatgtttatggaagccgctccagtaatcatgcaaacggcagtggcttggctggtgctggcgagagagaggagcaggatcagaatgacagtgctggcgtgcaagagcgaactccagaagcttgagtgcctaactctgcgttccttagagctgctccaatgggagtcttaaaaagagatgc

SEQ ID NO: 88615 - DNA, 567 bp, Zea Mays
gcctcgttgaacttccatggagatggcactagatgtgatagggagatcatcagctgtgtcttctccgccagatttgcgcaggcctcctgtggccgtggctgcagagcgaaggcctgcaagtatgtctgcaacttcccaacagacacaaggacaagcgtcttggcatcgaatcgctgcagaccatgccgatcggagtttatcagtggcaccgatgatgtatcaagatccattgtcaatgattgatgactataggtaataacctttctgttgagattagtagtcgattatatttgctcatgaattcaatcgatggtgatctgggatctccatggttgagaaattgaagtcaaggcctggtgaggttacttgtactggtaggtgctgatagatgtagtgctcaccgatgcttgtgaattgaattattggttctgaaaatatcctcacttcaaccatgcatacgagattatgagtaaatgtgaattccatacactctgttgccccagtccaatacaaccttgctgaaccttgcatatttgtgtgagcaggtacatttttgggagtctcttt

SEQ ID NO: 88616 - DNA, 1005 bp, Zea Mays
caagaaaatatggagagcgaaaatgaggtcatggagtcaccaccattgaatgattcaaattcacagtcaaaaccaaagggtcgatccaagaattttaatgaagctgaagacattttgttgatgtcagcttatcttaacatacgtaaagatgcaattactggaagggatcaataagaaggcaacttttgggaaagagttgagaagtactttaacgttaacaggacatttgagtcagatcgtaactggtcatcgttgaagcatcggtggggtataattcacaaataagttagtagtttccaaggtttccatgacagtatcgaaaggaaaaatgaaagtgggaagacaagtgatgataagctggctgaagcaaatgtaatgttccatcaatttaaaaataaggccttttctttgttccatgcgtggaacattctcagacatgagccaaagtgggctgaagataaaacatctaatgaagggaatgcaaatggggacagtcatcccaatgctcaaagacctgcaggaaggaaagctgaaaaggaaaagatgaaagcaaaaaggcgcaacagtgatgaagagtctgatcctttcattgaagaggtaaaaaaatttgagagaatcgagagagaaaactgagagcgaacgaaaggagcgtgatgaaagatactttgagctgcataagaaaaaagtagacttggagcaagaccagcatgacaagttgataatggcacttgagtcttgacacgagcacaatggatgaccaaggaaaacagtattttcagttgatgaaagaagatattttagctcgacgctttgggagtaggcagccatagttatttagtttttaatactttagacttttttccattcaaaacagattatcttgatgttcatgtaatgtaagaacatattttcattcaaagcagattatcttgatgtttgcaacaatctgtgttgacattgttttctggttactgtaaaagttgagttgaaattttgcttctgaaa

SEQ ID NO: 88617 - DNA, 303 bp, Zea Mays
cgcgatttgaataaagaacacattccaccaaaatctggaacttatctgagcgtgactgggaagtcgtcttctccagttggtcgacttctcacgctgcgggagctcgccgtcagccacgggacgtcgatccttacaaggtcggggacctcgcaagacgcctcctcgaccggcttcgtattccgcacgtccgaccatctggtattgagggatctagccgctgacgtagacgacatcctggttcctcttgctgtcccggagcgcttgtaccgatcagatcaccgggccaagatggctgcatcttag

SEQ ID NO: 88618 - DNA, 1384 bp, Zea Mays
tctggtcggtcggtcgctcgctccagtccattaatactcccaccggaaaaaaggaggcgaggcttccttcccacggaatcacggatcaccccaccaccacacccatgggcccgatcaatggccgccgccgccgccgtctcctgctcctcgccgcggttgctctcgccggcgccgccgtggacgcgcagcccgactacttcaaccccaagaatttcaacccgtccatggcgattgtcatggtcgtgctggtcacggccttcttcctgctcggcttcttctccatctacctccgccgatgcgcggggcccccgctgggcgggcccgacgaccactaccatgcgaggcagctgggtctggggctcggcaacaacagctacgcgccgccgcccagcaggaggatgcgcggcctcgaccgggccgtgctcgactccttcccgaccatggcctacgccgacgtcagggcgcacaagggcgcgctcgagtgcgccgtctgcctcagcgagttcgacgacggcgacacgctccggctgctgcccaggtgcgcccacgcgttccacaccgactgcatcgacgcctggctcgcgtcgcacgtcacctgccccgtctgccgcgccatcctcctcgtccccgacgctgccgagcccaccgcgttggctgctgcccctgtcactgcagcgccggatgatgaccatgccgtggtggtcgacgccgcagccgctgccggggagaccgaggaccagaggctcaggagggaggaggccgccgagctgctgcggatcgccagcgccaagcgcgcgctgcgaagcaacaagtcgcagttcccgcgctcgcacaccacgggccactcgctcgccgcgccgtcgcccgccggctcgcctagttccacctcggacgcggagcgctacacgctgaggctgcccgaccacgttctccgggaagccgtcgccgcggccaaccttcgccggtctgcgagcgtccagacgggcgctgacgggaccaccacgcgccgcggcttcgccatcgccggccgcgctggaactggaaggagcgtccgcctcggcaactcctccggccggtggcccagtatgtccctcctcctggcgcgcaccttctccgccaggcgcccagtgacgcggcgcggtgaggccgacgccgacgcaccagacaagttcgcaggctacgacggcaaaaccatcgtggagcagtgccacgacggcggagcttgctcgcttgtttgacgcgccgttcattcttctactacactatcctagtcggctagtcccagtaaaaaaaaattagagtggatttgtatatatacaaattattattattattgtaacttgaactttcggttacaataagcagattattcatccgtttggtt

SEQ ID NO: 88619 - DNA, 1621 bp, Zea Mays
ccgcgcccgcgcgccgctcgcgtccacgtgaaccgcaccgccgccaccacccgccgccgcccgcccgtccgatggcacatccagcccccaccgcccagaaaaaacctaaccgcccaccacccatacccagcccccgccttatcctcctccaccgccgccgcccccgccccccaactactcgtcctcacccccacccttatcgccgcccgcccccagatctagatctgagcctcccgtgaccgaggccgcgggtagacaggcatacgatggccgaggagcctcccccgccgccgctagcgaggaagagcgcgccggcgcagccctggtcgcacgtcgagaccacgcacctcatcgacgcgtacgaggagcgctggacggcgctgcgccgcggccagctcaaggcgcaccagtgggaggaggtggcggccgaggtcgccgcccgctgcgctgccacccctggggtcgtcgcccagcgcaagacgggcacccagtgccgccacaagctcgagaagctccgcaagcgctaccgcaccgagggcgcccgccccgtcacctcgctctggccctacttccgccgcatggatcgcctcgaacgggggccactcgccgtcgcgtcttccgcctacccggccgcgactggttctccgcctgccgccgacggcgacgaagaaggagaggaggaagaagaggaggtggaggaagaggaagaggaagaagacgtgcaggaggaaaacgaggaggaggaagaactcgccccacgcaacaacaacacccggagcatcaacggcatcatccgggaattcggcaccggccttgccccgcgccacccgcagctgcagctccacccgccgccgccttccatcacgccgtccatcgcgcccccgcgcaagagggtggcctatgaggcgttccaggccaaagccgccgccgcggcggtcaaggccaaggacgacgaagaggaggccatggagatggcccgccgccgcggctcctctgggcggcccgtcgcacagctgtcggctgtgctgagggatttcggcgagggtgtcatgcggctggagaggcggcgcatggaggtgcagtgggagatcgagcgagggtggcaggaggcggacgcccgccacgccaggatgctgcaggacgctcagcgccagctccgtgacacggtcgccggcgcctgtgccttgccgcccaagaaggccaggagggaccatggagactcctagcagcaattggcaccttggattgttagttatgccttttctgatgctgttgctagcagggaaggcatcccatcccaattggattgtactcctagtagggctagtcagttcagttggtatatggtggtaggactgatttgcagtagcatcttctcctaacctatgttttatgactttatttatgtcgtgtgaatggtggcggtgcagcaggctaatgcagtgaagttgctgggttttggtagtgcgggtgtctgcattgtgttcacttgttaattccaattttattttttgtgattagcatatgctcatgagtgctaaaaaaacttagtgcatttgattgtcactgaatttgattgccttcatagccgatatcattgtgatataattttaggccagac

SEQ ID NO: 88620 - DNA, 117 bp, Zea Mays
ctttcttttctgttgtctcttttctcttatctactctactatattaaaacaccagttttaatggtcgttctgcgtcatctttttataaataactcctcacatctatttcaaataaat

SEQ ID NO: 88621 - DNA, 1607 bp, Zea Mays
cctgtctgtttcgctttcgccacgtgaccccgaggcccgagcccgaagcggcggcgcgccgggcgtcttgacgtccccaatgacgccgcgcgtcgtggacggacctccgcagcttccctctcgtccgttccgcagtccgcacggggaggggagctacagcgacctaccgccgaggcgggccccaaccgcaccacgcctacttcaaaccctctcccaccccacctcctgccgttctcggaggggatcaagttcgcttctgccagtctgcctgcgtgctctgctggacagctggagagctagatggcgatgccgtccgggtggaggggtatcctgggcttccactacggcatcgtgcaggcgccgttgggccccgacatctccggccccgagctcgtcgccgccgtagcgaacgccggcgccatcggcctcctccgcctccccgactggccggcgccggatcacgtcagagaactgatccggaagaccaggagcctcacgtccaagccgttcggggcggccatcgtgctggccttcccgcacgaggagaatctcagggtcgtcctggaggagaagctcgccgtgctgcaggtctactggggggacttccccaaccaccgggtccaagaggcgcatcgcgccggggttaaggtcttgcatcaggtcggcagccttgaggaggcagctaaagctaaagaagccggtgtagatgggatcattgttcagggacgtgaggcagggggtcatgtaattggtcaggaaggactgtttccactgttgccacgagtagtagatcttgtttcagactcgagcattccagttattgccgctggcggaattgtagatggacgtggctatgttgccgcattggcactcggtgcccaaggtgtttgtttaggaactaggtttgttgctaccgaggaaagctttgcacatcctatttataagcaaaagctaatcgagatgagtcacacagactacacaaatatattcggacgtgctagatggcctgatgctccacagcgggtcctggaaacacccttctatgatgagtggaagaataatttcccagaccaggaaacagaggaagatcaacccatcataggccactctatcatccatggtgtgcacaaggatattcgtcggtttgccggtactgttccaaacgcgacggcaacaggagatatcgacatcatggccatgtattcgggtcagggtgttgggctaatcacggagatcataccagctgctcaagttgtcaaaagtctggtcgctgaagcgaaggaagtcatcagagaaaagctttctggttaccaatagaatccttcctgaactgcaaactagaagtatctgtgtgtgagtagtcaccaatcagaataatcggaagcaccaaggtttaggtttgattcttgtgctatttttaagtacaataaagtaaaaaatgatgaaaataaacgagactaacaaaggtattctgtcagacatttgtgtgcgtgtgtgtgaaaatgtttcataatccatttgtgatcttggccatacataaattttgttattttaatttagctgtttcactactacattgcaaccatcagtatcatgcagacttcaat

SEQ ID NO: 88622 - DNA, 144 bp, Zea Mays
gcgcctcttactatcggtgtttgttcaggttttccaagtaagaaacatggattcatccttggcgttggtttataaaaataactcataagttagatccatgaaaaaaatattacgggggaataaatgccacacatgcaaaaaata

SEQ ID NO: 88623 - DNA, 3505 bp, Zea Mays
ttgatttgggtgttttgtgtgtccctttttctatatgattcttcatttagctaaaatgtgtgcgccatgctttccagccccaagggaagtcatttttctacttgcaaggatgtttctgcatacctcatggcacttcttgggtatccagagctcaaaccagccactaataagtatgaaagcacaggacaaccttactcgagtgctaacgatggtgatgatagtgctttatgttttcaagatcaaattggttcaattatggacaagacgaatgtgcattcaatttcttctcttaccttctccagctattccagtgatccaaatgatgtgaatgaaaggaacttaaacaaagcaaatgtttatcaatgccagaaatgcaatttgactttcggtgaccggacttcatatgcgcaacaccatttggcgtatcatgaaatgagtgttaagaggcgtaggactggcaagtttggtgagccagtagtagggaaagatggaaaatttgaatgccctatttgtcataagacctttgaggaggaaccacagtactttggtcatgtcggatctcatgcaagatatgaaggtttagctcctgaagcattcttggataaggctacttccagaagggcagctaatgattcattggcagaaattccatttagccttcaggaattgactgaatcacatggacagaacaacaaggtttcttatggtgaaaagggttttcagcaccacaatcattcaaataaacatggtgataataaccttacagccattgatctttttggtacaaattattcggataatttcatcaggccaaataaaacttggggtagtcctgaagagggaccttcctgtaatgatgctccaagtgtatctagatatacaaattttacaggccatgctgatgtgatagtttcagaaagggcatcaatctccaataatcaatctgttagcaacattaatggctttatatttagtgatcagccgggaggtaaccatgttgtcagacctactgcctctgtaacagccaatcattatgaggaccagattattgatcgtggcagggctgctccgaatgctgacaataatactgtgaaagcaagagatgtcaaccttaattcatgtgcaagtgcaagtacaatatctttccctattgcttatgcaaataatgaaacatcagctgcccttaatgaagctaatcggtcatcttctactgccaaatgttttagtggcagttttaataacaacgatggtgcatgtagtgcgtcttcctcttgtggaccaaccaataaaatatctagttcatttggcacatcaagcaaaacccaagctgctggctccagaagcattggtgcaagctatgaaccttatggtgaagattgtagtgcccttaaagctaacccttttgccagcaagaacaatacctcagtgtatcagtacaatttggccacacagcctgtctatgcagtggcagctagggcagattgttttgcttctggttcagagcagacaaaaaacagtgataaagaacttgcatccagtgccaagcaacggattgataacgtggagaacagaacaagtaaagaagcaggatttgtcgcggaagcttataatagtggtgcttttaatggtggtattaccgaaaagggttttgcacagatcagtaacagttttactcacataaagtccaatgcttctggctcttgttcactacctgaatcaaaaactccaacaaatggaagtgatagcaactgcatcaagggctctttggttaatagaggtgatgatagcttcacaaaggtctcaattgtcaatagacccatcaacaacaatgaatcaaatgtagctagacttgaggcgatgggaaagttgaatgatgagatgcaaaaccgctataactatcatgctcctggtattgaccctcatgttgcagctagtgctagccggaatgccaatggttttatgcctatgcaggccaattttggttgcatgtcctctacagttcaatctgttgttgatgtttcagtatccagcacatctcaagatcagtgtgatttgcaacttggatttggtgcacagaagcagcagatattttctaaccatggagagcttagaacggctacacctggatcccctctgcctgggagcattgccagaaaagattctgtacccactgaaccctcacattttgggagcatgaatggacctaaatcttttcccactggaacatctcagtttgggggctttgcaaagcctacttttgtgcctgctgcgccttctcagtttgggagcatggctcaagctaattatgtacattctgctcaatcctcccaattcacaagctgggttcaaccgaattctattcctcccgctgaatcctctcagtttggaagcaaagcccaatctagttctgtgccccctgctaatacctctcagttcaggggcatggctggacaaaattctgtacctcctgctcagtcttttgggagcacggttcgaccaaattatgtaactccagaatcctcacagtttgggagcatggccagaccaaattctgtccctccacagtatgttaacatgcccagccaaaattttgtgagctcatccgagccaacactggttttggggtatgcaccacagattggaagtggccctccacctcaagtacagttaggatgggatttgtccttgccaaggatggttactggcggcagcatggtcacttgtttatgtatatggtgcaacagtcagttccatcattttggccctgttgatggacagcagcccagttcttttggcttcatttgccccacctgtaaagataggatgtctggtcatcacagtgtgcccaacaatggttcatggcagccttgaggtgcagcgctgtctggttaatcatctgtattgctgcattcgagggatcttgtggttttctgtacactactcatgcctgtcgactgtcaaggtctgaaaatggtcttctcaagcagcagttgtccgtcctccaagttgagtggactgccaaggaatgaacggcatctctgtatcaacagtgtcagctgggagctggtgtagtagggtaatgagagaagctacttttcaagatagcaatgggagaccatgatgaatccaggccatatttatattttttcttgaatccaccagttacgttacgtgggaatgtcttgagttcactggttgcattacatctggaattttgctgccctcggatgacccagccacctttgcattgggctccgaggatgttgccactcagcttccccatgttttggtttactttgagttctagcagcgatgggagtggcctttgttattgcagtgtcttggtggctgtgtaaagtatgcgttagctctagctgtctcaggtttaatttgtccccattgaagtagttgtgcctttgtcgatgattgctcatttaagttgtgtatactcaagctgaaaaggctgaaggtaattgtaagtgttagctcgacgagcatagcctaa

SEQ ID NO: 88624 - DNA, 2093 bp, Zea Mays
ctgatccctatgcaatcgaacaaagccttagttgtttcattttgttccccttgcctccttagttgttttatttcgtttccccttgcctccttagttgttttatttcatttcccatatgtggttttatgactggataaatgagtaagatagatgctgctattcattacgtagatggcctttcaattcattattccacaagtcttgcatcagcatagcatgctggttattctgttctgcagaagcataatgcctctttgattatctaatgcgtttatgaactagtatatactacagcttggtatctgtcatcttggacatcaacagtctacgaaacccacatttgaccattatcagtttttctaaatatatgttagtagaaaaaatcattctgaaacctactaataaactttcatatggcatatagatctttgtgcccaatttgtaaaaccaattaaaaattcttttgatggttgtcttgctctcatatacccccttttaagcctaaacctttatgtgtttggtatgttcaccaattctttgttcttgatgttattagcatgtatcaaatgatttttgccacatgaatattcatgatctttaatgctgggtgaccatgtgaaattttgctgtttttttaagcagtgtgatttgcaacttggatttggtgcacagaagcagcagatattttctaaccatggagagcttagaacggctacacctggatcccctctgcctgggagcattgccagaaaagattctgtacccactgaaccctcacattttgggagcatgaatggacctaaatcttttcccactggaacatctcagtttgggggctttgcaaagcctacttttgtgcctgctgcgccttctcagtttgggagcatggctcaagctaattatgtacattctgctcaatcctcccaattcacaagctgggttcaaccgaattctattcctcccgctgaatcctctcagtttggaagcaaagcccaatctagttctgtgccccctgctaatacctctcagttcaggggcatggctggacaaaattctgtacctcctgctcagtcttttgggagcacggttcgaccaaattatgtaactccagaatcctcacagtttgggagcatggccagaccaaattctgtccctccacagtatgttaacatgcccagccaaaattttgtgagctcatccgagccaacactggttttggggtatgcaccacagattggaagtggccctccacctcaagtacagttaggatgggatttgtccttgccaaggatggttactggcggcagcatggtcacttgtttatgtatatggtgcaacagtcagttccatcattttggccctgttgatggacagcagcccagttcttttggcttcatttgccccacctgtaaagataggatgtctggtcatcacagtgtgcccaacaatggttcatggcagccttgaggtgcagcgctgtctggttaatcatctgtattgctgcattcgagggatcttgtggttttctgtacactactcatgcctgtcgactgtcaaggtctgaaaatggtcttctcaagcagcagttgtccgtcctccaagttgagtggactgccaaggaatgaacggcatctctgtatcaacagtgtcagctgggagctggtgtagtagggtaatgagagaagctacttttcaagatagcaatgggagaccatgatgaatccaggccatatttatattttttcttgaatccaccagttacgttacgtgggaatgtcttgagttcactggttgcattacatctggaattttgctgccctcggatgacccagccacctttgcattgggctccgaggatgttgccactcagcttccccatgttttggtttactttgagttctagcagcgatgggagtggcctttgttattgcagtgtcttggtggctgtgtaaagtatgcgttagctctagctgtctcaggtttaatttgtccccattgaagtagttgtgcctttgtcgatgattgctcatttaagttgtgtatactcaagctgaaaaggctgaaggtaattgtaagtgttagctcgacgagca

SEQ ID NO: 88625 - DNA, 1412 bp, Zea Mays
gcggtcatccgtcaggtcagggtcagcagcattctcccttccaaatgccgtcctccccgtggcctcccgctgccggagcgccgccgccgcagcagcgagcggcgcagggcacggtctccaccgtggcgccggagcgtctacccgtcgagggttcccgatctgggccagcgaaggaggaggacacggctcggcttccgtctgtcgactactactcagagctaaagaccctggagcatgcagagaaaaccaaaaaatatcagggtaagcttgcagcacggttgaaggccaaatatttttccaacaagacttttgaagaaggtaatttgtaacaactgaatggcctgctaaattaatatgaacatttgtttcacttattttgtgtcagacaatataacctgtcagttttgttatccagcattagctatcgatatgtagtccatcatatttcaggatgtgctactctcgatatgtagtccatcatcatactggtctgaatttcaaatgttttgcataaatcttgaggcacatttgaaggcatttatgctgcccttgccaactagtgtgtgtaaaacctaatctgaatcaagatcctgtcctacaaatgcaagttgacacactgatgatatgcagactgaaatccaatatttccttagtggccaagcataatattgttgaactgcaaaaattctggataatcatagcatgagtctatggatcacgtgttattagttgatcaataacctgatgccttaccattatgtgatattgtagtttcataagaaatgaatttctggttgccttccatgctttgtacaaaaaaacaagaagtttgatagccaacttgttttctttctcctttttttttctttttaatctggctgatcagttgactgcaagtggaatgtctacactggcaatgcggtcatatgtgttattctgattctctttaccgtgtttaccatgccgtgaacaggatatgtgtttgaagaaattgttatagaatcaaagaccgtccggttaagcaggtggtgttctattaatttgcatcttggagtgctgatctgaagtttcactgcagcaaccatcttttttttctccttcaggtggccgtttacaaggttgtttgcagatccagcaagattttgccgagaaaagagctctactgagaagggcatttctcgacctctggctggtgaagccatgccagatgactaggcacctcattaatatctgactcctggcatgtggcaactatccatcatgaccacccgacagataagaaccatagtttgcgtcactaacctgtatctgttatccttaaaatcagtgacctggagcttgtatattttcaacaggccaaagttaaaaccttatccagttttgaaccaaaggcaaattttcgttttgtagac

SEQ ID NO: 88626 - DNA, 743 bp, Zea Mays
gcggtcatccgtcaggtcagggtcagcagcattctcccttccaaatgccgtcctccccgtggcctcccgctgccggagcgccgccgccgcagcagcgagcggcgcagggcacggtctccaccgtggcgccggagcgtctacccgtcgagggttcccgatctgggccagcgaaggaggaggacacggctcggcttccgtctgtcgactactactcagagctaaagaccctggagcatgcagagaaaaccaaaaaatatcagggtaagcttgcagcacggttgaaggccaaatatttttccaacaagacttttgaagaaggatatgtgtttgaagaaattgttatagaatcaaagaccgtccggttaagcaggtggccgtttacaaggttgtttgcagatccagcaagattttgccgagaaaagagctctactgagaagggcatttctcgacctctggctggtgaagccatgccagatgactaggcacctcattaatatctgactcctggcatgtggcaactatccatcatgaccacccgacagataagaaccatagtttgcgtcactaacctgtatctgttatccttaaaatcagtgacctggagcttgtatattttcaacaggccaaagttaaaaccttatccagttttgaaccaaaggcaaattttcgttttgtagacatgcttacaggtatactgagacccatgcatttgcctatatctatatcgatattattcctcctga

SEQ ID NO: 88627 - DNA, 1445 bp, Zea Mays
acacgtcatggaggaagcacgcggtcgcacggaatgcgtagaattgcagggctctagttttatgtagaaaaaaaagaaaaaaaatgcctcccgaaacgaaaacacttccacagaggagagaggcccaggtcgaacaagattttttttcgattcccctctccagcatcgcaatcgcatccatggcttcctcgtctatccacatccaccatccccggcttgccggcgacgagatccaccggaccctggaggcctcctactcccccagcgcgtcctactgctccgacgatgccttcgtccccgtcttccgcccggatccgtccgccccctccgtatccgcgtccgcatcggccgaccgcgtccgcagccttttccgctccgtcgacgtagccctcttccgagatacgctcttcgcgcccggtcgcggcggcgacggcgacggcgacgacctcgggttcacggacgcggacgcggaggcggcggagtacgacggcgatctcacctccatcttctgggactgcctccagatcgaggacgccgacgatccgctcgctgcctcccccgccgaggagttcgagtgggaggaggtcgcgtctccatcgggcgccgccggggaagccccggagcccgagtgggaggtgctcgccgacgtgccgcccgccgccgccgaggaggggttcgtgtacacctcccaccacagaggcagagatgaggaggaggaggaggcggcggcgtacgaggtgctcgtagcaggcggggaggggctgttcctcaagaccaagcccccggccgccagatccgccgtcgaggcgctcccgtccgccgtcgtcgcggccggccaggaaggccagggggatgagtgcgctgtgtgcaaggacggggtcgcggtcggccagcgcgtcaagcggctgccgtgctcgcaccgctaccacgacggctgcatcgtgccctggctccaggtgcgcaactcgtgcccgctctgccgcttcgagctgcccaccgacgacccggagtacgagtcctggaaagccggccggaccgacgccgcgtgaaccggccaaccaggcagtgactgcatgctcttatggtatggttttattgataatgttgtatgtatgggttgggtttgaatcgggtgctttggttacaaggttgctactcagccgtatcaaaggcaaagtatagaggcagtagatgcagagatggtttttgatcggtttcctttttctccttaaagagagggactcatgaagtttttccaaatgaccgaggttggcatatacttgttagttgttactacgtattcctgctgtatttattctaaaaatccagagaggttagctggatatcttggtgcagggcagctgtatatcctgatgcaatgggacgatctacttgctagatattatgatgttacattttaactgatcgttgtttggtgactctct

SEQ ID NO: 88628 - DNA, 716 bp, Zea Mays
aaacctcattccaagctctcttcattggttcatagctagctagttcgcctcccaaaaacacctgccctcgtgcgtggcaggagcacgggcacgatgatcagcacagcgcacagccggcagcagcaccatgccttcgagaagagccctggcaacagccacatgaagagcatcgacaggaagctgcagcaggccatgagccaggcggccagcaagtacatgcagaggatctaccctctaggcatgcagaggagcagctccagcctcacattgtcgtcgctctcgctgtcgcagaactccaacgactcctccatcagcagctccaactccagctgggagcccaaggtgccgctgctctacggcggcaccttcagcccatggggcgacgtcatggtgtctcgggagatgaggcgggaggacgatgacaaggtcagtgaccatgacgtcgaaggaggcgaggaggacttggactgcagtgagccggggagcctgcgtaggtgcagctggatcaccaagaacagtggtaagaaattcagtagtgctagctaactttgtttatgtcagtccttttttgtttgtgatcttaattcatctatttagtattacctccgttctcgaatatttgtcgctcgctagtccattttaaactaaaacacaacaaataaaaaagaacggatagagtactttatttcacatgcactacattaggatggacagtt

SEQ ID NO: 88629 - DNA, 872 bp, Zea Mays
aaacctcattccaagctctcttcattggttcatagctagctagttcgcctcccaaaaacacctgccctcgtgcgtggcaggagcacgggcacgatgatcagcacagcgcacagccggcagcagcaccatgccttcgagaagagccctggcaacagccacatgaagagcatcgacaggaagctgcagcaggccatgagccaggcggccagcaagtacatgcagaggatctaccctctaggcatgcagaggagcagctccagcctcacattgtcgtcgctctcgctgtcgcagaactccaacgactcctccatcagcagctccaactccagctgggagcccaaggtgccgctgctctacggcggcaccttcagcccatggggcgacgtcatggtgtctcgggagatgaggcgggaggacgatgacaaggtcagtgaccatgacgtcgaaggaggcgaggaggacttggactgcagtgagccggggagcctgcgtaggtgcagctggatcaccaagaacagtgacgaggcgtacgtccagttccacgacgagtgctggggcgtccctgtgtacagcgacaagtatttgatttcgccaccacatttgcttctccctgatgaacgaatttgtgaactaataacttgaaactaagcttcatgctgtacgcacgcagccggctgttcgagcttctgtcgctgtcagggatgctgatcgaccacaactggacggagatactgaagcggcgggacatgtacagggaggcgttcgccgacttcgaccccagcgcggtggcgcggatggaggaggaggacgtggcggagatcagcggcgacagggagctgaggatcgccgagtgcagggtccggtgcatcgtg

SEQ ID NO: 88630 - DNA, 1530 bp, Zea Mays
aaacctcattccaagctctcttcattggttcatagctagctagttcgcctcccaaaaacacctgccctcgtgcgtggcaggagcacgggcacgatgatcagcacagcgcacagccggcagcagcaccatgccttcgagaagagccctggcaacagccacatgaagagcatcgacaggaagctgcagcaggccatgagccaggcggccagcaagtacatgcagaggatctaccctctaggcatgcagaggagcagctccagcctcacattgtcgtcgctctcgctgtcgcagaactccaacgactcctccatcagcagctccaactccagctgggagcccaaggtgccgctgctctacggcggcaccttcagcccatggggcgacgtcatggtgtctcgggagatgaggcgggaggacgatgacaaggtcagtgaccatgacgtcgaaggaggcgaggaggacttggactgcagtgagccggggagcctgcgtaggtgcagctggatcaccaagaacagtgacgaggcgtacgtccagttccacgacgagtgctggggcgtccctgtgtacagcgacaaccggctgttcgagcttctgtcgctgtcagggatgctgatcgaccacaactggacggagatactgaagcggcgggacatgtacagggaggcgttcgccgacttcgaccccagcgcggtggcgcggatggaggaggaggacgtggcggagatcagcggcgacagggagctgaggatcgccgagtgcagggtccggtgcatcgtggagaacgccaggtgcatccagagggtggccagggagttcggctccttcagcggctacatgtggggccacgtgaaccaccggccggtggtgggcaagtaccgccaccacaagtacatcccgttccggacgcccaagtcggaggcggtgagcaaggacctcgtccgccggggcttccgcctcgtcggccccgtcatcgtctactctttcatgcaggccgccggcatggccatcgaccacctcgtcgactgcttccgcttccacgactgcgtccgcctcgccgagcgctcctggggcatcaccaacgtcgccgcgtaggcgtagccagccggcccctcaatatctgtgcatgcatgcctctccaagtttttcacaccttcttcttggtgttgttattgtttttttgtttggagatcggaattgtgtgtgaaattacgtagagtatgtactctactaagttatgatgtaatacttctattaactctttgccaatgaaaagtagtactgaactaataggactgcatgcaagtggcttcggccttctgcaacagcagcaagccgcttctttttttttccatattaaaaaaggggaaattaaatctgcactattaaaaggtttgaaatttagatcttatttgagactgctccagctccagaaatgttcggtgggattgtgtgtgaaattgtatagagtttgtatggtaagttatgatgtaaatgtaatacttctattaactctttgccaataaaaaa

SEQ ID NO: 88631 - DNA, 1261 bp, Zea Mays
cttcattggttcatagctagctagttcgcctcccaaaaacacctgccctcgtgcgtggcaggagcacgggcacgatgatcagcacagcgcacagccggcagcagcaccatgccttcgagaagagccctggcaacagccacatgaagagcatcgacaggaagctgcagcaggccatgagccaggcggccagcaaaactccaacgactcctccatcagcagctccaactccagctgggagcccaaggtgccgctgctctacggcggcaccttcagcccatggggcgacgtcatggtgtctcgggagatgaggcgggaggacgatgacaaggtcagtgaccatgacgtcgaaggaggcgaggaggacttggactgcagtgagccggggagcctgcgtaggtgcagctggatcaccaagaacagtgacgaggcgtacgtccagttccacgacgagtgctggggcgtccctgtgtacagcgacaagtatttgatttcgccaccacatttgcttctccctgatgaacgaatttgtgaactaataacttgaaactaagcttcatgctgtacgcacgcagccggctgttcgagcttctgtcgctgtcagggatgctgatcgaccacaactggacggagatactgaagcggcgggacatgtacagggaggcgttcgccgacttcgaccccagcgcggtggcgcggatggaggaggaggacgtggcggagatcagcggcgacagggagctgaggatcgccgagtgcagggtccggtgcatcgtggagaacgccaggtgcatccagagggtggccagggagttcggctccttcagcggctacatgtggggccacgtgaaccaccggccggtggtgggcaagtaccgccaccacaagtacatcccgttccggacgcccaagtcggaggcggtgagcaaggacctcgtccgccggggcttccgcctcgtcggccccgtcatcgtctactctttcatgcaggccgccggcatggccatcgaccacctcgtcgactgcttccgcttccacgactgcgtccgcctcgccgagcgctcctggggcatcaccaacgtcgccgcgtaggcgtagccagccggcccctcaatatctgtgcatgcatgcctctccaagtttttcacaccttcttcttggtgttgttattgtttttttgtttggagatcggaattgtgtgtgaaattacgtagagtatgtactctactaagttatgatgtaatacttctattaactctttgcc

SEQ ID NO: 88632 - DNA, 1652 bp, Zea Mays
ataatatgaagattgaactcttgtttgtcttcttcttcctccctcctcttgcattgctattgttaccccttccccttcgcttgccacatctgttctcctgagtggtaatccgagcacacggcgccgtgcgaggactgcttcctgcttcttccggtcgcgcccgacccggccgcagaatcagatccggtgccactggtgccttccctcctcctcatcgaagctttggggcccgtcgctgcctccctgcatcgcaccctgttactgccttctgcgcgagagatatggttgggaacagtgtgatgtggcaacacctggaagtggaggatctccttctctaccacaaggagaaaatccttctttactacaaggagaaaatccatgagtcggggagggcctttgttctaagggaggtccatcacgaagagtgtgctcggaggcttaatgagaagtatggtgctaacttcacgtggaaacaaacctacaacaagtaccacaagctgaaaggagaatggaaggtgatcatggaggcgaagtctgctaggggtgctggttttgatgatgttcagaagaagataacctacgacgagatcgaggttgtcaagatgaaagctaaaggcgacaagaaggctaagtactacaatgttccgatccccttgtatgatgagatggagtttgtcttcacggggaaacacgctactggagagttcagtgttattgaagcaccgtttgatcgctcaggaaggcaagaggatgatgccgttgggaatgtcaacctagatcaagagccagcagatctgaatggtgactcttctcaacacgatttcgacaccctcgcagagtctgatagtccgaacccagtaggctcgaagcgcaggcacgaggagaaggagaaggagaaggagaaggaatggaaatgggctaggcaaggcgtccccatcttcatgcaggccctgtcggaagctgtgagctttacccacggtggcacggacccatacgagggtatttacaaagccattgaagacatggatgagtatcctttgccggcacgccttgatctgctgacctatcttgctcagaatcgtcacattgccagcatgttgaagggacggcaggaggaaactttcaagcaatgggtggcacgatgggttgctggtcactaccctttgtgattcgtgtttgaagctcaagtcgtcttatgattcgtttgcgctcggagtagggtctaacttgatagggcaagatgcatattttggccgtatgtaaactatgcatggcagaatgtatagttttttttcctgatagtatgaaactagatagtgagtgttactaggcatgcatggcgtgttgaggtgagggtcatgagataatcacttcatctattattatactactaggagaagagagcttaacaaaagacctactttatcttgttcctataagattttgatggggatgagaatccaatagaatttggcttcgtgcagacgatcgatcactgccactgcaataataaacgtcacatggaatgacaaccatttgtcaacagaggaacaagcgaagcaagccggtatatttatacaaagtctcacatactgaatattccatctagcaacagaacgacacctcgatttatttctgtgtctttgttttta

SEQ ID NO: 88633 - DNA, 265 bp, Zea Mays
acagcgaattgttcccatttctgaaatacggagaacagccttcacagaaaaacacagccaatgctacatacatcggactgcagtgtacaacagaacagccttcacagatttactcttgtttacattttggaagctaacttaattacaaggtgaactgacaaaataacaaaccttgcataactttgtgtacctaaaaagttacatgaagaatatctgtacagaaacttatgttacacagccacaccagtatcaaaaaatagtgggc

SEQ ID NO: 88634 - DNA, 774 bp, Zea Mays
atggccactccgatccgccctgctgccgcggctcctcctgctcctgcccgccctccgcagccaatgccgccgccgccgccgccccaccacgacacgacgctcacgctgtcgctcgcgcttccgcccccgcctccgccttccccgttcgcccgcgcccgcggggtcgcccccaggccggcgccgcggccgccggacgtcgtcgtcgcccggccggcggcagtgcggtcgtcgccgcccgcggggggcacgccgccgtgcagcgagtgcggcaagcgcttctcgtcgtggaaggcgctgttcggccacatgcggtgccacccggagcgccagtggcgcgggatgacgccgccgccgcacttctggcaccagttcaccgtgcaggagcgcgagaccgccacgagcctgctcatgctccgcggcgaccgccccgcgggtgctgctggcagcaggggcaggaagagtaccctcggcgccgccggcacgtcggcttcttcgtcgctgccaaggtgcgaatgcgatgaccacaagtgtagcgtctgcgttcgaggcgggttcgccaccgggcgggctctcggcggccacaagcgctgccactgggagaagacggagggggcgccgccggcggttgctacgtgtagtggagacggattcagcgcatcgtcgtcgcaagcagcgccggccaccacgctggacctcaacctgccgctattgccacggaagagcgatcaagacggcagtttggacgcgacgttggatctgaagcttgggttctaa

SEQ ID NO: 88635 - DNA, 1242 bp, Zea Mays
ccgtcggatttgagagagaggcagatccaacggttgcaaataaacatgccaaaaatacccgcccattttcggcctccgtatggcgcgcaccaccccatcggctaccgccctcgtcggcaggccgcaggcggacgagaggagaccatgcactcaacatgccgcgacgcagagagacaaacagagaccccccaaacatagccaccgactccaccgtgctcctctcatcgtcgcttatatatagctcccgtggcgacgctagctaccttccatgtgttgtgacaccgccacacactagtcggggaaaacgatcgaacgagcacaggcacgcacgcaccatggcccgcgctcttgccctctccgccttcctcctcgtcgcctccgccgccgtggctttcgccgcggaggccccggcagcctcgccgaagcattcggcctccacgccgtcaaaggcacccagcagttcgcccgacaagtctgagaaggcccccacggcgtcgcctgagaatgctgcagagacaccgaaggcaaccccggccaaggccccggcgacggcctccaagtcagaggcgtcgccttccgaggcgcccgactccgggtccagcgctgcgtcacctactagcgagagcgccgcgtcagagaaggccctcgccggtgcccccaaggactcgtcggccagcccttccgcgtccccgtccgaagatgaagccgccgcatcgcacgatagcagcagcggcggtggcagtgccgcctcggaagagccgtcgacggccgaggccggcggcgaatcagccgatagtccacccgagccagcccatgctttggagtcaccagcagagtctcctggcccggccgctgaccacgagagcggcagcccgagcatgggcaccggtatcgtcctggccatgctggccgccgctgccaccgcgatgcttcctttctagatgaccatggtggctttgagctagcatcatagtcacagagcagcaattcttctgggaatctatgttctcatggtcatgcatgggaatgggagtcgatatgactacgcttattaggagtttatgaatttctcctcaagatatctaggcctttgtttcatcctttgggactggttggttaacttttttgcatgtttttcttcgtttgtaatttgaatgacaatcaatgaatttattgtgtagttgtatttgatttgttttttgttgtatgcatgtaatatattattagagcacttgtttatct

SEQ ID NO: 88636 - DNA, 219 bp, Zea Mays
atggctcgtgcatgtgtgttcctcgtcgtgctcctcctggccgccatcgcggtggcaccgttcgcgggcgccgcacgcgtggacgtcgtggagggtaggtccatggcatccgccgatgcaccggaggcggcggccgatgctcccgctcctagccccgactccgcctcatccccagactcatcgtcagaggcgccctccagcagcagctcctccgactag

SEQ ID NO: 88637 - DNA, 459 bp, Zea Mays
atgatggtcatcgcttcagttgtcaccaccttgtttgccgttctacttcttttctctctcccctcatgcctccaccttcgcgccaccccattttcaacagagggcacatcctccccatattcgtccgacaccaaccccgacaccgactcgcacagtggctattgcacgtccacgaggacgtttcacatcatgcgcgcaccatcgttttctccgtcgtcggacgtcccgttcgtcttcccggccttcgccctattcttcctccccaacctacttcctccgcccacggtcgcagctacgagccaatcgacgctcatcgacgtgggtacggggcgagtcggtcatgctcctggcctttctttatgcttgtcgtcgaggaggacatggtggcgcgtgtcacgcttaggttatcttggcgatgaggagtctaggtctgagatattgaacaaccaaggctcgtag

SEQ ID NO: 88638 - DNA, 965 bp, Zea Mays
atcgcagtcgcaacgaagcccccccacacacaaaaaagcaaaagcatcatcacaataatggcccgcgcgtgcgtgttcctcgtggtgctcctcctggccgccgtcgcggtggcgccgtttgcgggggctgcgcgcgtggatgtcgtggagggcaggtccatggcgtccgccgacgcgcctgaggcggcggctgacgcgcccgctcctggtcccgactccgcctcatctccggactcgtcgtcggaggcgccctccagcagcagctcatccgactagccgcgcacaacgcagttcttgtcatgatctatctagcaaataaaaaagatcatgtctcatttgattatctggaataactaatagtatatatgctgtgccccggatgatatttaaatatgtgcatgaaatgcgtgcggcaaacgcatggaatgtgcttgccgcctagctaattgttgttgtttcttttttcttctttacttttcttcatatctgtctctctctctcggttgtttaatttttcttcatgcatgtaatataataatgtgatatacccaatatatgcaacgcgctttaattctgtggtgacgatgacaccattttctcggtttattttatttgaacagacagagcattgtgttattttacagttcttgttcttgtatccagcagtttgccttttgccgcgctgcaacgtaggccgcgtgccacatgcctcattgccgccaagaaacaaaacaagcaaccaatgccatacacatggatgtcccatattactacgtatatacagagcaagcatgtgatggctcgctggaccacccacctctctctcgatcgcctatctgacatgtatccattactaggacgtgatagtgatgcgtgcatgtcgtcccttacccaactttgcagccaattgtaagctaagtgattttcatacttattattattaataatacggtcagtcttgggct

SEQ ID NO: 88639 - DNA, 2633 bp, Zea Mays
gtcacaggatgaagacgacgatggcgctttcttaacctgtcacttgtggctttgcaggagctactagctagctaccaatcaacacggcccctaattggcctgtccatcttattggttgctgtgtgggggcgccccggccctggcccctctacagaaaagcctgcttgcttttgtttgcttataaggacccccaaatcttaggtgagaggttggcaagctgtctcagaatggagccggtggagcctcagcagcaagtggagctcaaccgcctgaatgccagctccaggccaggcaccaatggcgggagtgcaagaacagagaaagaagaggaagtagacgactgccccatcgaggaggtccggctgacggtgccgatcaccgacgacccggcattgcccgcgctcacgttccggacatggttcctggggctcctctcctgcgcgctgctggccttctccaaccagttcttcggctaccgccagaacccgctgtacatctcctcgctgtcggtgcagatcgtggtgctgcctctcggcaagctcatggcggcgtgcctccccaccaaggccgtccgggtcatgggccgctccttctccctcaacccggggcccttcaacctcaaggagcacgtcctcatcaccatcttcgccaacaccggctccaactccgtctacgccgtcggcatcatcaccatcgtcaaggccttctaccaccgggagatccacccgctggccgccatgctgctcacccagaccacgcagctcatggggtacggctgggccggcctcttcaggaagttcctcgtcgactccccctacatgtggtggccggccaacctggtgcaggtctccctcttccgggcgctgcacgagagggagaccaggaggcccaggggaggcaccaccaggctgcagttcttcctcaccgtcctcgccaccagcttcgcctactacattgtgcccaactacctgttcccgaccatctccaccgtctcggtggcgtgcctcgtctggaggcgctccgtcacggcgcagcagatcgggtccggcgtgtacggcctcggcgtcggcgccttcggcctggactgggccaccgtggccgggttcctcggcacgccgctgtcgacgccggcgttcgccatcgccaacatcatggcgggcttcttcctcatcgtctacgtcatcgtccccttcgcctactggagcgacgcgtacggcgccaggcgcttccccatcatctcctcccacgtgttcatggccaacggcagccggtacgacgtgaacagggtgctgggcgccggcacgttccagttcagccaggccggctacgacggcgccggccagatccacctcagcatcttcttcgccttcagctacgggctcagcttcgcgacgctggcggccacgctgtcccacgtcgcgctctaccacggcaggtccatatgggagcagaccagggcgacggtgcgtgccgccggcggcgacgtgcacgcccggctgatgaggaggaactacgccgccgtgccgcagtggtggttccaggtgctgctgctgctcgtgctcggcctctcgctcttcacctgcgagggcttcggccgccagctccagctcccctactggggcgtcctcctggccgccggcctcgccttcttcttcacgctccccatcggcatcatcaccgccaccaccaaccagcagccggggctcaacgtcgtcacggagctcatcatcggttacctctacccggggcggccgctagccaacgtggcgttcaagacgtacggctacatcagcatgtcgcaggccatcatgttcctgcaggacttcaagctgggccactacatgaagatcccgccgcgctccatgttcgccgtccagctcgtcggcaccgtgctggcgtcgtcggtctacttcgccacgtcgtggtggctgctggagagcgtgccgggcatctgcgacccggcgaggctgccggaggggagcccctggacgtgcccaggcgacgacgtcttcttcaacgcgtccatcatctggggcgtcgtcggcccgctgcgcatgttcggccgcctcgggctctacgccaagatgaactacttcttcctcgccggcgcgctggcgcccgtgcccttctgggcgctggcgcgcgcgttcccggacagcgcatgggcgccgtggctccgcctcgtcaacatgcctgtgctgctgggcgccacggggatgatgccgccggcgcgctccgttaactacctcatgtggggcgccgtcggactcgcgttcaactacgtcgtctaccggcggtacaaggcctggtgggcgcggcacaactacgtgctctccgcaggcctcgacgccggcgtcgccttcatgggcatcctctcctatgccgtgctgcagtccaggggcgtcaatggcatcgactggtgggggctgcaggtcgacgaccactgcgcgctggccagatgccccacggcgccgggagtccgtgcgcccggctgccccgttcactagacacactcaggcaccacccagggtattctataccggaagcagtagtaatagtagtatagctaatctcatctcatcagacagaaaaatatcattatatcactgaaacaaaactcggaacaatgattg

SEQ ID NO: 88640 - DNA, 3532 bp, Zea Mays
atgaggttgtctgttcgtgtgatcgaggcccgcaacctgcgggccatggactccaacggcttcagcgacccgtacgtgaagctgcagctcgggaagcagcgattcaagaccaaggtgatcaagatgaacctcaacccgacttgggatcaggagttcagcttccttgtcggtgatatcaaagatgtgctcaagcttgatgtctatgacgaggacatcctccagatggatgacttcctgggccatttgagggtgccattagaggatgtgctgtctgccgatgacttgtcgcttggtacccggtggtaccagcttcttcccaaaggcaaaaccaacaagaccgtcgactgtggggagatttgtgtctcaatatcgttagaatcatctggagcatcacgatcatggtctgaggaccttggagatgaaattactgatatacagagagactattcactgtcaagccaaaacacggctccatctatttcatttgcttatcgagaaactgaaatttgtgaagaagacgatgagtattctgttacatctgaaattcatgcagaggatagaagtagtgaagttactgatagaaatcaagctgctgcagaggacaagccaaatgggaattctagtgcagatttgaatggaactgaaacttctagtggtgaaacagataagtctgataagctatcatttgttgatcgtgtctaccaaatatttgctaagaaaaatggcgatacaatgccaacctcctctggaagctctgaggctttagaagaagttcaagaggaagcaagtggatgtgagcttctggtcagtcaaattgataatgtgtgcccagagactccattcagtgaactactgagatctcttgaattgcgacatgaaggagtcgatatgcctgtaaatctacaaggaattcttgttaatcagtcgtatcttgcctcacctagtgatctgaataaccttctcttctcaccagattcagattttaaacaaacaatggttgagcttcaaggctgtactgatttcaaaactgaaccctggaggcttgataatggtggggagtccttaaagagagttgtaacatacacaaccgcaccatcaaaattggttaaagctgttcacgcaacagaggagcagtcttatttgaaggctgatggaaaagagtatgcagttttactgagtgtgagcactcctgatgttccatgtggtacttattttcggacagaaattcttttccgtatcatgccaggtcctgaacttgattcacagcaacagacatcacatctgagtactatgataaaaagtatgatagaaaatggagcaaggcagggcttggagcaaaactatgcacagttttcggatttactatcacaaaagatcaagcctattgatgtagaaggttctgggtctgacaaggaacaggtcttggcctctttgcaaggaggcgaggaatctgattggaagatagcatttctgtacttctgcaactttggagtcttatcctccttttttgtgtctctttacattattctgcatgttctacgagtgaatccaagtgctgttcaaggccttgagtttccaggattagatctgccagattcgctcagtgaaattatcatgggtgggctgttgtttcttcaagtacagcgcatacttaagaatattacatgttttcttcaagcaagagaacaaaaagggggtgatcatggcatgaaagcaaaaggtgatggatggttgttaacagttgctttaatcgacggaatcaaattggctccagtcgatgctactggtttatctgatccttatgtggtatttacttgcaatggcaaaacaagaacaagttcaattaagttccaaacactagagcctcagtggaacgaaatctttgaatttgacgcaatggatgatccaccgtcggtgatgagtgtacatgtatatgattttgatggaccattcgatgaagttacatcccttggacatgcggaaattaactttgtaaaatcaaacttgtcagagttagctgatgtatggattcctcttaaaggtaacctcgctcagtcttggcagtccaagttgcatctgaggattttcttgaacaactcaaaagggaccggcatggtcactgagtatctgagcaaaatggagaaagaggttggtaagaagatgacactgaggtctcctcggaccaatactgcattccaggaactcttctctttgccagcagaagaatttctcatcagcagttttacctgctacttgaagaggaaattgcctacacagggtcaagttttcttatctccaagaacaattgggttttattcaagcatgtttgggaggaaaacaaaattttactttctatgggaggatattgaagacatacagggaatacctcaatcaatatcatcatggagtccatccattataataactcttcacaaaggtagaggcatggatacaaagcatggtgcaaagagcatggacaatggaaagcttaagttctgcttgcagtcttttgcatcatttagtgtggccaataggacaataatggcattatggaaggcaagatctctgagcacagagcttaaagtacagcttgctgaagaacaatcccaaattaacacccttcagagtgaggacagtggggtctttgttggtattgaggatgccaagagccttcagatgactgaagttttctcctcgaccatttcgaccaatatggcctcgcttatggaggtgtttgcaggaggatccttggaaatgaaggtaatggataaagttggatgccagaagtactcggctacacagtgggaatcagataaacccaatgagtatcaacgacaaatccattacaagttcagcaagaagctgtctcccgttggcggagaagtgacaggaacccagcagaaatctcttatgcctaataagaaaggatgggttatcgaagaggtgatggagctccaaggagtccttcttggcgacttctttacgctccacatcaagtaccaggtcgaggacctcgctcccaagcaaagagcaagcaatgtgcaggtctccctgggaatcgagtggtcgaagagtaccaggcaccagaagcggatcgagaagaacgtcctttccagttcgtccgcccgcctaaaggagatgttcaaccttgcgtcgagggagctctcgcacgccagataggcggcggagcgtaatggcctttcgacgtctcacccaccgtccctgtgcataacaacaacaggaccgatcattgagtgaacatttaacacccactaactgtatatggaaagcttggctgaagactgacagacagcaacgccaagaagaagaggaggaggtactgtaggatagctcgatagacaacgatatagctgtatgttctgcttgcaagttgttctctctgcttgtagcagtatgggttgccctcaggtaggctctgaatgattctttggtcacaacacacaacacatgttggaattatacacagtacacgtccgaggctcaagagatggaacaaagctatgaagtttac

SEQ ID NO: 88641 - DNA, 513 bp, Zea Mays
agtctcactcgagcacccgcgcggcgccctacccaacccacgctattctcggcccgctcgccaccgctgcacgcgccgccgccgcatctccagcccccgcgccgctcctcatcttacctgggctagctacagcgacacctgcgtgggtggtggtgtccgactacttcattactcactggccgtccattgcagccctaagcgcggttcccttccagctccgctgcggggagcctggtttcgctcgtgatgtcgccggccgccggagagcagctctctggagcccaccgagagggcagggccgtggaggcgcggagggtcttcataggcgccggctgcaaccgcgtggtgaacaacgtctcgtggggagcctgcggtctcgtcgccttcagcacccagaatgccgtcgccctcttctcccccctgagaggtgagatcgtgacaactctcccggggcacaaagcgccggttaactgcacgctatggcttcccacgaagaaggatgtgctccatggt

SEQ ID NO: 88642 - DNA, 3757 bp, Zea Mays
cagtggtttcatgcgttgcagctcccaggaatgcataagaaagggatcacctgtcttgctggaaggatggtgtctgatactattgcaatttttgcttctacttcttcggatggtattgttgttatttgggagatggcaattgagcccaccactggtggcgattgcaaagtgacttgcttgcattctctgtccgttggtttgaaaccaatggtttcactttcattagctgtattgccaggacaaggaggctatctcattttggcgatgggcggtttagatcacaagatccacatctattgtggggataaggcaggcaagttcattaaggcctgtgaacttaaaggtcattctgattggatcagaagtttagatttttctttacccgtgatgatggacggtgaaaggcacaaccttttccttgttagctcatctcaggacagaaccattcggatatggaaaatgacttcagaagctgctgcttctggctcctccttacaattgaggaaagaaactattgagatgacctcctatattgaaggacctctatttgtggccggcagtacaagctatcaagtatcactggagtctcttcttgttgggcatgaggattgggtatattctgtagagtggcagccacctacattgttaactggggatgaagctcatcagccaatgagcatattatctgcatccatggacaagatgatgatgatatggaggccagagaaaactactggcctttggattgattcagtgactgttggtgaattaagtcactccgcacttggattttatggtggactttggcagcctgatggcagatccattctcgcacatggttacggtggatcctttcatatgtggcgagatgttggactggattctgaaaattggcagcctcagatagtcccgtccggtcatttcgcacctgtgtctgatttgacatgggcaagatctggccaatatttgctatcagttagccatgaccagacaacacgcatatttgctccttggagaaatcaagttaaccctggagacatgatctattggcgtgaaattgcccgtccgcaaattcatggtcatgatctcaactgtgtgacattcattcagggtagtgggaaccatcgttttgttagtggtgctgatgaaaaggtctctagagtctttgaagctcccttatcatttttgaagaccctacaacaagcaactctgttgaaacctgacatctccgaggattttgacaatgttcaagtccttggagcaaatatgtctgctcttgggctttcacagaaacccatatatacacatggagtcaaggaatcctcaatcagtaattctaacgatggtccagattctatggagacaattcctgatgcagtgcctactgtattcactgagcctcctgtggaggaccaacttgcatggaatactctatggcctgaatcgcacaaactatatggtcatggaaacgagctcttctctatatgctgtgattatgaagggaagcttgttgcttcatcttgcaaggctcaatcagcagcagttgcagagatctggctctgggaggttggaacatggaaagctgttgcccgcttgcaatctcacagtctaacagtgacacaaatggagttctctcgtaataatgcgtttcttttaagtgtttcgcgggatcgccatttgtctatcttttcaatcaggaaaactgaaggaggagcagagcatcgtctggttgcgaagctcgaagcacacaaaagaattatatgggcatgctcatggaaccccttcggctatgaatttgcaactggatcaagggacaagagtgtcaagatatggtgtgttgaagatgcatcttctgtcaagctacttgcaacattgcctcagttccgtgacagcgtaactgcattagcatggatgggccgtgaccgtgcttctaatgctggtatcgtcgctgctggcatggacaacggattgatcgagctctggagcgtttcaggtggaagagcttcttcaggaacccagctcagcgtggcatgcgtgcttcgatttgaccctctcttgtgtcacgtgtcaactgttcaccgattacggtggcggtgctcaaccgatgagaaatcgacacttgagctcgcgtcttgtggagctgatcacactgtaagggtgtttgaggtctgcggcagcatataggtttatgtccaacctagtaaatcaaaactgttatgtgcgtggcaggtttttattgatatcggacaccgttgggttgtaaaactagtcctggtatgagaatcgagaaaagagtgttttcatgaagcatgtgctgtccatatgtaaccccagtttagtggtaatagattcagtgttgccctcatttgagaagctatgaaattatggttatagatggtgatgtatttgctaaatcacctatatccaaaactctgtgtatcatctcaatctgcaatcaatacaaattcgagaaaaaaaatccactgtaccgcttacactcaagcaaagagttctatgctgtacattacacactttgttgaactctgttcaggttgcttacgatctaagctactgacctactgtgtgttgcagctagccactaggacgcagcaacaactgagcagccaagagatcgacaaagctgaagaaccaacttcgaattcacatgaatcaacaataggtatgttccgctgttctcgggccatttccatcatcagtataaaaaatagctaagattttatatataataacaaaagaaaacgaggggaatttttctagagccagtcattttgttgtgcatctccgggcaacaagaactccagaaggaggggcagtgagttccagctgacagaccgtgtacatccagtacgagtagtggccgaacctgaacctggcctccactttgaaggcgcctctgattgtgtacaccaccctgttgctcctcacctggtccaccatctttaccgccacctggggcggcagcaggacccggctggagagcaggtgcatgttcaggagctgggactggcctcgccgctgcgcgaacggaggcagcgcctgcacggccatgggcctgtcctggaagaagagctcgacagtggcggaccggaacaccaagtcgatctccctgttggggttggagatgttggcaacgagcgtcatgtcgttgttgaagtagggggccggcgagtccacgtagacgctgttgaggatggcgttagcggcgtcgaaggacggcggcctcggcttcaccgccaggaagacgaccagggtgacgacgcctgcgacgatgaggaggatgctgaaggcgaagcaagcgatggccgcgcaccacatcgccggcgaggtccgctggcgcggttgcaggattaccttggaaggcgcccgcgctggctgccggggcgcctgtggctgcctggttatcgtgggtggatccaccggctgcgaccgtggcagcaccggtgtctgctcggtcacctcggactgatccaccggcggcggcggcagctgtggcagggccggtggcagctgcttcatgctcattaccttggttatgatggttcttggtgattggaggtggtagggagcgcccatttcggcaacgccacagctaccaagttcaacaaggcaaagaagctcaagagtgcagagaggcctattgggggaaagcaagctagagaagagcagcaacaacaacagcaacgagaggcagccagggaatggacaatggagtggtggagttaaaaggagtctgatc

SEQ ID NO: 88643 - DNA, 1250 bp, Zea Mays
tctctgcaataaagatgacagttacttgtctctgccatttgtctctctcaattctcatttgccactgagtatacttcaacacgttatcagcacttttgcttggcagaacagagagaagtggttgttgaaaggaagaagaatatgccgctcacaagaagtaaaaaaagaggggctacgatctccagaaatcgtaagtacgatgtacagttcctcttcatcttctaaaaataattatgttggcggtggcacttgcgaagacatccgcagtcacgttgggtgaccatggccggtgaggccacgtcgccagggccatgctgcatgtgcccgcgccagagtactcacgtcggggctactaccgagcgtcgtggccacgtgcccgctccgccgcagccgtgcgccctagcgccggggtctgcctgcgcgtgccgcctgggggccacgcgccgaggccgtgcccgcccaccgccgcggggcctgcgtcctggcaccgccgcgaagccgcgcaagccagatccgcgcgttgccgcgaaacgcacaccgcgggcgccaatcccgcgcgcgccatggacgggtggccgcgcccgcgcctgggctataaccgggtctcgcgcccgcgtgcgccgtggcccacacccgagccgccggggccggggcgtggccgccgcaccacggggagccgccgggaccgcgctagccgagcgcccacgcacagccctcggggccgcgccctccatcgggcctaggccgcgctcgtgcctcgccggggctgcgtgcccgtaggctccgccaggggctgcgcccgcgcgccgtcgaggagccacgcccgcgagccgggggaccgcgcgctcgcctccgtggctaaggccgcgcctgctggaggccgtgcccgccgcaccgggggccgtccacgtcgccagagccccactccgcgcgcgtcggagccgaggacgggggccgccgcgccgccgagggccgcctggctcacgtgctggggctcgtgcccgccctggccgatggccgcctggctcagagccgccccgaggctgagcccttgccgcggctgcgcttgcatccggtcggggcagcacccgcccaatcgcgccgtggccggagccgatgtgcccgagccaggccggggctggtgccgcgcgcccgcgccgcgcagaggccaccagtgcctggccggggccgcgccgtctgaggagagtgctaggcggcggccgcctctgcccacggaggccaacggttag

SEQ ID NO: 88644 - DNA, 2415 bp, Zea Mays
gccggccggaccacccagagccagaagcgcgtcgccagccaactatcgccgctgataaccaacccaatccaacctaacccaaccctgctctctgccgacgcggattcgaatccgaggacgatcgatgacggtgggcgccggcatcgccgtccaggacggcagcctcctggcgctgggcgccaaggtcctgcgggaggtgcgcggcaacgtgctcgtgacgccggccgccggcgggggcctaaccaacggcgcgttcctcggcgtccggtccgcgcccgccgccagccgcagcatcttccccgtcgggaagctccgggaccagcggttcgtgtgcacgttccggttcaagatgtggtggatgacgcagaggatgggctccgcaggccgcgacatcccctccgagacgcagttcctgctggtggaagggtccggcggcggcgagcagcccgtcgtgtacaccgtcttcctccccgtgctggagggctcgttccgtgccgttcttcaggggaacgccgccgacgagctggagatctgcctggagagcggcgacccggacgtggaatctttccaaggctcccatctggtcttcgttggcgccggatcggacccgttcgaggtcatcacaagttcagtcaaggctgtcgagaggcacttgcagacgttctctcacagggagaagaaaaagatgccagacattctgaactggtttggctggtgcacgtgggacgcgttctacaccaatgtcaccgcccagggagtgaagcaaggattgcagagcttggaaaaaggcggggtctctcctaggttcgtcataatcgacgacggatggcagtccgtcgccatggaccctgtgggaatcgcttgcctatctgacaactcagccaacttcgcaaacaggctgactcacatcagggagaaccacaagtttcagaaaaatggcagggagggtcacagggaagatgacccagcgaagggcctagcacacgtcgtcaatgagattaaggggaagcatcagctcaagtatgtgtacgtatggcatgccatcaccggatactggggcggagtgaggccgggtgcagctggaatggagcactacggatcaaagatgcagcggcccgtgccatcgccgggggttcagaagaacgagcgctgcgacgccctggacagcatgacggccaacgggctgggcctcgtgaaccctgacagggcgttcagtttctacgacgagctccactcgtacctcgcgtctgccgggatcgacggggtgaaggtggacgtgcagaacgtcctcgagacgctgggcgccggccatggcgggagggtgatgctggcgaggaagtaccagcaggctctggaagcgtccgtcgccaggaacttccctgacaatggcatcatatcgtgcatgagccacagcacggacaacttgtacagctcgaaacggagcgcggtgattagagcctctgacgatttctggccgagagaccccgcttcccataccatacacgtcgcgtccgtcgcttataacaccgtctttcttggggagttcatgcagccagactgggacatgttccatagtgttcatcccatggctgagtaccatgctgcggctcgagcggttggtggctgtgccatatatgtcagcgacaagcctgggagccatgacttcaatctgctcaagaagctcgtgcttcccgacggatcgatcctgcgcgcaaagctccccgggaggccaaccagagactgcctcttctctgaccccgcaagggacggcaaaagcgttctcaagatatggaacctgaacgaacactccggcgtcgttggcgccttcaactgccaaggcgccggctggtgccgggtagccaagaagaacctcatccacgaccagcagcccggaacggtgagcggcgtcatccgggcgcaggacgtggagcaccttggaagggtggctgatcacggctggaacggcgacgtggtcgtgtatttgcacgtgggaggtaaaccatcattttttttaaatgaacagtcagatcattgtcaagctaggggacatcagtctcgttctcgtgaccccttttcggtttcatcttgttaacaacggacaacgaactgtacatatcagcacatcagtgacaagcaacctcttgttgtgttgtgtgtgttttcaggggaggtggtgtacctgccgaagaacgccttgctgcctgtgacgctgagatcgcgcgagtatgaggtgttcaccgtcgtccctctcaagcacctgccaaacggtacctcctttgcggcgatcggccttctcggcatgttcaactccggtggcgcggtgagggagctgagattcggtggtgaggatgccgacgtcgagctcagagtgcggggctcgggcacggtcggagcttattcctcgaccaagccaac

SEQ ID NO: 88645 - DNA, 2452 bp, Zea Mays
gccggccggaccacccagagccagaagcgcgtcgccagccaactatcgccgctgataaccaacccaatccaacctaacccaaccctgctctctgccgacgcggattcgaatccgaggacgatcgatgacggtgggcgccggcatcgccgtccaggacggcagcctcctggcgctgggcgccaaggtcctgcgggaggtgcgcggcaacgtgctcgtgacgccggccgccggcgggggcctaaccaacggcgcgttcctcggcgtccggtccgcgcccgccgccagccgcagcatcttccccgtcgggaagctccgatgtggtggatgacgcagaggatgggctccgcaggccgcgacatcccctccgagacgcagttcctgctggtggaagggtccggcggcggcgagcagcccgtcgtgtacaccgtcttcctccccgtgctggagggctcgttccgtgccgttcttcaggggaacgccgccgacgagctggagatctgcctggagagcggcgacccggacgtggaatctttccaaggctcccatctggtcttcgttggcgccggatcggacccgttcgaggtcatcacaagttcagtcaaggctgtcgagaggcacttgcagacgttctctcacagggagaagaaaaagatgccagacattctgaactggtttggctggtgcacgtgggacgcgttctacaccaatgtcaccgcccagggagtgaagcaaggattgcagagcttggaaaaaggcggggtctctcctaggttcgtcataatcgacgacggatggcagtccgtcgccatggaccctgtgggaatcgcttgcctatctgacaactcagccaacttcgcaaacaggctgactcacatcagggagaaccacaagtttcagaaaaatggcagggagggtcacagggaagatgacccagcgaagggcctagcacacgtcgtcaatgagattaaggggaagcatcagctcaagtatgtgtacgtatggcatgccatcaccggatactggggcggagtgaggccgggtgcagctggaatggagcactacggatcaaagatgcagcggcccgtgccatcgccgggggttcagaagaacgagcgctgcgacgccctggacagcatgacggccaacgggctgggcctcgtgaaccctgacagggcgttcagtttctacgacgagctccactcgtacctcgcgtctgccgggatcgacggggtgaaggtggacgtgcagaacgtcctcgagacgctgggcgccggccatggcgggagggtgatgctggcgaggaagtaccagcaggctctggaagcgtccgtcgccaggaacttccctgacaatggcatcatatcgtgcatgagccacagcacggacaacttgtacagctcgaaacggagcgcggtgattagagcctctgacgatttctggccgagagaccccgcttcccataccatacacgtcgcgtccgtcgcttataacaccgtctttcttggggagttcatgcagccagactgggacatgttccatagtgttcatcccatggctgagtaccatgctgcggctcgagcggttggtggctgtgccatatatgtcagcgacaagcctgggagccatgacttcaatctgctcaagaagctcgtgcttcccgacggatcgatcctgcgcgcaaagctccccgggaggccaaccagagactgcctcttctctgaccccgcaagggacggcaaaagcgttctcaagatatggaacctgaacgaacactccggcgtcgttggcgccttcaactgccaaggcgccggctggtgccgggtagccaagaagaacctcatccacgaccagcagcccggaacggtgagcggcgtcatccgggcgcaggacgtggagcaccttggaagggtggctgatcacggctggaacggcgacgtggtcgtgtatttgcacgtgggaggggaggtggtgtacctgccgaagaacgccttgctgcctgtgacgctgagatcgcgcgagtatgaggtgttcaccgtcgtccctctcaagcacctgccaaacggtacctcctttgcggcgatcggccttctcggcatgttcaactccggtggcgcggtgagggagctgagattcggtggtgaggatgccgacgtcgagctcagagtgcggggctcgggcacggtcggagcttattcctcgaccaagccaacgtgtgtcgccgtcgattccaaggcggttggtttctcctacgatgccacctgtggcctcatcagcttcgagctcggcattcccgaccaagaaatgtacttgtggacggttacagtagagtattgaagttacaactgagaattgagatagattttctaatgcgtcagagaacgcccggtggtgtaggtattctgatttattcagtgttgtactttctattgttagttatatatattctgtacac

SEQ ID NO: 88646 - DNA, 2713 bp, Zea Mays
gccggccggaccacccagagccagaagcgcgtcgccagccaactatcgccgctgataaccaacccaatccaacctaacccaaccctgctctctgccgacgcggattcgaatccgaggacgatcgatgacggtgggcgccggcatcgccgtccaggacggcagcctcctggcgctgggcgccaaggtcctgcgggaggtgcgcggcaacgtgctcgtgacgccggccgccggcgggggcctaaccaacggcgcgttcctcggcgtccggtccgcgcccgccgccagccgcagcatcttccccgtcgggaagctccggtacgtatgtgccgtgaggacaatccagattcacttccctcccttcccttgcaatgctaattccgacatgttcctatcgcttcccttggcaatgccatctgacggacgctgctgctgctgctgcagggaccagcggttcgtgtgcacgttccggttcaagatgtggtggatgacgcagaggatgggctccgcaggccgcgacatcccctccgagacgcagttcctgctggtggaagggtccggcggcggcgagcagcccgtcgtgtacaccgtcttcctccccgtgctggagggctcgttccgtgccgttcttcaggggaacgccgccgacgagctggagatctgcctggagagcggcgacccggacgtggaatctttccaaggctcccatctggtcttcgttggcgccggatcggacccgttcgaggtcatcacaagttcagtcaaggctgtcgagaggcacttgcagacgttctctcacagggagaagaaaaagatgccagacattctgaactggtttggctggtgcacgtgggacgcgttctacaccaatgtcaccgcccagggagtgaagcaaggattgcagagcttggaaaaaggcggggtctctcctaggttcgtcataatcgacgacggatggcagtccgtcgccatggaccctgtgggaatcgcttgcctatctgacaactcagccaagtaagcaagcagtcggggggacatggtttggttttctgtccaaaatccagagagtcggctcggattctgaacttcctctgttgttatgtgccttgtgttagcttcgcaaacaggctgactcacatcagggagaaccacaagtttcagaaaaatggcagggagggtcacagggaagatgacccagcgaagggcctagcacacgtcgtcaatgagattaaggggaagcatcagctcaagtatgtgtacgtatggcatgccatcaccggatactggggcggagtgaggccgggtgcagctggaatggagcactacggatcaaagatgcagcggcccgtgccatcgccgggggttcagaagaacgagcgctgcgacgccctggacagcatgacggccaacgggctgggcctcgtgaaccctgacagggcgttcagtttctacgacgagctccactcgtacctcgcgtctgccgggatcgacggggtgaaggtggacgtgcagaacgtcctcgagacgctgggcgccggccatggcgggagggtgatgctggcgaggaagtaccagcaggctctggaagcgtccgtcgccaggaacttccctgacaatggcatcatatcgtgcatgagccacagcacggacaacttgtacagctcgaaacggagcgcggtgattagagcctctgacgatttctggccgagagaccccgcttcccataccatacacgtcgcgtccgtcgcttataacaccgtctttcttggggagttcatgcagccagactgggacatgttccatagtgttcatcccatggctgagtaccatgctgcggctcgagcggttggtggctgtgccatatatgtcagcgacaagcctgggagccatgacttcaatctgctcaagaagctcgtgcttcccgacggatcgatcctgcgcgcaaagctccccgggaggccaaccagagactgcctcttctctgaccccgcaagggacggcaaaagcgttctcaagatatggaacctgaacgaacactccggcgtcgttggcgccttcaactgccaaggcgccggctggtgccgggtagccaagaagaacctcatccacgaccagcagcccggaacggtgagcggcgtcatccgggcgcaggacgtggagcaccttggaagggtggctgatcacggctggaacggcgacgtggtcgtgtatttgcacgtgggaggggaggtggtgtacctgccgaagaacgccttgctgcctgtgacgctgagatcgcgcgagtatgaggtgttcaccgtcgtccctctcaagcacctgccaaacggtacctcctttgcggcgatcggccttctcggcatgttcaactccggtggcgcggtgagggagctgagattcggtggtgaggatgccgacgtcgagctcagagtgcggggctcgggcacggtcggagcttattcctcgaccaagccaacgtgtgtcgccgtcgattccaaggcggttggtttctcctacgatgccacctgtggcctcatcagcttcgagctcggcattcccgaccaagaaatgtacttgtggacggttacagtagagtattgaagttacaactgagaattgagatagattttctaatgcgtcagagaacgcccggtggtgtaggtattctgatttattcagtgttgtactttctattgttagttatatatattctgtacac

SEQ ID NO: 88647 - DNA, 2663 bp, Zea Mays
gccggccggaccacccagagccagaagcgcgtcgccagccaactatcgccgctgataaccaacccaatccaacctaacccaaccctgctctctgccgacgcggattcgaatccgaggacgatcgatgacggtgggcgccggcatcgccgtccaggacggcagcctcctggcgctgggcgccaaggtcctgcgggaggtgcgcggcaacgtgctcgtgacgccggccgccggcgggggcctaaccaacggcgcgttcctcggcgtccggtccgcgcccgccgccagccgcagcatcttccccgtcgggaagctccgggaccagcggttcgtgtgcacgttccggttcaagatgtggtggatgacgcagaggatgggctccgcaggccgcgacatcccctccgagacgcagttcctgctggtggaagggtccggcggcggcgagcagcccgtcgtgtacaccgtcttcctccccgtgctggagggctcgttccgtgccgttcttcaggggaacgccgccgacgagctggagatctgcctggagagcggcgacccggacgtggaatctttccaaggctcccatctggtcttcgttggcgccggatcggacccgttcgaggtcatcacaagttcagtcaaggctgtcgagaggcacttgcagacgttctctcacagggagaagaaaaagatgccagacattctgaactggtttggctggtgcacgtgggacgcgttctacaccaatgtcaccgcccagggagtgaagcaaggattgcagagcttggaaaaaggcggggtctctcctaggttcgtcataatcgacgacggatggcagtccgtcgccatggaccctgtgggaatcgcttgcctatctgacaactcagccaacttcgcaaacaggctgactcacatcagggagaaccacaagtttcagaaaaatggcagggagggtcacagggaagatgacccagcgaagggcctagcacacgtcgtcaatgagattaaggggaagcatcagctcaagtatgtgtacgtatggcatgccatcaccggatactggggcggagtgaggccgggtgcagctggaatggagcactacggatcaaagatgcagcggcccgtgccatcgccgggggttcagaagaacgagcgctgcgacgccctggacagcatgacggccaacgggctgggcctcgtgaaccctgacagggcgttcagtttctacgacgagctccactcgtacctcgcgtctgccgggatcgacggggtgaaggtggacgtgcagaacgtcctcgagacgctgggcgccggccatggcgggagggtgatgctggcgaggaagtaccagcaggctctggaagcgtccgtcgccaggaacttccctgacaatggcatcatatcgtgcatgagccacagcacggacaacttgtacaggtaacaacgattgcttgtgctgagctgagatgtccggtcgcgtggctattccattcattcattcgcaatgctcttttcacataacgattgcttgtgcagctcgaaacggagcgcggtgattagagcctctgacgatttctggccgagagaccccgcttcccataccatacacgtcgcgtccgtcgcttataacaccgtctttcttggggagttcatgcagccagactgggacatgttccatagtgttcatcccatggctgagtaccatgctgcggctcgagcggttggtggctgtgccatatatgtcagcgacaagcctgggagccatgacttcaatctgctcaagaagctcgtgcttcccgacggatcgatcctgcgcgcaaagctccccgggaggccaaccagagactgcctcttctctgaccccgcaagggacggcaaaagcgttctcaagatatggaacctgaacgaacactccggcgtcgttggcgccttcaactgccaaggcgccggctggtgccgggtagccaagaagaacctcatccacgaccagcagcccggaacggtgagcggcgtcatccgggcgcaggacgtggagcaccttggaagggtggctgatcacggctggaacggcgacgtggtcgtgtatttgcacgtgggaggggaggtggtgtacctgccgaagaacgccttgctgcctgtgacgctgagatcgcgcgagtatgaggtgttcaccgtcgtccctctcaagcacctgccaaacggtacctcctttgcggcgatcggccttctcggcatgttcaactccggtggcgcggtgagggagctgagattcggtggtgaggatgccgacgtcgagctcagagtgcggggctcgggcacggtcggagcttattcctcgaccaagccaacgtgtgtcgccgtcgattccaaggcggttggtttctcctacgatgccacctgtggcctcatcagcttcgagctcggcattcccgaccaagaaatgtacttgtggacggttacagtagagtattgaagttacaactgagaattgagatagattttctaatgcgtcagagaacgcccggtggtgtaggtattctgatttattcagtgttgtactttctattgttagttatatatattctgtacacatcccgggattttatgacaaatctagataagtggcggtccttagattttaggagcccagaacgaaattttaaatagaa

SEQ ID NO: 88648 - DNA, 2728 bp, Zea Mays
gccggccggaccacccagagccagaagcgcgtcgccagccaactatcgccgctgataaccaacccaatccaacctaacccaaccctgctctctgccgacgcggattcgaatccgaggacgatcgatgacggtgggcgccggcatcgccgtccaggacggcagcctcctggcgctgggcgccaaggtcctgcgggaggtgcgcggcaacgtgctcgtgacgccggccgccggcgggggcctaaccaacggcgcgttcctcggcgtccggtccgcgcccgccgccagccgcagcatcttccccgtcgggaagctccgggaccagcggttcgtgtgcacgttccggttcaagatgtggtggatgacgcagaggatgggctccgcaggccgcgacatcccctccgagacgcagttcctgctggtggaagggtccggcggcggcgagcagcccgtcgtgtacaccgtcttcctccccgtgctggagggctcgttccgtgccgttcttcaggggaacgccgccgacgagctggagatctgcctggagagcggcgacccggacgtggaatctttccaaggctcccatctggtcttcgttggcgccggatcggacccgttcgaggtcatcacaagttcagtcaaggctgtcgagaggcacttgcagacgttctctcacagggagaagaaaaagatgccagacattctgaactggtttggctggtgcacgtgggacgcgttctacaccaatgtcaccgcccagggagtgaagcaaggattgcagagcttggaaaaaggcggggtctctcctaggttcgtcataatcgacgacggatggcagtccgtcgccatggaccctgtgggaatcgcttgcctatctgacaactcagccaacttcgcaaacaggctgactcacatcagggagaaccacaagtttcagaaaaatggcagggagggtcacagggaagatgacccagcgaagggcctagcacacgtcgtcaatgagattaaggggaagcatcagctcaagtatgtgtacgtatggcatgccatcaccggatactggggcggagtgaggccgggtgcagctggaatggagcactacggatcaaagatgcagcggcccgtgccatcgccgggggttcagaagaacgagcgctgcgacgccctggacagcatgacggccaacgggctgggcctcgtgaaccctgacagggcgttcagtttctacgacgagctccactcgtacctcgcgtctgccgggatcgacggggtgaaggtggacgtgcagaacgtcctcgagacgctgggcgccggccatggcgggagggtgatgctggcgaggaagtaccagcaggctctggaagcgtccgtcgccaggaacttccctgacaatggcatcatatcgtgcatgagccacagcacggacaacttgtacagctcgaaacggagcgcggtgattagagcctctgacgatttctggccgagagaccccgcttcccataccatacacgtcgcgtccgtcgcttataacaccgtctttcttggggagttcatgcagccagactgggacatgttccatagtgttcatcccatggctgagtaccatgctgcggctcgagcggttggtggctgtgccatatatgtcagcgacaagcctgggagccatgacttcaatctgctcaagaagctcgtgcttcccgacggatcgatcctgcgcgcaaagctccccgggaggccaaccagagactgcctcttctctgaccccgcaagggacggcaaaaggttagattcgcagctctctacgatggctggtctgttcttgttcactaaaagccgtctgctagctgaatcccgtttgatgctcttttcacagcgttctcaagatatggaacctgaacgaacactccggcgtcgttggcgccttcaactgccaaggcgccggctggtgccgggtagccaagaagaacctcatccacgaccagcagcccggaacggtgagcggcgtcatccgggcgcaggacgtggagcaccttggaagggtggctgatcacggctggaacggcgacgtggtcgtgtatttgcacgtgggaggggaggtggtgtacctgccgaagaacgccttgctgcctgtgacgctgagatcgcgcgagtatgaggtgttcaccgtcgtccctctcaagcacctgccaaacggtacctcctttgcggcgatcggccttctcggcatgttcaactccggtggcgcggtgagggagctgagattcggtggtgaggatgccgacgtcgagctcagagtgcggggctcgggcacggtcggagcttattcctcgaccaagccaacgtgtgtcgccgtcgattccaaggcggttggtttctcctacgatgccacctgtggcctcatcagcttcgagctcggcattcccgaccaagaaatgtacttgtggacggttacagtagagtattgaagttacaactgagaattgagatagattttctaatgcgtcagagaacgcccggtggtgtaggtattctgatttattcagtgttgtactttctattgttagttatatatattctgtacacatcccgggattttatgacaaatctagataagtggcggtccttagattttaggagcccagaacgaaattttaaatagaagcccttgttaatattgtatattgattttacaaataaaaatcgaatgtgatcaattaaaaatcacaaccttgat

SEQ ID NO: 88649 - DNA, 724 bp, Zea Mays
cacaacgttctcaagatatggaacctgaacgaacactccagcgtcgttggcgccttcaactgccaaggcgccggttggtgccgggtagccaagaagaacctcatccacgaccaccagcccagaacggtgagcggcgtcatccgggcgtaagacgtggagcaccttgcaaaggtggctggtcacggctggaacgacgatgtggtcgtgtattcgcacgtgggaggggaggtggtgtacctgccgaagaacgccttgctgcctgtgacgttgagatcgcgcgagtacgaggtgttcaccgtcgtccctctcaagcacctgccaaacggtgtcgcctttgtggtgatcgaccttctcagcatgttcaactttggtggcgcggtgagagagctgagattcggtggtgaggatgccgacgtcgagctcagagtgtggggctcgggcacggtcggagcttattcctcgaccaagccaacgtgtgtcgtcgtcgattccaaggcggttggtttctcctacgatggcacctatggcctcatcaccttcgagctcaacatccccgaccaagaaatgtacttgtggacggttacagtagggtactgaagttagaactgagaattgtgatagattttctaatgcgtcagagaacgccggtggtgtaggtattctggtttattcagtgatgtgctttctactgttagttatatatattctatacacatggggaatt

SEQ ID NO: 88650 - DNA, 2769 bp, Zea Mays
atgacggtgggcgccggcatcgccgtccaggacggcagcctcctggcgctgggcgccaaggtcctgcgggaggtgcgcggcaacgtgctcgtgacgccggccgccggcgggggcctaaccaacggcgcgttcctcggcgtccggtccgcgcccgccgccagccgcagcatcttccccgtcgggaagctccgggaccagcggttcgtgtgcacgttccggttcaagatgtggtggatgacgcagaggatgggctccgcaggccgcgacatcccctccgagacgcagttcctgctcgtggaagtgtccggcggcggcgagcagcccgccgtcgtgtacaccgtcttcctccccgtgctggagggctcattccgtgccgttcttcaggggaacgccgacgacgagctggagatctgcctggagagcggcgacccggacgtggaatctttccaaggctcccatctggtcttcgttggcgccggatcggacccgttcgaggtcatcacaagttcagtcaaggctgtcgagaggcacttgcagacgttctctcacagggagaagaaaaagatgccagacattctgaactggtttggctggtgcacgtgggacgcgttctacaccaatgtcaccgcccagggagtgaagcaaggattgcagagcttggagaaaggcggggtttctcctaggttcgtcataatcgacgacggatggcagtccgtcgccatggaccctgtgggaatcgcttgcctatctgacaactcagccaacttcgcaaacaggctgactcacatcagggagaaccacaagtttcagaaaaatggcagggagggtcacagggaagatgacccagcgaagggcctagcacacgtcgtcaatgagattaaggggaagcatcagctcaagtatgtgtacgtatggcatgccatcaccggatactggggcggagtgaggccgggtgcagctggaatggagcactacggatcaaagatgcagcggcccgtgccatcgccgggggttcagaagaacgagcgctgcgaagccctggacagcatgacggccaacgggctgggcctcgtgaaccttgacagggcgttcagtttctacgacgagctccactcgtacctcgcgtctgccgggatcgacggggtgaaggtggacgtgcagaacgtcctcgagacgctgggcgccggccatggcgggagggtgatgctggcgaggaagtaccagcaggctctggaagcgtccgtcgccaggaacttccccgacaatggcatcatatcgtgcatgagccacagcacggacaacttgtacagctcgaaacggagcgcggtgattagagcctctgacgatttctggccgagagaccctgcttcccataccatacacgtcgcgtccgtcgcttataacaccgtctttcttggggagttcatgcagccagactgggacatgttccatagtgttcatcccatggctgagtaccatgctgcggctcgagcggttggtggctgtgccatatatgtcagcgacaagcctgggagccatgacttcaatctgctcaagaagctcgtgcttcccgacggatcgatcctgcgcgcaaagctccccgggaggccaaccagagactgcctcttctctgaccccgcaagggacggcaaaagcgttctcaagatatggaacctgaacgaacactccggcgtcgttggcgccttcaactgccaaggcgccggctggtgccgggtagccaagaagaacctcatccatgaccagcagcccggaacggtgagcggcgtcatccgggcgcaggacgtggagcaccttgcaagggtggctgatcacggctggaacggcgacgtggtcgtgggaggtggtgtacctgccgaagaacgccttgctgcctgtgacgttgagatcgcgcgagtacgaggtgttcaccgtcgtccctctcaagcacctgccaaacggtgcctctttgcggcgatcggccttctcggcatgttcaactccggtggcgcgatgagggagctgagattcggtggtgaggatgccgacgtcgagctcaaagtgcggggctcgggcacggtcggagcttattcctcgacgaagccaacgtgtgtcgccgtcgattctaaggcggttggtttctcctacgatggcacctgtggcctcatcagcttcgagctcggcatccccgaccaagaaatgtacttgtggacgatggatccctacggcctaagggcccccggatctgtcacaccatccgaaccccctccccttcagtgttctcaagatatggaacctgaacgaacactcaggcatcgttggcgccttcaactgtcaaggcactggttggtgccgggtagccaagaagtacctcatccacgaccaccagcccagaacggggaggtggtgtacctgccgaagaacaccttgctgcctgtgacgctgagatcgcgcgagtatgaggtgttcaccgtcgtccctctcaagcacctgccaaatggtgtctcctttgcggagatcggccttctcggcatgttcaactccagtggcgcggtgagggagctgagattcagtggtgaggatgccgacgtcgagctcagagtgcggggctcgggcacggtcggagcttattcctcaaccaagccaaggtgtgtcgccgtcaactccaaggcggttggtttctcctacgatggcacatgtggcctcatcagcttcgagctcgacatccccgaccaagaaatgtacttgtggacggttacagtagggtattga

SEQ ID NO: 88651 - DNA, 113 bp, Zea Mays
gttgtattggctaagtggatgtgaatatgcttttagagccaacaactattgttcaattctcatttatgcataattttagtattttttactatttaaatgtggggaagtacaaa

SEQ ID NO: 88652 - DNA, 573 bp, Zea Mays
cgccatgtcatcctgtcgttggggcttggagctggtcgaccgtaggaggctttgtgtgttttcaggggaggtggtgtacctgccaaagaacgccttgctgcctgtgacactgagatcgcgcgagtacgaggtgttcaccgtcgtccctctcaagcacctgccaaacgatgcctcctttgcggcgatcggccttctcggcatgttcaactccggtggcgcggtgagggagctgagattcagtggtgaggatgccgacgtcgagctcagagtgcggggctcgggcacggtcggagcttattcctcgaccaagccaacatgtgtcgccgtcgattccaaggcggttggtttctcctacgatggcaccagtggcctcatcagcttcgagctcggcatccccgaccaagaaatgtacttgtggacggttacagtagggtactgaagttacaactgagaattgagatagattttctaatgcgtcagagaacgccggtggtgtaggtattctgatttattcagtgttgtactttctactgtagttatatatattctgtacacatcccgggattttatgac

SEQ ID NO: 88653 - DNA, 1734 bp, Zea Mays
atgaattcctacaaagttgctcaggtttcctctgactgttcaccattattggaagcagagcaggcagagagccttggaatcgaactcttggagatggtgcctagcagggaagatgagattaagttgaaagaatatagggaggatgctgtgtcgacttttatagttgatgattatgtgagacttgagtttaagggctcaacttttaccggttcttggaagtcatttagtagccctaagatttcatcaacattcttagtagtaattgctatagtatcaaatgggattgtgatctatgtttggatgatgaaaacagtgctactcgatgtgaagtccaccaatactatagttcagattaagtctaagatcggtgctttagagggaattggtaatcgccagaaagcactcttttttgctggaattatgatgtttgagaggaagattggtcgtcttagtacattgttcctggccatggaggaaggcttcctcgcgctcgtgtcaagcctcgttctcaagatatggaacctgaacgaacactccgacgttgttggcgccttcaactgccaaggcaccggttggtgccgggtagccaagaagaacctcatccacgaccaccagcccggaacgaacggcgacgtggtcgtgtattcgcacgtgggaggggaggtggtgtacctgtcgaagaacgccttgctttctgtgacactgagatcgcacgagtacgaggtgttcaccgtcgtccctcttaagcacctgccaaacgatgtctcctttgcgacgatcggccttctcggcatgttcaactccggtggcgcggtgagggagctgaaattcggtggtgaggatgctgacgtcgagctcagagtgcgaggctcaggcacggttttcttcttcttggactgggtaaaatacctgctaaacaatgctagactgttcaagtcattccttcgaattacccttacatgtgtgattactgttggcaccctggctcttggtattggtactgcatctggttacatctctccttggacagtacgattttactccctgctagatcctacctatgcaaaggaccatataccaatcatcgcatctgtttctgagcatcaaccaacagcatggtcatctttcatgtttgacttccacatcctcctttttctattcccagctggcctttatttctgtttcaagcacctgtcagatgccacaatatttattgttatgtatggcctcacaagtatgtactttgctggtgtgatggtctggttaattcttgtagcagcaccagccgtttgccttattagtgctattgctgcatctgctacaataaaaaatctaaccactttgattaggacaaagggcagaagtccacagactacttctgggaaaacaactggctcaaagtcagctgctaagtgctccaagaccaagaccctgctccaagaccaagaccaagacctcgccgtgccggaggatctgttgcccggcagcgtcctcggcgccagcacgctcttctcgacgcacttcttccatgcgagggctgcgtccgcctctagcagccgctcgacggactggtcccgcgagctgcacgacgcccgcgcgctcggcaccgacgacctggccgacagagaggactcgtcggagctctccctcgctgacgcttcttcagcgttcatcgtcgcgacctctgctgtggccacggcagtagcttcgactggtagagggtttagggtttag

SEQ ID NO: 88654 - DNA, 1300 bp, Zea Mays
ccgagttgccaacacagcacagccacagccacggcgcaaaaggtctctcctttcacctctgttcagccaaagccacctccccaaacccaatcccgtcactatctcattcccctgaccgccggaacaccctaggcaatggagcccaaatccaccacccctcccccgccccccgtgatgggcgcgcccatcgcgtatcctcccccgcccggcgccgcgtaccccgccgggccgtacgtgcacgcgccggcggccgcgctctaccctcctcctcccctgccgccggcgcccccctcctcgcagcagggcgccgcggcggcgcaccagcagcagctattctgggcggagcaataccgcgagatcgaggccaccaccgacttcaagaaccacaacctgccgctcgcccgcatcaagaagatcatgaaggccgacgaggacgtgcgcatgatcgccgccgaggcgcccgtcgtcttctcccgcgcctgcgagatgttcatcctcgagctcacccaccgcggctgggcacacgccgaggagaacaagcgccgcacgctgcagaagtccgacatcgccgccgccgtcgcgcgcaccgaggtcttcgacttcctcgtcgacatcgtgccgcgggacgaggccaaggacgccgactccgccgccatgggagcagccgggatcccgcaccccgccgccggcctgcccgccgccgatcccatgggctactactacgtccagccgcagtaacgaatttgcttccttatcatggtttcgcttccatgcagcctttgcgggtttttagtaaactattattattactgagagtgccctgttgttacccatgctctgttgttgccacccaataactcgatgacctgatgatcatctgatgtgcctcccgttccgtaacaagtgattccatttctgattacagagagatggctgctcgtaattaagagtgaggctgtgtgatggttatggtacatgtcatgcttgtcgtgattattaatcattagtgctggtactcttaccttgtccaactcccaactaccgtaaaattactcatgtatacttgtgttgagcaatgtcatgctgctctttagatttttgtaggctagaaaagcaaccgtttccaattgtaatgctatgggggcttcatgtaatctcaagcttgttggtagcacaaatatttgattagtccccattctctgtatcattaaattatttgttttttcctggtgttccttcttggaataatttcagggaccttatgtttgctcattttccagagtatgaatgtgttccctga

SEQ ID NO: 88655 - DNA, 850 bp, Zea Mays
cgcacacgagaaggccagggagacgtcttgcttctccttcgctcgtctacctgcttcctagttgttccatcatccatggcgcgcttcgcctccgctgtcctcttcgccgctgtcctgctcatggtaatgatcgatcgaacaacctgctggtcaatgcacgtaaggtagaggaagacgtacgcattcacgaatttccctctcccctcgccctcgggttcgcttgtgcttgtgcaggctggacggctgacccatgcggggccgtcgacggccgaggtgctttggcggcgcgcagtcctgccgggctccgccgtgccgaacgccgtcctccggctcctacgcccctgtcggttctcctctccctttgttgattctattttctaggtacgattttttcaagcaccaacgaatgcatagtgcagatagccacttcgtaagcgaagccaatgccgaggacaccgggcgatccaacgctccgttcaactaccaaaactacaagcgctcctctgcgactgcgacctcacctccaggtgaccgcagtgaagcagggctcgctggtggcagcggcgcgagagatgacacgccgttcagctacagctacagggcgccgagccaacaaggggtaccggccagcggcggcgcgagagacgacacgccgttcagctacagttacagggcgccgagccaacaagaggtaccggccagcggcggcgcgagagacgacacgccgttcagctacagttacagggcgccgagccaacaagaggtaccggccagcggcggcgcgagagacgacacgccgttcagctacagctacagagcgccgagccaaggggtaccggccagcggcgtc

SEQ ID NO: 88656 - DNA, 1743 bp, Zea Mays
cgcacacgagaaggccagggagacgtcttgcttctccttcgctcgtctacctgcttcctagttgttccatcatccatggcgcgcttcgcctccgctgtcctcttcgccgctgtcctgctcatggctggacggctgacccatgcggggccgtcgacggccgaggtgctttggcggcgcgcagtcctgccgggctccgccgtgccgaacgccgtcctccggctcctacgcccctatagccacttcgtaagcgaagccaatgccgaggacaccgggcgatccaacgctccgttcaactaccaaaactacaagcgctcctctgcgactgcgacctcacctccaggtgaccgcagtgaagcagggctcgctggtggcagcggcgcgagagatgacacgccgttcagctacagctacagggcgccgagccaacaaggggtaccggccagcggcggcgcgagagacgacacgccgttcagctacagttacagggcgccgagccaacaagaggtaccggccagcggcggcgcgagagacgacacgccgttcagctacagttacagggcgccgagccaacaagaggtaccggccagcggcggcgcgagagacgacacgccgttcagctacagctacagagcgccgagccaaggggtaccggccagcggcgtctcgagagacgacacgacattcagctacgacgactacaaggcgcggagccaagcggtcgccggcagcggccccagagacgatcagttcagctacgattactccgcctacgaagcacccatcgagcaccaccactcggaggtccgcgcgacggcgcgaagcggcggtgtgggcacgccaacgcctcacacggcggtgttctttcacgaggaagcggtgcgcgtgggcgagcgcctgccgctccacttccaggccgcggcgccggccgcgctgggattcctgccgcgccgcgccgccgactccatcccgttcacgacggcggcgctgccggccgtcctcgcgctcttcggcgtcgccccaagttcgtccagggccgccgccatggcggagacgctgcgcacctgcgagcggccgccgcccgccggggaggccggggccaggttctgcgccacgtcgctggaggccctggtggagcgcgccgtggcggcgctgggaacgcgcgacatccgggcggtgacctctgcgcttccccgcgcggggctgccgccgcaggcgtacgccgtccgcgccgtgcggcgcgtcggcggcggccccagcttcgtggcgtgccacgacgaggcgtacccttacaccgtgtaccggtgccacgacacggggcccgccagggcgtacctggtggagatggagggcgcccgcggcggcggcgcgatcaccgtggccaccgtgtgccacaccgacacgtcccggtggaacccggagcacgtctcgttcaagctcctcggcaccaagcccggcggcgcgcccgtctgccacctgatgccgtacgggcatatcatctgggccaagaacgtgaaaccctcgccggcgtgaggagcggagcaccacacaccattaatccgctggagaagaactattatgtgttatgttcagggcttggctgtctgatctgctcttgtttgtgctatgctgtgctgtgctatgctaggtcactagatcagcgtctgcaataaaatggactgcttttgtgcagttctgctacatgaaaatactcaattgtgaagccatcagaattcagatcatata

SEQ ID NO: 88657 - DNA, 1809 bp, Zea Mays
gcacacgagaaggccagggagacgtcttgcttctccttcgctcgtctacctgcttcctagttgttccatcatccatggcgcgcttcgcctccgctgtcctcttcgccgctgtcctgctcatggctggacggctgacccatgcggggccgtcgacggccgaggtgctttggcggcgcgcagtcctgccgggctccgccgtgccgaacgccgtcctccggctcctacgcccctgtcggttctcctctccctttgttgattctattttctaggtacgattttttcaagcaccaacgaatgcatagtgcagatagccacttcgtaagcgaagccaatgccgaggacaccgggcgatccaacgctccgttcaactaccaaaactacaagcgctcctctgcgactgcgacctcacctccaggtgaccgcagtgaagcagggctcgctggtggcagcggcgcgagagatgacacgccgttcagctacagctacagggcgccgagccaacaaggggtaccggccagcggcggcgcgagagacgacacgccgttcagctacagttacagggcgccgagccaacaagaggtaccggccagcggcggcgcgagagacgacacgccgttcagctacagttacagggcgccgagccaacaagaggtaccggccagcggcggcgcgagagacgacacgccgttcagctacagctacagagcgccgagccaaggggtaccggccagcggcgtctcgagagacgacacgacattcagctacgacgactacaaggcgcggagccaagcggtcgccggcagcggccccagagacgatcagttcagctacgattactccgcctacgaagcacccatcgagcaccaccactcggaggtccgcgcgacggcgcgaagcggcggtgtgggcacgccaacgcctcacacggcggtgttctttcacgaggaagcggtgcgcgtgggcgagcgcctgccgctccacttccaggccgcggcgccggccgcgctgggattcctgccgcgccgcgccgccgactccatcccgttcacgacggcggcgctgccggccgtcctcgcgctcttcggcgtcgccccaagttcgtccagggccgccgccatggcggagacgctgcgcacctgcgagcggccgccgcccgccggggaggccggggccaggttctgcgccacgtcgctggaggccctggtggagcgcgccgtggcggcgctgggaacgcgcgacatccgggcggtgacctctgcgcttccccgcgcggggctgccgccgcaggcgtacgccgtccgcgccgtgcggcgcgtcggcggcggccccagcttcgtggcgtgccacgacgaggcgtacccttacaccgtgtaccggtgccacgacacggggcccgccagggcgtacctggtggagatggagggcgcccgcggcggcggcgcgatcaccgtggccaccgtgtgccacaccgacacgtcccggtggaacccggagcacgtctcgttcaagctcctcggcaccaagcccggcggcgcgcccgtctgccacctgatgccgtacgggcatatcatctgggccaagaacgtgaaaccctcgccggcgtgaggagcggagcaccacacaccattaatccgctggagaagaactattatgtgttatgttcagggcttggctgtctgatctgctcttgtttgtgctatgctgtgctgtgctatgctaggtcactagatcagcgtctgcaataaaatggactgcttttgtgcagttctgctacatgaaaatactcaattgtgaagccatcagaattca

SEQ ID NO: 88658 - DNA, 838 bp, Zea Mays
aagccctcagcaggtctcaatcaattacgtagactcacgtctcgcccgtaggataggatgatctaatcgtagtcgtacggtgtaagtatgggatagataacagaaagcgggaatcttaattgagactctgatcacccagaaaagatgggtcgccgaatacctacagcttgttcagcaaaagtaaacgtatcgttctccagtttcttcacagcaacacctatgaacatagccacaactttcttgcttctaaagcctgtgatgtcgacctcacaggtctacaccagcacaagctcacagtgttgaatcaaggtacgagtagaaccgtcgccgactgaactggaggaggcagcagttgaagaagcgatcatgcacaccgacaaagagagcttcagtgtcaggactgaacgatatgcctgcgatctcaccaaagaagtccagctcctgcttcctgctgtacccactctcaacatcgaagatgtggatgaagtccgcgggttcagtcatcgccatgaacttcccgtctggcgtgtagcgaatcgacctgacggctccgatgttgccacccaatacaacaactgatctggagagattgcggacgtcccagaccctgcacgtcttgtcttggttccccgtggcgaatgttcggccgtctggattccatgccgacgcaaaggagtaatccaaatggccatggagtttgtgaaccgtctgcgagcaagcttgtatatatcaatcgtgcatttattatataaaaagaaatcagttactgtgcactgcgttccgcttacctttcctgaattagcgtcaatcagaagtccatcaggactgtcccccacaa

SEQ ID NO: 88659 - DNA, 618 bp, Zea Mays
atcaagccgcgccgcgtgcgtactcggtggcaatgggaccgtgcgcattgcacaagctaatccaaaaccaactcattgctctgcacatttgaacagtacatatcgagtctagattaagataaattctcgtcaaagtaaaaactgccgatcgagctaattgaagttcttgaaaaaaaaaagaacaaccacatcaaataaaaaaagcgaaggaagtatagccggttaaatctaaacttcttccttgctaaaaaacatgtgtctatttgtatgtttaacaatataaaattggatattttatccgtttatgtttttcttatggacagaagagattaaaagaaagaggactccgaaacgaatgacggtaatttgatcgatttgcatatggtgtgaggcaataaaagaatgcaagatacgaatagagtgttgttttaggaattgcttgaaaaacggatgctattttctgaatgtcgtcttaaaccagtgttgtttcgtagattctccatgtggtttggtgcaatgttattctcaataagtgacgtcttctatggcatattcatgtttaggctttccttttctgatgtgttaagttgtgttccgaataaaatagagtttttgtct

SEQ ID NO: 88660 - DNA, 2530 bp, Zea Mays
agatttggaagcgccaccactcaccgtgccggccccaaccccaagcggagcccccaacgcatccattcctctctcgtcttccctttcccctccggcgagccccttgttctcgccctccgttctacaaggttcgctcgttcatgttctaggtgctggacaccttttgcttcgcatggctcgggcgctgcacagtccctgtttcgtggctccgctgctgtggctgacgttgttactggttgccgtgtcaccggggggtgcgttctacttgcctggcagctacatgcacacatactcccaaggcgaggtgatacacgccaaggtgaactctctcacgtccatcgagacggagatgcctttcaactactacagcctaccatactgccgcccccagggcggcatcaagaagagtgccgagaatctgggtgagcttctgatgggtgaccagattgacaactccccctaccggttccatgtgaatgttaacgagtctgtcttcctctgcaccacaaaagggctcaatgagaatgacgccaagctccttaagcagcgcacccgtgatctttaccaggtcaacatgatgctagacaatctgcctgtcatgcgtttcactaagcagaacgatgtcacggtacagtggactggttttcctgttggttactctccacccggtgcctcggatgattatatcatcaaccacttgaagtttaaggtcttggtccatgagtatgagggtagaaatgtggaaatcattggcaccggagaagaaggatctgctgtcatctcagagacggacaagaatgggatgtctgggtatcagattgttggatttcaggttgtgccttgcagcgtgaagcgtaacgccgatgatttttctaagcttaatatgtacgacaacattgatccggtggactgccccgtggagcttaagaagtctcaagtgatcaggcaacaggagaggatcacgttcacttatgatgttgagtttgtcaagagcgacatcaggtggccatctaggtgggatgtctatctgaagatggaggctggcgccaaggtccactggttctctataatgaactccctcttggtgatcttgttcttggctggaattgtctttgttatattcctcagaactgttaggagggacctgactaggtatgaagagcttgacaaggaagcgcaagctcagatgaatgaggaactatctggttggaagctcgtcgtcggtgatgtattcagagagccatcttgctccaagctgttatgcataatgattggtgatggggttcagattttgggcatggcagtcgtaacaatcgtttttgccacacttgggttcatgtctccagcctcaagaggaatgctccttactgggatgattgttctatatcttttccttggtattgcaagtgggtatgtcagtgttcggttctggaggactattaagggcacatccgaaggatggagatcagtgtcctggttgactgcttgctttttccctggtgtcatgtttacggtccttactgtcctaaactttgtgttgtggaaaagtgagagcactggggctttacctatctcactatttttcaccctcctggctctatggttctgcatttctgtgccattgacgcttgttggtggttttcttggtacaagagcggagaaaatagaattcccggttcggaccaatcagatccccagagagatcccagcaaggaagtatccatcgtggcttcttgtccttggtgcaggaacactgccatttggtaccctgtttattgagctcttcttcattctatcgagcatatggcttggaaggttctactatgtgtttggtttcctgctgattgtcctgctgctgcttgttgctgtctgtgccgaggtgtccgttgtactaacatacatgaacctctgtgtggaggactggaggtggtggtggaaggctttcttcgcctctggttctgtcgctgtctacgtgtttctctactccatcaactacttggtctttgacctcagaagcctgagcgggcctgtctctgcaatgctttatgtttgctactcattcctcatggcatttgcaatcatgctgacaaccggaaccattggctttttgacatcattcgcctttgtgcactacctcttctcatccgtaaagattgattgatgtattccacagtctgcagacagattcgttcacagctgtgcgtacctgtgatgggcgtagtttacgagatgaggtggttttgggtaaactagtgacgtgtttagttccaagtaggagtgcagtatctgtttccagttccaattggtcagagttgtaagtgctccatctgatctagatactacagcctggctttgttagagtttaggagcaatggtactactgtgtttgttcggcaaattgtattggagtggaaatggcgtgcttattacaggctttggtaagttatattattgagaattgcaaagtgtatctgttatctttcttcagactgacatggtcacttaatgttaaattgctatttttgctaca

SEQ ID NO: 88661 - DNA, 929 bp, Zea Mays
acggccacaccacacccacctagctttgctttcctcgtccgcttccggcttgccctgcctctctccgccccgcgtcgcctcatcgccaacaaccgacgagatccggcgcgggaaaacgagccctagatccggcggcaccctcatgcgaccttgttgagtccgggccttcctcctcccgccgctggtgtcgccatggcggggagcgacctcgagccgctgcgcgcgagcgcggcggcgctgccgtcctcgtcggacccggactcgcccgccgtgaccccgcgccggagccgcgtgcgggacctgctgcgcaacctggaccgccggctctccaaccgaagccgcggcggcgcggacgcggggcacggcggcggcgaggccggggcgtcaccgaggaggcccgaggaggatagcgacgagctcggcgacggcgcgccgcccgagtgggcgctgctgctcgtaggatgccttcttgggctcgccaccggcatctgcgtcgctgtgttcaatcgcggggtgagtgccaagacctctccatgtggggggccgcgttgtttcttcatctcacggaagaatcgagtcgtatgcatattttggaaattcccactcgtatgctggtgttaattactttattacggcttgcgttgctgtttattggatactggaggcctcaatgtatcttttggtgtctcctaaatacgaaatttcataccgtggggatggtgtaccatgtctcacagtatttcgatttcgactacactgtgtgaggctaagggtttgcaggcagaatcttatgttgtatgttagtgctatactgctattagccggctactgttttgttgctggtgatttttgtgaacgacctggctgtgtcctgatttatatgccgtgaatttattatcagatagcgtttgctaatactgaattgatta

SEQ ID NO: 88662 - DNA, 2668 bp, Zea Mays
ctctcgcccgcctctcgagagtccgctggacggagcggtgcgttgcgcctccacgccgcccctctcccccgctcgctcacttcgccgcccaccacgcccatggccgccgcagccgccaccgcgccctaggcatcgagcgaggccagatgctctccctgggcgccctccgcaagctctgcgcagcctttgacgccgtcgcgctcaccgtcatcgctgcggggctctcgcgcccgccctcgggccgccaccctttctcctccgcgcacgcgcactcctcgcaccccgctgacttccccaccatcgccgcctgccgcgccgcgatatccgcctccaagggtgaccgccgccgccgacccggcgtcggccagccctcctcctccccttccccctctctcgcagccgctgcagccaaggaggagcaggagcagccggtgctggtaaggatcaagcacgagcgggacccggagcggctgtaccagctgttcagggccaatgcgcacaaccgcctcctggtggagaaccgcttcgcgttcgaggacgcggtggcgcgcctggcgggtgctcgtcggaatgacctcgtcgaggagatcctcgagcagcacaaggcgctgccccaggggaggcgggaagggttcgtggtcaggatcatcggcctgtacgggaaggccgggatgccaggccacgcgctacggactttccaggagatggggatgtacgggtgcccgcgcaccgcaaagtcgctcaatgccaccatgaaggtcctgctgcgggcacggatgtttgatgaggctctgtcgctgtttgaggaggggccagagaagtacgacgtcgaggtggatgacatctcgtgtaacacggtggtgaagatgttctgcgacatgggggacttgcgtgcggcgtaccaggtcatgcaggggatggagagggctggtgtgcggccggatgtcatcacgtacacgacgctcatggctgctttctataagtgtggccgacgcgaggttggggatggtttgtggaatctcatgaggctgaggggttgtgtgccgacacttgctacctacaatgtgaggatccagttcctggttaacaggggaagggggtggcaggcaaatgagttggcacggaaaatgtatgtggcggggatcaaaccagatgagatcacatacaatctaattatcaagggtttcttcatgatgggtgagcatgagatggccaagacggtctttggcgcgatgcacgggaggggatgcaagccaaacagtaaggtttaccagacaatggtccattacctctgtgagagaagggactttgatttggcattcaggttgtgcaaggatagcatggagaaaaattggtttccgagtgtcgatactattaaccaactgttgaaaggcctcatggctatctcaaaggataggaatgggaaagagataatgaagttggttactgggagaaaaccttcgtattcagatggtgaaatgagggtcttcaaagatatattatctcataggaagactggaagataagttgatgtctggataggaaatttgctgtaaatccaccacttgtaactgtaaggctgttgttgacattcttttatcactccgttttcatagtcaagttgaaatggggttgatccaagggttttgaatattgaatcatcctgtcgggcaacagttttacagctccttaaaataagttagtgtaagttataggaattccgtacctgtagcagaagtatcatgattcatgaatgacaccatgacaaggactttgagagctggaggttctgttttatactttcgttggctaatgttggatttttatagaaagttgtgatcgtaataattcaacataactacataagaatgtgatgttggcacattcattgggaaaacttatgagagtcagtggtgtccgcaagtgtttaggatagagtttgttcaggagttgtatcagttcagccatggtttgttcaattgagtcaagggtccagagtttgttctatgcttttagttggagaaaaaaaagtgtttgttatttggttccacctacttaacatgagtggtgttccagttgtaattaagaagaaataaagttgattccatctaaagatgttgttcagagcccccttacgaaggcaggtacaccatcttcatctttggtacagtttgcaaaactatgttgggggaaatctgatcttattattgttttttttttctttttccgtttatgccatcccaccaagatagaattgtctgcttgttaagaacaagaaatattttaattgtctgagttattgtatcctaaggttgacgattcttttgatattggtgagaactcaaaggaaacaaaccaaaacaaaatcaactgaattttttactttttttgtttgagccagatgatagttacacagcttttaattgtccctgaggatgcttgatattggcctactgcagcaagtctggctcggaacttcctgagatactttgagccaccgctgtttggagggctgcggtggcttggcgtcggcaagaatgtggctcaacgtcgtggctgcagcccgacagtcgcggacgttctggagcgaaaaccaggattaaccatctgctgcaacgccaacgcctgggacatgggctgcaggaacaagtgccatccagacattcgc

SEQ ID NO: 88663 - DNA, 2794 bp, Zea Mays
acgcctccacggcgactccggctcctccacggctccagctccaggccccagctcaccctcccccctcccctcgaggcggaccgcccccacgtcgccggcgatcgaatcggcggccgtagcctcgcgcttccagcgtcggagagtgcgcccgtccggcggatgagatggcgctgcggcacctcgtcacgggccagaataactgcgtgccggacggcgcctcgtcgtccaaccccctcaacgccctcgccaacgccttcctcggccagtcctccaaggcgcagtcaataaaggaacttcctggttctgttaatgtcccatctacatctgactttagcgtgtctgctcctttgtcaaacatccctggttcagaaaatgagttcaaacaagaccagcgacctcttgcacggggtgctgactttattcgaggtggtcctgctaatgattggattgagtcttttcggcctccgagggttcctcaacttggtgtagaagcacaatttccagattttgagcaaatttataacaatgcagggacaacctttcagtttcagccgccattggatggtccaccacaaagagtgttgtccggtgtcttgcattcctttctcacaagtggcccagctggtgtgccatttcaaccacttccggtaccagctgctcttggtttatctgaaagcgacaaacaatgcattcgtgatcgtagctgcataatggcacggcatattttttctgaccaaccagaagaatatatacagagtcaggtcaatactttgctgcattcgcttgatattgacaaccgtatgagaggacctatgcatgggcaatacccagaactacaggagtactggaagcagtcccaaagttctacgcgtcctgccccaatgcataatgctgctgataaatggattactgagtttggcaagcaaaataataatccagaaaattgggcgaactctttcgaacaacaatatggccccaatgggtgggcctctgagtttgaacagcatcagtctcagatggccatgcgccagatgggaggagcgaacatggccaacctggctgctatggagcaatcccgagtgcttgcacaaactttagcaagtaataatgatcccaagtttcagaattctaagttcttccagtttgtttcaaagatgagccgaggtgaacttattatagaagataatcaagtaaaagaaggttcagcatcccaatccagtggctgggctgatgaatttcaaacaccgtacattgctaatgcaaactcatgggcagatcagtttgcacatgaagagctttcacaaggggcggataagtgggttagcgagttctctagtcaacctaatcatggtgcactaaatgagaactgggttgatgagttctcgaaattaaatgttactgacgaatgggcagaggaattcagtggaggtggttttggcgaaagctctgctgatccatgggtagatgagttccaagaacacttgtcatctttcaaacaaagtccgggcgcctctcgaggggtttatgttttttctgagaacaacccgtatgttggtcaccctaatccaatgcaggaaggacaggagctcttccgcaagggcctcttaagtgaagctgttcttgctttagaggctgaagttttgaagaatcctgataacacagaaggttggaggttgttaggcgtaacacatgcagaaaatgatgatgaccaacaggccattgcagcaatgatgcgtgcgttggaagctaatccaacaaaccttgaagttcttcttgctcttggtgttagtcacacaaatgaattggagcagggggaagcattaagatatctttataggtggcttcagaatcaaccaaaatatggtggccttgtccctctgcagtcaactgattcaccttatggtcctgatgttgttagattgtttaatgaagctgctcagatgtcacctgaagatgcagatgttcatatagttctgggagtcttatacaacctatcaagagagtatgataaagctatagcttcatttaagacagcactacagctcaaaccacaggactattcactctggaacaagcttggtgcaacccaagcaaacagcatccagagtgctgatgcaatattggcgtatcagcaggctctggacttgaaacccaactacgtgcgtgcatgggcgaatatgggaatcagctatgccaaccagggtttgtatgaggattccattcgatactatgtaagggcagttgcaatgaacccaaaagctgacaatgcctggcagtacctgaggatctctcttagcaatgcttcgcgagcggacatgattgctgcatgcgacgcccgcaaccttgacgctcttcagaaagagtttcctctgtgagccctccggtccaaggcattagagcttccatggaaggaagcagcacactagcaagccgagtgactgcacctgtggtcatggaaatggaattggaaaccagtagcgttttgtatttgcctgttgattcttatatttatttttaggaagtgggggaatgtgtagcaactaggaagcgagggaacaacatccagttgatgtgaagcattcatggcacagtaggcaatagtggcaaaggggtactatacatacacacttacgggacgcacaacataaataaagaatggttgattaataaactatttattttggggacacacccctaggatcaacccctacttgtttcgagtttgaatactgatttgtatcaacaggcaataaataatgcgctttgtaaccttttatatcataatgtaatgcgc

SEQ ID NO: 88664 - DNA, 314 bp, Zea Mays
tttttttctgtttaggtaaaggaatggatttgcaacacgatcatcggcatgtcatgtttgggcctcacttcctggctgcacatcttcatcgacgcatttttttaatgtctcgggcaaaaaaatttaggtgaaatgtcaccggcaaattacatgcaactatatatagagttctgtcggtgaccaattgatatatccatggcaatgactcatgcttgcacgttggcagcaatgctaagtgatacgacctcaccaatccctggatagcatacctgaggctgagctagggtctagggatgctgtcgctcgactagaga

SEQ ID NO: 88665 - DNA, 550 bp, Zea Mays
ctgttaagttctaattttctggcccatttgatcgttctggttattaactcttccctttccttgatcctagtgtgtagataatggaaaggaagttaattttcaatttgctatcaaagcaaaaactgttaccagtggcttgaagtactcacttgctactggaaactgaggacaggctaaccaagctggaaccagagcaggggtttctcagtcaaatcagaagttacaaggtttaagggaagaattgaatgcgattgtcccatacttggaggagatgagaaagaagaaagttgaaagatgggaccaatttgttgatgtcatagagcaaattaagaaggttgcatctgaaatcaggcctgcagattttgtaccctttagaattcctgtggatcagtctgatatgtctttaagaaagttggaggagctaacgaaagagctgcaatcccttcagaaggagaaggtcagcatcacttgttcaaatcctctttatctgtctaatgaatattactccccatgtctattattttccttcaatactcatacaagtctataa

SEQ ID NO: 88666 - DNA, 1286 bp, Zea Mays
attacgcttctctaaattatacgaacctaacgcaaacattacgaacaacaaatcatacacttctaaacataattaacatctcaaatctacccaacgcgactactctaaaattacgaaaataatcacatcgcattcatcaaaatactacactctgcaaaatagaactagttcgaatatactcggtaactaaactcctcaaagcacacctcgcatcccgggtatttctaacttaaacttcatactcaaaccaagcgtcttatttcacgatcataaaatctatagtaaaaatagtgattttgctcaccgttatcaacttcattcaatatttgcgagaacggcggtagtcttcgattgaagtcttcagtcagacaactgatgagtatagaatggagctttactttctcttccatccgcaattcttggaatctctccatattaacgacgacaatcggccaggtcgacgacgcgatggggattaaggccgagcgagccgagagggcgcgctggcgaccagaaaaccacgcgagcactagacagggagaacgacgggctcgatagcgtctgcgaccgaagcgagcaccggagacaagcacgacggggcggctaccggcgaacaccacgacgcgatgacaaaaacagactgaaacagggagccgagcgccaaggacgagccgagcaggaaatcgagatccgagttgggcgagtgggaggaacagggagctgggcgaccgagcgccaatggggatggggcatgtgcgtccctgcgaccagagggagtgccgcggctacaggggcgcggtttggccagggaggagcagccgacgctggagctggaagaggcttcggccatggggaaaacaaggggccggggaggaactcggctgggaggagctcgacgcaatggagcacggaggaaggagaggggtgcgcaccatggatgcgcaggagcgagctccggcagcgcgcgtggggctggaacaccgagctggcagccggcgcgcagagagaggcgaccgaggaagatggagaagctcggtggagcgccatcggggcgagccgagggagaaaggaagccgcggcagagagctcgccgcgcagagaagactccactggagaacgagcagggagaacaaaggagctgggcgagaaatttcacgcgcgggcgccagggaatatgatagggccgagcagggcgccgagaggagggagatgagggaggatcgagctcatcggctggggatagaagagcgactaggaagataagactgctgggattttttttgcag

SEQ ID NO: 88667 - DNA, 721 bp, Zea Mays
cgcactcaactgctcatagaaccaaaacccctctccgtcaccgcggtggcaacctgccgtcatcgccatcgccgcgtgcgttctcgaacgttcttgtggcctagaaatacacgtttcccaggccggcgacgccgacgccgacgcggtcacgccttttttttcagccggctggttcacgtgctcgacgacggcgagcgtctgtctaggagcaagatggatgggaacaggatagctcggttttcggtcacctggaggggcagccaacttgatgtggatgcggatccaagttgtaccgtgaaagagtttgggcaactgttgcaggacttgactagtgttaggccagagacgttgaagctcattgttccacgatctacaaacaaaggctccaagctgatcatgccattttcggatgcacattcgagattgacactgaatggagtgggtattagcgagggaaaacctatccgaatgatgggagtttatgatgatgaaatcgaggaggtatccgacaatggcaaaagacctgaccaacgcattattggatttgatgaagaagaacagcggcttaggcaaagatcattaggcaggccacagatttcactcaaacttccccagggacaatacatcttctgcgattttcggacgcttcacttacctgggattgagccggatcctgcgcgctcgcaaggtccaaagcgaacaaccagctgcagacgaatct

SEQ ID NO: 88668 - DNA, 3105 bp, Zea Mays
atggacaagatggagagctacctgaacgagaacttcgggggcgtcaaggcgaagcactcgtcggacgaggcgctggggcgatggcggagcgtcgtcggcgtcgtcaagaaccccaccaggcggttccgcttcaccgccaacctgggcaagcgctccgaggccgccgccatgaagcgatccaaccaggagaagctgcgggtcgccgtgctcgtctccaaggccgcgctccagttcatccacggcctgccgccgcagggcgactacgccgtgcccgccgacgtcaaggcggccggcttcggcatctgcgccgaggagctgagcttcatcgtggagagccacgacgtgaagaagctcaagtcccacggcggcgtggacggcctcctgtccaggctgtccacctcggcgtccgacggcctcgacggtagcaagctgatggcggcccggcaggagctcttcggcgtcaaccgcttcgccgaggcggagccccgcagcttctgggtcttcgtctgggaggcgctccaggacatgacgctcatgatcctggccgcctgcgcgctcgtctccctcgtcgtcggcatcgccaccgaggggtggccccacggcgcgcacgacgggctcggcatcgtcgccagcatcctgctcgtcgtcttcgtcaccgccaccagcgactaccgccagtcgctgcagttcaaggacctcgacaaggagaagaagaagatcacagtgcaggtcacgcggagcgggtaccgccagaagctctccatctacgacctcctcgcgggcgacatcgtgcacctcgccatcggcgaccaggtgcccgccgacgggctcttcgtgtcgggcttctccctgctcatcaacgagtccagcctcaccggagagagcgaacccgtcgcggtgagcgccgagaacccgttcctgctgtcggggaccaaggtgcaggacggcgcgtgcaagatgctggtcaccaccgtcggcatgcggacgcagtggggcaagctcatggccacgctcagcgagggcggcgacgacgagacgccgctgcaggtcaagctcaacggcgtggccaccatcatcggcaagatcggcctcgccttcgccgtggtcacgttcgcggtgctcacgcagggcctgttctggcgcaagctcgccgacggctcctacttcagctggaccggcgacgacgcgctggagctgctggaggtcttcgccatcgccgtcacgatcgtcgtcgtggccgtccccgagggcctgccactggccgtgacgctcagcctggcgttcgcaatgaagaagatgatgaacgacaaggcgctcgtgcggcacctcgcggcctgcgagaccatgggctccgccaccaccatctgcagcgacaagaccggcacgctgaccaccaaccacatgaccgtcgtgaaggcctgcatctgcggcaaggtgaaggacgtgaacagctccgcggagaccaagacgctgccctccgacctgccggcgtccgtcgtggcgatgctcctgcagtccatcttcaacaacaccggcggcgacgtcgtgctgaaccaggacagcaggcgcgagatcctgggcacgccgaccgaggccgccatcctggagttcgggctcgcccttggcggcgacttcgcgacggtgcgcaaggcgagcaccctgctcaaggtggagcccttcaactcggcaaagaagaggatgggggtggtcatccagctccccggcggcgcgctgcgggcgcactgcaagggcgcgtcggagatcgtcctggcgtcctgcgccaggtacctggacgagcacggcaacgtcgccgccctcgacggcgccaccgcggaccacctgagggccaccatcgacagcttcgccaacgaggcgctccggacgctgtgcctcgcctacgtcgacgtcggcgacgggttctccccgagcgaccagatcccgacggacgggtacacgtgcatcggcgtcgtggggatcaaggatcccgtccgtcccggcgtcaaggagtcggtggcgatctgcaggtccgctggcatcaccgtcaggatggtcacgggcgacaacatcaacacggccaaggcgatcgcgcgggagtgcggcatcctgactgaaggcggcgtagccatcgaaggcccagatttcagagtcaagagtgaggaggaactgcaagatctgatacccaaaatacaggtaatggcgagatcttcgccgctcgacaagcacactttggtgaagcacctacgaacaacatttgatgaagttgttgcggtcaccggcgatggcacaaacgatgctcctgcgctacacgaagccgacattgggcttgcgatgggcattgctggcactgaggtgcaccttatcgtttctaataatgtttgtttgaaggtggcgaaagagagcgccgacgtgatcattctcgacgacaacttctccaccatagtgactgtcgccaaatggggccggtcggtgtacatcaacatccagaaatttgtgcagttccagctgacagtcaacgtcgttgcgctcatcgtcaacttctcttcagcttgcctgatagggagcgcgcccctgactgcggtgcagctgctctgggtgaacatgatcatggacacgctgggagctctggcgttggccacggagccccccaacgacgagctcatgaagaggactcccgtcggaaggaaaggcaacttcatcagcaacaccatgtggaggaacatcatggggcaggccctctaccagttcctcgtcatctggtacctgcagtctagggggaaacggctcttctggatcgacgagggcgccgccgacgccgacctggtcctgaacacggtcatcttcaactgcttcgtgttctgccaggttttcaacgaggtgaactcgagggagatggagagggtgaacgtgttccgaggcatcctggacaacaacgtgttcgtcatggtcctcggcagcaccgtcgtgttccagttcgtgatcgtgcagtgcctcggtagcttcgccaacacgacccctctcagcctcgcgcagtgggtcgcctgcgtcgccatcgggttcgtaggcatgcctatcgccgtggcggtgaagatggtgccggtggagtag

SEQ ID NO: 88669 - DNA, 177 bp, Zea Mays
atgccaaatccgcacccatcaccaggacacgtacgacgccttctccgccgccagggctcccctcaatccgctgagccgctggtctgcaccacgacgacggtaacggcgacggcgagctcgctccatagaggcaagaaggacggcgactcagaaggcgaggacgaaggagagagctag

SEQ ID NO: 88670 - DNA, 1333 bp, Zea Mays
ccgcaggccacagcagtcacacgaagacagcaagctaaacactcgtactctgtcgtctccttcccgagcccacaaacccttttgccaatggcacatcctgctagtgctagcaatgcccgcctgaccaccaccatcctcttcatgtcgcttctgctggtcttggctactgcttcactgggatgcccgtgcccatgctcatacacctgtgagaacgagctgaactggcgcgtgtatctgaagcaagttgtcggtactggaccaagtcacaaccaggaggtaattttcagacctcagcacgctaatccgttcggccagaccgtcgttcaggactggacgttggtagacgcgcctgctcaaggcgcaaaggtggtgggacacgcgcaaggcgtgcatgtcttgtctgatctagccaacgtgggctggttcgtctccctcaacctcaacatggtgttccaaggtgacaggttcagcggatccacgctcccggtgatgggagttcttccaccggagggggagtgggctgtcgtgggagggacaggagagctggctctggcacgcggcacgatcaagcacagaatagctggaagcgcacccgagaccaacttccggcagctggatatccacgccttctacgcgaacggctcagccagctgcgtcgtaggttctgctgcagtgatagccgagaaggggtctgctcacgccaagtgatgccatgcgaaacagttgcatgcatcctgtctcaagtgcaaacctacaggaaagaagaagaaaaaaaaaacataaataatcagttggacggatgcaaatgaagtgaatcaagtgatggtgctgcccttcatgtcatgagaagtaggcagaggaggcaccgtttgtgtgtgtgtgtgtgtttccttacaaataaataagacatgggtctctggatggaagtcatgaaactaccaatccagcgtccatctatcatgcatgcacacggttcgctgtggtcgttgctgtacgcaactactgttgtcgttgtaatgtttgttgtgtaatattttcaggaaaaaaaagcagttaagtttgcttgagaaaagggtttgtatatcaagatacataactccgctttaaaaaatcagcattacaactactggcttaaggggatgaaagatgagatacagatgctactggcttttatcccagctttaaaaatcagcattacaagtagactacaaatcgatgcgtattaccgagatacagatgctactagagaggagatgagtgaccacctcactccttgagtactctaaatatcaaggtcaaatcgatgcgtattgaggtggcacaagaaacaaaa

SEQ ID NO: 88671 - DNA, 992 bp, Zea Mays
acagcagtcacacgaagacagcaagctaaacacttgcactctgtcgtctccttcccgagccaacaaatccttttgccaatggcacatcctgctagccatgcccgcctgaccaccaccatcctcttcatgtcgcatctgctggtcttggctactgcttcactgggatacccatgcccatgcccctacacctgcgagaacgagctgaactggcgcctgtatctgaagcaagttgccggtgctggaccagaccacaaccaggaggtaattttcagaccccagcacgctagtccgttcggcgtgactgccgttcaggactggacgttactagacgcgcctgctccaggcgcaaaggtgttagggcacgcgcaaggcgtgcatatcatgtctgatctagccagcgtgggctggttcgtctccctcaacatggtgttccaaggtgacaggtttagcggatctacactccaggtgatgggagtcattccaccggagggggagtgggctgtcgtgggagggacaggagaactggctctggcacgcggcacgatcaagcacagaatagttggaggcgcgcccgagaccaacttccggcagctggatatccacgccttctacgcgaacggctcagccagctgcgtcgtaggttctgctgcagtgatagccgccaagtgatgccatgcgaaacagttgcatgcatctgtctcaagtgcaaacctacaggaaagaagaagaaaaaaaacataaataatcagttggacggatgcaaatgaagtaaatcaagtgatggtgctgcccttcatgtcatgagaagtaggcagaggatgcaccgtttgtgtgtgtgtgtttccttacaaataaataagacatgggtctctggatggaagtcatgaaactaccaatccaatgtccatctatcatgcacacggttcgctgtggtcgttgctgtacgcaactactgttgtcgttgtaatgtttgttgtgtaatattttcagga

SEQ ID NO: 88672 - DNA, 153 bp, Zea Mays
tttgaaatgcataaatcacgatggtctcatagggcacttgttttgttcacagtatatcaaaatataaagtacaacgatattttgccaatattgttgcaatcatacacgatttttttgacatgacaaaaaatgaggagctagccctgtcttcgg

SEQ ID NO: 88673 - DNA, 449 bp, Zea Mays
tagcgcgaggacacgtgtcatatgaacgcaagttggtacctggaatctcaagtgccaggtcaagagcaggtaccactggaggaggcacatggtggatgttgcgctgtgttcgtgagatgtctagggcgtcgtctcccagttgacttatgcgccaaggacgatccttagttcgtgttatatttatcttttattttgtaagtcttccgctatgtaataaatactctgattattgtgacatttatctctatacactctgttattatatatgttgtcttctttggcgcatgtatgagatgcacctagctttgtcccttaaagccgggtgtgacactaggactgcgcagtcaataattttcgtgaatgtatacagtaaacaccgatgtgatgataggaacattgttgttcatcagttataatcttgtgccttgtttttgtgggttgaacattca

SEQ ID NO: 88674 - DNA, 1494 bp, Zea Mays
tcgcccccgccaggcgccagcctcccgtatttgatgtttcacaaacgcgtgagcggctcgccctcctctccagtccctcctccctccggtccgcacaggggagcagccggcagcagctagctaccacagtaccagcagcaataagctaatcagctacgatggcggactacgtgtatggccccgggcggacccacctgttcgtgccgggccccgtgaacatcccggaccccgtgatccgcgccatgaaccggcagaacgaggactaccgctcgccggcggtgccggcgctgaccaaggtcctgctggaggacgttaagaagatcttcaagaccacgacgggcacgcccttcatgatcccgacgacggggacgggcgcgtgggagagcgcgctgaccaacacgctgtccccgggcgacagggtcgtgtccttcctcatcgggcagttcagcctgctgtggatcgaccagcagcggcgcctgggcttcgacgtggacgcggtggagagcgagtggggccagggcgccgacctggccgcgctggagcgcaggctccgcgaggacgcgccgcggcacgccatcaaggccgtggccatcgtgcacaacgagacggccacgggcgtcaccaacgacctggccgccgtgcgcgcgctgctggacaagcacgcgcacccggcgctgctgctggtggacggcgtgtcgtccatctgcgcgctggacttccgcatggacgagtggggcgtggacgtggcgctcacgggctcgcagaaggcgctgtcgatgccgacggggatgggcatcgtgtgcgccagccccagggcgctggaggccagcaagacggccaggtccgtgcgcgtcttcttcgactggaaggactacctcaggttctacgacatgggcacgtactggccctacacgccctccatccagctcctctacggcctccgcaccgcgctcgacctcatcttcgaggaagggctggacaacgtcgtgaggaggcacaaccgccttgggacagccaccaggctcgccgtcgaggcgtgggggctcagcaactgctgccagaaggaggagtggttcagcgacaccgtcaccgccgccgtcgtgccgcccaacatcgacagcgccgaggtcgtcaggcacgcgtggaagcggtacaacctcagtctcggcctcggcctcaacaaggtcgccgggaaggtcttcaggatcggccatctcggcaacctcaacgaggtagcgcactgcagagtttggcaattcgtttaattaattaatcagtgcaacgtactatatcttgatgctcccaaacattatttttttttcttcttctttgtcagctgcaacttctgggatgtctgagcggtgtggagatggtgctcaaggatgtggggtacccagtgaaactaggtagcggcgtggcagccgcggcggcgtacctgtcaaactccacgccgctcatcccatctaggatctgagaacaatgtaaggggaggat

SEQ ID NO: 88675 - DNA, 2586 bp, Zea Mays
tcgcccccgccaggcgccagcctcccgtatttgatgtttcacaaacgcgtgagcggctcgccctcctctccagtccctcctccctccggtccgcacaggggagcagccggcagcagctagctaccacaggtacgcctgtctccggtccagtgcaatcttgtcttctttttggatttgtgatcgacgatgatgtagtatgtagcaaagtgtttgcttggcatgtgggctcaaggcgtaagtaaggatcagtctagaggtttggttgccaagttcagtgcactacgctgacactccctcctctccctgcgtgcactgctgctagtaccagcagcaataagctaatcagctacgatggcggactacgtgtatggccccgggcggacccacctgttcgtgccgggccccgtgaacatcccggaccccgtgatccgcgccatgaaccggcagaacgaggactaccgctcgccggcggtgccggcgctgaccaaggtcctgctggaggacgttaagaagatcttcaagaccacgacgggcacgcccttcatgatcccgacgacggggacgggcgcgtgggagagcgcgctgaccaacacgctgtccccgggcgacagggtcgtgtccttcctcatcgggcagttcagcctgctgtggatcgaccagcagcggcgcctgggcttcgacgtggacgcggtggagagcgagtggggccagggcgccgacctggccgcgctggagcgcaggctccgcgaggacgcgccgcggcacgccatcaaggccgtggccatcgtgcacaacgagacggccacgggcgtcaccaacgacctggccgccgtgcgcgcgctgctggacaagcacgcgcacccggcgctgctgctggtggacggcgtgtcgtccatctgcgcgctggacttccgcatggacgagtggggcgtggacgtggcgctcacgggctcgcagaaggcgctgtcgatgccgacggggatgggcatcgtgtgcgccagccccagggcgctggaggccagcaagacggccaggtccgtgcgcgtcttcttcgactggaaggactacctcaggttctacgacatgggcacgtactggccctacacgccctccatccagctcctctacggcctccgcaccgcgctcgacctcatcttcgaggaagggctggacaacgtcgtgaggaggcacaaccgccttgggacagccaccaggctcgccgtcgaggcgtgggggctcagcaactgctgccagaaggaggagtggttcagcgacaccgtcaccgccgccgtcgtgccgcccaacatcgacagcgccgaggtcgtcaggcacgcgtggaagcggtacaacctcagtctcggcctcggcctcaacaaggtcgccgggaaggtcttcaggatcggccatctcggcaacctcaacgagctgcaacttctgggatgtctgagcggtgtggagatggtgctcaaggatgtggggtacccagtgaaactaggtagcggcgtggcagccgcggcggcgtacctgtcaaactccacgccgctcatcccatctaggatctgagaacaatgtaaggggaggatatcgcaaacaaggccagcgacaacgagtgggcagacgaacgaacaaagcgttgctacatagtactctctcagaatgtaaagttaaatttcacacccagctgttgctacatagtagtatagttttatgaattacaggtttgattaaacttcaaattaatctacatgtatagccctgcccagatttaactatattgggaccgtattacttaccgatcaactctgctttacagtagtagtctttttgtttctgaaatcagatcataagacatgccattctcacaaacagaaaaaaaacactctcacaagtcacaaatcaccagtatgtattgctggtatcaagtcaagtctttgcgcgatcatagaataaaactgtttcgaaaaacgaagtacatatactgtaactcaatgtaaaaacggcgaaaaattcagtaacaaaaccgaaaaacttcaagcgaagtactggctgttgcgctgaagaacatcaggcagctttggcaagctccctgtcgacggcgaccttgaggaagctgccttcgtctaggaccatctgcacggggaggaagccgaggccgttggccacggcgagcatcacctccttcatctccgcgcggaactcgtgccggtccaccatgccgctgccgtccctgtcgaaccgcgcaaacaggccgcggtacagcgccccgaggtcctccggcgccaccgcggcctcgtccacgccgaagtgcctctccagcacccgcaggctcatgagctccccggccatctcggcgtaggtgagcaggccgtcgtggtcggcgtccagcgcggcgaagcggccgtccaccgaggagttgaaggcgcgctcgtcctccacgaagctccgcaccgttctcccgtccatgatctccacgctcatcgtcggattcctctcgctgttcgtgttccttggatgtgttggtgtgtgagtttgctctgggctctctgctctgcctttttttatagagtcgcgactggacgtacctgg

SEQ ID NO: 88676 - DNA, 2387 bp, Zea Mays
tcgcccccgccaggcgccagcctcccgtatttgatgtttcacaaacgcgtgagcggctcgccctcctctccagtccctcctccctccggtccgcacaggggagcagccggcagcagctagctaccacagcagcaataagctaatcagctacgatggcggactacgtgtatggccccgggcggacccacctgttcgtgccgggccccgtgaacatcccggaccccgtgatccgcgccatgaaccggcagaacgaggactaccgctcgccggcggtgccggcgctgaccaaggtcctgctggaggacgttaagaagatcttcaagaccacgacgggcacgcccttcatgatcccgacgacggggacgggcgcgtgggagagcgcgctgaccaacacgctgtccccgggcgacagggtcgtgtccttcctcatcgggcagttcagcctgctgtggatcgaccagcagcggcgcctgggcttcgacgtggacgcggtggagagcgagtggggccagggcgccgacctggccgcgctggagcgcaggctccgcgaggacgcgccgcggcacgccatcaaggccgtggccatcgtgcacaacgagacggccacgggcgtcaccaacgacctggccgccgtgcgcgcgctgctggacaagcacgcgcacccggcgctgctgctggtggacggcgtgtcgtccatctgcgcgctggacttccgcatggacgagtggggcgtggacgtggcgctcacgggctcgcagaaggcgctgtcgatgccgacggggatgggcatcgtgtgcgccagccccagggcgctggaggccagcaagacggccaggtccgtgcgcgtcttcttcgactggaaggactacctcaggttctacgacatgggcacgtactggccctacacgccctccatccagctcctctacggcctccgcaccgcgctcgacctcatcttcgaggaagggctggacaacgtcgtgaggaggcacaaccgccttgggacagccaccaggctcgccgtcgaggcgtgggggctcagcaactgctgccagaaggaggagtggttcagcgacaccgtcaccgccgccgtcgtgccgcccaacatcgacagcgccgaggtcgtcaggcacgcgtggaagcggtacaacctcagtctcggcctcggcctcaacaaggtcgccgggaaggtcttcaggatcggccatctcggcaacctcaacgagctgcaacttctgggatgtctgagcggtgtggagatggtgctcaaggatgtggggtacccagtgaaactaggtagcggcgtggcagccgcggcggcgtacctgtcaaactccacgccgctcatcccatctaggatctgagaacaatgtaaggggaggatatcgcaaacaaggccagcgacaacgagtgggcagacgaacgaacaaagcgttgctacatagtactctctcagaatgtaaagttaaatttcacacccagctgttgctacatagtagtatagttttatgaattacaggtttgattaaacttcaaattaatctacatgtatagccctgcccagatttaactatattgggaccgtattacttaccgatcaactctgctttacagtagtagtctttttgtttctgaaatcagatcataagacatgccattctcacaaacagaaaaaaaacactctcacaagtcacaaatcaccagtatgtattgctggtatcaagtcaagtctttgcgcgatcatagaataaaactgtttcgaaaaacgaagtacatatactgtaactcaatgtaaaaacggcgaaaaattcagtaacaaaaccgaaaaacttcaagcgaagtactggctgttgcgctgaagaacatcaggcagctttggcaagctccctgtcgacggcgaccttgaggaagctgccttcgtctaggaccatctgcacggggaggaagccgaggccgttggccacggcgagcatcacctccttcatctccgcgcggaactcgtgccggtccaccatgccgctgccgtccctgtcgaaccgcgcaaacaggccgcggtacagcgccccgaggtcctccggcgccaccgcggcctcgtccacgccgaagtgcctctccagcacccgcaggctcatgagctccccggccatctcggcgtaggtgagcaggccgtcgtggtcggcgtccagcgcggcgaagcggccgtccaccgaggagttgaaggcgcgctcgtcctccacgaagctccgcaccgttctcccgtccatgatctccacgctcatcgtcggattcctctcgctgttcgtgttccttggatgtgttggtgtgtgagtttgctctgggctctctgctctgcctttttttatagagtcgcgactggacgtacctgg

SEQ ID NO: 88677 - DNA, 2384 bp, Zea Mays
tcgcccccgccaggcgccagcctcccgtatttgatgtttcacaaacgcgtgagcggctcgccctcctctccagtccctcctccctccggtccgcacaggggagcagccggcagcagctagctaccacagcaataagctaatcagctacgatggcggactacgtgtatggccccgggcggacccacctgttcgtgccgggccccgtgaacatcccggaccccgtgatccgcgccatgaaccggcagaacgaggactaccgctcgccggcggtgccggcgctgaccaaggtcctgctggaggacgttaagaagatcttcaagaccacgacgggcacgcccttcatgatcccgacgacggggacgggcgcgtgggagagcgcgctgaccaacacgctgtccccgggcgacagggtcgtgtccttcctcatcgggcagttcagcctgctgtggatcgaccagcagcggcgcctgggcttcgacgtggacgcggtggagagcgagtggggccagggcgccgacctggccgcgctggagcgcaggctccgcgaggacgcgccgcggcacgccatcaaggccgtggccatcgtgcacaacgagacggccacgggcgtcaccaacgacctggccgccgtgcgcgcgctgctggacaagcacgcgcacccggcgctgctgctggtggacggcgtgtcgtccatctgcgcgctggacttccgcatggacgagtggggcgtggacgtggcgctcacgggctcgcagaaggcgctgtcgatgccgacggggatgggcatcgtgtgcgccagccccagggcgctggaggccagcaagacggccaggtccgtgcgcgtcttcttcgactggaaggactacctcaggttctacgacatgggcacgtactggccctacacgccctccatccagctcctctacggcctccgcaccgcgctcgacctcatcttcgaggaagggctggacaacgtcgtgaggaggcacaaccgccttgggacagccaccaggctcgccgtcgaggcgtgggggctcagcaactgctgccagaaggaggagtggttcagcgacaccgtcaccgccgccgtcgtgccgcccaacatcgacagcgccgaggtcgtcaggcacgcgtggaagcggtacaacctcagtctcggcctcggcctcaacaaggtcgccgggaaggtcttcaggatcggccatctcggcaacctcaacgagctgcaacttctgggatgtctgagcggtgtggagatggtgctcaaggatgtggggtacccagtgaaactaggtagcggcgtggcagccgcggcggcgtacctgtcaaactccacgccgctcatcccatctaggatctgagaacaatgtaaggggaggatatcgcaaacaaggccagcgacaacgagtgggcagacgaacgaacaaagcgttgctacatagtactctctcagaatgtaaagttaaatttcacacccagctgttgctacatagtagtatagttttatgaattacaggtttgattaaacttcaaattaatctacatgtatagccctgcccagatttaactatattgggaccgtattacttaccgatcaactctgctttacagtagtagtctttttgtttctgaaatcagatcataagacatgccattctcacaaacagaaaaaaaacactctcacaagtcacaaatcaccagtatgtattgctggtatcaagtcaagtctttgcgcgatcatagaataaaactgtttcgaaaaacgaagtacatatactgtaactcaatgtaaaaacggcgaaaaattcagtaacaaaaccgaaaaacttcaagcgaagtactggctgttgcgctgaagaacatcaggcagctttggcaagctccctgtcgacggcgaccttgaggaagctgccttcgtctaggaccatctgcacggggaggaagccgaggccgttggccacggcgagcatcacctccttcatctccgcgcggaactcgtgccggtccaccatgccgctgccgtccctgtcgaaccgcgcaaacaggccgcggtacagcgccccgaggtcctccggcgccaccgcggcctcgtccacgccgaagtgcctctccagcacccgcaggctcatgagctccccggccatctcggcgtaggtgagcaggccgtcgtggtcggcgtccagcgcggcgaagcggccgtccaccgaggagttgaaggcgcgctcgtcctccacgaagctccgcaccgttctcccgtccatgatctccacgctcatcgtcggattcctctcgctgttcgtgttccttggatgtgttggtgtgtgagtttgctctgggctctctgctctgcctttttttatagagtcgcgactggacgtacctgg

SEQ ID NO: 88678 - DNA, 478 bp, Zea Mays
ggtttgtggcatattacgtcttggttttcatcatgagtcaagcatggaggctgcaaaagaattggtggagcagcagctcattctaaacagtctacggtggaaaggaaaagatctagctaagagtgctttagactgaagcgagcctcaaatagattcacttaatggtaaattgttattgaaatttctaagttaatatgtcatagaaatgcctaccatgctcatgatctaatcgagctcctggtgtctaagaatgtttaaagggcgagtgacaaatgatctgaagaaacctgatgacctaatattttacaaaccaaaattcaaacatattttttgtgatatggatgatatatcctttgctctctgcacatcttcgatgttgtgttacaaaccacaccaaatgtggctaaggatactcatgatctaccacatctagaggtgcaatgctaacactaatacgagctttgtggaatgtgatagg

SEQ ID NO: 88679 - DNA, 792 bp, Zea Mays
atggcggcggctgggccctttggtgggctgtgcaaccggccaaatggtggcgataggtcctcctatcgtgtggctgcatatgacggcgcagggtggcgtgggccggcagggcctggtgcagggtggtggtggcagccgttggcttcggtggccgtgtgtgccagggccgatggtgacagtcggcatcggctttggcgcacgcgacagtgtggcgcacgtggccaggtgttgcccggctctctgtgcccagccagaggggatggtgatcaatgcagctttgtggctgctgcggcagccggcgtgtcaatgccctctgaagggtttatgcgagatgtcaggatgacagcggaagctgcatgctttatctctaggtcttggcatgacaatgtgttggagatttcttgggcaaaagcctcggcgacggtgatgcctgtggacgtcgcttctcctattgagggtgtcgcattccccaacactgttttccttggacgaaagttcggtccatcttggacaagtgacggtggcgtcctagacatcactcgcttcctgaaggtggggctttgcaacgtgaagtcgaagctattgcttcaggtgttgtggctcgacaatgatgtcacgaaacccccattcttcgtggactggattgtttcggaggtcgggaaattgctgggggcggtcggagaatcaagctcgttggtgaagaatcggagctgcctcacatggggtgtgtttagacttggtaccgacggcgcaccacaatcttcttccttatgtgatggtgtttggatgtag

SEQ ID NO: 88680 - DNA, 357 bp, Zea Mays
ttttaggctgcaacagtagtggttaaggaatccgttgaaccactgctagatgattaccggcctccaggaataaaatctttgaagttcagcaaattttctcttggaaatgtgtcaccaaagatagaaggtattcgtattcaaaatcttcaaccaggtcaaatcatcatggatatagatttccgttggggtggtaatccaagcataatcctagctgttgatgctgtagttgcatcactgccaattcagctcaaggatcttcaggtctatactgtcatacgtgttatatttcaactgtctgaagacatcccttgcatttctgctgttgttgtggctctccttgctgatgcaagtatctag

SEQ ID NO: 88681 - DNA, 805 bp, Zea Mays
gttttataacatccatttaattatactcgacatatgtactctctaagcactcctcgtaaaatttgcacctaatacctaaacttcccctcaaacaacacttctactatccaatcatgacgtcaaaaaaatcatggcacacagccaaattatttcatcatacatcaaataccattacagcaataattatataaccaaatcattcattaactaagtagtcggacaaacgacttggctcacgacatcatgctccgacccgatttcagcaagaacgaagacggccaccagttcgagcatatcatcaaacacctaaggagcgttgaacttaaccttcttctccacctatttctccaaggattttactccatatcgcacacatcaacacacataaaacatcacatcagcaggatattaacaagaactagtaaaacaactaagaaatttagagatcaccatgggagcagcagaggtggctgggcgagctaggttgggcgaccatgggacttgtgcttggggaaggagatggaagaggggctatccatggcaacaagagagggggctggcgtccataccatgggcagcagggagggcgctggacagagggcaggggcgagctccagggaggagcgtcgagctgcagcagggaggggcggccatggcaggaaggggagggcgccatgggagagacgtcgagagagcagggatgaccagcgaggctctgtaggatcggcgcctagggaggaggcgacgtgaagaagctgacttcctatgcgcaggggatgagggagagatcacaggtgaagaaact

SEQ ID NO: 88682 - DNA, 939 bp, Zea Mays
aggtccaattgtccagtactccggtcagtgtttaatgccgcaccgttcttgcgcatgttcgtcccgggccccgtgaacatcccgggccccgtgaaccgcgccatgaaccggcagaacgaggactaccgctcgccggcggtgccggcgctgaccaaggtcctgctggaggacgtgaagaagatcttcaagaccacgacgggcacgcccttcatgatcccgacgacggggacgggcgtgtgggagagcgcgctgaccaacacgctgtccccgggcgacagggtcgtgtccttcctcatcgggcagttcagcctgctgtggatcgaccagcagcggcgcctgggcttcgacgtggacgcggtggagagcgagtggggccagggcgccgacctggccgcgctggagcgcaggctccgcgacgacgcgccgcggcacgccatcaaggccgtggccatcgtgcacaacgagacggccacgggcgtcaccaacgacctggccgcagtgcgcgcgctgctggacaagcacgcgcacccggcgctgctgctggtggacggcgtgtcgtccatctgcgcgctggacttccgcatggacgagtggggcgtggacgtggcgctcacgggctcgcagaaggcgctgtcgatgccgacggggatgggcatcgtgtgcgccagccccagggcgctggaggccagcaagacggccaggtccgtgcgcgtcttcttcgactggaaggactacctcagccgaggccgttggccacgccgagcatcacctccttcatctccgcgcggaactcgtgccggtccaccatgccgctgccgtccctgtcgaaccgcgcgaacaggctgcggtacagcgccccgagctcctccggcgccaccgcggcctcgtccacgccgaagtgcctctccagcacccgcaggctcatgagctccccggcca

SEQ ID NO: 88683 - DNA, 189 bp, Zea Mays
atggccgccgccctctgcctgcagcgccagagcctcgccgccaacccctttctcttctccgcccatggcctccgctaccgcaagctcgaggtcatcctcactacgaacattgacgggttagacgggattgacaatcacgagcctattaagacaaaggataagaaattttacgagagatctgaacactag

SEQ ID NO: 88684 - DNA, 2630 bp, Zea Mays
acacacagcacacaggaaagcacaccatcttctgtctccataaacaagctacctgcagcgatgtgctccactgcagtgctgctagttcgcacatgcgttgtgcttgtgtgtttggccgccatggcgcgagcgccggccaaggtccatgctgccgccggcaccggggatgggctccttgttatccctaccaccgcctccctgtcgcactgcccctctcgctgcggggatgtacaaatctcgtacccgttcgggatagggccgggctgcttccgtcaaggcttcgagctcacctgcgatcaaacagctccttctcccaggctcttcttcatgtcggggaacagctcgattcaggtgacttctctagatgtcggcaacaatatgggttgggcttcagctgttgggttcaacgtcaccatgagcgcaggcgtggacacctacaccaagtcttgggaggcccctactgccactggtgccagtttttatgcagataataataataatctgtacactgttggatgtggtgtctacgtctacgtgttgggtgataatatgacagatatcattggttattgcacgagtatttgcacagataacagagagatcatggagagcgcaaacactggttatggtgtctgtgaagggttaggctgctgcagcattccaatacgtggccgccaaggcttcactctcaaactaggtcgcctcaatagtaccattccacagttcggtgaagcgctatccagtgtcaagattatcgtttcgcaaaactataaattcgttactgatgatgtttacgcaagttgggtgaatacaagcaacgttaatgaaatgatattttacattacaatcatggaccaaccgaactgcgcgagtgcccagtcccaagagaacaaggatacctacgcatgcactagtgaaagcatctgctacgacgttctaccaccggcagtatctcaaggaggctacatttgcaagtgttcccatggcttacaaggaaacccataccttcaaaataactgtacagatattgatgagtgcactattccaaataaatgcaatggaatatgccacaattttaatggaggcttcaattgtacaagttgccctcatgggaaagagtatgatccaaaaaaacaaaaatgtgtcatgtcagctaagcagtgtattctaatttttgggattgtaattgggcttgtttgtggccttggatccataagttttgcacttggtgcaattgtactcaccggtaagtggaaaaaaggcatccaaaggagaattcgaagagagtacttcaagaaaaatcaaggtctactcttggagcaactaatatcgaatgaaaatgctacaaccaaaacaaagatattcactttggatgaactagaggaagcaaccaacaagtttgatgctactcgtgttctaggtcatggtgggcacggcactgtttacaaagggattttgtctgatcagcgtgtcgtggctataaaaaaatctaaaatagtggagcaaatagagatagatcagttcatcaatgaggttgctattttatctcaaatcattcaccgcaatgtggtgaagctttttggttgttgcctagaagatgaggtacccttgctagtgtatgagttcatatcgaatggcactttgtatgacattcttcatgaaaatattgcaacaaaatgcttgttgtcattggatgatcgaattaggattgcaacggaagcatcaggagcacttgcttatctacactcagctgctgcaataccaattttccatagagatgtgaagtcttctaatatactcttggacgacaacttcactgtaaaggtttcagattttggtgcttcaagatctctatcccttgatgaaacacatgtggtgacaattgtccaagggacattcggttatttagatccagagtattattatactggttctctaactgagaagagcgatgtgtatagttttggagtgatacttgtggaacttttgacaagaaagaaaccaatttttatcaatgaatcgggtgccaaacaaaacttatctcattacttcattgaaggactacaggaagggactctcatggaaataatagattctcaagttgtggaagaggcagaccaagaagagattaatgatatctcctcacttatagaagtgtgcttaagatccaaaggaggacatagaccaagcatgaaagaagtagatatgagattgcaatgtctaagaacaaagaggctacggaataaaacacatcttttgattgaaaagggtggagaaatggaacctttgttatgcgcagaagctcagcacccacatgaacgtatcaatccaatttataatgaggaacatttaataattccagtgatgtctgggtgctacagtttggagcaagaacttgcggcagcatctagtatggttcgctaacttggtatttgcttggatgttggacacatctatagtaaccatctattttcagagaggaactatggtatattttgttcccttcgcataagactatggtatatatggtgcgtatatgtatataatatatatgacattgctatgtttacatataatgtaatttccgtatttcaaactgtaatgcgttttagttttgttttgattacaaa

SEQ ID NO: 88685 - DNA, 1470 bp, Zea Mays
gaaccgcatcaggcccccacgttgcctcccgcacgggcgacttggccggtaaccctagccaccacaccttctccccatccctcccctctcccactatgctgccatcgagcaggccgccaggatggcaacggctgggccctttggtggtgtggtggcgcgagttggcgcctcgtgagggctcgtagctggacgggccttagcctgagcagtggtggatccgcgggatagagctcggccggagacagatccgtggggtggtgttcgccgcgtcagccgggaaggggctcgacaccgacgcggctgtcgagggcggagaggagttcagtgcaggcacatggctgccggagatgggagtggatggttggagatggccctcggtgtcgatgcctcgacggtgctcgtggttggccggttttggcagacctcgtgcagggcttggacgtcgacgctcggggaggggcgcgggcggagaggacgcgtccagtggtctggcggggtgtgtcggcagggctgcgcaaccggccaaaatggcggcgataggtcctctcgtttggttgcatacgacagcgccggggtggcgttggccggcagcggcagggcctggcgcagggtggtggtgctggttggcttcggtggccgacagtcggcatcggctctggcgcgcgcgcgacagtgtggcgcacgtggccaggtgttgcccggttctgtgtgcccaatctgtgtgcccagccagagaggatggtgatcatcgcagctttgcggctgctgcggcagccggcgtgtcgatgcccctctaaagggtttgtgcgagatgttaggatgacagcgaaagctgcatgctttgtccctaggtcttggcatgacgatgtgctggggatttcttgggcgaaagtctcggcgacggtgatgcttgtggacgccgcttctcctgttgagggcgtcgcattcttcaacactgtcttctttcgatgaaagttcggtccatcttggacaagcgacggtagtgtcctagacatcactcgcttactgaaggtgtcgttattaaagttcttctcggccacgacatcaccctcgattgttgttttcgcttctcggcgtctggtatgcgtgtgaaggtggggctttgcaacgtgaagtcgaaggtgttgcttcaggtgatgtggctcgacaatgatatcatgtggcgaaacccccattcttcgtggactggattgtttcggaggtcgagaacttgccggggaccggacagagaattaagctcgttggtgaagaatcgaagctgtctcacatgtgatgtgtttagacttggtaacgacggcgcactgtagtctttctccttatgtgatggtgtttggatgtaggcgtcgtcgtgttcctttagccatgtatagcctgtctcgaggagttacaactgcttgttccttatgttgagctcgacaacgatgatactggatgggttggagggttgcc

SEQ ID NO: 88686 - DNA, 2280 bp, Zea Mays
cgatgagcccaggacaatagcgcaggctccgtcttccccaccgtctcttcttcttcccccaagctcgtccatggccacctccccaccatctccctcagcacacgccgagctcccctccgatctgttcagagcagggagcagcagctcccattccccagcaacatcttcctcatcggcgccccctgctcggagcctcccatggcgcaatcgcccatggccgaggttccccctgcttggcctcgcttccgtgggcactagcagcagaagctcccaagcacagagccgttcttccccaaggagcgggcgccatttctcccatggccgagctcaccacctgctaggacaagccggacccctctgctcctccatggctgtgagctcaacgtccccttcttcctcctctaatgggcagctcgactccctctactccattcccccactcggcacccaactttctacaggagcttgccaatgctctcctccccccactcagcactcctcttcccttttctctgtgatgggcgcatgcaaccgtaagctccatggtcagatccctgtcttccccatcgacgctagttattcgaacctgcaccctgtcaacttccccaaggcaaagactcggcgcccccttctctgtccctactcctccctctatggatattcccatggcgtagttccccagccagcttcctgcctccggcaagcagcaattgttccctgctcgcgagctcgccgccaggactcccaagtcgctgcatgcccctgcccaagctctaaatccatggctggaatcctcaccggaagcgacgctagccgcgagcctcactgctccttgtgcatagttgttgttgtccatcgccttgaagttcctccgtcatcgtgctgcttcttcgcctctcctccatagcacgccctcccctacagctcaccatcgatctccattttggattgttgtggccatgtgaatggggtgttcgacgaaatgctaagtagggcagcgagtcgtggagagcatcatcgatcttgatgtgctcatcattttctcatgcaaccccgccgcccatgcagctccagcacgccgatgacgtctcccaactcgtccctgccttgtccatcgctgtcccatgcctcgctgtgctacgctagccgcagcagcacattacccctatgtcttacccttgtcgtgcttgcgtgctgttcgacaaaatgcccaacagcagcatcccggtgtctagtgtcatcgcttttggtgccctgctccattcctgcctgttgacgctatccttccggttttttttgccacacaaaacagcagccgcaacaactcctctatggcgtgtgctccaccttgttgcgtcgtggtgcccgtcgtgctccttcggcttcgctctgctctccggtacacgttggcacgttcatctccacgccatatgtgcagcggtatcaaccgagttgtttatggtaagccgatttgttgtttcgggtagtgttcgattaacggatataatatattttggtaatcacaatgattctttatgtgttgcacaaatgcgtcgtggttatattaaattgtggttaaacgccttgtcataaaatagtgtgttggttgtcgcaacttttaatgtgtagggtatgcttagtgttccaagcagcggccaataagtagtctacattattttgtattatatatatataaatttgctggcgtaagtatgcacaaagagtttgccattgaacaggtgtgctggagtatgttacatcaattgttgcgccaggtggatggaagtgttctgaatacatgccgcaatatggttgtattcgtgacaaggaggtgtaggttttactcgactagaagtttggttgatgtggctaggcattgctttggcttgtgtggtgaggtgatgacatgccaaagtagtcatcgtttcctctatgtttataagtcgagtcgtgacgatacacagtatgcgtttgttaaattatgctttgcatattgtgtatggttgtgctcacgatttcgattagacacattgggtggtcaagtaggttcgtgatacaagttgtgtaatgtagttagtttgttttagaatgattattgaaatgctcagttcatatgataaacatgtatgtgttcacgatttgggaagtaagtgcatggtggttgcgagttggagattagtggtttacggttcgtatgatttggtcgaagtgcgaatatacgcgtaaatatgtatatttataaaaaaatgttgtagtgtatgttgtgtcttggattgcgat

SEQ ID NO: 88687 - DNA, 2349 bp, Zea Mays
ggttcatagtaatcagctacgatggtggactacgtgtatggccccgggcggacccacctgttcgtgccgggccccgtgaacatcccggaccccgtgatccgcgccatgaaccggcagaacgaggactaccgctcgccggcggtgccggcgctgaccaaggtcctgctggaggacgtgaagaagatcttcaagaccacgacgggcacgcccttgatgatcccgacgacggggacgggcgcgtgggagagcgcgctgatcaacacgctgtcctcgggcgacagggtcgtgtccttcctcatcgggcagttcagcctgctgtggatcgaccagcagcggcgcctgggcttcgacgtggacgcggtggagagcgagtggggccagggcgccgacctggccgcgctggagcgcaggctccgcgacgacgcgccgcggcacgccatcaaggccgtggccatcgtgcacaacgagacggccacgggcgtcaccaacgacctggccgccgtgcgcgcgctgctggacaagcacgcgcacccggcgctgctgctggtggacggcgtgtcgtccatctgcgcgctggacttccgcatggacgagtggggcgtggacgtggcgctcacgggctcgcagaaggcgctgtcgatgccgacagggatgggcatcgtgtgcgccagccccagggcgctggaggccagcaagacggccaggtccgtgcgcgtcttcttcgactggaaggactaactcaggttctacgacatgggcacgtactggccctacacgccctccatccagctcctctacggcctccgcaccgcgctcgacctcatcttcgaggaagggctggacaacgtcgtgaggaggcacaaccgccttgggacagccaccaggctcgccgtcgaggcgtgggggctaagcaactgctgccagaaggaggagtggttcagcgacatcgtcaccgccgtcgtcgtgccgcccaacatcgacagcgccgaggtcgtcaggcacgcgtggaagcggtacaacctcagcctcggcctcggcctcaacaaggtcgccgggaaggtcttcaggatcggccatctcggcaacctcaacgagctgcaactgctgggatgtctgagcggtgtggagatggtgctcaaggatgtggggtacccagtgaaactaggtagcggcgtggcggccgcggcggcgtacctgtcaaactccacgccgctcatcccatctaggatctgagaacagtgtaaggggatgatatcgcaaacaaggcagacgaacgaacaaagcgtgcagacatctccgcttctgctgcctcgtagagcagcttattgcctgcagtaacaaactatctcagaatgtaaagttaaatttcacacccagttgttgctacatagtagtatagttttatgaattacaggtttgattaaacttcaaattaatctacatgtatagccctgcccagatttaactatactgggatcgtattacttaccaatcaactctgctttttacagcagtagttttttttctttctgaaatccgatcataggacatgccattctcacaaacagaaaaaaaaaacacactctcacaagtcacaaatcactggtagtctggtatgtattgctggtatcaagtcaagtctttgcgcgatcatagaataaaagtgtttcgaaaaacgaagtacatatactgtaactcaatgtaaaaacggcgaaaaattcagtaacgaaaccgaaaaacttgaagcgaagtactggctgttgcgctgaataatatcaggcagctttggcgagctccctgtcgacggcgaccttgaggaagctgccttcgtctaggaccatctgcacggggaggaagccgaggccgttgccacgccgagcatcacctccttcatatccgcgcggaactcgtgccggtccaccatgccgctgccgtctctgtcgaaccgcgcgaacaggccgcggtacagcgccctgagctcctccggcgccaccgcggcctcgtccgcgccgaagtgcctctccagcacccgcaggctcatgagctccccggccatctcggcgtaggtgagcaggccgtcgtggtcggcgtccagcgcggcgaagcggccgtcaaccgaggagttgaaggcgcgctcgtcctccacgaagctccgcaccgtgctcccgtctaggatctccacgctcatcttcgggttcctctcgctgttcgtgttccttggatgtgttggtgtgagagtttgctctaggctctggcctctgcgctctgcctttttttatagggtcgcgactggacgtacctggaaggcgcgtgtgggacgacggtttctgcagacgggttgggctgggc

SEQ ID NO: 88688 - DNA, 1698 bp, Zea Mays
ccaaatttgtaatcaaaacaaaactaaaacgcattacaggaaattacattatatgtaaacatagcaatgtcatatgtattatatacatatacacaccatatataccatagtcttatgcgaagggaacaaaatataccatagttcctctctgaaaatagatggttactatagatgtgtccaacatccaagcaaatactaaggttagcgaaccaaactagatgctgccgcaagttcttgctccaaactgtagcacccagacatcattggaattgttaaatgttcctcattataaattggattcaaacgttcatgtggatgttgagcttctgcgcataacaaaggttccatttctccacccttttcaatcaaaagatgtgttttattccgtagcctctttgttcttagacattgcaatctcatatctacttctttcatgcttggtctatgccctcctttggatcttaagcacacttctataagtgaggagatatcattaatctcttcttggtctgcctcttccacaacttgagaatctattatttccatgagagtcccttactgtagtccttcaataaagtaatgagataagttttgtttggcacccgattcattgataaaaattggtttctttcttgtcaaaagttccacaagtatcactccaaaactatacacatcactcttctcagttagagaaccagtataataatactctggatctaaataaccgaatgttccttggacaattgtcaccacatgtgtttcatcaagggatagagatcttgaagcaccaaaatctgaaacctttacagtgaagttgtcgtccaagagtatattagaagacttcacatctctatggaaaattggtattgcagcagctgagtgtagataagcaagtgctcctgatgcttctgttgcaatcctaattcgatcatcccatgacaacaagcattttgttgcaatattttcatgaagaatgtcatacaaagtgccattcgatatgaactcatagactagcaagggtacctcatcttctaggcaacaaccaaaaagcttcaccacattgcggtgaatgatttgagataaaatagcaacctcatcgatgaactgatctatctctatttgctccactattttagatttttttatagccacgacacgctgatcagacaaaatccctttgtaaacagtgccatgcccaccatgacctagaacacgagtagcatcaaacttgttggttgcttcctctagttcatccaaagtgaatatctttgttttgtttgtagcattttcatttgatattagttgctccaagagtagaccttgatttttcttgaagtactctcttcgaattctcctttggataccttttttccacttaccggtgagtacaattgcaccaagtgcaaaacttatggatccaagaccacaaacaagcccaattacaatccctacatccattaaatgagaccatgaatatttcatgtcttttaatttgttgcataaagacatgactcaccaaaaattagaatacgctgcttagctgacatgacacatttatgcttttttggatcatactctttcccatgagggcaacttgtacaattgaagcctccatcaaaattgtggcatactccattgcatttatttggaataaggcactcatcaatatctgtagcaataagatggttgtaaaggttg

SEQ ID NO: 88689 - DNA, 526 bp, Zea Mays
cagtcctcaccggcttctcctcccttcctgtcaccgatggagctgttcgcacgcgcgaaggtggtgcggctcaggagccaccacaacaagttcctgtacgtggacaaggacgaggtgcgcgtgacgcaggaccgggacgggtcctcggcgaacgcgcggtggaccttcgaggcggcgccgcacagcgcgggcgccgtccgcctgcgcagccgctacgggcgctacctcaccgcctccggggagtcgttcctgctagggatgacggggcggaaggtgacgcagacggcgccccaccaaagcgtccgtggactgggagcccctacgggacggcttccaggcgcgcctccgcaccaaggcgggtcacttcctccgcgccaacggggggctcccgccctggaggaactcggtaacccacgacgtgccccaccgcaccgccacgcaggactgggtgctctgggacgtcgaggtcgtgcagctcctcacgcctacgccgcggcccgagcgcaccggctccgcgcctgtcggg

SEQ ID NO: 88690 - DNA, 223 bp, Zea Mays
cacttaacccttgcatatgtcaacccgccaccggggttcttaagaccagatcaggttcacgcgaaccgagagcacagatacaccaccgtccagcctcttgccacggagggtacacgctactctcgccaccgctccacgcccattccgtgtcatcttattctggccttagtctgcccgaggcaaggcttacccatgacgaggcatgtgaccagttaaagggtcc

SEQ ID NO: 88691 - DNA, 549 bp, Zea Mays
agcctccaaatcaaggctgcaaccttttgtttttcttacttatttgacccaacaagaattcaaacaataatgttacaagtttgacaggaaaaagccccagacccgctcacgtcgccctgcttgggcggctcgggcagcaaattctagccgccgccgccaccttggccgcggcgcttcccgcacgccctgcaaggacggcggtggcagggagatgctcccccttgctccgccactccccacccctctccctctgcgccgacctaggcaggtggcctggcgccggcgcccgcgcgctcgcatggccgtggctagcccgcggtggcggcgtccgtgcgcgtggctagcccgtagcggcggcggcggcggttgcgccttgtccgtgctcgtggcgcggtggttgggtcgggtgtggcccgtatggaacttggcctggcggcggacctgcagctgccagcggcgaggtagatgtggaagagcagcaggtggtgggtcgtgggacggcggcctcggcggttcccggcgtcgtggcttcggttcacgcggtcgact

SEQ ID NO: 88692 - DNA, 384 bp, Zea Mays
atgcctaggtacttgttcgctgctgtggccgcagctgtagccgtccgaatagagagtgatcgttttggacacttatcgatggcactcagcgcttcgtcaaaggtcgaaccaatgtcacagaaattggatcttcgttctgactataccgagttaaccccgccaatacgtctcaagatttttgggctctcgagtctcgaaagagctgagtccaccctgcagaataactatcaagaatatgtgaagctaaaggcacgagttgaggttttacagcagtcacaaaggaatcttcttggcgaagatctagctgcacttagcccaagtgaacttgaccagcttgagaatcaagtagacaagaccttgaagcaaataagatcaagaaagtaa

SEQ ID NO: 88693 - DNA, 2764 bp, Zea Mays
tcataaaccccctccttgatcacctttcctaaccgctaaacttattagatccaccctcaccaaccagccgcctgacgttcgagccgcaccggccctaaacccttccacctccagccgccataactgtaatcccttccaccatcagctgtccctccgttcgagccgtcgacgccctaaccctatcaccttctggccgcccaaatccctttcggctcctgccgccctctgtttaaggcgcagaccatggagtcgtcggttatggcggcacagaccatggagtcacaggctatgatggcgcaggtcttagtctttaggccatggagtcgcagtcaggcgttcaagatgctctgagacttgtgtcaggttcttccaacatgcatgatggattcagtacaccaaaaaaattaatatccttctgacatcgctgtccatctgtgtacttgattgtgatgataaattgaagccagtaattggaacgtcatttggttctctagaggaggtggaagaattgtacaagatatatgctcttgagaattttattggctgcaacattccagaacatatcgaaatccatccaccatccgatgttcactcccagtaaaaacatcaagaaatccaaagaactatttaaatcgtgtaaagggaaaaatagtaaagtgagacgaaggtagtcaaacagtcatattgctaaagtattacaggtatgagaaagaatccaacaacatgttgaggagcttctacagtgttattggcatgggaattttgttagcttctatagtgctattggtatgttgaggagcttcaaccaggtatggaatttttaactctagcgagagtttttagttgtcacacactaatggctgaattggggaaagtagtaactgaaaatgagagtaaccagcatcaacaatagattgctttcaaaattcaggaggatagatccttgttttgtacaacatttttttaagtataagagttttaaaatagaacatagcagcatgaaaggcttattttttccagaacatagtttaatagacttaataagtttaaacgacccataattctggtgctctattctgtaagtataagagttttaaagtagaacatagcagcatgaaaggcttatttttttccagaacatagtttaatagacttaataagttcaaatgacccataattctggtgttctattctgtcttttatctgttgggtcattaaaatctatagactttagcgtcctatcttgtcatgtgttagtgacgtatgaaatcatttggagtcgatgggaagattaatagccaaaaatgttagaagatcatgcttgtttagacctctatgttgtacggaccagcaggtttgaaatgatgttgtcactgatccttgttctcaactgttgtattaagcaagtactaccatggggaagtggggtgggactagtccaaatgttgtagttactagagttagcaagcagaggaattggtaatggtgatgcattctcaacttcttatgtgtgcttgtcgttcgatcgtccatcagtttttagacgtacaaaacatatcaccgcattgacgtccatggctgcgagtacagtacagtggtcggccggttccaagtttacaaacagcaagcagtactagtgagtaggtgacattagcagtacaagccctgaaacctgcaactaagcacgatagagagtaggggtggagctcaggctcgtccatctcggttaggtggaaatggccggcatatgtgtttctttcatgctttactgcatcctgtatttttattttgttgcactggcacgaccgcctggcactggcactggcaccccgcgtactgatctgatgctgtaatagcacgtagcatgcgttcagattagttaggatagggagctgagctcgctgccaacaaggtcaatactagcatccatttttttgcaaactaggacacaatcaggtgaaaagcttgagctgcattctttgtctatttaactttattagttctgtttgtttcgtggtatgctgttatttacatgtaagccctagagattcttttattgatgttaaacaattacttttggatgctcctgaaacatgcttctatgcatgatacaatttgatattgcatactgaagtcagctcatcagttagaagactacaatgaaatatctgaaatagcagatataacttctagtggatgttcactggagatggttgctagtatgtaacaacttctagtttcttctctattgtcatatatagtgcttattttctggagctaacgtaaatgttctttcagcaacatacaatgagaggtctattaggtcacatctctgacgtgtgaaggggctactatctctgtctagtctttatgtttccctgtcaacgtccttagctctgcttcaggagtctgctcaaggaaaattagcaggacttatatatgtgatctctgttcactgatgtggctggagcgtcatgtcaactgctcaccctccccctaacaaattaaactacacggatgagtggagcttcatgttggatgatccatgcaccttttaagttttggaacgtcgtactcaaatgtagcttgtgttggttgaacctattgtactttcttttggatttaaattatatgatatttaaacattttttatgtttaatacttgtgttggatgctttatgcttcaaataatcatcacaattcgtttgatgtttaatacttgtgttggatgctttatggttcaaatattcgtcacaattcgttt

SEQ ID NO: 88694 - DNA, 849 bp, Zea Mays
atgtacatctatatgcacaacgagacggccacgggcgtcaccaacgacctggccgccgtgcgcgcgctgctggacaagcacgcgcacccggcgctgctgctggtggacggcgtgtcgtccatctgcgcgctggacttccgcatggatgagtggggcgtggacgtggcgctcacgggctcgcagaaggcgctgtcgatgccgacggggatgggcatcgtgtgcgccagccccagggcgctggaggccagcaagacggccaggtccgtgcgcgtcttcttcgactggaaggactacctcaggttctacgacatgggcacgtactggccctacacgccctccatccagctcctctacggcctccgcaccgcgctcgacctcatcttcgaggaagggctggacaacgtcgtgaggaggcacaaccgccttgggacagccaccaggctcgccgtcgaggcgtgggggctcagcaactgctgccagaaggaggagtggttcagcgacaccgtcaccgccgtcgtcgtgccgcccaacatcgacagcgccgaggtcgtcaggcacgcgtggaagcggtacaacctcagcctcggcctcggcctcaacaaggtcgccgggaaggtcttcaggatcggccatctcggcaacctcaacgaggtagtgcactgcagggttgcgttaccgttatatattggcaattcgtttaattaatcagtgcaacgtactatatcttgtcttgatgctcccaaaaaaaattcttctcttctttgtcagctgcaacttctgggatgtctgagcggtgtggagatggtgctcaaggatgtggggtacccagtgaagctaggtagcggcgtg

SEQ ID NO: 88695 - DNA, 1874 bp, Zea Mays
atgtacatctatatgcacaacgagacggccacgggcgtcaccaacgacctggccgccgtgcgcgcgctgctggacaagcacgcgcacccggcgctgctgctggtggacggcgtgtcgtccatctgcgcgctggacttccgcatggatgagtggggcgtggacgtggcgctcacgggctcgcagaaggcgctgtcgatgccgacggggatgggcatcgtgtgcgccagccccagggcgctggaggccagcaagacggccaggtccgtgcgcgtcttcttcgactggaaggactacctcaggttctacgacatgggcacgtactggccctacacgccctccatccagctcctctacggcctccgcaccgcgctcgacctcatcttcgaggaagggctggacaacgtcgtgaggaggcacaaccgccttgggacagccaccaggctcgccgtcgaggcgtgggggctcagcaactgctgccagaaggaggagtggttcagcgacaccgtcaccgccgtcgtcgtgccgcccaacatcgacagcgccgaggtcgtcaggcacgcgtggaagcggtacaacctcagcctcggcctcggcctcaacaaggtcgccgggaaggtcttcaggatcggccatctcggcaacctcaacgagctgcaacttctgggatgtctgagcggtgtggagatggtgctcaaggatgtggggtacccagtgaagctaggtagcggcgtggcggccgcggcggcgtacctgtcaaactccacgccgctcattccatctaggatctgagaacaatgtaagggaaggatatcgcaaacaaggccagctacaacgagtgggcagacgaacgaacaaagcgtgcagacatctccgcctctgctgtctcgtagagcggcttattgcctgcagtaacgaactatctcagaatgtaaagttaaatttcacacccagttgttgctacatagtagtagtatagttttatgaattacaggtttgattaaacttcaaattaatctacatgtatagccctgcccagatttaactataatgggatcgtagtaccgatcaactctgcttcttccattacaatagtagtttttttgtgattattttgttgtaatttgttttatcatttaggtagtttatgcttaacttaaaattttatattttaaataaaacgattggtcaaagtacggaagcagtagtagtttttttttcctgagtctaaactaaaatcagatcataggacatgccattctcacagacaaaaaaaaacactctcacaagtcacaaatcactggtatgtattgctgtcaagtctttgcgcgatcatagaataagtgtttcgaaaaacgaagtacataacatatactgttgtaactcaatgtaaaattggcgaaaaattcaataacgaaaccgaaaaactccaagcgaagtactggctgttgcgctgaagaacatcaggcagctttggcgagctccctgtcgacggcgaccttgaggaagctgccttcgtctaggaccatctgcacggggaggaagccgagcccgttggccacgccgagcatcacctccttcatctccgcacggaactcgtgccggtccaccatgccgctgccgtccctgtcgaaccgcgcgaacaggccgcggtacagcgccccgagctcctccggcgccaccgcggcctcgtccacgccgaagtgcctctccagcacccgcaggctcatgagctcccctgccatctcggcgtaggtgagcaggccgtcgtggtcggcgtccagcgcggcgaagcggccgtccaccgaggagttgaaggcgcgctcgtcctccacgaagctccgcaccgtgctcccgtccaggatctccacgctcat

SEQ ID NO: 88696 - DNA, 139 bp, Zea Mays
tccggccccaagatcagcagcagcgtgtactccacccgccccgtcgcggtgtacgaggtcagccaggtgctcctaccggtgcaaatcttcaagagcgacccccccgctggcgccggccccttcccctgccccccggccc

SEQ ID NO: 88697 - DNA, 2888 bp, Zea Mays
cgctgtttgtgcctgagacgcagcgcgtgctcactagctagcgtgtcactgagcgccgggcccgtcctcggtgcgccaccttccctttccgctttccccgcgtttccatttcgtttcagtcagtggctcagtgcgcgactgaaggctgccgcaacaccattaaaccaccaaactgcttctcctccagtctccgcttcccgtgcgccgcgggaacaaggttctggaagcttcggagatggggaggagtagacgccacgaaggaggaggaggaggagaacgacggggtgcgggtgctggaggggtggccgccgccgccttcgccgctctgctgctgggctgcgtcgtcatggccctcgtcggcggcgccgccgcgcagggcccccggctcccctccgactacaaaaccctcagcggcgccgctccgctcgtggtggccagaggcgggttctcaggagcgttcccggactccagcgagggcgcctactccttcggggcgtccgccagcgcgcctggcacggccatgtggtgcgacgtccagctgaccaaggacggcgtcgggctctgcctccgcgacgtcaacatgaagaactgcaccaccgtcgaccagacgtaccccgggaggaagcggacctacgtcatcgacggcgtccacaagaccggctggttcgtcccggacttcaccagcgccgagcttcttcagtccgtgtacctaacacaagcaatctggtctcgcactgagaggatggacggcatataccctatcgtcactgtccctgacgttcagtccatcgtcaacacgtctcctatctggctgaatgtccagcatcccatcttctacaaacaacgcgatctggacatgagcagctacatacactcgatccggaagctggtgcgcatggactacatctcgtcgcctgagatcggcttcctcagaaacatatccgcaagagtccgccgcagaaccaagctcgtgttcagctttctcgacaaaaaactcctggatcactccgtgaaccagacatacggttcgctggcgaggaacctgacgttcgtcaggtccgtcgcgtctggcatactggtcccgaaggactacatctggccggtgacggccgataactacctgctgccgtccacgtcgatcgtcaccgaagcgcacgaagcggggctggagatatacgcctctggttttgtgaacgataaggctgtcccctttaactacagctacgatcctctggcggagtacctgaacttcgtcggcgatggtggcttctcggttgatggcgtactgtcggactaccctattactgcatcagaggcaattggttgttttgctaacctgaattcaagtaagactgatcatgttacagggaaacccttagttatctcccacaatggcgctagtggagactacccggactgtacagacctggcctaccacagtgccgttgacgatggcgcagatgtcatcgactgtcctgttcaagtgacaagcgatggagtcctcatgtgcatgagttccattaacctgcttgacaccaccaatgttcagagaacacctttcgccactccttccctggttccatctatcttaataaatgtaattctttcatcactgatcaatctatcttctctaccgcagaatgctgcgttcatagcaaagtcactagggatcgacatggttgactccgtaaccgccgccttaagtgccgccggcttcagtaaccagaccaccaaggaagttctgatccggtcaacagacagcgccgtcctcgtcaaactgaagcagcagaaaacgagatgcaagctcgtgtacaccctccccctaggcatcggggacgcttccaaaccctcgctgaaggacatcaaggcgttcgcggaagccgtagtcgtcgacaggacctccgtcttcgctctgagctacgatttcatcatgggacagaacaggatcgtgcgagacctgcaggcggcggggctggctgtgtacgcgcaggtgttccggaacgagtacgtagcgcacccgtttgatttcttgggggatccgaccgtggagatcaactactatgttcagacgtttaatctgtccggcatgatcactgatttccccaagacagtcagaagatacaaagagaacacctgtacagctctggggaaggatatgcccaagtacatgcggccagttgaggctggctcccttgcagatttcctccggtccttccaaacccagccgccgtctgtggcaccgatgccggcgctgaactcttcaagcgtggaggagccgcctcttccaactgctgcgccgagaaacgtgccgcctggtggtggcgccccagcggacgccgccgggactgctggcggcgctgctccttctgatgcgagttccggcggcgctcctccttctgacgcgcgtcacacggctaccggaagtagcggtatgctgcttgtggtgctggtttccgcggctctgctgatctgattctgagcagacacatgagactgtatagtagacagagccgaagcaaatgcaaatctccgttggattcgatcaagctttgaccagcgatataccatacacttgtttttctcgggtatatatgtttgtatttggccgcatttttcacgtccacatgtgtaaaaaattgtcagtggaaacgttatatgtatcagccggaaattttatccggcgatgatcaaagttctgacaaggattaagcgatcaccacaaactcccaataatatggtgttatgtaactgtgaatgatttactctttattgttatatttatatctccacgctaaaaatctttactacttattaaggctgcaatagtagtctgccaccattccatgttctacaattctcatgtcttgttctgcctttctgattccctc

SEQ ID NO: 88698 - DNA, 687 bp, Zea Mays
atacatttgcagaactgggacgtagctttggaggaactcaaccgcttgaaggaaataattgattcaaagaacttctcatcacctctgaatcagctccagaacaggatatggctgatgcattgggctctgttcatcttctttaaccatgaaaatggtagaaatgggatcattgatctgttcttccaggacaagtacttgaatgctatatagacaaatgcacaccatcttattaggtatctagctactgcagttgttgtcaacaaaaggagaaggaatatgtttaaagagttgattaaggtcattcaacaggagcaccatagctacaaggatcccgtaactgaatttctggaatgcttatatgttaactatgattttgatggtgctcaacagaaactcatagagtgtgagcaggtaactctagagcagctagagtgatgtagttgtgggcttttgaacaatagctggagtgatatgaaacattagtgatgtagttttgggcttttgaactgcttcaagctggagtgatgtcgttgtggtgcttttgtgactgatcatctctggagcttttgtgaatgatctagctagctatctgtaaatgatctagttgtgaatgatattataattgtgatgcttttgtgaatatataattgtggtgcttttgtgtttatgaaaaagcaaagaaagaga

SEQ ID NO: 88699 - DNA, 2229 bp, Zea Mays
gtcccgcctcggtcgtccagcggatgccagtcatcccaccccaactacaacgtgacgattccaccggcggcctccggccgcctcggcgagatcgccgacgtctccctcgttgcaggggagaagacgaggagtgagggtcagggacagagcatgtggaccgtccatagtacaacgacttgacacgacaaccgtccgatccgaccaaccaaacacaccggctactttccccgccgcgatctgggcatgcccagtgtccctcgcggcgacacccctcgatctgcgcgagagtgcgagaccacagcggctcgccggcggcgatgatggctggcagagctcatggccacagaaaccgcctccgccgcctcatcccgcggctcctcctcctcctcgtcgccgtctacgccgcctccttcgcgatctacctcctcctccagtcccattcccaccaccagtcgccgccggaccccacccccaggactgaagcccgtgacggtgtcctggcgccgtcgtcctcgcagaagccgtggccgcgcctcccctccttcctgccctgggtgtccagcgccgtgccgccgccgccgctgcacacctgcgaggcctacttcggcaacggcttctcccgccgcgtggacgtcctgcccgcgggccgcggcagcggcggcggcggctggttccggtgccaccacagcgagacgctgggaagctcgatctgcgagggcgccagggttcggcttgacccggcgctcatcgcgatgtcgcgcggcggggagccgctggagcaggtgatgggccgcgccgaggaggaggagctacccaagtacgagcccggcgcgctgcaggtggaggggccggcggcgggtatgccggtgcccctggtggacgcagggttcctcaacgactacgtacccaccggcgggatcgggatgcacactatgagggcgctgctcgagtcgacgcgcgttgtgccacccggtgagctgcactgctcccagtgggttgaagaaccgacacttctggtcactcgtttcgaatatgcgaaccttttccacacaattacggactggtacagtgcatatgttagttccagagtcacgaatttaccaaaccgtcctaatgttgtattcttggatggccattgcaaggcacaattagaggaaacatgggaagcacttttctcaagtgtgacatatgctaagaacttcactgttcctgtttgtttccgacatgccattctttcaccattgggctatgagactgccatgtttaagggtcttagcgagagcttcagctgtgaaggtgcctccgtagattcactccgagaaaaaccagactatgaaaaaactgcacggttatctgaattcggggaaatgattgtagcttcttttgatcttctgcaggatgacatcatgtcatccaaaaaatcgaatggactcaatgttctctttgttcgacgagaagactacctggcccacccgcgccacagtggtaaggttgaatcgagactaagcaatgagcaggaggtgtatgatgcaattgacaagtgggcacaaggcctgaaatgcaaagtgaatgtcgcgaacggtctttttgcccacatgaccatgaaggagcaactccgtgctatcctggaagcttcagtggtaataggggctcatggggctggtctaacacacttggtttcagcaactcctgatacaaaggttcttgagattatcagcagcatgtaccggcgcccacattttgcacttatctcacactggaagtctttagagtaccatgccataaatctccctggatcatttgcaagggtcacagatgtcatcaacgagttgagaaaaatactggaaggtctcggatgctgaaacagaaatactcttcaaggccaccacaggccatgtagaatggacatcgtgtctacttcatcacccatacttggtcacaccagttgcaaggggtcatatggattttaattcgaagacattttcacaggctattcaacattgtgccaagaaaccaatcattctcattttccagcaaagaattttattatgctgccaaatacagaaagtcaagaaagcaatcctctgtttggtttatgtcagcaaatgataacacgtaatccagagctttaggttgtccacccttattcttggacatgattttaggaccagaattttgacaaaactgtattctttgttggattatagattagtataccttttgtgtgtt

SEQ ID NO: 88700 - DNA, 1889 bp, Zea Mays
gtgtccctcgcggcgacacccctcgatctgcgcgagagtgcgagaccacagcggctcgccggcggcgatgatggctggcagagctcatggccacagaaaccgcctccgccgcctcatcccgcggctcctcctcctcctcgtcgccgtctacgccgcctccttcgcgatctacctcctcctccagtcccattcccaccaccagtcgccgccggaccccacccccaggactgaagcccgtgacggtgtcctggcgccgtcgtcctcgcagaagccgtggccgcgcctcccctccttcctgccctgggtgtccggcggctggttccggtgccaccacagcgagacgctgggaagctcgatctgcgagggcgccagggttcggcttgacccggcgctcatcgcgatgtcgcgcggcggggagccgctggagcaggtgatgggccgcgccgaggaggaggagctacccaagtacgagcccggcgcgctgcaggtggaggggccggcggcgggtatgccggtgcccctggtggacgcagggttcctcaacgactacgtacccaccggcgggatcgggatgcacactatgagggcgctgctcgagtcgacgcgcgttgtgccacccggtgagctgcactgctcccagtgggttgaagaaccgacacttctggtcactcgtttcgaatatgcgaaccttttccacacaattacggactggtacagtgcatatgttagttccagagtcacgaatttaccaaaccgtcctaatgttgtattcttggatggccattgcaaggcacaattagaggaaacatgggaagcacttttctcaagtgtgacatatgctaagaacttcactgttcctgtttgtttccgacatgccattctttcaccattgggctatgagactgccatgtttaagggtcttagcgagagcttcagctgtgaaggtgcctccgtagattcactccgagaaaaaccagactatgaaaaaactgcacggttatctgaattcggggaaatgattgtagcttcttttgatcttctgcaggatgacatcatgtcatccaaaaaatcgaatggactcaatgttctctttgttcgacgagaagactacctggcccacccgcgccacagtggtaaggttgaatcgagactaagcaatgagcaggaggtgtatgatgcaattgacaagtgggcacaaggcctgaaatgcaaagtgaatgtcgcgaacggtctttttgcccacatgaccatgaaggagcaactccgtgctatcctggaagcttcagtggtaataggggctcatggggctggtctaacacacttggtttcagcaactcctgatacaaaggttcttgagattatcagcagcatgtaccggcgcccacattttgcacttatctcacactggaagtctttagagtaccatgccataaatctccctggatcatttgcaagggtcacagatgtcatcaacgagttgagaaaaatactggaaggtctcggatgctgaaacagaaatactcttcaaggccaccacaggccatgtagaatggacatcgtgtctacttcatcacccatacttggtcacaccagttgcaaggggtcatatggattttaattcgaagacattttcacaggctattcaacattgtgccaagaaaccaatcattctcattttccagcaaagaattttattatgctgccaaatacagaaagtcaagaaagcaatcctctgtttggtttatgtcagcaaatgataacacgtaatccagagctttaggttgtccacccttattcttggacatgattttaggaccagaattttgacaaaactgtattctttgttggattatagattagtataccttttgtgtgttacatgttgatca

SEQ ID NO: 88701 - DNA, 107 bp, Zea Mays
gggcaaaatcgtcaatttataggttccttaatctgcacgaagctgttggaaacgacttgtaaaatgaaaacgaagggtgtagctagcaagctgtgtgtgatcatggg

SEQ ID NO: 88702 - DNA, 1572 bp, Zea Mays
tcgatcctacaaccccatccatccatggaagacccctacacgagcttcttcaagaacagctactactactacgcctcctcctaccccgctgccccagctccccaccgcctccctcctcccatcccaccgtacaccaccctctacccagccgccgcgcctcagtaccaccaccctgcctgcttcttccagccgccagcgccgacgctgccgccgcctctcaacgacagcccgccgtcaccgccgctacgggaggctctgcccctcctgtcccagtcgcctactcgcgccgcctcccgggcccggccgcacccgcacgtggcggtggactccgactccgacgacgacgccgacgacttcctgctaagggaggccgccgtcggcagctccgtgaccccctcggcatcgacgcgcgcgccgctcttcgccgacctcaaccgcgtgccctcctgctgcgacgacgacggcggcggcgacccgatggacctggagcccgcggtcgcgctgcgcatcggcctgccacctgctcccgccaacggctgcggtgccccggaggctgacctcctgtccgggctgtccggaagggcgggctgtggtggcatggaggccgaggaggacgaggacgagtgcaaggtgggcgacggggacgaggtggtgccgttagggttcgcgtcgacgcccatcgggagcctcaacaaggggcagtactggatcccgacgccggcgcagatcctgatcgggcctacgcaattctcgtgccccgtctgctacaagaccttcaaccgatacaacaacatgcagatgcacatgtggggccacggttcgcagtaccgcaagggcccggagtccctccgcggcgtgcagccgacggcgatgctccggctgccgtgctactgctgcgcgccggggtgccgcaacaacatcgaccacccgcgggcgcggccgctcaaggacttccggacgctgcagacgcactacaagcgcaagcacgggctgaagccgttcctgtgccgcaagtgcggcaaggcgttcgccgtcaagggcgactggcgcacgcacgagaagaactgcggcaggctctggtactgcctgtgcggctccgagttcaagcacaagcgctcgctcaaggaccacgcgcgcgccttcggccacggccacggcgccttcggctgcaacaacctcgacggcgacggcgacggcgacggcggtgctggcggcggcgccaacggcctcgacgacgacgacgacgacggcgccgtctccgagatcgagcacgactactgcgccgccgcgcggtgatcgatcgtgcatcgatctgtacgtggtgggtgccagtgccacactagctagctagtagcttgcttgctctagtagtgctatatatacccggctgaccggcggtgttaatttcttgttctctcgcatgcattgttagtttgcggcggccgggctgtattacgtgttgcggccggcccggccccggcctgtcgttgtttgcttttgctctaattagggttgtggaggtcgtcctgatgatttatatccatctctaagctagctacctgaaggtacgtt

SEQ ID NO: 88703 - DNA, 175 bp, Zea Mays
ctctgttattcgtgccgatccatcgagaggagaggactccactcttattattagcatagctgcaggtagtagaagaagaatgctgtcgttattgggtgcgcatggttatatatctcgatggagaaaagaaacagcttcctgcctcaatatgatttcatgttttggcgtttcttaa

SEQ ID NO: 88704 - DNA, 1319 bp, Zea Mays
ctcttccccaatctctctgtcggaaaccgagtcctcttccaccgcacgccaccggccaccgcgtcccctccaacggccaccccgccccctcgctccggcccctccaccggccaccgggcggcccgccccctcgccccggcccctccaccggccgccgcgcgcccgcgcagctccggcggcgcgcgcccccctcggcccggcagcgctaccaccgcgcctcggccccgccgcctccaccgcgcctcggccccgccaccgccctcggactgtagtttgagataagctagcaatttttttaggcagcaacttccacaggacctcaagccgccatctcgccacatgacctgattgcagccttgcaggcacagcacagaagcagggttgcgccacctctctgagtgtcataggttggtgcataggcacacacacacaggtagccatggcatcgcgtaagcttctcgtgggcctcacagccaggaggcagctacaatcccgcactcagcaactattctgggccaccagtctccctgaagctaccacttctcggtccctaatggtggctgctgcaatggcgcggttatcggacaggtcttcagctccttttatcttatcttcaagggccatctcgtcgacgcagcctgtgatgcagtctacaggagatgtgtctggctctagcccatctgcagtggatcacaagttagcaatgcaagaggatgagtttcacaaattagcagatgagacgattcatgatttgcttgaaaaacttgaggagtatggtgactccattcagatggatggtttcgacatagagtacgggaatcaggttttgacattaaggcttggggatttggggacatatgttataaacaagcaaactccaaacaaacaaatttggctatcttctcctgtgagtgggccttctaggtttgattgggatgcaacagctaatggttggatatacaagaggactggagtgaaccttgtgcggcttctggagaaggagattggtgagctctgtggtactccagtagaactttagtaacagtactggaaatgccacacagctaggttgtatggagagcagtgctctgaatgtcgaagtgtagtacacaaaactttttttttgttctacacatttgcacatggtttggaataaataacttcccctctctggtagcggggaacagtattattcggaaatggtgggagtatttttcagcttttgtaagtaccgaattccgatcactgtcagcctgtcagactacattagtgtttctggatgcaatatcacattgcaagatgaccagatatcacactat

SEQ ID NO: 88705 - DNA, 2001 bp, Zea Mays
ctcttccccaatctctctgtcggaaaccgagtcctcttccaccgcacgccaccggccaccgcgtcccctccaacggccaccccgccccctcgctccggcccctccaccggccaccgggcggcccgccccctcgccccggcccctccaccggccgccgcgcgcccgcgcagctccggcggcgcgcgcccccctcggcccggcagcgctaccaccgcgcctcggccccgccgcctccaccgcgcctcggccccgccaccgccctcggactgtagtttgagataagctagcaatttttttaggcagcaacttccacaggacctcaagccgccatctcgccacatgacctgattgcagccttgcaggcacagcacagaagcagggttgcgccacctctctgagtgtcataggttggtgcataggcacacacacacaggtagccatggcatcgcgtaagcttctcgtgggcctcacagccaggaggcagctacaatcccgcactcagcaactattctgggccaccagtctccctgaagctaccacttctcggtccctaatggtggctgctgcaatggcgcggttatcggacaggtcttcagctccttttatcttatcttcaagggccatctcgtcgacgcagcctgtgatgcagtctacaggagatgtgtctggctctagcccatctgcagtggatcacaagttagcaatgcaagaggatgagtttcacaaattagcagatgagacgattcatgatttgcttgaaaaacttgaggagtatggtgactccattcagatggatggtttcgacatagagtacgggaatcaggttttgacattaaggcttggggatttggggacatatgttataaacaagcaaactccaaacaaacaaatttggctatcttctcctgtgagtgggccttctaggtttgattgggatgcaacagctaatggttggatatacaagaggactggagtgaaccttgtgcggcttctggagaaggagattggtgagctctgtggtactccagtagaactttagtaacagtactggaaatgccacacagctaggttgtatggagagcagtgctctgaatgtcgaagtgtagtacacaaaactttttttttgttctacacatttgcacatggtttggaataaataacttcccctctctggtagcggggaacagtattattcggaaatggtgggagtatttttcagcttttgtaagtaccgaattccgatcactgtcagcctgtcagactacattagtgtttctggatgcaatatcacattgcaagatgaccagatatcacactatattctgttgtgccaagcaacaaggatcaaatcacatcaatgctgaaacatcatgtatgcctcttcttccatcaggtcagggctcaatctgaccatgaggatgcagaactccatctgatccagtgccccgtcctcgtccaggtcgccttctttcatcatctccaggagctcatcatcctggagctggccaagcccgagcctggccgcgctctgcttcaagctccagatggtgatctttcctgccctgggctccatgagcagctggaaccccttgcagagctcctggatcaggccctccacgcccagcttcctcgccatcagtggcaggaagtcctgaaactgcacggaggagcccttgtcggattccatgctggagttatcccgcccgcgaagtcgtgatgaggattgaagatcagggcaatggttggcaaaagttatgcgtgcgtgggtaacgaaggaggctggtgtttatttatagcagcaggggaggaggaagttcttggaatcgggagcagttcgtttctgcgaagtagctggctggttgcttggacatgtctatctggcttcttccctttcttttttaccacataaagactcgttcggttagctctcaatccatatagattaagtgagattgagtatgtttaaattccaaacaagtcaaacttcttcttaattttttt

SEQ ID NO: 88706 - DNA, 1648 bp, Zea Mays
cccaatctctctgtcggaaaccgagtcctcttccaccgcacgccaccggccaccgcgtcccctccaacggccaccccgccccctcgctccggcccctccaccggccaccgggcggcccgccccctcgccccggcccctccaccggccgccgcgcgcccgcgcagctccggcggcgcgcgcccccctcggcccggcagcgctaccaccgcgcctcggccccgccgcctccaccgcgcctcggccccgccaccgccctcggactgtagtttgagataagctagcaatttttttaggccagtacgcatcacttctctgttttttttttctgctgaagtaatttgagataaatttgtgttttacctgaagcttctgagctctagactggtgcttccatttttagcacaagctagttatgttagcttctgtttctctaatgaaggtgctagcttccatttgatctgaacacgcctaactgagtggcaagtcttccttgtcaattatgttacccagtcagtaggtttcccttgtggcatgtttaactttttaataaaaaaacaatctgacatgttattgctcagttacaggcttggcaactctgaatcggctataatgaacatgttcagttttagttccttctgccttgtgatgtaaaccacagtacagtactttcttgcattcaattgtaattttctaatagttcctctgatctcgtgttgaactttctgtgttgttatttatcctgatataggcagcaacttccacaggacctcaagccgccatctcgccacatgacctgattgcagccttgcaggcacagcacagaagcagggttgcgccacctctctgagtgtcataggttggtgcataggcacacacacacaggtagccatggcatcgcgtaagcttctcgtgggcctcacagccaggaggcagctacaatcccgcactcagcaactattctgggccaccagtctccctgaagctaccacttctcggtccctaatggtggctgctgcaatggcgcggttatcggacaggtcttcagctccttttatcttatcttcaagggccatctcgtcgacgcagcctgtgatgcagtctacaggagatgtgtctggctctagcccatctgcagtggatcacaagttagcaatgcaagaggatgagtttcacaaattagcagatgagacgattcatgatttgcttgaaaaacttgaggagtatggtgactccattcagatggatggtttcgacatagagtacgggaatcaggttttgacattaaggcttggggatttggggacatatgttataaacaagcaaactccaaacaaacaaatttggctatcttctcctgtgagtgggccttctaggtttgattgggatgcaacagctaatggttggatatacaagaggactggagtgaaccttgtgcggcttctggagaaggagattggtgagctctgtggtactccagtagaactttagtaacagtactggaaatgccacacagctaggttgtatggagagcagtgctctgaatgtcgaagtgtagtacacaaaactttttttttgttctacacatttgcacatggtttggaataaataacttcccctctctggtagcggggaacagtattattcggaa

SEQ ID NO: 88707 - DNA, 1180 bp, Zea Mays
tcggaaaccgagtcctcttccaccgcacgccaccggccaccgcgtcccctccaacggccaccccgccccctcgctccggcccctccaccggccaccgggcggcccgccccctcgccccggcccctccaccggccgccgcgcgcccgcgcagctccggcggcgcgcgcccccctcggcccggcagcgctaccaccgcgcctcggccccgccgcctccaccgcgcctcggccccgccaccgccctcggactgtagtttgagataagctagcaattttttaggcagcaacttccacaggacctcaagccgccatctcgccacatgacctgattgcagccttgcaggcacagcacagaagcagggttgcgccacctctctgagtgtcataggttggtgcataggcacacacacacaggtagccatggcatcgcgtaagcttctcgtgggcctcacagccaggaggcagctacaatcccgcactcagcaactattctgggccaccagtctccctgaagctaccacttctcggtccctaatggtggctgctgcaatggcgcggttatcggacaggtcttcagctccttttatcttatcttcaagggccatctcgtcgacgcagcctgtgatgcagtctacaggagatgtgtctggctctagcccatctgcagtggatcacaagttagcaatgcaagaggatgagtttcacaaattagcagatgagacgattcatgatttgcttgaaaaacttgaggagtatggtgactccattcagatggatggtttcgacatagagtacgggaatcaggttttgacattaaggcttggggatttggggacatatgttataaacaagcaaactccaaacaaacaaatttggctatcttctcctgtgagtgggccttctaggtttgattgggatgcaacagctaatggttggatatacaagaggactggagtgaaccttgtgcggcttctggagaaggagattggtgagctctgtggtactccagtagaactttagtaacagtactggaaatgccacacagctaggttgtatggagagcagtgctctgaatgtcgaagtgtagtacacaaaactttttttttgttctacacatttgcacatggtttggaataaataacttcccctctctggtagcggggaacagtattattcggaaa

SEQ ID NO: 88708 - DNA, 1164 bp, Zea Mays
ctgagtggcaagtcttccttgtcaattatgttacccagtcagtaggtttcccttgtggcatgtttaactttttaataaaaaaacaatctgacatgttattgctcagttacaggcttggcaactctgaatcggctataatgaacatgttcagttttagttccttctgccttgtgatgtaaaccacagtacagtactttcttgcattcaattgtaattttctaatagttcctctgatctcgtgttgaactttctgtgttgttatttatcctgatataggcagcaacttccacaggacctcaagccgccatctcgccacatgacctgattgcagccttgcaggcacagcacagaagcagggttgcgccacctctctgagtgtcataggttggtgcataggcacacacacacaggtagccatggcatcgcgtaagcttctcgtgggcctcacagccaggaggcagctacaatcccgcactcagcaactattctgggccaccagtctccctgaagctaccacttctcggtccctaatggtggctgctgcaatggcgcggttatcggacaggtcttcagctccttttatcttatcttcaagggccatctcgtcgacgcagcctgtgatgcagtctacaggagatgtgtctggctctagcccatctgcagtggatcacaagttagcaatgcaagaggatgagtttcacaaattagcagatgagacgattcatgatttgcttgaaaaacttgaggagtatggtgactccattcagatggatggtttcgacatagagtacgggaatcaggttttgacattaaggcttggggatttggggacatatgttataaacaagcaaactccaaacaaacaaatttggctatcttctcctgtgaggtacagtaatgcatcttagtgtatcagttgttgtttgtttcattatatgtaatagacacctgaacttgattccaatcgtcttgtctgccatgctatattatcctcctttctcaaggtagatgcatattgtattacactattagttaattttactagtatcgtgaacctgtcactgtgtaaggacttgggagtactcagtagatgtcatttttcgaatattgtatatgtccaccctctgtgatttgtggttcagtttattcgatatggttatttgc

SEQ ID NO: 88709 - DNA, 673 bp, Zea Mays
attctgttgtgccaagcaacaaggatcaaatcacatcaatgctgaaacatcatgtatgcctcttcttccatcaggtcagggctcaatctgaccatgaggatgcagaactccatctgatccagtgccccgtcctcgtccaggtcgccttctttcatcatctccaggagctcatcatcctggagctggccaagcccgagcctggccgcgctctgcttcaagctccagatggtgatctttcctgccctgggctccatgagcagctggaaccccttgcagagctcctggatcaggccctccacgcccagcttcctcgccatcagtggcaggaagtcctgaaactgcacggaggagcccttgtcggattccatgctggagttatcccgcccgcgaagtcgtgatgaggattgaagatcagggcaatggttggcaaaagttatgcgtgcgtgggtaacgaaggaggctggtgtttatttatagcagcaggggaggaggaagttcttggaatcgggagcagttcgtttctgcgaagtagctggctggttgcttggacatgtctatctggcttcttccctttcttttttaccacataaagactcgttcggttagctctcaatccatatagattaagtgagattgagtatgtttaaattccaaacaagtcaaacttcttctt

SEQ ID NO: 88710 - DNA, 813 bp, Zea Mays
acgtaaggacaaacgcgaacggaaccctccccagcagatgagcggagtaggtgggcggggttctcctccactcccgctccagctttctctggcccgatcgatgctacattcccgcggcgagccgctcgccttcctccgcgggccttgggctacccaacccatcgccgagccgcctcgcgcggtcccccctccatctttgcccggctctctcgcctcggaggacggacagagaaagagaggatgagaagggactcctcgacccgcgtcccgcgctcgggctattggaccgaggggttgcggtggatttggagcgcggggtggactcgtcgctgatggtattctccgatgcaagaggcagggagagagcgggacagggcggcggcggcggcggatctcggaggcgtcgccgctagcgtcaggccaacggatacagcagctgtaagcacaaagccggcaaagcgatacccactggccttatggataggcatattgggcctgataatgttagtcgctgtgtacatcttctcgttgtctctaaagcaaaatgggatgcttttcgggctgatgcagacaaatttgatagaaaaggaaagggagaagccttgtcatgatcccagtattccagacacagaaatcccttacttgcactacccgatgccaaatacttatgataggtaatgaagatatatactgggtcatgtgattttcctttttctatttatttccaggttagtgtctgacttgcatgttctttgtctgttaggaaagaatgtgcgtgcacaggggttaggttctttgctatcttgtcaatgc

SEQ ID NO: 88711 - DNA, 2755 bp, Zea Mays
acgtaaggacaaacgcgaacggaaccctccccagcagatgagcggagtaggtgggcggggttctcctccactcccgctccagctttctctggcccgatcgatgctacattcccgcggcgagccgctcgccttcctccgcgggccttgggctacccaacccatcgccgagccgcctcgcgcggtcccccctccatctttgcccggctctctcgcctcggaggacggacagagaaagagaggatgagaagggactcctcgacccgcgtcccgcgctcgggctattggaccgaggggttgcggtggatttggagcgcggggtggactcgtcgctgatggtattctccgatgcaagaggcagggagagagcgggacagggcggcggcggcggcggatctcggaggcgtcgccgctagcgtcaggccaacggatacagcagctgtaagcacaaagccggcaaagcgatacccactggccttatggataggcatattgggcctgataatgttagtcgctgtgtacatcttctcgttgtctctaaagcaaaatgggatgcttttcgggctgatgcagacaaatttgatagaaaaggaaagggagaagccttgtcatgatcccagtattccagacacagaaatcccttacttgcactacccgatgccaaatacttatgataggaaagaatgtgcgtgcacaggggttaggttctttgctatcttgtcaatgcagaggtccgggagtggatgggttgagacgttgttgaatagccatcctaatattagctccaatggagagatcttctctgtcaaagaaagacgcagcaatatcaccgcgatcacgaaaacactggacagattgtacaatctggattggtatagcagtgctgctaagaacgaatgtacggctgccgtggggctgaaatggatgctcaatcagggtctaatgaagcaccatcaagagatagttgaatacttcaaccgaaggggtgtttccgcaatttttctactaagaagaaatcttcttcggcgttacgtctctatattagcaaatgctcatgatagtgccatgaaacagttgaatggaactcataaagctcatgtgcactccaaacatgaggctgaaatccttgctcaatataagccaaccattgacaaaaaaacattgattactgaactaaaacggtctgataagttggcagctgatgctctggtgaatttcaagaacaccaggcacgttgtcctgtactacgaggatgttgtcagcaatcgcacgatgctcatggatgttctggattttctcagattgccaaagaggaagctgttcagtcgacatgtgaaaatccacacaaaacgattgtgcgatcatatagataactgggcagatgttactgattttttgaagggcacaccgttcgagagctttttgaatggctcaagaagatgacatggctagctgatgtatatagtgctatagtgagttgtccttctggcgcctcgtaggtttttttttttgataccatgatgaaataagtatgggccactgagagaaatagttaggtagagatgcttgatccaggctattagagctgtagaataaagattaaaaacaatacctttgtgattatcagatatctaatgcaagaacttgcaaaactgtctggagtcattcgtgtatacatcaaagtttacacttacacttgaaaatgaataggccaagctccgtggcagaggaactgaggaaaaaggcagagtagcctatacaaaactgatgatttttactagcaattacaacgcaccgcgaatcgctcagtaggtttctcgctcgtgctcagatggagctaggtctccgtggccggtggcggggcgccgggctggatggtcttgaaggactcgtgcaagcggcggagcatggcctcgtcgcggctccactcggcgttgggcgcggtgacgaagtgcgcgtacagcttgttccgtgcgcacgtcaccgatatgaggctgtgcgcgctggcgcccgccacctcgtactcgtagtacacctggccggcgccgtcggcgcgctcggcggagcgcacgtcgtcggcggacgagatctggtccagcagcccgacgtcggagagcgccaggttgtcgagcacggcgctgagcggcgccagcgcgcggatcccggacaggaacgtcaggtactccttctccgcccgctttcgcgggttgaagaactccgagtccgtgccgttggtgcccttctccaccttggacaccagccgctccttccacccctccggcacgtcgtacacgtactccgccgtgtccttcttgctcgcgttcccgccgtatccgccgtagttcgccgcgctcgccgccgtgccatagtacactgtgaactccgcctcggcgcgggacggcgccgtcgccggggacagcagcaggagccccgccgcggccgcagccaccagcgtcgtagcgacgggcctgtagttgttccctggctgaggcgggagcctcagcgactgcaggggaggggctgcggcagccgcctgctgcgacgaggcggtcggggtgcatgcggtggtgaggagaggggacgccacgcacgagaggaatgagggaagcatggtcgccgtcgaccgtcggtgacacgcggacggggcggtggcggcgaggtggtccgtggtcgtgtgctttgtgttggaggcgacccgcgagaggatagcagagatcgcgtgggcccgtggcttatccaaagagacgtcgacatggca

SEQ ID NO: 88712 - DNA, 1004 bp, Zea Mays
cacagcgacggtcatcaaatcgtgctcaacttagtggccaaaccaccggtcctacctggtggcacccacgcaaaggcaacagaaacggagaaacccacgacaagcccaaacaaaaactcaaaaaaatctcgcctgccatctcgcggtccagccccgtcgttcacctcaatctccacgcgtcaccgccgccttccggcgagtctattcccctccgccacgccgtcgaagctttccagaccccgcagcggttcggataaggcggccgcccgccacccgccctcgtttcggccccactcgtctcggccccgggaccgcttcggggtggatctagggttgcgtggggaggggttctggaagcctccgccgcgatggacgaggcggacgatgacgcccgcaccttcaaggtcggattcaccgccgccggagagaagcagttccgggagctcgtgagggagaagctgcgcgggttcaggaggggcctggacgacaccctcctggtacggttttcttccgtcgccctccgactcgttagcttatggtactagcggttgattgcggctgttcaaggacttggggttctctgcagactgcagcttcaagtttttggtcgaactcaattaacacttaacagtatgtaaaggactggttagaattaaagatggcttgtgcgagttacgcaactgtgccctgtgttttcgttcagtgccgccccgcatataacacctattgctggaatcagtcagtaatctaatgtcgttacatctcgtgggcctgcaactattactatgtgatggctgtttgttcaggctaattgctgtctgttttctttcccaacttataatgtgctcactatgcaccagactgtttataggtgggttcaacaaatgtaatggattggtggtggtgcactatatgcactagattgttgtggtgcactatacttatgaagcctcttctcgaactgaggatttttaaatcaggatgaatatgaagtgtttgtctaa

SEQ ID NO: 88713 - DNA, 1014 bp, Zea Mays
gcccaaacaaaaactcaaaaaaatctcgcctgccatctcgcggtccagccccgtcgttcacctcaatctccacgcgtcaccgccgccttccggcgagtctattcccctccgccacgccgtcgaagctttccagaccccgcagcggttcggataaggcggccgcccgccacccgccctcgtttcggccccactcgtctcggccccgggaccgcttcggggtggatctagggttgcgtggggaggggttctggaagcctccgccgcgatggacgaggcggacgatgacgcccgcaccttcaaggtcggattcaccgccgccggagagaagcagttccgggagctcgtgagggagaagctgcgcgggttcaggaggggcctggacgacaccctcctggattatgttactatcatgctccagaatggaaaacgtaaggatcaagccagtatggaactccatgtatttctaggggatgatagtgcagtattcgtttcctggttgtgggaacatctttctttaaatatgcacttatatgtgcaagcacaagaacaaactcaggtggttaaggatgatgaggcccccaaagaagtatctggaaaagataaatcatcagatatgttcccaagaagcaaatgtcaaactcattctgagcacccaattgaatcaagtgcagccactactaggaaacgtgataagcgggaatggaagggaattggtcgggcgggtaatgaaaaatttccacttcgaaatgtactaactgatattcttcacggggaagagaaaaaatctcaaaagtccaatgaaatacgatacccttcatcaaaacaacagaatggcagaaagcgtgacagggatgatgaaccacaacaagcaaagatttatattctatggctagatacatagtaacagttatgtatccagaaaagccagaatgacctataatttggaatggagggagtatcaagtttggataaagaatttgcttgtttgaactttgaactgctgaccgctaaggg

SEQ ID NO: 88714 - DNA, 3301 bp, Zea Mays
gcccaaacaaaaactcaaaaaaatctcgcctgccatctcgcggtccagccccgtcgttcacctcaatctccacgcgtcaccgccgccttccggcgagtctattcccctccgccacgccgtcgaagctttccagaccccgcagcggttcggataaggcggccgcccgccacccgccctcgtttcggccccactcgtctcggccccgggaccgcttcggggtggatctagggttgcgtggggaggggttctggaagcctccgccgcgatggacgaggcggacgatgacgcccgcaccttcaaggtcggattcaccgccgccggagagaagcagttccgggagctcgtgagggagaagctgcgcgggttcaggaggggcctggacgacaccctcctggattatgttactatcatgctccagaatggaaaacgtaaggatcaagccagtatggaactccatgtatttctaggggatgatagtgcagtattcgtttcctggttgtgggaacatctttctttaaatatgcacttatatgtgcaagcacaagaacaaactcaggtggttaaggatgatgaggcccccaaagaagtatctggaaaagataaatcatcagatatgttcccaagaagcaaatgtcaaactcattctgagcacccaattgaatcaagtgcagccactactaggaaacgtgataagcgggaatggaagggaattggtcgggcgggtaatgaaaaatttccacttcgaaatgtactaactgatattcttcacggggaagagaaaaaatctcaaaagtccaatgaaatacgatacccttcatcaaaacaacagaatggcagaaagcgtgacagggatgatgaaccacaacaagcaaagagagacacctcatcacgccccatgcttggtggtggtgcttcccgtcgtcttctacagtttgctgttcgagatgcagtaaaagctgtacagccagccagcacctctgctgaaccagcatccaagcgtctgcgctctgtggttgccactacttctgcagagaacatgcgtgataggagatcagaaaaatctcaggactacctgaacgatagaagatcagaaagatctcaagataactcgagtgacagaagatcagaaagaactagaccaatgctacaggtacaaggagctgctttagctcttagagctgcagcggaagctgctgcagattctacaaaggctagatctactggaagtgttttcaagcgattgggtcaagggaatgttgtgaaacaaccatctcgttctcgtgaagagaagagagattatgctgattttgagccagttacgaccgcaaatgaacatggttctgatcgatatgttaataatgaggaatctgaagaggaatatagagagctaaccatggctgatagggtagcaggaatgaatgttgattcgggctctgaagatgatgtggaccgagatgagggggttacaagataccaaacttctatttcacatgaagatactttctcatcatttgcagagaagaaaactgtatcggcacaatgcagtgttgaactagagaccgatgcaataaggccttcaagtgtgaatcacgaggagcaacctgtcccttcattaacaaatacaacaagtaaagctgtgtctatttctgttgatgtaaatatggtggaacctcccagttatgaaacaccaaaagatgttcatgttgtggagaagccttatgttgcacccatgaattcaaatgccacaagtgtggctaccaataccaaagaattaggccatgcagaagttcaaaaggattctcagcggtctgcaccatctgttccggtttcatatagcacatcacatccgacagtggatgcagattcgagaacactttatgttagcaatgttcactttgctgccaccaaggactcattatctcgccatttcaacaagtttggtgcagtactgaaagtagtcattgtcactaatgctgcaacgggtcagccaacagggtctgcctatgtagagttcttacacaaagaatcagctgaacgagcgttgtcgttgaatggcacatcatttatgactcgtattctcaaggttgttcgacgaagttctcatgaagcagctcatttttatggttggcctggtattggacgatcatcattatatggtaggcatggtaggatggcatacccaagagctgttcaccccggtggttcctttagagggcgtgctccgatgaaagctggcgctagaagtttacagtggaaacgggagccttcaggcactgattcaagtgcaggtgcgaaaaatgacatgagtgtgccattttcctgtgaacaggtcctcccgccggcaacataggggagcatactatagctgatataatgagaactgaatggtatgttactcgtcgcccctaatggctgaatatggaaagcaagctgagaagattgttccttcctgatgcagcgtaaaacaaaagtccgaaaaaacatgaaaatacaaaaaaaacaacaactaaaacttaaggaaaaaaagagggggagtttggcattaggatatggcttatcattctggtaaccggattgggtcgtctttgccatatgcgagtaggatgacagcctgagcaattttctgtggactccagctatctgaaaaaaggattcacattcgaaataatcacaacatttgggttgtgttggatggaagatgcttatcagtagaacaagatgggcagattttggacgaggtaagcctcaactgtatagaagtaacctatcaatctgtacccttatctgaatcaatctctttcccaacctgaaaagaaaaaaaaagccaacacaaatgatgtgtcttcttctgttttttttactccatgaactgttatttattgtactgattgttgatttttagttggacattcaatttgttgtcaaacagtttaacaatgattcttccgtgtggtttataattagattcaccgtgctgcctgacttacaaaatccagtttactgtctgatgagaatgcagtttatactcgcgatgtcttaccaaggttcttgtatatttatgggttggcctgcctgtccgaatctttcttgcacattatatgcttttcattcaatgatgcagctactcatcatgtgggttgacactgctcgtcgttggaggacttgtatatatctttttttgcggggaggacttgtatatatctggccattagtttactgactaatggtgcatgctttgggaaaagtaatttgttggaagcttatattaactctaaaaaggcaaaaaatggcctttttcttc

SEQ ID NO: 88715 - DNA, 1818 bp, Zea Mays
gtggcggccaacagggtggtcgtagttgccgcatgcgtcgcggctccgggacattgaaaacaatatcaccttggatttggtctctctggcgtagggtcctctctcctcgccctcttgcgtgacagacacagagaagcttgccgttacgtagcccgcgcagccgccgccgtgcgccgtagccacgacacgagtagtaaagttgcgtactccttcctacgaaccgaccgacaacacaaaaaaaaaaaaaaaaccgtcaacagcggtcacgtgcgcagtggatggatgggtggggagggagagggaggagcatttgggcctgggcggcggccggcgtcgactaaatgcgaatccgccgaggcacagccagctagcacaaagatcaaagttccattccaccacattacaggcttgctgacaggcacacaagattactcctccccccccccccccccccccccgccgtcccaacgccgtacccaggggccaggggtgggcgggcgcaccgcaccgcacgtcgctgtcgcgcgtcggcccggagaacgcgtacgccgcccgtctcctccctccccgcgataaaaggccttcccctcctccccagcccccaccagctcaggccagccgtgcggcagcttctcccctcgcctccccccctcgtctccgcacagagagggctcctcgctgccgtgtgccgggcttcactttcccctctcgtctcctctcccatggctcagcgcgacaagaaggtggaggagccgacggagctgcgcgcgccggagctcacgctgtgcgccaacagctgcggcttcccgggcaacccggccaccaacaacctctgccaggcctgcttcctggccgccacggcttcctcctccgcctccgcctccgtctcgccgccgccgccctcctcctcctcctcgtcgccggcggtgctccagttcgacgagcagcagcagcagcaaaatccgaggccgcgtgcgccggcggcgtccgggcccacggaggaaccgcccaggccggcccgggcgtcagctccggctccggctccggcgtcgtcctcgtccgtccgccggtgccagacctgccgcaagcgggtggggctcacgggcttccgctgccgctgcggagacctcttctgcggcgcgcaccgctactcggaccgccacgactgctgcttcgactacagggccgccggccgcgacgccatcgccagggacaaccccgtcgtgcgcgccgccaagatcgttaggttctaggcgtctcggatccggccggaggagctagctagctagctaggggcgggcacacacacgcacacgcggtgatgggcgccgagatccgtcgccggtcctcatcgccctctatagtccgtccccccttcctctcctcctctccctctttgattgtcctctccttttcttcttgctgtcatctatttttattgcgagggggaaaaatgatttgatggtcaccgatcgatccgtccttggagggtgttggttatgtgttgatcgccatgctgttctagaaaattattccgtctacgaggacgacgatcgacgagaagcgtcgaaaaagagaggggagagagaatgaagacgaaaagaatagtgcgatgataacgttgttgttgttgtttgtagcggtggtggtggtggctggtggaagcgatatggttcggttcggttcggtgtgctcttgtcctgctgcgaatcacaaattcctgttgaattttttttatatatctttgtataaaacgaaattgaaaatgtttatatggtgtgccatgacagctataatactacccatttcattcgtgtt

SEQ ID NO: 88716 - DNA, 657 bp, Zea Mays
ccagcctttcctctcctgccccgtctcccgttcccacagcacagcctccatctcccaatctcgcaggcgacgccgacgcgttccaccggcggcaccgatgcgggcgatctcgacggccgcggggggcatgctgcgcgcgcggctccgctcctcgtcccgcgtgcgcggcggcggcgatggcgcggggcgatggacgacgccggggcacgaggaaaggcccaaggggtacctcttcaaccgcccgccgccgccgccgggggagacgcggaagtgggaggactgggagctgccctgttacatcacctccttcctcaccgtcgtcatcctcggcgtcggcctcaacgccaagcccgacctcacgatcgagacctgggcgcacgagaaggcgctggaacgcctcaagcagcaggagctagccgccgtctccggaggcggtgacgccgatgccgacgccgagtgatccgctggtcagatcacccgcaactctagagatattgttttttcttttcttttctttctggtttcctgcttgtgtcgcgcggttcaataaggctgtctgtactgagatgcatgtcatgagattccagaaatggatggacatcagactgaacactgtatcattgttgctgtttcgctggataacttacacttcacaaa

SEQ ID NO: 88717 - DNA, 2710 bp, Zea Mays
cgcacactcgccttcctgacgtcggttggatttaagcagagcgcagaggagagcaaccactcgcccgctcgcccaccacgatctccctcccctccgcacgccgcacggggcgttgcagacccccagccaaaggcaggccgcgacccggagcacgccggccggtcgcgggcgtcgtcgtcgcctcccgcgccgccgccctgctgctcgctcccgcattggatcgcgctgcggttggcgactcggtgtggtctgctgctggtgactgaagccggcccacgcggagacggcatcaagtttctaacaatttgaagtatcccgaaatgggcgcaagagataacggggaggggagagatgagaagagggggactggatcagattatgtacctgctagagactccttttcatcacaaggtgagtctcgggttccaaagaggctcggtaaaaaggagtcaaaagataatagcccccgaacgaccaaaagcagcgccagccgtcaagctcaaaacaagctgcaacataaaggattaaacaatgtacagaacaagcctcagaaacaaaagaaaacagttagtgctgctaaggctgttgacgttagaaaaccagatattacaagaattccttcccgccctccatcagaattgtctgaggaaacagacgatataatcagtgatgctggaactgttgatgatagaggcactgaggaggccaaggagatcaatgtgttagatgaagctccacgctgtgatcagagtactggtactgatgatgaaattcctgatattgaagacaaggtagttgatcatggaaaatcagttgtagatcaaggcaatgaggaattagtgctgaaaatcgacaagttggaacaagaacttcgtgaagttgctgctcttgaagtttccctgtactctgtagtgcccgagcatggaagttcagcacataagttgcacaccccagctcggcgtctgtctaggttatatatccatgcatccaagtcttggtctgaagataagagagcttcggtagcaaaaagcattgcttctggtcttgttcttgttgcaaagtccagtagcaatgatgcttcgaggctgacattctggctgtccaacacagttgtcctcagggagataattgtacaaacttttggcatctcacatcaatttactccatccatgacgaatatgagcatgaatggtggtgccaaaaaacttggtgggaaatctatgacaatgctgtggagaaacaactacaatggcacgcaagccaactttgctgcgaggctgatgccagatgattggcaggaaacaagtacacttttggctgcattagagaagattgagtcttggatattttctcgcattgttgagacagtatggtggcaggcactaactcctcacatgcaaaaacgggcagaaggatcatcaactccaaaggctggtagagtgctaggtcctgctttgggtgatcagcagcagggcaccttttctgttaacctgtggaaggctgcgtttcaggacgcattcagcagaatgtgccccctcagtgctggcagacatgagtgtggctgtttaccagtattagcaaaactggtgatggagcagtgtgtagcccgtttggatgttgccatgttcaatgccatcctacgtgaatcagcaagtgagataccaacagaccctatatctgacccaattgttgacccaaaagtcctaccaattccagctggtgatctaagctttgggtcaggcgcgcagctgaagaactctattggaaactggtccagatggctgacagataagcttggcatagatcatgatgattctgaggacataggagatgttgaagacgaaagaagagccgcagctgaaacgaaatcgtttcaacttctcaatgagctaagtgatctcctgatgctcccaaaggacatgctccttgaaaaatctatcaggaaagaggtttgtccctcaattggccttcagttagtgactaggatcctgtgcaacttcaccccagatgagttttgccctgatccggttccaagcacggtcttagaagagctgaattccgagagcttgctggagcgtcacgccaacaaagacgtgaccagtgtgtttccgtgcaccgctgcccctatagtgtaccgcacaccttcaacgttggacgcggcagagagagcggcagacataggaggtggcgcgaagctggacaggaaagcctcaatggtgcagaggagagggtacaccagtgacgacgaccttgacgacctggattctcccctcgcatccctaatcgacaggagcgccccaccttctccgtcgaacggtttggcacacttcagtgctgggagaggagtttccatggagaatacaagatacacgctcctaagagaagtatgggggctggagcaacggtgatggatgatgacgagcctgtaaaacctaaaatctcttctactgccacccaaatgagagcacaagaaggcctatttgtgtggggtcttcagcaatctctacagtaaaaatgcaacacttccttgtactgtacattcccacgatcctatgtatcttagctcttttgtagtatatagcagcaaaagagggtgtcggcaaagatacagatacagtattgagttaaaattctataatgatatgacattctcttcacctaccaatctgatgggcacttgagacgcttacctttgagctgtcgccactat

SEQ ID NO: 88718 - DNA, 770 bp, Zea Mays
caagccatcacagggcgaagttgctaaaaccatactgacaagttatccaaggaacacaacttgataacgtaaacaccacacatggagatttccaaacttgtcccatgagcagcgacttcccagggggcgataatgaagaaaaggatgcagcagcaatgaaaagaaaactagccatgcaattctgttgcggaaatagacaactttgtgaatacaaaaggttttgctgttgcaaatacaaactaggaactctctaaagatgtagataacgcgacagcttaatcggtatcgtcaacgaccttggtccccagccctttcaagccctcggcggggatctccgcgacggtgacaagggagtagagctcctccttggcatcctcctcgtcgttcctcttgcgggcgatcctcacacgaaccctccgcggcacgctcctgatcccgctgctccagatgtgcttgttgagcttcacatcaatcctaatgtccgtggtgcccatggccttctgcgcaaacttcctgatctccttgatggcgttgggtgccttcttcttgaattaccagccgtggaggcgcttgtggaggttgatggtgtactccctggtgaccacctcctccttcctcgacgctcctcccttcccctgcgacatatctcctctgctccgggtgcgggtgggcggattccgctgggtagtgtggtgcggtgttgtgttccgcggcggcgcgagaggaaaaccctaccggatactggggttgcattttatatgagctgccca

SEQ ID NO: 88719 - DNA, 683 bp, Zea Mays
gaccgatcagttgctgcctgtagtccggttgtttttgtttcggcaagaaccactttatattgtaccaaaaagaaaaaagataagcatatcgagctcaggcttaaaggcccatatacaagacttttccatgtctcggtggaccacgagagctcaagcggcagacgaacgcgttcgtccggtccggtgtgagggtttagcaccacctcgccaggcgaaggcagacgcgacgcgcacttgcgctataagacgagcgtcccgtgctcctgtcttccatacttacctggacgggaccaacaggcgaacaagaaggcctgtggtctaggtcagtggtctgcattgcacttggtgggtgcgctggcctaccatctccttaatgggagagtggacgtcataatttgtggtagtgggggtacgcgttcgcgcggcccctgcaaaatagattaaatttattttagggtcgtctttaattaaaaggggttttggcttttgaatgtggtcatatgcgtatacgcggcccctgtcaagtgtaagaattttaattttggtcccttgttaatgcaagggctttaagctttcgatggtggtcatagacgtctgctggtccagatccagctattgaattggtgctgtaattgcagtatttccttattattaaagccggatcaaaacggcgcctttgagcc

SEQ ID NO: 88720 - DNA, 893 bp, Zea Mays
gtatgcgtgtgtttaagcttgacattccttcacacgaaaaatcaaggataggctggaactggaaaaacatgcatcaaaagataggaggtgtagctggtggactctgctttggtttctcggttactggagtagcaagtgccgaggttcctatcattagagtcaaagacaatgccgagacttcgtcatcatctaccagttcaactcatggaaaggaagtgtacacagattattctgtcacaggtattcctggagatggaaggtgtttattccgctccgtggtgcatggtgcatgcattagatcagggagaccaatacctaatgaagatcttcagagaaaactagctgatgaattgagagcaacggtcgcagatgaatttgtcaagaggcggaaagagaccgaatggttcgttgagggggattttgatacatatgtatcccatattagggagccacatgtgtggggaggcgagccagaattgttcatggcgtcccatgttcttcagatgccaataacggtttacatgcgcgacgaggatgctggcggtctgatagcaatcgcagagtatggccagcagtatggtaaagaagacccaatccaagtcctgtatcatggttttggccattacgacgctctacagatcccagcaaaggttggatcgaagaggaaactgtagacgctgcgcgccgcgagcttgaggtacgctccttgttccagtgtttatacaaccttgtcgaacactcatgctatatgcatgcgagtgtggaagaagacaagcttaacatgaaatggcgttaactcgccgccatgcataaatgttattacatgattcatgtacttccccaggagcagatgagttggaacacttcacttgttgtgttttctctctcctccc

SEQ ID NO: 88721 - DNA, 1047 bp, Zea Mays
gtatgcgtgtgtttaagcttgacattccttcacacgaaaaatcaaggataggctggaactggaaaaacatgcatcaaaagataggaggtgtagctggtggactctgctttggtttctcggttactggagtagcaagtgccgaggttcctatcattagagtcaaagacaatgccgagacttcgtcatcatctaccagttcaactcatggaaaggaagtgtacacagattattctgtcacaggtattcctggagatggaaggtgtttattccgctccgtggtgcatggtgcatgcattagatcagggagaccaatacctaatgaagatcttcagagaaaactagctgatgaattgagagcaacggtcgcagatgaatttgtcaagaggcggaaagagaccgaatggttcgttgagggggattttgatacatatgtatcccatattagggagccacatgtgtggggaggcgagccagaattgttcatggcgtcccatgttcttcagatgccaataacggtttacatgcgcgacgaggatgctggcggtctgatagcaatcgcagagtatggccagcagtatggtaaagaagacccaatccaagtcctgtatcatggttttggccattacgacgctctacagatcccagcaaaggttggatcgaagaggaaactgtagacgctgcgcgccgcgagcttgagagaaaattcggaaacaataagctgcatgcatgcatgcattgagatgtgtacctgtacaaaatgtcaatccaagcttcggatgctgaatctgtacaccatgccctgaaaaccgcacttgtgtagtttgtgtgactggtacagtagaagatagaaggggcgccggggacccatttaccatactctgatgactgcaagtacgttcatttagagtgaagtaagctacacagctcaccagttggtccagacgtccagtgagcgtacatgttttgaatgaggggcatgtggagagcacatagacagttgagtccggcactctcctggatcggaattgaattttatttgcagcataa

SEQ ID NO: 88722 - DNA, 1109 bp, Zea Mays
gtatgcgtgtgtttaagcttgacattccttcacacgaaaaatcaaggataggctggaactggaaaaacatgcatcaaaagataggaggtgtagctggtggactctgctttggtttctcggttactggagtagcaagtgccgaggttcctatcattagagtcaaagacaatgccgagacttcgtcatcatctaccagttcaactcatggaaaggaagtgtacacagattattctgtcacaggtattcctggagatggaaggtgtttattccgctccgtggtgcatggtgcatgcattagatcagggagaccaatacctaatgaagatcttcagagaaaactagctgatgaattgagagcaacggtcgcagatgaatttgtcaagaggcggaaagagaccgaatggttcgttgagggggattttgatacatatgtatcccatattagggagccacatgtgtggggaggcgagccagaattgttcatggcgtcccatgttcttcagatgccaataacggtttacatgcgcgacgaggatgctggcggtctgatagcaatcgcagagtatggccagcagtatggtaaagaagacccaatccaagtcctgtatcatggttttggccattacgacgctctacagatcccagcaaaggttggatcgaagaggaaactgtagacgctgcgcgccgcgagcttgaggtgcattcgttgggcaaccatctaacctcctactactacagagaaaattcggaaacaataagctgcatgcatgcatgcattgagatgtgtacctgtacaaaatgtcaatccaagcttcggatgctgaatctgtacaccatgccctgaaaaccgcacttgtgtagtttgtgtgactggtacagtagaagatagaaggggcgccggggacccatttaccatactctgatgactgcaagtacgttcatttagagtgaagtaagctacacagctcaccagttggtccagacgtccagtgagcgtacatgttttgaatgaggggcatgtggagagcacatagacagttgagtccggcactctcctggatcggaattgaattttatttgcagcataatcatgtgtggttctccaactg

SEQ ID NO: 88723 - DNA, 1238 bp, Zea Mays
gtatgcgtgtgtttaagcttgacattccttcacacgaaaaatcaaggataggctggaactggaaaaacatgcatcaaaagataggaggtgtagctggtggactctgctttggtttctcggttactggagtagcaagtgccgaggttcctatcattagagtcaaagacaatgccgagacttcgtcatcatctaccagttcaactcatggaaaggaagtgtacacagattattctgtcacaggtgagaaatcctcactttttttttgtcttaaagcttcatgaatcatgttcagccttttatgcttcatagttataatagaagaatgagcattgacctcattacttgtgattgagttacatggatccccaggtattcctggagatggaaggtgtttattccgctccgtggtgcatggtgcatgcattagatcagggagaccaatacctaatgaagatcttcagagaaaactagctgatgaattgagagcaacggtcgcagatgaatttgtcaagaggcggaaagagaccgaatggttcgttgagggggattttgatacatatgtatcccatattagggagccacatgtgtggggaggcgagccagaattgttcatggcgtcccatgttcttcagatgccaataacggtttacatgcgcgacgaggatgctggcggtctgatagcaatcgcagagtatggccagcagtatggtaaagaagacccaatccaagtcctgtatcatggttttggccattacgacgctctacagatcccagcaaaggttggatcgaagaggaaactgtagacgctgcgcgccgcgagcttgaggtgcattcgttgggcaaccatctaacctcctactactacagagaaaattcggaaacaataagctgcatgcatgcatgcattgagatgtgtacctgtacaaaatgtcaatccaagcttcggatgctgaatctgtacaccatgccctgaaaaccgcacttgtgtagtttgtgtgactggtacagtagaagatagaaggggcgccggggacccatttaccatactctgatgactgcaagtacgttcatttagagtgaagtaagctacacagctcaccagttggtccagacgtccagtgagcgtacatgttttgaatgaggggcatgtggagagcacatagacagttgagtccggcactctcctggatcggaattgaattttatttgcagcataatcatgtgtggttctccaactg

SEQ ID NO: 88724 - DNA, 2132 bp, Zea Mays
cctaaaccccacgcccctatcgctcccctccttccccttctccgcagctcatcctccccttgtctgcgacccagggaatggcagcactgtcattctagtcactcaacaaccaccaccacctgcacccccgctcgctccgggcaatggcggcggttctggcggtcctggtgtcggcggtggccgccacgtccatcacggccgcggcgctcaacacggacggtctcgcgctgctggcgctcaagttcgccgtctcagacgacccgggcggcgcgctgtccacgtggcgggacgcggacgccgacccctgcgcctggttcggcgtcacatgctccaccgccgccggccgcgtctccgccgtcgagctcgccaacgcctcgctggccgggtacctcccgtcggagctctcgctgctgtcggagctgcaggcgctgtcgctgccctacaaccggctctcggggcagatcccggcggccgtggccgcgctgcagcggctggccacgctcgacctcgcgcacaacctgctgtcgggcccggtcccgcccggggtggcgcgcctcgtctcgctgcagcgcctcgacctctcctccaaccagctcaacggcacgatccccgccgcgctggccgcgctcccgcgcctggccggcgtgctcaacctcagctacaaccacttcacgggcgccgtcccgcccgagctcggcgccatccccgtcgccgtcagcctcgacctccgcgggaacgacctggagggggagatcccgcaggtcggctcgctcgtcaaccagggccccaccgcgttcgacggcaacccgcgcctgtgcggcttcccgctcaaggtccagtgcgcgggggccgccggggcggacgacgacccgaggatcccgaactccaacggccccaccgaccctggcgctgcggcggaggtcgggaggaggggaggcccgaggcagccgcggcggcggcgctcgtcgccggcggtcccggtcctcgcggccgtcatcgtcgtcgccctcgtcgccggcgtggttctgcagtggcagtgccggcggcggtgcgccgccgcggccggggacgaggggaaggagtccggcaaggagaagggcggcggcgcggtgacgctcgccggcagcgaggaccgccgcagcggcggggaggaaggggaggtgttcgtggccgtcgacgacggcttcgggatggagctggaggagctgctccgggcctccgcctacgtcgtcggcaagagccgcggcggcatcgtgtaccgggtcgtccccggccgcggccccgccgtcgccgtccgccgcctcagcgagcccgacgacggcgacagcgatggctccggttctggctccggctggcgccgccgccgcgcgttcgaggccgaggctgccgccatcggccgcgcgcgccaccctaacgtcgcccgcctccgcgcctactactacgcccccgacgagaagctgctcatctacgactacctccccagcggctccctccactccgctctccacggtggcccgacggcgtcgccgacgccattgccgtggtccgtgcgtctgtccatcgtgcagggcgcggcgcgcgggctggcgtatctgcacgagtgcagcccgcggcggtacgtgcacggctgcatcaagtcgtccaagatcctgctggacgacgagctccgcgcgcacgtgtccgggttcgggctcgcccgcctggtcgccggcgcgcacaaggccgccggcggcgggcactccaagaagctcggcagcgcggcatgcgcgctccgaggcggtggcgcggcgtcgtacgtggccccggagctgcgcgcgcccggcggcgcccccgccgcggccgccacgcagaagggggacgtgttcgcgttcggcgtcgtgctgctggaggccgtgaccgggcgcgagcccacggagggggagggcggcgtggacctggaggcctgggtgcgccgcgcgttcaaggaggagcggccgctgtcggaggtggtcgaccccacgctgctcggcgaggtgcacgccaagaagcaggtcctggccgtcttccacgtcgcgctcgggtgcacggagcccgaccccgagatgcgcccgcgcatgcgcgccgtcgccgagagcctcgaccggatcggctga

SEQ ID NO: 88725 - DNA, 2509 bp, Zea Mays
cctaaaccccacgcccctatcgctcccctccttccccttctccgcagctcatcctccccttgtctgcgacccagggaatggcagcactgtcattctagtcactcaacaaccaccaccacctgcacccccgctcgctccgggcaatggcggcggttctggcggtcctggtgtcggcggtggccgccacgtccatcacggccgcggcgctcaacacggacggtctcgcgctgctggcgctcaagttcgccgtctcagacgacccgggcggcgcgctgtccacgtggcgggacgcggacgccgacccctgcgcctggttcggcgtcacatgctccaccgccgccggccgcgtctccgccgtcgagctcgccaacgcctcgctggccgggtacctcccgtcggagctctcgctgctgtcggagctgcaggcgctgtcgctgccctacaaccggctctcggggcagatcccggcggccgtggccgcgctgcagcggctggccacgctcgacctcgcgcacaacctgctgtcgggcccggtcccgcccggggtggcgcgcctcgtctcgctgcagcgcctcgacctctcctccaaccagctcaacggcacgatccccgccgcgctggccgcgctcccgcgcctggccggcgtgctcaacctcagctacaaccacttcacgggcgccgtcccgcccgagctcggcgccatccccgtcgccgtcagcctcgacctccgcgggaacgacctggagggggagatcccgcaggtcggctcgctcgtcaaccagggccccaccgcgttcgacggcaacccgcgcctgtgcggcttcccgctcaaggtccagtgcgcgggggccgccggggcggacgacgacccgaggatcccgaactccaacggccccaccgaccctggcgctgcggcggaggtcgggaggaggggaggcccgaggcagccgcggcggcggcgctcgtcgccggcggtcccggtcctcgcggccgtcatcgtcgtcgccctcgtcgccggcgtggttctgcagtggcagtgccggcggcggtgcgccgccgcggccggggacgaggggaaggagtccggcaaggagaagggcggcggcgcggtgacgctcgccggcagcgaggaccgccgcagcggcggggaggaaggggaggtgttcgtggccgtcgacgacggcttcgggatggagctggaggagctgctccgggcctccgcctacgtcgtcggcaagagccgcggcggcatcgtgtaccgggtcgtccccggccgcggccccgccgtcgccgtccgccgcctcagcgagcccgacgacggcgacagcgatggctccggttctggctccggctggcgccgccgccgcgcgttcgaggccgaggctgccgccatcggccgcgcgcgccaccctaacgtcgcccgcctccgcgcctactactacgcccccgacgagaagctgctcatctacgactacctccccagcggctccctccactccgctctccacggtaacagatctgtgttccgctagcgatagcaatgagcaaggataatacatagattaacaccggcaagagccgttccgttggttatctgtcccaggtggcccgacggcgtcgccgacgccattgccgtggtccgtgcgtctgtccatcgtgcagggcgcggcgcgcgggctggcgtatctgcacgagtgcagcccgcggcggtacgtgcacggctgcatcaagtcgtccaagatcctgctggacgacgagctccgcgcgcacgtgtccgggttcgggctcgcccgcctggtcgccggcgcgcacaaggccgccggcggcgggcactccaagaagctcggcagcgcggcatgcgcgctccgaggcggtggcgcggcgtcgtacgtggccccggagctgcgcgcgcccggcggcgcccccgccgcggccgccacgcagaagggggacgtgttcgcgttcggcgtcgtgctgctggaggccgtgaccgggcgcgagcccacggagggggagggcggcgtggacctggaggcctgggtgcgccgcgcgttcaaggaggagcggccgctgtcggaggtggtcgaccccacgctgctcggcgaggtgcacgccaagaagcaggtcctggccgtcttccacgtcgcgctcgggtgcacggagcccgaccccgagatgcgcccgcgcatgcgcgccgtcgccgagagcctcgaccggatcggctgacttccagcgcgacggcgtccggccggccgccggttactgatcatcaactacgtaggtgcaatccaacgcataaaagagactcgcagtcctgttcatgtagattagcgcagttaagcattgtggatttcagagacggtaaacgcaggtaaaaacaatcatcatccgctccatctgtgaatgacgaaggtgaatcactcgacgtagcaggctataggctagcagccgtgctaatattttgtggcaccccttgatccattccaaagcgaactctgttgggagtttt

SEQ ID NO: 88726 - DNA, 2282 bp, Zea Mays
cgccgaggggcaaatccgtcagcgcgggcacatcgcgtcgcctttccggcccccacacctctctctctctctctctctcttcccggtcgacgagcggagagctagcggcggggcgcgcgctgctatttatcgagcacacgggagccacgccgcccgtccctgtctccatcttgccgtcgctcccacgccgccgttccctccgcctgcctcgaccgcctcgtgccgtgcgcgctaaggagggagggagggagggaaagtgaagcaggagggtggaccactgcgcgcgtgcggcgccttcctcctcgaatcaccgccgacagcttctgcagctagcgttatcacccccaccaccccggggctcggattaggatctgagctgaagctgccaggccaggcgatcgagccgatgtacggctcgccggtgtccaaggacctcaacctcccggcgcagccgccgccgatggcctcgtccgggctgctacgctacagatcggcgcccagcgcggtgctcggcggcctctgcgaggaccagctccagctccctgccgccgctccgagcgccgccgacaacgtcttctcaaggttcctgcccgaccaccacatccgggacgacaagccgtcgcctgcccacttcccgagtgcggccgacatggcctcccaccaccagcaggagcaaatgatgttccactcccagtcccagtcccagcaccagcaggagacgggtaggtccgggggcggcctctaccgcaccgtcagctctggcatggaagcgggcggcactggcgtcggcgccgccagcagcctgattcggcagagcagctcccccgccgggttcctggaccatttcggcatggacaacgggtacggggcgatgctgagggcgagcatgggcatggggttccaggacggtggtgccagtgactccctcgcgggcggcggcggcggtagcggcaggctcgggggccagctgagcttctcgtcgcggcaggggtcgctcatgtcccagatctcggagatggacagccaggaggatgtcgtcggagcgagcagccccgacgctggcggcggcggggacgccgcctacatgccggggtacccgatgagctccggcgggtgggacgactcgtcgtcggcgctcttgccggacagcctgcccgcgacgaataaacgcccgcgggactcgttggagcacggcggcgggctggcgcaccagttcagcctccccaagacgtcgtcgtcggaggtggccgccatcgagaagttcctccagttccaggacgccgtgccctgcaaggtccgcgccaagcgcgggtgcgccacgcacccgcgcagcatcgccgagcgggtgaggaggacgaagatcagcgagcggatcaggaagctgcaggagctcgtgcccgacatggacaaggtgactgcacctgcacccaccggtttcagtgcgcgttgagttgctgccatatgctatgccaggaccactccggccggccagccagagctgatgacctacttgcgttcccgttgccttgcagcaaaccaacacctccgacatgctggacttggccgtcgactacatcaaggatctccagaagcaggtcaaggtaacgagctccggcggccgccggtctgctttcctcctccagaacccaaattgcaaggtcagagagccagtgacgtccaaatcacggaggctggcctcatcttgccccgccggctgatcgacggcgagcgagggttacctacagttacaaacaacgatatgtcgttgactcttcctcacctagtactagtagtaggaggaggaggagtatctttatcgtcgtttatcatcccttgtgttcacgcgttgcaggcgttgaacgagagccgcgccagctgcacctgcccggcgagcaagcaccagcagcggttctccggctgaagcaccggccgggccggcagtccccatcggtccccggcggctgcgtagcacgctccagtacacagctagtgcagcaaagatggacccaccacaaggcctggagacagacctgactgagaccgagatagagaggaacaccgccatcgtctgcagtgcatgcgcgcgagcagcatgtacagcgccggagcgatcgaggctcgctggactgctggatcgagcagtgtggcatcatcaagtattcaagcgactgggaggaaggaagaaagaatcgagtcatgggaccgaggaggaagaacgaatgaattgtacagtgctgtttctttttttttttttgctgtaaacacttttgctacatctgtgc

SEQ ID NO: 88727 - DNA, 2360 bp, Zea Mays
cgccgaggggcaaatccgtcagcgcgggcacatcgcgtcgcctttccggcccccacacctctctctctctctctctctcttcccggtcgacgagcggagagctagcggcggggcgcgcgctgctatttatcgagcacacgggagccacgccgcccgtccctgtctccatcttgccgtcgctcccacgccgccgttccctccgcctgcctcgaccgcctcgtgccgtgcgcgctaaggagggagggagggagggaaagtgaagcaggagggtggaccactgcgcgcgtgcggcgccttcctcctcgaatcaccgccgacagcttctgcagctagcgttatcacccccaccaccccggggctcggattaggtacgctgttcatgccgtctccacggccaaggaccggggaggagcttctttctctagctgggggatgagcaacaccaagtgatgttccatcatgtttgcttaaaaagacacgcactgcctctgcctgtgcctgcctgttcatggtcctcatcctcacagagctggttaccgaaaaattggtatactttttcttggcgcaggatctgagctgaagctgccaggccaggcgatcgagccgatgtacggctcgccggtgtccaaggacctcaacctcccggcgcagccgccgccgatggcctcgtccgggctgctacgctacagatcggcgcccagcgcggtgctcggcggcctctgcgaggaccagctccagctccctgccgccgctccgagcgccgccgacaacgtcttctcaaggttcctgcccgaccaccacatccgggacgacaagccgtcgcctgcccacttcccgagtgcggccgacatggcctcccaccaccagcaggagcaaatgatgttccactcccagtcccagtcccagcaccagcaggagacgggtaggtccgggggcggcctctaccgcaccgtcagctctggcatggaagcgggcggcactggcgtcggcgccgccagcagcctgattcggcagagcagctcccccgccgggttcctggaccatttcggcatggacaacgggtacggggcgatgctgagggcgagcatgggcatggggttccaggacggtggtgccagtgactccctcgcgggcggcggcggcggtagcggcaggctcgggggccagctgagcttctcgtcgcggcaggggtcgctcatgtcccagatctcggagatggacagccaggaggatgtcgtcggagcgagcagccccgacgctggcggcggcggggacgccgcctacatgccggggtacccgatgagctccggcgggtgggacgactcgtcgtcggcgctcttgccggacagcctgcccgcgacgaataaacgcccgcgggactcgttggagcacggcggcgggctggcgcaccagttcagcctccccaagacgtcgtcgtcggaggtggccgccatcgagaagttcctccagttccaggacgccgtgccctgcaaggtccgcgccaagcgcgggtgcgccacgcacccgcgcagcatcgccgagcgggtgaggaggacgaagatcagcgagcggatcaggaagctgcaggagctcgtgcccgacatggacaaggtgactgcacctgcacccaccggtttcagtgcgcgttgagttgctgccatatgctatgccaggaccactccggccggccagccagagctgatgacctacttgcgttcccgttgccttgcagcaaaccaacacctccgacatgctggacttggccgtcgactacatcaaggatctccagaagcaggtcaaggcgttgaacgagagccgcgccagctgcacctgcccggcgagcaagcaccagcagcggttctccggctgaagcaccggccgggccggcagtccccatcggtccccggcggctgcgtagcacgctccagtacacagctagtgcagcaaagatggacccaccacaaggcctggagacagacctgactgagaccgagatagagaggaacaccgccatcgtctgcagtgcatgcgcgcgagcagcatgtacagcgccggagcgatcgaggctcgctggactgctggatcgagcagtgtggcatcatcaagtattcaagcgactgggaggaaggaagaaagaatcgagtcatgggaccgaggaggaagaacgaatgaattgtacagtgctgtttctttttttttttttgctgtaaacacttttgctacatctgtgctgctgctgctctccatatgccgttgcccattgttactacgttaagaatcacagtgagatatagatcgaggaaaacttcactactgttaccaccaccatcaccatgcaagctggcggcacagtgccatgc

SEQ ID NO: 88728 - DNA, 2039 bp, Zea Mays
cgccgaggggcaaatccgtcagcgcgggcacatcgcgtcgcctttccggcccccacacctctctctctctctctctctcttcccggtcgacgagcggagagctagcggcggggcgcgcgctgctatttatcgagcacacgggagccacgccgcccgtccctgtctccatcttgccgtcgctcccacgccgccgttccctccgcctgcctcgaccgcctcgtgccgtgcgcgctaaggagggagggagggagggaaagtgaagcaggagggtggaccactgcgcgcgtgcggcgccttcctcctcgaatcaccgccgacagcttctgcagctagcgttatcacccccaccaccccggggctcggattaggatctgagctgaagctgccaggccaggcgatcgagccgatgtacggctcgccggtgtccaaggacctcaacctcccggcgcagccgccgccgatggcctcgtccgggctgctacgctacagatcggcgcccagcgcggtgctcggcggcctctgcgaggaccagctccagctccctgccgccgctccgagcgccgccgacaacgtcttctcaaggttcctgcccgaccaccacatccgggacgacaagccgtcgcctgcccacttcccgagtgcggccgacatggcctcccaccaccagcaggagcaaatgatgttccactcccagtcccagtcccagcaccagcaggagacgggtaggtccgggggcggcctctaccgcaccgtcagctctggcatggaagcgggcggcactggcgtcggcgccgccagcagcctgattcggcagagcagctcccccgccgggttcctggaccatttcggcatggacaacgggtacggggcgatgctgagggcgagcatgggcatggggttccaggacggtggtgccagtgactccctcgcgggcggcggcggcggtagcggcaggctcgggggccagctgagcttctcgtcgcggcaggggtcgctcatgtcccagatctcggagatggacagccaggaggatgtcgtcggagcgagcagccccgacgctggcggcggcggggacgccgcctacatgccggggtacccgatgagctccggcgggtgggacgactcgtcgtcggcgctcttgccggacagcctgcccgcgacgaataaacgcccgcgggactcgttggagcacggcggcgggctggcgcaccagttcagcctccccaagacgtcgtcgtcggaggtggccgccatcgagaagttcctccagttccaggacgccgtgccctgcaaggtccgcgccaagcgcgggtgcgccacgcacccgcgcagcatcgccgagcgggtgaggaggacgaagatcagcgagcggatcaggaagctgcaggagctcgtgcccgacatggacaagcaaaccaacacctccgacatgctggacttggccgtcgactacatcaaggatctccagaagcaggtcaaggcgttgaacgagagccgcgccagctgcacctgcccggcgagcaagcaccagcagcggttctccggctgaagcaccggccgggccggcagtccccatcggtccccggcggctgcgtagcacgctccagtacacagctagtgcagcaaagatggacccaccacaaggcctggagacagacctgactgagaccgagatagagaggaacaccgccatcgtctgcagtgcatgcgcgcgagcagcatgtacagcgccggagcgatcgaggctcgctggactgctggatcgagcagtgtggcatcatcaagtattcaagcgactgggaggaaggaagaaagaatcgagtcatgggaccgaggaggaagaacgaatgaattgtacagtgctgtttctttttttttttttgctgtaaacacttttgctacatctgtgctgctgctgctctccatatgccgttgcccattgttactacgttaagaatcacagtgagatatagatcgaggaaaacttcactactgttaccaccaccatcaccatgcaagctggcggcacagtgccatgc

SEQ ID NO: 88729 - DNA, 1351 bp, Zea Mays
tccagctccttggacgcggaagccgtcatggatggcagcagcaattattgcagttcttgcctggggagggagtctctcctcccccgaaacatttctatttccggaactgacacggagggagggccacccgcccgcatgctctgttgctgttttgcccgattccttcgtccagggtacggggcgatgctgagggcgagcatgggcatggggttccaggacggtggtgccagtgactccctcgcgggcggcggcggcggtagcggcaggctcgggggccagctgagcttctcgtcgcggcaggggtcgctcatgtcccagatctcggagatggacagccaggaggatgtcgtcggagcgagcagccccgacgctggcggcggcggggacgccgcctacatgccggggtacccgatgagctccggcgggtgggacgactcgtcgtcggcgctcttgccggacagcctgcccgcgacgaataaacgcccgcgggactcgttggagcacggcggcgggctggcgcaccagttcagcctccccaagacgtcgtcgtcggaggtggccgccatcgagaagttcctccagttccaggacgccgtgccctgcaaggtccgcgccaagcgcgggtgcgccacgcacccgcgcagcatcgccgagcgggtgaggaggacgaagatcagcgagcggatcaggaagctgcaggagctcgtgcccgacatggacaagcaaaccaacacctccgacatgctggacttggccgtcgactacatcaaggatctccagaagcaggtcaaggcgttgaacgagagccgcgccagctgcacctgcccggcgagcaagcaccagcagcggttctccggctgaagcaccggccgggccggcagtccccatcggtccccggcggctgcgtagcacgctccagtacacagctagtgcagcaaagatggacccaccacaaggcctggagacagacctgactgagaccgagatagagaggaacaccgccatcgtctgcagtgcatgcgcgcgagcagcatgtacagcgccggagcgatcgaggctcgctggactgctggatcgagcagtgtggcatcatcaagtattcaagcgactgggaggaaggaagaaagaatcgagtcatgggaccgaggaggaagaacgaatgaattgtacagtgctgtttctttttttttttttgctgtaaacacttttgctacatctgtgctgctgctgctctccatatgccgttgcccattgttactacgttaagaatcacagtgagatatagatcgaggaaaacttcactactgttaccaccaccatcaccatgcaagctggcggcacagtgccatgc

SEQ ID NO: 88730 - DNA, 513 bp, Zea Mays
atgtcgctggaccttccggatgagattagggttgctcaagagaagaaactggaagaactgaagaggcaacaagagcttcagaatcaacttgttgtccagcggacattacaatttagagatagaaagataaagttctttgagagacggaagattgagaggatgataaggcgactcgagaagcaacaacgttcaaatggtgatggtgtcaacaataatctgtcaaaattgcgagaagatcttgaatatgttagattcttccctaagaatgagaaatatgtctcgctgttcactggagggaatagtcaagatattgttcaagagaggaataaatgtcgcaaacagatcaaggagaatctcatggctgctgcagcaaacggaaaagatttagaagagacagcaagcgatgaactgaggcaaaactacaggttgccgatcaatattgttttgtggctcataaccggaagcataatcagcatcagcaagaaggaaaagccaccacaacagacgagctaa

SEQ ID NO: 88731 - DNA, 1899 bp, Zea Mays
atgttggaccatcttgctatcattgcgtctgagttaggggacgacgcaacggattttgaggttgatggcatcgacaacctcagcgagaacgatgtcagcgacgaggagatcgatgccgacgagctcgcccgacgaatgtggaaggacaaggtcaagctcaagaggatcagggagaggcagcagaagcttgccctgcagcggctggagctggagaagaccaagacaaagaagatttcagaccaagccctccggaagaagatgacgagggcccaggacgggatcctcaagtacatgctcaagctgatggaggtgtgcaatgcccgagggttcgtgtacgggatcattcctgagaaaggtaagcctgtcagtggtgcgtccgataacatcagggcctggtggaaggacaaggtgaagtttgacaagaatgggccagcagcgatcgtgaaatacgagcttgagaactcgatgctgagcaaccctaagggcggcggagccatggaccagcatagcttgatggacctccaagacggcactctgggctcattgctttcagcgctgatgcaacactgcagcccgcagcagcgaagctatccattggataagggtgtcccgcccccttggtggccaacagggaacgagtcgtggtggcctgcgttgggcctcccaaagggagaagcgcctccgtacaggaaaccgcatgacctgaagaaggtttggaaagttggtgtcctgacgggcgtgatcaagcacatggccccaaacttcgataagatcaggaaccgtgtaaggaagtcgaagtgtctgcaggacaaaatgactgcaaaggagagcctcatctggcttggtgttctacaacgcgaggagaagtctgttcacggctttggcagtgctttactacagaatgctcggcatagtagcacttcagaggacagaaacgagggcatatatagcagcagtgacgagtatgatgtcgaccgcctcgagcagcctcctcgttccacatcatccaaagaggacgagggagacgctcagcctgtcttgcagattagaggggagcagacctcaactagaggaactaataagagaaggcgccatgacacatcctccaaccaactagctattagcaaggaagagatgagtaaatctaaatctcaacagcggaaaggcccctcaacccgccctcctgttgccgaggttgaggttgaagtgacacaaagaaacgacaagacgccagaagtagtgtgcagtgcagctggtggtgatatgaactttatcgacccaattgatgcggtgggcattactaacctgccaatgagccctaaacatgtcccccctacaattggagctttgcagcagcacggagattgtcgagggaattttctatctcctgctgctgccatcaactacaacagcagcaacagcaaccaggcagcaagtgctgctcaatcaaacacttatctgggaggccatcctctggcttgtgaaggcagtgatattgccaactcatggtccggacactcatttcagcaggatgttggtcttgggcctcctattggttttgatccttcaccagttgctcaccagggttcggcagtgcagcagccactgccactgccacttccacttcctatggatcaccaagcgcctatcacgggatcaggagctctcgccacgaacggctcttacagtctcccgacagcaggcggtgtgagttctgggacaatcgtcagcgagacccaccagcagctcatggacaaccctttcttcggcgacgccggagacagctcttttggcggtcttcctttcagcctccttcctttcagtagtccgatgcttaacttcgatgaattggatgagttggtggacgacgacgacttgatgcagtacctcggcacataa

SEQ ID NO: 88732 - DNA, 2857 bp, Zea Mays
tcgtccctggtccagcttcggcgctggtcgcggaggaagaccatagggtgcgtggcgtcgtcgtcgtcggcgcggtcggagacgccgagcagcagtagcggcgcgagcgctgcagcagcgtcgacgtcggccatggcggaggcgcgtgtaacggcggtggcgacgatcaaggtcaccgccggcgggttcctcaacagcttgaggccgtccagggccatcgacgacatcaaggacctcatcggaaggtcgctctacctcgagctcgtcagctcccatctcgacgcgaagacggggcgggagaaaccgacgctccggagctacgcgcacaaggtggcggacaacgacgccgacgtggtgacctacgaggccgacttcgacctgccgccgggcttcggcgaggtcggcgccgtgctggtcaccaacgagcaccacaccgagatgttcctcgaggacgtcagcctctacaccaactccgactcgggcagcgactccgactccgactccggcagcgacgatgcccgcgccgcgccgctcctcgccatccggtgcaggtcgtgggtggagcccaagtccagcgacgccgccggggacgggaagcgcgtcttcttcgctaacaagccttacctgccggggcagacgccgccggggctccggagctaccggagcaaggacctggaggagaagcgcggcgacgggcgcggcgagcggaagcccagcgaccgcatctacgactacgccacttacaacgacctgggcgaccccgacagcgacgccgccaaggcgcggcccgtcctgggcggcagcgcgcagttcccctacccgcggcggtgccgcacgggccgcccgatgtctgccaaggacccaagcacggagacgaggagcggcgacaactacgtgccgagggacgaggcgttctcggaggtgaagaacctgcagttctccgtgaccacgctgcgctcggtgctccacgccgccgtgccggcggtgcagtccacgctcatcgaccccaacctcgcgttcccgtccttcttcgtcatcgacaagctgttcgaggacggcgtcgagctgcccaaggccgaccagctgggcttcctccgcagcgtcgtgcctcgcctgctccagctcctccgcgacggccccggcgaccaggtcctcctcttcgacaggcccgccaatgtccagaaggacaagtttgcgtggctgagggacgaggagttcgcgagggagacgcttgccgggatgaacccgtacgcgatcgagctcgtcagagagttccctttgaagagcaagctggacccggcggtgtacggacaggcggaatcagcgatcacggcggaggtgctggagcggcagatggggcgggtgatgacggtggcggaggcggtgtcgcagaagcggctcttcatgctggactaccacgacctgttcctcccatacgtgcacaggatccgggcgcaggcgcacaccaccatgtatggctcgcgcaccatcttcttcctgtgcaacgatggaacgctgcggctgctggccatcgagctgacgcggccggcgtcaccgacgcagccgcagtggcgccgggtgttcacctcgtcgacggacaccaccgagtcgtggctgtggcggatggccaagtcgcacgtgcgcgcgcacgactcgggccaccacgagctcatctcccactggctgcgcacgcactgcgccgtggagccctacatcatcgcggccaaccggcagctgagcgagatgcacccggtgtaccagctgctgcacccgcacttccgctacaccatgcggatcaacgcgctggcgcggtcggcgcttatcaacgccggcggcatcatcgagctctccttctcgccgcagaggtacgccatagagctcagctccgtggcgtacgacaagctctggcgcttcgacacggaggcgctccccgcagacctcgtccgcagggggatggccgtggaggaccccgccgcggagcacgggctcaggctcacgatcccggactacccgttcgccaacgatggcctgctcgtctgggacgccatcaagggctgggtgacggcgtacgtcgcccggttctacccggacgccagcaccctcgccggcgacgcggagctgcaggcgttctggacggacgtgcgcaccgtggggcacggcgacaagaaggacgcgccagggtggccggcgcttgactcgccggacagcctggcgcacgcgctgaccaccatcatctgggtcgcgtcggcgcaccacgccgccgtcaacttcgggcagtacgacttcgcgggttacttccccaaccggccgtccatcgcgcgcaccaacatgccggtggaggagcccgtcgacgccaccgcgctcgcggcgttcctggacaacccggaccaggcgctccgcgagtgcttcccgtcgcaggtgcaggcgacgctggtgatggccgtgctggacctgctgtccacgcactcccccgacgaggagtacctgggcgggatggagaccgcgccgtggaacgacgatgccacggtgcaggatgcgtacggcaagttcaacgcgcggctcaaggagatcgagggcatcatggacgagaggaacaaggaccgcaggctcaagaaccggtgcggcgccggcattttgccgtaccagctcatgaagcccttctctcagcccggtgtcacagggatgggcatccctaacagcacgtccatctgatgatccttgttgactcctcactatttaattttacctcggtacggtgtctagtggaattatttattcatcaatgtaacggtaacggtaatgtaataatggcataaacttacttcggccggtgctatatatattaagagctctgagc

SEQ ID NO: 88733 - DNA, 1357 bp, Zea Mays
atcactctgcgaaaccgaattggccaaagcccgctacgccctcgtcatcgtccaatgagaccgcccccccacagtttcgtcttcctcttctccgaccccgaccatggagccggacgccgatgaggactacatgggagacctctcacgcttcctcccgccgagtccgtcctcctccccaccgaagaacctcgggcgccggaagcagccatccacgcaggcgcaggcgcagccgagggcgaagcgcgggaagggtgtgccgtggcaggagcggcggaggcaggagcgcgagcggaagcagcgggaggaggacgcacgcacgatggccgggctcgcggaagctatccctgagagcaacgtagggttcaggatgttgaggcagatggggtacgatcccgactcccgcgccggcgccggcgccgaaccggtcggcatcgagatccgccgctcgcgggcggggctcggggcggaggagcctgtgttggctccggcgccggcgccggcgccggtggagaagccccgggaggtgtcggagcgggagcgtaggcagcaggaggagatggcggtagagctaagggcgcggaagagcacgcagtggaagggccggagggtggtgtgggactaccgcaaggccgagagggcactcgcgcagctggagaaccgggaggtggagccacaggcaccggagggggaggacaaggagaaaggggcagaggaggaagaggatgtgatcactgaagaggatttgcagcaaatactgtctaagttgcgtgatcagtaccagtattgcctttattgtggatgcaaatatgaatcactagaagtgctgtcaaaggaatgccctggtcctgatgaggatgaccattgatttgttgtgtgaaggtgacaaataattgtctttgatacaaacaggtgatggttctatactcaccatcatcacaatgatgttcagtcatgattggtgtacttcattggattcccaatacattggagcacaaactttgtggtttgtgctcttgtcgtcatcatacggacacactaagctctagaatagcttgttttgttggctgtattggctacttttatacttctagttaaatagtttctaactattattttatatcagggtgatgagaccttaagttgacacaaaacagaattgttgccctgtaagtgctggaaggtatatcttctagagtgatgccatgcaaccataacaacaacaaagcattttagtctctggtaaattaaagtaggttagagttgaaacttaagagaaaccacaggtcaaaattcagacacgtggtccgtgcacctttattcaaggctaatttttttggtatattcaagtctccattct

SEQ ID NO: 88734 - DNA, 2236 bp, Zea Mays
atcactctgcgaaaccgaattggccaaagcccgctacgccctcgtcatcgtccaatgagaccgcccccccacagtttcgtcttcctcttctccgaccccgaccatggagccggacgccgatgaggactacatgggagacctctcacgcttcctcccgccgagtccgtcctcctccccaccgaagaacctcgggcgccggaagcagccatccacgcaggcgcaggcgcagccgagggcgaagcgcgggaagggtgtgccgtggcaggagcggcggaggcaggagcgcgagcggaagcagcgggaggaggacgcacgcacgatggccgggctcgcggaagctatccctgagagcaacgtagggttcaggatgttgaggcagatggggtacgatcccgactcccgcgccggcgccggcgccgaaccggtcggcatcgagatccgccgctcgcgggcggggctcggggcggaggagcctgtgttggctccggcgccggcgccggcgccggtggagaagccccgggaggtgtcggagcgggagcgtaggcagcaggaggagatggcggtagagctaagggcgcggaagagcacgcagtggaagggccggagggtggtgtgggactaccgcaaggccgagagggcactcgcgcagctggagaaccgggaggtggagccacaggcaccggagggggaggacaaggagaaaggggcagaggaggaagaggatgtgatcactgaagaggatttgcagcaaatactgtctaagttgcgtgatcagtaccagtattgcctttattgtggatgcaaatatgaatcactagaagtgctgtcaaaggaatgccctggtcctgatgaggatgaccattgatttgttgtgtgaaggtgacaaataattgtctttgatacaaacagggtgatgagaccttaagttgacacaaaacagaattgttgccctgtaagtgctggaaggtatatcttctagagtgatgccatgcaaccataacaacaacaaagcattttagtctctggtaaattaaagtaggttagagttgaaacttaagagaaaccacaggtcaaaattcagacacgtggtccgtgcacctttattcaaggctaatttttttggtatattcaagtctccattctactgcctcatctcatatcaactcgatgtaactatcctggagtgtttgaagatcattatcctggagtgtttgaagatcgtttattatctactcgatgcaacgatcttgaaattataaatcttcccttattgaaaaaaagaaaccatcatccaccaccagaataccaattaagagtcaggcatgagcgacctaaggaggagttcatggagtgtggaagcaccagccaagcaccacaaactgcaccccttgactaggtttactaggtttatgatctgaataattatgtcgctctctcaaacacgcaggtgcttcgatgcttctagacttcccaagtcactaggatgattagggtattggtacccttcacattcttgagaagcttattgcagtgataaatatatcgatatgaaaattgaatagtatttgttcttcgtcggcctggaaaggtgggagtggatggaaagccacaaggagcgtctgcatatgacatgctatgcagcaaaactgaagtggagctacatcttcagaaatgcctcatcgaggcaccaatgcacttcagagccagaagtgaaatgttgccggtggtgaacaagcaaactttgattttgatctgtgataatcagataacaattttgtatctgctttccaactgagcgagagagggggctatacttgtggacatctgctcaattttgttgtcagaagagaagtaagtctattttatgaaacttccactgtacgatgttggaatggaatatctgtacattactgtcagtcctgtgtgtcgtctaaggatccatgattgctgaataaatgcctggaaagggccacgatcactgttgaacatcacagaaggttcctcatctgtatgctctttgaatcagacggttctccaacagcaatattttcagcttctacagcacaatcaaaccagtctttggaaataaaaagggaaggaatggcatgaaatagtgattggacataaaaggagatagaagcatcaaactttccaagacattctgtttcgtgcaattccaagtcttgatgctttatgtagaaaataaaacaatcatactaatagctggatttcagtc

SEQ ID NO: 88735 - DNA, 1698 bp, Zea Mays
atcactctgcgaaaccgaattggccaaagcccgctacgccctcgtcatcgtccaatgagaccgcccccccacagtttcgtcttcctcttctccgaccccgaccatggagccggacgccgatgaggactacatgggagacctctcacgcttcctcccgccgagtccgtcctcctccccaccgaagaacctcgggcgccggaagcagccatccacgcaggcgcaggcgcagccgagggcgaagcgcgggaagggtgtgccgtggcaggagcggcggaggcaggagcgcgagcggaagcagcgggaggaggacgcacgcacgatggccgggctcgcggaagctatccctgagagcaacgtagggttcaggatgttgaggcagatggggtacgatcccgactcccgcgccggcgccggcgccgaaccggtcggcatcgagatccgccgctcgcgggcggggctcggggcggaggagcctgtgttggctccggcgccggcgccggcgccggtggagaagccccgggaggtgtcggagcgggagcgtaggcagcaggaggagatggcggtagagctaagggcgcggaagagcacgcagtggaagggccggagggtggtgtgggactaccgcaaggccgagagggcactcgcgcagctggagaaccgggaggtggagccacaggcaccggagggggaggacaaggagaaaggggcagaggaggaagaggatgtgatcactgaagaggatttgcagcaaatactgtctaagttgcgtgatcagtaccagtattgcctttattgtggatgcaaatatgaatcactagaagtgctgtcaaaggaatgccctggtcctgatgaggatgaccattgatttgttgtgtgaaggtgacaaataattgtctttgatacaaacaggtgcttcgatgcttctagacttcccaagtcactaggatgattagggtattggtacccttcacattcttgagaagcttattgcagtgataaatatatcgatatgaaaattgaatagtatttgttcttcgtcggcctggaaaggtgggagtggatggaaagccacaaggagcgtctgcatatgacatgctatgcagcaaaactgaagtggagctacatcttcagaaatgcctcatcgaggcaccaatgcacttcagagccagaagtgaaatgttgccggtggtgaacaagcaaactttgattttgatctgtgataatcagataacaattttgtatctgctttccaactgagcgagagagggggctatacttgtggacatctgctcaattttgttgtcagaagagaagtaagtctattttatgaaacttccactgtacgatgttggaatggaatatctgtacattactgtcagtcctgtgtgtcgtctaaggatccatgattgctgaataaatgcctggaaagggccacgatcactgttgaacatcacagaaggttcctcatctgtatgctctttgaatcagacggttctccaacagcaatattttcagcttctacagcacaatcaaaccagtctttggaaataaaaagggaaggaatggcatgaaatagtgattggacataaaaggagatagaagcatcaaactttccaagacattctgtttcgtgcaattccaagtcttgatgctttatgtagaaaataaaacaatcatactaatagctggatttcagtc

SEQ ID NO: 88736 - DNA, 285 bp, Zea Mays
atggcgacgagtgccgagacaacgtcggagctggacgcgtccatctccaccacctctttctcgcccgacgtgacgacgaacgccgacctcacgctagatccgggcgtgctcacctccgcctcctcttctgcgtcggcgtcgcaccaaccatctccagccatagagacaacttgctcgctgcagaatggttggtgctacgccggtcagcaagatcctcccgatcagcaagatcactatagttcgtggagcgttgtcccggtcagcaagatcctccctgcgctctaa

SEQ ID NO: 88737 - DNA, 873 bp, Zea Mays
ctcggttctggctcggaggccggaaagttcccgatctctctcctccgagcgggccatttctacccatagcctccccacctcccattgtgcggcctccaatgcctccctcggagctgatgattgagagtacacgctggaaaagataactcgtcggttaagattaaccacaccaataagagactaaacgaagaaaaacaaatagagagagaggcaccaacctagtcgtgtggaataatgtcccgcatcatcgacaaatggcaatggagaccgccttaccgaagttgcaaaggaagcgctccaccgactcgaggctcatgtcagtgtggtcggcagtcgctttgatcagatgccattcttgcacctccatctcctccccctccgagccctcaaggatgaacagagggtgattcaaggcctccttcgggggtaggaagtggaggcatcggcaacacatgggaggaggaggcaagcgacgaaggtgatggagcccggggctcaccgcccatgccagttgccaccaccccggtcgcgtaagccaccacaacatcacccaaaggcggtaaggtgggcggtggctgggggacgactgccgcatccaccataagggaagcgtccacagtgatgaccgtagtcacgggaatcaccctgaaggacgggcaaggacctctgtgccttcggaacaaagacgccagcaacggacgatcccgacgcccctcgggcgacagggggcgacagagcgcccataacgggggaagcgggtgccgccacgggggctgaccggagcgtccggaggagctccgctagggtagcgactcgggaggacgatgttggattttttataggtttggtacatttattaaataaactttatga

SEQ ID NO: 88738 - DNA, 5107 bp, Zea Mays
atggagctacatcgtgaacctcctgaagctattctgaatgccataaaatttgatctcatgacgagtacggatatggaaaaattgagcagcatgagcataatcgaagtgagtgatgtcactagtccgaagctaggattaccaaatggttccctgcagtgtgagacttgtggatcacaacgtggacgcgactgtgatgggcattttggtgtgactaaactggcggcaacagtacacaatccatacttcatcgatgacgttgttcactttctaaaccgaatatgtcctggctgtctcagcccaagggaaggcatagatacaaagagattggagagagaaaaggttcaagcaacatgcaagtattgttcgaaggatggctctaaactttaccctagcatagtctttaagacactgtcaagtccaagagtattattattcaagagtaaacttcacagaaacgccagcgtgatggaaagaatttcgattgttgcagaagctgctgacagaatgcctaatagatcaaagggtaaaggttcgcttgaaggcctgcccctggatttttgggattttgtaccttctgagaataaacaagtccagtcaaatatgaccaagataatattgtcgccctaccaagtcttctacatgttgaagaaaagtgaccctgaacttatcaaacaatttgtttcaaggcgggagctattgtttctatcatgtttaccagtaactcctaattgccatcgtgttgtagaaattggatatgggcttccagatggacgcctaacatttgatgacagaacaaaggcttacaagaggatggttgatgtcagtaggagaattgatgactaccgccagcatccacatttcagtgttcttgcaagttcacttgtctcaagccgggtttcagaatgcctaaagtcatccaagttgtactctaaaaaggcagatggagagacatccacagatacatatggaatgaaatggctaaaggatgttgttctcagcaaaagatcagataatgtttttaggagtattatggttggagacccaaaaattaagttatgggaaattggcattcctgaagatttatcctcaagcctggttgtttctgagcacgtcagttcttataattttcaaagtacaaatctgaagtgcaacctgcaccttctagccaagcaagaactatttattcggcgaaatggaaagctaatgtttcttcggaaggcagaccagctagaaataggtgacattgcctatagaccattgcaggatggtgatattattctcatcaacaggcctccttcagttcatcaacattcattgattgcattatctgcaaaaattctaccaattcactctgtcgtatcaatcaatccactatgctgtacaccttttgcaggagattttgatggtgattgtttgcatggatatatcccacaatctatacgctcaagggttgaacttgaagagctggtaagcttacacaaccagctgttgaatatgcaagacggtcgaaatttggtgtcactaacacatgactctctagctgctgcacatttgttaacaagtacagatgtttttctgaagaaatctgaattacagcagcttcaaatgctatgcctttcagtatcaacaccagcacccgcagttattaaatctatgaattttcaaggttctctgtggactggtaaacaacttttcagcatgcttcttccttcaggcatgaatttcagttgcgatacggagttacatatcatggacagtgaggtgcttacctgctcactgggttcttcttggctacaaaataacacatctggtcttttctctgtcatgttcaaacagtatggttgcaaggcacttgacttcctttcttcagcacaagaagtactatgtgagttcttaaccatgaggggtttaagtgtctctctttcagatctctacatgttctcagaccattactcaaggagaaaactagctgagggagttaagttggcactgtatgaagctgaagaagcttttcgagtcaagaaaatattgttagatccaattaacataccagttctgaagtgtcacgatgaaactgaagatgtaacttacagacaatctgattgtatccagagcaatccatcagttatcagatcttcaatcatggcatttaaagacgtcttccgtgatctcttaaaaatggtgcaacaacatgttagtaatgataactcaatgatggtgatgataaatgcaggaagcaagggtagcatgttgaaatatgctcaacaaactgcatgtattggtcttcaacttccagctagcaaatttcccttcagaattccttcccaactctcatgtattagctggaatggacagaaatcgttgaactatgaagctgagagtactagtgaacgtgtgggaggtcaaaacctttatgctgtgataaagaattccttcattgagggtttgaatccattggaatgtcttctgcacgctatatctggcagggcaaacttctttagtgaaaatgctgatgtaccagggacattgacaagaaaattaatgtatcacttgagagatatacatgttgcctatgatggaactgttagaagttcttatgggcagcaaatagtgcaattctcttatgatagtgttgatgacctagtagataaactcggcgccccggttggatgtcgggctgcttgttccatttcagaagctgcatatggagctttggaacacccggtcaatggtttagaggactcccctctcatgaatctacaagaagtatttaagtgtcacaaggctacaaattcaggggatcatattggtttgcttttcctgtcaaggcatttgaagaagtacagatacggtctggaatatgcatccctagaagttaaaaaccatcttgagcgagtgaacttctctgatttggttgaaaccatcatgattatatacgatggacatgacaaaataagaaacgaaggaatgtggaccacccattttcatataaacaaggcaatgatgaagaaaaaaagattaggattgagatttgttgtagatgaacttgcaaaagagtatgacaccaccagagatcagctaaacaacgcaatcccatcaattcgtatctcaaggagaaaatgtttagtaggtgacgagggtgttaaaagttcatcatgctgtatcgctgtcgtagcacatgctgaacgcaactccatctctcagttggacactatcaagacaagggtgattccaagcatactggatacactgctgaaaggttttttggaatttaaggatgttgagatccagtgtccacatgatggtgaacttcttgttaaagtttgtatgtctgagcattgtaaaggggggaggttctggcctactctacaaaatgcttgcattccagtaatggagttgattgactgggagctgagtcaaccaagcaatgtatctgatattttctgttcatatggcatagactcagcatggaaatactttgttgaatccttgaaatcagcgactactgatactgggaggaacattcgccgggagcacttgctggttattgcagatagcttgtctgtaactgggcagttccatgcattaagcagtcaaggtttaaagcagcagcgcactcggttatcgatctcgtctccattttctgaagcatgtttttctaggcctgcacaaagttttataaatgctgcaaagcaatgttcagtggacaatctgtgtggaagtctcgatgcagttgcttggggcaaagagcctttcaatgggacgtcagggccttttgaaattatgcactcgggaaagccacatgaaccagaacaaaatgagagcatctatgatttcctatgcagctctaaagttcggaattttgaaaagaatcatttggatacccgtagacaaagtactgaaaatgcttcgatatgtagattagcatgcaagtcttctaaaggcagtacgaccgtcaatggtgttgctataactatcgaccaggactttcttcatgctaaagtcagtatatgggataacattatcgatatgcgtacttccttacaaaacatgctaagagagtacccgttaaatggatatgtggcggagccagataaatcacagttaatcgaggccctgaaatttcattccagaggtgctgaaaagatcggtgtgggagtaagagaaattaagatcgggttgaatcctagtcacccaggtacaaggtgcttcattttgctgagaaacgatgataccactgaagacttttcttaccacaagtgtgttcagggtgctgcagactctatctcaccccagctcggaagttatttgaagaaactatattacagagcataagcttatgcaacactcccactagttcatttttttaactaaaacgtggcaaataaaaaagaacggatggagtaggattttggaaagtgttcctggcaacatcttgttctgatcagaccatattaccaatttctgataaggaaactacgtgtcgcattttaaggatgaggtgaaaactgaaagggtctggcgctcagaactcagaaggtcttctggactggaggtgtatgtcaactcaactcaatgggactatgtaaggtgggcctgagtcatgactgcggtttcatgcctgcaattctctagtcagtagtataaatactagtctgcgtgttttctaatatgaagatccatctattttattacttaaccatagcgtagatgattggtaacagatagatacattttatttactgattaaaatgcagcagcgactccccgaacttaaaacaggtaaacgggtgtggaaacttagtggctcattcaaaactgtctaaaatcgggtttgctcaaacaaagtgtcgacatggcatgtcatgttgaaatcatttgagtctctaaatttggtttacagacttttattagtgtgcttcaatcgtagcacaccaaatcagtattcggtttgagcatccgatttctgatggttttgcacaggccggccaagttatatgatctagttttttaacttaggggatctaattgatacaacatgccaagtttaagaatggctattgtatcttactcttatttattgaacaagtaatgcacattcccagtc

SEQ ID NO: 88739 - DNA, 5107 bp, Zea Mays; identical to SEQ ID NO: 88738

SEQ ID NO: 88740 - DNA, 797 bp, Zea Mays
gtgattgatgggtgtaacgtaccagcggctgctctcgcaggggagccagagccagcgtccgcggggcggcggcgtgcgggcgcgggcgtgggtgctgctgcggtgggcggccgtgcggctgagctgcgcggcgaggcggcggtactggtgcggcggcgcaggccgcgcgcggaagctggcgtgggcggggctctgcggaagaggcggcacggcggcggaaaggaagggcggcagcggcaggaggagtgccacggcgggcggcggggccggggccggagccggagccggggtgctggggtacgactccgccagctacgcgcgcaacttcgatgacggtgcgtggaaggccgaggagggcgtgtcctgggccggccccggcggcgcgttcttccccggcgccaacatcggcggcgcggccgtggacaccgcccgcctgtgatgccgttcccagctccgtccgtccgctaggtaactggtaactgttgctgcgctggaaatggatggatcgtggtcgtggatgcgtcactcgggatttgctttcttttctttttttttcttgttcatctggattgttggcatttactttcttcggtcgacaatgaaagtattcaggccgtgcttgttcgggtgcaaaaaacaaaaaaaccttgctgccatgcgaatggaaactgccttgagtatctccgcacctagatgtatatacagtatacggtatacatatgtacgtatttatgtgtatacggctagcaagctgtccaaaacacaacgcacaataatccagatcagactggagaaga

SEQ ID NO: 88741 - DNA, 744 bp, Zea Mays
gtcggaatcggaatacagctgctccagctcttcttcagtcccccaagcagtgatgagctgaggagccaggagtttgtcagtttcgcgcctaccaaccggtccagcctccgcgtccaagatctctccccctctcccatccactagtgtctcccacagcccgttcgatcccccggccgggtcggtggtcgccaaagtcgaggagcaatggcgaccgacgcgatcctggagacgatcaagccgcgggggagcgaggagcagctgccggtgaccacggcagggaccgggatcgagctgcggcggcgcatctcctccttctcggcgcgcgtgaggccgtcgtcctccgtggcggcgttccggcgcgcgcggtcgatgccctccgtcaaggcgctggcggcggcgggcgcgctgcggcggtggtgggagtgggggctcgggtgggtcacggcaccgttcgcgacccgcgcgctggagctcggcggcggcgacgacgacgacgacgacgacgacgaggcgcggccgctaggcctgggcgggtgccggtgcgccggcgggtggcggcacaccctcttcaggctccgcgccggggcgcgccgcctgctggggcgcgacggccgcccgctcaaggcccccgcgccgcaggacttcgggtacgactccgtcagctacaagcagaacttcgacgacggcgaggcgtgacgccgagccggcatcgatcgaggaggtgggggccatggcgctgtcgct

SEQ ID NO: 88742 - DNA, 1334 bp, Zea Mays
gggaaaaagaaattgcggcgcagggcagaagagagagaatcccaatgcgcggctccgtctccggcagtccggctccgctctgcatctcccgccgccttgtgcaatgcggtgccctcctccacctctttcgcatttgatttgattcgtccagaggacaatctctgcgccgcgcataaacaacgccagaagagtcgtcgcccctgaccgtcccgtctccttcctcccctcacccccacccacccacccacccacccaccgcgccaccataaaccccgaggggatacagagaaaaaccccgggcccccacacgcgcactccatggcggagccggccggcaaggcccgggagcggcgggtgtcgatcgaggaggtggcgaagaagctgtccctgtggcacacggccacgttccggcccatcctgacccacgccgagctggagcccatcctgtgtgcggcgggcttcgtggcgctgccgtcggcaccagcgacgcatcagaagcaggacgagcggcccggcgtggcgtggcgcgagtacgccttcctcggcggcggcaatgcgagccctgcggcggcggccccgcggcgctggctgggcccgcgcccccgcctcccgtacccgcgcgtcgacggcctccacctcaagacgtaccaggccttcctcggcgccgtcgaggcctacctcggcgcccaccgcgtctccaacctcttccacgtcaggctgatgccggtgacgagcccgcacgaccgcgcgttcgacaaggtgttccggccgatgcggaactgcagcccggaggaggacgggctcatcgtgtaccgggagggcaccctggacgacctcaccgtggagacgtgcagccgccacgccgccaccggggacgacggcgccgccggccacgtcatcccggggatcagctgcagcgacctcggctgcctccgcaaggtggacggcaactgcctcgaggagggatgcaaaagccgccgcggcactgcccgcggccatgacgacgacttcttcgtcgtccagctcaaggatctttttcccagctactactgagattagctgcctgaaacgacgaaactaaaccgtgcagcctagcttcaccccattctgcatgggcatgagagtttgcagaactgcagtcgaattagtggcgaggaatgcatcgccataggtgttagttggcctgtcagcaggctgttccgatcccaccgttgtttttagttttttttttgttttgtttctctctccatcaagtgtataatctgtctgcgagttgcgtatatcatgcaatgctgagtgagttttgtcggcagatagcacaaagttttggaaag

SEQ ID NO: 88743 - DNA, 602 bp, Zea Mays
atattcccttcttcttcttcttcttgtcctcctccttcgtcttctccatcttcccgtccttcgatccatcaaaagctggccggccgagacgacgtgcatagctataaataatagcccatagcatcctcaacaaccagacaagaagaaccacgccgccggttgtttgttaatttcttccatggagagcacggagctgaaagtggagatggtggcgttgcatgagaagcgggtacgcagatgcctgtccaaagtgaaagggatcgagcgggtggaggtggaggcgagcctgcagaaggtggtggtgacggggtgcgtgaaccggagcaagatcctcaaggcgctccgccgggtggggctgcgcgccgagccgtggtcaccgcacaacgagctgctcagcgcctacgccgccaccaccaccctcgtcttcaacaactcctacgccttcttctgatcaagtcatctcatcctttatagctagatagctactgtaatctctctctctgcgtgcttggcttgcttggagtttgttgggaacgtgaacgacggacggcgttccacatgtacacaacatgaatggcattttaatctctctcccttctttc

SEQ ID NO: 88744 - DNA, 444 bp, Zea Mays
atgggcaacttacttagagcttgggttacccttcgcccatccgtagataaaaacttcgttggcctgccaacaatagcacgcccacatgtgtacccagggcctggagtcttaagagtgaagttcttcggcaccttaacagttttattggtagttccagcaagaccaaaactgatctggaaggaggaagcaacatttgctgggtcctggttaaaggtatttataactcctgccttgcagcaatttgcaatttgcatgttgtatggagtgcctggaagtaaatcaacaattgttggatctttcttgcagcaatggggggtgttgcccttgaactttgagcagtcaccctgttcagtggtctgagccccaaccattgaccatataacctccttttttgcccatgtccacccaagctgccatccaggtgccccgatgtgccgaaattgt

SEQ ID NO: 88745 - DNA, 1438 bp, Zea Mays
ctaggtcgtcaccaccgatcttatgcttccatctctgaggctgccgccagccaccggccagcgtcgttcgctttgtagcagtccagctctgcgcccggcgccgcagccccgcatcgcgcacaggcacaacttctacggtcctgccgctgatcgccgcacgtggccgcgccgccgcctccctcacccgagctcgaccgcgcttctccagctcgccgcctcgacggtcgctgcctcgacacctcccccgcgtgggcatcagccgggagcagagagccctggtccctggaggcgcgtcgcgttacggcgggggcgcggcctccccagccccccttggtgatcggtcctcccccggcagactcgcctcctcggtcttgcgctcctgcgcggctgcgcgcccagcgccgtgcccggtggcggcggcgaccggcgacggtcagcccccgacagtcaggacttccgactccggacctccccctcagccccctctgtccgttccagtcccagctcgagcttgaaggttgaaacaacaagcaagatattttgaaatagcccccgccacgaaattcttcagccatcgtggaggggttcagttcaggggaggactcgactcaggaaacaggagcacgagcggagcagaaggcagtcatggcggatgaggtggagcttgctgcggaccagcacgtccgctacatcgtcacggtggagaagaagaaggactcctttgagtcgctggtgatggagcacatccgcctcaacggcgcctactggggcctcaccacgctcgacctcctccacaagctccatgccgtagatgccgccgaggtcgtcgactggatcatgtcctgctaccaccccgaatctggtggatttggagggaacgttgggcatgacccgcatgtcctctacacgcttagcgccgtgcaggtcctctgccttttcgatcggctcgatgtccttgacgtcgacaaggttgctgattatgtcgccggactgcaaaacaaggatggatcattttctggcgatatttggggtgaagttgacactaggttctcgtatattgccttatgtaccttatcattactgcaccgtctgcataagattgatgtgcaaaaagctgtggatttcgttgttagctgtaagaacttggatggcggatttggagctatgccaggaggggagtctcatgctggacaaagtatgccttacccttgacttcacctgacaatctgcattgtggtgtttctgagtgtaactggaatttagtctaattgtttctagaatatgcttaccaaggaataagaatgagcaaactggtttaggaatgcagtagacttttttccaaaggaatattactgcatttttttacatgtaatctgacttatactatggtaggtttgtagcactagaacttccttggattattgatgacattttaact

SEQ ID NO: 88746 - DNA, 1808 bp, Zea Mays
caccgatcttatgcttccatctctgaggctgccgccagccaccggccagcgtcgttcgctttgtagcagtccagctctgcgcccggcgccgcagccccgcatcgcgcacaggcacaacttctacggtcctgccgctgatcgccgcacgtggccgcgccgccgcctccctcacccgagctcgaccgcgcttctccagctcgccgcctcgacggtcgctgcctcgacacctcccccgcgtgggcatcagccgggagcagagagccctggtccctggaggcgcgtcgcgttacggcgggggcgcggcctccccagccccccttggtgatcggtcctcccccggcagactcgcctcctcggtcttgcgctcctgcgcggctgcgcgcccagcgccgtgcccggtggcggcggcgaccggcgacggtcagcccccgacagtcaggacttccgactccggacctccccctcagccccctctgtccgttccagtcccagctcgagcttgaaggttgaaacaacaagcaagcccccgccacgaaattcttcagccatcgtggaggggttcagttcaggggaggactcgactcaggaaacaggagcacgagcggagcagaaggcagtcatggcggatgaggtggagcttgctgcggaccagcacgtccgctacatcgtcacggtggagaagaagaaggactcctttgagtcgctggtgatggagcacatccgcctcaacggcgcctactggggcctcaccacgctcgacctcctccacaagctccatgccgtagatgccgccgaggtcgtcgactggatcatgtcctgctaccaccccgaatctggtggatttggagggaacgttgggcatgacccgcatgtcctctacacgcttagcgccgtgcaggtcctctgccttttcgatcggctcgatgtccttgacgtcgacaaggttgctgattatgtcgccggactgcaaaacaaggatggatcattttctggcgatatttggggtgaagttgacactagctgtaagaacttggatggcggatttggagctatgccaggaggggagtctcatgctggacaaatattttgttgtgtcggcgcgctcgcaatcaccgggtccctgcatcacattgatagagacctcctcggatggtggctctgtgagcgccagtgtaaagacggaggacttaatgggcggcctgagaaactagctgatgtttgctactcgtggtgggtgctatcgagcctagtcatgattgacagagtgcattggattgacaaggaaaagctaacgaaattcatactgaactgtcaggacaaagagaacggcggcatttcagatagaccagataatgcagtcgatatctatcacacgtactttggaattgcagggctttcattaatggagtaccccggggtgaagcctttggatcctgcctatgcactaccattgcacgttgtcaatcggattttcttgaaaaaatagaacattccattcgatctgcggcgcagagatatgctgagatggcgctgtcagatgtggacgctacttcacagaaccacgattcgacggagaaatagctgagggggaatcaattacaggaacatgttgggataccataatcttggacttgtattctcgcattggctgtggccgcttagtcgatgtttttttgtcatttggcacttgccctgttgaatgcttggtgcatgctgtgttttgctagttgatctgattctcttgtttaagtcgtaacattgtgtgtcctgatgacgacgacattagtcaggagctatctataaacagt

SEQ ID NO: 88747 - DNA, 1820 bp, Zea Mays
ttttgttttgtaatcaattgtggaagcgaaaaattgttaagcttgtctatcccacccaaccaatttggacggttgacagttttactctcgatagtcgatactactgtttgcacatacccccttgattttgggacgtgattaatattcaaactccagatattttgaaatagcccccgccacgaaattcttcagccatcgtggaggggttcagttcaggggaggactcgactcaggaaacaggagcacgagcggagcagaaggcagtcatggcggatgaggtggagcttgctgcggaccagcacgtccgctacatcgtcacggtggagaagaagaaggactcctttgagtcgctggtgatggagcacatccgcctcaacggcgcctactggggcctcaccacgctcgacctcctccacaagctccatgccgtagatgccgccgaggtcgtcgactggatcatgtcctgctaccaccccgaatctggtggatttggagggaacgttgggcatgacccgcatgtcctctacacgcttagcgccgtgcaggtcctctgccttttcgatcggctcgatgtccttgacgtcgacaaggttgctgattgtatccttttttcccagattttgaattgggtttgtgctgttggtgtatgtaaaattgatatttaccaatctcctggtgagcaaagccagttctgcaactttggttttgttgttaagctcactgaacttggaatccagttcctcttccttatctaaatcacgccagatgtcgccggactgcaaaacaaggatggatcattttctggcgatatttggggtgaagttgacactaggttctcgtatattgccttatgtaccttatcattactgcaccgtctgcataagattgatgtgcaaaaagctgtggatttcgttgttagctgtaagaacttggatggcggatttggagctatgccaggaggggagtctcatgctggacaaatattttgttgtgtcggcgcgctcgcaatcaccgggtccctgcatcacattgatagagacctcctcggatggtggctctgtgagcgccagtgtaaagacggaggacttaatgggcggcctgagaaactagctgatgtgaggtttactctgtcacaagtcatgcgtggtctgcattcttcagtacatgtttccacgagcccgctatggatttaattgaaccctaccaaattctcaaggtttgctactcgtggtgggtgctatcgagcctagtcatgattgacagagtgcattggattgacaaggaaaagctaacgaaattcatactgaactgtcaggacaaagagaacggcggcatttcagatagaccagataatgcagtcgatatctatcacacgtactttggaattgcagggctttcattaatggagtaccccggggtgaagcctttggatcctgcctatgcactaccattgcacgttgtcaatcggattttcttgaaaaaatagaacattccattcgatctgcggcgcagagatatgctgagatggcgctgtcagatgtggacgctacttcacagaaccacgattcgacggagaaatagctgagggggaatcaattacaggaacatgttgggataccataatcttggacttgtattctcgcattggctgtggccgcttagtcgatgtttttttgtcatttggcacttgccctgttgaatgcttggtgcatgctgtgttttgctagttgatctgattctcttgtttaagtcgtaacattgtgtgtcctgatgacgacgacattagtcaggagctatctataaacagtatgtcttttttg

SEQ ID NO: 88748 - DNA, 189 bp, Zea Mays
atgggggaaagctctggcatggccgccgtctgggaatatgcggggcggatggcgctccaggatcccgcgctggctgttgacgctggggcgcgccgctcgtcccaccgtgctgcgttcgcgcagggagaagcaagtcgctggggggcggcaatggcgccgccttggccacacctgcgtcgccgcgggtga

SEQ ID NO: 88749 - DNA, 1276 bp, Zea Mays
gccccgttgccacacatacggatccaacaaaatctcccgcaaagacaacggcgagccaaccaccaccagcgtcccgcgctagctgcggcaccgcatggctgccgtgaccagcaccgcctccatctgcccggccgcagccggcgccctctcttcgctgccgtccttcatcacgcgcaagcccaccagcggcagcaggaggttgcagcaggcagcagcgacgacagtctgccactgccgctctgctcgggtagaggaggggctgctgggccggagggacgccttattgctcggcatcgtcttctccgccgcgacgccgccgctgctcgcccctgccggcgctctggcggacgaggccaccgccgagtcgcaggagggcttcactacgtacgaggatgaggccaacaagttcagcattcaagttccgcaaggctggctggtcggcgccggcgaggccagcggcatcaagtctgtcacggcgttctaccccgagcaggccgccaccgactccaatgtcagcgtcgccatcaccgggatcgggccggacttcaccagcctcaagtccttcggcgacgtcgatgccttcgccgagggtctggtgaacggcctggacaggagctggcagaggccgccggggctcgccgccaagctcatcgactccagggcggcaaacggcctgtactacctggagtacacgctgcagaaccccggcgagcgacggcgccacatcgtctcggccatcgggatggccttcaacggctggtacaaccgcctctacactgtgacgggccagtacatcgacgacgatgactcggagaagtacaggcctcagatagagaaggctgttggatcgttcaggctgacatgaaagatgcgatgtcatccagcaccagcagcagcagccgcccacggtacataaaccctaaatatgtatgcggagaggtccagcaacatgttgtgcccgaaaattgacaccttgccatttcgatgagacaagacaaggcatgtgcctattgccctattccaattcttgagcactgtaacactgccaatatgcagagtatatgttttctgcctgttgaggtggatacaaatgcatgctttttttttattaataactcatgtgtaacactgctgccttttttattctcttttcaaggcaaatgccctctcatttccatgtgaaatcctatatgattcctccgaaactcttgcattccaaaagggccaaggttcctgtaacttggcttcaaaacaagcaaatggctttgtttcttga

SEQ ID NO: 88750 - DNA, 1414 bp, Zea Mays
gccccgttgccacacatacggatccaacaaaatctcccgcaaagacaacggcgagccaaccaccaccagcgtcccgcgctagctgcggcaccgcatggctgccgtgaccagcaccgcctccatctgcccggccgcagccggcgccctctcttcgctgccgtccttcatcacgcgcaagcccaccagcggcagcaggaggttgcagcaggcagcagcgacgacagtctgccactgccgctctgctcggtacacacctcagtctcctatcggcgcgcacctcgctcgccggcacaattcggcgtcaccgctgctcgaggagctccggatgacgtacgcgcgcgcgccatgatgtattattacttgtgtcttatatgtggttgtcagggtagaggaggggctgctgggccggagggacgccttattgctcggcatcgtcttctccgccgcgacgccgccgctgctcgcccctgccggcgctctggcggacgaggccaccgccgagtcgcaggagggcttcactacgtacgaggatgaggccaacaagttcagcattcaagttccgcaaggctggctggtcggcgccggcgaggccagcggcatcaagtctgtcacggcgttctaccccgagcaggccgccaccgactccaatgtcagcgtcgccatcaccgggatcgggccggacttcaccagcctcaagtccttcggcgacgtcgatgccttcgccgagggtctggtgaacggcctggacaggagctggcagaggccgccggggctcgccgccaagctcatcgactccagggcggcaaacggcctgtactacctggagtacacgctgcagaaccccggcgagcgacggcgccacatcgtctcggccatcgggatggccttcaacggctggtacaaccgcctctacactgtgacgggccagtacatcgacgacgatgactcggagaagtacaggcctcagatagagaaggctgttggatcgttcaggctgacatgaaagatgcgatgtcatccagcaccagcagcagcagccgcccacggtacataaaccctaaatatgtatgcggagaggtccagcaacatgttgtgcccgaaaattgacaccttgccatttcgatgagacaagacaaggcatgtgcctattgccctattccaattcttgagcactgtaacactgccaatatgcagagtatatgttttctgcctgttgaggtggatacaaatgcatgctttttttttattaataactcatgtgtaacactgctgccttttttattctcttttcaaggcaaatgccctctcatttccatgtgaaatcctatatgattcctccgaaactcttgcattccaaaagggccaaggttcctgtaacttggcttcaaaacaagcaaatggctttgtttcttga

SEQ ID NO: 88751 - DNA, 2027 bp, Zea Mays
aaacaacggcccactcgtgcgcctccagtctattctatgtaccgaaagcgcgggcggttccaaattcgtaattcctccccccccccccccccccccccccccaaaaaaaaagaagccgttggagcgcctccctctcaaacggcactcttccccactggcccactcctccgctccctcccgcatacaaatcgtccgccaacaatcccccaaaccctactccaccacgcgatcaccgaccgacgcctctccgacgagcaactcaaccccccaccgcgcacgcgagagccggatccccacgatggcgacgatccagcaccaggcgaaaccggcggtggcggcggcgccgagcacgactactggcggtgggcagcgcgcgatggacctctacgagaagctggagaaggtcggagaggggacctacgggaaggtgtacagggcgcgggagaaggcgacggggcggatcgtggcgctgaagaagacgcggctccccgaggacgacgagggcgtgccccccaccgcgatgcgggaggtctccttgctgcggatgctgtcgcaggacccgcacgtggtgcgcctgctggacctcaagcagggcgtgaataaggaggggcagaccatcctctacctggtcttcgagtacatggacaccgacctcaagaagttcatccggggacaccgcagcaacaacgagaagatccccgcggccaccgtcaagatcctgatgtaccagctctgcaagggcgtggccttcgtccacggccgcggggtgctgcaccgggacctcaagccgcacaacctcctcatggaccgcaagaccatggcgctcaagatcgccgacctcggcctcagccgcgccatcaccgtcccggtgaagaagtacacccacgagatacttaccctgtggtacagggcccccgagattctgcttggagccacgcactactccaccccggttgacatatggtccgttggctgcattttcgccgagctggtcactaaccagccacttttccctggcgactcggagctgcagcagctgctccacatcttcaagtaacacagtccattgcttgtttaccgaaactctcggtgtgtgtctctgtactgacggcgatccatcttgcttcctgggacggcaggttgcttggcaccccaaacgaacaggtgtggccaggcgtcggcaagctgcccaactggcacgagtacccccagtggaagccgacgaagctgtctgctcttgtgcccggcctcgacgctgatggctacgatcttcttgagaaattgctggaatacgagccggcgaagcggatccccgcgaagaaggccctggagcacccctacttcaaagatgtgaggaagggagatgcgcactgactgaagcgatccaccaagggcccgccctcacgagttgacatatatatacgtgtgtgtcgtcgtgtcgagcatgattgccctgaagcaattcttttgctaccagggcacagcctactttctgttctctagttgatgttcgtgtcgtgtgtgctgtgaaccgttcgctttggctggtgatggatggaaatgttatgtttctaggattactgatgaaactttgatgtctacctggtcattcattcgttataccagcaagaatcctagagccggtgggggcatttgggtatgggcaacaggcaggcaaggttcgtcactctctcgacagggcaaagagtgcatcagcgttctatagacaagccttcttgctgcattgagatcttttttttccctgagaacaatttgtgacaggatgtaaattacaagagtgacaggatgtcgtaccgatgccgggcaagagatggagaccgttatcgatgaaaccacacacacacatacacccagaaatcacttttagttcaaataatccctgtttcgtacgacttactcagcgcaaatgttaaacttgtgactgtacatttttatgacgatgtatgtattaccattttatagtacaatcaaagtgtacgataaaatcaattagatgtgaagttagc

SEQ ID NO: 88752 - DNA, 1941 bp, Zea Mays
aaacaacggcccactcgtgcgcctccagtctattctatgtaccgaaagcgcgggcggttccaaattcgtaattcctccccccccccccccccccccccccccaaaaaaaaagaagccgttggagcgcctccctctcaaacggcactcttccccactggcccactcctccgctccctcccgcatacaaatcgtccgccaacaatcccccaaaccctactccaccacgcgatcaccgaccgacgcctctccgacgagcaactcaaccccccaccgcgcacgcgagagccggatccccacgatggcgacgatccagcaccaggcgaaaccggcggtggcggcggcgccgagcacgactactggcggtgggcagcgcgcgatggacctctacgagaagctggagaaggtcggagaggggacctacgggaaggtgtacagggcgcgggagaaggcgacggggcggatcgtggcgctgaagaagacgcggctccccgaggacgacgagggcgtgccccccaccgcgatgcgggaggtctccttgctgcggatgctgtcgcaggacccgcacgtggtgcgcctgctggacctcaagcagggcgtgaataaggaggggcagaccatcctctacctggtcttcgagtacatggacaccgacctcaagaagttcatccggggacaccgcagcaacaacgagaagatccccgcggccaccgtcaagatcctgatgtaccagctctgcaagggcgtggccttcgtccacggccgcggggtgctgcaccgggacctcaagccgcacaacctcctcatggaccgcaagaccatggcgctcaagatcgccgacctcggcctcagccgcgccatcaccgtcccggtgaagaagtacacccacgagatacttaccctgtggtacagggcccccgagattctgcttggagccacgcactactccaccccggttgacatatggtccgttggctgcattttcgccgagctggtcactaaccagccacttttccctggcgactcggagctgcagcagctgctccacatcttcaagttgcttggcaccccaaacgaacaggtgtggccaggcgtcggcaagctgcccaactggcacgagtacccccagtggaagccgacgaagctgtctgctcttgtgcccggcctcgacgctgatggctacgatcttcttgagaaattgctggaatacgagccggcgaagcggatccccgcgaagaaggccctggagcacccctacttcaaagatgtgaggaagggagatgcgcactgactgaagcgatccaccaagggcccgccctcacgagttgacatatatatacgtgtgtgtcgtcgtgtcgagcatgattgccctgaagcaattcttttgctaccagggcacagcctactttctgttctctagttgatgttcgtgtcgtgtgtgctgtgaaccgttcgctttggctggtgatggatggaaatgttatgtttctaggattactgatgaaactttgatgtctacctggtcattcattcgttataccagcaagaatcctagagccggtgggggcatttgggtatgggcaacaggcaggcaaggttcgtcactctctcgacagggcaaagagtgcatcagcgttctatagacaagccttcttgctgcattgagatcttttttttccctgagaacaatttgtgacaggatgtaaattacaagagtgacaggatgtcgtaccgatgccgggcaagagatggagaccgttatcgatgaaaccacacacacacatacacccagaaatcacttttagttcaaataatccctgtttcgtacgacttactcagcgcaaatgttaaacttgtgactgtacatttttatgacgatgtatgtattaccattttatagtacaatcaaagtgtacgataaaatcaattagatgtgaagttagc

SEQ ID NO: 88753 - DNA, 584 bp, Zea Mays
gatcacattagttgaattttgtctataatcacatcagatgagaaattatacagccttcttgcttaaatgtatagaccaccgtttaattttttgaactttattttatctaacaattgtctctctacaggttgctgactttggacttgcaaagttcactactaataataacacccatgtttcgacaagagtaatgggcacctttgggtatttggcacctgagtatgcagcatctggcaagctcacagaaaaatccgatgtattttctttcggagtcatgcttcttgagcttattactgggcgacgaccaattgacacaacccaagtggcactgcttgctataagcacatatgtacttccatttgcatgttgtataatactaataccaattgcaaaattatagttattttttctgcccttgttagttaataaacatatttctggtcaataggttgtattcttattcttgtaaccatgttaattaatgttatggacttgtagtcttgtattaccttcctattcttattcttgtaattgtgttaattaatgttatggacttgtagtcttgtattaccttgtgaatatat

SEQ ID NO: 88754 - DNA, 2249 bp, Zea Mays
atggcgcagtcgctggagctgatgctaatccagttttttatggggagctggttgatccaggccgtgctttgttccattggttacatgataatgcattatggtcagattatgtcctccttttcacggttcactgtaggatgcagactgcagtcaataggtggctcgcgagccgggtttaagccaagcccatttgcacaactcacaacaatactgagcagagccggctcgtttccacccctcgcagccgtgtcatctccacgccgcggagacccaggggccacgggccacggcccacggcccacggcccacggctccgcacctacgaaagccaactggaaccagcagcagcccagccctcgtttcgtttccccacaaggcctcaagggcgcaaaagcagcacagccggcgctgccgactgtgacgacgacgatcgacgaaccctccctttcgtttcccccaagacaacacaaacccccactcgcgcgactcgcacaaggaacagaacttcagaacccagcgaatccagcctggcccatgccatgtcgcagcccgacgccgacgccatcctcatccccatcgccgcggcgatggatccctccccagccccagccccagccccggctccggctccggtcccggcccctacggtggtcgagtggcttcgagggcggcgcactgacgcgggactgggtggcggggctggcgtccacgctggactggtgctcgcggcacctccccgcggaccgcctcccggcggtgctcccgcccgcgctggtccagcgcctggtcctggccgccgccgccatcctgcaccgcgagcccaacctcgtccgcgtcgacccgcgccccggccaggccgtcgtcgtcgtcggggacgtccacgggcagctccacgacgtcatcttcctgctccgcgacgccgggttcccgtccgaggaccgcatcttcgtcttcaacggcgattacgtcgaccgcggcgcctggggcctcgagaccttcctcctgctcctcgcctggaaggtgctactcccaaactgtgtgttccttctccggggaaaccacgaatccaagtactgcacgtcagtatatggtttcgagaaggaggtaatgactaaatacaaagatcagggccctcaaatttaccggaagtttttaagatgttttgaggaccttcctctggcgacaataatagcaggatgtgtgtacactgcacacggcggtatcttccgtggaacaattgtagtgccatcaaagaaatcaaaaaagggaaagaagggtcacaaatacaaggcgaattttactgttgatctgacttccatgaaacttggatccttggatgagttattgaaagcaaggagaactgttctcgaccctccttgggaaggctcaaatttgatccctggggatgtgctgtggtctgacccttccttgcagatgggtctttctccgaataaagaacgaggcataggtttgctttggggtcctgatatcactcagcagtttctgaggacaaatcatttgaagctaatcatcaggtcacatgaaggtccagacgcgagagacaagcgacacgatctcttaggaatggataaaggatatacgattgatcatgaagtagaatgtgggaaactaattactctcttcagtgctccggactacccacagtttcaggcttcagaggagcgatacaacaatcgtggagcatatattgtccttagtccacctgattttgctacccctgttttccatagcttcggagctgtaaagcctcgacctgcggcccatccgttctatgattttgaacaagtgatcgactcagatgaagaattggatttaatcgccatggacagcggcacgtcgagcctgtcatgacgactcgccatgtttctggatggcctgagtcctgacatgcacacgccaaatctgatctgttggtttggttgaggttgatttgtatctaaaactaagtgagcgtgagatgtcatctaaaggctgaaggaagtcagcggttgcaagaatcttagttcatgattgtttatcatctagactatataatctagcttaaataagttaagaggcaaacaaacaatatatattattagatggtcatgcctaaattatgataatccataagcagatcattaggtgtttatataaaatataagctggattatgtaatcctaaaagtaaacaaacatgcccttaaacgcagatgcggccattaagaggaagatggaggatttggtgtc

SEQ ID NO: 88755 - DNA, 1559 bp, Zea Mays
cccatcgccgcggcgatggatccctccccagccccagccccagccccggctccggctccggtcccggcccctacgggcggcgcactgacgcgggactgggtggcggggctggcgtccacgctggactggtgctcgcggcacctccccgcggaccgcctcccggcggtgctcccgcccgcgctggtccagcgcctggtcctggccgccgccgccatcctgcaccgcgagcccaacctcgtccgcgtcgacccgcgccccggccaggccgtcgtcgtcgtcggggacgtccacgggcagctccacgacgtcatcttcctgctccgcgacgccgggttcccgtccgaggaccgcatcttcgtcttcaacggcgattacgtcgaccgcggcgcctggggcctcgagaccttcctcctgctcctcgcctggaaggtgctactcccaaactgtgtgttccttctccggggaaaccacgaatccaagtactgcacgtcagtatatggtttcgagaaggaggtaatgactaaatacaaagatcagggccctcaaatttaccggaagtttttaagatgttttgaggaccttcctctggcgacaataatagcaggatgtgtgtacactgcacacggcggtatcttccgtggaacaattgtagtgccatcaaagaaatcaaaaaagggaaagaagggtcacaaatacaaggcgaattttactgttgatctgacttccatgaaacttggatccttggatgagttattgaaagcaaggagaactgttctcgaccctccttgggaaggctcaaatttgatccctggggatgtgctgtggtctgacccttccttgcagatgggtctttctccgaataaagaacgaggcataggtttgctttggggtcctgatatcactcagcagtttctgaggacaaatcatttgaagctaatcatcaggtcacatgaaggtccagacgcgagagacaagcgacacgatctcttaggaatggataaaggatatacgattgatcatgaagtagaatgtgggaaactaattactctcttcagtgctccggactacccacagtttcaggcttcagaggagcgatacaacaatcgtggagcatatattgtccttagtccacctgattttgctacccctgttttccatagcttcggagctgtaaagcctcgacctgcggcccatccgttctatgattttgaacaagtgatcgactcagatgaagaattggatttaatcgccatggacagcggcacgtcgagcctgtcatgacgactcgccatgtaccttttgcacttagggttgtatttattattatcgctccaattgttgccatggaagcgtggcatcaaggttttttgctgtcgttgttgtaagctaatgccaacgtagtaacgttgcaggtttctggatggcctgagtcctgacatgcacacgccaaatctgatctgttggtttggttgaggttgatttgtatctaaaactaagtgagcgtgagatgtcatctaaaggctgaaggaagtcagcggttgcaagaatcttagttcatg

SEQ ID NO: 88756 - DNA, 4826 bp, Zea Mays
cgctccggcctgcccgcccccaccagtacagtaccacccgcgccccgtacggcctccccgtccgtccccgtcgtgggggtggggccggcgccggcggcaccaccacccaccgcacccgtccgggcccgcccccgtgcccggtcgctaattacgcgcacctgccatccggccgtccacgcacacggcgcacgccaccaggcccccgtccgtcgccgcgccaggacgcttacccacgcgggaggtcctcttcctcgcccgctttgcgctgctgccttctctccgctcgattccccgctgcctctctctctagtctctctacacacgccttcctcccagcgccgcaccacaccatcagggcgggcagcacattcctctctctctcccactcccacttcttcatcctccgccgattccagcactacgcaggtgggcagggaagggatattttctgctctggccctatttctggacggctggggaggcggcgaggtgacgtggactggcgccgaagacttgcgtgagaggtaactggaatatttctcctcagctgctcgcttcaccccggcgccgctcgtgtaccctgctgccgcgccgctgatcgggttgacctcatctgcagatccctgatcggttgccgcggctgagttgggaggcccggagaccttgaggagcgatgcagagggaggtggggccgcaggtggcccctccgctcttccttcaccagatccagccgatgcctccccacgccgccgccgccgcgaagaagcgcggccacccgtggcccgcggccggcgccgcggaggccggcgctgggaactggaaccccaggctgtgggactgggacagccgcgcgctcaccgccaggccgtcctccgatgcgctccgcctcgccggtggccagccccagccggctgctgaggcgcagcgccagggggccggcgcgctgaacctccagctcggcctgcaggaggactccacgaccccgatggacgccagcccgacggctcccgcggcggcggcggcggcgtccccgccagcttcggctgcggcggggcaggagccggtcgttaggccgagcaagcgggtgcggtctggatcgccggggggcgctgggggagggccgggcggcggtgggactgccaacggaggcgcgagctacccgatgtgccaggtggatgactgtcgagcggatctgaccagcgccaaggattaccaccggaggcacaaggtctgcgagacccacagcaagaccaccaaggcggtcgtcggcaaccaggctcagcgcttctgccagcagtgtagtagatttcacccactcgcggagtttgatgagggtaagaggagctgccggcggaggcttgctggccacaaccggcggagaagaaaatcccagccaacagatgttgcttcacagttgctgctacctgtaaaccaagaaaatgcagcaaatagaacacaagatattgtcaatctaattacagtgattgcgcgcttgcaaggctctaacgttggtaaagtgcctagcatccctcccataccagataaacagaatctggtggaaattataagcaaaataaattcattgaacaacgcaacctctccggcaaagtctccttcgccagaagtcgtcgttttgaatacttcacaagagcaacgagagcaaggacatgattctgtagacaagacgaccaacggaatcgacaagcaaactgtaccatcaaccatggatttgctaggagttttttcaactggcttcgcaacttcaacacctgtgacaaatacatctcagtcccaagggagcagcgacagcagtggtaataacaagagcaagagccattcaacggagccagcaactgttgtaaattcacacgatatatcaacccaagattttcctgctgctggtttcatgagaagcaacagcacacaagaaagccgacctcatatatacaagcagacagaacacgagacaagaccatacttgtcactacagctgtttggcagcagtgaggaggatattccacctaagatggactcattgaataagtacttatcttctgagagtagtaatcctctggatgagagatctccttcatcctctccgcccataactcgcaagtttttccccatacattcggttgatgaagaggttcgacaccctcatattacagattttggggaagatgctacaatgggtgaagttagcacaagtcaggcatggtgtgcaccaccacttgatctcttcaaggatttagagcgtcccctcgagaatggatctccaccaaatcctggttaccagtcctgctatgtttcaacatcttgttcagaccattcaccttcaacctcgaactccgatggacaggaccggactggtaggattatcttcaaactatttggcaaggaacctagtacaatacctgggaaccttcgtgacgatatagtaaattggctcaaacacagtcctactgaaatggagggttacatccgccccggttgccttgtactatccatgtacctatcaatgccggctattgcatgggatgagcttgaagaaaatctcctccagagagtcaactcattagttcaaagttctgatttggatttctggagaaaaggaaggtttttagttcgaaccggctccaagttggtatcttataaagcgggaatgacccgtttatcgaaatcgtggagaacatggaatactcctgaattgacctttgtgtcaccaattgctgttgttggtggacagaagatctccctcattcttaaaggccgcaatctatctattcctggcacacagatccattgtacaagtacaggaaagtacatatccaaagaagttctgtgctcagcatatccaggtaccatatatgatgattcaggtgtggagacttttgacttgccaggacaaccagattttattcttgggcgctgctttattgaggtggaaaacaggttcaggggtaacagcttccctgttattgttgcaagttcaagtgtttgccaggagttgagaagtctagaagtggagcttgaggattcacaggttcttgatgtttcttcggatggtcagattcatgactgtaggcagtcaaaaacgagggttcaagttctgcacttccttaatgaactcggctggctctttcagagggcttctgcctgtacattgtccaccagacctgatgtgtctgatttggatttgactcagttttcaatcacacggttcaaatatcttttactgttctctagcgagcgtgactggtgctctcttactaaaacacttctggatattcttgccaagagaagcttggtcagcgaggaattatcaaaggaaactatggagatgctggctgagattcaccttctgaacagagcagtaaaaagaaagagtaggagaatggtgcatttgcttgtacagtttgttgtactatgccttgataattccaaggtttaccccttcctcccaaactttcctggccctggtggtttaactccgttgcatcttgctgcatccattgagaatgcagaggatatagttgacgccttgacagatgatcctcaacaggttggtttgacctgttggcagtcagctttagacgaagatggccaatctcctgaaacatatgccaagttgaggaatcataattcatataatgagcttgtagcacaaaagctggtggacatgaagaacagccaggttactataacggtcaatggcgatgaaattcatatggatcagttagggaatgttgatgaccgtaaaaaatctggggttcaggcattgcaaataagatcttgctcccagtgtgccattttggagtctggtgtgttaaggcagcctatgcggtcaaggggactgcttgctcggccttatattcattcaatgcttgctatagcagcagtctgcgtatgcgtctgtgtattcatgcgagctttgctgcggatcaattctggaaaatccttcaagtgggagaggctggattacggtacaatataattgtggggacacacctgagccttgtggtattattaagttaacaagcagttgttatggagctattttggagccttgaagggtatggagattgtttcatgcttcctcgaaactcgcccatccgtatggctgagtggaataatgtaatatttttgctggacaattcctttacttcctgtgaaatagaagtgttaataggtgagcagccggagatgttaggggggtggcaaaacttggtaccaaatgtggagcttgagcagagttggaacatgtcatggcaagggccgtagcaactgcgctcccacaacatgatatgcatgcaatgcacaaaatgtcgatatggatgcaatccgcaagatggatgtaatcacagttcggggagaatgagcaagtaagtaaccttggtttcctttttgctgctgtaagctcgactcttttggttcatgtatcccaagaatgatgtttaatttatcttgctcactgtttcatatttttgtgtgtgtgtgtgtattaaatacagtacgctagcatgaatgtaccctatatcgactttagatagtagcaggggtaaatgaaaagaggctttgcatatgtctgtgtcgaccattttgacttgtagctacatagaaatgaggcagatctgaagtgtacttggatctttcgttgttgttgttgttgttgacatccaccatatgttctcattctgatgaagcttagttacacctttgtcctatattgttctcttgatacctgccggctgctatcattatcttggttcactcgcactttccttctgacccaagttttcactgatcaaaatcctattgtatgactt

SEQ ID NO: 88757 - DNA, 3709 bp, Zea Mays
gccaccaggcccccgtccgtcgccgcgccaggacgcttacccacgcgggaggtcctcttcctcgcccgctttgcgctgctgccttctctccgctcgattccccgctgcctctctctctagtctctctacacacgccttcctcccagcgccgcaccacaccatcagggcgggcagcacattcctctctctctcccactcccacttcttcatcctccgccgattccagcactacgcaggtgggcagggaagggatattttctgctctggccctatttctggacggctggggaggcggcgaggtgacgtggactggcgccgaagacttgcgtgagagatccctgatcggttgccgcggctgagttgggaggcccggagaccttgaggagcgatgcagagggaggtggggccgcaggtggcccctccgctcttccttcaccagatccagccgatgcctccccacgccgccgccgccgcgaagaagcgcggccacccgtggcccgcggccggcgccgcggaggccggcgctgggaactggaaccccaggctgtgggactgggacagccgcgcgctcaccgccaggccgtcctccgatgcgctccgcctcgccggtggccagccccagccggctgctgaggcgcagcgccagggggccggcgcgctgaacctccagctcggcctgcaggaggactccacgaccccgatggacgccagcccgacggctcccgcggcggcggcggcggcgtccccgccagcttcggctgcggcggggcaggagccggtcgttaggccgagcaagcgggtgcggtctggatcgccggggggcgctgggggagggccgggcggcggtgggactgccaacggaggcgcgagctacccgatgtgccaggtggatgactgtcgagcggatctgaccagcgccaaggattaccaccggaggcacaaggtctgcgagacccacagcaagaccaccaaggcggtcgtcggcaaccaggctcagcgcttctgccagcagtgtagtagatttcacccactcgcggagtttgatgagggtaagaggagctgccggcggaggcttgctggccacaaccggcggagaagaaaatcccagccaacagatgttgcttcacagttgctgctacctgtaaaccaagaaaatgcagcaaatagaacacaagatattgtcaatctaattacagtgattgcgcgcttgcaaggctctaacgttggtaaagtgcctagcatccctcccataccagataaacagaatctggtggaaattataagcaaaataaattcattgaacaacgcaacctctccggcaaagtctccttcgccagaagtcgtcgttttgaatacttcacaagagcaacgagagcaaggacatgattctgtagacaagacgaccaacggaatcgacaagcaaactgtaccatcaaccatggatttgctaggagttttttcaactggcttcgcaacttcaacacctgtgacaaatacatctcagtcccaagggagcagcgacagcagtggtaataacaagagcaagagccattcaacggagccagcaactgttgtaaattcacacgatatatcaacccaagattttcctgctgctggtttcatgagaagcaacagcacacaagaaagccgacctcatatatacaagcagacagaacacgagacaagaccatacttgtcactacagctgtttggcagcagtgaggaggatattccacctaagatggactcattgaataagtacttatcttctgagagtagtaatcctctggatgagagatctccttcatcctctccgcccataactcgcaagtttttccccatacattcggttgatgaagaggttcgacaccctcatattacagattttggggaagatgctacaatgggtgaagttagcacaagtcaggcatggtgtgcaccaccacttgatctcttcaaggatttagagcgtcccctcgagaatggatctccaccaaatcctggttaccagtcctgctatgtttcaacatcttgttcagaccattcaccttcaacctcgaactccgatggacaggaccggactggtaggattatcttcaaactatttggcaaggaacctagtacaatacctgggaaccttcgtgacgatatagtaaattggctcaaacacagtcctactgaaatggagggttacatccgccccggttgccttgtactatccatgtacctatcaatgccggctattgcatgggatgagcttgaagaaaatctcctccagagagtcaactcattagttcaaagttctgatttggatttctggagaaaaggaaggtttttagttcgaaccggctccaagttggtatcttataaagcgggaatgacccgtttatcgaaatcgtggagaacatggaatactcctgaattgacctttgtgtcaccaattgctgttgttggtggacagaagatctccctcattcttaaaggccgcaatctatctattcctggcacacagatccattgtacaagtacaggaaagtacatatccaaagaagttctgtgctcagcatatccaggtaccatatatgatgattcaggtgtggagacttttgacttgccaggacaaccagattttattcttgggcgctgctttattgaggtggaaaacaggttcaggggtaacagcttccctgttattgttgcaagttcaagtgtttgccaggagttgagaagtctagaagtggagcttgaggattcacaggttcttgatgtttcttcggatggtcagattcatgactgtaggcagtcaaaaacgagggttcaagttctgcacttccttaatgaactcggctggctctttcagagggcttctgcctgtacattgtccaccagacctgatgtgtctgatttggatttgactcagttttcaatcacacggttcaaatatcttttactgttctctagcgagcgtgactggtgctctcttactaaaacacttctggatattcttgccaagagaagcttggtcagcgaggaattatcaaaggaaactatggagatgctggctgagattcaccttctgaacagagcagtaaaaagaaagagtaggagaatggtgcatttgcttgtacagtttgttgtactatgccttgataattccaaggtttaccccttcctcccaaactttcctggccctggtggtttaactccgttgcatcttgctgcatccattgagaatgcagaggatatagttgacgccttgacagatgatcctcaacaggttggtttgacctgttggcagtcagctttagacgaagatggccaatctcctgaaacatatgccaagttgaggaatcataattcatataatgagcttgtagcacaaaagctggtggacatgaagaacagccaggttactataacggtcaatggcgatgaaattcatatggatcagttagggaatgttgatgaccgtaaaaaatctggggttcaggcattgcaaataagatcttgctcccagtgtgccattttggagtctggtgtgttaaggcagcctatgcggtcaaggggactgcttgctcggccttatattcattcaatgcttgctatagcagcagtctgcgtatgcgtctgtgtattcatgcgagctttgctgcggatcaattctggaaaatccttcaagtgggagaggctggattacggtacaatataa

SEQ ID NO: 88758 - DNA, 1323 bp, Zea Mays
atggccatggcctatgaacgaggcgacggcgtcgtcgaacatctcctcgacgcccttgaattccgccagccccagcgcgcgggccttggacgtgtcgaagccgtacgactgctcgccgtaggcgcggggcaggctcctcgggacggggtacgctgggaaccgccgcgcgagcagggcggcgaggtcgccgcagtccagcaccgccgcgctgcagatgtacctccctcgggcgcccgcggcctcgtacgccagcatgtggcacctcgccacgtcgtcgatgtggacgtaccccatcctcccgtacgtcgtgaacttccccgtctctccttggaacaggccgaggacatcagaagcggtggggccgagctcaggagacagagtaggtccgacaacgaaggtcggaagaacggtgacgaggtcgatcctgtgctctccggcgaactcccaggctgccttctcggcgaggatctttgcgacggcgtaccatatctaagggagcacgggaacagcacattgtcacgcaggtacggtccaaatcactcttctgacgaccgtacgctcacctggagactttcgcagaactcgatggagctccacgacgattcgtccagcagcacgttagggggcaggtcggcttcgtccttgatcctcactgtcgacgacgaggatgtcaggacaaccctcttgagcgatgggttcttcttgcacgagcgtagcacgttcatcgtgccgtttattgctgaatcaagcatctcctcctgccaagtggcaccaacatgtttcaggtcgctatatgtccaggcctttcctgaagctgcaaatatgagaaacagaattggtgtttagcatgccttggaattagatccggtgacgacgggcgatgcggtgtggaagacgccctcgcaagccatcacagcgtcgtcgaagctcccttcctccaagagatcagctctcacgagctgcagcctttcctttgcgccttccaggccccagaggtgccctactttcttgccattccctaccaagacatctttgctttcaggagtgatttatttgacaggtaatgaaaatggacataaaccgtcaacaggtattactagtattttaattcagatcatcatcagaataagatgaaactgacctgggtctctgactgtacccaggacatggtacccagactcaagaagccgcttgacgagccaggaggcgatgaaaccagacgccccagtgacacagaccttacccttagcagtgttagccattctctcagactcgaggtgctcctgtatttgatcccagctagtttatattgtgcacattgaa

SEQ ID NO: 88759 - DNA, 753 bp, Zea Mays
cttttcatttcagagctgtggtagactggtaggttggtagctgttactgaaaaactaagagaaggcaggacggggaaaggagatggagctcaacagcatcccctatattgcgtcgtggtcttcctcctcgagctgcttctactacagctacagtcgctgcgcctgcagaggtacaagagatgggaagctggtaacaaaagcttctgcagctggtcgtaagcgtgctgctgattcagtatgttcacaactctctgagcagggaactgaagattccatttcaggtcctagatcttcctggcgtataaggaggagagaccttgcttctgccattttactcccttttctgattcctcgtgttaacatctctatcgcggctgagatatacgacgcatcaattattcgaagtggtgtgaggagtgttttaaccaagggcaaggctgctggtgtgcttcggttggttttccatgatgcagggacttttgaaattggggacggatcaggtggcatgaatggctctataatttatgaagttgacaggcctgaaaacattggcctaaatagatccataaagatactaagaaaagcaaaagaaggaatcgacaacgttcagaaagtgtcgtgggcggatctgattgccgtggctggcgctgaggcagttgcgctctgtggcgggcctgagattccagtaaggctaggaagagtagattctagcagtgctgaccctagtggaaaagttcctgaagaaacattgga

SEQ ID NO: 88760 - DNA, 1009 bp, Zea Mays
cttttcatttcagagctgtggtagactggtaggttggtagctgttactgaaaaactaagagaaggcaggacggggaaaggagatggagctcaacagcatcccctatattgcgtcgtggtcttcctcctcgagctgcttctactacagctacagtcgctgcgcctgcagaggtacaagagatgggaagctggtaacaaaagcttctgcagctggtcgtaagcgtgctgctgattcagtatgttcacaactctctgagcagggaactgaagattccatttcaggtcctagatcttcctggcgtataaggaggagagaccttgcttctgccattttactcccttttctgattcctcgtgttaacatctctatcgcgtaagtagtgcattattatcaaagaatttagctatccagctcttgaaattactagctgacattcaaaagagcgtcttcttgatgtttcaaatggtaaatactgtgagaaaggggaagcatgtaatgagccacagttgaatcttgtagacataggacagtgatctagtaaaggaaagatccttaaatctggtttcttgctcctaaaacagtgatgccattgccatctatatgagaagttatctggttgatttcacagggctgagatatacgacgcatcaattattcgaagtggtgtgaggagtgttttaaccaagggcaaggctgctggtgtgcttcggttggttttccatgatgcagggacttttgaaattggggacggatcaggtggcatgaatggctctataatttatgaagttgacaggcctgaaaacattggcctaaatagatccataaagatactaagaaaagcaaaagaaggaatcgacaacgttcagaaagtgtcgtgggcggatctgattgccgtggctggcgctgaggcagttgcgctctgtggcgggcctgagattccagtaaggctaggaagagtagattctagcagtgctgaccctagtggaaaagttcctgaagaaacattgga

SEQ ID NO: 88761 - DNA, 646 bp, Zea Mays
acgcaaatgatgcagtcttgtctgcatggaagcaaacgacctgagaaatccttatgtacagaggtacaagagatgggaagctggtaacaaaagcttctgcagctggtcgtaagcgtgctgctgattcagtatgttcacaactctctgagcagggaactgaagattccatttcaggtcctagatcttcctggcgtataaggaggagagaccttgcttctgccattttactcccttttctgattcctcgtgttaacatctctatcgcggctgagatatacgacgcatcaattattcgaagtggtgtgaggagtgttttaaccaagggcaaggctgctggtgtgcttcggttggttttccatgatgcagggacttttgaaattggggacggatcaggtggcatgaatggctctataatttatgaagttgacaggcctgaaaacattggcctaaatagatccataaagatactaagaaaagcaaaagaaggaatcgacaacgttcagaaagtgtcgtgggcggatctgattgccgtggctggcgctgaggcagttgcgctctgtggcgggcctgagattccagtaaggctaggaagagtagattctagcagtgctgaccctagtggaaaagttcctgaagaaacattgga

SEQ ID NO: 88762 - DNA, 1285 bp, Zea Mays
atggaaaaacaacactggttcagtcggacgaccacacatctttgtgctgcgtgccggcggcgtggagcagacaagacgctagtcgaacacgaggataagctcctgcagccagtggttggttggttggtttcctcgcccgtgccgtgcgcagctgaagccgatggaatgaggctcgccgcagccaagcctgccgccatcaccgtcgcccagcggcagccgatccccatccccacatgcagctccagccgcaatcaggccaagaagagccgccgtagcgcatggagggtcgcagtggcaagccgcgacgccgccgacggcgacgcagaggcgggcgcgggccagggccagggccaggcaccgacgggacggcgggcccggctgtcggcgaggcggcggcagcgcgtgccgctgccggacggcgtctccggcgccggcgtcggcgagttcctgcgccacccggacgccgtcgagtccatcctcaacaccggcgcgctcgagagcttcgcgcccgcggggcccggcaccttcacctgcgcgctgcgccgcgtcgggctcctcggcttcgaggtcgccccggtgctggacctccgcgtcgccccgaccagcaccgactgcaccatcgagatgctgtcgtgcaggttcgagggatcagaggtgcttgagcagcagaatgaactcttctcagcattcatgagtaaccatataacgtggagcgacgacgccgaggagccctgcctagacatccatgtcaaactggaggtcactctggaggtctacaccaagccattcagcatgcttccgttgtcagcagtggagaagccaggtaacctgttgatgcaaggcctgctggacaggctcgttcccgtgctgggagagcagttgctgagggactaccattcctgggctcaggctcagcagcagcatgaatcgtcttgatgagattggaggtcaagggaaggaggagagattggtcgctcatgtatctacgccactacaagtatccaaggatttagcgaatccagatatacaaggactcgtaaatcaagacgcttgttttttttggggtgcaccaactggccatcgtcagtctgtgcttttgtcctgtgtccaatactccatcagtaaacaaaaattctactgtttttacttcgtcaataccgcatcctgtagataaaagctctgttgtttcttcatcagcaagtgaaaaggtacagaggaacaggaataaaaatgattgaagttacagcagcaaaatttaaggaatagctacaaaaactattccgtt

SEQ ID NO: 88763 - DNA, 1278 bp, Zea Mays
atggaaaaacaacactggttcagtcggacgaccacacatctttgtgctgcgtgccggcggcgtggagcagacaagacgctagtcgaacacgaggataagctcctgcagccagtggttggttggttggtttcctcgcccgtgccgtgcgcagctgaagccgatggaatgaggctcgccgcagccaagcctgccgccatcaccgtcgcccagcggcagccgatccccatccccacatgcagctccagccgcaatcaggccaagaagagccgccgtagcgcatggagggtcgcagtggcaagccgcgacgccgccgacggcgacgcagaggcgggcgcgggccagggccagggccaggcaccgacgggacggcgggcccggctgtcggcgaggcggcggcagcgcgtgccgctgccggacggcgtctccggcgccggcgtcggcgagttcctgcgccacccggacgccgtcgagtccatcctcaacaccggcgcgctcgagagcttcgcgcccgcggggcccggcaccttcacctgcgcgctgcgccgcgtcgggctcctcggcttcgaggtcgccccggtgctggacctccgcgtcgccccgaccagcaccgactgcaccatcgagatgctgtcgtgcaggttcgagggatcagaggtgcttgagcagcagaatgaactcttctcagcattcatgagtaaccatataacgtggagcgacgacgccgaggagccctgcctagacatccatgtcaaactggaggtcactctggaggtctacaccaagccattcagcatgcttccgttgtcagcagtggagaagccaggttgatgcaaggcctgctggacaggctcgttcccgtgctgggagagcagttgctgagggactaccattcctgggctcaggctcagcagcagcatgaatcgtcttgatgagattggaggtcaagggaaggaggagagattggtcgctcatgtatctacgccactacaagtatccaaggatttagcgaatccagatatacaaggactcgtaaatcaagacgcttgttttttttggggtgcaccaactggccatcgtcagtctgtgcttttgtcctgtgtccaatactccatcagtaaacaaaaattctactgtttttacttcgtcaataccgcatcctgtagataaaagctctgttgtttcttcatcagcaagtgaaaaggtacagaggaacaggaataaaaatgattgaagttacagcagcaaaatttaaggaatagctacaaaaactattccgtt

SEQ ID NO: 88764 - DNA, 1097 bp, Zea Mays
cttggtttgttggttgaaaatgctacagaggaacaacttggcacagcaaggaaagtcacgatacatcagactacaacaaccctcatagtagatgcagccagtaaagatgagcgtcttggcgctgatattattcaaaaggcgttggtagcacctgcttcattgattgcacacaatgctggagtagagggtgaagtggtagtcgagaagatcaaggagagcgattgggaggtgggctacaatgcaatgactgacaagtacgagaacctgatggaggctagtgtgatcgaccctaccaaggtgaccaagtgtgcgctccagaatgcggcctctgtagctggaatggtcctaatcacacaggccattgttgttgagaagccaaagccgaagcctcaagtggcagagccaccggagggagcccttaccgtttaaaacttaacgttcttgaggctgctgtccagacggttcagatcagttgagagggtagaactttggtttgagaattttggttcagatccactgggagttgtagagtaggattgctattttgcagacgaagagtaattttactctggtctgaacttatccgaatcaaagacatttgcatcaccattttttttaaaataagctcatggcgatgctggattgtacagtagtaaacttatatattttcatagagatacatacttgtcgtttcatagcaggacatacatctgttggtggcaataaaggagcatctagatagccctgtaatagcataaaaacattaggacataaaaatgctaagtccatgcaatctttagtgagttagaaataaggttatttggatttacatgttgccttttctgtcgctccacggtatgttgcaaatctagtatagtatcatcttgcttctggacatgcttttgaagtttttccaattcaagtctaagtgatactacatcttcactggatgtttcatccaaagtggttacatttagatgcttcatacggcttgatgtcaaggcatcaaaaacttgttttggatttggaacaaggcccagaccatggatatggccaggcttttcctttcctaatattctgtttagtgcatctccttc

SEQ ID NO: 88765 - DNA, 426 bp, Zea Mays
atgcaggcttccggaaagataaaacagagatactgccactttaatctctgtagtgtcgcaaagtttgaatacctcaagccagtagcgtggagtacagagatcccgtacgagcaagctagagatccagtagcgtggagtacgggcggaggacggcaagccagagctggaccttggagtagaacaaagctggacgtcgcggcggtagtgggaggccagagattcgtcgcggcggcggcgggaggtcgtcgcggtcggatgccccgtccgtggggaaacctgcccggggtcgcggctcgggggagcgttcccctggtgttttggcaattcgtgggagatactgacccggggaaccgggctccaaacaggccggcaaaattactcgtggcccattctcacgcggggttttctcgccgggaaaaaggctga

SEQ ID NO: 88766 - DNA, 2311 bp, Zea Mays
ccgccgtcgtcaagcgctggcgccggcgggctggctctctggcgccgccgccccagacatggccggagtgccatcgtcgctagcgcgcctctacttcctcctcctcccgctagccaccggatgcctcctcctgctgtctgctgaagccgcgcggctcccgctgtccctcgctcccgccgacgccgcggccgacgcgctcctcaggctcaaggctggcatcaacgacagcggcggcgctctcggcagctggtcccccgacacgagcccctgcggcgacggagacggcgggggggccagctggaagggcgtcatgtgcaacagggacggcgtgcacggcctgcagctcgaggggatgggcctctccggcgtgctcgacctgcgcgccctcacgagcctgcccggccccggcctccgcacgctgagcttcatggacaacgatttcgccggcccgttgcccgacgtcaaggcgctgagcggcctccgcgctctttttctgtccgggaacaagttttccggcgtgatccccgccgatgcgttcgccgggatgggctcgctaaagaaggtggtcctctccaataatgacttcaccggccccatcccggcgtcgctcgccgacgcgccccggctcctcgagctgcagctcaatggcaacaagtttcaggggaagatccctgacctgaaacaggacgagctgacggcagtcaacctcgcaaacaatgagctcgagggggagatcccgccgagcctcaaattcacgccgcctgacatgtttgccggcaacaccaagctttgcggcccaccgcttggtgtcaaatgcgaggcccctccgccgccgtcagcgtcgccgtcgccatcaccgccgccgtcaccgaagacaccgcctccagcctccgtcaaagaaggcaccacgccatcccaaccagcagcagacaccgtggcgtccacaggcgcgtcgtcagctgacgatgcgaagcaagacgagggccataagcccgtcgagggctccacctccacgtcgttcggcgtcctcgccgcattcattggcacgcttgggatcgccggcgtggcgttcgtcgcgctgcggaggcgacgggggtacaagaccaagaacttcggcccgaccgcgtcgtcggctcggccctcggatccgccgagggtcgagccgcacccgccggcggcgaaggccgaagccagcgcggcgcaggcgccccctgccgccgccgggtgcgtggcgcgcgctggcggcgcggcgcggaaggtggagcaggggcggctgacgttcgtgcgcgacgaccgcggccggttcttcgagttgcaggacctgctcaaggccacggcggaggtgctcggcaccgccaacctcggcgtgtgctactgcgccacgctcacgacgggccactctgtcgtggtgaagcggttcaaggagatgaaccgggtgggcaaggaggacttcgaggagcacatgcggcggctgggccggctcagccaccccaacctcctcccgctcgtcgcctactactaccgcaaggaggagaagctgctcatccacgactacgtccccaaccggagcttggcgaacctcctccatggcggcggcgacgagcgcgggatgaagaaggcggcgctgcattgggcggcgcggctgaagatcgtcaagggcgtggcgcgggcgctcagctacctgtacgacgagctgtgcatgctcacggtgccgcacggccacctcaagtcgtccaacatcctgctcgacggccactacgagccgctgctgacggactacgcgctggtgcctgtgatgaaccagtcgcacgccgcgcagctcatggtggccttcaagtccccggagcggaagcagttcggccgctcgtccaagaagagcgatgtctggtgcctcggcctgctcatcctcgagatgctcaccgggaagccgccgacctacgacctgcccaaggcggcgggggcggtgccgtcggccgaatcgttgtcgtcaccgcagaagccgggtccggcggcgggcaacggcacggacctggtgaccgtcgtggggtcgacgccggagggcgagtggctggacaccgtggtggacccggacctgaggggcgaggaggaggaggacaaggaggagatggtgaagctgataagggtcggcatggcgtgctgcgagagtaacgtggacagccggtgggagctcaagaccgccatcgacaagatcgaggagctcaaggcgaaggagcgccccgcccccgacgaggagcaggccttctactcgacggtgaacaacgaggacttcaacgacgttgccatcaactga

SEQ ID NO: 88767 - DNA, 261 bp, Zea Mays
atggccctggcgaggcgagatcctgtggcggacgaagagaagaggccaacagtgaggggcggtgcgcgcatgcagaagcttagggtggagagaaaaggtcaggaagttatgccttccacgtcgggccactggatccgtggcggctgcgatccggatgcagcggcagcttcgactgcgggggtgggggcgatgccatcttgggaggtcgaggggttagggttttgggaggaggggttgaacggggaagggcgagactcgtga

SEQ ID NO: 88768 - DNA, 373 bp, Zea Mays
gcagaggagcaagatgtcgtgcttacgcagtggaccgagatcgcgtgggtggatgatccttgcggggtcgcacgcctccgcggctccacaaccgccatgcggcaaggtcgatcctcgtggggccgtgcgacgccgaggccgagggcggttcccaagctgcctgcgtcgaggccctagagctacgtccaccggatctggatcccgcgggagcgagtggcgcggcggtagcgacgacgttgggggaggggcggtggaggcaaagggaggaggggaagcggtggaggccgcgtcgacggtggatgtcacaacccaaccaagttatcgggcccacgtataccaatccttgccctcaaggcctcggatagatatgtaa

SEQ ID NO: 88769 - DNA, 702 bp, Zea Mays
atggtggtgctcacggaggagtttcacggcggcctttcgttgaagcggaagggcgcccacgagccgggcctcttcgacgtcgacgccggcgccaccaagatgcggcgcctcgcgtgtcccgacggccctcgcggcggggccgaccaggccgtgacggcggcgtgggaggatgacgttgcgatgggcgacgcggcgccggcggcgacgtctccttcgcccagcgacgacgggagggcggtggtggtgtacagagacggagacggagaaagcgtcagaggcagctgcagcagtaggcggatcgggatcgacgccccgcgcctcgcgctgcgcgacggcaccggcgcgggcgcggactggatccgcgccatgctccgggaggcggacagcaggacggtgcggcagctgctcgccggcgccgccaaggaacatggctccgatcctgacctcgccctggccgtcgtgccctgggtggctccggcgccggcggaggcggaggcggaggacggcgatgaccgcgaggcggcgatggacggacaatgtgcgactattcccaacaatgatgagtcgagaaggcaggaaagtcggccctggaccagccatggccaggtgtacgacgccgttgctgcggaggggttggtgtaccggtggccgcagctctgctgggcggcggtggcgcaggcaggcccggtgatgtggtcgtag

SEQ ID NO: 88770 - DNA, 1624 bp, Zea Mays
ctcctccatcctgcccaccagccccgaagccattgcgccccgaagccgtcgcagatgctgttgcggaggcccgggaccgaaatttaactgcggttggtgaggtggcggcggaccgggtggcggcgggggcgggggcccagcgtggtagggcggcgccggcatcctgtttagggcgcctgcggtggcggcggcgtgtacggattcatctgcggcgggtagccgccctgcggaggcggcggtgcgtacggcctgtaagacgccatcgcgcggcggctagggttcctcggaacccgagccccagcacacagacaccgcgccggcggacactgctcgctcccccttctcctccgtcgccgccaccgcagaagcctctaccactgcacgtccgaggccaccgacacatattctaccaaatctatgggagcgcgaggtagtcggcgtctcggcgatttggcgaggagctggaaggaaggaaggaaggggcgatgagaatttcacgacagcttgtgaatcctcgcctaggatgccgacgggcacggcgcccacggtggtcaccttctgcgcctcttcgaggtggtgctcatcggctccatagatctggcaccatgcttagccgaccatggcgaggccatcaaggaggacaccggccacgatccgtcagatgatggagcccacgagccattttcacgtaaacttcttgaagataagcctcggatcacagaagaaatggtccgtggatatatgagcaacactgagcttgagaccgctgtacatgcctttggaagtcgttgttccaatatctccagggtgtacagtatcaaatttacacactggcgaacacttctggttattcttgtagtgggtgattgaaatatcagacaagcccaagcaaagggaatctgaaccagcattcaagttcattggaaacgttcatggtgatgagcctgttgcaagagaggttcttatgcatcttgcaaattggctgtgtgataactatctgaaagattcactggcaactctcattgttgagaacatgcaccttcatatacttccgacaatgaaccctgatgggtttgctcttagatggcatggtaatgcaaacaatattgatctcaacagggattttcctgaccaaggggctcttgttgccaactatccatgggatggaactagagacacaagggctcaatatgactttgtttcacattgtaacatcctcaacaatgattttacttcttacaacaaacactactacggatgtcctgatgataagacattccagcacatggcatctgtgtatagtcggtctcactataacatgtctttgagcaaagaatttgaaggagggataacaaatggagcattctggtactacgtaggttgtgtatttgttggctttgaatcaaacaacatcattgcttgtggtccagattgcaagaacgggactgctaagcaagctaagatttcaatggcctattccttcatacacaggccattgagcgacgaggaacgccgtgtcacttgcaatgaccagagacgggaggtcttcgttgcccaggacatcgctaacaaggaaattgaccgcaccgttgcattcgacaaggtaagatggattagcaaataa

SEQ ID NO: 88771 - DNA, 75 bp, Zea Mays
tggtgcaaacgccatgaagtccctattgagaagattttcaataaatctcttcttaggaaatttgtatgggcaatg

SEQ ID NO: 88772 - DNA, 1007 bp, Zea Mays
aacaccataattgtcagccatgaagttatctcgctgaaaaacagatgggacaggtatagcattgcctttgggaggcttaccacttctatcatctttcagagccgctcttgcatttgggagtgagatgtctggcggaatcttagacatccatgttgaccacctctggatccatgactcctccaagggtatttctttcagacctcaccgaccgtgggggttacatagaagacgtggtatcaacagatgcttggaaagtttctgtcgccaaatgggaaacaagatattgtaggcctggagccgtgaaacaacgacaccgcaagactgtacaacagcttcaggtgagcagccatctatgagcagccctcctgccattgaggcctgtgctggcaacgacggaagccatttggtgggatctcagccagatgctacgccatatgcttctaccagcacaacgcagaggatgagttccgaagcattagcaagccagcaatgtggatcactaccacaaatttcgataaatcgagctgaacgtacccttgagatgaagggcagccccaataatcttcactgacacccaggcatgcagcaaactacgaatggtttcaatgatgttccaggaccaatgatgttcccacatgtggctcaactggtggtgaatcagatgcagacacatacggctgattgataatgttgtgtgtgtgccggggggggtcgggtcgcctttgatccgtcgcgcctcaacctggggctgcaactgtgagcctgttgtgtaattgcttaagtagttattaggatgatagcgtgcatagatgtgttgggtggatgctgtaacagcggtgaccggtgagttgcgattctgaatgtgtagcagaaaaaccacaaccgaaatgaaacatctgtatagattatcgaggattttttagcatgaaaccgtgcgaatcagtttgtctattgtctgtatggtttatatatagacatcaaactgacggtgttcccggactgcttaa

SEQ ID NO: 88773 - DNA, 803 bp, Zea Mays
taacccgcatcccccttccgcggcatccatcgtcggctcctcgtgcgttgtctctctctctctctgtctctctctctctcgtccccctcgctctcagacgaccggtgggccgccgccgccgacgccgcaataagccaggtgctgaggctcttgttggtctcttcgccagcgaggagcacccagcaggacaaggcaacaggctgttggaatatggaccaacaaggcatgcatgaccatgaaggggtccacgttgttggatttgaagtcccgccttcaccggattccagctacgacaaccctgttcctgggaatgaagacgaaggccgggagcccccactgatgccacctcatctgcagcacacgctgctgagcttcccaccaagccaagacgagtcgagcccgctgccccagccccagaccgtggttctgaaccacctttacatcgagaaagagaacacgaggtccatggttgctctggggatcacgcaccggttcaaggctaagttcgtgaccgtcgtgctttacaagccagtgctgaggcggtagggtgtggtcgtgtgcctgcgctcctgctccctcttctcgcgcaggatcggtaatggtaatgccgtaatggtaatggtaattgaacaccccttgggttgcagcccaccccttccagttgttgttattgttgttgtagtggtgcagaaacgggcgagaacgtcattttcgaatgattattagccttgttgtacctaatttggctgctggtggtggcagtgatggtttggttggagtagtttgcttgtgatttggcacca

SEQ ID NO: 88774 - DNA, 3885 bp, Zea Mays
acttgctcctttctctgccgcccgccgctgccgagtgccgggtcttcgctttctttctcctcttcgggcacttcgctgcttgcctgctctgctcgcgacctgcttctcagacccgccctcctcgccggccgcccggcgatgcctcctggccagaggcggcggtggcggcggcggcgacggagatagttagctcttcagattgagtgactggtggtcgccggcggcggagacgcggagtatggaggcgccggggacgagctcgggcggcgccggaggcgagggggccgggggcaccaaggtcaacgaggagctgtggtacgcgtgcgcgggaccgctcgtggcgctgccgccggcggggagcctcgttgtctacttcccgcagggacacagcgagcaggtagcagcatctatgcgaaaggatgcagatgccaaaattccgagctatccaaatctctcatctaagcttatatgcatactccgtagtgtcactatgcttgctgatcctgacacagatgaggtttacgctcgaatgactctccagcccgttagcaatgtgacgcattgtgacaaggagacgttgctggcaacagagcttgcactgaaacaaaccagaccacagacagagttcttttgtaaaacactgactgcaagtgatacaagcactcatggaggtttctctgtgccacggcgtgctgcagagcgaattttcccccatcttgacttctcagtgcagcctcctgctcaggaactgcaggccagggatttgcacgatgcaatttggacattccgtcatatatatcgaggccagcctaaaaggcatttgctgactactggctggagcctatttgtcagtggaaagagactccttgctggtgattcagtcctgtttattagggacggaagacagcaactcctcttggggataaggcgagcaaataggcagcccgttaacctctcatcatctgttttgtctagcgacagtatgcatattggaattcttgctgctgcagcccatgcagcagccaataacagccaattcacagtattctataacccaagggctagtccttcagaatttgttattccttttgccaagtaccagaaggccgtctatagcaaccaactatcacttggcatgcggtttagaatgatgtttgaaactgaagaatctgcaacaagaaggtacatgggaacaataactggtataagtgatatggatcctttaaggtggaaaaactcccaatggcgcaatattcaggttgcatgggatgaagcagcaccaagtgagagacgcaccagggtttccctttgggaggttgaacctgttatcgctccattcttcatttatccctcgccattgttcactgcaaaacgtccgaggcaacctggggtaacagatgatgatagctcagaaatggacaatctttttaagcggaccatgccatggtttggtgaggaggttggcaagagagatctgagtactcaaaacggtttagttcctggattaagtttggttcagtggatgaatatgcaacacaacccctctcttgccaacacggttatgcaaccggaattgctaaattcgttagctggaaaacctgtacaaactctggctgcggctgatctatctaggcaaattagcttccagccccagttcctgcaacaaaataacatccagttcaacacttcgctgctacctccccaaaaccagcagaccgaacagttagcaaatgtaatagctacaccaaaccaattgggaagtgttatagtaccacaaaaggcagttcaaaattccagttctgaacagaaacagaatctggttacacaaccactgcaagtcagccaaccaatggttagtgtggcacagcctcaacttgtccatactcaactccagcaacctcaagtagttctccaggctcagcctcagcaacctcaagtcattgtccaagctcaactacaacaacagcaacctctggttcaaaatcacaccaccatacaaagtggccttcaacaaatccagcttctgcagcaacagcaagttcagcagtcagtgcaggaacaacagcaaataaagatacagccttttcaggtacctaatgatgccaacatggtaacacagttatctgatcagatgaaaatacaactattgaaggctctacagccacagcagcctctggtcatggaacagcagaaaatgatatttgatttgcagcaacaagcagtaaattctcagtcaactgctcagcagtgctcacaggtagctacccaagtggttggtttgcatagcagtagcactaatcagtacccgacgcagcaaaagactcaacctctcaaaacatttcaagattttcctgggaatgctgtttctattgtaaaaccagaaattgtcacctccgtgggtgctcgctctttgcatgtgcctggtggagtgcagtcaatgaagatggatgaagttccctcttcttcaacatcgccatccacaaacaacaatcctgttattttgcgatcaactccaagtagctccaagaaccaatgtttacctactgcagcaaaggctcctcagtcatctgttgtattgggttctacacttgaacagggtatgaagccttgtgacagtacacaacacccaatggtgattcccaagctggctgaagaaaggccagctactggacaagactacatgaacagcactcagctggattatttggatacgtcatcttcagcgacttcagtttgcctttcacaggctgacggatcgctgcaacaaagttttccaccttcatccttcaatcagcatcaaccgttgagggaagcagttccagatagcgagtttgaggttacagatgcaggaaataactttctatttggggcaaatattgatggccatatggagcctcttaacgaagacgatttgcttggaactgccttcgaagctgacaagtacatggaacagatgccaggaaacggcatctctaactacatttcatcaaaggattctcagcaagagttatcatcttcaatgatctcacatccatttggcgttgctgatatcgcgttcaattccatagattcgtcgatcaatgatatccaattcttaaacagaaattcccgggctccaggtcctgttcaacaacgtatgcgaacatacaccaaggtgcacaagcgtggcgctgttggaagatctatcgacatcaacagatattctggttacgatgaactgaagcatgacgttgcccgtatgtttggaattgaggggcagctcagcgaccaaaacagagttggctggaaactggtttacgaagatcacgagaaggatgtcctattagttggtgatgacccatgggaggacttcgtgaactgcgtgcggtgcatcaggattctttcgccgcaggaagagaggcaaatgaggctggccagcgactacggagacagctttcttggcaaccaagcgtgtagcagctcggacgggggtcgtccgtggagggtcaccggcgactagaaatagcaggctatgcctgagcacaaatgtttgatataatccgtcccacgatagcaagaaaatgatacgcgatttctgagcacaaacttttgcactcagatgatcgtgcaaacagttagcattttaagaaaaatgttgcagttcaatgtaactgcaggaatgtctctgatgtagcctcttcgatgtggcagccttaacaatcgatgtgctacagttactctgcctatgtatttactatactaccttggccttgtatatccttttgatgtaggcgcagctggatgctgaaccccccggaggctgttagggacaattacaaccgttcataatttgccacagatacaaatctgagtggacaaatggattcagtttacgtatgcttcatt

SEQ ID NO: 88775 - DNA, 2367 bp, Zea Mays
atcgccctcccactccgggaccgcctctcgcgcttcgttgtgcctcgccgccgacgcagcggcattgtcagccagggcgcgcgatggcggtgagcccagagctagagggcttgcggcgcatcgcgccttcccgcttcgtctccttcgccttcccaaaccctttcctcggccacgcctccaatccttacgggggcggggacgacggcgacgcgggggagtgcgtccgggtcgctgtcctcgattcgcccctccccgccccgcccgtcccggcgacggcggcgatgctggtcccgtccggccggcaccgcgactggatcttctccacgcgtgcgggccacctccacctcctcctctccgccacccgcttctcccgtctcatactcgtcggccccgagctctcggcgccttcccctcgggtcgtttcgtgcgcccgtcgccgcccagacccagacccagaccctgcccacgcgcggctcctccccctcctcctcgctctctgccccgtggccgcgtttcggggcaacgccgtccccgacgtcccgctgctcaccttccaggacgacctcctccggcttgctcctatcgagttcgtcgccggccccgtcgtcggcgagatggttgtcgaggatgtggccgttgactgcagccctagtcgtccagctgaactgcgccgcaggctgcggttcaagcgcatgccctgccttgtgcagacccaggtgcgcctgcgtcagtcacacgcgtcgccgtcgctgtcgctggaagcactggaaggctcatcaggtgagctgctgcagccggaggtgggtggaccgctggctcagccttacctccaagccatggttgctggcctcgcagtgactgcgccgtccatcgaaaagagtattcagtcaggtgctaggcctaggtgcctctgcgccggcgttggaggtggatcgctcctcatgtcactcagagtggggctccagttcgatgtgctcggcatagaggccgacggcgtcgtcctggatgtcgcaaggagccattttgggctggtggaggatgagtttctccgcgtccacgtcggtgatgccatacagacgatagagggtttcgctgctgggcaaggggagcctggtatgaacttcagcgcggtcatggtggacctcgactcctcggatgctatgtgcggcgtcagcgcaccgccgctggagatggctcgtggaagtgtcctcctctccgtgcgcacaatcctagaccatcacggacttttgattctgaatgtgattccacctcctgctgataagaccttctacaaagcggtgactgatcttcttcgccaatttttctcagagctgtacgagattgatgttggtaatggcgagaattttgttcttgttgcgacagtgtcaccggtcgaaaccacagctactggtgaccccgggcagtttctgactgatctgaggaattcagctggggactttttggaacgtataagaaaaatttgacgttcttagtgatcatgtggtgttgcctccaaaaggacagttccatatacttgcagtcaactgctgtgagccgagatggttatattagcattcattcaaacactaccactggattcactgtttgatatacctcagttttttaatatataaaaaaagcttagatgcttaggtgttattatttatctagacatgtgtgtgactagtattgagtattcagatattagtgcaacctgccacgaagaggatattttgttgtgattgtgatgtacacactgcacctcagacacagaactattggtgctttaggtgcacagcaatttttgcaacaagatatgtcaacaactactttggtacactatgaacaaaaattcgtcaagacattatggcatggaatgtaggaagtcaattttttattgatgattgaattattttcagaacggaatatggatcctgcaactcctattttagatttgagaatgttttttctctcctgaaactgtgttctccattactacgctgatctgtaacagatacccaatatggcgaatacatacatgacaaattattcttggtaaaatttgctccgaaatctccagaagatctccttgttcgctgtaagaagaatgcctggtcgcctcttgttttcaacgagaacaatggtccgagtctaactgaccaggatgccgttctgtccattatgctcgtacttatacagtgtcagaaaatatgttactttgctaatctgagggctagtttgggaactctaaatgatttttattttttcaatggaaattaattaattttcaattggaaaaatagaaatcccttagacctcgtttgtttcgttggaattgaattctattttaataattataatttagac

SEQ ID NO: 88776 - DNA, 807 bp, Zea Mays
atccaagttccaagcggccccaaacctgagcgagcagttttcaggcaggaatgaccccggtctcacatgtcagtgagtcacaacagccagatggaaaggcccacgtcatctagtcattggttgtgaaatccccgttctacccctcccgtctctgatctcgataggggagccgggggagcgcgacgacggggagaaaaaacagaggaggaaaaaaacacccaaaaaaccaccttcttttcctgcgttcccctgctcgatccccgacgagaattcgctcccgaacccatcgatctgctctccgcagtccgccgatccgtggatcgatccgtgcgcgggctcggtccgccccgggttccgatctggtcgccgcctcgcctgaggagatgaacggcgccgggggcagccaccaccagcagcagcagaggctccggcagcagcagcagcaggcgctcctgatgcagcaggcgctgcagcagcagcagcagcagcagtaccagtccggcgtcctcgccgccgcggcggcggcggccatgacccagatggaacctgtttccaatggcaaccttccacctgggtttgatccttccacttgtcgcagtgtgtgagtgctttcggtgttcttctctgttttcactttcttatttgattgatagcttatttttcccttttctcttttcatctgtgcaacaatggttttcttttttaaaaacctggagttttaaaaggtaacaaaaaccaaatttaggtaatgcacagtttcacatttatgctggtgctcaaatctgtagctaattgtagttgcatata

SEQ ID NO: 88777 - DNA, 2076 bp, Zea Mays
atccaagttccaagcggccccaaacctgagcgagcagttttcaggcaggaatgaccccggtctcacatgtcagtgagtcacaacagccagatggaaaggcccacgtcatctagtcattggttgtgaaatccccgttctacccctcccgtctctgatctcgataggggagccgggggagcgcgacgacggggagaaaaaacagaggaggaaaaaaacacccaaaaaaccaccttcttttcctgcgttcccctgctcgatccccgacgagaattcgctcccgaacccatcgatctgctctccgcagtccgccgatccgtggatcgatccgtgcgcgggctcggtccgccccgggttccgatctggtcgccgcctcgcctgaggagatgaacggcgccgggggcagccaccaccagcagcagcagaggctccggcagcagcagcagcaggcgctcctgatgcagcaggcgctgcagcagcagcagcagcagcagtaccagtccggcgtcctcgccgccgcggcggcggcggccatgacccagatggaacctgtttccaatggcaaccttccacctgggtttgatccttccacttgtcgcagtgtgtatgttggaaatgtgaaccctaatgtcacggagagccttttgattgaagttttccagagtgctggccttgtggaaagatgcaagctcatacggaaagagaagtcttcctttgggtttgtggactactatgatcgaagatctgctgctctagcaatcatgacccttcatggccgtcacgtatatggacaagcaatcaaggtgaactgggcatatgcaagtacgcagagggaggatacgtcagggcatttccatatttttgttggtgatttaagttctgaagtgaatgatgcaactctttatgcctgtttctcagcatatccttcttgttctgatgctcgagtcatgtgggacaacaaaactggacgctccaggggttatggttttgtctccttccgtaatcaacaggaagctgaaactgctataactgaaatgactggaaaatggcttggaagcagacaaataaggtgcaactgggcaacaaagaacaattcggaagagaaaccagaaactgacaatcataacgcagtcgtactaacaaatggtagctccaacaattcagcaacggatgcaagccaggacgcaggaagtaaagagcccccacagaacaatcctgattgtactactgtatatgttggcaacctcggccatgaggttaaccgggatgagcttcaccgccacttctataacttgggggtcggggcgatcgaggaggtccgtgttcagcaggacaaagggtttggattcgtgagatatagcacccacggggaagcagcactcgctattcagatgtccaatgggtcggtagtccgcgggaaaccaatcaagtgctcatggggtgtcaaaccaactccaccggggacaggctccaagcccctaccccctccagccgcaacgtaccagcccgctgtggcaatgccaggcgtcccgcaaggtttcacgacagcagaactccttgcctaccagaggcagcttgccctgagccaggccgcggccgggcagcagcatgctggtcttgcgggccaggtttctgcagcaggccttcttgctgctgccggttcccaggccctctacgacggctacccgaatcaatcgtcagcgcagcagcttatgtactacaactagtagagctcaagaggaaggaaggcgtctgtagtgttcagcttgtttttgcgcaaacttgggtcatcctcgccctgtttttttttctttattattttgtggttcatgtactatttgtgtgagagctcttgttctctcttctcagccgcgggattgtgttacttactgtcttcttactgtaccattttccttgtctaattctgttgagtaagaggtgtattctatgtgactttgcgattgattaatgtaatgctcccctggggatcggctttggtcgctgggctggttcatgatccggtgttcgggtccgattggacattgaaaggaggtttactggttcatgatctggtggtgt

SEQ ID NO: 88778 - DNA, 1363 bp, Zea Mays
atgtgctcgctgctgcttccaccatggcggccggttcatcctgcaccctctatttccctcccacccactcgtcgtcttgctccgtcctcggctcgccaggtctcgacgcgcgcacagactccgcctcggcgtgccgctgccgtgccccgtctaagagctgccgctccggacgccacggaagcggcggcggccctcatggtcgcgcgcgccgaggccggggacttcgcggaggcccggtccctctgggcgcagctcctgcacagctccgccgcgccgtgcctgcccgccgcggcgccgcgcctactgccggcgtacgcgcgcctgggccgcttcgacgagatcctccacgcagtgcgcgagctctcggcgcgggaccgcggcgcggcacgcgcgctctacccgctcgccgtctcctgcctcggcgccgcgggcgagctggcgcgcatggaggacgccgtcctagaaatgggccgccttggcctccgcgtcgactccgcgaccggggacgccttcgtccgggcctacgcggccgccggaaccatcccgcagatggaggcggcctaccgccggcacaggaagtccgggctgctcatcacccgtggcgccatccgcgccgtcgcgtccgcgtacatctcccggcagaagtactacaggctcggcgcgttcgcggcggacgccggcctccgccggcgcgacgtcggcaacctgctctggaacctctacctcctctccttcgcggccaacttcaagatgaagtccctgcagcgcgcgttcctggagatggtggccgccgggttccggccggacctcaccaccttcaacatccgcaccgcggccttctccaagatgtgcatgttctgggacctccacctcagcgccgaccacatgcgccgcgacggcgtcgcgccggacctcgtcactcacggctgcttcgtcgacgcctacctcgagcgccgcctcgcgcggaacctcacgttcgcgttcgaccgcctcgacggcgacggcgagcccgtcgtggctacggaccccatcgtgttcgaggcgttcggcaagggcggcttccacgccagctccgaggtgctgctggagaccgccggcgggaagcggcgctggacgtactacaagctgctcggcgtctacctcaggaagcagcataggagaaaccaagttttctggaactactgatgctaaccagttcagtaactagtgtagtgcttacattgtaattttcagtgattaaaatgtgcttgccattgccagcaactccatatatctaggagcttgcaacagacataccaaagactgatttatatactcccggaagatgatttatactcgcatcaatagttctgtgcactgattc

SEQ ID NO: 88779 - DNA, 1898 bp, Zea Mays
ctcctccctcgctcctgccttccctacaaaagccgcgacaaccggcggggacgaggaggagaccgcccgaccccgaccccccccgattgcgcttgcccccccccccccccccccccccatcccgttcggcgcattcgcgttccgccgcacccgcgtggaggccgggccggagcagccagccatgggcgtggatgaggcggggcgcgccgccggcaggaatctcacgctggcaagcatcggcttcgcggacgtccgcgtgggcgctgccgtgcccgggggcgccgggtacaaggacggcctgctcgtcgtggggctgcccgtgcccaaggacgacggcctcgacgccgccgcccgggtcgtccgggacctcgccaccaggctgcccgacgtaggcgccgccgctaggacttttctgaggaatagagaagttgcagaattcgtgagtggagcattggctggtgcaatgactaaggctgttcttgctcccttagaaactatcaggacaagaatggttgtaggggtaggatcaaaacatatttttggtagctttgtggagattgttgaacataatggctggcaaggactctgggcaggtaatacaataaatatgctccggattatcccaactcaagcaattgagctcgggacatttgaatgtgtcaaaaggagtatggcctcggcacaagagaaatggaaagaggaaggatgcccaaagatacaactcggcgatttgaaaattcagttgccatttcacttactatcgccgattgcgattggaggtgcggcagctggaatagctagcactttggtgtgtcatcctcttgaggttcttaaggtacttcagagctaaatccgcatcttgaatatctgtgggcactattcatggaatgttaggttcattttccttactttctttttggggtctggtttatatttctgacttctattgcctattccaaataaatggcaaaccagcaaacttcacagaaatttgtgaggcctcttatttagttaatcgattactttttgctgttcttcgtgtcgcaggatcgcatgactgtcaaccgtgaggcttatcctagtattgccattgccttcagcaagatctaccgaactgatggcattggtggtctttatgctggcctctgcccaacgttggttggcatgcttccatatagcacatgctactatttcatgtacgagaccatcaagactaactactgccgtgcgcacaaaaagaaatctttgagccgtcctgagctgctggttatcggggctctttcaggtctaactgcaagcacgatcagcttccctcttgaagtggcaaggaagcgccttatggtaggatccctgcaagggaagtgcccaccccacatgatcgcggcgttagccgaggtgatccaagaggagggtgccaaggggcttttccgaggatgggcggcgagctccctgaaggtcatgccaacgtccggtgtcacctggatgttttacgaggcatggaaggaccttcttttgagttcacggctccatgcgtagcaggagcttgaagaagtcgggctcttgcattgtcacagaataaatttgttgcgctgtgtcggattttcaacatttttttcttcttaaaaagtcgcacacatgccaaccatttaggagagaagaaggccatcttgtgctggttgcacccttgattagcagcactagccaattggccttcgctgacctgggattatctaactactagcaactctgagcagactcaacctggactgggtatgcattggccccaggcatcgttgttgcgaaatttgtctactaatgaaaaacaaggactattcatgaaccttttgtcactgaatgttgcatgttttgtatgtgtggggcatttatccggttcttaa

SEQ ID NO: 88780 - DNA, 1712 bp, Zea Mays
ctcctccctcgctcctgccttccctacaaaagccgcgacaaccggcggggacgaggaggagaccgcccgaccccgaccccccccgattgcgcttgcccccccccccccccccccccccatcccgttcggcgcattcgcgttccgccgcacccgcgtggaggccgggccggagcagccagccatgggcgtggatgaggcggggcgcgccgccggcaggaatctcacgctggcaagcatcggcttcgcggacgtccgcgtgggcgctgccgtgcccgggggcgccgggtacaaggacggcctgctcgtcgtggggctgcccgtgcccaaggacgacggcctcgacgccgccgcccgggtcgtccgggacctcgccaccaggctgcccgacgtaggcgccgccgctaggacttttctgaggaatagagaagttgcagaattcgtgagtggagcattggctggtgcaatgactaaggctgttcttgctcccttagaaactatcaggacaagaatggttgtaggggtaggatcaaaacatatttttggtagctttgtggagattgttgaacataatggctggcaaggactctgggcaggtaatacaataaatatgctccggattatcccaactcaagcaattgagctcgggacatttgaatgtgtcaaaaggagtatggcctcggcacaagagaaatggaaagaggaaggatgcccaaagatacaactcggcgatttgaaaattcagttgccatttcacttactatcgccgattgcgattggaggtgcggcagctggaatagctagcactttggtgtgtcatcctcttgaggttcttaaggatcgcatgactgtcaaccgtgaggcttatcctagtattgccattgccttcagcaagatctaccgaactgatggcattggtggtctttatgctggcctctgcccaacgttggttggcatgcttccatatagcacatgctactatttcatgtacgagaccatcaagactaactactgccgtgcgcacaaaaagaaatctttgagccgtcctgagctgctggttatcggggctctttcaggtctaactgcaagcacgatcagcttccctcttgaagtggcaaggaagcgccttatggtaggatccctgcaagggaagtgcccaccccacatgatcgcggcgttagccgaggtgatccaagaggagggtgccaaggggcttttccgaggatgggcggcgagctccctgaaggtcatgccaacgtccggtgtcacctggatgttttacgaggcatggaaggaccttcttttgagttcacggctccatgcgtagcaggagcttgaagaagtcgggctcttgcattgtcacagaataaatttgttgcgctgtgtcggattttcaacatttttttcttcttaaaaagtcgcacacatgccaaccatttaggagagaagaaggccatcttgtgctggttgcacccttgattagcagcactagccaattggccttcgctgacctgggattatctaactactagcaactctgagcagactcaacctggactgggtatgcattggccccaggcatcgttgttgcgaaatttgtctactaatgaaaaacaaggactattcatgaaccttttgtcactgaatgttgcatgttttgtatgtgtggggcatttatccggttcttaatgagtctcaatgttacacaatattat

SEQ ID NO: 88781 - DNA, 101 bp, Zea Mays
tcaagtaaatcagaccaaatttgctttggttgcattattttcgtgccagctatttgctgcaaaattccagaaccttgtgtatcgaaccacagttgtacatc

SEQ ID NO: 88782 - DNA, 2091 bp, Zea Mays
atgtgccccgacgcgtcaacgccggcgaccaaagatgccgatgccggcaccgacaccactattgttcttgcgaagcttcatgcttcgcgagccgccatcgtctcggtgctttccgccgcggctgaggctgaggtcgaaatcgacgccatcggtgaccgccttgatgagctcctgtccagcgcctcgccgtcgtcctcccaccacctccagtcccaagccgtggcggcacgcgcgctgagcgcgcgcatcgaccgcgccgtcgcgccggccgatcccctcctcgcggagttccgccgcgtgtccgcgctcgccgaggacgccgcgccaccggccaacccgggcgacgccgaaagcgcggtggcgttcgtcgaccgcgtggaccagctgcgggacgccatcgaggaggtggtggcgcgcggcgaagaggccgtccggagggtggaggaggcggtcggcttcctaggcaggaccaaggcagccggccgaggccgcgtccggaggctgaccgaggccgccgcggcgctgcgcgcggtgtacgagacggaagccgaggagatgcgcttcgagggcccgctggacgatgctctcctcggcctccaggagctcttcgaggcgctgctcctcaggctgaagcacccggcgcccgtggacgacgacgtcgccggcgccgaggatgacacggccgggcacgagctgggcactgacgacgaagtggaggccgccgcaaggatggccaaaacgctcgccgccaacgactgtttggacatctgccttgacatctacgtcaagacgaggtacaggagagcagccaaggcgatgatgcggctcaacccggcgtacctcaagtcgtacacgccggaggagatcgacgcaatggagtgggagtcgctggagtcggccatggcgctatggagcccgcatttccacgtggctatcgcctccgtgctcgccgcggagagccggctctgcgagcgcgtgctcgagcccctgccgccggcggtctggcccgagtgctttgcgaagatcgccgcccgcatcgtcgcggcgttcttccgcttcgcggacggcgtggccgccgcggcgcgcgagccgcagaggctgttcaagctgctcgacatgctcgacgcggtggtccgggagcgggagcgcctggacgagctcttctccagcgggtcggccacgctggtcgccatccgcgagcgcacgcgcgaggtggagcgcgcgctggggcgcaccgcggccggcgtgttcttcgagttcggtctccgcatcgagacgctttacgtcaccggcgccggtgccgacgccgggcacgtgcccaaggtcgtgcggtacgccgtgaactacctcaagtgcctagcgtccgacgactaccgcgcgctcatggacaccgcgctgcgcgcggatctagagcgcggcgacgaggaggacgcgggcgaaggcggcgaccgcgccccgctcgccgaggcggcggcgagcgtgctggaggcgctgcaccggcacgtcgaggcggcgcgccgggtatgcccggacacggtggcgtcgcacgtcatggccatgaacgcgtactggtacatctacatgcgcgcccggggcacggagctggcgaagctggtgggcgaggacaccatgcggcgccggtacaaggcggcggccgaggaggcggcgtgggagtaccaggacgcggtgtggaccccgctggtccggctcatcagcggcagcagctccggggcgccgaagacctggccgccggacgatgcgcaggagaaggcggcggcgttcgctggcaagctcgaggagcgggtgaggcggcacggggccgagtacaagataccggacggcgacctccggggacagatcaagatcgcggcggccaaggcggtgcgcggcgcgtacgccgggttcttgaaggcaaacgacaaggccctggctggctgccggaaacaactgctgccgctggacatcatcgagggaatggttgggcgcgtgttcgacgaaatgagcgatggaaccgccggcagcgtcggccgggcgaggagccggcgggagtccaggagcagcggcaatctggagggcttcttcggcgtctaa

SEQ ID NO: 88783 - DNA, 1254 bp, Zea Mays
ctccttcagctccctgcgcgccgcgtgagctcgccgtgccggagctccactgcatcgccccagctccctctgcttcccagctcggccgctcctccctgctgcacatcgcgtccggccgagctcgcctccgacctctgcttgtcctgctgctgctcgcccatggcagccgattcctctatgcgcgcgctccctgtttccccgtccaaagctctatggtgtccggctccttgcgcgccctgccgagcgccctcccggcttcctgctcgccgagctcggcttcgagttcctatctcccatgccgcggcactccactgtgcgctgctcgccgagctcgccctgcgctcggattccaccttcctgcgtgcgtgcctgtatgtgcgcgccgtgctcctactgcgcgtagctgtgtctactccttcctcgccttagtccctgcgcgcgtcgagctttcgtgtcgagctctcgcgccgtcgaatcgcctgcttgctgtccgcgccgtcgaagttccctcgccgtgtgctctgacatcggctgctgccgattccgccataaagttcgcgagcgctccttgcttggctcgtttcgccgtgggcaatttttccacgtttcaaatctgtgctgcttggtcgcgtttggtcgtcgagctgttgaacccgtcatctctggctcgatccccacctcaccagcttaccccagacttcaatagaaggtcgtcgtcgttcgtgcatcccaagaaaactcaagaatcgggtgaagacgaagttagcagcgcgattttccccaagcgctcgacaaattgcctggatcgaaaaatcattaccaacctcgcggattcgagtccaatattgaaatggtgagctaatttgctattttattgactggtttgatggatgaattgataggtgtgtacgtcgcgatgaatatcctgcttgtagctaagcacgtatttatataacgcttgtaggaatacggggctacaggtagcatggcaattgtgtccacgattgcgaagtcgtcgtgctgcgtagctaagtttagcattaacgacataggttatgtgagaagattaaattggtgattcgtatccgatgaatgatcaaattaataatgggagggttaggtttaaatatttattatgcgaggaatatatagataaacctatgtgaggtatgatgagttagtaacgcgaaagtaggttaaattatatgattaagtcaatgatattcccttttagtagttatatttcttggttaa

SEQ ID NO: 88784 - DNA, 1880 bp, Zea Mays
gcgcgagtctccgaacgacaaacacgagcgcgggcgcgcacaagttcgccaacccccacgccccaccccccaccccccgcgtgctgcgcgtcgttggaaccaaggattggattagcctcgccgaggaggaggtggtggtcggcgaggggctcgcggggatggggatctcgaggccccttgtgatggcgatggcggtggcgctgctgatcgccgtcgccggtgcgaccgccgaggagcaggagcccctgctggcggcggacgcggtggccggcgcggtggaggcggcgctcggggaggtggagaccgcggcgctcagggccgagctggggcaactccgggcgaagatctcggcgctagagtcagacatagaagagcgatctcaagaactgaagaataaggatgatgccatcatgaacctggagaaagccattgaagagaagtcaaaggctattacctctatgctggacgagattgcttccctccaggcaaaagggtctgtagctgccgaggagcaggctaacaaggccaatgccaaggttgttgagcttgagaagcaggttgacaagatcaaaaaggatattgaagcacaaagcagccagaaagcagcactagagtatagggccaacgatgcagagaagaaggtggaagtactgaatgaaaagcttaatacaatccaaaaggaaagtgatgagaaaaaacgcaaaatcaagaagacagaacgtgctcttaaagtcgctgaggaggaattaatgaggttgcagttagaagtaactgctaaatcaaaacagctgtcagaggttcatggagcatggttaccaccttggctaatggcacaatatgcttgttatgcggaggttgtctcaggtcactgggatcaacatgggaaacctgctgtgcagaattttttgcataaggcatcagaaaaatcagcacaggcaaagaaatgggctgaacctcatatcgagactgctaagatgaaatggattcctgttaagcagaaattggttgccctcaagaaaaatgcagaaccttatgtacaaaaggtatcaacaagatcagtagagttttacgagtcatcaagggatgctgtgacacctcatgctgtcaaagttaaagtgtttgttcattcctactaccagaaagccaagaagttttctaagccttacattgatcaaattgctgagattactaaaccacatgttgagaaaattagaactactctgaagccatacactaagagagcagttcatgcatatgggtcatttctcaagtcggcaaccacataccatcgacaggctcaagcaagcatcatggactaccttcaccagcatgatataacaaaatcattggcaactaaggagttagtttggttcctggcttctgctttgctggctctgcctgtcttcattatatacaggcttctagtagggaccttctgctccaaaaagaataaaaggcctcgtagtagtaatggtaaccatggccacaagagatacaagcggcgacatgctgacaagtagatcagtttactgaacactttagggttcagtatgctgtgtaccgtggcagatctttgagcaggattgggtcatgggcacccttaccttgaaagcattgtacaccaccaacatactcttctcttttgcattttcgtcccaggtgtaatatggacttcagtgcagcagaccttttatctgcactttgctgggttcatgtggttatgcctcggcctttgtttgattggtcatttgtttattgtaacttgtgaatgcgtttgaatttgtatgcttgttcttgtcggcgacctacattcgaacttaatacttatgtatacagtggttggtttagctaataactggatgtctcctgttcacttcgtt

SEQ ID NO: 88785 - DNA, 1013 bp, Zea Mays
aagggtctagaaatggcaacccttctcttgatagtttgtgcgctcttctgtttttagctgcttcattaagttaatgaatttaacttctgttttgatatacttttagctggttgttatatatgtttagtttttttctatcatatgatgttttttatttaaaaaactaaaaaaagtagcagacgtagtgtcggaggcctccacatgagtgtgatctagggcaagccttcctcacaattatggagaggctgttttaaaaccggtgccgtggtgagagctatcttagtgagtcactatgtcacgggttcaaaacagcctctccgaatttgtggagggaagacttgcgtcgatttatctcttccacagatcccacccatgtgggagactccggcactaggtctaccctttatttctaagaactgatttggcaaaattccaacatgttctcctttgtaggctcaagcaagcatcatggactaccttcaccagcatgatataacaaaatcattggcaactaaggagttagtttggttcctggcttctgctttgctggctctgcctgtcttcattatatacaggcttctagtagggaccttctgctccaaaaagaataaaaggcctcgtagtagtaatggtaaccatggccacaagagatacaagcggcgacatgctgacaagtagatcagtttactgaacactttagggttcagtatgctgtgtaccgtggcagatctttgagcaggattgggtcatgggcacccttaccttgaaagcattgtacaccaccaacatactcttctcttttgcattttcgtcccaggtgtaatatggacttcagtgcagcagaccttttatctgcactttgctgggttcatgtggttatgcctcggcctttgtttgattggtcatttgtttattgtaacttgtgaatgcgtttgaatttgtatgcttgttcttgtcggcgacctacattcgaacttaatacttatgtatacagtggttggtttagctaataa

SEQ ID NO: 88786 - DNA, 653 bp, Zea Mays
ttggggtctctcgttggtgcttgaccggcgttggggctctgagggttggggctcgtgggttggtgcgtcggtggacgacagaaggtcttcggaggaaactttgcttggtttgtaccaggcgggcggcgacagcttttcgacctcgtttctccttcttgaaggcgcggcccagaagacctctagtttgtgtgttcgtccatgttgtggaggctcttcgtcactctgcttggctcgatggtgtccgggcctttgtcgctttaggcgtctgctcgctcctggagttcggcgttgtggatctttgctcgtggtgaagaatcagagttgcctcgtgtggggtgtgctgaggcttgtcaacgatggcacgccgtggtcttattccttgcgtcggtgtctggatgtaagcgtcgtcgagttgctttggcagtgtgtggctcatcttgggaagtcggagttgctcgtctcttgtgtttgagcttggcaacgatgaatctagatgtgtttgtgtgtggggactgtcgttgtctaggttgtttgttagggcgttcgccggtttttctactgtgtgctctgtgtaggttttaggcacggttttccttaaaactgggtcaattccattctttttaattgagaggcagagctcctgccattatgtt

SEQ ID NO: 88787 - DNA, 2525 bp, Zea Mays
atcaggtacttccactcctcgtcgccggagcacacccaaaccccaggttccccgccccaactcaacttctccgccgccgaccgcaccgtctcgtactcgtgcaccgcgcgcgccccgcagcttgcgtcatcccacgtcctcgcgcggtctgcgccttcttcgcggccgcctcatctgcccgcccctctccaccaaggagctcgggcaccggctgccactgcacgatcctgcgccggcgaccgtttgacgccgccgcctcagcagcagcagcagcagcagcgtgctacttcacttggcacgctctccttctgactgggcgctgagggtgcggaagctggagtcgtcatcgatggcgaccgtggagtagcaccccaaagctggcgcgcttttcttgccgtcctgccagcgcttctagcttggtttccccatgatcctccgcagcgcactaagggctggtcgcagcctccggcgggttcccctggttcagctcattgtggaacacggtgagccgtaccgagcaccacaccggtgtgctactgatacccaggatggtgaagaatcatcggctgttttgaattggtggggggacactccaatcggtcacaggtatcagttgcgggcttactcgcctgctcctgcacatgttagggatgagaaacccttggatcatgacgatggggcggtaatggcggataaggaggtcaatcgaatgaagaagatgcgggtgttctggaccgcacagcagactttcatggagtacctccatgtcacacgggggctgagctttcccgacgcggagcatataagcaagcactcacctgtctttgtgagcaatctgctgcaccaggtgaaggatgctatcaaggaccctgtggagggggatgaggcagcgttcaggtcaaaggtgaagacaaaggagataagggatgagagggccaccaaggcgttggagcgtctattcaggtattatccgatcaatgagttcgagccattcttcgagagcatgggcctcaagccgagtgagtaccaaccctttctgcgtcgggatctcatgtttctttccgatgacgagacggtgctggagaactaccgtgttctttgcaattatggggttatgcgcaataagatagggcagatatacattggtgctgcggaggctttcagttttggtgatggtgtgcttgcgtccaagctcagagctcttgaggatctagggttcagtaagtccactgtgataaagcttatggcctgttgccctgccgtgttgacatgtggcccacatgccgaattgaagatcatagagtggctagatgacattggcattcagagagactggattggtcagttcttatccgtaaagaagtcgtataattggagaaagatggttgaagttcctcagtttcttgctgaattgggattcgataacgagggtattggtaaactgatcaggcaacacccagatttcttgttggatggctctggaaatgcactgtttagggcagttgtcattatgctgaaagcagggtccggaaaaggagacctgttcaatcttttcctggacttcccagacgtacaggcgaggagttttgcgaggaacatacagagcgttacgctattcttaactgacatcgatgtgagcgaggaggatattaagaagttcgtggtagcgaacgcctcgatgctcggttccgctcgggtgaagaaggcaaacagcatccttacatacctcagcgtggggaagaagcgtctgtggaagatcataagggaagagccacgccaactaatgaaatacacactagggctaaaggtcagccgcctgccgccttgcgacgaaatcgccgagaagtcactgaaggagaaggtgaagttcctgaagaacgtagggttcgcggaaggctccaacgacatgaacaaggcgttgaaggccttccgcggcaagggcgacgagctacaggaccggttcgacttcctggtgaacgctgggttcgagcccaaggacgtgtcgcacatgatcaaggtggcaccgcaggttctgaaccagaagacacacgtcctccagtccaagatatcgttccttgtgaacgagacggcgtaccctctgagcgttctggtcgggtaccccgcgttcctgtcgttcaccatagagagaaccaaagccaggttcctgatgtacgactggctgcgagaaagagggctggtccctccgaacttcgcactgtccaccttgttagcctgttcggagaagcggttttttaagtatctggtcctgaaacatcagaagggcccggaggtctgggagaagctcaagaaggaggtggctgcagacaaaaacgcgcactgtgcttcagaggatgatcagcatgctattgtttcttgagcaattaatttttttatggaaaaggcagtgggggtgtcttttcgtgttttgattaatgaacgatgtacatggacggtagaaactgatattgtgacctactcccttcggtctactactagttgttgttttggatcttataaaattttga

SEQ ID NO: 88788 - DNA, 3929 bp, Zea Mays
tgtgctagtgtgcagcgatggagatggcctaggctggcgtggtgggccggtggcccagttcttgccatcaacgccgccgcaatctcatactgctccttctctaactccggcggcggagcccatcgcggttgcctccaccaccagtccacggctgtcaccgccgcactcctccacacagacaccttctagagtctaggttccccaggccccacttgccagggtctatcttatgatcttatcccctcctgttatctctgctttccccctttctctcttccgaaccgtcccattcccgcgctctcggcttctcgcccgcctgcccctccgcctgtcagcgcgccggtcgtctcgcctgcaggagagttcgaactctgctccttccagccaccgtaaccatggcgacgcctccgctctactccgtttccactcaccaccgcgccccaccaccatggccgcctcccaaggctgccactagtccgcgaataacctttcggtgtagcgtgctggcggcaccggctggccgagtcctggaggcgcccaccgctgctccaagctcatggagcaccaagaatccgccaagtcgggccctgagttccgacgtgaacctgcgaatccagcgcctctgtcaggcgggtgacctcgcgggcgctctgaggctgctgggctctgacggcggcgtcgacgtgcggagctactgcatggtcgttcagctctgcggggaggagcggtcgttggaggctgccaagagagcgcatgccttaattcgcgcgtccagtgccgctgcaacgggtggaaaagggagcgtccttgggaagaggttagtgctggcgtacctgaaatgcggcgacctgggcgaggcaaggacggtgttcgatggaatgcctcctcaagctgctgatgtccgtgtctggacttcgctgatgagcgcgtacgccaaggcgggtgatttccaggaagctgtctccctgtttaggcagatgcagtgctgcggggtcagtccggatgcacatgctgtttcctgtgtcctcaagtgcgtttccagtttgggcagccttacggaaggcgaggtgattcatggattacttgagaagttgggtctcggtcaagcatgcgcggttgcaaatgctctgattgccgtgtactcgaggtgtggacggatggaggatgcggcacgggtatttgacagtatgcatccccgggatgccatctcttggaattctatgattggtggatgcttttcaaacggatggcatggtacagctgttgatcttttcagcaaaatgtggtctcaaggtacggagatcagttcagtgacagtgctcagtgttctgcctgcttgtgcgggattaggttatggccttattggaaaagcggtgcatggatactccgtgaaatccggattgctttggggccttgattctgtacaaagtgggatagatgatgctgctcttggatccaaactggtattcatgtatgtgaaatgtggggacatggcctctgcaagaagggtgtttgatgcgatgtcatcgaaaggtaatgtgcacgtatggaatctgataatgggtgggtacgcaaaggttggtgaatttgaagaaagtctctcgctttttgtgcaaatgcatgagcttggaattgccccggatgaacatgccatttcttgccttctgaagtgcatcacttgtttgtcttgtgccagggatggcttggtggctcatggatatatagtaaaattgggtttcggggcacagtgtgcagtttgcaatgcactgatatcattctatgcaaagtccaacatgattggcgatgcagtcttggtgttcaatagaatgcctcgtcaagataccatttcttggaattctgtgattagtggatgctcttccaatggactaaacagtgaagctattgagttgttcataagaatgtggacacaaggacaggagctggactcagttacgttgctaagtgttttgccagcttgtgcacagtcacgctattggtttgcaggaagggtggttcatggttactcggttaaaactggattgattggggaaacatctcttgcaaatgctcttcttgatatgtactcaaattgctcagattggcagagcactaatcagatattcagaagcatgggtcaaaaaaatgtggtgtcctggacagcaatgatcacgagttatatgagggcaggactgtttgacaaagtggctgggttacttcaagagatggtactagatggtatcagacctgatgtctttgcagtcacaagtgcccttcacgcttttgctggtgacgaatctctgaaacaaggcaaatctgtccatggttacaccatcagaaatggaatggagaagcttcttcctgttgccaatgcacttatggaaatgtatgtgaaatgcaggaatgtggaagaagcacggttgatttttgaccgtgtgacgaataaggatgtaatctcatggaatacactgataggaggttactccagaaataattttcccaatgaatccttcagtttgttcagtgacatgttgctccaattcagacccaatgcagtgaccatgacttgcatccttcctgctgctgcaagcatttcatccttggagcgaggaagggagatacatgcttatgcacttcgaagaggatttctggaagatagttatgcatccaatgcgcttgtggacatgtatgttaaatgtggtgcgttactggtagctcgagttttgtttgaccggttgactaagaagaacctcatatcatggaccattatgattgctggatatggcatgcatggttttgggaaacatgccatcgccctctttgagcaaatgagaggcagtggtattgagccagatgcggcctctttcagtgccatattgtatgcttgctgccattctggtcttgctgctgagggacggagattcttcaaggctatgcaaaaggaatacaaaatagagcccaagttgaagcactacacctgcattgttgacctgcttagccgtaccggcgacctgaaggaggctcttgagttcatcgagtcaatgccgattgaacctgattcaagcatttgggtatcattgcttcacggatgtagaattcacaagaacgtcaagcttgcggagaaggtagcagacaaggtctttaagctggaacctgagaacacagggtactatgttcttcttgccaacatctatgctgaggctgagagatgggaggctgtcaagaagctcaagaacaagattggtggtcgagggctccgtgagaacactggctacagttggatcgaggtcagaagcaaggttcatgtctttattgcagataaccggaatcacccagactggaacaggattgcagagtttctggatgatgttgccagaaggatgcggcaagaaggccatgatcctaagaaaaagtatgctctgatgggtgccgatgatgcagtgcatgacgaggcactatgtgggcacagctcaaagctcgccgtcgcattcggtgtgctgaatttaccggagggacggccaattcgtgtgacaaaaaactcaaaagtctgcagccactgccatgaggctgccaagttcatatcgaagatgtgcaacagagagatcattctgagagattcaagcagattccatcgttttgaaggaggcaggtgttcttgcagagggtacctctgaaagaaacaccagtcatgtgcctgtggttttgtttgttcattagcagagagcacatttattgctactagcagttctagcaccaccatatagcctgcatctgtagtgatttttctttataacattaggagggaagagacctttagaaggtaacaggtgtgtgtgttcaggaaacagaagctactgtccatagaaatgtgaagattttatatatgtatgaaggcattttggcatcttttactaaaaatattgttacaaaca

SEQ ID NO: 88789 - DNA, 1361 bp, Zea Mays
gagtcacaaaggagaggggacgacaataggagccggcggcacggagtcctccagcggccagcactcccagtcgccgtgcttgttctgccacagcgagaagtggctgggagtccacacctccccccgctcgttcctctccttggcgagccgcctcgccgtctcctccacccgccgcttcgcctgcctggccgcctcccagtccttgttcaggatcgcggcgctgacctcggcccagaccacggcggactccgaggcggacacgccctgtgatgtagcacgatcagcatgcaccgtttgttcaccatcaataacttactggtgtcctgtcgtctcctacctttctgtcttgcacgacgggcgtggccaggtcagcgatggtttgccgtgcgtcgtagagcacggagacctcgccggtggcgacgtccctgagcgagacctggcggtcccagaacccgtccacctcgcacagcgtgtcgtcgggcgcggcggagcggaagaccctgcccctgacgcagcgcgcgtcgccgccgccgaggccgaggaaggagcggcggctgcggcggtagctgagcgtggcctcgagcccggactcggcgcaggagacgcggacgtcgccggcccactcgcagcccggcgacggcagcaggcggatcacgaggcccgggcacccgacggcgtacgtctcggcgtggcgcggcagccgcagctcccgcgcgccccgcaccgcggcctccacgctggcgccgtggaaccgcggcgcggggctctggcaccacaccagctccacctccccacgcgcgtgcgtcgcgtgcagcgccgtcacgggcggccggtgcgagacctgctccaggagcacgttgaggccggcggacgtggagacgtggtgcgtctccccgagcaccgggttgtagggcgcgaagccgaagatggggggccgcgtggtggagatgctccacgccaccacggcgcacatgcgctgcaggctgtcggcgccgcgcgcgcaccgcgccagcatgtcctcgccgccgcagtacacggcctcgccgtacagctgcagctgcgacttgggcaggttgaacgtcgccggtacctggaagtgggagaggtcggagcccgggcggacgttgcggaacaggctgagcacccgctggccgaggttggccgggcggagctcccccgcgagcccgccggcccccagcgacagcggcggcgtcagcacggccgcgcgcgccgcctccgcctcgccctctgactccgtctgcgtcacatcaggcgctccgccgatcgagacgctggcactggccaagtggaggcgggcgtcagatttggcagcgcgtgcgtgcgcgccaaaggttttccct

SEQ ID NO: 88790 - DNA, 1308 bp, Zea Mays
acatcccgtcgcgtcgcgtcgcggattacggaggaaccctctaggctccggttccggaaacagcgggcgccattcccgggcgaggaggccggcccagatccgagtacggcggcggcggctgcggcggcgagatgactggtggcggcccggccgcggcgtcgcaggcgtacggcgaggcatggtactgggacgagcgctaccgcaaggaggccgggcccttcgactggtaccagaagtacccggccctggcgccgctgctccgcctctacctcgcgccgcaccaacgcctcctcctcgttggctgcggcaactccgtctttggtgagaacatgattgacgatggttatcaagatgttgtcaacattgatatatcttctgtggtaattgagcaaatgaagaagaaataccacgataagcctcaacttaaatacatgaagatggatgtaaagaacatgtcagattttgagtctggttcttttgatgctgttattgacaaaggaacactggattctcttatggtgagtgtacttttgtcaggacgctttgacattctcccagtgtgatactcagcagcatctcttgtatttcagtgtggtcaaaattcccaagagaatgcaacgaaaatgctagaggaggtcaacagaatcctcaaggaaaatggtgtctacatgctgatcacttatggggatccaagttaccgcttgcgtctcttgaaggacatggaaaaatggacagtaaagctccatgtcataggttagttagttactcaccatcaggccaattcaactgcaccttccggtatttgcagagctccaatcacattgaccttttctcatatccaaaaaagatgggagaaaagttcgaatcagaacaaatgggaactgacaaagccattgcctctagaggaccatagcacatcactagctgcacttcttggccccaaacctgatgtccactacatctatgtctgtgtaaagggcaacggtggcgcaagtgtggattctaaagctggagaagctgccaattgatttctcctataaccctctgaactgacgtgcgtaaccggtgtagcaaataatgtagagaaatagaacagatgttgtacctcgaattgatcgttgttgttttattggataataaccagcgtgtgaattgtagaacagatatcgcacctcaatttgcagttgtttcattgaataaccagtgtgtgaataatgtagaacagatgttgtaccgcttgtttcagtgtttcatgaattcgattgaccctgtcagtgatcctgtgcttgtaccggatgttctagatca

SEQ ID NO: 88791 - DNA, 1321 bp, Zea Mays
acatcccgtcgcgtcgcgtcgcggattacggaggaaccctctaggctccggttccggaaacagcgggcgccattcccgggcgaggaggccggcccagatccgagtacggcggcggcggctgcggcggcgagatgactggtggcggcccggccgcggcgtcgcaggcgtacggcgaggcatggtactgggacgagcgctaccgcaaggaggccgggcccttcgactggtaccagaagtacccggccctggcgccgctgctccgcctctacctcgcgccgcaccaacgcctcctcctcgttggctgcggcaactccgtctttggtgagaacatgattgacgatggttatcaagatgttgtcaacattgatatatcttctgtggtaattgagcaaatgaagaagaaataccacgataagcctcaacttaaatgtatggtctttgttcttgagtacctctgcagtatatcccacataatctgataccgtgtatttcccttgattggcaagacatgaagatggatgtaaagaacatgtcagattttgagtctggttcttttgatgctgttattgacaaaggaacactggattctcttatgtgtggtcaaaattcccaagagaatgcaacgaaaatgctagaggaggtcaacagaatcctcaaggaaaatggtgtctacatgctggtaacctgaactatttgattctttattctttaaaagatgtggttattttgtgctcatctggtgtctttaacaaatttctgactcctataatgtcttagatcacttatggggatccaagttaccgcttgcgtctcttgaaggacatggaaaaatggacagtaaagctccatgtcatagaaagatgggagaaaagttcgaatcagaacaaatgggaactgacaaagccattgcctctagaggaccatagcacatcactagctgcacttcttggccccaaacctgatgtccactacatctatgtctgtgtaaagggcaacggtggcgcaagtgtggattctaaagctggagaagctgccaattgatttctcctataaccctctgaactgacgtgcgtaaccggtgtagcaaataatgtagagaaatagaacagatgttgtacctcgaattgatcgttgttgttttattggataataaccagcgtgtgaattgtagaacagatatcgcacctcaatttgcagttgtttcattgaataaccagtgtgtgaataatgtagaacagatgttgtaccgcttgtttcagtgtttcatgaattcgattgaccctgtcagtgatcctgtgcttgtaccggatgttctagatca

SEQ ID NO: 88792 - DNA, 1248 bp, Zea Mays
acatcccgtcgcgtcgcgtcgcggattacggaggaaccctctaggctccggttccggaaacagcgggcgccattcccgggcgaggaggccggcccagatccgagtacggcggcggcggctgcggcggcgagatgactggtggcggcccggccgcggcgtcgcaggcgtacggcgaggcatggtactgggacgagcgctaccgcaaggaggccgggcccttcgactggtaccagaagtacccggccctggcgccgctgctccgcctctacctcgcgccgcaccaacgcctcctcctcgttggctgcggcaactccgtctttggtgagaacatgattgacgatggttatcaagatgttgtcaacattgatatatcttctgtggtaattgagcaaatgaagaagaaataccacgataagcctcaacttaaatacatgaagatggatgtaaagaacatgtcagattttgagtctggttcttttgatgctgttattgacaaaggaacactggattctcttatgtgtggtcaaaattcccaagagaatgcaacgaaaatgctagaggaggtcaacagaatcctcaaggaaaatggtgtctacatgctgatcacttatggggatccaagttaccgcttgcgtctcttgaaggacatggaaaaatggacagtaaagctccatgtcatagaaagatgggagaaaagttcgaatcagaacaaatgggaactgacaaagccattgcctctagaggaccatagcacatcactagctgcacttcttggccccaaacctgatgtccactacatctatgtctgtgtaaagggcaacggtggcgcaagtgtggattctaaagctggagaagctgccaattgatttctcctataaccctctgaactgacgtgcgtaaccggtgtagcaaataatgtagagaaatagaacagatgttgtacctcgaattgatcgttgttgttttattggataataaccagcgtgtgaattgtagaacagatatcgcacctcaatttgcagttgtttcattgaataaccagtgtgtgaataatgtagaacagatgttgtaccgcttgtttcagtgtttcatgaattcgattgaccctgtcagtgatcctgtgcttgtaccggatgttctagatcaactgagttagatgtttgcatgattgcatcattgcatggtacttgggattaggctatcagctgtgtaggttacttatatccttatatactattatattattat

SEQ ID NO: 88793 - DNA, 1311 bp, Zea Mays
atcccgtcgcgtcgcgtcgcggattacggaggaaccctctaggctccggttccggaaacagcgggcgccattcccgggcgaggaggccggcccagatccgagtacggcggcggcggctgcggcggcgagatgactggtggcggcccggccgcggcgtcgcaggcgtacggcgaggcatggtactgggacgagcgctaccgcaaggaggccgggcccttcgactggtaccagaagtacccggccctggcgccgctgctccgcctctacctcgcgccgcaccaacgcctcctcctcgttggctgcggcaactccgtctttggtgagaacatgattgacgatggttatcaagatgttgtcaacattgatatatcttctgtggtaattgagcaaatgaagaagaaataccacgataagcctcaacttaaatgtatggtctttgttcttgagtacctctgcagtatatcccacataatctgataccgtgtatttcccttgattggcaagacatgaagatggatgtaaagaacatgtcagattttgagtctggttcttttgatgctgttattgacaaaggaacactggattctcttatgtgtggtcaaaattcccaagagaatgcaacgaaaatgctagaggaggtcaacagaatcctcaaggaaaatggtgtctacatgctgatcacttatggggatccaagttaccgcttgcgtctcttgaaggacatggaaaaatggacagtaaagctccatgtcataggttagttagttactcaccatcaggccaattcaactgcaccttccggtatttgcagagctccaatcacattgaccttttctcatatccaaaaaagatgggagaaaagttcgaatcagaacaaatgggaactgacaaagccattgcctctagaggaccatagcacatcactagctgcacttcttggccccaaacctgatgtccactacatctatgtctgtgtaaagggcaacggtggcgcaagtgtggattctaaagctggagaagctgccaattgatttctcctataaccctctgaactgacgtgcgtaaccggtgtagcaaataatgtagagaaatagaacagatgttgtacctcgaattgatcgttgttgttttattggataataaccagcgtgtgaattgtagaacagatatcgcacctcaatttgcagttgtttcattgaataaccagtgtgtgaataatgtagaacagatgttgtaccgcttgtttcagtgtttcatgaattcgattgaccctgtcagtgatcctgtgcttgtaccggatgttctagatca

SEQ ID NO: 88794 - DNA, 1554 bp, Zea Mays
ctttctgccccgacacgccctccaaaaatccgcaagccagaacccaacccccctttccccgtccaacgtcctctagccgcctcgccgaactctctctcacacacacacagtctctctgctccacgctcgccgcttttccgctccacccctcctctctttctccctccctctctttctctctcctgccccaaccaaccaatggaggctctcgcgggcgccgcatcctcctccgttctccccgcgcgccacccgccctcccgcgtggccgcgcagtccctcgcgctccgccctagccgctgcggtcccctccgcgcggttagcgccggcggtgtcagtggcaaggacgacgcccacgccgccaacgggtctcccgtcctcaagcagctgaatagcgattccagtctaaatggagtcctaccgattgcagctgacaagtcacagaaggcttcatcaactaacgttagtactgactctagtggatctagagctggcctgtttagaacacccatatcaggtggtgtgcagagtgcaactttcgcccacggtctacctccgccggctttggctgttcgcaatttgatggaacaggcgcggtttgcccacctgtgctctgtcatgtctggcatgcaccaccgccgtactggatatccgtttggttcacttgtcgactttgctaacgattcaatgggccacccaattttttcgctgtcacccttggcaatccatacgaggaacttactcgctgacccaagatgcacgcttgttgtccaggtgcctggatggagtggactgtcgaacgcgcgagtcaccatatttggtgatgtttaccctttgccagctgaacaacaggaatgggcacataagcaatatgtagcaaaacatcagcagtgggcatcacagcagtggggaaacttttactattacaggatgcacaacataagtgacatatacttcatcgggggcttcggaactgtcgcatggatagatgttaaggagtatgaaacgattcaacctgacaagatagcagttgatggtggtgacttgcaaagtttaaaggagttgaacgctattttctctaaaccacttcgggaggtcctatcatcagaaggggaggttgatgatgctgcgcttatatcagtagatagcaaagggatagatatacgggttcgacagggtgcacagttcaatattcagaggctagcatttgatgtccctcataaggttgagactctggaggaagccaagaaagcactccacaagataatcaaagacaagcagcaaataaagtgaagttgcaggagctggctctacccatttttctggtggtgtaaggtttcattgcaaccggaccaaggattacgtaatggtagcaggtagcatgatacaagtgaaaacgatggctgtttttttaaataatgagagtctcgctctccagctgtggtgaagattgtatatatgctcgtgttgccttattaataattattattgtgcggttgcttcttgaggaaatcggaccttcttgttctctatttccggcttctggctggctacctg

SEQ ID NO: 88795 - DNA, 1570 bp, Zea Mays
ctttctgccccgacacgccctccaaaaatccgcaagccagaacccaacccccctttccccgtccaacgtcctctagccgcctcgccgaactctctctcacacacacacagtctctctgctccacgctcgccgcttttccgctccacccctcctctctttctccctccctctctttctctctcctgccccaaccaaccaatggaggctctcgcgggcgccgcatcctcctccgttctccccgcgcgccacccgccctcccgcgtggccgcgcagtccctcgcgctccgccctagccgctgcggtcccctccgcgcggttagcgccggcggtgtcagtggcaaggacgacgcccacgccgccaacgggtctcccgtcctcaagctgaatagcgattccagtctaaatggagtcctaccgattgcagctgacaagtcacagaaggcttcatcaactaacgttagtactgactctagtggatctagagctggcctgtttagaacacccatatcaggtggtgtgcagagtgcaactttcgcccacggtctacctccgccggctttggctgttcgcaatttgatggaacaggcgcggtttgcccacctgtgctctgtcatgtctggcatgcaccaccgccgtactggatatccgtttggttcacttgtcgactttgctaacgattcaatgggccacccaattttttcgctgtcacccttggcaatccatacgaggaacttactcgctgacccaagatgcacgcttgttgtccaggtgcctggatggagtggactgtcgaacgcgcgagtcaccatatttggtgatgtttaccctttgccagctgaacaacaggaatgggcacataagcaatatgtagcaaaacatcagcagtgggcatcacagcagtggggaaacttttactattacaggatgcacaacataagtgacatatacttcatcgggggcttcggaactgtcgcatggatagatgttaaggagtatgaaacgattcaacctgacaagatagcagttgatggtggtgacttgcaaagtttaaaggagttgaacgctattttctctaaaccacttcgggaggtcctatcatcagaaggggaggttgatgatgctgcgcttatatcagtagatagcaaagggatagatatacgggttcgacagggtgcacagttcaatattcagaggctagcatttgatgtccctcataaggttgagactctggaggaagccaagaaagcactccacaagataatcaaagacaagcagcaaataaagtgaagttgcaggagctggctctacccatttttctggtggtgtaaggtttcattgcaaccggaccaaggattacgtaatggtagcaggtagcatgatacaagtgaaaacgatggctgtttttttaaataatgagagtctcgctctccagctgtggtgaagattgtatatatgctcgtgttgccttattaataattattattgtgcggttgcttcttgaggaaatcggaccttcttgttctctatttccggcttctggctggctacctgggtaccagcatcttttttt

SEQ ID NO: 88796 - DNA, 602 bp, Zea Mays
ctccctccatagtccaatcgcacgtctcccggaccccggcgcttcgtttccgtccgattgatttctcccccatcccaaatcccagccctacccgacacgttccgagacgagagatccttccataccgaggcgggcgcgcggcagactgtagggtgccctagcaaggatctcgccggccccccagccatggccgaggccgccgacgcgtcgcctcctcctcccaccgtcggccgcggagaccgcaagcggggccgagcctcgccagtgctcccgccgccgccgcccgggcccccgccacccggcccgcacaagaagcgtagggaggagggcggtggcggcttcgaccggcgccggctcggcccagtcggcggcggagggcacgaacaggacgacaggaggtgagtggccgcggtgttatggagtttagcttgctgtatgcatgtatatggttgatcgcagcagatcggagcttgctatatgctctacttgttgctgtcactggaactgtatggtggtaaccggacatcgctgtttttggcttggtctatatgtgtagatcagataatagatattgtgacctgcaaagaagaaaaaaggtccaa

SEQ ID NO: 88797 - DNA, 689 bp, Zea Mays
tccaatcgcacgtctcccggaccccggcgcttcgtttccgtccgattgatttctcccccatcccaaatcccagccctacccgacacgttccgagacgagagatccttccataccgaggcgggcgcgcggcagactgtagggtgccctagcaaggatctcgccggccccccagccatggccgaggccgccgacgcgtcgcctcctcctcccaccgtcggccgcggagaccgcaagcggggccgagcctcgccagtgctcccgccgccgccgcccgggcccccgccacccggcccgcacaagaagcgtagggaggagggcggtggcggcttcgaccggcgccggctcggcccagtcggcggcggagggcacgaacaggacgacaggaggtatggaaatggtcttggtggtgtaggaggaagaggtggtgatggtcaatatacgaatcgtgcaccagattggtcggattctggacgtggtggatggaatgagggtcctgggaacagtcgtaggtacatatataaatctggattggctttatgtattcttttttacttcatgaggatcaactctttcaagattgtcatgattttcactaagatatttttctcatgcaagacaacacgagagttgcatttcattgcattattgaaggaataataggttttagtacaagggtgagaacacccacc

SEQ ID NO: 88798 - DNA, 2376 bp, Zea Mays
tccaatcgcacgtctcccggaccccggcgcttcgtttccgtccgattgatttctcccccatcccaaatcccagccctacccgacacgttccgagacgagagatccttccataccgaggcgggcgcgcggcagactgtagggtgccctagcaaggatctcgccggccccccagccatggccgaggccgccgacgcgtcgcctcctcctcccaccgtcggccgcggagaccgcaagcggggccgagcctcgccagtgctcccgccgccgccgcccgggcccccgccacccggcccgcacaagaagcgtagggaggagggcggtggcggcttcgaccggcgccggctcggcccagtcggcggcggagggcacgaacaggacgacaggaggtatggaaatggtcttggtggtgtaggaggaagaggtggtgatggtcaatatacgaatcgtgcaccagattggtcggattctggacgtggtggatggaatgagggtcctgggaacagtcgtagggaaggattgatgtcatacaagcaattcattcaggaacttgaagatgacgtttcaccagttgaagctcaaagcagatacgaggggtacaagtcagaatacatcacaactcagaagaaagcatactttgacctccataagaatgaagattggttaagaaataagtaccatcctacaaaccttgaaaatgtcattgaaagaaggaatgaactggcaagaactactgcaaatgatttcttcctaaaattgcaaagtggagatctggacatcggtccaggtttgacgggttcggcagtgagcaaatcaggaaataatagcagtaaaaatctagatgctgtggaaggggatggtaaaaagggaaaacatggaaagggttctgatgattcatattatgctgcttccaaggctcacccagttagttccgaggttcgtcgaattcgaattgacattgagcaagctcaagttctcattcgtaaacttgattctgagaagggtattgaaaacaacgttctctcaagtagtgaccatgaaaagtcagacagggataagtcacatggttcagtggggccaattgttataatacaaggatcatctactgtgaagggtcttgagggtgctgagttgctggacactcttgttacttatttatggcgtatccatggtgtggattattatggtatgtctgagacaaatgaacctaaaggcctaaggcatgtgaaagctgatgcaaggacatataatggggctagctcaaatggtgctgaatgggagaataaacttgattcattctggcaagacagaattcaaggtcaggatccattagaaatgttgaaaggaaaggagaagattgatggagctgctactgaagtcttggatccatatgtgaggaaaataagggatgagaaatatgggtggaaatatggatgtggagccaagggctgcacgaaacttttccatgccgctgagtttgtccagaagcatcttaaactgaagcatgcagacttggtggttgatctaacttcaaaagtgagagaggatatttactttgagaactatatgaatgacccaaaggcgcctggtggtacacctatcatgcagcaacctgctccaaggggaaaaggcagacaaaggccaccaatagagagtcggctgagggatgagcgtgggaatcataggttcgacaggaatgttgattcaccaaaacgtgatgggtctggtgaaaatcccgatgatcctatttatgattcgtttggtgatccagctatgcatggtgccttccctccagatatccctgctcccccggttctaatgcctgtgcctggtgctggtccgctcggaccgtttattcccgcaccacccgaagttgccatgcatatgttgagagatcagggtgcgccgccacctattgagccaaccggaggtccacatcctaggaaagcagggacgggtggtggtccttcaatgcgtggcccatccccaatctttggcgctccttcccctcatcatatgcatgatcctcgcagaatacgaagctaccaagacctcgatgctccggaggacgaagtgactgtcatggactaccgaagcttgtagacttcctccagttcttgtgcatccagatacctttgtagtcaacatttttagcgcgagagaaaaacaccttgctctttctagaatcgccgcggaggaaaccccggcaggctttttgtgtcgcgaccactgagatgtcagcttctcagtgttttgtaaaacgaaacacaggaagtacattacaacttctccccattaaacaaggtgaaagatttccatcagtgttttgtttttttggtcagcccagcattgatgtacatgtacgtaccttggcaaata

SEQ ID NO: 88799 - DNA, 3432 bp, Zea Mays
atgtggcagcgtgatgcgccgcaagaagcttccacgaagcttcatggccgctaccgcctcgagaacaagtccccattcccgaccgcaaaagcgggccgagccgaggaagaagagaacaaaacgaaacccgaagctttttcccccattcttcgctggatatacaggaggattttcagagtcagggaggggagttcgccgccgccgccggagatccgctcgccggacgagcgggccgcggcggaggaccccgccgaggcggaggcgggggaggtggtcttcgacgacgcgttcgacataccccataagaacgctccgcacgaccggttgcgccggtggaggcaagctgctcttgttcttaatgcttcacgacgttttagatatactcttgaccttaaaaaggaggaagagaaagagattataaggaggaagatccggtcccatgcgcaagttatacgggcagcatttcttttcaaagaagctgggcaaaaagatatcagagaagcttatactggtataaatcttgcaacggcctctcgcagttttccaattgaactggaaaagcttaacacattaaacagggaccatgacagtgttcttcttcaagaaattggaggagttaagggattgtcagatttgttgaagagtaatttagagaagggagttagtccaaatgaggatgaattattacaaaggaagaatgtatatggatcaaatacatatccacgcaagaagagaaaaaacatactgcgttttgtatttgaagcttgccaagatttaactcttgtcattctgatgatagctgctgccatatcactaacattgggtatgactacagagggtgttgatgaaggatggtatgatggcggaagtatctttttagccgtttttcttgtgatacttgttactgcaacaagtgattataggcaatctctacagtttcgacatctgaatgaggagaaacagaacatacaagtggaggttgttagaggtggtaaaagatttggagcttcaatctttgaccttgttgttggtgatgtagttcctctcaaaattggtgatcaagttcctgctgatggtgtcctgatatctggccattctcttgcaatagatgaatcaagtatgactggagagtcaaaagttgtccacaaggatcaaaaggcaccattcttgatgtctggttgcaaggttgcagatggctatggttctatgttggtaacaggggtgggtacaaatactgaatggggtcagttgatggctaacctttcagaagataatggtgaagaaacaccattacaggttcgcttgaatggtgttgcaacttttattggtttggtgggcttgtctgttgctggtgcagtacttgttgtgctttggataaggtattttactggacataccgaaaatcctgatgggacacctcaatttgttgctggaactactggtgtgaagcaaggatttatgggggcaattagaattttgactatcgctgtgaccattgtagttgttgctgtgcctgagggactcccattggcagtaacactgacgcttgcatattccatgaaaaagatgatgcgagacaaagctctggtgaggcggctctcgtcatgtgaaacaatgggatcagctactacaatatgcagtgataagacaggaacccttacattgaataagatgacagtcgtggaagcatattttgctggaacaaagttggatccatgtgatgatgttagccagatgtcagacagtgcagcgtcacttattattgaaggaattgcgcagaacacaacaggaactgtatttctgccagaggatgggggagcagctgaacttactggttcgcctactgaaaaggccattctttcttggggccttaagatagggatggatttcgacgatgtgaggacaaaatcttcagttattcatgtttttccatttaactcggagaagaaacgtggcgctgttgcagtacagttagatgatggtgttcacatccactggaaaggtgcagctgaaatagtgttatcatcttgcaaaagctggctttccgtcgatggctctgttcagtcaatgagtgctgagaagcacgatgaattcaagagatcaatcgaagacatgggagcgaattcattacgctgtgttgcttttgcatactgttcctttgacattgaaaagatcccaatggaagacataacaagctgggagttgcctgaggatgacctgactctgcttggcatcataggaataaaggacccctgtcgcccaggtgtaagggatgctgtacgcctgtgcactactgctggtgttaaggtgcgcatggttacaggagataatattgaaacagctaaagctatagctctggagtgtggaatactagatgcaaatagtgttatttcagagccagttgtaatcgagggaaaagtgttccgtgagatgtctgaaagtgcaagaggagaggccgccgacaagataattgtgatggggagatcctcgccaaatgataaacttttgcttgtccaagctttaaaacgaaaaggccatgttgtagctgttactggtgatggcacaaatgatgcccctgcattgcacgaggccgatataggtctttcaatgggcatttccgggacagaagttgctaaagaaagctctgacattataatcttggatgatgacttcacgtcagttgtcaaggttgttcgttggggacgatctgtctacgctaatatccagaaattcattcagttccagctcaccgtcaatgttgctgcacttgtcattaatgtggttgctgctgtgtcctctggtgatgtgcccctaaatgctgttgagcttctgtgggtgaacctcataatggacacacttggagctcttgcattagcaaccgagcctccaacagacaaccttatgaagagaaatcctgttggtcgaagggaacctcttgttacaaatatcatgtggagaaacttgtttgttcaggccctttaccaagtagcaattcttctgattttcgattttgatggagtaaggattctgcgtctgcagaatgaaagccgatctgatgctgagaagataacaaatactttcatcttcaacacatttgtattttgccagatcttcaatgagttcaatgcacgaaaacccgaggaaaagaatgtcttcaaaggggtcacgaagaatcacctgttcatgggaataatcggtataacgacagtatttcagatactgataattcagttcctggggaagttcttcaaaatagtgaggcttggttggagactatggttggtttcagttgctatcggccttgtgagttggcccctggcttatgtgggtaaatttattcctgtgcccgtaagacctcttccggactatttcaaaccccgctgttgttggaaaccgccgcgccgagacgaggaggaaggtgggcagagctaa

SEQ ID NO: 88800 - DNA, 1630 bp, Zea Mays
caagtatacatgcattttctttggaaatggatttttttatattctatgactgatagccataatgtctgcaatttaggtgcgcatggttacaggagataatattgaaacagctaaagctatagctctggagtgtggaatactagatgcaaatagtgttatttcagagccagttgtaatcgagggaaaagtgttccgtgagatgtctgaaagtgcaagaggagaggccgccgacaagataattgtgatggggagatcctcgccaaatgataaacttttgcttgtccaagctttaaaacgaaaaggccatgttgtagctgttactggtgatggcacaaatgatgcccctgcattgcacgaggccgatataggtctttcaatgggcatttccgggacagaagttgctaaagaaagctctgacattataatcttggatgatgacttcacgtcagttgtcaaggttgttcgttggggacgatctgtctacgctaatatccagaaattcattcagttccagctcaccgtcaatgttgctgcacttgtcattaatgtggttgctgctgtgtcctctggtgatgtgcccctaaatgctgttgagcttctgtgggtgaacctcataatggacacacttggagctcttgcattagcaaccgagcctccaacagacaaccttatgaagagaaatcctgttggtcgaagggaacctcttgttacaaatatcatgtggagaaacttgtttgttcaggccctttaccaagtagcaattcttctgattttcgattttgatggagtaaggattctgcgtctgcagaatgaaagccgatctgatgctgagaagataacaaatactttcatcttcaacacatttgtattttgccagatcttcaatgagttcaatgcacgaaaacccgaggaaaagaatgtcttcaaaggggtcacgaagaatcacctgttcatgggaataatcggtataacgacagtatttcagatactgataattcagttcctggggaagttcttcaaaatagtgaggcttggttggagactatggttggtttcagttgctatcggccttgtgagttggcccctggcttatgtgggtaaatttattcctgtgcccgtaagacctcttccggactatttcaaaccccgctgttgttggaaaccgccgcgccgagacgaggaggaaggtgggcagagctaaagcgcaacgagtgggcagtgtaaataggcacgtgataaaaaaatggagataaattgcactggttgattccatggtagcagcatcctggggatgtacgcataagatggcaggtagtcggcctcgtcgttttcttctaggagaagcagtcggaagaaaagaagtactatacagaagccaaacttgtctacccctatccagctggtgtgtctgctatgcggcagcgaaacttgagtcattagattgtagcctgaatgaaagcagcgctagcttgcgatgtagcagtacctttttttccctggcgatatcatctgactgtaaatttgtaaatgctttcggactacgagttgttcttatttttcatccacctcttctctacggaacgtttttttctatataagaaaataaagtcaacagagcagttctaaaacg

SEQ ID NO: 88801 - DNA, 858 bp, Zea Mays
acagcctcggcgcggccgccttgcattcttcgcgtttgtccgccagcccctccctcgttcgttccacttccacctcctccctcgcatcgcatcgcacccgccgcccgtgatctcccgcgcgcctacctacggcggccagatgagctccgcggcggccgacgccctgccgccggcgctgccgccgatcaggaccacggcggagcccgtggcctcgccctcgcctccagcggagaagggggcgcaggagcaggagcaggagcaggaggcggagcccacgacgccgacgtcggaggagagccggcttcgggcgccggccgagtgccctccggcgccgcggaagccggcgtgggcgcctccgcggccgccgccggtgccaccaacgcccgccaagcgcaggctcccgtcttccgctgcgccgtcggcgtcggcgtcgccgcgccgcgccttctaccccgtcgcccgcgacctcgccgccgtgttccgcgccctgccgcccaagaagaggatccgcgcgggctgacggccagttgcgtgccttgcgcacttgcgggcacgcaccgcgccgacctcaccggcatggtggtacagactacagagtacagacctctcgtagaaatggtgtgttggtttattatttacttgccctatgcttcttcttcttcttttttttagtgtggttgtgcgtgcgtgtgtgtgtggaatagacgaaactgtagagttgggaattgttcttatttacaggggggtgatgaattggggtggggggagagaagaaatagaaagcatgtaagagagttcgcagagatctgttcattactacattcgttatagtaaactatagctcacagttcgccaaaa

SEQ ID NO: 88802 - DNA, 2351 bp, Zea Mays
atggacccggacgacgagtccgcggcgcagcggaaagccgccgacttgcacctgccgcgcgtcacggagcctgcctccgcgcccgcacgcaccttctgcgccgcgcagcgcgtgctcagctacggtgacggccctgtcgcctccgcctcggcgcagcgctgcgcgtcgttcccgcagcgccacgggcacgggcacggccacggcgaggcggcgctcgcccctgctgcgtccttcgccgcctgggtcgacggcggcccgacgccgccttcggcggtggcagcggcactggagcgggccatgtcgcagtacgacggcgcgggcgacgcgctgccggagttcgtcggcgccggcgggggcgagggcatcttccgcgtgccgctccgcgcggcggtgcacccggcccgcccgccgccgctcgaggtgcgtccccacccgctgcgggagacgcaggtgggcgccttcctgcggacgctggtgtgcgacccgcggcggcggaagctgtgggccggcgccgagtccggggtccgggtgtggtgcctcgacgaggtgttccgcgggtggtggccaggcgccgggccgcggcgccgcggcgacgaggaggccgcgcccttcagggactccgtgccggtcccgcccgcgctctgcgccgcggtcgacagcgccaacgggctggtgtggacgggacacagggagggcaggatcagggcgtggcgcgtggaccacgccgcgcccgccggaggagaccccaccggcagcgcggccatgttcaaggaggccttcgcgtggcaggcgttcagccgcacgccggtgctcgccatcgtcgtcacgccgtacggatcggaaggaggtgcgataaaggcatggccttgggaagcccttgctaagtgcctctcatctacaccagaagaaattcatgaggctgcctcgttggttgaaaaatcctatatcgaccttaggaaccatgctacagttggtaacatgtgctctttgcctactgctgatgtgaaacacatgctcgcagaccactgccgattgaaagtttggagtgtaactagcatgacatttgctctttgggatgctaagactagggagcttttaaaagtatttggcatcgatggccaagtcgacttagctcgtcctgaggccccagtaatgccggaacaattcatagaggaagagattaaagcaaaacccacaaaaaaggagaaactgcaaggttctttaagtttctttcggaaatctaggaatgccttgatgggcgcagctgatgctgtacgcagagttgcaacaaaagggacatttgtggaagataatcggcgaaccgaagcggtggctcaagcaatgaatgggactatttggtctggttgtacagatggttcaattattgtgtgggatggaaatgggaatagactgcaagaatttcattaccatagctcttctgttcaatgcatagaggcactcggagagaggatctgggtgggctatgcaagtggtactattcaagttatggatgttgaaggtaaccttcaggcaggatggattggtcatagctgcccagtcataagcatggcagtcggcgattcttacattttttctttggcacatcatggtggcattcgaggatggtctctaagttcccctagccctcttgatgatattctacgctatgaattggctagcagggagctgtcatacacaaggctagagaaccttaaaatactggttgggacttggaatgttgcacaagagaaagcttgtcctgaagcgctaaagtcatggttgggtggtgcatttttcgatgttgggttggtggtggttggtttgcaagaggtcgagatgggtgctggagttcttgccatggcagcagccaaagaaagtgtaggacttgagggcagtaccaatgggcaatggtggatagacagtattggcaaaacacttgatgaggggatatccttccacagggttggttcaaggcagttggcaggattacttattgctgcatgggcaaggaatgaccttaagccacatgttggtgatgttgatgctgctgcagtgccatgtggctttggacgtgctattggcaacaaggtaagcgattgtcaaggcatcttcacttttttttgggtttctgaaggtaccaggtatcatctgtttggtctgtttattaccactaggcatcccctaggccctcccttctgcacaatataataaaaactttgtcagaaaaaaaggaaaagagaaactggtaatctgcatggcatttattggagatattgcaatatagaatcagcaaacttattaaaatgtgctgtttttttgttgctgtatcatggagaagcaatgtgctcgtc

SEQ ID NO: 88803 - DNA, 350 bp, Zea Mays
agccgttctgtatcaatgcctgaatgctcattagagtgtcctgttgtcgctgcaattacagcgtacgaagcttgcatggatgtcacagatagtgatcataaaccagtgagatgtacatttagcgttgatattgcgagagtagacgagctgataagaaggcaagagtatggaaaaatagtcgagtctaacaaaagggtacactctttgcttcgggagttgcattttgttccggacactatcgtcagcacaaacaacattatattggaaaaccaagaagatgtcatcctccgaataactaataactgcgaaactagtaaggctgcatttgaaatcctgtgtgaaggccaatc

SEQ ID NO: 88804 - DNA, 833 bp, Zea Mays
aagggcatcctttggctttccactttggcttgaggtccagccatcatccggcctcatcggaccaggagacacaacggaagtcgccgtgcaccacgaagacttcttcacgcaagaagagttcgtcgacggggtgcagcagagctggtggtgcgagaccaccagagacatagaggtcgtcctgtcggtgaacgtcacgggcgtcgcctcgaccgaggccgccacgcacaggatcaccgtccggcactgctgcccggcgcctccagccccgccgtccgctaacccacgcggccccattaccgactcacctagcgacgctgtgccaggtcccaagagtagccagtcgaatcacttgctgcgttctgacttcgcaaacttcggcagctccgaggtgcgcgacctgtgcggcgtgcggaagcggaacctgtagagacgagcagctcagttttgttttgcctggtgctgtggtttttttgctttctgtccgagtgtttagccggtggagtcttggatttcttgcctaagcttgggggtgggggtggggagagaagaagtggttctgctcttcatcttgttctgtacatatgcgtccctgacctctcacgtctcaccgtcctttgcatatcagatcaaaaagggaaaagaaaaaagtgtgtgtgtgcagttgttgcaaacatttttctttttacattcttacgttctagatgtggcattgaaattatgtggttagaaggtggagtacataattgtgtgtgtacttataatagaggtttacttcattgaatcaagctagtgtgaattatacacagaggcagtacatttaacttacagggcaa

SEQ ID NO: 88805 - DNA, 1396 bp, Zea Mays
atgatccaaatactttaataacagcaaaattactagtatacgaattggcgaaaacaatctgtgagatctccagacttaccgattgagcccacaccactttccgctggttataaatcacccctcacacactcattgcacagctgcaagaacagagcgaacagagcaagcagagcgagcgagctgtccggccaaaccctcacggccgcctccacaatgccgcgccatctcgcgctgctcctgcccctgctcctgctggcctcgccggcggccacgcgcctggcgtccgccgcctgcgcgggcgagaagttcccggcggggcgtgcgtacgcgtcgtgcgaggacctgccgaagctgggcgcgtcgctgcactggacgtacgacgcgtccaagagctccctgtcggtggcgttcgtggcggcgcccgcggcggcgggcgggtgggtggcgtggggcctgaaccctacgggcgagggcatggccggcgcgcaggcgctggtggcgctggcgggggccggggccgcggcgcccgccgtgcggacgtacaacatcacggggtacgtcccgctgggcaaggcctccacgccgctggacttcccggcgaccgacctcgccgcggacgccgcgggcggcaagatccgggtgtacggcaagctgcagctgcgcaaggggatgaaggccgtgaaccaggtgtggcaggtcggcgcgtcctccacgggcggcgcccccgacaagcacgcgttccaggcggacaacctcggcgccaagagcaagctcgtcctcgccggcaaggcccccgcggcggccgaggccccctcgcccgccctcgcgcccgaggccggcggcccgtccgcgggcggcgacagcggcgcgggcgcgtcctcgtccacggcgccgtccaagtcccccaacgccgccgtgcccgcggccggcgtgtccgcgcccgcgctacttgcgctcgcgctggtggggtttttggcggcggtatggtgacgcgtgaatggtggagccatcatcccggcgaaggtggcggcggcgggctggggacgaaatatcgcgctgttttctttttattggggttcgtttttaagctttgtttttggccgtgaaataaaaatagttgctgtacttgttgagctgttgtttggtagagtcatagtgacgatttattattactagcagtaccgagtctgtgatcatggccgagagattaagctcggattagcagtggccagcaagatgagctggcggccggcgctcttcagtcgccggcgatgcaggcaacgccggccggttgattagaagattttgtgcacgtttcctgatgtctccactgcacgctttgtttccaacccttttaccctttcttctgcaaggagatgattagttactctgtctc

SEQ ID NO: 88806 - DNA, 512 bp, Zea Mays
atggcgttgcggacgcctcgtgcttctagaaacattctcacctctgctccggtcagacaccgtagcttccttcctcgccgtcgccaaatgttgcaggccgcctccatgagttctgcccttggtgccgcgcccatgagcctcaccgaggcgtcgtccccgtccccgttgtcgtcgagcgggagcgatgacttcgcggccttcctcgcctccgagctcgagctcgcctccggtgctgactccgccttccctcgtgacccctcctccgttttccccgccaccgacgacgagggcgaggacgaggatctggaggagctagagggtttagaagttattgaagcacattatttatttggtgatgaatatgatgacattgagattgtgattcacccacagtctatcatacactctatggttgaaacccagttttcgctgtatgaactggcctactagttgcttgttttgttgataatgttttatctgcatcacctagcaaatggttgctttgtttttcg

SEQ ID NO: 88807 - DNA, 402 bp, Zea Mays
atggcggtgccgctgctgacaaagaagatcgtgaagaagcgggtcaagcagttcaagaggccccatctcgaccgctataagtgccttaagccaagctggcgcaggccaaagggtattgactcccgtgtcaggaggaagttcaagggatgcaccttgatgcccaacattggttacggctctgacaaatcaaccaggcactacctccccaacaagttcaagaagtttgtggtgcacaatgtctctgagctggagttgctcatgatgcacaacagaacctactgtgccgagatcgcccacaacgtttcaaccaagaagcgcaaggagattgttgaacgtgccgcgcagctcgacattgtggtcaccaacaagctcgccaggctccgcagccaggaggatgagtag

SEQ ID NO: 88808 - DNA, 1876 bp, Zea Mays
ggcagcctcctcccccaacccaagtctctctctctctcccaaaccaaaagaaggcttccacttccagctgcagcggagcatcgccagttcagagttcaccaccacgcctttgacctccagcccatagcccaatcccgcaagcatccatccacgcccaccgcacccgctataaaatctccccctctgctcccgattcgccacctaaaggaggcgcctttccccaaatccaccaccaccgagaaacaaccgcaggaaatccgctcggccctcggctccggtcactctgttgcggccacgatgaaagagggcagacccggcgccggcgactacattgccagcctgctaagctcgtcgccgaggctcgacttcggcggggaggaggaggaggactgcctggacaggttctgcggcgacccggggttcgcggctcgcgcggcgcggctgtccagcttcagcgggcagcgcttcgccgtcaccgcgggcctcttcgggctgcccccgccgctgcccgccgcgagcggcggcggcgagttcgccgggtcccgggaggcgtcgtcggtgtcggacccggcgtcggcgatgaaggacgccaatgccaagaagcggaaggcgcccgcggcggcggcggccaagggcaaaggcagggagccatctgcgcaggcacaggcaggggagccgaagggtccggacgccaagaggtgctgcaaggcggagggaggcgagggggaggaggggagccccgtgaagctgcccaagccggagcaggccggcagcgacagctccgtcgaggacggcggcgcgcagaaccagaagccgccgccgccggtgaagggaaagaatgccaagccggtggagcctcccagggactacgtccatgtccgggccaggagagggcaggctaccgacagccacagcctcgcagagagggtgagaagggagaggatcagccagaggatgaaggtccttcaggacctggtgccaggatgcaacaaggtgatcggcaaggcgctgatgctcgacgagatcataaactacgtgcagtcgctgcaacggcaggtcgagttcctctccatgaagctcgcaaccgtcaacccactggacctgagcaacctgcccacgctcctacaaaaagatatgttccaggcctgcggcgcttcggcgagctcggtcttctcgctggagagctgcagcccggggttcccgttcggcgggcaaggggacgtgttccagtccttcgtcccgaacggcctggagaacccgtgcggcggcctgaacccgctggacctggctctgtcccaggctaccggcgggcagttcggtttccaggacggaacggccggcacaaacctgcagcaaaggaactactgggaggaggaggaggaggacctgcagagcgtgttccacatcgacgacaacgggcagagccaggagcacggggcctcagcttcagcacaaagcttccatggtcagcttcaaccacaagagggccacatgaagatggagttcttctgatcgggcctcgacacccagccgccgacggccgagggagcgacctgtacatagcgaagactcgaggtacaagtacaaaagcaccagcggcggtggcggcggcggggacggaagctctgaagctatagctaacagcaagtccgtacatgtaggcccttccttgcccttggagaggcgagttcttcgctcgccgtagcgtgaaccagggggtgggcgatcgtgtgatttctttgaacgttttcgatccggcgattaatttgattgattaacacagccaccccgacgatagcgtacgtagcaatcacccgaacagtgaagctgtcacttttgtgtataagataatgcatatggtgcagatattagtatc

SEQ ID NO: 88809 - DNA, 1798 bp, Zea Mays
ggcagcctcctcccccaacccaagtctctctctctctcccaaaccaaaagaaggcttccacttccagctgcagcggagcatcgccagttcagagttcaccaccacgcctttgacctccagcccatagcccaatcccgcaagcatccatccacgcccaccgcacccgctataaaatctccccctctgctcccgattcgccacctaaaggaggcgcctttccccaaatccaccaccaccgagaaacaaccgcaggaaatccgctcggccctcggctccggtcactctgttgcggccacgatgaaagagggcagacccggcgccggcgactacattgccagcctgctaagctcgtcgccgaggctcgacttcggcggggaggaggaggaggactgcctggacaggttctgcggcgacccggggttcgcggctcgcgcggcgcggctgtccagcttcagcgggcagcgcttcgccgtcaccgcgggcctcttcgggctgcccccgccgctgcccgccgcgagcggcggcggcgagttcgccgggtcccgggaggcgtcgtcggtgtcggacccggcgtcggcgatgaaggacgccaatgccaagaagcggaaggcgcccgcggcggcggcggccaagggcaaaggcagggagccatctgcgcaggcacaggcaggggagccgaagggtccggacgccaagaggtgctgcaaggcggagggaggcgagggggaggaggggagccccgtgaagctgcccaagccggagcaggccggcagcgacagctccgtcgaggacggcggcgcgcagaaccagaagccgccgccgccggtgaagggaaagaatgccaagccggtggagcctcccagggactacgtccatgtccgggccaggagagggcaggctaccgacagccacagcctcgcagagagggtgagaagggagaggatcagccagaggatgaaggtccttcaggacctggtgccaggatgcaacaaggtgatcggcaaggcgctgatgctcgacgagatcataaactacgtgcagtcgctgcaacggcaggtcgagttcctctccatgaagctcgcaaccgtcaacccactggacctgagcaacctgcccacgctcctacaaaaagatgcctgcggcgcttcggcgagctcggtcttctcgctggagagctgcagcccggggttcccgttcggcgggcaaggggacgtgttccagtccttcgtcccgaacggcctggagaacccgtgcggcggcctgaacccgctggacctggctctgtcccaggctaccggcgggcagttcggtttccaggacggaacggccggcacaaacctgcagcaaaggaactactgggaggaggaggaggaggacctgcagagcgtgttccacatcgacgacaacgggcagagccaggagcacggggcctcagcttcagcacaaagcttccatggtcagcttcaaccacaagagggccacatgaagatggagttcttctgatcgggcctcgacacccagccgccgacggccgagggagcgacctgtacatagcgaagactcgaggcccttccttgcccttggagaggcgagttcttcgctcgccgtagcgtgaaccagggggtgggcgatcgtgtgatttctttgaacgttttcgatccggcgattaatttgattgattaacacagccaccccgacgatagcgtacgtagcaatcacccgaacagtgaagctgtcacttttgtgtataagataatgcatatggtgcagatattagtatcaccggcgcttctctctc

SEQ ID NO: 88810 - DNA, 722 bp, Zea Mays
acatatgcgatgtgaagaatttttttccatggagcccaccccgcaaccctcgaacaccgccgcccaccatgcccagctcccgtagcgccgcacacccccagaaaccggcagcgacagccgggagtacatcccaccctcccctccaacgccgccgcccgccatccccctgccctccgtagttccacgatgttggcttaggccgttgcctagggctccattcccctcccacagctctgccgccgcctcctgtcctctgaaaatggctgacctctaaaatctaaacccttcaaagcttctgtagattcacttcacatcgtccatggccgccgctgctcgcgtggcaatctcacggcccccacctctccctctcccttcctcctcgagcagcagggcgtgtaacctggttgctgggaggagcagcgaccccagcgccaccgctcgcgcggccctcccggctcccgcagcccccacctctccctttcccttcctcctccaacagcaggatgcgaaacctggtggctgggaggagcagagaccccggcgttagggcttctacctccaccgctggcgcgtataagaccaccgcgtcgacaacctcaggcgccaccgtgtttacggccccaaccgccacgacgaggttgaactccacccgtggatctctcatcgccagccatggcgctctcgtcgccgggcacccgcgactcgaggaagcgtcatcattg

SEQ ID NO: 88811 - DNA, 3722 bp, Zea Mays
acatatgcgatgtgaagaatttttttccatggagcccaccccgcaaccctcgaacaccgccgcccaccatgcccagctcccgtagcgccgcacacccccagaaaccggcagcgacagccgggagtacatcccaccctcccctccaacgccgccgcccgccatccccctgccctccgtagttccacgatgttggcttaggccgttgcctagggctccattcccctcccacagctctgccgccgcctcctgtcctctgaaaatggctgacctctaaaatctaaacccttcaaagcttctgtagattcacttcacatcgtccatggccgccgctgctcgcgtggcaatctcacggcccccacctctccctctcccttcctcctcgagcagcagggcgtgtaacctggttgctgggaggagcagcgaccccagcgccaccgctcgcgcggccctcccggctcccgcagcccccacctctccctttcccttcctcctccaacagcaggatgcgaaacctggtggctgggaggagcagagaccccggcgttagggcttctacctccaccgctggcgcgtataagaccaccgcgtcgacaacctcaggcgccaccgtgtttacggccccaaccgccacgacgaggggacgccggcaaggttgatgtcctataaatacatatattacaagcatgatccaaacctgtttggtgaatgggattttgaggtctctaatctctcttgaagtaagctacatcactaagatattgcagcccataccagaagacagaagaggtacatgatctcgatgttgttctctttatctagataaaatatccctctctctatcaatagatgcaatgacaaactattaacccttctaataatgtgaagtaaagttgtttgttcacaaattaaattacctatgctatctgatcttctcatttgtattattgttttccactacaagactcaattcatgcatgtcttttcccctctttttcactcttccttacactactgctggtcaattccatccttctatccttatttgctggtcaataaaagtaaaaagtaaatgtaccgacaattagatagcacatacaaagttgacctcatctattagcaaaagaaaaagggcactccacagtataaaggaactaaatgcagaaaagtatccaaaacttaccttattcagatatattgaatggcaagaacaattaaactgcaataatgctattaacttttgtattgtcatgagtcaagaaacaacctatctcaaatacttaggtttacggtaacatcttgtcatctttcttgcatgtctacttaccatcctaaattcttcgccttcccaactacaaataatgaaatccaagtattttatttttttccctttctctcaattaagttaccacaatcatacaagtatgacccaatacagtactagcaacaggtcaatctcatacatccctaaaaacaaagagtagcgactgttatctaccttggttaaacagctcggtatgaacacccaatgttgtggccaaaagtgttgttgctgctttcatcattcatgggccagtattatgtacaaatatctcatctcttttcatttcgaaactttttcaattgataaaaacactgaatttaacaattgtgccctttcgttctatatgatgatctcaagttccttcaccacataattgatgttgggcggtcaacatcagacttccacacattccatagccaaatgtttaaatctccttaagccaattagtttacatgaatcctagatttctggatccattattccatttgaaagttgcctaggagggggggggggtgaataggcgaaacctgaaatctataacattaaacacatactataagtcgaggttagtgttagaattaaattcaagtccggaagagaggaaaaacaactcaaacaagaatcaagcaagtggacacgatgatttgttttactgaggttcggttccaaagaacctagtccccattgaggaggtcacaaagaccgggtctatttcaaccctttccctctctcaaacggtcacttagaccgagtgagccttctccttaatcaatcgggtcactaagaccccgcaaggaccaccacacacttaggtgtctcttgctttgattacaagtcacttgggaacaagaatgagaaaggaagaaaggcaatccaagaaacaagagcgcaaaagaacatgaacacactctctcaagtcactaagtggttgagatgaattctagacttggagagggtctgatctttggaaatgtgtcttggagtgaatgcactagctcttgtattgaatgtgatctctgaaaaacttggatgccaatgggttgaggtggttgtgggtatttatagccccaaccacttggtagccgtcggccaaggctgctgacgatgggcgcaccggacagtccggtgcgccaccggacagacactgttccttgttcggtgcgccgccacgtcagccaacctttagggttatgagctggtcgaccgttggagactgtcttcttgcggcaccggacagtccggtacccctctgacttctgcgcggcactgttcatcactgtagcactttgcagagtcgaccgttgcgcagggagccgttgctccgctagcacaccggacagttcggtggcataccagacaatccaataaattatagtggagcacaccctggaattctcgagagtggttggtttgcatctgtacggtcctggtgcaccggacattgtccggtggcacaccggacagtcggtgcgcgattctacagcacactccagttcttttgctccaataaaatggtgtccctaacttgatatttttcttggtttgtgttgaaccttatgcacctgtaatacatgtattctaaacaaactagttagtccataggtttgcattggtcgtcaaccaccaaaattaattataggaaatggttagcctaatttccctttcaatctccccctttttggtgattgatgccaacacaaaccaaagcaaatataaagtgcagaaatgtaactagtttgcaattgagatgacaatgcatatgttacttggaattaaaccaattgaaagtcttaggtgaacaaggcaagagcccaaagagccctaccaacaaggcaaaaaagaggaatcagtagaagtgtttcttaggtgaacagaaattacactgaagaaaatataaaatacttaccaatgtttcttttatttgggtagatacatgaccctttttatgtgatagacacaagttttcaaacaccaatatcaataagcttagcattgagactttcatccaaaaggatagtggttgatttgatgttttagtgtatgatttgcggatcaacaagttcatggagttatgctagcccttctgttgagccaatgataatcctgagacgattctttaaatctaaatcaactcctctttctcaaaattggaatcgaaaatcaatgatatcacttatttcacatgtatctttgtttcctgaaattatattggcacctgccacatataaaaataattatatacactgcttcagttatttttctcagattttcatatgattctatgtcggctttgcctagaaatataaattacagattgtaacctgcattgtcatatttcaaatctggttatgtctcttctccatctaaagaaagtctaaaatcaatttttaaatcgcgcgca

SEQ ID NO: 88812 - DNA, 288 bp, Zea Mays
atggacacgacggcagcggtggccgcgcgcgtggcgcgtcccacgagcccgtcgcggccgcccaagacgatctgcagcatcaagtcgcaggggctcgacgaggacatggcggcgacgccgcccgtgtttggcaagggcaaggtctcctccgccgcacccgcgacctcgctccaccacaaccaccatgcagacatgccgatggacgcgatcgtctgggcgggtctccctgacgacctgctccccaaggtgctcgcctgtgtgccgaccttcctcctcttccgtcgctag

SEQ ID NO: 88813 - DNA, 197 bp, Zea Mays
gatctgggagctgaaccatggcagaacagtttgggtggagattagtagaatgccacccaggtacttcagggctctgctgaggttgtcgtctgagaggttcgagtgctttgggcaggacaatttgatctgtttcacgtcgtggaaccagggcaaaggtcttctgtatgatgttgataagaagtcttggtcgtggatta

SEQ ID NO: 88814 - DNA, 1290 bp, Zea Mays
atgcagctcgctcggccgcgaccttgccgagctccgcccctgctccacgtctcctggtcgggctctcgttctgcgcgtgacgccgctgttccctggtgctccctgctcgaccctgcttcttcttccttgagcctcgccgtgcgagttctccctggctcatgtgcctaccgccgtcggccccagtctctcgctcgcaaggtcttcccaagccgtcgtctcctgcctctggctgtcaagcgcgacgaactcgtcccgagctcgtcacaacgtctcagccctgcgtgtcgcgctagctcgcgtctatggtcgcgtccgctgaactcgccaacgccctgttgccagtccgactatcgtcgctactgcgtgcctcgctgcgcgctcgttggtggtgccgtctgttgtgcccctgcatccgcccttgtcgctagtgccaactccggccgtcgcggtatctgctccgtcctggcgccctgcgctagtgctctgcttcctggccccgcctggcctccagcttgctcaacagtactatccatttcgtcgtcatacgtctccgcgtcatgtacaataacgtcgtcgaccatgccttcgcctgctttgacgcgtcgagctccttcccgttgtgactcgcgcaccatctattcatcaaaatggaatactaatgagctcctcgcgacgcagtttctctgtgtcgtcgttcgcgccggccgcagtcgtccttcgagcagccatggcgtggtcctacttctgcttgacaccatggagctcgccctcgacgcccggcgtcctgcctactcgtgctcgcccctgtgtcaactccgtcgtcgcgtcgatatcctgctcgcgagtttctcctgcgcactatggtgctggccggtcttctcttccagctcggcgcctttccctgctacgaagttcgccgtttgtccgtacatcgcctgctacttaggtcccagccaggttgaccttgtcatggtgctggaactctcatggatccggcatgtcgtctacttggcagctccagctggccgcgtcgtcacgctgtttactccttcgacgccgtctgatgcacacctccggagctcgccggtgtcgtattttagtcagcatcatatcctgtgcgacgcactccagtatcgtttgtcgcgttttgcgcgtccttaccacctccaactttcaacgttcactgtcgttcgctacgctcaaccatgcgacaaccacgtcatccacggcatgtgttcgcgccaaaaatctgagaagattagacgtagaaggaaacaaatcagtacgtag

SEQ ID NO: 88815 - DNA, 2103 bp, Zea Mays
ctactcgattggatttaaacccgggtttgggtggcgtcgcctttcatcatttcccccctcgtgctctctctcgaaccttcttccaaagcacccgaaccctagtgatctcggaaccctagccgcgcgcggatctcggcttttccccttcctccacgccagccatggacgaggacttcgagatgcctcccgccggcgccgatgagatgatgggcgacgacgagatgggcgacttcggcggcgacgagggcccggtgatgaaggtgggcgaggagaaggaggtcggcaaggaggggctcaagaagaagctgctcaaggagggcgagggctgggagactcccgaggtcggcgacgaggttgaagtgcattacacgggcacgctccttgatgggacaaaattcgactcaagccgtgatcgtggagaacccttcaagttcaagcttggacaaggtcaagtgataaagggttgggatcaaggaatcaagaccatgaagaaaggagaaaatgctatttttaccattcctccagagctggcttatggagcatctggttcacctccaactatcccacccaatgcaaccctgcagtttgatgttgagctgctttcatggaccagtgtcaaagacatttgcaaagatggcggcatattcaagaagatccttaaagagggagagaaatgggagaacccaaaggatcctgatgaagtacttgtgaaatatgaggcccgtctggaagatggtactgttgtatccaagtctgagggggttgagtttactgtgaaagatggctacttttgtcctgccctggccaaagctgtcaaaaccatgaaaaaggcagagaaggtgctccttacagtaaagccacaatatggatttggtgagaagggtagaccagcagctggagaggaaggtgctgtgccgccaaatgcttcgctgctcattgaccttgagttgatttcatggaagactgtcacagaaattggggatgataagaaaatccttaagaaggttctcaaggagggagaaggttatgagcgtcccaacgagggtgctgttgttgaagtcaaaattatcggaaagcttcaggatggcgcggtgtttacaaagaaggggcatgacgaagagccatttaaattcaagaccgatgaagaggaagttattgccggtcttgatcgtgctgtgttgaacatgaagaagggcgaggttgctcttgtcacaattcctcctgaatatgcatttggttcaactgagtcaaagcaggatcttgctgttgttccacctaacagcacagtaatatatgaagttgagcttatttcatttgtgaaggacaaggagtcgtgggacttgaacaatgaagagaagattgaggctgctggtaagaagaaagaggaagggaatgcattgttcaaatcgggcaaatatgctagagcttccaagcgatatgagaaggctgccaagtacattgagtacgacacttcgttcagtgaagatgagaagaagcaatccaagcaactgaagatcagctgcaacctaaacaatgctgcctgcaaactgaagttgaaggattacaaggaagctgcgaagctttgcaccaaggttctggaactagacagccaaaatgtcaaggctctctacaggagggtgcaagcttacattcaacttgctgacctagagctagcagaggccgatatcaaaaaggcactggaaatcgatcctgacaacagggatgtcaagttggaatataagatcctgaaggagaagatcaaggagtacaacaagaaggacgccaaattctacagcaacatgttcgccaagatgacaaagtaactgtcactgccctaagtcagcggcgagctccacttaacccgattgatttgttgctgatgacagtgtcgctaataacaggtagcttttggggtggaggatgttgtggtgaagcgaagggattaaaaacaccgatttctgctgccgaaggacttcgcccgttgcttaacttctcgcttttcgcatactttgtagtcaattagtgtgcacggatgcttggatatgtgaaactgaggaacatgtacttcgaggattattattggttctgaatttttatgttttc

SEQ ID NO: 88816 - DNA, 2173 bp, Zea Mays
ctactcgattggatttaaacccgggtttgggtggcgtcgcctttcatcatttcccccctcgtgctctctctcgaaccttcttccaaagcacccgaaccctagtgatctcggaaccctagccgcgcgcggatctcggcttttccccttcctccacgccagccatggacgaggacttcgagatgcctcccgccggcgccgatgagatgatgggcgacgacgagatgggcgacttcggcggcgacgagggcccggtgatgaaggtgggcgaggagaaggaggtcggcaaggaggggctcaagaagaagctgctcaaggagggcgagggctgggagactcccgaggtcggcgacgaggttgaagtgcattacacgggcacgctccttgatgggacaaaattcgactcaagccgtgatcgtggagaacccttcaagttcaagcttggacaaggtcaagtgataaagggttgggatcaaggaatcaagaccatgaagaaaggagaaaatgctatttttaccattcctccagagctggcttatggagcatctggttcacctccaactatcccacccaatgcaaccctgcagtttgatgttgagctgctttcatggaccagtgtcaaagacatttgcaaagatggcggcatattcaagaagatccttaaagagggagagaaatgggagaacccaaaggatcctgatgaagtacttgtgaaatatgaggcccgtctggaagatggtactgttgtatccaagtctgagggggttgagtttactgtgaaaagggtagaccagcagctggagaggaaggtgctgtgccgccaaatgcttcgctgctcattgaccttgagttgatttcatggaagactgtcacagaaattggggatgataagaaaatccttaagaaggttctcaaggagggagaaggttatgagcgtcccaacgagggtgctgttgttgaagtcaaaattatcggaaagcttcaggatggcgcggtgtttacaaagaaggggcatgacgaagagccatttaaattcaagaccgatgaagaggaagttattgccggtcttgatcgtgctgtgttgaacatgaagaagggcgaggttgctcttgtcacaattcctcctgaatatgcatttggttcaactgagtcaaagcaggatcttgctgttgttccacctaacagcacagtaatatatgaagttgagcttatttcatttgtgaaggacaaggagtcgtgggacttgaacaatgaagagaagattgaggctgctggtaagaagaaagaggaagggaatgcattgttcaaatcgggcaaatatgctagagcttccaagcgatatgagaaggctgccaagtacattgagtacgacacttcgttcagtgaagatgagaagaagcaatccaagcaactgaagatcagctgcaacctaaacaatgctgcctgcaaactgaagttgaaggattacaaggaagctgcgaagctttgcaccaaggttctggaactagacagccaaaatgtcaaggctctctacaggagggtgcaagcttacattcaacttgctgacctagagctagcagaggccgatatcaaaaaggcactggaaatcgatcctgacaacaggtacagtctaggaaatggattctgcaaggcgggcagtactcttattacgtatcacgctgataattttggaaacaatcccagggatgtcaagttggaatataagatcctgaaggagaagatcaaggagtacaacaagaaggacgccaaattctacagcaacatgttcgccaagatgacaaagtaactgtcactgccctaagtcagcggcgagctccacttaacccgattgatttgttgctgatgacagtgtcgctaataacaggtagcttttggggtggaggatgttgtggtgaagcgaagggattaaaaacaccgatttctgctgccgaaggacttcgcccgttgcttaacttctcgcttttcgcatactttgtagtcaattagtgtgcacggatgcttggatatgtgaaactgaggaacatgtacttcgaggattattattggttctgaatttttatgttttctggttcttgttaggaccattgaatgttctctctatataattttcggacacatgttcttaataaaccacgggagcaaaagtttatgctaa

SEQ ID NO: 88817 - DNA, 1855 bp, Zea Mays
ctactcgattggatttaaacccgggtttgggtggcgtcgcctttcatcatttcccccctcgtgctctctctcgaaccttcttccaaagcacccgaaccctagtgatctcggaaccctagccgcgcgcggatctcggcttttccccttcctccacgccagccatggacgaggacttcgagatgcctcccgccggcgccgatgagatgatgggcgacgacgagatgggcgacttcggcggcgacgagggcccggtgatgaaggtgggcgaggagaaggaggtcggcaaggaggggctcaagaagaagctgctcaaggagggcgagggctgggagactcccgaggtcggcgacgaggttgaagtgcattacacgggcacgctccttgatgggacaaaattcgactcaagccgtgatcgtggagaacccttcaagttcaagcttggacaaggtcaagtgataaagggttgggatcaaggaatcaagaccatgaagaaaggagaaaatgctatttttaccattcctccagagctggcttatggagcatctggttcacctccaactatcccacccaatgcaaccctgcagtttgatgttgagctgctttcatggaccagtgtcaaagacatttgcaaagatggcggcatattcaagaagatccttaaagagggagagaaatgggagaacccaaaggatcctgatgaagtacttgtgaaatatgaggcccgtctggaagatggtactgttgtatccaagtctgagggggttgagtttactgtgaaagatggctacttttgtcctgccctggccaaagctgtcaaaaccatgaaaaaggcagagaaggtgctccttacagtaaagccacaatatggatttggtgagaagggtagaccagcagctggagaggaaggtgctgtgccgccaaatgcttcgctgctcattgaccttgagttgatttcatggaagactgtcacagaaattggggatgataagaaaatccttaagaaggttctcaaggagggagaaggttatgagcgtcccaacgagggtgctgttgttgaagtcaaaattatcggaaagcttcaggatggcgcggtgtttacaaagaaggggcatgacgaagagccatttaaattcaagaccgatgaagaggaagttattgccggtcttgatcgtgctgtgttgaacatgaagaagggcgaggttgctcttgtcacaattcctcctgaatatgcatttggttcaactgagtcaaagcaggatcttgctgttgttccacctaacagcacagtaatatatgaagttgagcttatttcatttgtgaaggacaaggagtcgtgggacttgaacaatgaagagaagatcaaggagtacaacaagaaggacgccaaattctacagcaacatgttcgccaagatgacaaagtagcttttggggtggaggatgttgtggtgaagcgaagggattaaaaacaccgatttctgctgccgaaggacttcgcccgttgcttaacttctcgcttttcgcatactttgtagtcaattagtgtgcacggatgcttggatatgtgaaactgaggaacatgtacttcgaggattattattggttctgaatttttatgttttctggttcttgttaggaccattgaatgttctctctatataattttcggacacatgttcttaataaaccacgggagcaaaagtttatgctaagaacgtctgctcatcgtaactaacaacagctgcctcaccgtcacgcactgccgtgtcaggatgtgtcaacctgaagatcacagaaactgcacaacgtttgcagatcaatgaatgggcactttggattagaggtggtaatgagct

SEQ ID NO: 88818 - DNA, 2248 bp, Zea Mays
gattggatttaaacccgggtttgggtggcgtcgcctttcatcatttcccccctcgtgctctctctcgaaccttcttccaaagcacccgaaccctagtgatctcggaaccctagccgcgcgcggatctcggcttttccccttcctccacgccagccatggacgaggacttcgagatgcctcccgccggcgccgatgagatgatgggcgacgacgagatgggcgacttcggcggcgacgagggcccggtgatgaaggtgggcgaggagaaggaggtcggcaaggaggggctcaagaagaagctgctcaaggagggcgagggctgggagactcccgaggtcggcgacgaggttgaagtgcattacacgggcacgctccttgatgggacaaaattcgactcaagccgtgatcgtggagaacccttcaagttcaagcttggacaaggtcaagtgataaagggttgggatcaaggaatcaagaccatgaagaaaggagaaaatgctatttttaccattcctccagagctggcttatggagcatctggttcacctccaactatcccacccaatgcaaccctgcagtttgatgttgagctgctttcatggaccagtgtcaaagacatttgcaaagatggcggcatattcaagaagatccttaaagagggagagaaatgggagaacccaaaggatcctgatgaagtacttgtgaaatatgaggcccgtctggaagatggtactgttgtatccaagtctgagggggttgagtttactgtgaaagatggctacttttgtcctgccctggccaaagctgtcaaaaccatgaaaaaggcagagaaggtgctccttacagtaaagccacaatatggatttggtgagaagggtagaccagcagctggagaggaaggtgctgtgccgccaaatgcttcgctgctcattgaccttgagttgatttcatggaagactgtcacagaaattggggatgataagaaaatccttaagaaggttctcaaggagggagaaggttatgagcgtcccaacgagggtgctgttgttgaagtcaaaattatcggaaagcttcaggatggcgcggtgtttacaaagaaggggcatgacgaagagccatttaaattcaagaccgatgaagaggaagttattgccggtcttgatcgtgctgtgttgaacatgaagaagggcgaggttgctcttgtcacaattcctcctgaatatgcatttggttcaactgagtcaaagcaggatcttgctgttgttccacctaacagcacagtaatatatgaagttgagcttatttcatttgtgaaggacaaggagtcgtgggacttgaacaatgaagagaagattgaggctgctggtaagaagaaagaggaagggaatgcattgttcaaatcgggcaaatatgctagagcttccaagcgatatgagaaggctgccaagtacattgagtacgacacttcgttcagtgaagatgagaagaagcaatccaagcaactgaagatcagctgcaacctaaacaatgctgcctgcaaactgaagttgaaggattacaaggaagctgcgaagctttgcaccaaggttctggaactagacagccaaaatgtcaaggctctctacaggagggtgcaagcttacattcaacttgctgacctagagctagcagaggccgatatcaaaaaggcactggaaatcgatcctgacaacagggatgtcaagttggaatataagatcctgaaggagaagatcaaggagtacaacaagaaggacgccaaattctacagcaacatgttcgccaagatgacaaagtagcttttggggtggaggatgttgtggtgaagcgaagggattaaaaacaccgatttctgctgccgaaggacttcgcccgttgcttaacttctcgcttttcgcatactttgtagtcaattagtgtgcacggatgcttggatatgtgaaactgaggaacatgtacttcgaggattattattggttctgaatttttatgttttctggttcttgttaggaccattgaatgttctctctatataattttcggacacatgttcttaataaaccacgggagcaaaagtttatgctaagaacgtctgctcatcgtaactaacaacagctgcctcaccgtcacgcactgccgtgtcaggatgtgtcaacctgaagatcacagaaactgcacaacgtttgcagatcaatgaatgggcactttggattagaggtggtaatgagct

SEQ ID NO: 88819 - DNA, 2301 bp, Zea Mays
atcatttcccccctcgtgctctctctcgaaccttcttccaaagcacccgaaccctagtgatctcggaaccctagccgcgcgcggatctcggcttttccccttcctccacgccagccatggacgaggacttcgagatgcctcccgccggcgccgatgagatgatgggcgacgacgagatgggcgacttcggcggcgacgagggcccggtgatgaaggtgggcgaggagaaggaggtcggcaaggaggggctcaagaagaagctgctcaaggagggcgagggctgggagactcccgaggtcggcgacgaggttgaagtgcattacacgggcacgctccttgatgggacaaaattcgactcaagccgtgatcgtggagaacccttcaagttcaagcttggacaaggtcaagtgataaagggttgggatcaaggaatcaagaccatgaagaaaggagaaaatgctatttttaccattcctccagagctggcttatggagcatctggttcacctccaactatcccacccaatgcaaccctgcagtttgatgttgagctgctttcatggaccagtgtcaaagacatttgcaaagatggcggcatattcaagaagatccttaaagagggagagaaatgggagaacccaaaggatcctgatgaagtacttgtgaaatatgaggcccgtctggaagatggtactgttgtatccaagtctgagggggttgagtttactgtgaaagatggctacttttgtcctgccctggccaaagctgtcaaaaccatgaaaaaggcagagaaggtgctccttacagtaaagccacaatgtgagattccatttcaaaatggatttggtgagaagggtagaccagcagctggagaggaaggtgctgtgccgccaaatgcttcgctgctcattgaccttgagttgatttcatggaagactgtcacagaaattggggatgataagaaaatccttaagaaggttctcaaggagggagaaggttatgagcgtcccaacgagggtgctgttgttgaagtcaaaattatcggaaagcttcaggatggcgcggtgtttacaaagaaggggcatgacgaagagccatttaaattcaagaccgatgaagaggaagttattgccggtcttgatcgtgctgtgttgaacatgaagaagggcgaggttgctcttgtcacaattcctcctgaatatgcatttggttcaactgagtcaaagcaggatcttgctgttgttccacctaacagcacagtaatatatgaagttgagcttatttcatttgtgaaggacaaggagtcgtgggacttgaacaatgaagagaagattgaggctgctggtaagaagaaagaggaagggaatgcattgttcaaatcgggcaaatatgctagagcttccaagcgatatgagaaggctgccaagtacattgagtacgacacttcgttcagtgaagatgagaagaagcaatccaagcaactgaagatcagctgcaacctaaacaatgctgcctgcaaactgaagttgaaggattacaaggaagctgcgaagctttgcaccaaggtacaatctattcctgcaatgcgggcgtgaattatgttgcagtaaagcaggctgaccttgtgattccttttcaggttctggaactagacagccaaaatgtcaaggctctctacaggagggtgcaagcttacattcaacttgctgacctagagctagcagaggccgatatcaaaaaggcactggaaatcgatcctgacaacagggatgtcaagttggaatataagatcctgaaggagaagatcaaggagtacaacaagaaggacgccaaattctacagcaacatgttcgccaagatgacaaagtagcttttggggtggaggatgttgtggtgaagcgaagggattaaaaacaccgatttctgctgccgaaggacttcgcccgttgcttaacttctcgcttttcgcatactttgtagtcaattagtgtgcacggatgcttggatatgtgaaactgaggaacatgtacttcgaggattattattggttctgaatttttatgttttctggttcttgttaggaccattgaatgttctctctatataattttcggacacatgttcttaataaaccacgggagcaaaagtttatgctaagaacgtctgctcatcgtaactaacaacagctgcctcaccgtcacgcactgccgtgtcaggatgtgtcaacctgaagatcacagaaactgcacaacgtttgcagatcaatgaatgggcactttggattagaggtggtaatgagct

SEQ ID NO: 88820 - DNA, 2227 bp, Zea Mays
atcatttcccccctcgtgctctctctcgaaccttcttccaaagcacccgaaccctagtgatctcggaaccctagccgcgcgcggatctcggcttttccccttcctccacgccagccatggacgaggacttcgagatgcctcccgccggcgccgatgagatgatgggcgacgacgagatgggcgacttcggcggcgacgagggcccggtgatgaaggtgggcgaggagaaggaggtcggcaaggaggggctcaagaagaagctgctcaaggagggcgagggctgggagactcccgaggtcggcgacgaggttgaagtgcattacacgggcacgctccttgatgggacaaaattcgactcaagccgtgatcgtggagaacccttcaagttcaagcttggacaaggtcaagtgataaagggttgggatcaaggaatcaagaccatgaagaaaggagaaaatgctatttttaccattcctccagagctggcttatggagcatctggttcacctccaactatcccacccaatgcaaccctgcagtttgatgttgagctgctttcatggaccagtgtcaaagacatttgcaaagatggcggcatattcaagaagatccttaaagagggagagaaatgggagaacccaaaggatcctgatgaagtacttgtgaaatatgaggcccgtctggaagatggtactgttgtatccaagtctgagggggttgagtttactgtgaaagatggctacttttgtcctgccctggccaaagctgtcaaaaccatgaaaaaggcagagaaggtgctccttacagtaaagccacaatgtgagattccatttcaaaatggatttggtgagaagggtagaccagcagctggagaggaaggtgctgtgccgccaaatgcttcgctgctcattgaccttgagttgatttcatggaagactgtcacagaaattggggatgataagaaaatccttaagaaggttctcaaggagggagaaggttatgagcgtcccaacgagggtgctgttgttgaagtcaaaattatcggaaagcttcaggatggcgcggtgtttacaaagaaggggcatgacgaagagccatttaaattcaagaccgatgaagaggaagttattgccggtcttgatcgtgctgtgttgaacatgaagaagggcgaggttgctcttgtcacaattcctcctgaatatgcatttggttcaactgagtcaaagcaggatcttgctgttgttccacctaacagcacagtaatatatgaagttgagcttatttcatttgtgaaggacaaggagtcgtgggacttgaacaatgaagagaagattgaggctgctggtaagaagaaagaggaagggaatgcattgttcaaatcgggcaaatatgctagagcttccaagcgatatgagaaggctgccaagtacattgagtacgacacttcgttcagtgaagatgagaagaagcaatccaagcaactgaagatcagctgcaacctaaacaatgctgcctgcaaactgaagttgaaggattacaaggaagctgcgaagctttgcaccaaggttctggaactagacagccaaaatgtcaaggctctctacaggagggtgcaagcttacattcaacttgctgacctagagctagcagaggccgatatcaaaaaggcactggaaatcgatcctgacaacagggatgtcaagttggaatataagatcctgaaggagaagatcaaggagtacaacaagaaggacgccaaattctacagcaacatgttcgccaagatgacaaagtagcttttggggtggaggatgttgtggtgaagcgaagggattaaaaacaccgatttctgctgccgaaggacttcgcccgttgcttaacttctcgcttttcgcatactttgtagtcaattagtgtgcacggatgcttggatatgtgaaactgaggaacatgtacttcgaggattattattggttctgaatttttatgttttctggttcttgttaggaccattgaatgttctctctatataattttcggacacatgttcttaataaaccacgggagcaaaagtttatgctaagaacgtctgctcatcgtaactaacaacagctgcctcaccgtcacgcactgccgtgtcaggatgtgtcaacctgaagatcacagaaactgcacaacgtttgcagatcaatgaatgggcactttggattagaggtggtaatgagct

SEQ ID NO: 88821 - DNA, 795 bp, Zea Mays
actctttccacttccccattggatccgcttgcccaggagagcaagttccaacaaacggttaatcaaaatgacccaacagcctaattggctccagctctctagctggtccggaacccgggtgttgtatcaagacttcaggagcagtaagtgcagtcctcttccatcccctcactcccaccgccgatccccacccagagccacagcaggtggaacgacagcccgcgccccgaccggaagcagcagccttatcgtatgctccagctccggctctggctccggagacgcagcgcatccacccggagcccgggcacagacccagacctggccgcctgcagtcgtacaccgcagtccattgaggcttccagaaagtaagcgagagagctgtagaactactcgggggccttccgcggccgcttccgctcccgatctcgggccaaactgacttagccgctccgattcgatgaggagggcacaccgaagtcagggtcgccgtctgtccaaagccaacaacagtaataggttacttcgccgagcaaatcggggaacagcgtgatgatctcggtgcctgcgacggcgggagaggcttgtggctaggttccacttgtggggaggggtaagttctgacttccgagttcgcgaggaaatggcactagctcgcttttgctccttctctctgctctcgttgttgctttcccgcacgccgcgtcgcacatgcaaaacgttggccggcgagggcccgttccggtgacaggtgtccggctacgactgcgccgatcagttggttgggcaattccg

SEQ ID NO: 88822 - DNA, 441 bp, Zea Mays
aagtcaattgcatccatgcttcgcaaagcacctgaagatgtggtttgtgagaggcattgcaagggcaacactcaaactacattgcagcgaaagaacaaggaggagaaggaaagaacagatatgtatgttgctgattttatttatgagtgtggcttaccacttaatgtcatcaactcaagggcctttgggatcatgcttgaggcggttgggcaatatggtcctaggtccaagctatcaagcacagaagcaggaaagaaggtcacaaagatacttctttcgacaaacttttggaactcagtccaagattgtattcgtgcatcacaaccactcctcattgtgttgcgaattgttgatggtgatgaaaagccagccatgccagaggttgccgctgccatggatatggcaaaagcaaagatcactttgagttttgaagattgctaa

SEQ ID NO: 88823 - DNA, 326 bp, Zea Mays
atggacacggccctgcctccagagccccatctctctcgcaccacgtcgcaactgcccccacccgcactgtccaggaggcagattttgatgttcgtgctacagcagcagctcatccaagtggcgcacacccaagccaaggcagtgagcttccccgtctccatcaccgagcaagccttgaagatcctcgttgcacacatggactcgatcggccaggggaaagtgaccatcactgcaaaacctggcgtcaagctagaaatcccagatggagcagtgattgggaataaggataattttggaaaaggaaagagaaaacaataatagatgcc

SEQ ID NO: 88824 - DNA, 95 bp, Zea Mays
atggttgagcacacatgctttaatattctcatgaagtatatgaatctgttgtatgaatttgttggtaggaagaccataagagctaaatgtttaag

SEQ ID NO: 88825 - DNA, 748 bp, Zea Mays
atcatgcagttttccttcagcttcatgtgagtttcagtcatacttatcatctactgaagcgaacccatcaaagagtgagttgctcatctatttggatgaaacaaatgtgagtttagctgacaaggagtttgatttgcttaaccggtggaaggttaactcacatagattttcaatggtgttgaggatggcaaagaagttcttaactattccaactacctctgtgtcttctgagtctacttttagcgctagtggtcgaactctagatgactatcgtagctctctaagttcttctacggtggaggcattggtgtgctcctctagttggattcgaggtgcacatgatgggagttttacatatgtggagcaagaggatgatgtcgaaaacatttcatttccaaaaagtttggtggagagcaactagattatccttttagttggagacttggagtaggactgatgctttttgtaatggattgttggatggagtctacatggctgaacctgaatggcctggacctgaatggacatcatggtcaattggtcatggctgaacctgaatggacatcatggtcatggttctcttatttgtatttatttatgttctatttctgtggacagcatggatgaactattctgtaatctgctttttagtttttggatgaagaaatgcaactatgcaaatgcaagtatctgtattaggtgcaatgaactatgcaaatgcaaatgcaagtatctgttctgtttagac

SEQ ID NO: 88826 - DNA, 1345 bp, Zea Mays
agaaatctaagtattgggctgattctgctcaagcacaggggcccatactacggtgccatcgctctcgctctctctctctctctctctctccagactccacgactccaccgctcctctgtcctctccccaccacctccttgtatctctcctccccttctggccgacgaaaccctacgcgcgcgcgctgccaagccctcgccgccgacgcctactccgactccgacgccgcagtagtgatgtacgccgacaggtcctcgggcaggaaacgctctgtaatggaccgcctcgggtcgggcggcggctcgcgctcgcggtccgacgacgcaaaaaggttttgccaggatgatgggacatggagacgtgagctttataaggattctagaggaactcagacttcatctgaacctacttccagaaatctggaatcgaacaaaaaatcccaagtgcagcaaaaggttgtgaagaaattaccagtttcagatcttcgtggaaagttatctggtgtcgcgagccagcgccctcaacttagcagtactgttcaggtcccaaaacctgtaaaagaggttattaagagcaacaaacctgttcaaaagagagaccccgctccaactactgcccctcctgacatcaagaaacccagtgcacctgcacctgtaccagcaccatctgcattaccaaagcaatcccagaacaagattgatgcttcgcttgacagtttactgaagtctcttgatctagagaagtatttgataaatttccaggctgaagaggttgatatgaaagcattggtttacatgaatgaagaagatatgaagtctttaggaattccaatgggtcccaggaaaaagatactatcagcattggctcacagaaagaacaagtcttcgaagtcattgcctaccagtaccagttgaggcatctttaagcttgtgtggtagctagacaacttgttgatcttggatatgtgcaagtgcatcatcgacctgcagagttaactccactgacgagcaagattcctatccatcaaggctgatgcggtgtataagtagagaactccgtgatgttggtagttgaaggcaaccaactgattgttgatgtccctcctattctgtgatctccggaatatttgttgatcattgggtgttaattcatgatgatgccttggggattgtttccccttgtccggcaaacccaattcttgcttcttgcgtctcaccgtctgcatatccatccaaaaagaattgagttcacagagaaatgcttgagtttaactaagttcacagaaaaataacaggcaacatttatgtctccaaacaggtttaatatgaaaatatagtatatgatt

SEQ ID NO: 88827 - DNA, 1326 bp, Zea Mays
agaaatctaagtattgggctgattctgctcaagcacaggggcccatactacggtgccatcgctctcgctctctctctctctctctctctccagactccacgactccaccgctcctctgtcctctccccaccacctccttgtatctctcctccccttctggccgacgaaaccctacgcgcgcgcgctgccaagccctcgccgccgacgcctactccgactccgacgccgcagtagtgatgtacgccgacaggtcctcgggcaggaaacgctctgtaatggaccgcctcgggtcgggcggcggctcgcgctcgcggtccgacgacgcaaaaaggttttgccaggatgatgggacatggagacgtgagctttataaggattctagaggaactcagacttcatctgaacctacttccagaaatctggaatcgaacaaaaaatcccaagtgcagcaaaaggttgtgaagaaattaccagtttcagatcttcgtggaaagttatctggtgtcgcgagccagcgccctcaacttagcagtactgttcaggtcccaaaacctgtaaaagaggttattaagagcaacaaacctgttcaaaagagagaccccgctccaactactgcccctcctgacatcaagaaacccagtgcacctgcacctgtaccagcaccatctgcattaccaaagcaatcccagaacaagattgatgcttcgcttgacagtttactgaagtctcttgatctagagaagtatttgataaatttccaggctgaagaggcacgttcgatatatgttgcaattttgtattgtgggtgtgactgggtcccaggaaaaagatactatcagcattggctcacagaaagaacaagtcttcgaagtcattgcctaccagtaccagttgaggcatctttaagcttgtgtggtagctagacaacttgttgatcttggatatgtgcaagtgcatcatcgacctgcagagttaactccactgacgagcaagattcctatccatcaaggctgatgcggtgtataagtagagaactccgtgatgttggtagttgaaggcaaccaactgattgttgatgtccctcctattctgtgatctccggaatatttgttgatcattgggtgttaattcatgatgatgccttggggattgtttccccttgtccggcaaacccaattcttgcttcttgcgtctcaccgtctgcatatccatccaaaaagaattgagttcacagagaaatgcttgagtttaactaagttcacagaaaaataacaggcaacatttatgtctccaaacaggtttaatatgaaaatatagtatatgatt

SEQ ID NO: 88828 - DNA, 1440 bp, Zea Mays
agaaatctaagtattgggctgattctgctcaagcacaggggcccatactacggtgccatcgctctcgctctctctctctctctctctctccagactccacgactccaccgctcctctgtcctctccccaccacctccttgtatctctcctccccttctggccgacgaaaccctacgcgcgcgcgctgccaagccctcgccgccgacgcctactccgactccgacgccgcagtagtgatgtacgccgacaggtcctcgggcaggaaacgctctgtaatggaccgcctcgggtcgggcggcggctcgcgctcgcggtccgacgacgcaaaaaggttttgccaggatgatgggacatggagacgtgagctttataaggattctagaggaactcagacttcatctgaacctacttccagaaatctggaatcgaacaaaaaatcccaagtgcagcaaaaggttgtgaagaaattaccagtttcagatcttcgtggaaagttatctggtgtcgcgagccagcgccctcaacttagcagtactgttcaggtcccaaaacctgtaaaagaggttattaagagcaacaaacctgttcaaaagagagaccccgctccaactactgcccctcctgacatcaagaaacccagtgcacctgcacctgtaccagcaccatctgcattaccaaagcaatcccagaacaagattgatgcttcgcttgacagtttactgaagtctcttgatctagagaagtatttgataaatttccaggctgaagaggcacgttcgatatatgttgcaattttgtattgtgggtgtgactggtgagtggtgaccttaaatattgttaatggatattcatctttcaggttgatatgaaagcattggtttacatgaatgaagaagatatgaagtctttaggaattccaatgggtcccaggaaaaagatactatcagcattggctcacagaaagaacaagtcttcgaagtcattgcctaccagtaccagttgaggcatctttaagcttgtgtggtagctagacaacttgttgatcttggatatgtgcaagtgcatcatcgacctgcagagttaactccactgacgagcaagattcctatccatcaaggctgatgcggtgtataagtagagaactccgtgatgttggtagttgaaggcaaccaactgattgttgatgtccctcctattctgtgatctccggaatatttgttgatcattgggtgttaattcatgatgatgccttggggattgtttccccttgtccggcaaacccaattcttgcttcttgcgtctcaccgtctgcatatccatccaaaaagaattgagttcacagagaaatgcttgagtttaactaagttcacagaaaaataacaggcaacatttatgtctccaaacaggtttaatatgaaaatatagtatatgattattttc

SEQ ID NO: 88829 - DNA, 3782 bp, Zea Mays
gataattttcctttgatttggggataactcgaggaaggcagctggtccatcgccggcggactggtcggcttcctgtgcggctgtgcctctctcgtccctgtttcttatgtctctctcacgttgtagtcacgtgcgtgcgtacgagcgagggtgtttcgttttggatcgttttgcagcggcccgtctcggacgccgacgcgcaacacggacagatccaccacatatatctctggcctgtgggccgccttttgacacctgcaggccgagcaccgcaccgccttccttccaccgttccgtccgtcccgtccttccccgttcctgtgcagcacaagcaccgaccctgccgtgcgcccaaccccgtgcgccgcgcatggctatggcggcggcgaccggcgcaggcgcggtgggcgaggggatgcgtcggctcacgcagctctcgcttgtctccaaggtctgctcggagctggagtcccacctcggcgtcgcggaccgcgtcctcgccgagttcgtcgtcgaactaggccgcgcctccgcctccgccgccgccttcgccgccgcgctcagggaccacggcgccgagctgccggactacctcgtccgctccctccacgccgtcatcaccgccatcccggacagcgcccccgctccccccgcctcacgtggcgctggtgcccgggggcgcgtggacaaggcggcgggagaggacgaggaccaggagccggggctgcaccaggtgcgccgggggagggtcacccgggtggccaacgccggatgcttcgttcgcctcgacggcggacgcgaggggctcgtgcacgtctcccagatgcccgcccgcggccgcggccgcgccggcgctaccgtcacgctcggccaggaagttttcgtcaaggtcgtctcggtggacggcgccaagctggggctgtcgatgctagacatcgatcaggataccgagaggggtctccatccgatgcggcgtccgcaccctgcggaggaggacgcgccgagggcaaatccgccagctgatcgccccagacccgccgggaggaagaagggggtttctgggattttcgtttccgatgaggacgacgacgacaaggctggtcctccgacgcgcagaccaactaggcggatgacctcgccggagaggtgggaggtaaagcagctgatcgcggcgggggtgttagatgccaagaactacccggtgttggatgaggatgaggaggggatgctttatcaggaggaagaagtggaggagcttgagattgaactcaatcaggatgagccccctttcttgtggggaaaagggcgatcctcatctgacatgtctccagtgaggatttccatgaatcctgaggggtcgatgagccgtgcggcagcgctacaatccgcacttactaaggagaggcgtgatattcgcacacaagagcaaagaggaatggttgatgcgatccccaaggaccttaaccggtcatgggaggatcccatttcaagtggacggtatctgatgcaggagctgatgggcacaggactatcagcgcagagtgtgccggaatggaagatgacatatgggaaggccggaacatatgggcagaagtcgaggctttcgatccaggagcagagacaaagccttccaatattcaggctgaaaaaggagctgatcagtgctgttaatgacaaccaagttttggtggttatcggtgagactggctctgggaaaacaacccaggttacacaataccttgctgaggcagggtatactacaaggggaaagattgcatgtactcaacctcgcagggttgctgcagagtcaattgcaaagcgagtagcagaggaggttggctgtcgagtgggtgaggaagttggttattctatacgctttgatgactgcacagggcctgaaaccgtcatcaagtacatgacagacggcatgctcctccgagagattttggtggatggagacctgtcttcttattcagtggtcatgcttgatgaggcacatgagagaaccatctacacagacattctcttcagcttgctaaagcagctaattaagcggagaaatgatctcaagttaatagtcacttcagccactcttgatgcggagaagttctctggttatttttttgattgcaatatcttcacgattcctggaagaacgtttccagttgagatactacatacaaaacaggcagagagtgactacatggatgctgcactgatcacggtattgcagatccatctgaccgagcccgaaggagatatcctattgttcctgactggccaggaagagattgatcatgcttgcgagcgtctccatgagaggatgaaggcattcggtggggacataccagagcttataatttgtcctgtgtacagtgctcttcctactgaagttcagtcaaagatattcgaaccggctcctccttgtaagaggaaggtggtcgtggccaccaacatagcagaagcatctattaccatagatgggatttactatgttgttgaccctggcttcgcaaagctaaatgtctataacccaaaactagggttagattcactggttatcactccgatctctcaggcgtcagctaagcaaagagcagggcgtgctggacgcacaggtccaggtaaatgttaccgcctgtacactgagagtgcctttcgcaatgaaatgccaccaacaacgattccagaaatccagagggccaacttggggtggacggttctgaatatgaaggcaatgggaataaatgaccttttgtcatttgacttcatggaccctccagcatctcaagcactcatatcggctatggaacaactgtacagtcttggtgccttagatgaagagggtcttcttactaggctagggagaaaaatggctgaatttccacaagaaccacctctttctaagatgctccttgctagtgtagaccttggatgcagtgatgaaatactgacaatcattgcaatgattcaaactgggaacatattctatcgaccaagggagaagcaagcacaagcagatcggaaaagatccaactttttccagccagaaggtgatcatctcaccctactcactgtgtatgaggcatggaaggcaaaggggttttcaggaccatggtgtgttgagaatttcattcaggtaaactcactaaggagggcacaggacgtgcggaaacagcttcttgagattatggacaagttcaagctcaatgtcatctctgccgggaacaattccaccaagatagggaaagccctcactgctggattcttcttccatgctgcaaggaaggaccccagtgacgggtaccggaccctagctgatcatcagcaagtttacatccacccgagcagtgccctctttcaccagcagccacagtgggtgatctaccatgaaattgtgatgacaacaaaagagtatatgagggatgtcacagcggtggacccaagatggctactagagttggcaccgaggtcgtacaagtcggtggacccaacgaagatcagtaagcggaagcgccaagaaaggattgaacctctctatgatagatacaatgaacccaactcgtggcgcctgagtaagcgccgctggtgatttttcatcatgtcttgcaggtctttgatgtaatgttactgtagtgtatatattaaggtgttctttcaatgcaaagactgggataatggcagcgcagtgatacatgtatagttttctcttaaatttggaagacttataaggaatatcttttcccttttaaactggatgccaactgatgatgaatttatca

SEQ ID NO: 88830 - DNA, 1361 bp, Zea Mays
ggcagaattttaatcaagaggcaaggcaatggttaagcacgcgcacgcacggggcacgacggcttaataatccctatccataacgctatcgtctccctctctccctccaatgcagctttgcaagatcatcgccattgcagatgaaaaatagaatggaaaacaaatcaaacgaaccaacgaacgaaaatggctctcgctgcgaacacgactctctctctcgaccatctagcagccggcagcggcgggaagaactggtcgatctcggcggtgtcgcagccgacgtcgccgctctcagagccgaggctctcggtgcaggcgcccgcttcgccgccccgcccgcggtgcccggcgcccacccacggcgctggccggatcatcgagagagcgctcctccgccgtccactccacggtgacacaaaacctgtacagactttccttttttctagcactacaaaagtatggaaactcccatgagaaaattcagtttacatgggaacgagcaaacctcaataagcgccacttttacggtcactaacaaccaaaaaaatccaaaattccaagaaaggtgatcatgcacactgcaggtcaagaagcactcatggcatgacacctacttccatagctggagcagcagcaggcttgctggtttcctgcagcgagatgacgctctgtcagtctcaaaggcgtcgacgagtgcctttaccttactcttcctcgcctcagcgactcggtcacgttgttgaacagccctggctcctgcttttttgtttccttcctgtcctgccaccaccgcagcacaacgacctcagcacccgtgtctctcgctacagcatcgtcaccgctcctcctacttgtgatcctgtcgcatctgctcctggatgtcgcaaatcaaaggcaccccggaattaaggggtagcagtgacatgtaactcgagtaaaatgcagatgcttacctttgcatcaaaatggtggttccttgtcactgtaaccagctgaaagagagagaaaaatatgcaagatgcagtgaatgagatgaactgcaatgaactctctgacatttataaatttctgacatgtaaaactctctatcatgcacaaattaaaatcctatgaaaggatagactgaaggattgattttcagtatttctcttagttgtgttagcagccaagtaatatatgtttaactaaatagatgcagtactatcttggttttcggtccagaaggtgaatgagtgtcaagttaacaattccaataataaaattggcattgcccgcatctgatcagcaaccacatatctcgaaatgacttgtaggataaaaataagatagagaacattgcattaatagatctaacaacattg

SEQ ID NO: 88831 - DNA, 602 bp, Zea Mays
aagaagagccagccagacgcccagcccagacataacaagccggcaataatggaggagaagaaggacctgctccgcaagctgacgatcgtgtcgatcccgttcgtgttcgtggcgatcccgtcggtggtgatcatcgtgggcatgctgtcaccgcacgcggcggagccccgggcggggtcgtcgtcgtcgggggcggcggaggcggcgccggggcagaaccactcggtgtcgatgctgagcacgatgacgggggggcagatgatcctgagctgccgcgccgccttctcgggcaactgggagtacttccactacttcatcctggacccgtacaagccgcagcgggccttcttccagccgcaggccgacccctacatcctcttctgcaagtgggggtacatgggcaacttcctccaggacgtcgtcgtcttcaacagctccgccgcgtgggcgccgcgctgccgcgtcgacaacggcggatgccgatacctcttccaggacgcccacatgttcctcatcaccgggaagcacggcggcgacaccgaggcacacagggtgaaggtggaggagacgactgaggaacagcagacgcctgcacctgctgg

SEQ ID NO: 88832 - DNA, 231 bp, Zea Mays
aggtccttgaagagaaagaaggcgatgaggaagaagaggacgaagaagatctcgaactcggcgaggcggacgaagcggaacgccctgttgacggctctcgtgaggagcaccgggtcatcctccctcctcccggccccgaccccgccccgctgctgccgcatctctcccgatcgatggaccggcagcggattcctccactgctaccaccgggtccgagacggatcggcctga

SEQ ID NO: 88833 - DNA, 3006 bp, Zea Mays
aaagaaaaagagaaagacacaaacaatgaacaagtctcatggtcatgggccagcaaaccagcgtcgtgatgcgcgtgcagctgcaggaaaaataaaaataaaaagacaaaatcagtcggcccaatagccatggaagaattgctctcctgaggtgtgctctgctgcttggtgtttttcctcctcccgttcacctcgccgtcgacggggccaggcggccgaacacatccttgacgaccgccgtcgccctactcgcagcttcctgggtttcatcggatcctctgctagcgacgagcaccccctacaccaggccgttacttgggcgccggtgccatgcccggcgggtcttcgggtccagatggtgaagtggatgcaggatttgcgaagctccagggagaggatttcgagtattacatgcaaacgtactccatcatgctgggacgcaacagcaagaaatcaacagtggatgtggatctctcgagcctcggtgggggtatgaacatctcccgccaccacgcccggatattctacgacttccagcgccgcaggttcgcgctcgatgtcattggcaagaacgggtgccttgtcgagggcgtcctgcaccttccagggaacccccctgtcaagcttgactcgcaggatctgctgcagattggggacaagaagttctacttcctactgccaacacggtccatcttcgcttcggctgctgctgctcggcatgctcctattattccacagcagcttcctcctccaccgtatgcacatgcacgggcaggccgccctcgtttgtccgagtttcatgaccgctccttcgaaggtgattatgggcgggaggttgatgagattgggaatggtatcagtgaaactgcgatgaggggaaagctggtaaagaggaacaagaagtcttctggcgacttggatatctatggtgggcatagaatcaatgtggaagcaatagggacgctaggtgaagacagtagatcagaaataagatcaaggggtgacagggatattgacaaccaacaagcccttcaagcagaagagaaggatgttgtatcatctgtggccacagtgttatctgatctctgtggccctggggaatggatgcccatggcaaaactccacaacgagcttcttgagcagttcggcaacgtgtggcaccccagcagggtccggaagtacctgacacaggacgactggtcgccgacggagacgaagggcaggccttggttcggccttctggcgcttctcaggaagtacccggagcactttgtcatcaacacgaggtccaagggcaggatgacctcggagttcgtctcgctggtctccttgctctcctagagggacggagagggggtggtgttgtgtccagtactccagtccgtgtccagaagggtcggaggtgtactggctctcgtttgcttgccccttgctgtgtttcagcagctgttatatggacccaccatgttgtgctgtagtatctcgtgtggttgaggcagctgcactggtccgtgaccgtctctgtagcgtcggcagcagtgtatggaaagcatgcgttttaagttttaacctatgctagcaattcagcagcagctcggtgattaccgtatccagcatgtatatccaatgccatacttgtaactgttgtgtggtgtcctctttgcagtttcccgactctcgtgaactacgtgagtagaaacgtctcaaaagatgtcacggccactctatataattatttattgggaaaataagtttttcagccgtaattaaccacggcatgtatagtatgccgacaatcttggctgcccacgtgtccgatgcaccgaagcatcgagatcagcataattgctccaagcgtcgctccttcggggtccctctcggtctcgcaagcatcaatgattcctcgcctctcactacacggcagacggcactacaggcctacagcacgcggcgcacgcgcgccttttggtaaacaattccaggagctacagtcacaccaccaaagcaactcggccagcgcgcgggccggggtcgcatgggcgacgccggcgacaagtgtgcgctgcggctggccgccaccgcgaggaagtggctggaggacgtccgcgtcgaccgcgaaggccgcgtccaccccgccgtagccagcggggggcaggcgctcacctggctcgcgactgccggcgcccgcgtctcgctggccgagcccggccgcgtcgtctgctcgctccgcgtgggcgccccgctcaccgacgcggaggggaggtggcacgccggggccatcgcggtggcggcggacaacgtgtgcgcggcggcggtcttcacggctctgggcgcggacgtgctcaccgtccagtacagcctgtcctacttctcgcccgcccatctcgacgtgcgtgcgatgcgtgcgtacaccacggcatagctagtcaacgcccaaacagcaacacagcacaccacactacaccccccagatctttcattttttttgttccgcgccacctgattcgatctgcgtcgctgctccggccggcctcaaatcgcaggaggaggtggagatggaggggcgagtggtgggccggaaggcggcgctggcggccgcgacggtggaggtgcggaagaaagagtccggcgagctggtggcgatctgcaggcagtggatggcacctctctcgacaacaaaggtcagcacaagcacgagcagcaagctctgaagaaatgcagaacgtctctcgccaacacacacaacggttgctgcactcctccggcaggggcggcacggcaacaccactggttgttggtagagagagaatagctgacggtgcagaggatgttgaggcgccgaggcggcgccgcgacggcttgtactctcgaggtagggaatcacttctgtgccgccggcgaggcttgttcagcctgagccttctcctgtttgttaaacgcaaacatcaaatggagaagaaattcatccataaattacatgttgaacataaatatagtgtcaaaaaa

SEQ ID NO: 88834 - DNA, 2734 bp, Zea Mays
aaagaaaaagagaaagacacaaacaatgaacaagtctcatggtcatgggccagcaaaccagcgtcgtgatgcgcgtgcagctgcaggaaaaataaaaataaaaagacaaaatcagtcggcccaatagccatggaagaattgctctcctgaggtgtgctctgctgcttggtgtttttcctcctcccgttcacctcgccgtcgacggggccaggcggccgaacacatccttgacgaccgccgtcgccctactcgcagcttcctgggtttcatcggatcctctgctagcgacgagcaccccctacaccaggccgttacttgggcgccggtgccatgcccggcgggtcttcgggtccagatggtgaagtggatgcaggatttgcgaagctccagggagaggatttcgagtattacatgcaaacgtactccatcatgctgggacgcaacagcaagaaatcaacagtggatgtggatctctcgagcctcggtggggattggggacaagaagttctacttcctactgccaacacggtccatcttcgcttcggctgctgctgctcggcatgctcctattattccacagcagcttcctcctccaccgtatgcacatgcacgggcaggccgccctcgtttgtccgagtttcatgaccgctccttcgaaggtgattatgggcgggaggttgatgagattgggaatggtatcagtgaaactgcgatgaggggaaagctggtaaagaggaacaagaagtcttctggcgacttggatatctatggtgggcatagaatcaatgtggaagcaatagggacgctaggtgaagacagtagatcagaaataagatcaaggggtgacagggatattgacaaccaacaagcccttcaagcagaagagaaggatgttgtatcatctgtggccacagtgttatctgatctctgtggccctggggaatggatgcccatggcaaaactccacaacgagcttcttgagcagttcggcaacgtgtggcaccccagcagggtccggaagtacctgacacaggacgactggtcgccgacggagacgaagggcaggccttggttcggccttctggcgcttctcaggaagtacccggagcactttgtcatcaacacgaggtccaagggcaggatgacctcggagttcgtctcgctggtctccttgctctcctagagggacggagagggggtggtgttgtgtccagtactccagtccgtgtccagaagggtcggaggtgtactggctctcgtttgcttgccccttgctgtgtttcagcagctgttatatggacccaccatgttgtgctgtagtatctcgtgtggttgaggcagctgcactggtccgtgaccgtctctgtagcgtcggcagcagtgtatggaaagcatgcgttttaagttttaacctatgctagcaattcagcagcagctcggtgattaccgtatccagcatgtatatccaatgccatacttgtaactgttgtgtggtgtcctctttgcagtttcccgactctcgtgaactacgtgagtagaaacgtctcaaaagatgtcacggccactctatataattatttattgggaaaataagtttttcagccgtaattaaccacggcatgtatagtatgccgacaatcttggctgcccacgtgtccgatgcaccgaagcatcgagatcagcataattgctccaagcgtcgctccttcggggtccctctcggtctcgcaagcatcaatgattcctcgcctctcactacacggcagacggcactacaggcctacagcacgcggcgcacgcgcgccttttggtaaacaattccaggagctacagtcacaccaccaaagcaactcggccagcgcgcgggccggggtcgcatgggcgacgccggcgacaagtgtgcgctgcggctggccgccaccgcgaggaagtggctggaggacgtccgcgtcgaccgcgaaggccgcgtccaccccgccgtagccagcggggggcaggcgctcacctggctcgcgactgccggcgcccgcgtctcgctggccgagcccggccgcgtcgtctgctcgctccgcgtgggcgccccgctcaccgacgcggaggggaggtggcacgccggggccatcgcggtggcggcggacaacgtgtgcgcggcggcggtcttcacggctctgggcgcggacgtgctcaccgtccagtacagcctgtcctacttctcgcccgcccatctcgacgtgcgtgcgatgcgaggaggtggagatggaggggcgagtggtgggccggaaggcggcgctggcggccgcgacggtggaggtgcggaagaaagagtccggcgagctggtggcgatctgcaggcagtggatggcacctctctcgacaacaaaggtcagcacaagcacgagcagcaagctctgaagaaatgcagaacgtctctcgccaacacacacaacggttgctgcactcctccggcaggggcggcacggcaacaccactggttgttggtagagagagaatagctgacggtgcagaggatgttgaggcgccgaggcggcgccgcgacggcttgtactctcgaggtagggaatcacttctgtgccgccggcgaggcttgttcagcctgagccttctcctgtttgttaaacgcaaacatcaaatggagaagaaattcatccataaattacatgttgaacataaatatagtgtcaaaaaatcagatcattcgtaagctatttatttc

SEQ ID NO: 88835 - DNA, 2721 bp, Zea Mays
aaagaaaaagagaaagacacaaacaatgaacaagtctcatggtcatgggccagcaaaccagcgtcgtgatgcgcgtgcagctgcaggaaaaataaaaataaaaagacaaaatcagtcggcccaatagccatggaagaattgctctcctgaggtgtgctctgctgcttggtgtttttcctcctcccgttcacctcgccgtcgacggggccaggcggccgaacacatccttgacgaccgccgtcgccctactcgcagcttcctgggtttcatcggatcctctgctagcgacgagcaccccctacaccaggccgttacttgggcgccggtgccatgcccggcgggtcttcgggtccagatggtgaagtggatgcaggatttgcgaagctccagggagaggatttcgagtattacatgcaaacgtactccatcatgctgggacgcaacagcaagaaatcaacagtggatgtggatctctcgagcctcggtggggattggggacaagaagttctacttcctactgccaacacggtccatcttcgcttcggctgctgctgctcggcatgctcctattattccacagcagcttcctcctccaccgtatgcacatgcacgggcaggccgccctcgtttgtccgagtttcatgaccgctccttcgaaggtgattatgggcgggaggttgatgagattgggaatggtatcagtgaaactgcgatgaggggaaagctggtaaagaggaacaagaagtcttctggcgacttggatatctatggtgggcatagaatcaatgtggaagcaatagggacgctaggtgaagacagtagatcagaaataagatcaaggggtgacagggatattgacaaccaacaagcccttcaagcagaagagaaggatgttgtatcatctgtggccacagtgttatctgatctctgtggccctggggaatggatgcccatggcaaaactccacaacgagcttcttgagcagttcggcaacgtgtggcaccccagcagggtccggaagtacctgacacaggacgactggtcgccgacggagacgaagggcaggccttggttcggccttctggcgcttctcaggaagtacccggagcactttgtcatcaacacgaggtccaagggcaggatgacctcggagttcgtctcgctggtctccttgctctcctagagggacggagagggggtggtgttgtgtccagtactccagtccgtgtccagaagggtcggaggtgtactggctctcgtttgcttgccccttgctgtgtttcagcagctgttatatggacccaccatgttgtgctgtagtatctcgtgtggttgaggcagctgcactggtccgtgaccgtctctgtagcgtcggcagcagtgtatggaaagcatgcgttttaagttttaacctatgctagcaattcagcagcagctcggtgattaccgtatccagcatgtatatccaatgccatacttgtaactgttgtgtggtgtcctctttgcagtttcccgactctcgtgaactacgtgagtagaaacgtctcaaaagatgtcacggccactctatataattatttattgggaaaataagtttttcagccgtaattaaccacggcatgtatagtatgccgacaatcttggctgcccacgtgtccgatgcaccgaagcatcgagatcagcataattgctccaagcgtcgctccttcggggtccctctcggtctcgcaagcatcaatgattcctcgcctctcactacacggcagacggcactacaggcctacagcacgcggcgcacgcgcgccttttggtaaacaattccaggagctacagtcacaccaccaaagcaactcggccagcgcgcgggccggggtcgcatgggcgacgccggcgacaagtgtgcgctgcggctggccgccaccgcgaggaagtggctggaggacgtccgcgtcgaccgcgaaggccgcgtccaccccgccgtagccagcggggggcaggcgctcacctggctcgcgactgccggcgcccgcgtctcgctggccgagcccggccgcgtcgtctgctcgctccgcgtgggcgccccgctcaccgacgcggaggggaggtggcacgccggggccatcgcggtggcggcggacaacgtgtgcgcggcggcggtcttcacggctctgggcgcggacgtgctcaccgtccagtacagcctgtcctacttctcgcccgcccatctcgacgaggaggtggagatggaggggcgagtggtgggccggaaggcggcgctggcggccgcgacggtggaggtgcggaagaaagagtccggcgagctggtggcgatctgcaggcagtggatggcacctctctcgacaacaaaggtcagcacaagcacgagcagcaagctctgaagaaatgcagaacgtctctcgccaacacacacaacggttgctgcactcctccggcaggggcggcacggcaacaccactggttgttggtagagagagaatagctgacggtgcagaggatgttgaggcgccgaggcggcgccgcgacggcttgtactctcgaggtagggaatcacttctgtgccgccggcgaggcttgttcagcctgagccttctcctgtttgttaaacgcaaacatcaaatggagaagaaattcatccataaattacatgttgaacataaatatagtgtcaaaaaatcagatcattcgtaagctatttatttc

SEQ ID NO: 88836 - DNA, 975 bp, Zea Mays
atgtcgtcctcgcactcggccaccgtcacagcactcgccgtcgccgttggcctgcaggaggggttcgccagctcgctattcgccaccgtcgccgtcttcgcctccgtggttggttcccctccccgctccccctcttcttggctcctgccgaaggtcgagcgccggaccttgatttctacagcaaggagaatagataatgtaatgtcaaatttactgtattattatggcatgtgtaatgtcgtgaaggatattttgttgcaacactactttggaaagggagtacgtggaggctcagttgaacctgaatcagatattgtgcaggcttgcagaagctttctagatcaacgacagtgcattaatgtgtggcgatttatccaaactatcaacgagagaaaagacttgacagagaacctgaagcagctacagtgcaggacactaatttttgttggtgagaattcccagttccatgctgaagctgtgcacatgactgcaaagcttgataggcgatatagcgctcttgtggaggtacaagcttgtggctcggttgtgacagaggagcaaccacacacaatgctgataccaatggagtactttctcatgggatatggactgtacaggccaagccagataaactttagccctcgtagccctctgaatccgttttgtatatcaccagagctcctctctcctgagagcaagggggttaagctaaagccaaccaagacacaagccaaccttaaagcataggaacaggtgatgagaatgcataggaactgatgtgcatcccttgatttttttttgtgctgaagtgacatagctgttgtttccgtgatgtacataagacaagaggttagtcgggtcaaggttgggtgggtggtcgattccattgatttgtagcctttaaaacagttgtacattgtcacagatttatttgttgaagggggaagaaataataaggggagatgagatgttgcc

SEQ ID NO: 88837 - DNA, 1001 bp, Zea Mays
aagaattcgactccctgcttcccattccgtgaccgcgcctcagaattttcagaagagagcagaccgccaccgaagcacacaagcagcgtcgtcagggcgtgaaggcaccaccgaatctcgggagcagcggctatggcgaggttcaacccatacgagaacaacggcggcacgtgcttggccgtcgccggcgccgactactgcgtcgtcgccgccgacacccgcctctccatcggttacagcatcctgtcccgcgaccactctaaaatctctcagctgtcagacaaatgtgttttggcttcatctgggtttcaaggtgatatcaaagctttgcagaaggctctggctgctaaggaattaatctatgaacacaataataacaagaagatgagctgcccagcaatggctcaacttctgtcaaacacactctactacaagagattcttcccatactacgctttcaatgtgttggccggactggacacccaaggtaaaggatgtgtctttacatacgatgctgttgggtcttatgagaggacaggctatagtgctcagggaacaggttcagcgttgatgatgcctgttcttgacaaccagttgaaatcccctagtcctctcctactgccagctcgggatgcagtgacacccttgtctgaatctgatgcggttgatctggtgaaggacgttttcgcatcagccactgaacgagacatatacactggagatagattggaaattgtggtcatcaacaaatctggcacacaccgagagtacattgaactgagaaaggattagtgcaatattcctgtataatggcacattagcactatcgttgttatgcataaggatatttgttctcactgtcaggtttctgtatttgaatttcgtctaaacagaaaggtgcatttgaatttccattctgttgattctagcaggaaatgattataaagaggtcgtaattcatcattttatccgatatgcttgtgatgagacacttttttgag

SEQ ID NO: 88838 - DNA, 115 bp, Zea Mays
gagaaattcgggggagaggtaccccaccttttcattgccattagtaagggcctatacatggtcaagttacatatcggttaagattgttacagaggaggagaagaggagaacacca

SEQ ID NO: 88839 - DNA, 2032 bp, Zea Mays
gcttctcgttgctgtcagaagccacctgtttttatatatagccccagtgaactcagtagcagcagcaaacgcgatgatcggatttggaactgcaattctgcatccaatccttcctctccgcgcgcgagttagtttaccttgcttcgctgcgagcttcaccaatccgggaacggaacaatgtcgatcatggagcggcgttcttcctccgacagtgacgacaccaggagctccgcggcggccggagaggctagtgccgtggtggccagcctgagcgacgacatgatggcggagatcatccgcaggctgcccgtcgactccgtggcgcggtccaagtgcgtgtccaaggcctggtgcgccaccgtctccgacggctacctccgccgcaggctcccgctgcagctgtccgtggtctacttccccgacgacgacgacgccgccgcctcagcccgcggcaaggcgcggccacggttcgcgtgcgcggactcagctgccggcggcggcgggatgctccgggaccgggacctcggcttcttcccgttcctcgacgtctccgtcgtctccgacgcctgcaacggcctgctcctgctccgcgccgccggcaccagaaggttctacgtcgtggaccccgtcacgaggcgctgggcggcgctgccgccgccgtcgaaggacccgcgcctgtccatgctcgccttcgacccatcgtcgtcgtcgtccgcctcctcgcgccgcggcggcggcggcggctaccacgtcatcaacttcacggggcggtggcgcgaccgcggcggcgaggtggaggtgttctcgtcggagacgcgggcgtgggcgctgcgcgacgccgagttcggcgtgcccgcggcctcgctctcgggctccgtgcacttccacgccggcgccgtctacgtcctggcctccgacccggactgcgtcgtgcgcatggacgtggcctccgccggaagcggcggcgacctcgcgtgcgcggtcgccgagcttcccgagcatgcggacggcgtcgacggccgcctcgcgcactccgcggggaggctgcactacatggccagcgacggcgcgcggctgctcaaggtctgggtgctcgacggggagctgcctgcgctgcggtggcggctgaagcacgccgtcaggttcggcgacgacgtcgtggagggagggcgatgctgcggcggcaggcggggcgaggtcagggtcctggcgctgcacccggagaaggacgccgtgtacgtgtggtcggcgtggaagctccggctcctggagtacgacctggcgaggaaggaggtcaccggagcgtggacgttgggcgagggcggcaggaatcgtgtcgtcaagacatggcttgtcccgtcgtcgatgtacctgtcggactgtctgcctctccctgatgctcacgtgaggcagtgctgagcgagcggtcaactgctactgtgactctttttttacgtgccgctaaaacttcttccactcgtgttctgctctgctattctgcttgttaagctggctgtttttttttacgttggccgatgcttgtaacacatacttttcgttctttggctgagcatgcctggttttttgtacagatatgttgcccattgtttcaagctcttgtgacaaagtgtatcacaaatcagggccctgcaatccctgtttctttcttcgactagttgtcaaactctgaaaattttgaccctcgatggcgcactggttttccacatttccttggcgccttttggcctcgaagaaccgatgaacactgccctataagccgaagacgccgacttgccgaggaaatcacgtcaagcaaaatctcactcttagtaaccgggaatttggccacgttactcgttccggaaacgtgggaacaatctcgttccagtaatgttaaatcctagtttttgtagcgttctatgtaccacgttcccgttcatcgatcccatcgatccggtaacctggttactaagatctcacttcaacatgcagcctcaactactagtgaactgcaccgtctcgagcaattccc

SEQ ID NO: 88840 - DNA, 766 bp, Zea Mays
ccggcggttcatataaaccgcctccacgcaacggcctcctccaccaggctagctcccccacccaaaagccccacctcctccccgtgtcaaaacctccaagtcgatcgcccaggtggccggcgaggcggcaaccgccgccgtagagacgatggaggacgcgttgggctccgcggtgggtccccacttcagcggcctccgtctcgactcgcgccgcctctccctctccccttcctcctccccctcccgctccgccagcggcaacggcacgctcgtcgccgcgccggggctcgcgttccccaaggcggaggacgggaccaggaagcccttcgtcataggcgtgtgtggaggcaccgcgtcgggcaagacgacggtgtgcgacgcgatcattcagcagcttcacgaccaccgcgtcgcgctcgtcaaccaggattcattctaccatggtttaactgaggaacagtctgagcatgtgcaagactataattttgatcatcctgatgcattcgatacagatcgacttttggagtgcatgggaaagctaacaagtggacagtccgtgaatattcctatatacgattttaagaatcacaggcgatgctctgaaaaatttaggaaggtagtgaaataaactattggtgcgaggagaataactttgttattatttatttatgatctaatttgcatacccttgtttacaacgattttttgtaagtacattgtctttataatcatcgtttttttttctgttgtgaaagctttttattta

SEQ ID NO: 88841 - DNA, 1355 bp, Zea Mays
taatcagtatgtgagatttgtcaagcctgcatttgatgcttttgtcctgccttcgaagaaatatgctgatgtgatcataccaagagggggagataaccttgttgcaattgatctaattgtgcaacatatcaacacaaaacttggccagcataacttgtgcaaagcctacccaaatgtctttgtagttcacacaactttccagataagaggaatgcatactctaattcgtgacaagaacattactacacctgactttgttttctactcagataggctgattcgtctggtggttgagcatggtcttgggcatttgccatttacagagaagcaggtggttacaccaacaggatctctttacatgggagttgacttctgcaagaagctctgtggagtgtctattattcgaagtggagaaagcatggaaaatgcactgcgtgcttgttgtaaggggataaaaataggcaaaattctatttcatcgcattggagacaatggacaacaactcatataccataagctgcccgtggatattgctgaacgccatgttttgcttttggaccctgtgcttggtacaggtaattcagctaatcaagccattgagcttcttatgagcaaaggagttcctgaggaccgtatcatttttctgactctcgtctcggcccctgaaggcatccattgtgtgtgcaagcgcttccctcatttgaagattgtaacctcagagattgatagtggattgaacgatgaatatcgtgtcataccaggacttggagagtatggtgatcgatacttcggcacagactaaccgatgactgatgctgttgtagttagcagtgtgaaaaggtactcaaattagagctgacattaccgtggcagatatactggtgtttggttgctttatggtatactggaagacaaacgtggataggtttctggtaggtgctgaaaccgtgaccgtgtggtcttgtccattatcatatgttttgataccacaaaccgttggttgtgaggcaaatttgttttttttttgcattttgaggctcctagctgaagtgcctgctcctcgtcacacaatactgttatacagccttgtgaaatgtatgactgaaccctgttcccggcatctaacagttgccgtggggtcacagctgtggttggaatgaaattcaaaggttgtgacaagacttaatgtgtgatgcagagttttgttgctttggagtatctataatgctttttgatgcattagtcgacatggattagtttacatttttcatttcccgtgcgcgcttggtccttctacccaggctcacctgagtaaatgagttcagttaactgtccccgccaaggcgccaagcaac

SEQ ID NO: 88842 - DNA, 1221 bp, Zea Mays
gattcctcccccatggatcatctctatttctctgatcaccaaatcaaccctaaaagattatttgctaattgttctatctacttcattcttcttctcatttcttccagtactaccctctattgttccatattttaggatagaaaagaattgaatgcttgcaatctatcgtatcatgactgttttttatcatgactgttttttcgtgcatttcaggatctctttacatgggagttgacttctgcaagaagctctgtggagtgtctattattcgaagtggagaaagcatggaaaatgcactgcgtgcttgttgtaaggggataaaaataggcaaaattctatttcatcgcattggagacaatggacaacaactcatataccataagctgcccgtggatattgctgaacgccatgttttgcttttggaccctgtgcttggtacaggtaattcagctaatcaagccattgagcttcttatgagcaaaggagttcctgaggaccgtatcatttttctgactctcgtctcggcccctgaaggcatccattgtgtgtgcaagcgcttccctcatttgaagattgtaacctcagagattgatagtggattgaacgatgaatatcgtgtcataccaggacttggagagtatggtgatcgatacttcggcacagactaaccgatgactgatgctgttgtagttagcagtgtgaaaaggtactcaaattagagctgacattaccgtggcagatatactggtgtttggttgctttatggtatactggaagacaaacgtggataggtttctggtaggtgctgaaaccgtgaccgtgtggtcttgtccattatcatatgttttgataccacaaaccgttggttgtgaggcaaatttgttttttttttgcattttgaggctcctagctgaagtgcctgctcctcgtcacacaatactgttatacagccttgtgaaatgtatgactgaaccctgttcccggcatctaacagttgccgtggggtcacagctgtggttggaatgaaattcaaaggttgtgacaagacttaatgtgtgatgcagagttttgttgctttggagtatctataatgctttttgatgcattagtcgacatggattagtttacatttttcatttcccgtgcgcgcttggtccttctacccaggctcacctgagtaaatgagttcagttaactgtccccgccaaggcgccaagcaac

SEQ ID NO: 88843 - DNA, 1809 bp, Zea Mays
aacacaccaccgccatgccgttcttctcagacgaccccgtcgtcctgcgcccctccctcgcctccttcaagcaggccgtccaagggcatggcggcggcctggaaggtggtgagaggcgacgcctccgggaggctcctcccggtcatctccttcttcctcggcgcggcgctgacggcggcgttcgtcttcctcggcgcaaccacggacgtgagctggcgcttcgccgcgtggggcagcggcgctcgaccaggggccggagacgaggcgaagtcgttcgcggagctggctgaggtgctgaagaacgcgtccatggaggacaagacggtgatcgtgacgtccatcaaccaggcgtacgcggcgccgggctccctgctggacctcttcctcgatagcttccgcgccggcgagggcacggcggggctgctggaccacctgctcatcgtggccgtggacccggccgcgctcgagacgtgccggtcggtgcaccgccactgctacctcctccgtccggcggccggcgcggccgacgccgacctcggcgccgccaagttcttcatgaccaaggactacctggacatgatgtgggccaggaaccggctgcagcagaccatcctggagctgggcttcagcttcctcttcacggacgtggacatcctgtggttccggaacccgatgcgccacatcgccgtcacgtccgacgtcgccatcgcctgcgactacttcaacggcgacccggacagcctgagcaaccgccccaacggcggcttcctgtacgtaaggtccgcgcgccggacggtggagttctaccgcgggtggcgggaggcgcgcgccggcttcccgcccgggaccaacgagcaggacgtcctggcgcgggtgcagctcccgctcgcccgccgcctcggcgtgcgcatgcagttcctcgacacggcgcgctgcggcggcttctgccagctcagcgacgacctgcgcggcttgtccaccatgcacgccaactgctgcactgggctagagaacaaggtgcacgacctcaggaacgtgctccaggactggcggaactacacggcggcgccgatggaggtccaaagccgcggaggggatattgtagactgcccccgcctcgagcagcccgcacgcccgccgcgaatcccgccgcacgaccgcccgtccgccgcgaatcccctctcgcaacccacaacgcccgcggcgaatccccgcgcgaaccggccgcacgaccgccagcaaccgcctccgcttgagcagccccgccgtgaatcccctccgggaacccgcaacacacatggacacccccaacagatctaccacatcccacgcgaagaaccaatgaactggcagcatcagagaataagcatggcaacaatgaggaagagaacaggatacgtcaccagagatggccatcgcgaagccacaaccgccaccgcacacgtctctccacccatcatcggcggcagtcgccgccgtcgggggcaaccttacagggaccggcccgagcagcggcgagcgctgcggggacacaccgggcaggtaattgagagcggtggtaaggaccagacagacggtggagatgctatccgcatatttgttttggtatatacacttcactatatactcaggtaccataatttggtggatcttgctgggtcagaaagaatcatcaagacaggggcagaaggggatgcaaagattcttcgaaggaactttgtaattgatctgttaagttacgaggacaattcatgccgctatgccattcctgcaaacatacaacaaagacttatcgctaaaaaggattag

SEQ ID NO: 88844 - DNA, 2335 bp, Zea Mays
ctagagagaggacgcagagatgtcaaaggaaataaatgattctgaaggaaataaatgattctgattgttatatttaagaaggaaaaaaaggcaactagtagcagcaggcaagtagtataaattatggccacgttattcgtggcgtaacaggctctcacctttagaaccgttccagactctgcgacgacgacggcggcggtgggattggtgggaaggaagaaagcttgctccctgtgttccaacgacgaccgaaccgactgcgtccatggagcgcatgccgcaggacgccgggcaggagagagtcatggcggccgctaagcagatcctgaagagccttgccgtgtccaagaacgccgccgacgacatgatgcacttcctgtcgactttcgacccgcgcctccacccgctgtcctccccggaggcggccgaggaggaggcgtccgggtccggcgctgatgatgatgatctcgaagaggaggaggagatcgccgccgcggaggaggtgatcatccggtgcgagtcctcgtcgatgacgtccggcgtgttctctgactacctgtacgccgtggacgacgccatcgccgcgtccggccgctcggcccgcgccgccgccgccgtgcacgccgccatgccgcgcctggaggaggaggcgcgcgccctgctctcttcctctccgtccctgcggcgcctctcggtgtcgtcggatgacctcggcgacgcgacgaccacgcccgacgcgtccccgcgccacgggaacgggcacggcacgctgtccccgaccgccgcggcctccgtgggcgccgtcgcggcgcgcatgctgcgcgccgggtacggcccggagctcgcgcaggtgtacgttgccgcccgccgcgatgcgctggcggactccgtggcgctcctcggcgtcgaggccgtcgccatcgaggaggtgctcaggatggagtggacggcgctggaccagaggatgcggcggtggagccacgccgtgcgggccgtggtcaggacgctcctcgccgccgagcgccagctctgcgacgaggtgttcgcggcggacgagggcctcggccacgagtgcttcgccgacgtcgccagggcctgcgtcctgcagctgctagccttcgcggacgcggtggccgtgtcgccgcgcgccaccgagaagctgtaccgcacgctcggcatgtacgaggcgctcgccgacgtgcagccggacctggaggcgctcttctcagacgacgacggcgcgcgcgagttcttcgcgtcggaggcctccagcgccgtccagcagctgggctccaccgtgcgccacaccatcgaggagttcagccaagccatccacggcgaggcgtcgcggaggcctgtccacggcggggacatccaccccatggcccgctacgtcctcaactactgcggcctcctcgccgactgccgcggcgccctggacgcggtcctcggcgacgccggcggcctggacgacgcgtcctccgacggccgcggcgccgcctcgacgccgtccgcgtgctgcatccgcgagctgctcacgctgctgctgcgcaacatcgacgacaagtcccggctgtacgacgacgccgggctgcggaacatcttcctgatgaacaacctctactacgtggtgcagaaggtgcgggagtccccgtcgctgcgcgagctcgtcggcgacgactggctccggcggtaccgcggacagatccggcagtacgagaccggctacctccgggcgtcctgggccgccgtgctgtcccagctgaggagggacgacggcgcggcggctaggccgccggccgggcacagggcgccgtcgggcccgtcggccaagagcttcaacgcggtgttccaggagctgtaccggacgcagacggcgtggaaggtggcggacgcccagctccgtgaggagctgcgcatcgcggtgtcggagcggctgatcccggcgtaccgggcgttcctcgggcagggcacccggcacccggcgagacacgtcaagtggagcctcgacgacctcgagtgctacatgctggacttcttcgaaggcgtgcagaagtttgtcaggtggtgatcaccggagcagaggatcatcaattcaccaatcagcatccatggcgagtttgggacgtgcgtgcatcgtgaactcgtggcgtatgcgctccaatctcatggcacttacgatgccgtagaatctcgtttctcctctcttctaggaaatccttttttttacactgagatagatgtagatatgcatcaaattcaggagtgtgtatataccatactctgtttttttggcttgttcatgatttagatgtggttgttatttagcttatta

SEQ ID NO: 88845 - DNA, 1957 bp, Zea Mays
aaatattaggtcggggctcgggcggggccgccggcctcgccctcgtcgccgagtcaccactcaccacacaccaaacaaagcaggggccaggggagcccacttcgaggccgcggcgttggctgtctcggtgtcatcgtctcctctcgtctcgttctcttctcctcacctccttcgtttcgcggagcagagcgagcagccgggaccggacctccagggagcgcaccgcggaggctagcgaagatgcccgggctcacggcaccgtccgactacgcggaggagccgccgcgtcacccggccctcaagatcaactccaaggagccattcaatgctgagcctcaccgatcagagctagtcgcatcttacatcaccccagtggatttcttctacaagaggaatcatggacccatccctaaagtcgaggacctctcaagatacactgtttccatttctggtctcgtcaacaagtccattcagctatcgatggctgacatttggtctcttccaaagtacaatgtcacagcaactttacagtgtgcaggaaacaggaggactgcgatgagtaacgtacggaaagtgagaggtgttgggtgggacatatctgctcttggaactgcaacttggggaggtgccaaactatctgatgtccttgagctagttggaataccaaaactcagttcagtcacgtctctaggagggaaacacgttgagtttgttagcgttgacaagtgtaaagaggaaaaaggtggtccttatacggcatctattccattaaatcaggcaacaaatcctgatgccgatgtattacttgcatatgaaatgaatggagaggtactcaaccgagaccacggatacccgctccgggttgttgtacctggagttattggtgcacgctctgtaaaatggctggacagtatcaacgtaaaagaggaggaatgccaggggttttttatgcaaaaagattacaaaatgtttccgccaaccgtggactgggacaacattaactggtcaactagaaggccacagatggatttccctgtgcagtctgctatctgtacactggaagatgtagatgttatcaaggaaggacaggctaggattgctggatatgcactttcaggtggtggccgtggcattgagagagtggatgtatcagctgatgggggtaagacctgggtcgaggctcgtagataccagaaagacaatgtggcgtatgtgtcagatggacctcaaagtgataagtgggcttgggttctctttgaggccacattagacgtaccagcgaatcctgagatcgtagttaaggcggtggactcagctgcaaacgttcagcccgagaaggtagaagacatatggaatctgaggggaatcctcaacacgtcttggcatcggatcaaaatccagagatcttcgtgcgttgaaagatctaagctgtgaaattaagtacgcagctgaccacttggagaaagcacactcactttaccattgtccctgaataataattagtcacttcaactttatgcgtctgtggagtaaggttgtacgagtgttgtggctgtgtcattatgggatttgagctcacttggtttctgtgtaaatgtcagctgctgcggtttttttttggttggtcaggtttgatatcgagaaatatccattgcattctgcgtttgaaaatactatcgcagcatagaactgttctttgggcaaatggcagctctgggaagaggtgcgcttcatatcgcagctgagaaataccaataaaagagaaagaaagatgtgaacatatatatccccttcagccgtgggaatggcaatttcagtaggcaatgatatactacctcggttcaaatatttgtagctctctagttcatttttgaatgaactaaaccgcaacaaataaaaataaactaaaccacgataaataaaaaagaacggaggaagtagttagcattaacattct

SEQ ID NO: 88846 - DNA, 2071 bp, Zea Mays
gtatttcgcagctttcctgtcacatacacatgctaaatccatgccctccacggccaccacctctaagcatgtaacgtaccgcgcgcagctgaactcggccgagcaatttctgctctgagtttgtcaggtccgagagatgggatcactcagtatggctgaaaaagctcccggcgctgcgttgccagagtcttcatgtgcatacttgcttcaagaactcaagatgatatgggatgaagttgggcaagagcagagcgaaagggagagaatactcgaagagctcgagcaggagtgccaggaagtttaccgaagaaaagtaaacagtgccaacatgtccaggatccagctgcaccaagccttagctgaatccgaggctgaatttaccaacctgctgctatccctcggagaaagatcgttcccggcacgacccgagaaaatggcaggcaccctgaaggagcagctcaattccatcacgcccgccctacaagaaatgcagatgagaaaggacgccagagtaaagcagttcgtggaggttcagactgaaacacacagaatcgcttctgaaatcgctggacggttagcgggtggagctgtcgctgtgaatgaagaggacctgtcgctaaagaagctcgaggagttccaaagcgaattgcgaaggctgaagagagaaaagagtgaccgcctctgcaaagtggaagaatacaaagttctaattcacaattttgcgaaagtgatgggaatggatccttcagagatacttgctagtgttcacccaaggttgctagatggaccaaatgagcagcagacgaagaatatcagtgatgacatccttaacaagctcaatatgactgttcagcagctaaaacaagagaagagcaatagaagggaaaagctccaaaaccttgtaaaagcattaacaaacttatggaatactctggatactcatatggaagagcgtcaaccttatgggcaaattaaggtactcgcaatgacttcagtaaacggtatgctaggtcctggaagcctcacacttgagacaattcaacaggttgaaactgaagttcagcggctgagtcagttgaaggcaagcaaaatggaagagctattcgtaaagaagagagcagaagtcgacgaaatttgcaagaaatcacacatgggcatgccttatcaaacagaaatggacaaaataatgaatctgataatgtcaggagatgtggtccatgatgatctattaaagacaatggatgaatatatatacagagcaaaagaggaggccacaagccggaaagacataatggataaggttgacaaatggatggcttcatgggatgaagaacgatggctagaagaatacagcagggatgaccgaaggtactcagtaagcagaggagcgcacaagcacttgaaaagggcagagcgtgctcgaattatagttaacaaaattccaggcttggtagaacagttaatggtcaagacacaattctgggaacaggagagaaacaagatcttctactatgatgagctcccgcttctagcaatgctgaaagactacatgttcacgctcaaagaaaaagaagaagagaaatacaggcaacgggagaataaaaagatacagactctacttgtaaagaggcatgagaattcaataatgttaaggcccaacacaagcttcagccgtccatcaagcagaggcttcaatacgagtcctggctccacatccatctggagcagccaagtttctgcaaaagttcagctgcctgactcagagaactccccagctgaaaaagatatgcgtgcaaaaataattaggaacagaggtacgcagggcattttgggaaataacagaagctgttcaatctctcatgaagataaagcagaagtctccacagtgaagcaaggcatttcaccaatttaattttttctcactttaaatttctacagaaattgtctgcctgacgtgaagttgcaacagcccccttaagctattagataagtgaagaaaagtatgtttgtatgcagcttacaccatattcatatatatatatttatttatgtatgattcattaaaatgtta

SEQ ID NO: 88847 - DNA, 1222 bp, Zea Mays
ctatcctagcccccgtgccatcgctttcctctcgttatttagccctccgttcccgaccctcatcctccgctccagacttccagcatctccgctccggctgcgctctgccttgctttcctgctacctgctctagcgcgagcgagagaggtacggcggccgatctggcggcgcaggcggagggctcggccggggccggcaagtcggcgccgaacatggggaggggccgggtcgagctcaagcggatcgagaacaagatcaaccgccaggtcaccttcgccaagcgccgcaacggcctgctcaagaaggcgtacgagctctcggtgctctgcgacgccgaggtcgcgctcatcatcttctccaaccgcggcaagctctacgagttctccagcacgcagagcatgccaaaaacacttgaaaagtaccaaaaatgcagttttgcagggcctgaaacagcactccagaatagagagaatgagcaactgaaaagtagccgcaatgagtacctcaaactgaaggcacgtgttgataatttacagcggactcaaaggaacttgcttggtgaagatcttgagtcattaggcataaaagagctggagcacctggagaagcagctcgattcgtccttgaagcacataagatctacaaggacacaacacatggttgatcaactgacagaacttcagaaaaaagaacaaatgttttgtgaagcaaataagtgtcttcgaagaagactggaggagagcaaccaggttatatggcagcatgcgtgggagcaaagcgagcggcattctgaagtgcagccgcagcagctcaatggcaataacttcttccatcccctcgatggtgctggtgaacccacccttcagatagggtatccttcagaggcactgactagctcatgcatgaccaccttcctgcccccgtggttgccatgagatcgaactactgcgcaattccgaattaataagcatggccgcatgcagctgcctgtgctatacgttgtgcttggagtgtactttaaggttcttgcatggcaagtatgtgtgtaacatttgtgatgaacatggaaactatccacttaattctcgaataatcaatgaactgggtaagattgtaacatagtgctttatgcctgaaacattaatttaggctgcgtgtgaatgatggaggttgtgttccgcgtgttcagtttactagtaacagcagtttagggttggtgagg

SEQ ID NO: 88848 - DNA, 1730 bp, Zea Mays
agtaccacatgaagaccttaatatttgggggcattttaatctttcatatatccttattcgtgacaatattatcatttgctaacaaactactccctccattcttttttatttgtcatattttaattcaaaaatgaactaacagacgacaaatatttgagaatggaggtagtattatacatcgattgaacactgaagataccactgctcatcaaattccatcgaaaagtgtccctttttattcaatagaacatgtgcaatttgtgccactagattcatccattggacccaatattgttctaccaatccatgacaaaaagaaacatttagaacggtgctaaaaacacttgccaccaccgtgttctttcgtcttactaaattgtagagttgtgggaactgatctttcaaagagaagtttctcggccatttgtcctcccaaaatctcacatgattaccatcattaagctgaaaggttccaaagctgaaaaatatcttattttactttcattagtccccccctaaatgtgaatcggttggccgcctctgtacctgaggtaaaatttggttttgtaagtatttctgcctaagcagtgtctgccaatccctcttcattcagcagattaaacaaccacttacttaataaacatctattctgtatatcaagattcttaatgcctaaacccccacatacttaggttggtaaataatattccatttgatgagcctatacttcttatgtccttccccttgccaatgttggctttattttcattcctctgtgttaagtttgcactcaatatttttcaatgacatgtgtgaattttctagatattagctgctgtatgcctgggttttcatgcctttcctatctgcagcatgccaaaaacacttgaaaagtaccaaaaatgcagttttgcagggcctgaaacagcactccagaatagagagaatgagcaactgaaaagtagccgcaatgagtacctcaaactgaaggcacgtgttgataatttacagcggactcaaaggaacttgcttggtgaagatcttgagtcattaggcataaaagagctggagcacctggagaagcagctcgattcgtccttgaagcacataagatctacaaggacacaacacatggttgatcaactgacagaacttcagaaaaaagaacaaatgttttgtgaagcaaataagtgtcttcgaagaagactggaggagagcaaccaggttatatggcagcatgcgtgggagcaaagcgagcggcattctgaagtgcagccgcagcagctcaatggcaataacttcttccatcccctcgatggtgctggtgaacccacccttcagatagggtatccttcagaggcactgactagctcatgcatgaccaccttcctgcccccgtggttgccatgagatcgaactactgcgcaattccgaattaataagcatggccgcatgcagctgcctgtgctatacgttgtgcttggagtgtactttaaggttcttgcatggcaagtatgtgtgtaacatttgtgatgaacatggaaactatccacttaattctcgaataatcaatgaactgggtaagattgtaacatagtgctttatgcctgaaacattaatttaggctgcgtgtgaatgatggaggttgtgttccgcgtgttcagtttactagtaacagcagtttagggttggtgaggaaagtgataaatttaagcagttttctagtaaca

SEQ ID NO: 88849 - DNA, 1627 bp, Zea Mays
atggaccgtatccagatttttcctcgtcttttcggcccgggaaccgcgcctcgtcgaccgggggtggaaaatatcccgtctgaaccacacgcgaacacgaagggcacgcgacggctgtggatacaacattcttctctccggcgtcgatctgctctggcggccgcttctcaccgattatccctgcaccagttcgagtttggagaagacgaacttccaccgtcttgggaccctatatcctctccttttaggtacttgttatattctaaatgttctttattacaccatgttctatttttgttggtgtttattttctgtcatgaattttgttttagttagcaatggatgtggcactaagagatcaccttagacagaggagagatgatgatgatgatgacatgatgttgttttttctccctatgctacatatattgggttctagttcaaacatagtaacggaaaagaagcgaaggcatacatcaaagttaagtggcgaagaacatgttcaggagttgctccaaggtcatttgaagaactgtcgggtagcgttcaggatggagcctgaaattttcaaatccttggcaagttatcttagaagggaggggttggtccgtgatacaaggattaaggtcgaggaaaagttagcattcttcttatacatgctcagccataatgcctcatttgaagatctaatagaagaatttgggcacagtggtgatacatatcatcgtcacatcaagcatttctttgacctagttgttcctacactctccaagcaattcctgaagccaccaaatcctaatcatgtccatcaaaaaattgaaaggaatcctaggttttatccctacttcaagaattgcattggtgcaatcgatggcactcatgtgcctatatcgatatcacctgacaaagccgctccatttaggaataggaagggcactcttactcaaaatgtaatggtagcgtgtgattttgatctcaatgtaactttcatatccactaggtgggaggggtccgcgacggatgctagagttcttagggctgcaatgaacaatggctttcaagtacctctggggaaattttatttagtagatggcggttatgccaacacaccatctttccttgccccatatcgcggagttaggtatcatttgaaggaatatggggcaggtcgtcgaagaccacaaaactacaaggagatctttaatcatcgccatgcagtgttgaggaatcatattgaaagggccttgggagttataaagaaacgcttccccatacttaaggttgccacgtttcacaaaatagaaaaccaagtgaagataccggtagcagctgccgtgttgcacaacattattcggtctctcaaaggagatgaacaatggttagaagatcaggcagaaaatgttcaaggcaatgttgttgatattccagatggagatcaaagcaatgatcaaggcagtgaacaaggcaacaatctcagagacacaattgcacaacaaatgtggattgattatcaacaatgcaattagtgatgcattataatatgttttattgttattgggattgcaataagttcttaggaaatgtagtttgtactagttatgatgttttaatgttattcgaatatgct

SEQ ID NO: 88850 - DNA, 768 bp, Zea Mays
atggaccgtatccagatttttcctcgtcttttcggcccgggaaccgcgcctcgtcgaccgggggtggaaaatatcccgtctgaaccacacgcgaacacgaagggcacgcgacggctgtggatacaacattcttctctccggcgtcgatctgctctggcggccgcttctcaccgattatccctgcaccagttcgagtttggagaagacgaacttccaccgtcttgggaccctatatcctctccttttagttaccatgcttggaagggggtctccaagattaaacatgcttgcaagggggtctcctagatttaacatgctcttatctaaaggtgcacaaaagaaaaaatctcctatagctactgcttcaaagacacatggaggctctccaaaagatctgctatctttcacttatgtccaatctttcacttgtgccggtgaatggtgatgatgcattgctgcttattgctgacggccgcctgctactgcttgctacttgtaccacgacaacaacgattgctgcttgttgttggccatgtgtgcgaggcctggtcatgcataaacaatggtgcatgtcatgaactctttaactgtagggcatttcagtgcattggatggattacttgtcctgtaatgaaacctataataatggtgcttctatgcgactgctgcaagacatcacttgtctgctatttcttgtgtaaactgaggataattatatgctgttgataaaactatatgcatgaatagaagcctgacgattcctggcct

SEQ ID NO: 88851 - DNA, 1356 bp, Zea Mays
gagcatattttccagcccagcagaggacacgagtggaggtgcggtccaggagcgtgagccggcaccaatcatgccgcttgcattgctggtaccgacccgtccccaccagtccagtctataagagcgacgggatcacggaaacctgttcaccgctgcgccgcctcactattgactgtcggattccccactcgccggcgacaaccgccgcgcccgatccgtctgctaggtcttgcacctccgggctctggccatggctgccgaagctggcccaatctccaaggtcctcatcgtcgtagcgatgcagacggaggcgatgccgctcgtccacaagttcaagctcgtcgaggcgcccgcccacgaatccacatttcctaaaggtgccccatgggttaggtaccatggcaactacaaaggcctccacattgaccttgtattgcctggaaaggatgctgttttaggagtcgacagtgttggtacggtatcggcagctcttttgactagtttttccattcaaacattgaagccagaccttatcattaatgctggcactgctggtggcttcaaggtatgaactaaaactttgtttatgtttgccttatatgtttggattcagtactccatttgaacatttgctctcttgtgtttaggccaaaggggcaagcattggagatgtattcctggcatcagatgtttcattccatgacaggaggataccaatacctgtttttgacatgtatggaattggagcacggaaaacttctgcagttcctaatatcttgaaggaactcaatttgaagattggcaaattgtcgactggggattctctggatatgtctccccaggatgagaaggtgatactgagcaatgatgctacagtaaaggatatggagggagctgctgtggcatatgtcgccgacatgttttcaacgccagcgatctttgtgaaagccgtgactgatatcgtggatggggagaagccaacatctgaggagtttctgcagaacctgattgccgtgacggcggcactggacctggcagtcaccaaagtggtggatttcatcagcgggaaacgcatctctgatctttgaaggctgtcatgaaatccgacacccccactgctctgatgcacgatgctaggctacgaacaatacaacattgggtcaacgattttttgtgaggtgttttctatgtgaggttaaaccttcttaaccctgtgtacaaaattcctgccaattgctatgggccggccatagcgtggaattttgtagaataatttgcaaaatgtattttgtggtgcaaatatcgatatataataatatgctgggggacgggatccccgtgggattagatgaaaga

SEQ ID NO: 88852 - DNA, 1675 bp, Zea Mays
attttccagcccagcagaggacacgagtggaggtgcggtccaggagcgtgagccggcaccaatcatgccgcttgcattgctggtaccgacccgtccccaccagtccagtctataagagcgacgggatcacggaaacctgttcaccgctgcgccgcctcactattgactgtcggattccccactcgccggcgacaaccgccgcgcccgatccgtctgctaggtcttgcacctccgggctctggccatggctgccgaagctggcccaatctccaaggtcctcatcgtcgtagcgatgcagacggaggcgatgccgctcgtccacaagttcaagctcgtcgaggcgcccgcccacgaatccacatttcctaaaggtgccccatgggttaggtaccatggcaactacaaaggcctccacattgaccttgtattgcctggaaaggatgctgttttaggagtcgacagtgttggtacggtatcggcagctcttttgactagtttttccattcaaacattgaagccagaccttatcattaatgctggcactgctggtggcttcaaggccaaaggggcaagcattggagatgtattcctggcatcagatgtttcattccatgacaggaggataccaatacctgtttttgacatgtatggaattggagcacggaaaacttctgcagttcctaatatcttgaaggaactcaatttgaagattggcaaattgtcgactggggattctctggatatgtctccccaggatgagaaggtgatactgagcaatgatgctacagtaaaggatatggagggagctgctgtggcatatgtcgccgacatgttttcaacgccagcgatctttgtgaaagccgtgactgatatcgtggatggggagaagccaacatctgaggagtttctgcagaacctgattgccgtgacggcggcactggacctggcagtcaccaaagtggtggatttcatcagcgggaaacgcatctctgatctttgaaggctgtcatgaaatccgacacccccactgctctgatgcacgatgctaggctacgaacaatacaacattgggtcaacgattttttgtgaggtgttttctatgtgaggttaaaccttcttaaccctgtgtacaaaattcctgccaattgctatgggccggccatagcgtggaattttgtagaataatttgcaaaatgtattttgtggtgcaaatatcgatatataataatatgctgggggacgggatccccgtgggattagatgaaagaccgtgtgactgtgcctcactgaaccatgattcccttttttgtccagggcggacctaggtagtgcctagtgaggatacggaggtgtcctactcctaatccagatgttggaacggggatgtttggagcaacgtggactcggggccaagaaaggagcagtgtcagtcttgtcattgttgtctaagggtgtgtttagtttacttttggctttaacttttgcttcgtaaaagccaaaagctaaattaaaaagctggatctagaaagcagttttttctgaaaactgactttctcgtattataaaattgaaagcatgggattttcttttagcagcttttatagatggaattgttcaaatatatatgaaataatttttaacggttttagtggatttcactaaataatttttagct

SEQ ID NO: 88853 - DNA, 1601 bp, Zea Mays
gcaccaatcatgccgcttgcattgctggtaccgacccgtccccaccagtccagtctataagagcgacgggatcacggaaacctgttcaccgctgcgccgcctcactattgactgtcggattccccactcgccggcgacaaccgccgcgcccgatccgtctgctaggtcttgcacctccgggctctggccatggctgccgaagctggcccaatctccaaggtcctcatcgtccgatgcagacggaggcgatgccgctcgtccacaagttcaagctcgtcgaggcgcccgcccacgaatccacatttcctaaaggtgccccatgggttaggtaccatggcaactacaaaggcctccacattgaccttgtattgcctggaaaggatgctgttttaggagtcgacagtgttggtacggtatcggcagctcttttgactagtttttccattcaaacattgaagccagaccttatcattaatgctggcactgctggtggcttcaaggccaaaggggcaagcattggagatgtattcctggcatcagatgtttcattccatgacaggaggataccaatacctgtttttgacatgtatggaattggagcacggaaaacttctgcagttcctaatatcttgaaggaactcaatttgaagattggcaaattgtcgactggggattctctggatatgtctccccaggatgagaaggtgatactgagcaatgatgctacagtaaaggatatggagggagctgctgtggcatatgtcgccgacatgttttcaacgccagcgatctttgtgaaagccgtgactgatatcgtggatggggagaagccaacatctgaggagtttctgcagaacctgattgccgtgacggcggcactggacctggcagtcaccaaagtggtggatttcatcagcgggaaacgcatctctgatctttgaaggctgtcatgaaatccgacacccccactgctctgatgcacgatgctaggctacgaacaatacaacattgggtcaacgattttttgtgaggtgttttctatgtgaggttaaaccttcttaaccctgtgtacaaaattcctgccaattgctatgggccggccatagcgtggaattttgtagaataatttgcaaaatgtattttgtggtgcaaatatcgatatataataatatgctgggggacgggatccccgtgggattagatgaaagaccgtgtgactgtgcctcactgaaccatgattcccttttttgtccagggcggacctaggtagtgcctagtgaggatacggaggtgtcctactcctaatccagatgttggaacggggatgtttggagcaacgtggactcggggccaagaaaggagcagtgtcagtcttgtcattgttgtctaagggtgtgtttagtttacttttggctttaacttttgcttcgtaaaagccaaaagctaaattaaaaagctggatctagaaagcagttttttctgaaaactgactttctcgtattataaaattgaaagcatgggattttcttttagcagcttttatagatggaattgttcaaatatatatgaaataatttttaacggttttagtggatttcact

SEQ ID NO: 88854 - DNA, 1823 bp, Zea Mays
gcaccaatcatgccgcttgcattgctggtaccgacccgtccccaccagtccagtctataagagcgacgggatcacggaaacctgttcaccgctgcgccgcctcactattgactgtcggattccccactcgccggcgacaaccgccgcgcccgatccgtctgctaggtcttgcacctccgggctctggccatggctgccgaagctggcccaatctccaaggtcctcatcgtcgtagcgatgcagacggaggcgatgccgctcgtccacaagttcaagctcgtcgaggcgcccgcccacgaatccacatttcctaaaggtgccccatgggttaggtaccatggcaactacaaaggcctccacattgaccttgtattgcctggaaaggatgctgttttaggagtcgacagtgttggtacggtatcggcagctcttttgactagtttttccattcaaacattgaagccagaccttatcattaatgctggcactgctggtggcttcaaggccaaaggggcaagcattggagatgtattcctggcatcagatgtttcattccatgacaggaggataccaatacctgtttttgacatgtatggaattggagcacggaaaacttctgcagttcctaatatcttgaaggaactcaatttgaaggtgagctgtagctgtgtcttgttgccaaattgctgagtcattttcttgcatgttgtgtttggagaagtatgcctcttgttatttccgtttagtgggacaaatttttttgataaattttgtagttctatgggcgaacttctgagcttctagcaatctatgggcgaacctgaatatgacttgtcttaccgagaacttcatttcagattggcaaattgtcgactggggattctctggatatgtctccccaggatgagaaggtgatactgagcaatgatgctacagtaaaggatatggagggagctgctgtggcatatgtcgccgacatgttttcaacgccagcgatctttgtgaaagccgtgactgatatcgtggatggggagaagccaacatctgaggagtttctgcagaacctgattgccgtgacggcggcactggacctggcagtcaccaaagtggtggatttcatcagcgggaaacgcatctctgatctttgaaggctgtcatgaaatccgacacccccactgctctgatgcacgatgctaggctacgaacaatacaacattgggtcaacgattttttgtgaggtgttttctatgtgaggttaaaccttcttaaccctgtgtacaaaattcctgccaattgctatgggccggccatagcgtggaattttgtagaataatttgcaaaatgtattttgtggtgcaaatatcgatatataataatatgctgggggacgggatccccgtgggattagatgaaagaccgtgtgactgtgcctcactgaaccatgattcccttttttgtccagggcggacctaggtagtgcctagtgaggatacggaggtgtcctactcctaatccagatgttggaacggggatgtttggagcaacgtggactcggggccaagaaaggagcagtgtcagtcttgtcattgttgtctaagggtgtgtttagtttacttttggctttaacttttgcttcgtaaaagccaaaagctaaattaaaaagctggatctagaaagcagttttttctgaaaactgactttctcgtattataaaattgaaagcatgggattttcttttagcagcttttatagatggaattgttcaaatatatatgaaataatttttaacggttttagtggatttcactaaataatttttagct

SEQ ID NO: 88855 - DNA, 608 bp, Zea Mays
ggcaaagcagacaaaacttggaagccatggtcttgccgtttctggcaaactccctaactcctctaccacaccacactgtgtacatatccaatgctggtgcgaaacgcgtcttcccgccgagctcttcgtctttcgggagagagggccggccgaacactgacgcgacagccggatacaacgagtcagcgagcagcggtgtatcctttacccaccggtatatgtggagcagaagatggaggacacaggactacacgaggcatggagcccaccgctcctgctgccatatccacaaccttcgcaggaagggatccatccatcgcttctgggtcgccggctcgccgtcacccgcctcgtcaagatttgttctgatcctctctttatacccgtccttccgtctagttgctcgcagcagcgaagtgacaaagctcattcacattgcgaggctgttgtttgggggccaggatcggcttgggaaggaggaatggaggcagcggtggggcagccgcagccgaagaaaggcaaggggaagaggaagcgcggcccgagggagctgcggctgatcaaggaccgcaccatccggaaggtgcgcttctccaagcgctagagcg

SEQ ID NO: 88856 - DNA, 599 bp, Zea Mays
gggcacacacgcagtcacgcaagtacgcacggcattcgcaactcgcaacccacaaaaggccacggtgaccgctgccggactagcctgccgcacaacgatccgggcgcgcccgtccctggcccagaagaccccaacgccgggcgcgcgtccccatccgtccgtcgcgccggggtatctatcgcggcgtcgtggggtcggagctccgggtccggggccgggaaggcgggaagcagggcgcaagcgcaatggtggagatagggagccgggtacgggggttcctgcggaaccggtggctggtgttcgtggcggcgatgtggatgcagtcctgcgccggggtcggctacctattcggcagcctctcgccggtgatcaaggcctctctcgggtacaaccagcgccaggtggccgggctcggcgtcgccaaggacctgggcgacagcgtcggcttcctcgccggcacgctctgctccgtgctcccgctctgggccgcgctcctcgtcggcgccgcgcagaacctcgtcggatacggatgggtctggctcgccgtcacgcgccgtgtccccgtgcccccgctctgggcgttgcaggaggtcacttga

SEQ ID NO: 88857 - DNA, 1128 bp, Zea Mays
tttacactggtacggaaaacatttgcttctcgctctacggatagctgatgctgcgaatttcagacttcaaataaaacgggctaaaacggaaaacacaacaactaggttatttgaattgtttactgcgctgaaactccgttcatccagaacaaacaaacaaacaaacaaacaaaaaagcttgtaaatggcgacgcacaaggagaaaccatccattgtcacaagtcaccatgaaacacggtacagggaaagagggagggaacaacgtctcagctggatctatttttttttatgagatagtacagagtagacatgggctagcggaacgcagcacgagaacgaatccacaggagggtaaaaaaaaaccgccgctgctcctttgagaggaggtcggtccatcagaagagtgacgaggcgatcgcggagaccacggcgagcgcgacgccgccgctgaccccagcccggagcttgacgccgctgcccgcggcgctgtcgctcgcagggttgccgccggctgacggcgtgactgcaggagaaaacagaacggtgacggcggttgccagttagttgagtgcagtgcagtggccagtgggttactggatgggtggcgaactggcgatgatacgaagggttcacttgagagagctgagagcactcactcttggaggcgttggcgaagagggcgtagtccgcagagcccggcttcaggttcagcagggctgtagcgaaacagacagggggaagggaggcgtcaggtattatgaacggataatattaaaaaaacatccggaattattttacaagatgcgagtcatcagctctttgagtatagttaaatgtctgtctatacccattatttatgatatatatgcttaattgaatctcagcatactcaagtacatctaccttgacactaacccgctatatactagtatttagtatcctcttcgtccctaaatgaacgtgcatcccgtttgactcaattttgatttcgattatatttatgaaaaatatttatatttccatataggtttattacgaagaggaagtatatgattgttgatctactataacggtacagtataaaaattagtagatctgagagagtaggaagctaggagcatgggctga

SEQ ID NO: 88858 - DNA, 123 bp, Zea Mays
atgcagagcgagacgttggagttggggaggttgcaggcggcggggagcgccatgagtcggtcgaagcgcagtccgagcgactgcacctggttgcgccccgtgtgcgtctgctggatgatgtag

SEQ ID NO: 88859 - DNA, 2235 bp, Zea Mays
actgcctgcccacaaagccacacacattcactgtcgctcacacacagcacccacccaaagaagagagagagagaagaggaggagaaagatgcactcatgcacatactatactcaaatccacgagttggcatgctgtcatgcgggtgctgctggctgctgctgctgctgtcctctctcctcccaaccccacgaggccagagcccagatgccatggccaagatatagtatataactataggagtagctgagagctttgcttcttcagagctgttcagggaacacaacacactggggaacggagagggacaccggcgccatcgcaagtacgcactcggattggggagcgacagaggaggcgcatccctgttgcctcgccagctccgtgactctctctctctcctctcccggtgcaagcaagcaagcaagctaggcttggacaacgacgacgacgatggcgtgcgggtctcgaagccggaccaacgagatggttgacgagtacgagaagctggttctcagaatgaaccctccaagggtcaccgtggacaacgactccgacatgactgccaccttgctcaaggtggacagcgccaacaagtacgggaccttgctggaggtggttcaggtgctgaccgatctgaagcttaccatcaagcgggcctacatttcctccgacggcgagtggttcatggacgtgttccatgtcgtggatcaggatgggaataaactttatgattgccaagtcatcgacagaattgaacagtctctgggagcgggatcgctcagcttccgcgggccgccggagcgggcggtggccgtggaggcggaggcggaggaggcgcagaccaccatcgagctggtggggcgggaccggccgggcctgctgtcggaggtgttcgcggtgctggcggacctcaggtgcaacgtcgtggcgtcggaggtgtggacgcacgacggccgcgtggcagcgctggtgcacgtgacggacgccgacaccctgggcgccatcgaggacccggcgcgcctggacacggcgaggcgcctgctccgccacgtgctgcgcgggagcagccgcgacaagaaggccgcccgcgccgccgtctcggcgcgcgtcgtggagcacgcgccgcgccggctgcaccagatgatgcgggcggaccgcagcgcccgccgcgacggtgagggcgagggcgagggcgatggcgagcgcgagcgcggcggtgccggcatgccggtggtcgcggtggaggactgcgccgagcgcgggtacacgctcgtcaacgtgcggtgccgcgaccgcgccaagctgctgttcgacacggtgtgcacgctcaccgacatgcagtacgtggtcttccacggcaccgtcatcgccgagggctcggaggcgtaccaggagtactacatccggcacctcgacgacagagccgccagctccggcgaggagcgcgagcgcctgcgccgcggcctcgaagccgccatccaacgccgatacaccgaggggctccggctggagctgtgctgcgaggaccgcgtggggctgctgtccgacgtgacgcgcgtgttccgggagcacgggctgtcggtgacgcacgcggaggtgggcacgcgcggggcgcgggcggccaacgtgttctacgtggtggacgcgtcgtcgggggagcccgtgcaggcgcaggcggtggccgccgtgcgcgccgagatcggcgagcagctcctgttcgtccgggagcaccaggacgccgccgccgccgccgccaacgggaccaggtcgaccgtggccggcgggcggcgctcgctcgggaacatgatccggtcccgctccgagaagttcctctacaacttagggctcatcaggtcgtgctcgtagccgccggcgactaattgatcagacagagctcgcatgtacctgaggcaggcacgcaggcaggggaattgtcgtctactagctaagctagcattagaatctctgcatctgctagataaaaaaagggagtccatgctctcatagtctcatcaacgccacgttgttcgatcgatccatgcatgtcaaagctcacgcggacgatagatcgaggtctgatgctgctagtagctgtgtagatacgctcatcttcgaatggttctcgctccttcagcccctcccttattctctagctcgtcgtatgattcgtctcgtctctgtggcagctcgcagctcccaatccatttgaataataataaaaagaatttagacgc

SEQ ID NO: 88860 - DNA, 91 bp, Zea Mays
aaatcccccccttcccccggaacagcgcgcccttgtaccatgccatccttgctcagcatcagcggtcagcggcgacgcgacaaaaaaaaaa

SEQ ID NO: 88861 - DNA, 872 bp, Zea Mays
gcacgaccaaaggcaagtgggcggcagactgccttcactctcactcccgcccgtgtccctcgccctgtccgcgctgcggtgcgccctccctgcgccgctgttaatggaaacggcgcggcgtttccttcccaccacctcctcctcctcctcctgcacggcctcttcttcgctacgattcgccgcttctccgctcttcttctccttcccctgcagataaagcggctggttgccctggaagccttgcggtggagacggtctcggtctcggatccaggggagacacgcggatttgctgccatggtgaggtggggcgagatggtggaggaggaagaggacgacgagtacgctaagctggtcaggaggatgaatccaccgaggtatacacacaactgctcttgtatgtatactgtatatactattgctcatgccgtttaaatttctgcactgttttttattaaaaaaattgattttgtgtttgtatgattgtgacttttgaggatgatgttcttattctcgtctacggtttggtactttggtctgcaactctgcgtgttgattgatcttcctctttagtattttcctatcaatatcaaaatcattttatttattcatttattcatacttttaataatcgcagatggttttttgggttgttggatcggtgtattattatccctccacgaattctaatatatacatatcagatttacatccgcttttcccaatcgctcctaggattccgctttattatattgacaaacactcgtaggattccactggattattctcagtcagtcacttaggattgagtatactgtgtgttgctagcttacttgtggatccgacgagttcatgtacagtatttccaaactt

SEQ ID NO: 88862 - DNA, 1813 bp, Zea Mays
gcacgaccaaaggcaagtgggcggcagactgccttcactctcactcccgcccgtgtccctcgccctgtccgcgctgcggtgcgccctccctgcgccgctgttaatggaaacggcgcggcgtttccttcccaccacctcctcctcctcctcctgcacggcctcttcttcgctacgattcgccgcttctccgctcttcttctccttcccctgcagataaagcggctggttgccctggaagccttgcggtggagacggtctcggtctcggatccaggggagacacgcggatttgctgccatggtgaggtggggcgagatggtggaggaggaagaggacgacgagtacgctaagctggtcaggaggatgaatccaccgagagtggtcatcgacaacgactcgtgtggcaacgcaactgtcatccgggttgatagggtcaataagcatggcattttactggaagcagttcaggtccttgtcgatctcaacctcgtcatcaccaaggcttacatttcttcagacggcaactggttcatgcatgtgttcaatgtgaccgatcaggacgggagtaagcttcataacagggaggtcattgaccatattcagaaatgcctggaatcagacggctaccttgttcctccggcgaacggttatgcgctgccggaagaccagttcacctccattgagctgacgggcgcggaccgcccgggcctcctctcagaggtgtgcgccgtgctcgccaccctgagctgcaacatcgtgaaggccgaggtgtggacgcacgacgggcgcaccgccgccgtgatccaggtcaccgacgaggccaccgggcgcgccgtccacgacgcgggccggctgtccagggtgcaggagcttctccgcgacgtgatgcggggcgacggcacgtgcaaccgcggcggcacgggaatttccgcggagaggcgcctgcatacgctgatgctggacagcgtcggcggcggcggtgccgaggaggctggtggcggccgtgacgagagcggtggatgtggcgtggcgaggcccaaggtcgtggtgatggactgcgcggagaggcggtacacggtggtgatcctgcggtgcagggaccggccgaagctgctgttcgacacgctgtgcgcgctcgccgacctgcagtacgtcgtgttccacggcacggtcgacgccgagggagccagcaaggacaaggaggcctaccaagagtactacatccggcacgtcgacggccacccggtgcgctccgacgccgagcgggcccgcctcgtccggtgcctagaggccgccgtcgagaggcgcgcgtccaacgggctggagctagaggtgtggacggaggacagggtggggctgctgtcggagatcacgcgcgtgttccgggagaacagcctctccatcatccgggcggcgatcacgaccagggacggcaaggccgaggacacgttctacgtgtcggacgcgtacggcaaccccgtcgacggcaggaccatggacgcggtgggggagcagctcgggcacgccgtgctgagggtgaagcgcggcggccacgacgcgcccgtcaagcacgaggccgagggcggcgcggtgtccgtccttggcagcctgctcaagagctcgttccagggcctgagactcatcagatcctactcgtaaaccgtaatcgaagaacataataaagccctgggccttgtacatatataaaatctcacgtaggttaggaaatagtgaagcagcattgtaaatatcatatcagtcgcatggtaaatatcataccgttacaagtgcataaatctcattacattacagca

SEQ ID NO: 88863 - DNA, 1180 bp, Zea Mays
atagctatgcgcataaacatcatagccatcatagaagatgattcacatgaactagatggtacagaaccaaaactttgaattcttacatgatgtctttctgtcatggtcggtgactcggtgtctctccctgaagcaaaactctcaaaaactagatctgacaaccaccgtgattgcacacgatcgcaagtacacgaaaattttaatttaacaggacaagacttaggtcatccgctgggcagcttccttggcaagcagcttttccctggccttggttttcgcctgtgatttggagcccatgataccaccaccccacttcttcctgacctcatcaaacttgtcgttgaagttagcctagaagtgaaccagagttccagtcagtacacaaaccaatagcacccagactagatgctgagagaaaagatattcatgacatccaaccttgatagcctccaggattttgctgaactcaagcttgtcctcgttcttgacggtggtcaagcaaagaacagatgcagtcttcttgtgaacgatctacatgaagttatttatcagcgcacacttttggcaagccattcgacacatatagcaagcaaaaggaagttggtcgggttaaaataccgatccaaggcgtgcttttcccttgacaatgcagtatggaacctccattttcctgcaaagggccgggagccacacgaccagctcgatcggatcaacatcatgagctatgacaaccagctgggccttgctctgctcgatgaggtaagtcacatggttaaggccgtacttcacaacaattggtttctttgactcaacagttttcccctcgttttcagcctgggccctcttcaagagcctctccttcttggcagctttgtcctcggggcggtacttaagaagcatcttgaacaagatcgtaccaaggttcttgtcgagggtacgtgtgaactggttgagcgccgggggcaccttgaggcgctgcttgaggatgcggcgctggcgctggatgcgcacgaccttgggccacttgacgaagcggtggaggtccttcttgggcggaagggcgccgccgatcccaaactgcttcggcctcttctcgaagagcgggttcggccataccgccttcttcttggcggggaccggcgccctaccgcctctcttcggggcctgcaagattagacga

SEQ ID NO: 88864 - DNA, 1650 bp, Zea Mays
cgtgactcgccggctcgccgccggcgtccaagctaacagtaaagacagcgcactgaaatgttagcgatcaatagtataatcagtaatatgacgaacgataaaaaccaaaaaaaaaaaaaacaacgcgcaccggcattccaatgtcattactgaaccgtagcataagtatctaggcgtcgaatcaacatcaggggttctcactttgatatttcacagatgaagcagagtgcagttacatgctgtaggtgattactctaccagatacataaaccaacatcaaattctgaaagggaccggattcagaaaaaaactctccgtttccgtatctatgtttttttggcggaaatgggaccggattcgatgccattcagcgtgccgctcctcgacacctctccgcctccgcgcgacgggcgacagcgccagtcgtgaatcagcgccggcgagcccccatcctggccggcagactccctaggcggctgggccagctctccgcctccgcatccccagtctccgcgctgactgccccgccccatctccagccacgccggcgccgcatccccattcccctcaccgccgtctccggtcacgccggcgcgtccccagcccccgcgtcgtccgcttaccaggcagggaaccgagaatcttcttcccttccattatcttcgttgcaaggtcgctacatcaacatgaggctcaacaaggtggaagtgaaccttataaggctgctggaggctgctccctggcagcaaaatcaggctaaactactctattatgtaaccacagcccgggagcttttggagcagctaggagctgagactacaccagaagggatatcaagcatttcaaaagctaagctttctgagtattcagaaaagattgaagcactagcttctaggcttgctgcttcactgcctgaaaatgaaaagccaattactgaaagcagagatgaaatctcttacgacgaagccaaggcagaaagtccaatatctttatcatcaggactacgaaggagatcaacagcccatgctgaggttggaccaagtcatcatgagagaaaagaagatattggagcacctataaaattggatgcagaagctcaggctcacattgagaagcataggaagcttcaagaagatttgactgatgaaatggtcgagttagcacggcaactgaaggaaagtagcctaatgatgaaccaatccgtgcaggagacagagaagatccttgattctaccgagagggccgtcgagcacagcctggcaagcgcgggccacgcaacctcgcgagccgcggaggtgtactcactggcttccaagactacgtgcttccagtggctgctaatgtttgtgatggcctgcatgtttgtaatggtggttctactcataaggatcacttgatgaaggatgagggctgtagagggcactcaaatcttttgtcacccttgactttgtttcatagggaattttttgtgttgatggtattttctcgaccaagtgtctccaaccaaacaaggctgtagtatgtgaaactgggagacggctgcctgtacagaggcttggtgattgctgtttttggttacatggggattagaggtaattgagggatatataatcgcttgctatttaattttgatcagcaagaggttatggc

SEQ ID NO: 88865 - DNA, 1418 bp, Zea Mays
ctttgatatttcacagatgaagcagagtgcagttacatgctgtaggtgattactctaccagatacataaaccaacatcaaattctgaaagggaccggattcagaaaaaaactctccgtttccgtatctatgtttttttggcggaaatgggaccggattcgatgccattcagcgtgccgctcctcgacacctctccgcctccgcgcgacgggcgacagcgccagtcgtgaatcagcgccggcgagcccccatcctggccggcagactccctaggcggctgggccagctctccgcctccgcatccccagtctccgcgctgactgccccgccccatctccagccacgccggcgccgcatccccattcccctcaccgccgtctccggtcacgccggcgcgtccccagcccccgcgtcgtccgcttaccaggtcgctacatcaacatgaggctcaacaaggtggaagtgaaccttataaggctgctggaggctgctccctggcagcaaaatcaggctaaactactctattatgtaaccacagcccgggagcttttggagcagctaggagctgagactacaccagaagggatatcaagcatttcaaaagctaagctttctgagtattcagaaaagattgaagcactagcttctaggcttgctgcttcactgcctgaaaatgaaaagccaattactgaaagcagagatgaaatctcttacgacgaagccaaggcagaaagtccaatatctttatcatcaggactacgaaggagatcaacatgaaattaaatagagcccatgctgaggttggaccaagtcatcatgagagaaaagaagatattggagcacctataaaattggatgcagaagctcaggctcacattgagaagcataggaagcttcaagaagatttgactgatgaaatggtcgagttagcacggcaactgaaggaaagtagcctaatgatgaaccaatccgtgcaggagacagagaagatccttgattctaccgagagggccgtcgagcacagcctggcaagcgcgggccacgcaacctcgcgagccgcggaggtgtactcactggcttccaagactacgtgcttccagtggctgctaatgtttgtgatggcctgcatgtttgtaatggtggttctactcataaggatcacttgatgaaggatgagggctgtagagggcactcaaatcttttgtcacccttgactttgtttcatagggaattttttgtgttgatggtattttctcgaccaagtgtctccaaccaaacaaggctgtagtatgtgaaactgggagacggctgcctgtacagaggcttggtgattgctgtttttggttacatggggattagaggtaattgagggatatataatcgcttgctatttaattttgatcagcaagaggttatggc

SEQ ID NO: 88866 - DNA, 1293 bp, Zea Mays
ctccgtttccgtatctatgtttttttggcggaaatgggaccggattcgatgccattcagcgtgccgctcctcgacacctctccgcctccgcgcgacgggcgacagcgccagtcgtgaatcagcgccggcgagcccccatcctggccggcagactccctaggcggctgggccagctctccgcctccgcatccccagtctccgcgctgactgccccgccccatctccagccacgccggcgccgcatccccattcccctcaccgccgtctccggtcacgccggcgcgtccccagcccccgcgtcgtccgcttaccaggtcgctacatcaacatgaggctcaacaaggtggaagtgaaccttataaggctgctggaggctgctccctggcagcaaaatcaggctaaactactctattatgtaaccacagcccgggagcttttggagcagctaggagctgagactacaccagaagggatatcaagcatttcaaaagctaagctttctgagtattcagaaaagattgaagcactagcttctaggcttgctgcttcactgcctgaaaatgaaaagccaattactgaaagcagagatgaaatctcttacgacgaagccaaggcagaaagtccaatatctttatcatcaggactacgaaggagatcaacagcccatgctgaggttggaccaagtcatcatgagagaaaagaagatattggagcacctataaaattggatgcagaagctcaggctcacattgagaagcataggaagcttcaagaagatttgactgatgaaatggtcgagttagcacggcaactgaaggaaagtagcctaatgatgaaccaatccgtgcaggagacagagaagatccttgattctaccgagagggccgtcgagcacagcctggcaagcgcgggccacgcaacctcgcgagccgcggaggtgtactcactggcttccaagactacgtgcttccagtggctgctaatgtttgtgatggcctgcatgtttgtaatggtggttctactcataaggatcacttgatgaaggatgagggctgtagagggcactcaaatcttttgtcacccttgactttgtttcatagggaattttttgtgttgatggtattttctcgaccaagtgtctccaaccaaacaaggctgtagtatgtgaaactgggagacggctgcctgtacagaggcttggtgattgctgtttttggttacatggggattagaggtaattgagggatatataatcgcttgctatttaattttgatcagcaagaggttatggct

SEQ ID NO: 88867 - DNA, 1342 bp, Zea Mays
acttctcttcaactgagcggcggattgaacaggtctacaggcgcgctcccgcacgccccgcgaaggcttttctcgacaagcttcagcagcggcgcagtcgaccagccgaccaccaggcaccagcccaccgccaaacgtaggatggcggcggagactaaaccggctgcggccagcggggttgccggcgagatggaggtggaggcgtaccgccgccttttcccggtggccttccttgagcgccacctcggcgagtccgtccgcatcgatgcccgccgcctcagagaggcccgccccaccaccgtcgccctcggcgccgtctcctccgcgcatggttccgctctcgcccgccttggcgacaccgccatgctcgcgtcggtcaagctcgaggtgatgtcgcccccggcggagcacccagacgaaggatccgtcgctgttgagttccacatgccgcctatctgctccccgctggttaggccaggccgacccactgacgttgcacccgtcatctccaaggcccttgaagacgttttgacgagttctggaatgctaaatttgaaggacctctgtttgatcactgggaaggcttcttggctagcgtacctggatatctattgcttgaatgctgatgggtctctgtttgatgctgcacttatttcagcagtggctgccttcacacatttggagattcctttagtttctgttggtgatgatggtagattatttactgttggaggcaatgatggaaaaaacaaatttgaattagtaaacagagaaaagaggaaactgacacttggtgccattccattgtcccttacatgtgcacttcataaagatgaaatattagcggacccaacttctgaagaagaatcgataatagagacctatgtgactgttgttgtagattcttcagaccgcctagtgtcattacaaaaacttggaggtgcagtgacatgcatggcgactattaaggagtgcattagcttggcgaaagaaaggagacggagcctaagagaaattctgttagactctatcaaagccatggaagtcgaccaaactgaataattctacaaatagattcagttaatctaaccggactacatcttgatggtttctctctgcctcggctgtactggttgtaacagcagttttgttgatttaggcaaagtatgtagctatttgtactctacagtctacacataattcttcacttaagtagcctggcgattttgtttgacgagcatgtctgcaatgcatctttttcgcgacttggcatctttgtaacaccctaattcacattttgcaatattttattttattttttataatcaattagaactactgc

SEQ ID NO: 88868 - DNA, 1434 bp, Zea Mays
acttctcttcaactgagcggcggattgaacaggtctacaggcgcgctcccgcacgccccgcgaaggcttttctcgacaagcttcagcagcggcgcagtcgaccagccgaccaccaggcaccagcccaccgccaaacgtaggatggcggcggagactaaaccggctgcggccagcggggttgccggcgagatggaggtggaggcgtaccgccgccttttcccggtggccttccttgagcgccacctcggcgagtccgtccgcatcgatgcccgccgcctcagagaggcccgccccaccaccgtcgccctcggcgccgtctcctccgcgcatggttccgctctcgcccgccttggcgacaccgccatgctcgcgtcggtcaagctcgaggtgatgtcgcccccggcggagcacccagacgaaggatccgtcggttcgtgttccccctttccctgctgctgcctgcttcctattgcctttggttttttattcttttgttgatggacgtatgtgtgttttgcgtagctgttgagttccacatgccgcctatctgctccccgctggttaggccaggccgacccactgacgttgcacccgtcatctccaaggcccttgaagacgttttgacgagttctggaatgctaaatttgaaggacctctgtttgatcactgggaaggcttcttggctagcgtacctggatatctattgcttgaatgctgatgggtctctgtttgatgctgcacttatttcagcagtggctgccttcacacatttggagattcctttagtttctgttggtgatgatggtagattatttactgttggaggcaatgatggaaaaaacaaatttgaattagtaaacagagaaaagaggaaactgacacttggtgccattccattgtcccttacatgtgcacttcataaagatgaaatattagcggacccaacttctgaagaagaatcgataatagagacctatgtgactgttgttgtagattcttcagaccgcctagtgtcattacaaaaacttggaggtgcagtgacatgcatggcgactattaaggagtgcattagcttggcgaaagaaaggagacggagcctaagagaaattctgttagactctatcaaagccatggaagtcgaccaaactgaataattctacaaatagattcagttaatctaaccggactacatcttgatggtttctctctgcctcggctgtactggttgtaacagcagttttgttgatttaggcaaagtatgtagctatttgtactctacagtctacacataattcttcacttaagtagcctggcgattttgtttgacgagcatgtctgcaatgcatctttttcgcgacttggcatctttgtaacaccctaattcacattttgcaatattttattttattttttataatcaattagaactactgc

SEQ ID NO: 88869 - DNA, 807 bp, Zea Mays
gcactcgcactcgcactcgcacctgcacctcgcactagctagtcttgccaattaagctaggtatagaccagcatggcttctgctctcaagatgacggccatctgcatgctgatcctgaccacgggccagctgatggcaactgccggtgcaaaggcgccgctggtgcaggcggacgccgcgcctacggctcgccgtctgctctcggcggaccatgagcgctcagcctccgggaggacgagcaactgcccctgcaccgccatgactccgtggtgttgcttcggtttgcagaggacggcgacggagaactgcccctgcaccgccaggactccgtggtgttgctccggtttgcagaagacggcgctagaggactgcccctgcagcccatttacaccatggtgctgctccggtttgcagaagacggcgctggagaactgcccctgcacccccatgactccattctgttgctttggcgccggcagtgctgccacaaactgaaatcttcatgagaagaacatgcatgcagatggatgtggcctctaaatgtgtgcggtatggtgcttgcgtatcattcctgccgtgtgtctttgttctccaacaataagtacgtacgtgtagaggggatgcatgctgctacactacatctgcatgcaccgtagtacgtaggctttgtttgctgcagatgctctgcaggcttacgacccgagtacgcgtatagccgtataggcggtgtacgcctgctttgtaatgtaccaagtaatgctgttttgctttcaataaatataagaggccgcgcatgcaacagttaaa

SEQ ID NO: 88870 - DNA, 423 bp, Zea Mays
atcacacccttcggcatgtactgctatgtcaccatgccgttcggcttgaggaatgcgggtgcgacataccaacggtgcatgaaccatgtgttcggcgaacacattggccggacggtcgaggcctacgtcgatgacatcatagtcaagacgaggaaagcctccgacctcctttccgaccttgaagtgacattccgatgtctcaaggcgaaaggcgtgaagcttaatcccgagaagtgtgtcttcggggttccccgaggcatgctcttggggttcatcgtctccgagcggggcaacgaggccaacccagagaagatcgcggccatcatcagcatggggcccgttaaggacttgaaaggcgtacatagagtcacgggatgccttgcggctctgagccgcttcatctcgcgcctcgcaaaagaggcc

SEQ ID NO: 88871 - DNA, 957 bp, Zea Mays
atggtgattggcgttgggtcacaccgcggcggcggcggggacgatctcgatgacctccggcatggcgccgtccgggtttgcggcggccatccggcgggtctcggcggccacggcggcctccttgtgctgctgctccaccacctcgatcttgtgcacgcccacgatggggatggggctcaccgacaggatggccaccgtgttgggcgccagctcgatgacctgcccctgcacctgcaccgcgttggcgccgtccgtggtcgtcggcagcacggcgttgttcttggccgccgggcggggcttgcggtaccagaagtagaggcccatctggacgcagctgaagaagaagccgccgacgttggggtacatgacaaaggggtccttggtgaagaggccgtagcagaaccaggcgacggcgctgagcgtgaggcagaaggagaggctgatgggcaggaactcgacgctcttggtcttgaccaccttgacgatgatgctgagcggcgcgacgaagacggccatggagaaggcgaggcagacgctgccgaggaacttgacgcggtggggctcgcggacggcgaagagcgtgacggcgacgacgagcgcgaaggccgccacgtccagcaggaagaagtaggccagagtccgcaggcgcgcccgccgcggcgcgtacgccaggtagaggactatgtaggccgcctccacgccgcagccgaaggcgttgatggtcagcagcggcctcgagttggtcttcaccagcgcgtagaagatccacagcaccgagctgaagagcgccaccacgtacggcaccgagctgaacccgcccgtcgacttcttccggtacacctgcaggaacgtcgccactggtgcaaggaacaccaggaaggagatgatgtttcctgcgatgccggagagggtgacggccgggtgagccatggagaagaagcctcctgccattgctga

SEQ ID NO: 88872 - DNA, 699 bp, Zea Mays
cgcacgccgaagaacttcgacatcgagaagatgagagggagaaccgtcgagtcgctgcaaagccaccgcggtcaatcctcgattgtgtcgctgcttggcccatggagaacatctcccggcccttgctagcacgtgatgaagttgtggcaactctcaaatcgaaggaagccacggtgttgggggaattcctcgctgatgaccgcactccgccgtggagccacacgtgactgtggagagagctttacgctgcgcaatcggcgttgagtagttccctatcatacatgccatatcctccactttcttttacgtgtcgttgttcttggtttgtttcaccggatcacaaggcgagtgtcgcgtcggtgaggcctctaccgaaggctgcgggcgacgccgccgcggcttgcgtcgggaggaagcaggagcacgtgtagccatgggttgcggtgtgagcggctgagacctgagattagaacaggagatacccctttagtgcaataaagcagggcgatgccggtgcaggagatgggcctgtcggctgtcgcgcaacgccttgagcttcaacctgtccattgtggagatatcggagcagctcatctcgctagacgtcagctataaagctatatatggcaacatcctggtgcgggtggtgaacctgaccacccatgtcgtcccaaaacagattgaaagggaaatgaactt

SEQ ID NO: 88873 - DNA, 1213 bp, Zea Mays
aaaaagagtattttggaaccagcgctgccaaatcaggaaacgggcacgacgcgggcggggcggggagccaaaatggcgctcccgggcccggcggcgacccgcgcggcggtgaggctctgccggatcgcggcgagcgcttcctcgtatttgccgtctgcggcggccgacggaaggagggagctggagctgccgttcgcgctggtggcggagcgggggatggtggtgggcggccaccgcgggatggggatgaacgcggtgggggcaccgcccggggcgcgcttcggggccgccagggagcgggagaacacgctgctctccttcggccgagccgccgcacatgctgccgtcgccttcgtcgagttcgacgtccaggtcacaaaagatggctgcccaataatcttccatgacgatttcatcctaacacaagggaccggggctgtacatgaaaggcgtgttactgatcttctcttggaagatttcctctcttatgggccacaaagagaatcttgcaaggtctccaagccattacttagacgggcaggagatggtagagtccttaattggactacagaagatgacgattccctttgcacattgcaagaggcctttcaacgtgtcagtcctcgcctgggatttaacattgagctgaagtttgatgacagcattatgtatcacaggaaagaccttcagtgtgctcttaaagctgtattgcaagtacagtcttttcccctacttcgtatagagctcagttgtttttgagcatgctaggaacagaccagtctttttttcatcgttccatcctgatgcagcacagatgatgcgggaactccagagcttgtatcctgtaatatttgaaactcctgttctatgcctgaaactttgaattgcctgtcaggtttcctcaatctgtagtgtagctagtagtattgcaacggctacggaattcattggcaaagttccagtcaatctttggcacatcaacttttcaagacaccaatctgactgcgaatacgcttgctgcttgcatcatagtattctgagtgcaccatagatcatctagttaccttatctttaggtagctacaaatcgataatactctatgtaaattctgaaacaaatatgtgctggtatttgattgtgtataatttagatccagtttagcgtatgtggtagaatcactggtgaataaaattttgctagacgttgttgaagt

SEQ ID NO: 88874 - DNA, 1179 bp, Zea Mays
aaaaagagtattttggaaccagcgctgccaaatcaggaaacgggcacgacgcgggcggggcggggagccaaaatggcgctcccgggcccggcggcgacccgcgcggcggtgaggctctgccggatcgcggcgagcgcttcctcgtatttgccgtctgcggcggccgacggaaggagggagctggagctgccgttcgcgctggtggcggagcgggggatggtggtgggcggccaccgcgggatggggatgaacgcggtgggggcaccgcccggggcgcgcttcggggccgccagggagcgggagaacacgctgctctccttcggccgagccgccgcacatgctgccgtcgccttcgtcgagttcgacgtccaggtcacaaaagatggctgcccaataatcttccatgacgatttcatcctaacacaagggaccggggctgtacatgaaaggcgtgttactgatcttctcttggaagatttcctctcttatgggccacaaagagaatcttgcaaggtctccaagccattacttagacgggcaggagatggtagagtccttaattggactacagaagatgacgattccctttgcacattgcaagaggcctttcaacgtgtcagtcctcgcctgggatttaacattgagctgaagtttgatgacagcattatgtatcacaggaaagaccttcagtgtgctcttaaagctgtattgcaagttgtttttgagcatgctaggaacagaccagtctttttttcatcgttccatcctgatgcagcacagatgatgcgggaactccagagcttgtatcctgtaatatttgaaactcctgttctatgcctgaaactttgaattgcctgtcaggtttcctcaatctgtagtgtagctagtagtattgcaacggctacggaattcattggcaaagttccagtcaatctttggcacatcaacttttcaagacaccaatctgactgcgaatacgcttgctgcttgcatcatagtattctgagtgcaccatagatcatctagttaccttatctttaggtagctacaaatcgataatactctatgtaaattctgaaacaaatatgtgctggtatttgattgtgtataatttagatccagtttagcgtatgtggtagaatcactggtgaataaaattttgctagacgttgttgaagt

SEQ ID NO: 88875 - DNA, 1279 bp, Zea Mays
gccaaatcaggaaacgggcacgacgcgggcggggcggggagccaaaatggcgctcccgggcccggcggcgacccgcgcggcggtgaggctctgccggatcgcggcgagcgcttcctcgtatttgccgtctgcggcggccgacggaaggagggagctggagctgccgttcgcgctggtggcggagcgggggatggtggtgggcggccaccgcgggatggggatgaacgcggtgggggcaccgcccggggcgcgcttcggggccgccagggagcgggagaacacgctgctctccttcggccgagccgccgcacatgctgccgtcgccttcgtcgagttcgacgtccaggtcacaaaagatggctgcccaataatcttccatgacgatttcatcctaacacaagggaccggggctgtacatgaaaggcgtgttactgatcttctcttggaagatttcctctcttatgggccacaaagagaatcttgcaaggtctccaagccattacttagacgggcaggagatggtagagtccttaattggactacagaagatgacgattccctttgcacattgcaagaggcctttcaacgtgtcagtcctcgcctgggatttaacattgagctgaagtttgatgacagcattatgtatcacaggaaagaccttcagtgtgctcttaaagctgtattgcaagtacagtcttttcccctacttcgtatagagctcagtaaagtatcgattgatttgcattcagattcagtctattcacatccatttcagcactaagaggtgatgtctgatgtcaaatcattttggcaggttgtttttgagcatgctaggaacagaccagtctttttttcatcgttccatcctgatgcagcacagatgatgcgggaactccagagcttgtatcctgtaatatttgaaactcctgttctatgcctgaaactttgaattgcctgtcaggtttcctcaatctgtagtgtagctagtagtattgcaacggctacggaattcattggcaaagttccagtcaatctttggcacatcaacttttcaagacaccaatctgactgcgaatacgcttgctgcttgcatcatagtattctgagtgcaccatagatcatctagttaccttatctttaggtagctacaaatcgataatactctatgtaaattctgaaacaaatatgtgctggtatttgattgtgtataatttagatccagtttagcgtatgtggtagaatcactggtgaataaaattttgctagacgttgttgaagt

SEQ ID NO: 88876 - DNA, 1698 bp, Zea Mays
gccaaatcaggaaacgggcacgacgcgggcggggcggggagccaaaatggcgctcccgggcccggcggcgacccgcgcggcggtgaggctctgccggatcgcggcgagcgcttcctcgtatttgccgtctgcggcggccgacggaaggagggagctggagctgccgttcgcgctggtggcggagcgggggatggtggtgggcggccaccgcgggatggggatgaacgcggtgggggcaccgcccggggcgcgcttcggggccgccagggagcgggagaacacgctgctctccttcggccgagccgccgcacatgctgccgtcgccttcgtcgagttcgacgtccaggtcacaaaagatggctgcccaataatcttccatgacgatttcatcctaacacaagggaccggggctgtacatgaaaggcgtgttactgatcttctcttggaagatttcctctcttatgggccacaaagagaatcttgcaaggtgtcataccttcttgctatatattttttttcatgcgaagtccatgaatgcatgctgaaggcactgatatattcactctcctttgcactggcctttcaggtctccaagccattacttagacgggcaggagatggtagagtccttaattggactacagaagatgacgattccctttgcacattgcaagaggcctttcaacgtgtcagtcctcgcctgggatttaacattgagctgaagtttgatgacagcattatgtatcacaggaaagaccttcagtgtgctcttaaagctgtattgcaagttgtttttgagcatgctaggaacagaccagtctttttttcatcgttccatcctgatgcagcacagatgatgcgggaactccagagcttgtatcctgtacttttcctaacagaaggagggacatcgaaacaccacgatccaaggaggaactcgtttgacgacgccgtccgggtatgcctagagtacgatctgcacgggatcgtgtcagaagcgagaggcgttctcaagaacccatccgcggtcgccagagcacaagaatctaacctcgcgcttctcacgtacgggcagctcaacaacgtgtgggaggcagtctacatccaatacctgatgggcgtgcacggcgtcatcgttgaccgggtggaggagatctcggacgccgtggccggttttggtctggggaaaccaggccttggccggggcggtgctggcgtggacggagcgaaaacgcatcaggctcaggccttctcgcagcagcagctggggttcctgctccggcttatccctgaactgattgagcagcggcactgaaggacggtacaccaccatatgtaacatcccagtttttgacccccctcgaagcggatggcaagcattcgcctttggggtcaacacttctcctgactgactgactggcaggtccgatttgacagcttaggaggtatacttgtgctgcgtgcacacactcttctgtatagtctgaaaactcgcggttccttgttggttcagtacagttacagccgaccatggaccgtggtcgatctcttgttgtttcaagtaggctcaccagaaaaaggtcagcaatatgtattgttggaaacttgtatgattgtgacgtgtgttgttaacaaccagggatgaaaaccgtaaccgaagtctattgtttccattaaagagaatattcttcgtataga

SEQ ID NO: 88877 - DNA, 1599 bp, Zea Mays
gccaaatcaggaaacgggcacgacgcgggcggggcggggagccaaaatggcgctcccgggcccggcggcgacccgcgcggcggtgaggctctgccggatcgcggcgagcgcttcctcgtatttgccgtctgcggcggccgacggaaggagggagctggagctgccgttcgcgctggtggcggagcgggggatggtggtgggcggccaccgcgggatggggatgaacgcggtgggggcaccgcccggggcgcgcttcggggccgccagggagcgggagaacacgctgctctccttcggccgagccgccgcacatgctgccgtcgccttcgtcgagttcgacgtccaggtcacaaaagatggctgcccaataatcttccatgacgatttcatcctaacacaagggaccggggctgtacatgaaaggcgtgttactgatcttctcttggaagatttcctctcttatgggccacaaagagaatcttgcaaggtctccaagccattacttagacgggcaggagatggtagagtccttaattggactacagaagatgacgattccctttgcacattgcaagaggcctttcaacgtgtcagtcctcgcctgggatttaacattgagctgaagtttgatgacagcattatgtatcacaggaaagaccttcagtgtgctcttaaagctgtattgcaagttgtttttgagcatgctaggaacagaccagtctttttttcatcgttccatcctgatgcagcacagatgatgcgggaactccagagcttgtatcctgtacttttcctaacagaaggagggacatcgaaacaccacgatccaaggaggaactcgtttgacgacgccgtccgggtatgcctagagtacgatctgcacgggatcgtgtcagaagcgagaggcgttctcaagaacccatccgcggtcgccagagcacaagaatctaacctcgcgcttctcacgtacgggcagctcaacaacgtgtgggaggcagtctacatccaatacctgatgggcgtgcacggcgtcatcgttgaccgggtggaggagatctcggacgccgtggccggttttggtctggggaaaccaggccttggccggggcggtgctggcgtggacggagcgaaaacgcatcaggctcaggccttctcgcagcagcagctggggttcctgctccggcttatccctgaactgattgagcagcggcactgaaggacggtacaccaccatatgtaacatcccagtttttgacccccctcgaagcggatggcaagcattcgcctttggggtcaacacttctcctgactgactgactggcaggtccgatttgacagcttaggaggtatacttgtgctgcgtgcacacactcttctgtatagtctgaaaactcgcggttccttgttggttcagtacagttacagccgaccatggaccgtggtcgatctcttgttgtttcaagtaggctcaccagaaaaaggtcagcaatatgtattgttggaaacttgtatgattgtgacgtgtgttgttaacaaccagggatgaaaaccgtaaccgaagtctattgtttccattaaagagaatattcttcgtataga

SEQ ID NO: 88878 - DNA, 1584 bp, Zea Mays
gccaaatcaggaaacgggcacgacgcgggcggggcggggagccaaaatggcgctcccgggcccggcggcgacccgcgcggcggtgaggctctgccggatcgcggcgagcgcttcctcgtatttgccgtctgcggcggccgacggaaggagggagctggagctgccgttcgcgctggtggcggagcgggggatggtggtgggcggccaccgcgggatggggatgaacgcggtgggggcaccgcccggggcgcgcttcggggccgccagggagcgggagaacacgctgctctccttcggccgagccgccgcacatgctgccgtcgccttcgtcgagttcgacgtccaggtcacaaaagatggctgcccaataatcttccatgacgatttcatcctaacacaagggaccggggctgtacatgaaaggcgtgttactgatcttctcttggaagatttcctctcttatgggccacaaagagaatcttgcaaggtctccaagccattacttagacgggcaggagatggtagagtccttaattggactacagaagatgacgattccctttgcacattgcaagaggcctttcaacgtgtcagtcctcgcctgggatttaacattgagctgaagtttgatgacagcattatgtatcacaggaaagaccttcagtgtgctcttaaagctgtattgcaagttgtttttgagcatgctaggaacagaccagtctttttttcatcgttccatcctgatgcagcacagatgatgcgggaactccagagcttgtatcctgtacttttcctaacagaaggagggacatcgaaacaccacgatccaaggaggaactcgtttgacgacgccgtccgggtatgcctagagtacgatctgcacgggatcgtgtcagaagcgagaggcgttctcaagaacccatccgcggtcgccagagcacaagaatctaacctcgcgcttctcaccaacgtgtgggaggcagtctacatccaatacctgatgggcgtgcacggcgtcatcgttgaccgggtggaggagatctcggacgccgtggccggttttggtctggggaaaccaggccttggccggggcggtgctggcgtggacggagcgaaaacgcatcaggctcaggccttctcgcagcagcagctggggttcctgctccggcttatccctgaactgattgagcagcggcactgaaggacggtacaccaccatatgtaacatcccagtttttgacccccctcgaagcggatggcaagcattcgcctttggggtcaacacttctcctgactgactgactggcaggtccgatttgacagcttaggaggtatacttgtgctgcgtgcacacactcttctgtatagtctgaaaactcgcggttccttgttggttcagtacagttacagccgaccatggaccgtggtcgatctcttgttgtttcaagtaggctcaccagaaaaaggtcagcaatatgtattgttggaaacttgtatgattgtgacgtgtgttgttaacaaccagggatgaaaaccgtaaccgaagtctattgtttccattaaagagaatattcttcgtataga

SEQ ID NO: 88879 - DNA, 1677 bp, Zea Mays
ccctcctcaccctggaaaacacacgcacgcagacctcccccaaccgctctcagtctctccctccctgtctctctgttcaatctctcggctcgccatggacgctccgagcaactgcacgcgtcctgcgcgcgccaagtgaccgaacaagctcgagctctgctgctacagttgcttgcccctgtgccaaactggcaggaggtaggtagcttatagcagctagagctaagctgtggtgcgtagcggcagctagagctagctagcagtgcacgcgcaggtgcgtgctagctagctcgttagctgtgtactagctgtgtagcagcagcagcagcacagtagcagtagtcggtgataaaaggaatttctttggggacatgtcggcggagagagccccggtgctggtgaggcacggcggcggcggcgtggaggcgctccggcagctcccgccggggttccggttccgccccacggacgaggagctcgtggtgcagtacctccggcgcaaggccatcggcgtgccgctccccgccgccgtcatccccgtcttccgcgacctctacagccgcgacccctgggacgtcgtcgccgtctctgcccctgatacgaggagcgagggggagaaatacttcttcgcggtgcggccggcgagcggcggcaagagcagcggcgctggtactggtagcagggcggccgcgggcgggcggtggaagccgtcggggaaggagaagccggtggtgctgccccgcccgtgtggcggagggagcctcctggtgggcgtgaagagggcgatgacgttcgtgccccgccgccggaagaagacggcggcgttgccgtcggcggccctgaagaccggctgggtcatgcacgagtaccgcctcgccgcgccgctgcacaagaacggctgcagcctggctcaggcgcaaggagagtgggtcgtctgccgcgtcttccagaagggcggcaacaggccgaggaggaggcagcgagaagcgtcgccgccgccgtccgctagcagcagctgcgtcacggatgcgtcgagctcggacctggacgaggtcagcagctagcttagctagctagctagcagaaccgaccgtacgtgccggctggccacaacatgcagtcaagaacgtacgtacgtatatgtataccgccaccagctcgtcgcgcgcgcagctgtgctgtgcatgccgtacgtgtgcggccggcctcgacctcgatctcgaagagaggatgtgatcaagctgagttacggataagggggaacaacccatccacacgcacttctcctccgacccaacattatttgttgttaactagtttttcttttctttatctctttctttcttttgcactctgtacgtgtaatgtaatgcagtgtaatttaattagtgagagaagcatgacgccctactaccggccggattattagttaacagcaaattaattactacgtacctactactcgcgtcagcagcttctactgtacttgaggtttcagaagcccaatatatatgtatattgtcaaatttgtaacctgcattatatgcagaggtcgtcgtcgtacgtgtccttaattagtgtctttgtaatatctcttcatgaagcgaggaggaaggaaggaacctgaatccatgcgtaacagcgcagtcgttgctgcatatatgcgttgggctctgt

SEQ ID NO: 88880 - DNA, 1680 bp, Zea Mays
ccctcctcaccctggaaaacacacgcacgcagacctcccccaaccgctctcagtctctccctccctgtctctctgttcaatctctcggctcgccatggacgctccgagcaactgcacgcgtcctgcgcgcgccaagtgaccgaacaagctcgagctctgctgctacagttgcttgcccctgtgccaaactggcaggaggtaggtagcttatagcagctagagctaagctgtggtgcgtagcggcagctagagctagctagcagtgcacgcgcaggtgcgtgctagctagctcgttagctgtgtactagctgtgtagcagcagcagcagcacagtagcagtagtcggtgataaaaggaatttctttggggacatgtcggcggagagagccccggtgctggtgaggcacggcggcggcggcgtggaggcgctccggcagctcccgccggggttccggttccgccccacggacgaggagctcgtggtgcagtacctccggcgcaaggccatcggcgtgccgctccccgccgccgtcatccccgtcttccgcgacctctacagccgcgacccctgggacgtcgtcgccgtctctgcccctgcagatacgaggagcgagggggagaaatacttcttcgcggtgcggccggcgagcggcggcaagagcagcggcgctggtactggtagcagggcggccgcgggcgggcggtggaagccgtcggggaaggagaagccggtggtgctgccccgcccgtgtggcggagggagcctcctggtgggcgtgaagagggcgatgacgttcgtgccccgccgccggaagaagacggcggcgttgccgtcggcggccctgaagaccggctgggtcatgcacgagtaccgcctcgccgcgccgctgcacaagaacggctgcagcctggctcaggcgcaaggagagtgggtcgtctgccgcgtcttccagaagggcggcaacaggccgaggaggaggcagcgagaagcgtcgccgccgccgtccgctagcagcagctgcgtcacggatgcgtcgagctcggacctggacgaggtcagcagctagcttagctagctagctagcagaaccgaccgtacgtgccggctggccacaacatgcagtcaagaacgtacgtacgtatatgtataccgccaccagctcgtcgcgcgcgcagctgtgctgtgcatgccgtacgtgtgcggccggcctcgacctcgatctcgaagagaggatgtgatcaagctgagttacggataagggggaacaacccatccacacgcacttctcctccgacccaacattatttgttgttaactagtttttcttttctttatctctttctttcttttgcactctgtacgtgtaatgtaatgcagtgtaatttaattagtgagagaagcatgacgccctactaccggccggattattagttaacagcaaattaattactacgtacctactactcgcgtcagcagcttctactgtacttgaggtttcagaagcccaatatatatgtatattgtcaaatttgtaacctgcattatatgcagaggtcgtcgtcgtacgtgtccttaattagtgtctttgtaatatctcttcatgaagcgaggaggaaggaaggaacctgaatccatgcgtaacagcgcagtcgttgctgcatatatgcgttgggctctgt

SEQ ID NO: 88881 - DNA, 1665 bp, Zea Mays
gcctaaccattcccggctcccggcagagacggccgctcgcctccagaagagcaacccaagtcgccgagagcgactcccacacgacccacctaccccgccgccgccgccgccgcatccccctcgatcccgtctggcgatcgggggctcccagacacatcacagatacacaccacgctaagccaaatcgagcaacgcctatcatcatattataatttcccctcattcatctcacagtcccaggcctcccctccctcctccccgtcgccaaccaacctccaacccccagccgatcgcgtcggagatgctgggcgtcgcgcggaggcggctcggatccggatgcgtgctcgcccagctggcgcaggccctccgccccgccgccgctcccgccaggacctactccgccgcggccaaggagataactgtacgggaagcattgaataccgcattagatgaagaaatgtcggcagacccttctgttttcttgatgggagaagaggttggcgagtaccaaggtgcatacaagatatccaagggtttgcttgacaagtatggccccgatagggttctcgatactccgatcactgaggttggcttcactggcattggtgttggtgccgcttaccatggtcttcgacctattgtagagttcatgacatttaacttttcgatgcaggcaattgatcacataattaattcagctgccaagtcgaactacatgtctgctgggcagatatctgttcctattgtctttaggggtccaaatggtgctgctgctggagttggtgcccaacactcacagtgctatgcagcttggtatgcacatgttcccggattgaaagttctagctccatattctgcagaagatgctcgaggtttgctgaaagcagcaatcagggatccagatcctgttgtgttccttgaaaatgaacttctttatggtgaatcatttcctgtatctgctgaggtacttgattctagcttctgccttccgattggaaaggctaagatagagcgacaagggaaagatgtcactatcactgcattctccaaaatggtgggatatgcccttcaggccgctgatatactggccaaggaaggtatcagtgccgaggtaatcaatcttcgctcaattagaccgctggatagagctactattaatgcatctgtgaggaaaaccaatagattggtaaccgtagaagaaggcttccctcaacatgggattggtgcggaaatatgcatgtctgttgtagaggacagctttgagtatcttgatgcaccagtcgagaggattgctggagctgatgtgcccatgccgtacgctgccaaccttgagaggatggctgttccacaggtcgatgacatcgtccgggcagccaagcgtgcttgctacagggcagcagtaccgatggcagcaaccgcctagtccagcagaaccctgcatgttgcatttctttgtctaattttaatgtccgtgctgcagaaagacgtgtcacataatggtgtgacgagtacccactgccgctgcaactcaactatagcatgagctgagtttttgtagagccaccgagagatttgcagcagagcctctggagatgagaattttacttgtggcgagatgttgtgagtaacttgtattcagaagggggaactctcaagagatcctca

SEQ ID NO: 88882 - DNA, 1820 bp, Zea Mays
gcctaaccattcccggctcccggcagagacggccgctcgcctccagaagagcaacccaagtcgccgagagcgactcccacacgacccacctaccccgccgccgccgccgccgcatccccctcgatcccgtctggcgatcgggggctcccagacacatcacagatacacaccacgctaagccaaatcgagcaacgcctatcatcatattataatttcccctcattcatctcacagtcccaggcctcccctccctcctccccgtcgccaaccaacctccaacccccagccgatcgcgtcggagatgctgggcgtcgcgcggaggcggctcggatccggatgcgtgctcgcccagctggcgcaggccctccgccccgccgccgctcccgccaggacctactccgccgcggccaaggagataactgtacgggaagcattgaataccgcattagatgaagaaatgtcggcagacccttctgttttcttgatgggagaagaggttggcgagtaccaaggtgcatacaagatatccaagggtttgcttgacaagtatggccccgatagggttctcgatactccgatcactgaggcgggcttcactggcattggtgttggtgccgcttaccatggtcttcgacctattgtagagttcatgacatttaacttttcgatgcaggcaattgatcacataattaattcagctgccaagtcgaactacatgtctgctgggcagatatctgttcctattgtctttaggggtccaaatggtgctgctgctggagttggtgcccaacactcacagtgctatgcagcttggtatgcacatgttcccggattgaaagttctagctccatattctgcagaagatgctcgaggtttgctgaaagcagcaatcagggatccagatcctgttgtgttccttgaaaatgaacttctttatggtgaatcatttcctgtatctgctgaggtacttgattctagcttctgccttccgattggaaaggctaagatagagcgacaagggaaagatgtcactatcactgcattctccaaaatggtgggatatgcccttcaggccgctgatatactggccaaggaaggtatcagtgccgaggtaatcaatcttcgctcaattagaccgctggatagagctactattaatgcatctgtgaggaaaaccaatagattggtaaccgtagaagaaggcttccctcaacatgggattggtgcggaaatatgcatgtctgttgtagaggacagctttgagtatcttgatgcaccagtcgagaggattgctggagctgatgtgcccatgccgtacgctgccaaccttgagaggatggctgttccacaggtcgatgacatcgtccgggcagccaagcgtgcttgctacagggcagcagtaccgatggcagcaaccgcctagtccagcagaaccctgcatgttgcatttctttgtctaattttaatgtccgtgctgcagaaagacgtgtcacataatggtgtgacgagtacccactgccgctgcaactcaactatagcatgagctgagtttttgtagagccaccgagaggtgttcagtactccagttccagttccgcttatcttcgccgccgcagccggaaggctgcgcatgactctgcgtctgttttatggttcacgaatgattgcagatttgcagcagagcctctggagatgagaattttacttgtggcgagatgttgtgagtaacttgtattcagaagggggaactctcaagagatcctcaagtcgtgattccagttgcggctttcttgatagtaacgtactccctctgtttttta

SEQ ID NO: 88883 - DNA, 2191 bp, Zea Mays
gcctaaccattcccggctcccggcagagacggccgctcgcctccagaagagcaacccaagtcgccgagagcgactcccacacgacccacctaccccgccgccgccgccgccgcatccccctcgatcccgtctggcgatcgggggctcccagacacatcacagatacacaccacgctaagccaaatcgagcaacgcctatcatcatattataatttcccctcattcatctcacagtcccaggcctcccctccctcctccccgtcgccaaccaacctccaacccccagccgatcgcgtcggagatgctgggcgtcgcgcggaggcggctcggatccggatgcgtgctcgcccagctggcgcaggccctccgccccgccgccgctcccgccaggacctactccgccgcggccaaggagataactgtacgggaagcattgaataccgcattagatgaagaaatgtcggcagacccttctgttttcttgatgggagaagaggttggcgagtaccaaggtgcatacaagatatccaagggtttgcttgacaagtatggccccgatagggttctcgatactccgatcactgaggcgggcttcactggcattggtgttggtgccgcttaccatggtcttcgacctattgtagagttcatgacatttaacttttcgatgcaggcaattgatcacataattaattcagctgccaagtcgaactacatgtctgctgggcagatatctgttcctattgtctttaggggtccaaatggtgctgctgctggagttggtgcccaacactcacaggtttttgcacaaagtttcctctacatgggtgctctgttgctgctgttattctttagaggacaaattgttatgccacatgatttaattttctgaaagtcttgtggtcggacatacattgacagaggatagatcaattgtaggaataaacagtttgttacatgagttatttatcttcatactattatagtttgtcgaaatgttctgaaaaatggatttaaaatgtaaatgtgtttactgaaagaggtgtcagctttaggtcgcattaaaatcatgcagtgcatatcatctcatggacattatagtcttgtaaatattctcagataggtattttgttgtactacgatggaattactaactgccttagtatgcagtgctatgcagcttggtatgcacatgttcccggattgaaagttctagctccatattctgcagaagatgctcgaggtttgctgaaagcagcaatcagggatccagatcctgttgtgttccttgaaaatgaacttctttatggtgaatcatttcctgtatctgctgaggtacttgattctagcttctgccttccgattggaaaggctaagatagagcgacaagggaaagatgtcactatcactgcattctccaaaatggtgggatatgcccttcaggccgctgatatactggccaaggaaggtatcagtgccgaggtaatcaatcttcgctcaattagaccgctggatagagctactattaatgcatctgtgaggaaaaccaatagattggtaaccgtagaagaaggcttccctcaacatgggattggtgcggaaatatgcatgtctgttgtagaggacagctttgagtatcttgatgcaccagtcgagaggattgctggagctgatgtgcccatgccgtacgctgccaaccttgagaggatggctgttccacaggtcgatgacatcgtccgggcagccaagcgtgcttgctacagggcagcagtaccgatggcagcaaccgcctagtccagcagaaccctgcatgttgcatttctttgtctaattttaatgtccgtgctgcagaaagacgtgtcacataatggtgtgacgagtacccactgccgctgcaactcaactatagcatgagctgagtttttgtagagccaccgagaggtgttcagtactccagttccagttccgcttatcttcgccgccgcagccggaaggctgcgcatgactctgcgtctgttttatggttcacgaatgattgcagatttgcagcagagcctctggagatgagaattttacttgtggcgagatgttgtgagtaacttgtattcagaagggggaactctcaagagatcctcaagtcgtgattccagttgcggctttcttgatagtaacgtactccctctgtttttta

SEQ ID NO: 88884 - DNA, 799 bp, Zea Mays
atttcttctaaactacagccttgtgctgtcagatctcattttccctgggagtccagtcgttgtcttattctttagtaattctctgttcaggtaatcaatcttcgctcaattagaccgctggatagagctactattaatgcatctgtgaggaaaaccaatagattggtaaccgtagaagaaggcttccctcaacatgggattggtgcggaaatatgcatgtctgttgtagaggacagctttgagtatcttgatgcaccagtcgagaggattgctggagctgatgtgcccatgccgtacgctgccaaccttgagaggatggctgttccacaggtcgatgacatcgtccgggcagccaagcgtgcttgctacagggcagcagtaccgatggcagcaaccgcctagtccagcagaaccctgcatgttgcatttctttgtctaattttaatgtccgtgctgcagaaagacgtgtcacataatggtgtgacgagtacccactgccgctgcaactcaactatagcatgagctgagtttttgtagagccaccgagaggtgttcagtactccagttccagttccgcttatcttcgccgccgcagccggaaggctgcgcatgactctgcgtctgttttatggttcacgaatgattgcagatttgcagcagagcctctggagatgagaattttacttgtggcgagatgttgtgagtaacttgtattcagaagggggaactctcaagagatcctcaagtcgtgattccagttgcggctttcttgatagtaacgtactccctctgtttttta

SEQ ID NO: 88885 - DNA, 3033 bp, Zea Mays
acaagcctgccaaaccaaaccagccttccgccggattggaaactaccagatgctaccagcgctactaatccagcgtctcccaccgtaggaatctctcaattagcgacccgtgtcctgttgcacaattatatagccaccatttgagaagataggggggaggtggagcagagcgcaaggagaggggacaaggagggacgggaaggggaataagctgaggggaaggcaaggcaagcaggaatcggctgggttgcgcgccgacttcctggccgagtttttctagccatcggatcgaggcagtcccatcggcgaagacccggttccgttcggcggccatgcggttggtttctctgcttggtctgtcaggactctgatgggcatggttcatcctaggtttctggttgcttgctcggggtccaagctgtgcttcatctccagttgccgcggtagcagcgcaaagatgatgatgtcctttctccggaggcgtccggagcgtcgttccacgcttcctatattgattgagttcggtagatgattcttggacatcggtttggtgttcggtggggctcaaatacggattctgaaggacttcaaaggtgcttgaatcagtacatcttaggtgctatcccagactaggctgcgatgggtttaccccaaccttcaacagtcgaggatgatgcgccaacagcactgcgcacctctatttcttgccctccacattctggaggagttagtgcctgtgatttggatgggcttcctgcgggaagctctagcagaagggtgctttcgtacccattgatatgtgattttgatagaaaggccacattagatgctcctaatgaatcaaatgggtattctaaagacggatgtgaatttggcgaacccgcagacctccatggactaaacattgattcaagaaatacaaattcttggtcttctcctaaattagtgccttctgtccatatgccggcaaggagggttgtgggctttgattctggttgtattggaggttctgatggggcagaaacggatatggtcgattcatctttggtcgacagaaattctcatttgccatttgatcagcatgaacttcaagcaaggaaaagactgttctctccattgaaaaatgtgctcgttaaacagttcaatggtgatatgctcaaccttccttctggtgattctagatttaggcattctgattcagccgataaactatacagtactggtttccaagataataaaaaagccaacacgggatgcatcaatttttttgaaacgcgggatactccagcctctaggtgctccagccggagcccagaatgggatgttactaggagcaattctaattcattcactgatggtcctttacttgggagcaaggattatatatcctattatgatcatctagcagctagtgcaaaattagcgcactctccgctttctctgtctcctctcagccctaaatatatgaacaaaattaaagtgacaggatctcaaagatatataatgaaagatcttgaggatgacttcctagatttaaaggaaactggaggttctggcggagctaggatgccggaggtatcaaaaggatctaacttgttacatgatgaacttgatgttatgacacctaaatggggttcattgagaagatatcaaaattggggccctgaatcttcccctacatctcccagaattggttatggtcggagtttgtctttgcatgtaaggaggtcacttgttggctcctttgaggagtctcttttatctggtcgatactcgtatggaaaagacagtcagacaattgatggtttcttagctgttctaaatgtcactggtggtagtttcttccccacaactcagaaacttccattctcagtaacaagcatcgatgaggatagctccttactatactattcttctattgatcttgctgggaggttgccttcgaataacaccaaaagcccaaagctccaaagaagctacagtaataatgattcgcggtcagcaaagagtcgtttacgcatccctgttaagggtcgcatacagctggtggtaagcaacccagagaagactccacttcatactttcttctgcaactatgacttgagtgacatgcctcctggaaccaagactttcgtgcggcaaaaggtcactctctccccctctgccttgccttctaatccagtggaagaaggaagcaagacttgtgatgttaattctggtcacaaatcttctcagtcagtttcatgtggaaatgaacctagcgaacggggagctcgttctgaatgctgcaacggtggacagaactgcaactcaaatgatgaatcagaaaaaggagatctgaaaacaagatgtcgatcattggatagtgattctaatgaatcaaataagtctagttctccaggaaataagaaagaccagtctgattctgatggttgctgctgtcaaatggataagtttggcatgggagaaaagaaatcatgctgctcaccttctaagatcaatgatagttcaggtggagctgtgcttcgttatgctttgcacctgcgatttctgtgcccctccaagaaaaaatcctcgaaatcaatgcttcgttgcaaatctgatctatcaacggcaccatatagcagcaatacgctacctgaggaagaacggaggttctatctctacaatgatcttagagttgtatttcctcaaaggcactcagatgcagatgaaggcgagctgcgagtggagcatgatttccccgccgatcccaagtactttgacataagcaactgatggttgcgctgctgcaccggacaataataatctgtaaatatgttatcatgactaacttggtcaccagccgtttcatcttttcaccaacaaatgtacaggtcaatgttccaaataaaatgcaccatttagttgtgcctatatgttctttcctcctgatttcgaaaccgtcagagggctgttctgtcatgtttctgaacactagctgtcacctgttaaaactgatgctgatatgtctgtctcttccttgccatgggg

SEQ ID NO: 88886 - DNA, 1263 bp, Zea Mays
cattttatttttaccccttccattgtttgcacctttacttcgaataattggttcatgtttgaacatatgttctttcacatatgtctgtctgctgcctggatttctaggcaacatggacaaaagattctttgttgttgtgtgttgtgggggagttcctcacagcagtcaataaaggcaaagatttacaggatctgatttacacatctgcgcctgcccacttttgggagttgtattccgagtctctgtacaattgaaataaaaaaatgactttgacaggtggtaagcaacccagagaagactccacttcatactttcttctgcaactatgacttgagtgacatgcctcctggaaccaagactttcgtgcggcaaaaggtcactctctccccctctgccttgccttctaatccagtggaagaaggaagcaagacttgtgatgttaattctggtcacaaatcttctcagtcagtttcatgtggaaatgaacctagcgaacggggagctcgttctgaatgctgcaacggtggacagaactgcaactcaaatgatgaatcagaaaaaggagatctgaaaacaagatgtcgatcattggatagtgattctaatgaatcaaataagtctagttctccaggaaataagaaagaccagtctgattctgatggttgctgctgtcaaatggataagtttggcatgggagaaaagaaatcatgctgctcaccttctaagatcaatgatagttcaggtggagctgtgcttcgttatgctttgcacctgcgatttctgtgcccctccaagaaaaaatcctcgaaatcaatgcttcgttgcaaatctgatctatcaacggcaccatatagcagcaatacgctacctgaggaagaacggaggttctatctctacaatgatcttagagttgtatttcctcaaaggcactcagatgcagatgaaggcgagctgcgagtggagcatgatttccccgccgatcccaagtactttgacataagcaactgatggttgcgctgctgcaccggacaataataatctgtaaatatgttatcatgactaacttggtcaccagccgtttcatcttttcaccaacaaatgtacaggtcaatgttccaaataaaatgcaccatttagttgtgcctatatgttctttcctcctgatttcgaaaccgtcagagggctgttctgtcatgtttctgaacactagctgtcacctgttaaaactgatgctgatatgtctgtctcttccttgccatgggg

SEQ ID NO: 88887 - DNA, 959 bp, Zea Mays
gtattttcaatcatctgtcctgatcttgtttctcatattgtgtaacgagacagactttcgtgcggcaaaaggtcactctctccccctctgccttgccttctaatccagtggaagaaggaagcaagacttgtgatgttaattctggtcacaaatcttctcagtcagtttcatgtggaaatgaacctagcgaacggggagctcgttctgaatgctgcaacggtggacagaactgcaactcaaatgatgaatcagaaaaaggagatctgaaaacaagatgtcgatcattggatagtgattctaatgaatcaaataagtctagttctccaggaaataagaaagaccagtctgattctgatggttgctgctgtcaaatggataagtttggcatgggagaaaagaaatcatgctgctcaccttctaagatcaatgatagttcaggtggagctgtgcttcgttatgctttgcacctgcgatttctgtgcccctccaagaaaaaatcctcgaaatcaatgcttcgttgcaaatctgatctatcaacggcaccatatagcagcaatacgctacctgaggaagaacggaggttctatctctacaatgatcttagagttgtatttcctcaaaggcactcagatgcagatgaaggcgagctgcgagtggagcatgatttccccgccgatcccaagtactttgacataagcaactgatggttgcgctgctgcaccggacaataataatctgtaaatatgttatcatgactaacttggtcaccagccgtttcatcttttcaccaacaaatgtacaggtcaatgttccaaataaaatgcaccatttagttgtgcctatatgttctttcctcctgatttcgaaaccgtcagagggctgttctgtcatgtttctgaacactagctgtcacctgttaaaactgatgctgatatgtctgtctcttccttgccatgggg

SEQ ID NO: 88888 - DNA, 101 bp, Zea Mays
actgtacattggtttcatgagaatttaaaacatcaaatgttatgggatagagggagtaggaaggacatgaggaattacagaatctttcgaacctctgaaag

SEQ ID NO: 88889 - DNA, 543 bp, Zea Mays
actttcgtatataccatccacaccatgccaatatttcatatatgccacaacagcacatctcaatatgtacaaccatctttcattagaatgccacatctacttcatgataaaagatgactagaaaattaagagaagcaactccatttacaagcttactatgcatcacctgcagcaaacaaaaccaaaccgtttgccagatgactaaataaggaccactgatgctaaacaagcaaacggcggggaaagaaacaacatgcgcatcatgatactgaagccctagaacgacatgtacataggttgctttcatgccatgaattcggattgtctgcacgacaagctaggaccgagcggggctggatccctgttagttgagttgaccacaccaagagaacctcaatttactgaaggtgtggttgcaagatcatctactatgatcctctaacaatgcaagaatgtcttcgtcgcttgttccaccatcgattgcatactgcaatgctgtcctaccatctcgatccatggcttgtgaatcagcccctctgcata

SEQ ID NO: 88890 - DNA, 2236 bp, Zea Mays
gtcgaatttctcactccgatgtgctaacctagtgggatttctttctcctcaaatcacacgctgccgccggctgatcagatccagcgcctaacccggcggctccggcgacggtgagtcgccggcgtccatgacaccggccgcggcgtggtgcgcgcagcaccgcctccggttcctcctaccgtccctcttcctcgcgcccgtcctcttcttcctcctgtcgccgccgtcctctccgcccttcgtcagcctccccgcctccggagagctgcctcctttaagctcgcggctcatatgggcgcagcggtggttggtggagtggcgcccgtgcgggtggtggcggacggcgccattgcaagctccgtccaggaggaacgggtacatccgaatagattgctacggcggtctcaaccagctgcgacgtgatttatgtgacggaattggggttgcacgacttctgaacgcaacaatggttctacccaagtttgaggttgccgcctattggaatgaatctagtggctttgcagatgtttttgatgttgattacttcattgagcagactagaggatatgtggaagttgttaaggacttgcctgcagagatagcgtccagagaaccatttaaggttgactgcagtaaacggaaaggacattttgattacgttgaaacggtacttccagctctcttggagcatcaatacatctcattgacacctgccatgaatcaaagaagggatagaaaccccgcatatgcaaaagcttcatactgtcaaggctgttacagcgctctcaggttgaataagaatgtggaatccaaagctgttgagctcctccaagccataccaaaacccttcttatcccttcacctgagattcgaaccagatatggtcgcttacagtcggtgttcatacactggcctttcttccaaatcaatggactccattgaagctgcacgcagggagggtaggaaggtattgaccggtgacgctgcccgcctgtggaggaaccgtggcaagtgccctctgacaccaagcgaaacagcattcatcctccaggcgctaggcattcctacaaacacaaacatttatttagctgctggtgacgggctaatggaactcgagggtttcacgtccgtttacaagaacacgtacaccaaatcgtctctcctgacccatgaagctttcgagaacatgcatggcaacacaaaggctgctctcgactactatgtttcggtcaacagcgacgcctatgtcgccacattctttggaaatatggacaagatggtaactgcgatgagaacaatgcaaggtctccagaggacactggtcttgagcaggagggccttcgcaaactacactgccgctgggctagcagggcagcaactggctaaggctatgtgggacgctcatcgagaggagtatgtcagaggcagggggtcggctctgcccgagtactgcttttgtgagttcaaattgtagcgctagtggctaagtgatatgaggtttacctagacggacacctgttggcttggcgcaactgttagatctcgctgtgattgtgtagacatgaatgagctgttactgcaaacgagatttcagtcagatgagcttcaactgggtacagctgagagacattgatgtgttatgacctggccttctgtgcgagtcagctgcgctgtagtatctagaccaagtggaaatgctcttgtcatatcccataacagagatgcagttcaggtgctgccggacgtgaaacagtagtgtgtgtctgtgagctacaacacgcgggaaggttcgagtatgatgatccatcagccgagctaagaggaaaggggtacttaactggtttggaggacaagcgggcgacagttttggaaattctgttactcttctctaacaaactgtattcttctcccttccagtctcttcatctgttttcgttgtaattctgtatgctgttgaacttgtggagaaagaagaggaacaattttcttctgagatttgtgtgtgcgtttgcaccgttttatcactggtgatcctgtcagagctctctggttggcttcattggaattggctgcctttgggtttgggggacatgttctgccgcacacaccggccagaacattttccgacgtctgggtttttgccaaactctttgatttttttttattttagctcatccctccatcctaaaatagttgacatttctctgttctgaaatagtttttaatcttaccttct

SEQ ID NO: 88891 - DNA, 2225 bp, Zea Mays
gtcgaatttctcactccgatgtgctaacctagtgggatttctttctcctcaaatcacacgctgccgccggctgatcagatccagcgcctaacccggcggctccggcgacggtgagtcgccggcgtccatgacaccggccgcggcgtggtgcgcgcagcaccgcctccggttcctcctaccgtccctcttcctcgcgcccgtcctcttcttcctcctgtcgccgccgtcctctccgcccttcgtcagcctccccgcctccggagagctgcctcctttaagctcgcggctcatatgggcgcagcggtggttggtggagtggcgcccgtgcgggtggtggcggacggcgccattgcaagctccgtccaggaggaacgggtacatccgaatagattgctacggcggtctcaaccagctgcgacgtgatttatgtgacggaattggggttgcacgacttctgaacgcaacaatggttctacccaagtttgaggttgccgcctattggaatgaatctagatgtttttgatgttgattacttcattgagcagactagaggatatgtggaagttgttaaggacttgcctgcagagatagcgtccagagaaccatttaaggttgactgcagtaaacggaaaggacattttgattacgttgaaacggtacttccagctctcttggagcatcaatacatctcattgacacctgccatgaatcaaagaagggatagaaaccccgcatatgcaaaagcttcatactgtcaaggctgttacagcgctctcaggttgaataagaatgtggaatccaaagctgttgagctcctccaagccataccaaaacccttcttatcccttcacctgagattcgaaccagatatggtcgcttacagtcggtgttcatacactggcctttcttccaaatcaatggactccattgaagctgcacgcagggagggtaggaaggtattgaccggtgacgctgcccgcctgtggaggaaccgtggcaagtgccctctgacaccaagcgaaacagcattcatcctccaggcgctaggcattcctacaaacacaaacatttatttagctgctggtgacgggctaatggaactcgagggtttcacgtccgtttacaagaacacgtacaccaaatcgtctctcctgacccatgaagctttcgagaacatgcatggcaacacaaaggctgctctcgactactatgtttcggtcaacagcgacgcctatgtcgccacattctttggaaatatggacaagatggtaactgcgatgagaacaatgcaaggtctccagaggacactggtcttgagcaggagggccttcgcaaactacactgccgctgggctagcagggcagcaactggctaaggctatgtgggacgctcatcgagaggagtatgtcagaggcagggggtcggctctgcccgagtactgcttttgtgagttcaaattgtagcgctagtggctaagtgatatgaggtttacctagacggacacctgttggcttggcgcaactgttagatctcgctgtgattgtgtagacatgaatgagctgttactgcaaacgagatttcagtcagatgagcttcaactgggtacagctgagagacattgatgtgttatgacctggccttctgtgcgagtcagctgcgctgtagtatctagaccaagtggaaatgctcttgtcatatcccataacagagatgcagttcaggtgctgccggacgtgaaacagtagtgtgtgtctgtgagctacaacacgcgggaaggttcgagtatgatgatccatcagccgagctaagaggaaaggggtacttaactggtttggaggacaagcgggcgacagttttggaaattctgttactcttctctaacaaactgtattcttctcccttccagtctcttcatctgttttcgttgtaattctgtatgctgttgaacttgtggagaaagaagaggaacaattttcttctgagatttgtgtgtgcgtttgcaccgttttatcactggtgatcctgtcagagctctctggttggcttcattggaattggctgcctttgggtttgggggacatgttctgccgcacacaccggccagaacattttccgacgtctgggtttttgccaaactctttgatttttttttattttagctcatccctccatcctaaaatagttgacatttctctgttctgaaatagtttttaatcttaccttct

SEQ ID NO: 88892 - DNA, 511 bp, Zea Mays
cacgcgccggcgacggagccacagcggcggcctcggtaccgcggcgtgcggcagcggccgtggggcaagtgggcggcggagatccgggacccggtgaaggcggcgcgcgtgtggctcggcaccttcgccaccgccgaggacgccgcgcgcgcctacgacgacgccgcgctccgcttccggggcgccaaggccaaactcaacttccccgctaacgcgggccacggcaccgctgccgccttccagccccgctaccgcggccagcatcggccggggacgccgagcgctgctgctgctcctgttggctgtcacgaggagccgtcgtcgtcgttccccgacctcggccagtacgcgcgcatcctgcagagcggcggcggcgacttggacctgcaggccgccttcgcgggcggggtggcgccggcggggcggtcctcgacttccgcggcgtcggcgtcggcgtcgtcgccgtggcaaggtgctacttgacattgtatcgcgcgacgatcagcacaca

SEQ ID NO: 88893 - DNA, 2717 bp, Zea Mays
atggtctttatgcgattccgccccccagttcattttcttctcactccccggctccactcctaaacccagaacccagcccgccgcaaccctagccgccgccgccggcaccacaccaccgccatagtcacctccatggccgcggcgtcggaggacgcgttgcggcgctcgctcgcggagcgccaggccgccgtggacgcgcaggccgaggccgtgcgcgcgctcaaggccggcggcggcgcgtccaaggccgacgtggacgccgcggtcgaggcgctcaaggcgctcaaggtcgaggccggcgccgccgcgcgccggctgcagcaggcggtcggggcgggcgcgggtggcgccgcgagggaggagctgcgccaggcggtggtcaacacgctggagcggaagctgttttacataccctccttcaagatctaccgcggtgtcgcggggctctacgactacgggccgcccgggtgccgcgttaaggccaacgtgctttccttctggcgccagcactttgttttggaagagaatatgttggaggttgactgcccctgtgtgacgcctgaggttgtcttgaaggcatcgggccatgtcgagaagtttactgacctcatggttaaagacgagaagacaggcacatgctaccgtgctgaccacttgttgaaagatttttgcaaggagaagcttgagaaagaccttgccttgccccaagagaaggctgatgaatttaagcgtattcttgccattttggatgacctctcagcagaggaacttggtgcaaagattaaggaatacgacattgttgcccctgatacaaaaaatccgctttctgatccctacccattcaatcttatgttccagacatctattggccccactggtcttagcgtggggtatatgcgaccagagacagcacagggtatttttgtaaatttcaaggatctatactattacaatggccaaaagctcccctttgcagctgctcaaattgggcaagcttttagaaatgagatctcgccacgacaaggtcttctccgagtgcgtgaattcacattggcagagattgagcattttgtggacccagaggacaaatcacatccaaaatttgttgatgttgctgatttggagttcctgatgtttccaagagagctacaactctcaggggagtcggccaaactattgaagctcggggaagcagttgcaaagggaactgttaataacgagacacttggttacttcattggaagggtctatcttttcctgacatgcttgggaattgataagggtcggttgcgcttcaggcagcatttacctaatgagatggctcattatgctgctgattgttgggatgctgagatagagtgctcttatgggtggatagagtgtgtgggtattgctgatagatctgcatatgatttgaaagctcacagtgagaaaagcggtgtcccacttgttgctcatgaaaaattctccaaacctagagaggttgagaaacttgtcatagttccctcgaagaaagacctggggctggcttttaagggcaaccaaaagatggtccttgaagctttggaggctatgagtgagaaagaagcatttgagatgaaagctgaactagaaaccaagggggagacaaattttaaagtctgcacgcttggaaaagatgtggtgattacaaagaagatggtatcaatcagcatggaaaagaagctggaacatcagcgagtcttcaccccttcagttattgagccgtcatttggaataggccggatcatctactgcttgtttgagcactcattttgcacaaggcctagcaaatcagaagaggaacaactgaatgtcttccggtttcctcctcttgtggctcctatcaagtgcaccgtgttccccctcgtcaagaatcaagagtttgatgctgctgccaaggaaatcgccaaggcattaacaactgctggtatctcacacattattgatactactgcaatttctattgggaggagatacgcgaggaccgatgagattggtgttccatttgccgtgacagtggattcggcaacaaacgtgactatccgagagagggacagcaaggagcagatccgtgtggacataaacgaggtggcgtccgtggtgaagcagctgacagaaggacaaagcacctgggcagatgtttctgcaaagtatcctgcccatgttggaccccaaggtgaccaggagtgaaaaatcctgccacccttatgtctagccatggaccgagaaggagccaggatggatttcattctccgattgccgagaagattgactagcctaaacataaccgcatttggtatttgacacgatccagcgcggtagtcccccttctcatacatacatgatacgtgctgttataaaatcggcagagctcaccaatgtttttgtttcttgtaaatgtctttttttcttaatatattgtctcacccacacaaaacttactatttgagttacttctgaactagttgcccttttgtaaggtcaaaccgagaattgaactgggatccacagtggaattggaatataaagagtttggttgtttgcccataaaaggcccgtatccaggctccaacaccaaaaggagggcctctccgtagcctgactccctatcccactctttatttttaaatttcactatgtaaacggtatactctataatgtattcccttgtcttagaatataaaaaggcataacca

SEQ ID NO: 88894 - DNA, 981 bp, Zea Mays
atgggatgcttccattccacggccaagcggcagcatcctggctacgaggaccctgtgcacctcgcctcccagacctcctttagtgttagtgaggttgaggctctattcgagctgttcaagagcataagtcgttcagtgattgacgatggcctgatcaacatggtatattctattactcatctctgtattccttgctatattgtcagttttgtgtatgaacatcaaaacaagccactcagacgtagaaaacttgacatacattactccattccgaaggacaatccttcggagaaggatattaaccaggggatgcttgttatatttaatgttgacccctctataacaaacaatgatatccatcagatatttagcgaatatggtgacataaaagagattcatgatgcaccgcaaaagggccatcacaaaattatagaattttataatgtcagagcagctgaaggtgcagctcgtgctttaaacaggagtgatcttgctggcaagaaaataaaactggagactggccgtctgagtggtgctagacgttcaacacaacacatgtccaaggagttggggttggaagaatttggcgtatacaacctgggcagtccaagcacaaatagcccttcattgccttcattgggtatgagcctgtcctctcccattggaattgcttctgctgcaactcatagtaaccaggctccccttggtgagatcagccactctcttagtcggatgaataggcatgtgaattatggttttcaaggcttgggtgctattcatccccattctcttcctgatgttcacaatggagcaaataatggcaccccttacaatctgaacaccatcacacctgttggtgtcaataagaactcaagaacagctgaagcagttgacagcagacatcttcataaagtgggttctggcaatctcaatgggcactcatttgatcgtgccggtgaaggagttgtaaagtggtggtga

SEQ ID NO: 88895 - DNA, 2581 bp, Zea Mays
cgccccggcgcctccccggaacgacctcccacgtggtgggccctcccccgcgttccacctgttttctccgttgacagcgcatcgagccttgcactgcccccactttccagtgtcacttgcgtaactcacctcgctgggtggggcccaccgggagccccgtgcgccgcgcgcgcgcgaggggtcaaactaccgccgcgttgtcgcgctcatcgtcgccgcgtgctgtggtctgctgctcctgctgctacccctcaatctccccgcaccgcacctcacctcccccagctcctcctcttcctctaattgctacacgctttcgaggctagggttgcctcgtcctcctcgctgtccacatggcgcgaatcctcatgcggctcctcctcctcgccgcggcggcggcggtggcggcgggggacggctgcctcaactccggctgcgtcgcgctgggctcctacctcgtcgcccggaaccagaacctcacctacatcgccagcctcttcggcatcggcgactaccacgcgctggcgcgctacaaccccggcaccacaaacctggactacatccaggccggccagagcgtcaacatctccttcacctgcggctgccacacgttccccaactcggacgccacctacctcggcggctccttcccgcacaaggttgtcaccggcgacacctacggcggcatcgcccagaactacaacaacctcacctccgccgcctggcttgccgtcaccaacccgtatcccacgaacaacatccccgacaccaacaccgtggtgaacgtcacggtcaactgcacctgcggggacccgaagatctcgtcggactacgggttcttcctcacctacccgctcatgggccagaccctcgccgccgtcgccgccaactacagcttcaactcgtcgtcgcagttggacctgctccgcaagtataaccccggcatggacaccgctacatccgggctcgttttcatccccgtcaaagatggcaatggaagttaccatcctttaaaaccaccaggaaacggaggttctataggagctatagtaggaggagttgttggtggtgttgctattctggtcctgggcgtcttgttatatatcatgttctataggcgaaaaaaggcaaacaaggctgccttacttccatcttctgaagattctacccaacttgctactacatccatggataaatctgccttgtcaaccagtcaagctgatagtagctctggagttccaggaattactgttgataaatcagtagagttctcgtatgaagaactttttaatgccacagagggatttagcatgagtaacaaaatcgggcaaggtggttttggtgctgtctattatgctgagctcaggggcgagaaagctgccataaagaaaatggatatgcaggcttctcacgagttccttgctgagttaaaagttttgacacatgttcatcatttgaatctggtgcgcttgattggtttttgcaccgaaagttccttgtttcttgtctatgagttcatcgagaatgggaacttaagccagcatttgcgtggaactggttatgagcctctgtcttgggctgccagggttcagattgcactagattcagcaagaggtcttgagtacattcatgaacatactgtcccagtgtacatacatcgggacatcaaatcagcaaatatcttgatagacaagaactaccgtgcaaaggtcgcagattttggtttaacaaaacttacagaagttggtaatacatcactacccacacgtggaatcgtgggcacatttggttacatgcctcctgaatatgctcggtacggtgatgtttctccaaaggtcgatgtttatgcctttggcgttgtcctctacgaacttatttcggccaaagacgccattgtcagatcaaccgagtcttccagtgattcaaagggattggtttatctgtttgaggaggctctcaacacaccggatcccaaggaaggccttcaaagactgattgatccggcgctcggcgaggattaccccatcgactcgatcctcaagatgacggtcctggcaagggcgtgcacgcaggaagaccccaaggcaaggcccacgatgagatccatagtggtggcgctgatgacgctgtcgtcaaccagcgagttctgggacatgaacgcgatccaggagaaccaaggtgtcgtgaacctcatgtccgggagatgactcctgtccctgtgggctgtggtatatattattgtacgtcctacctgccttcccctgggcaattgtacattagggctcatttgtacggcccgttgacggccagagaggagggccactgtaggtatttacaatgtaatatcttgtcactcaagggttttctcccgtgtttaggctccctttggaacaaaaaggaaatttcctgaacctgtgttttttgctgtattttttaactaatttctatgaaattcttatagcattcatgtgaaattcctgcattctaaaggatcggaaggtcgttgagagccgcgtgtgagttactggggttatgtacaactctgaagatacttataaaagttattaatatttacttattt

SEQ ID NO: 88896 - DNA, 1880 bp, Zea Mays
agtagacgccagcactgtcgtcagcaagccccatccgcccacccgcttttatttatatctacgagaacaacaaacacatagcggcgaccggcgacgagcggaagccttcctccatcttcaggctgctagtactcagtagtcagtacagtacagtggtgccgacgacatgacgaagatctcccgctcgttgctcgtcgtcatcgcgctggtcctcctcggccctcacctcccgccatccgaggcgctgacgcccaagcagggcgtcaggtccaagaccttcctgtccccgcccatcctgcttcgcccgggcgacgtggccgacaagttctactacgacatccccttcccccggggccacctggcgctcaagagcttcaacggcgaggtggtggacgagcgcggcgcccccgtgccgctccacgagacgtacctccaccactgggtcgtgcagccctactacgccctggtagtatcggcggagggcggcagcagccggccgcggaccatcccggcgcgcaacgccggcgtgtgcagcggccacacgctgggccagtactacgggctggggtccgagacccggcgcacggccacgtgggtgcccgacccgtacggcatcgagatcggcgacccggccgcggcgcccgccgagggctacgagcagcgctggctgctcaacgtgcacgccatcgacacgcgcggcgccgccgaccggacgatggcgtgcaccgagtgccgctgcgacgtgtacaacgtgacggcggactggcgcgggcacgccatcgagcccgggtacgccggcggcctgcgctgctgctacgacggcacgcggtgcggcgccgcggcggagggggctgaggggaaggccaggactgtgttcctgcgctacacggtgatgtggcgcgactggagccccgcggcggtgctgcccgtgcggatctacatcttcgacgtggccggctgcggcgtggagtacgacgtggaggagcagtgcagcggcggcgcgggcggggagtgcgtgcacgtgaagacggccacgcaggcgctgccgcggggcggcgacgtggtgttcggcgtggcgcaccagcacgcgggcggcgccggcgcgtcgctgcacggcgccgacggccgcctgctgtgcgagtccgcggccacgtacgggggcgggcgggaggccggggacgaggcgggctacatcgtcggcatgtccacgtgctacccgcgcccgggcgccgtcacggtgcgcgacggcgagccgctcaccgtcgtgtccaggtacagcagcgaccggcgccacacgggcgtcatgggcctcttctacatcctcgtggccgaccacgcccggcagctgccgccgcaggagggcctgtgcttcagcttcccggtcccatgtgagcgaactaactgaataaattaaacgaactcttgcatttgcatttgcatgcgacaatatgtgatttcggacggtagttctcatcttctctcttgatttttttttccatcaaattttgttgcagggtgcctaccgtcatggctgtcgagcaacctgtgagatcttttggtgttgaaagctggtgctatgttctaattagctgcttggttagggttcggttcggggctggtgatggtagggcaaagcaaggaaggccgcgtgggtccttgcgttactcatacagtagtagtaatgtaaaaatatagaagcagcggtcagtctactctgctgttgctgtattatacaataaccacgtcgctccctccgtttgacttctccacgtgctgccgttgttgctcaggagtcaggagtctggacatgttcggttacatcggaactattctgaaactattctaaatgatcaattattatataaactaaattatcattc

SEQ ID NO: 88897 - DNA, 1774 bp, Zea Mays
agtagacgccagcactgtcgtcagcaagccccatccgcccacccgcttttatttatatctacgagaacaacaaacacatagcggcgaccggcgacgagcggaagccttcctccatcttcaggctgctagtactcagtagtcagtacagtacagtggtgccgacgacatgacgaagatctcccgctcgttgctcgtcgtcatcgcgctggtcctcctcggccctcacctcccgccatccgaggcgctgacgcccaagcagggcgtcaggtccaagaccttcctgtccccgcccatcctgcttcgcccgggcgacgtggccgacaagttctactacgacatccccttcccccggggccacctggcgctcaagagcttcaacggcgaggtggtggacgagcgcggcgcccccgtgccgctccacgagacgtacctccaccactgggtcgtgcagccctactacgccctggtagtatcggcggagggcggcagcagccggccgcggaccatcccggcgcgcaacgccggcgtgtgcagcggccacacgctgggccagtactacgggctggggtccgagacccggcgcacggccacgtgggtgcccgacccgtacggcatcgagatcggcgacccggccgcggcgcccgccgagggctacgagcagcgctggctgctcaacgtgcacgccatcgacacgcgcggcgccgccgaccggacgatggcgtgcaccgagtgccgctgcgacgtgtacaacgtgacggcggactggcgcgggcacgccatcgagcccgggtacgccggcggcctgcgctgctgctacgacggcacgcggtgcggcgccgcggcggagggggctgaggggaaggccaggactgtgttcctgcgctacacggtgatgtggcgcgactggagccccgcggcggtgctgcccgtgcggatctacatcttcgacgtggccggctgcggcgtggagtacgacgtggaggagcagtgcagcggcggcgcgggcggggagtgcgtgcacgtgaagacggccacgcaggcgctgccgcggggcggcgacgtggtgttcggcgtggcgcaccagcacgcgggcggcgccggcgcgtcgctgcacggcgccgacggccgcctgctgtgcgagtccgcggccacgtacgggggcgggcgggaggccggggacgaggcgggctacatcgtcggcatgtccacgtgctacccgcgcccgggcgccgtcacggtgcgcgacggcgagccgctcaccgtcgtgtccaggtacagcagcgaccggcgccacacgggcgtcatgggcctcttctacatcctcgtggccgaccacgcccggcagctgccgccgcaggagggcctgtgcttcagcttcccggtcccatggtgcctaccgtcatggctgtcgagcaacctgtgagatcttttggtgttgaaagctggtgctatgttctaattagctgcttggttagggttcggttcggggctggtgatggtagggcaaagcaaggaaggccgcgtgggtccttgcgttactcatacagtagtagtaatgtaaaaatatagaagcagcggtcagtctactctgctgttgctgtattatacaataaccacgtcgctccctccgtttgacttctccacgtgctgccgttgttgctcaggagtcaggagtctggacatgttcggttacatcggaactattctgaaactattctaaatgatcaattattatataaactaaattatcattctgaatcgctgtcggtcaaac

SEQ ID NO: 88898 - DNA, 2031 bp, Zea Mays
atgacgagtagcttcgctctcccggggccgccggcgggggacgctcgcgttcgcggcgagtggctcgccgcggcttccgccttcggcggctacctggaactggaaggtcgcgtgcatggaggccagccttccggcgcggtcttcacggactccgcgatgccattgctactcagcagcaagggggcgccgagttctctcctcggcgacatagaggcgtatctgaaccccatctccggcgagctactcgcggaccccgcgctacggctcaccagatacctggccgctgcgaagttgtcgctggtgcttcagcggcagcaggcccttggcactggcagtggcacggcatccggcgacacgcacgagcatgaaaaacgtccgaaaaaattgctcgaccaggccatgtcttccctcgcgatggagttctgccacctccggatctggaggctcgacgccgacgtgctgcggggccatccgcatcgtcgcctgggtatctcgcccgcgtccatctgggagtccgtcgtcaggggcggctgccgcggcggttccaggtctgctgctgattcggtggcctcatggccgagctcctcctctacctccttcggcggcactagtggcactggcagctcaagcgggttcctctcggctctgtgcgaggacatgtcggtccgaagtgacaaggcattcggacgcatggatcttatcgacaggaaggtgctgtccaccatcaatgacattgcgggcctcatgatccaaggtggatacgaatacgaagatatgctccgacgggccatcgatcgacactctgctcagcttgccagttacctcgaaatcctcgacatggacaacattctgggcggccacaaggaagagcccaaggaaactgtgctgaacgtttggacagcggggatgcacatcatcgtcggtgttctgggtgagatgcgaaggcagttgaacgggcaggatcttggctggttcaacatgctcaaggaggattatttctcagcgatcgcaaaacaatctgtgaggaggctgctcagagcggccgattctatctgcactcagatccatggcgtcggcgtcgcgtcaccagtcgttgatccagttcacatgatggataccgatgatacctacacagcagttaagcctgatgacctcctcctgtccagcaggacggcggtgggtctggtgatgatgtacaaggcactgaactgtggcatgccgatagtactggcactgctctctacaggtcacgccaaggactccatcctcgcagagggcgaagcgctggtgcagcgcttgtcggacatgttcgtcaagctatgtgtggagcagaaggagctggtgagggcgcggcgtttggacatctccgacaccggcgtccatcccttcacgaggcgcgtcatggctcacgtgcggacgctggtccagcacgggagcacggtctgcctgatgctcaagggtcgcccgaaggcggcgttccacgagctggtcgcgcagctcgtctcctcgctggagtgcgcgctggacagcaactctagaggtctgcagatccctggccagcagcagatgttcctgctgaacaatgcacacatgatgcttcaggaggccagggcggagagagacctgggccgggtcctaggcgaagggtggctggcgcggcgccatgaccagctggacgtgttcatcgcaggatacgtagacacttcatgggcacctgtcgtctcctgtgcgctgagacgacgacggaggaccacccgagcacgggagaccttgtggccggcgtcgtcccaccggcagtcgtttgacaagctcacttggctcttggagaccacctgccgggtgcatagaacttggaaagttagcgatcctctggtccgggacaaggtgcgggaggcagtgtttcacaaggttgtcccagtgtaccggatgcatatggagaattgtcaatcggagaagaagcagcagcagcagcagaaatgtgcgaggcggcacagcgtcgcaactgcaggaactgttcgaggggtagggtaa

SEQ ID NO: 88899 - DNA, 636 bp, Zea Mays
atgaagaccatcggcaaggcggccgagctcgtgagcaaggccgtgggcgcgctgcgggggaaggccgccgtcctcagggcccgcctcctcttcctggcctcgccgcgccggagggccgcggtgttcgccgggatatcccgccacacccgcgcgctgacgacgccgcgccagcacaaggcgaaggcgaaggcggcggcgcagcaatactgccacggcggcagcagggcggccctcgcgccggcggacgacgtcgagggactaggcgccgctggcggcctcccccgccatcgtctccccgtccccgccgccagcttgctgctcgcagtccaagagggcggcggcggcggcagtgacggcgtagggtgcactgccgactgggcactcgcgctgcgctcgctgttcgacgacgacgaaggtggtggcgacggttatctgccggcggcggccgcggcgactgatgggctcgacgaggaggaggatcaggacgggacgtcggtgatcgacgtcatccggaggcgccgagagggcgacgggcaggagttcaggatcgaggacgagatcgaccgggccgccgacatgtacatcgccagggttcgacgccggatgagcgcgcagctggaggacctaattgcctaa

SEQ ID NO: 88900 - DNA, 471 bp, Zea Mays
ttccaccctccttccattccgttcggatacaccgtctcgtttctctctcctcccctcgcccgtcttccctcctgtgcgagctcagctcacggtcctcccacccccacgagcgcctccgcggcgaggaagagataatcagcaggcggagcggggggcgcgccgatggatctggagaggccgccgccggcgtcggcggcggaggcggccggggccgcggcgtgctccatctgcctggatccggtgctcgcctgcgtcgcgggccggtccgtcgccaagctgcaatgcggacacgagttccacctaggtcagattcctcgcggctacgggctttcgtcatacagatctgcttgtgatggttgctttggtcggtcgggtaacgtgcgccacgggcgcaatttgccgtaactgaggaattctggtggggtagcttttctagatttcatagtgtcagcgacgtggttcagacttgaa

SEQ ID NO: 88901 - DNA, 1759 bp, Zea Mays
ttccaccctccttccattccgttcggatacaccgtctcgtttctctctcctcccctcgcccgtcttccctcctgtgcgagctcagctcacggtcctcccacccccacgagcgcctccgcggcgaggaagagataatcagcaggcggagcggggggcgcgccgatggatctggagaggccgccgccggcgtcggcggcggaggcggccggggccgcggcgtgctccatctgcctggatccggtgctcgcctgcgtcgcgggccggtccgtcgccaagctgcaatgcggacacgagttccacctagattgtattgggtctgcattcaatgcaaaaggagcgatgcaatgccctaactgtcggaagattgagaaaggtcgctggctttatgcaagtggacgtcacccccctgctgatattgatatgggtggatgggtgactagcgacaactatgatatcacctccgagcttccttttggatttcaatggtgtccctttagtggattcacccagctagcatcaatgttaggggtgcgtgaagctgagccaacttaccacacaactggagatcactcaagtgctgcaagcagttcacttgtttgcccatatcttgccctgcgtggttttctccatcctgttaatgtgccttctacttctaattctggtgctgaaagcacttcatttcatcggcactcaactggcttggaaggacatgtcactcctgatttgaacaatgctccagttttccatgctaccgagtcaagaaatcatgacagtgagcacagacatttgagtaatcttcctgtatcaggaactcctgaatattctatgactccatttgggataggagtaccaagatatgacagtggcagccaacagggattccgatcatatgcacatcatcatcccctaatccataggctgacccctcgcagcggaagcaatctggtggcaccattagggtcagttccagccgtcgtggcagagactagaggccatggccatggtgcaccgggccatatgtaccagcactcatctgtgcagggcagcccgttccctcctaccaccagaagggttaggcccagagccttgacgattacgtctttcatcgcagcgacttcctcagctgagattgcagggccccttggccacgggtttcccgctcctggagccgtgaacaggagcgtttctgatgccgagggcatcgaccgagcgtacacatggggccgggagggatatgatctgttcccttggacccctgctgaatggggcaccttcaatcccatgcagaaccatgcgcatggaagctttaccagaaggcctgctggggagcggatgccgcagagtcgccccgagaacggataccagccgcctgtgcccacttcacagaggatgccaccgttcttgtgatcagacgaggctgcctctccaattgctgtgtataaaattatttgattcggggtttggcagagaacaacgagcgaatatcgaccgcacggcagcatcgaaactggtcggctatgagacctgtgtgtgtgtgatgtttatgatgatgccgctcgtatttttagcgctttcggtccagcggcgctcaggtttcgtcgagcgctgtcgtttgtcctgactgatatggtgttgcgttgagaaggactgtttgagctaaactgcatctctggtcccgggattcgaaagcaccgcgtgcagctatggatttgttcgtcacatcacgttcgtgtatggctggccctggccgtttcatgac

SEQ ID NO: 88902 - DNA, 874 bp, Zea Mays
acaaatctctgcctgattttctttcgctttgttaaaccacaaatttccctctcgttcaattactgcaggctgacccctcgcagcggaagcaatctggtggcaccattagggtcagttccagccgtcgtggcagagactagaggccatggccatggtgcaccgggccatatgtaccagcactcatctgtgcagggcagcccgttccctcctaccaccagaagggttaggcccagagccttgacgattacgtctttcatcgcagcgacttcctcagctgagattgcagggccccttggccacgggtttcccgctcctggagccgtgaacaggagcgtttctgatgccgagggcatcgaccgagcgtacacatggggccgggagggatatgatctgttcccttggacccctgctgaatggggcaccttcaatcccatgcagaaccatgcgcatggaagctttaccagaaggcctgctggggagcggatgccgcagagtcgccccgagaacggataccagccgcctgtgcccacttcacagaggatgccaccgttcttgtgatcagacgaggctgcctctccaattgctgtgtataaaattatttgattcggggtttggcagagaacaacgagcgaatatcgaccgcacggcagcatcgaaactggtcggctatgagacctgtgtgtgtgtgatgtttatgatgatgccgctcgtatttttagcgctttcggtccagcggcgctcaggtttcgtcgagcgctgtcgtttgtcctgactgatatggtgttgcgttgagaaggactgtttgagctaaactgcatctctggtcccgggattcgaaagcaccgcgtgcagctatggatttgttcgtcacatc

SEQ ID NO: 88903 - DNA, 1334 bp, Zea Mays
atggccgatggggaggacatcggccacgcgagacctcaacaccccatgaagcagtcacgcttcgacttcaccaagctgagggccctttcctccgcctgcgacactcacccaccagagcatcttatctctggatgtgagtgccatgaaagtgatacccaacagacaactaactctggaacacctttgcttttctctgcggtaaattgctggcttaaatgcatgctgcttgaaccctataatcagacagaccatcccgaatgcaagtcaaggcctgatagtggtctttctgcaattacagagctggaccctggttatataacagctaaaaggactattgtaactgccagtacacaaattatagaaggagcatacccaacagaagggtgtactaataaagctgtgcgaggtgatcaatgtgacaattgcagacacatgttgaatccaactgaactaattgatccaaagtgtaaggttcggaatgagaaagcaagaaggtacttgagcagcatgaggaagaaggaccctgttccattttcccagaagtttcccagtgcagatcctttggcacttaaactgttagaaaaactattagcgtttgatccaaaggatcgtctgacagcagaagaggcattgcgtgatccatacttcaaaggtcttgccggggttgaaagagaaccatcctatcagccaatcagaaaagtggaatttgactttgagcacaaaagaatgtcaaatgctgttgatcaatttaagaagcagttttctcatcttgaagagagtggtggtaacgacccatcagttccaacagacaggaaacatgcatcccttctcaggaccactgtggttcaatcgaatccaattcctgccaaggaacaacctcttgctgtgtcatcaagggttagaccagtctctgatgattcgtgtaagaatccttgggagaaagcaagtggtcctagaaatgttaccaggacatctctgactccacaagggctgcaagcacaagcaggatcagtaagagttaatggcccagtgacggattcaaggtatcctgctcaccaacagatcccacaagcatacggttaccgccaaatgcctgcaaggttggacagtaccaacccatcgcaggccatgggaggttacacgctgcagtcacagaaggaaacattatttgaagagttgccattttgaagagttactcgaatccaatattttgctcttttgaattccttggtgtacactggcaaatattagcatatttgaagagttgccattttgatcatcatcttcatttgtactttttgggtcagatctaataaagcatcaacattaaattt

SEQ ID NO: 88904 - DNA, 1445 bp, Zea Mays
gttttgcttgccaccatgaatagccatatgttggccatcacatggtaccttgttcgtcccaaactagaccagagcattacaagcaatgactgccatatctaaaatggaaaacatgcgcagcttataagaggctaaatttgctccacttctaagtatccaagatctactggttttgatgcgttccattgcctgcagcttttctctgcggtaaattgctggcttaaatgcatgctgcttgaaccctataatcagacagaccatcccgaatgcaagtcaaggcctgatagtggtctttctgcaattacagagctggaccctggttatataacaggtaaaacgtatggcttactttcttttttcttagcactgacttcacaaagttgtagccatgagttgtaatatctagagactctaatatctattacatgataatttttagattatatcatactccatgttgagtgaaaagttcattttggaaaacatttttgcaagttctgagctgaagtggctgaaacatggctgaaacagaaaatgtttttttacacgagatcatcaaactaatgaccataggtgctacaacaaagtattgattaggagagaatcatgttctttattcatgtctaagctgaacaatgtggaataatttgtgcatgtacagttatctgtatctcactcacactactgcttctttcaaagtaatctacgttcatctgtttccaaatggcaactccccatatttgctttgatattagcattgcgttctacacttcagaatagtcctgttagacagggtgcattcagtactcatgtttgttagtgcattctgaagctacccatttcatttattcatgaagagagaaagggaagggaaaacaccttgcactgatattattttattgggcaaggtttcaggtcctctctcttcagtatggaaagaatgggtcaaatggtgtgtagagtttggcattgaagctaatgcaattatcgctgttccgtatgattggggactgcccccatcaatgcttgaggagagagatctgtactttcacaaattaaagtttgtaacacttgcctcaacttgttatgaagcaaccaaatgctatacatctgttaggatcagtaagagttaatggcccagtgacggattcaaggtatcctgctcaccaacagatcccacaagcatacggttaccgccaaatgcctgcaaggttggacagtaccaacccatcgcaggccatgggaggttacacgctgcagtcacagaaggaaacattatttgaagagttgccattttgaagagttactcgaatccaatattttgctcttttgaattccttggtgtacactggcaaatattagcatatttgaagagttgccattttgatcatcatcttcatttgtactttttgggtcagatctaataaagcatcaacattaaattt

SEQ ID NO: 88905 - DNA, 1435 bp, Zea Mays
gtgaagtgagactgcggatgggccctctcggcccaaacgccgacggcattggcgcgttgaccgcacgacctgccgattccttcgagcgatatagggcgcccccgtccacaccacccctcgtctccgccctagcgccactgagccactcgacgtcgagatcgagacgacccgagtccgccgcgcccgtgcaccaccgaccgtcgaactcccgaaagtaactctatttcttgatcaacatcaacatgtcgcgggaggataatgtttacatggccaagctggctgagcaagcagaacggtacgaggaaatggttgagtacatggagaaggtggctaagaccgtagatgtggaagagctcaccgttgaggagcggaacctcttatctgttgcctacaagaacgtaattggggcccgccgtgcctcatggcgcattatctcctccatcgagcataaggaggagtcccgtaagaatgaggaacatgttattcagatcaaggagtaccgtggcaagattgaggctgaattgagcaacatttgtgatggtatcctgaagttgatcgactctcaccttgtgccttcctccactgctgcagagtcgaaggtgttttacctcaagatgaagggagattatcacaggtaccttgctgagtttaagactggtgctgagaggaaggaagctgcagagagtacaatgatagcttataaggcagctcaggatattgcgttggcggaactggcatctactcatcccataagacttggacttgcacttaacttctcagttttctattacgagattctgaactctccagacaaagcttgcaaccttgccaggcaggcgtttgatgaggctatttctcagttggatacgcttggcgaggattcatacaaagatagcaccttgatcatgcagctcctgagggacaacctaaccctatggaccgctgacagcacaacggaggacggcatcgaggagggcaatgaggcctcgaagggtgatgctggtgagggtcagtagtctggtaaaacctcgattgatggttcggcatgtttttgaagtctactgtgttggaaaccatgttctaatagaaggcgtctcccgctccatgcattccaagattctgtcctccccctccctccccccatgttgtaggctggtagtggtcaaattagttggccctgggtccatttggactgatgtattgtttactgctattgaagtcattcgttctcgttttgctcttgcagtggatcgctatagccttgtgttttcaatcttttagggcctgtttgggaatgcagtttcaaaatactgtaattttgagataccatagtttataattgtacatgacataaatactacggtattgctttaccacaataaaactatagtattgctcaaaaccgagatctgtttggttctattggaaaaacaaa

SEQ ID NO: 88906 - DNA, 1273 bp, Zea Mays
ccgattccttcgagcgatatagggcgcccccgtccacaccacccctcgtctccgccctagcgccactgagccactcgacgtcgagatcgagacgacccgagtccgccgcgcccgtgcaccaccgaccgtcgaactcccgaaagtaactctatttcttgatcaacatcaacatgtcgcgggaggataatgtttacatggccaagctggctgagcaagcagaacggtacgaggaaatggttgagtacatggagaaggtggctaagaccgtagatgtggaagagctcaccgttgaggagcggaacctcttatctgttgcctacaagaacgtaattggggcccgccgtgcctcatggcgcattatctcctccatcgagcataaggaggagtcccgtaagaatgaggaacatgttattcagatcaaggagtaccagtcgaaggtgttttacctcaagatgaagggagattatcacaggtaccttgctgagtttaagactggtgctgagaggaaggaagctgcagagagtacaatgatagcttataaggcagctcaggatattgcgttggcggaactggcatctactcatcccataagacttggacttgcacttaacttctcagttttctattacgagattctgaactctccagacaaagcttgcaaccttgccaggcaggcgtttgatgaggctatttctcagttggatacgcttggcgaggattcatacaaagatagcaccttgatcatgcagctcctgagggacaacctaaccctatggaccgctgacagcacaacggaggacggcatcgaggagggcaatgaggcctcgaagggtgatgctggtgagggtcagtagtctggtaaaacctcgattgatggttcggcatgtttttgaagtctactgtgttggaaaccatgttctaatagaaggcgtctcccgctccatgcattccaagattctgtcctccccctccctccccccatgttgtaggctggtagtggtcaaattagttggccctgggtccatttggactgatgtattgtttactgctattgaagtcattcgttctcgttttgctcttgcagtggatcgctatagccttgtgttttcaatcttttagggcctgtttgggaatgcagtttcaaaatactgtaattttgagataccatagtttataattgtacatgacataaatactacggtattgctttaccacaataaaactatagtattgctcaaaaccgagatctgtttggttctattggaaaaacaaa

SEQ ID NO: 88907 - DNA, 1234 bp, Zea Mays
ccgattccttcgagcgatatagggcgcccccgtccacaccacccctcgtctccgccctagcgccactgagccactcgacgtcgagatcgagacgacccgagtccgccgcgcccgtgcaccaccgaccgtcgaactcccgaaagtaactctatttcttgatcaacatcaacatgtcgcgggaggataatgtttacatggccaagctggctgagcaagcagaacggtacgaggaaatggttgagtacatggagaaggtggctaagaccgtagatgtggaagagctcaccgttgaggagcggaacctcttatctgttgcctacaagaacgtaattggggcccgccgtgcctcatggcgcattatctcctccatcgagcataaggaggagtcccagtcgaaggtgttttacctcaagatgaagggagattatcacaggtaccttgctgagtttaagactggtgctgagaggaaggaagctgcagagagtacaatgatagcttataaggcagctcaggatattgcgttggcggaactggcatctactcatcccataagacttggacttgcacttaacttctcagttttctattacgagattctgaactctccagacaaagcttgcaaccttgccaggcaggcgtttgatgaggctatttctcagttggatacgcttggcgaggattcatacaaagatagcaccttgatcatgcagctcctgagggacaacctaaccctatggaccgctgacagcacaacggaggacggcatcgaggagggcaatgaggcctcgaagggtgatgctggtgagggtcagtagtctggtaaaacctcgattgatggttcggcatgtttttgaagtctactgtgttggaaaccatgttctaatagaaggcgtctcccgctccatgcattccaagattctgtcctccccctccctccccccatgttgtaggctggtagtggtcaaattagttggccctgggtccatttggactgatgtattgtttactgctattgaagtcattcgttctcgttttgctcttgcagtggatcgctatagccttgtgttttcaatcttttagggcctgtttgggaatgcagtttcaaaatactgtaattttgagataccatagtttataattgtacatgacataaatactacggtattgctttaccacaataaaactatagtattgctcaaaaccgagatctgtttggttctattggaaaaacaaa

SEQ ID NO: 88908 - DNA, 1620 bp, Zea Mays
caataatagggatgatcaccaaacgcattatttagaaaaccgccgggagctggaaagggcgaggcgagcggtgccggcggaggtcgacaggggggctacaggtagaaaggcgactccgccgctccagctgaaaatggcgaaatgatttgccttccccagaacccagctcagacagacgccgccctccgctgctctgctctgttcctcttcctccttgccccctgagcaggcgagttgccagcccggaaaccattcgaacaggccgagcccgcccgcctccattgctcgcgtgcgtcagagaaggaaggaaaagaagaactaggagcagagttgaataggtcattatgcgccggtggctttgctgcagtcattttgacacaccgtatctcgaaaacgaaaatggatttacgagcagtcctgatagaacaagtggtaatggaaacggtttaaatgcaaacagtgatcctgcaaaaccgccttctattgaagtacctgcattgtcattagatgaattgagggaaaagacggatgattttgggtccaaggctttggttggtgaggggtcatatggaagagtatattatgctgttctggaaaacgaacaacatgtggctgtcaagaagcttgatacttcagcagatcctgagcctgataatgaatttctagcacaggtgtccgttgtttcaagattgaagcatgaaaactttgtggacatgcttggttattgtatccaaggagatcaacgtctactggcttacgaattcgctacgatgggctctctacatgatattttgcacggaagaaaaggtgttgcaggtgcacaacctggacctgctcttgattggatgcaaagagtcaaaattgctgttgatgctgcaaaaggtcttgaatatcttcatgagaaggttcaaccttccatagtccatcgagatatacggtccagcaatgttcttttatttgaggattacaaggccaaaattgcagacttcaatctttcaagccaatctccagatatggctgctcgtctacattctactcgtgtccttggaaccttcggatatcatgctccagagtatgctatgactggccaactgactcaaaaaagtgatgtatatagttttggggttgtccttttagagcttcttactggaaggaaacctgtagatcatacaatgccaaggggccagcagagtcttgttacttgggcaacaccaaggcttggtgaggacaaggtgaaacaatgtgttgatccaagattgaatggagagtaccctccaaagggagtagcaaagctagcggcagtggcggctctctgtgtccaatacgaatctgagttcagaccaagcatgagcattgtagtcaaggcgttgtctcctcttcttgtgaatgcaccgtatcagccggctgctgctcctgatgtatcttcagatgcctgacagcatgagcaactgaaaacccatgtaaagaaacaccatttactgtcggtatgccattttttccacgaattattcatctttcgtaaaatcagaattgtgtgtgtgtttattggagaggaagggaagaggaaagagcaacgcatttgttttgaacccatgtacttcgtgcttgagagctgctgca

SEQ ID NO: 88909 - DNA, 1652 bp, Zea Mays
caataatagggatgatcaccaaacgcattatttagaaaaccgccgggagctggaaagggcgaggcgagcggtgccggcggaggtcgacaggggggctacaggtagaaaggcgactccgccgctccagctgaaaatggcgaaatgatttgccttccccagaacccagctcagacagacgccgccctccgctgctctgctctgttcctcttcctccttgccccctgagcaggcgagttgccagcccggaaaccattcgaacaggccgagcccgcccgcctccattgctcgcgtgcgtcaggaaggaaaagaagaactaggagcagagttgaataggtcattatgcgccggtggctttgctgcagtcattttgacacaccgtatctcgaaaacgaaaatggatttacgagcagtcctgatagaacaagtggtaatggaaacggtttaaatgcaaacagtgatcctgcaaaaccgccttctattgaagtacctgcattgtcattagatgaattgagggaaaagacggatgattttgggtccaaggctttggttggtgaggggtcatatggaagagtatattatgctgttctggaaaacgaacaacatgtggctgtcaagaagcttgatacttcagcagatcctgagcctgataatgaatttctagcacaggtgtccgttgtttcaagattgaagcatgaaaactttgtggacatgcttggttattgtatccaaggagatcaacgtctactggcttacgaattcgctacgatgggctctctacatgatattttgcacggaagaaaaggtgttgcaggtgcacaacctggacctgctcttgattggatgcaaagagtcaaaattgctgttgatgctgcaaaaggtcttgaatatcttcatgagaaggttcaaccttccatagtccatcgagatatacggtccagcaatgttcttttatttgaggattacaaggccaaaattgcagacttcaatctttcaagccaatctccagatatggctgctcgtctacattctactcgtgtccttggaaccttcggatatcatgctccagagtatgctatgactggccaactgactcaaaaaagtgatgtatatagttttggggttgtccttttagagcttcttactggaaggaaacctgtagatcatacaatgccaaggggccagcagagtcttgttacttgggcaacaccaaggcttggtgaggacaaggtgaaacaatgtgttgatccaagattgaatggagagtaccctccaaagggagtagcaaagctagcggcagtggcggctctctgtgtccaatacgaatctgagttcagaccaagcatgagcattgtagtcaaggcgttgtctcctcttcttgtgaatgcaccgtatcagccggctgctgctcctgatgtatcttcagatgcctgacagcatgagcaactgaaaacccatgtaaagaaacaccatttactgtcggtatgccattttttccacgaattattcatctttcgtaaaatcagaattgtgtgtgtgtttattggagaggaagggaagaggaaagagcaacgcatttgttttgaacccatgtacttcgtgcttgagagctgctgcagttgaaattaattacttaatgtacacacttgtgcatc

SEQ ID NO: 88910 - DNA, 1456 bp, Zea Mays
gaacccagctcagacagacgccgccctccgctgctctgctctgttcctcttcctccttgccccctgagcaggcgagttgccagcccggaaaccattcgaacaggccgagcccgcccgcctccattgctcgcgtgcgtcagagaaggaaggaaaagaagaactaggagcagagttgaataggtcattatgcgccggtggctttgctgcagtcattttgacacaccgtatctcgaaaacgaaaatggatttacgagcagtcctgatagaacaagtggaaacggtttaaatgcaaacagtgatcctgcaaaaccgccttctattgaagtacctgcattgtcattagatgaattgagggaaaagacggatgattttgggtccaaggctttggttggtgaggggtcatatggaagagtatattatgctgttctggaaaacgaacaacatgtggctgtcaagaagcttgatacttcagcagatcctgagcctgataatgaatttctagcacaggtgtccgttgtttcaagattgaagcatgaaaactttgtggacatgcttggttattgtatccaaggagatcaacgtctactggcttacgaattcgctacgatgggctctctacatgatattttgcacggaagaaaaggtgttgcaggtgcacaacctggacctgctcttgattggatgcaaagagtcaaaattgctgttgatgctgcaaaaggtcttgaatatcttcatgagaaggttcaaccttccatagtccatcgagatatacggtccagcaatgttcttttatttgaggattacaaggccaaaattgcagacttcaatctttcaagccaatctccagatatggctgctcgtctacattctactcgtgtccttggaaccttcggatatcatgctccagagtatgctatgactggccaactgactcaaaaaagtgatgtatatagttttggggttgtccttttagagcttcttactggaaggaaacctgtagatcatacaatgccaaggggccagcagagtcttgttacttgggcaacaccaaggcttggtgaggacaaggtgaaacaatgtgttgatccaagattgaatggagagtaccctccaaagggagtagcaaagctagcggcagtggcggctctctgtgtccaatacgaatctgagttcagaccaagcatgagcattgtagtcaaggcgttgtctcctcttcttgtgaatgcaccgtatcagccggctgctgctcctgatgtatcttcagatgcctgacagcatgagcaactgaaaacccatgtaaagaaacaccatttactgtcggtatgccattttttccacgaattattcatctttcgtaaaatcagaattgtgtgtgtgtttattggagaggaagggaagaggaaagagcaacgcatttgttttgaacccatgtacttcgtgcttgagagctgctgca

SEQ ID NO: 88911 - DNA, 1575 bp, Zea Mays
gaaaattaagccccgtaaaaccaatccaatcgggtggcagtttttaaggaaaccagggaccgcagcagcaagccgccccagccgacgaggcgaggagcgtgcaattccgtagctgcaacgaactccctcgaccgtatcgcccgctgctcctctatccctttcctgctgctgctactaccttaagctatcactatcatggccttgatgctgctagcgcgcaacctgcgctcccgcctccgcccaccgctcgccgccgccgcggcgttctcgtcggccgcggcggaggcggagagggcgatacgggacgggccgcggaacgactggagccggcccgagatccaggccgtctacgactcaccgctcctcgacctcctctttcacggggctcaggtccacagaaatgtccataaattcagagaagtgcagcaatgcacacttctttcaatcaagactggtggatgcagtgaagattgttcttactgtcctcagtcatcaagatacaacactggattgaaggcccaaaaattgatgaacaaatatgctgtcttggaagcagcaaaaaaggcaaaagagtctgggagcacccgtttttgcatgggagctgcatggagagaaaccattggcaggaaatcaaacttcaaccagattcttgaatatgtcaaggaaataaggggtatgggcatggaggtctgttgcacactaggcatgatagagaaacaacaagctgaagaactcaagaaggctggacttacagcatataatcataacctagatacatcaagagagtattatcccaacattattaccacaagatcatatgatgatagactgcagactcttgagcatgtccgtgaagctggaataagcatctgctcaggtggaatcattggtcttggtgaagcagaggaggaccgggtagggttgttgcataccctagctaccttgcctacacacccagagagcgttcctattaatgcattggttgctgtaaaaggcacacctcttgaggaccagaagcctgtagagatctgggaaatgatccgcatgatcgccactgctcggatcacgatgccaaaggcaatggtgaggctttcagcaggccgagtacggttctcgatgccagaacaagcgctgtgcttcctcgctgggggccaactccatctttgccggcgagaaacttctcacaaccgcaaacaacgactttgatgcggaccaggcgatgttcaagatccttggcctgatccccaaggctccaagctttggcgaggaagaggcgtctgcggcggctcccacagaatccgagaggtctgagcaagctgcttcgatgtagaatatatacatatcattaccgattatccgtatcacggttggggcgaaactagaactaccgttgtagctagagcattggattgtagaaaccacaacatttcattattttgtaattgcttgagactgaatgggggatacccatgtcgggctagatcaatggacaacttccacacaaccaaatccaaacattgaaactcatttttcatcacagttttaataaacttctcccacttatcttgagagccc

SEQ ID NO: 88912 - DNA, 1932 bp, Zea Mays
cagccgacgaggcgaggagcgtgcaattccgtagctgcaacgaactccctcgaccgtatcgcccgctgctcctctatccctttcctgctgctgctactaccttaagctatcactatcatggccttgatgctgctagcgcgcaacctgcgctcccgcctccgcccaccgctcgccgccgccgcggcgttctcgtcggccgcggcggaggcggagagggcgatacgggacgggccgcggaacgactggagccggcccgagatccaggccgtctacgactcaccgctcctcgacctcctctttcacggggctcaggtccacagaaatgtccataaattcagagaagtgcagcaatgcacacttctttcaatcaagactggtggatgcagtgaagattgttcttactgtcctcagtcatcaagatacaacactggattgaaggcccaaaaattgatgaacaaatatgctgtcttggaagcagcaaaaaaggcaaaagagtctgggagcacccgtttttgcatgggagctgcatggagagaaaccattggcaggaaatcaaacttcaaccagattcttgaatatgtcaaggaaataaggtattcattggaatcttttgtttacccgatagaggtattgtatatggcgcatgttttgcataaccatgtgcaagttttcggcttttcgcctatgtcaatgttctgttgtcacgcctatgttcacctactttgtactccctccatttttttatttgacgtttgttagtgtatatttgtactatccggcgtcaaataaagaaaatggaggtagaattttttttcttgaaacaaactaactttgtctaatcacctatgatatacaggttattgacttaaagttcttaattgtatgggatatgatgatatattcaatcagcagaagttttatacattattattattagtttatttcaacattttagcatgcattggataattgaatttgcaggggtatgggcatggaggtctgttgcacactaggcatgatagagaaacaacaagctgaagaactcaagaaggctggacttacagcatataatcataacctagatacatcaagagagtattatcccaacattattaccacaagatcatatgatgatagactgcagactcttgagcatgtccgtgaagctggaataagcatctgctcaggtggaatcattggtcttggtgaagcagaggaggaccgggtagggttgttgcataccctagctaccttgcctacacacccagagagcgttcctattaatgcattggttgctgtaaaaggcacacctcttgaggaccagaaggtattcctgctgccgattactttgtttagtttaggtggttgcagctagcgtgacactccatctcacacattgaaaacatgcctatatctctgtattatataagtagttgattgcgcattatgctaactaacgttccacatcagcctgtagagatctgggaaatgatccgcatgatcgccactgctcggatcacgatgccaaaggcaatggtgaggctttcagcaggccgagtacggttctcgatgccagaacaagcgctgtgcttcctcgctgggggccaactccatctttgccggcgagaaacttctcacaaccgcaaacaacgactttgatgcggaccaggcgatgttcaagatccttggcctgatccccaaggctccaagctttggcgaggaagaggcgtctgcggcggctcccacagaatccgagaggtctgagcaagctgcttcgatgtagaatatatacatatcattaccgattatccgtatcacggttggggcgaaactagaactaccgttgtagctagagcattggattgtagaaaccacaacatttcattattttgtaattgcttgagactgaatgggggatacccatgtcgggct

SEQ ID NO: 88913 - DNA, 1592 bp, Zea Mays
gactggggcacgcaactctatcgatctccgcccacctcgtccctcacttgccctctccctgccaggcttgccggaaccctagcctcatcgcccctcccctcccggcccgatctccctatcgccggattcgtgctgcgggatggactccgacgtggagatgaacgccgccagcgacgaggaggtgatggacgatgaggattactacgactactgctacagcgacgtgggtgacgacggcgacggcgggagcgaggaggagctggtgcccgtggactacgacgagggccttgaggccgagggtaccgacgaggtggtgtccagacgcgagcagacatttgtggttctaaatgaagaagttatatctgagcgtcaagaggaagatgtaagcaaggtatcagccgtgttactgattacaagggaagaggcatgtgccctcctgcatcactataaatggaacatcagcaagttgagtgatgaatggtttgcagatgaagaaaaagtccgccatactgttggcttacttttgaatggaaatcatgagcccggctctaggaagctaacctgtggaatatgttttgaagggtattcttctgatacgatgagctctgctggttgtgctcatttttattgccatgaatgttgggaaggctacattagcgctgcaataggtggtggtccaggatgtttgtctttgcgatgtcctgatccatcatgcagtgctatggttcttcaagggatggttaatgaattagctaaagatgaggacaaagcaaagtacgcacgatttctcttacgtgcatacgttgaaggtagcaagaagactaaatggtgtccagctcctgactgtacatgtgctgtggagtttcttggtgatgaaaactatgatgtctcatgcaattgcaagttcagcttttgctggaattgcactgaggaagctcatcgaccagtgaactgcgagactgtttctaagtggatattaaagaatagtgcagaatctgaaaatatgaactggtttgtcgcaggctcaggactagcgtttgatatgtggtcttcaagtttctgtttttgttgataccatctttagttaagacatggcatataaataaggagttccttgattttattttggatgattcaacctattcaactttataccttctgattttgattattttttgtaatgtttcgtttatcagttcagactaagcacaatgataactaattcttgtgtggttggatcttcatatcctatttcaccgaccttttagcggtttattgaacaatgtaaatgtcacaatcctggaactattcgccttgactgctgacaataagtgagatggtgaaacaaatctgcctaaagctagttgtttagggcctttaggctcacaggcttttgataccatttctctaaggcatttaagctgaattggaaatgggtggggaagccacggcaaatatttatgtgaggttgaatcataggtgttgtgactgttgtcaactatgaaaaatatcctagtaatttaattattttaacataattttaagatagcatttttgtttactgcaagttgcttgggatcaataggcattgt

SEQ ID NO: 88914 - DNA, 408 bp, Zea Mays
gaggctgagtctggtttggaacgtctgcatcagtgcgctgagaaagacttgcacaattttttgactcctgtgaaatttgagagcactgaaacgacgacccctacagtggctgaatttggtgaattccgggtgaagcttgctgggctcacaagcgttactcggaattactttgagaaccttgttcaagctttggaagctgggttggaggatgtccacgccactgcccaggctgctggtacatccatcgccggcaccagctccaagaaaggaggaactaaatccaagaagaaacaacacactaagccatcgtctgaccacactgatgatggttggccctgcgagcgctgcacatttcttaaccctccctcagtggttgtgtgcagcgtctgcgaaaagagtaggtactag

SEQ ID NO: 88915 - DNA, 91 bp, Zea Mays
caaaaaagaggtctattttattcgatttgggaaagggcgagtggacggcaccctgccgttcaacttcaatctgggtcgactaacgatctgg

SEQ ID NO: 88916 - DNA, 731 bp, Zea Mays
cttcatgttgagtaggtgtcgtgctaaagaaagcaaagaagattgcaaacgggaagggagatgtgaatctctcgctggggtcatttgtggacactcttgctgtttgcccagatgaccttgttcaagttattgcaaagggtctttcactcccccttaagggtgtctgtaaacctcttgattccaacgtggttgctgccagtggatccttgaagcctcaaatttcacatgcgaatgacccaaaaatgtctaataaaactgaaaatatgtctccacttatgcaagctgagaaatgcacctcagtggatcaggagaaaaatacttctgttaagagaaatggtcaagataatggtattactacaagtttaagttcttcaaccgtacatgtgggggcatgtttatccaataattgggattctaggtctagaagtatggtgcctaaagttgatgttatcacaagttcagcttcagttgtgcccgtggtggcttcaggtgttaaaccctctcagtcagtcaataatttagttgccaagattgtcacgtcaagcaaaactgctgctaagggtgatttcgagactataacaacgctagatgttgagaaacaggaagttgatgtcataatggatgttcttggaactcaaacatacttgcatcaaatgttattttttgaagtacaagatacaggtatagaaccagttgtatcaggttggcatgacttaggtacccgtgcctag

SEQ ID NO: 88917 - DNA, 1248 bp, Zea Mays
atggtggctcgagagattgctccatgcagagcgaggaactgctcgacagcctgctgtgggttctgctcctccgccgacgagctcacctccgcgtacgagctgaaacatcgaacgatgctctctgccgcagaagcttcttgcatggcttcaacagcagccatttgtgctgcatccctgtacttcagaagctccttccctagtttaacgagtgatggaggaagcgttgtccacgaagcgctagcatctgtcagtttcctgttacttgcagcaaccttcactagattagtgacattcgggttatttaaaacccctgatgtcctccttataggagaagaaagcttgttgttcacaactttgtcggaatcgtctgcaggagcactcgctgagctcttcctgggtggagtcagaatcttactgtcatccttattcgatggtttctcttctgctaatgattttcgtctgggagtcgaagagcttcgattttcagacttcttttcagctttggcaggctttgaatccgaattgcctttgtcctttgcatctgctttcccttcccagcttcttctcaaggccttgggcccagattcgaagctcaacaaggtgttactaatggagttacccagggaggacttcctccctgccgtagtggccttcaacacagacgcagccttttctagcaaggacagccttgacggcggcgatttctctgctcctttggttctcactctctgtttcatgtcactcgagaatttatcgaacgacgcaggcagagaatgggcgctggtcggggaagacggcgtcgacctagcgctggttgattttgccttcgagctaaccacgtccttcttgtccgagaggaggccattgagcgcctgtttcgagaggttggagttcgacttggtgagctggggcttcttgctctctgtgccgttgctcttgggaggagcattgatcttctctaacctgccctgctctttctctagcgacagggcaccggcatccttggaactaccattggtggaggaggcttgggcggccttgccgctgccaagaagaaaagtggaggagctggtcaccacaagatcctccgggctgccgacgcaggcatggcggcccgggaccggcctgacccccctgaggatcggcaccggggtggctgcctcgagacggtcgacatggacgaactgccccagctggatgacgtcgctgaggatgaggtcgtgctgctcgtccggcagcgacacgtag

SEQ ID NO: 88918 - DNA, 1318 bp, Zea Mays
ctgtacgtccaatagggccagatgggtcttggtcgtctcacactgttcggcccagaccacatagtgcccttaactccccagcaaccagcagcagcaaaaatcttcacgatttagaaaccctcacctcttcccttcctccccgccgccgccaccgccggaaggagaaaaaaaatgggtgccgatggggaagaagcgtcgcggatagtcgtgccaatggcggtggaggggacctcggagcagctggcgttcgtggaggagtcgaagctgcagaagcgcaaggagaacgcggactgggccgtcaggaaccgggagcgcagggcggtaaagcgccagcgcatccgcgacgagcacaaggtcaccgtaaggcggcccgaggacttcgttgcggcgttccggaacaaggaacgcgacttcctgcggatgaggacccgcctcaaggtccgcaagcagccgcccgccgaggcgctcagctccaagctcgtcttcgcaattcgcatccctggctccgtggacttgcatccgcacatcaggaaggtcttgaggaagctacggctgacgacggtcctcaccggcgtattcctcagggccaccgagctgacgctgaagaggcttcttgtggtcgaaccctttgtcacctacgggtttccaaacttgaagaacgtgaaagagcttatttacaagaagggccgtgggtttttcgacaaggagcctttccctcttaccagtaacgatctaattgagaaggctcttggagatcacggcatcatatgcttggaagacgttgtgcacgagatcgccacggttgggccgcacttccgagaagcatcgaggttcctcatgcccttcaggctcaagtgtccggagaggaggctgcagatgaagaggaaaccctacaaggatggcggcgactcgggcgaccgtggcgacaagatcaacgaactaatcgagaagctgaactagaagcgcagaccttgcctcctccggctgtcgttttgcgttggagcgatggatctgttattaccttgtcggttttgtaatagcattagctgggtgtaccttcggctttgaaaccttacctgcgcttgtgcgatcaggtcatgaaatagcaggcgcttctttggtcatccccttgcgttctgctccacatgcctcttcggttggtgcgacaatatatcagctgtgttatgaatgatgtagcgtgctagtatagtgcagacgcttataatgtatgcacacttgcaactgtgaacggacatatatgcaaacattacttctatgatcttcgaaggagattgatgaaagtcactttgcttgattt

SEQ ID NO: 88919 - DNA, 1322 bp, Zea Mays
ctgtacgtccaatagggccagatgggtcttggtcgtctcacactgttcggcccagaccacatagtgcccttaactccccagcaaccagcagcagcaaaaatcttcacgatttagaaaccctcacctcttcccttcctccccgccgccgccaccgccggaaggagaaaaaaaatgggtgccgatggggaagaagcgtcgcggatagtcgtgccaatggcggtggaggggacctcggagcagctggcgttcgtggaggagtcgaagctgcagaagcgcaaggagaacgcggactgggccgtcaggaaccgggagcgcagggcggtaaagcgccagcgcatccgcgacgagcacaaggtcaccgtaaggcggcccgaggacttcgttgcggcgttccggaacaaggaacgcgacttcctgcggatgaggacccgcctcaaggtccgcaagcagccgcccgccgaggcgctcagctccaagctcgtcttcgcaattcgcatccctgggtagctccgtggacttgcatccgcacatcaggaaggtcttgaggaagctacggctgacgacggtcctcaccggcgtattcctcagggccaccgagctgacgctgaagaggcttcttgtggtcgaaccctttgtcacctacgggtttccaaacttgaagaacgtgaaagagcttatttacaagaagggccgtgggtttttcgacaaggagcctttccctcttaccagtaacgatctaattgagaaggctcttggagatcacggcatcatatgcttggaagacgttgtgcacgagatcgccacggttgggccgcacttccgagaagcatcgaggttcctcatgcccttcaggctcaagtgtccggagaggaggctgcagatgaagaggaaaccctacaaggatggcggcgactcgggcgaccgtggcgacaagatcaacgaactaatcgagaagctgaactagaagcgcagaccttgcctcctccggctgtcgttttgcgttggagcgatggatctgttattaccttgtcggttttgtaatagcattagctgggtgtaccttcggctttgaaaccttacctgcgcttgtgcgatcaggtcatgaaatagcaggcgcttctttggtcatccccttgcgttctgctccacatgcctcttcggttggtgcgacaatatatcagctgtgttatgaatgatgtagcgtgctagtatagtgcagacgcttataatgtatgcacacttgcaactgtgaacggacatatatgcaaacattacttctatgatcttcgaaggagattgatgaaagtcactttgcttgattt

SEQ ID NO: 88920 - DNA, 777 bp, Zea Mays
acagcaacattttctaaggctgcgatcggttatctacttatcttgttgttctgtagtatcacgtttttttagcattgcaattgctgctgtgtgacaataggtttccaaacttgaagaacgtgaaagagcttatttacaagaagggccgtgggtttttcgacaaggagcctttccctcttaccagtaacgatctaattgagaaggctcttggagatcacggcatcatatgcttggaagacgttgtgcacgagatcgccacggttgggccgcacttccgagaagcatcgaggttcctcatgcccttcaggctcaagtgtccggagaggaggctgcagatgaagaggaaaccctacaaggatggcggcgactcgggcgaccgtggcgacaagatcaacgaactaatcgagaagctgaactagaagcgcagaccttgcctcctccggctgtcgttttgcgttggagcgatggatctgttattaccttgtcggttttgtaatagcattagctgggtgtaccttcggctttgaaaccttacctgcgcttgtgcgatcaggtcatgaaatagcaggcgcttctttggtcatccccttgcgttctgctccacatgcctcttcggttggtgcgacaatatatcagctgtgttatgaatgatgtagcgtgctagtatagtgcagacgcttataatgtatgcacacttgcaactgtgaacggacatatatgcaaacattacttctatgatcttcgaaggagattgatgaaagtcactttgcttgattt

SEQ ID NO: 88921 - DNA, 1392 bp, Zea Mays
ataaaaatgtaataaaatagtccaatcgccttgactaccgcttccggttccggatccgaatctcgccctcccctctctttcttgcctccaggtccggccgtccgggcggcgccgggaggagagaatggcctccacggcgtcgccgccggtgttcgagagggtggccgggatccgagccattgccgagtccggccgcttcaaggcatggttgctggaccagtttggcgttcttcatgacgggaagaagccgtaccccggcgccattctggcattggagaagctagcggagaatggggcaaagatggtgataatcagcaattcctctaggcggtcatctgtgacaatgaagaagctcaagagcctggggttcgacacgtcctgtttcctcgcgaccatcaccagtggggagctcacacatcagcaccttcagaagagagacgacccatggtttgctgctcttggaaggaagtgtatccatatcacttgggacgatcgaggggcaatttctctcgagggccttggtttgcaagttgtgaacaatgttgatgatgcagagttcatattagcccacggtactgaagctcttggctcaccttctggtgttcctcttcccaaaagtcttgaggagcttgagcaggttctaatgcttggcatagaaaagcgacttccaatggtggtagctaatccagattatgtcactgtcgaagctcgagatctccgtgtcatgcctggcactctggcagctaaatatgagagtcttggtggtgaagtgaaatggatggggaagcctgataaggtgatctatacatcagcgatgtccctagcgggcgttgatgcccgtgaatgtatcatggtgggtgattcgctgcaccacgacatcaaaggagccaatgcgtcagggatggcatccgcgttcgtcactggaggggtccatgcggacgaacttggactcggtgaatttggagaaactgctggggaggatgctgtcagttcgctgtgcagcaagcacggatcgtacccttcttatgttctgccttcattcgcgtggtagagatgcggcctagaatttttttttgttttaggtgcacgggaaagtgattttaggcagatattgttgttatggaaataagtgccacgcaatgatcaagccgctggaggtgtcattcttcttaataaataataagtgacacgcaatgctcaagccgctggaggcagatttgtatttgcatttgtagtgtgtgtgtgtctatatatgctgcctgtggtgtatataccgcctgtgctgcaatgttcggttgagactttagacagcgatactgtatgaaggattcacattgttctgctcaattatgtaaacccgctctattacttttcgtggatgctgctttacgt

SEQ ID NO: 88922 - DNA, 1425 bp, Zea Mays
aaaaatgtaataaaatagtccaatcgccttgactaccgcttccggttccggatccgaatctcgccctcccctctctttcttgcctccaggtccggccgtccgggcggcgccgggaggagagaatggcctccacggcgtcgccgccggtgttcgagagggtggccgggatccgagccattgccgagtccggccgcttcaaggcatggttgctggaccagtttggcgttcttcatgacgggaagaagccgtaccccggcgccattctggcattggagaagctagcggagaatggggcaaagatggtgataatcagcaattcctctaggcggtcatctgtgacaatgaagaagctcaagagcctggggttcgacacgtcctgtttcctcgcgaccatcaccagtggggagctcacacatcagcaccttcagaagagagacgacccatggtttgctgctcttggaaggaagtgtatccatatcacttgggacgatcgaggggcaatttctctcgagggccttggtttgcaagttgtgaacaatgttgatgatgcagagttcatattagcccacggtactgaagctcttggctcaccttctggtgttcctcttcccaaaagtcttgaggagcttgagcaggttctaatgcttggcatagaaaagcgacttccaatggtggtagctaatccagattatgtcactgtcgaagctcgagatctccgtgtcatgcctggcactctggcagctaaatatgagagtcttggtggtgaagtgaaatggatggggaagcctgataaggtgatctatacatcagcgatgtccctagcgggcgttgatgcccgtgaatgtatcatggtgggtgattcgctgcaccacgacatcaaaggagccaatgcgtcagggatggcatccgcgttcgtcactggaggggtccatgcggacgaacttggactcggtgaatttggagaaactgctggggaggatgctgtcagttcgctgtgcagcaagcacggatcgtacccttcttatgttctgccttcattcgcgtgattgatctcgatcaagctcgtcaaagcattgaacggcatgatctccatagaagaagaacgtcttcagctctgtccttgaaactgttatggtgaagatgacagcattcagggtacggtcggagagctttcctccagtgaccaagtgctcaccgatgtattattgcttcctaaaccggtccagctgcataatcaatgtataatgaccctgtcttgatttctgatattagctggagctattgggaaaaaaaaggggctccaatcggctctgcaaaacattactggagttgattggagttctaacaaaggagccctagataactttagttaggtaagcaaaacattaccttaaggcatctgttttttcgaggtggtggtccaaa

SEQ ID NO: 88923 - DNA, 2458 bp, Zea Mays
gttcttggtttagggggggaacggacgattctgctttgtacaatattccctagccagtatcaggcgcaagttgcgattctcgggagttcgttgaggagtcacagagaaagtttggtggtactggtgaggcaaaggtttccttccagggttcgtcaggaacgaggcgtgtcgcaatctgaagcctttcgtcggttccgtctagctgcccccctcggattcggccatggagcggcagtccagcatccggctgggcgcgctggagaagctgaggagcttccgggggatggagaagcagaagagcttccgcgggatcatgtccctggagcggcggagcagggacagcccggggaaacgcggcgacacgccgctccacctcgcggcgagggccgggagcgtggcccacgtgcagaggatcctcgcggagctcgaccgggcgctggccgccgagatggccgccaggcagaaccaggacggcgagacgccgctgtacgtcgccgccgagaagggccacgcggaggtcgtgcgcgagatcctcaaggtctgtggcgtgcagacggccggcatcaaggccagcaatagtttcgacgcgttccacatcgccgccaagcagggccaccttgaagttctgaaggagatgctgcaggctcttcctgctcttgctatgacaacaaattctgtaaacgctacggccctggacaccgccgcgattcagggccatgttgacatcgtcaatctcctgctggaaaccgatgctagcctcgccaggatcacgaggaacaacgggaaaacggttttacactcagcagcaagaatgggccacgtggaagttgtaagatcgttgctgaataaggatcccaggattggtttgaggacagacaagaaggggcaaactgcgctgcatatggcttcgaaagcgcagaatgctgagatcgtggtcgagttgttgaagccagatgtctcggtcatccatatcgaagacaacaagggaaacaggcccttgcatgttgctactcggaaggggaatatcattatagtgcagactctgttatcagttgaggggatcgatgtcaatgcagttaacaggtctggagagactgcatttgccattgccgagaaaatggacagtgtagaactcgtgaacatcctgaaagaggctggtggagaagccgcaaagcagcaagtacatcctccgaattcggcgaagcagctgaaggaaacagtcagcgatatcagacacgacgtccagtcccagttcaagcaaacacgtcagaccaagatgcaagtcaaccagatcaagaagaggctggagaagctccacatcggcgggctgaacaacgccatcaactccaacaccgtcgtcgcggtgctcatcgccacggtcgccttcgccgccatattcacggtcccgggaaacttcgtggaggagctgagccaggcgcctccgggcatgtccctggggcaggcgtacgtggcgagcaacccggcgttcatcgtcttcctggtcttcgacgcgctggccctcttcatctcgctcgcggtggtcgtggtgcagacctcgctgatcgtggtggagcggagggcgaagaagcggatggtgttcgtgatgaacaagctcatgtggctggcgtgcctcttcatctcggtggccttcatcgcgctgacctacgtggtggtggggcgcgacgactggtggctggcctggtgcaccatgggcatcggcgccgcgatcatgctcactaccctcggctccatgtgctactgcatcgtcgcgcacaggctggaggagaagaacaccaggaagatcaggagggcctccgcgagccagtcccgcggctcgtggtcccgatcggtcgactcggacgaggagatacttaacagcgagtacaagacgaagatgtacgcgctgtagcctgtaggatggatagcaagtgtaacatgacggattcttttgtacataccagtgctttgtttcgccagaggctgctccatggcatgcggcaccacatcagtcttcttcaaccaaagggactgaaggtccttcctgcggaaccaagttcaggtcacttgaccggtgtgcctgttcctggggagtgagagtctgctcaactgtgtggttcttagcgcctgaaaccgtcaatggtgatggagataatccagctagaaatttagaatagaataaagtgtccggtacaaaatgcattgtgtcgtgcagtagatatgatgatcttgtacacgaggatctcatcggagagagtgatttgttgaactcttgtgggcagttttttttttcccttgggagttgggacttgggcttgtggtctgtgacgcagggaatatatgtgttgacaagatgaaaactgtcattgatcggccatttccgagactaaatttgtgtaacttgtcgaccaccggagtgaaatgtgtatctgcgaataacgatatagagtatgtgtttgtt

SEQ ID NO: 88924 - DNA, 1672 bp, Zea Mays
ctctcttcttctccccttccacccaaagccttgacctcacgtctgagagcaaaccagacgaaacaaaccctcctgggctgcttccccttttcgatccccatggcgcaggacgacatcccggagtcctccgcctccggatcccccacctcctccaccccggcggctcgcctcaacgccgccgcgcccgagtttaccccccgatccgccgcccagcaccacggcaacaacgcccatcgccgcggcccgcaccaccaccatcagccgcaccaccacccccactaccaccctcaccagcactaccagccgcggcaccagcaccatcaggcccaggccgaggatgaggggagcgccgccgcgacggcggaggatagggagggccccgctggtgcggtgcagccgcagcaccggctgcccgaacccgaggcccgcaagctcgtcaagcaggttgaattttacttcagcgatatcaatttggccacaactgaacatctgatgaagttcatcgctaaggatccagatggatttgtgccaatttctgtagttgcatcttttaggaagatccgagagatagtttatgatagatccttgttggttgctgcattacgcacgtcatctgagctggttgtttcagaggatgggaaacatgttaaacgcttacagcccttcaatgccgaagaagttcagtctcgtattgttgttgctgaaaatttacctgaggatcaaaagcatcagactctgatgaagattttctcagctgttgggaatgtgaaatctatacgtacctgttatccacaagatatttctccagcagcagctaacagaacatcaaggattgagatgatttttgctaataagcttcattcttttgtggagtattcaactgttgaagatgctgaaaaagcagttgctgaattcggtggtgggggaaactggagagaggggattagagttcgttcactgcttggatgtctgaaacatgggttaggtcaaggaagaaaaggtggggatgaggagtatgctgcagatgaagatggccctgacacaactgatcatccacgagactttggaacagatgttactgcccaaatctcagaagcacatttcgatcaccaggccgaagatggcacccatgacaagggtggaatgaggcagcaggggagagggagaggccgtggaggtagaggcagaggccgtggtcagcattatggccacaacagccgagatggccaccatccaattggcactcccccgtcagagcatccagctgtgccgaagccgcccccgggcccccgcatgccggatggcacaaaagggttcaccatgggccgagggaagccgctcagcattaccattgatgctgcggctaaccctaccaccacggatgctgcttagccgcagcgtctatgctggtaccggcctattgccctgatcatcagtcttttgcaaaccgattgcagtggtcatttactcatgttctaaaccgtttactgtggcgtgttggttcattttgtctgggatttaaaaggaaaggagatggctggtactatgatacatgagtgtatactaacacccgaagtttagacatgtggacatgtactgtgatatgtagctcttaaattagaaaaatgcatacttttgatgagaaagaggggtggttttatgatctgtctcc

SEQ ID NO: 88925 - DNA, 684 bp, Zea Mays
atggcccgctgctcacctcaacctcacatgtgtcgcctccgcctcgcccccgcccaatgccttgaccctggccccaatgtgacaaagagaaaggggtggaggcgagcccctagtttgaagatcttctcaagcgatttggttctctgtaaattgttcttagttgctaagcttggcctctacttatctgatcaagatgcgtttaagtacaacagtggacaactagcaccagagacgattactgatcaaatttatgggaacacactatcaatttttgaaataaaaacagcagacatttctgataatgtcctaccctctgttggagttgtaagctatggtgagttcaccatagaagtgatagatcatgttttagattaccttgaactaatggagtgcatggttggtgatattggagataagttcttcacaaagagagcactaaggggcgttcatgttgtcccatatgacaacatgacacccttccaagctgcattaggagtaagggattgcgaatggacattctgggcaacgtgtcaccaaactgattcgacggtgttgggagaagatcttgatgtgtgtctgactttttttggagattattatggaactccaagatgttctactccatatccagggataggggtaaaggataggaaagaatacaagagatttggtggagacctctaa

SEQ ID NO: 88926 - DNA, 1826 bp, Zea Mays
atggacgacccgggcgcttccgccgaccccgccgcgcgccaccacctgtcgccgcagcagctcgggggccagccgccggtgccgcgctccccgaccccgctcgacctggcctccgccgccgcggcgtccgggtatcgccgcctctcgccgtcgctgcggccgccagcgcacccgcaggcgcgcctctcgtcgccctacggccagatcccctcgcccggcgccggcgcgcaccacgcgcgctcgctctcccagccgctcttcttctcgctcgactcgctcccgccgccgccctacgccgatctgggcgccgcgcccgccgtgcctccctccccgccgccgtcgacctccgacccgccgcctctcggcctgccgcccaggagggccggccaccgccgctcgcagagcgacatcccgttcggcttcgcgcagctcagcccgccgctgcccccgccggcgccggtcaagcgcgaggtcaccgctgcggccgacggctgcagatcggacggcggcggcggtgatgacgccgccctctacgacctcgtcaacgcgtacatggacctggacgggctggacccgctcaactcgtctgaggaccgccacgacgaccgcgacagtcgtgccagcggcacgcgcgcggggagcgcggccgagagcagcgagaacgaggcggagagccagtccacgtccgcggacaggaaggacgggggcaagtcccgccattgtcgcagcctgtccatagacagcttcatgggcaagctcagcttcgccgcaggggaggagtctccgaagctgccgctgccgtctcctggtggcagcctcaccaggagcgggagtggctcactggaaggtggtgctgtcgcgctgttcaatatggagtttaccaacggagagtttaccgactccgagaagaagaaaattatggcgaatgagcgacttgctgagatagctctgacggatcctaagagggtcaagaggattctggcgaatcggcagtcagcagccaggtcaaaggagcgcaagatgaggtacattcaggagcttgagcataaggtgcaagtgctgcagacagaggctacgacactctcagcacagttgacaatgctgcagagggactcagctggattggctactcagaacaacgagttgaaaataaggcttcaagcaatggagcaacaagcacagctgagagatgccctgaacgaagcgttaaccgccgaggtccaacgtctgaaactcgcgactggggaggtaaccgatggccggatgccgaagggcctacagcagcagatgaactcccagatgctccagatccagcagctgcaggttcagcagcaggcgccccaggcacagcagcagggccagcgacagcagcagcagcagcctcagaaatcggcatagatcaggtcaggtcgagagaaggacgctgaagctaattgagcttgagcatgaccaattgaaggatgctgggtggggagaaaaaacccgagtcttttgcgtatatcagacatgttgtaggatagctgcaatagtagggcgacaggcgccgtggtgccgctgtttcagttggtttcgccgagtcaagtaccttagctggagtatgtcgtcttggtgtcgtagtaccatacatgattgcctgcctattgttgaggcgtcttggtagcgtccctgaacgttctctcggaggtgcttcttctgttcttttgtctaagggggctagggtgtcacaaatgtacctgcgtaatagtgtaattattatctatagcgtaccttcagcgtctgtactgtggaggggttcccaagttctcatgcatgcccgttgatctttc

SEQ ID NO: 88927 - DNA, 544 bp, Zea Mays
aattaattaactcaataacaaatcagctgctcgttttgatttgcattacacgctgcttctacagttccactacctctttcatcatcttcttctctctaccactaacactgggggtcactgaactgaacgtgagctacgacagaaagcatcatgtagttcatcataaggaggattgcgaaaggggggaaaacgagggggagcgattaaattagagcaaaaggaacctaagctttggggttggactttctgggcgtacggtggtgcgttactcttctgggctggagtcggacaccggctcgtcgtcgtcgtcgtcgtcttcttcctcctccggatggttgacgtcgctgcgaccgccgcgctgctgctcgtgggacccggaccccaggtgcagatgctccgagttgctgttgtgagacaagctagagatgggctgctggccctggaagtcggcgacgttcaccgccgcggggaacacggcggcctgcgcgccgccgaggttgatgagctgcggcgcgggctggatggcccagaattgcgtgggctg

SEQ ID NO: 88928 - DNA, 1010 bp, Zea Mays
cttgagcgacgccatgatgcgccgggtgacggcggcgccgacgcccgcctccgcgcccgcggcgttgtccccgcattgcacctgcgcgcgcaggctcgtggacttgtacgcgatgtcgaagaagggcggctgccaggcgggcggcgcggaggaggtggacggcagggaggcgctcatctgcgcgtgcgagaagaggttgatgccggtgtagtccaggcagacgtggcggtccaggtgctggtactcctcgccacggatcgcgtccgcccgcgccagcgcgccgtgggcgtactgcgggaacgccgcgacgaactcggcgtacgcgtcgggaagcggcggcagcgactcgtggttggtgaagtgcgcccccgccagcaggcccgacgccgcggccctgacgaagttgtgccgcgacgcccgcgccgtggtgaccgtggccgctgcggcggcggaggcggaggcggaggcccgcttggcgcgcacgggcacgcagcccggcaggcagaggtggtcgctggaagccgccgccggcgccatctcttcgccgcctcctccggccgggctgctgttcctgctcctgaaatacctgttgatgagcaccagcatggctgcctcatggatggagccccccctcttgtgcctgcgctcggcgagtcgctggtgcggggtcggagggacagcgacgggcgggggtggccggccgcggcctgcttttgcccggtcgctgatcaaacggtggctctcctctcctgctgccggccgaggattccttctttcggctctcagctagcagcgcgtcgaggcctcagagcgagtgacagcaacctaaccgagcagagaaagcttgaagcatccgctgatccgcccttcttcgacctctcatcgggtcaatgacatcgtgctgacccatgacatgcatgattactcctactcctgtatatatcctctgcaggatatgattttcgtttttcgttcctccttttttttgttaaagaaaattcagaagagat

SEQ ID NO: 88929 - DNA, 1613 bp, Zea Mays
gacgcctgctcctggtcgttacagatagagacggataagcatgacagcgcaggccgcgcggcgtggactccatgcctgcaaggggacaatagagatgccgtctgcgtccgcggcggcatcggcgccggcgtcaccccccgctataaatccgtcgcacccgcccacccacctgccgtgccagtgctctcatctgcgtacacggtctccctcttcctgtcagtagtagagtgagagtgaggcagcgagtaggagacaaggggaaatggggaagggagcgcaagggagcgatgcggcggcggcgggcggcgaggtggaggagaacatggcggcgtggctggttgccaagaacaccctcaagatcatgcccttcaagctcccgcccgtcggcccttatgatgtccgcgtgcgcatgaaggcagtggggatttgcggcagcgatgtgcactacctcagggagatgcgcatcgcgcacttcgtggtgaaggagccgatggtgatcgggcacgagtgcgcgggcgtggtcgaggaggtgggcgccggcgtgatgcacctgtccgtgggcgaccgcgtggcgctggagccgggcgtcagctgctggcgctgccgccactgcaagggcgggcggtacaacctgtgcgaggacatgaagttcttcgccaccccgccggtgcacggctcgctggcgaaccaggtggtgcacccggccgacctgtgcttcaagctccccgacggtgtgagcctggaggagggcgccatgtgcgagccgctgagcgtgggcgtgcacgcgtgccgccgcgcgggggtggggcccgagacgggcgtgctcgtggtgggcgccggccccatcggcctggtgtcgctgctggcggcgcgggccttcggcgcgccgcgcgtggtggtcgtggacgtggacgaccaccgcctggccgtggccaggtcgctgggcgcggacgcggcggtgcgggtgtcgccccgcgtggaggacctggcggacgaggtggagcgcatccgcgcggccatgggctcggacatcgacgtcagcctggactgcgccgggttcagcaagaccatgtcgacggcgctggagtcgacgcggcccggcgggaaggtgtgcctggtcgggatgggccacaacgagatgacgctgcccctgacggcggcggcggcgcgggaggtggacgtggtgggcgtgttccggtacaaggacacctggccgctgtgcatcgacttcctgcgcagcggcaaggtggacgtcaagccgctcatcacccaccgcttcggcttctcgcagcgggacgtggaggaggccttcgaggtcagcgcccgcggccgcgatgccatcaaagtcatgttcaacctctaggcgggcaagccgcctccctctcggtccagccgtctaggcgccgtcgccgtatgcccctgcccccacccaggccacaactcctggaataaaaatgacagaaaagaaactttatagttcgatgaatgggcagtttgccgtggttttggaataatttggacttcgtcttttttcgcttctgttgtcgtaccattgtcttaatcgatttgtggattttgaagtctccttttattgccaaaagttcgcgagaact

SEQ ID NO: 88930 - DNA, 238 bp, Zea Mays
caaaggcctaaaactacatgtgcgggcatcaaatctctgtaacacgcgggattacaagagtgtctccaatagcgttctctatatacattttctatatcatttttaaagattacaatagaaagtttctcgtcggacaatagctttccagccccgtcttcatccccacgaacgctcacggacaatagaaaatgtattgtttggacacaaatttaaattgatcatatcaaatcaataaaaa

SEQ ID NO: 88931 - DNA, 1210 bp, Zea Mays
acgtgaccaaaaaaaccatagtagtaaaacgaaaatcagattgttttgtttgcgggcacgcacagcgttcgttaatcctctgccctactcctaactcggggggcggctagagctaggtggctagtcccacagctccatctcaccagcgccgccgcaatcgtcatcctcctcctcggggcactctacggcgggcggcggcgggtcgatgagcagcccctgcgccaggctcgcgtagtaggacccggcgtcgtccatgccgccgaacacatccacctcaaccacgctgccgccgccaccgtccaccgccgccgccgacgcgccggcgtggtccaactccgtctccgtggcggcattggcgcgctgaccctgcgaggcggcggcgggcgcgtccccgccgccgcgcggttgctgcgtccgcaagaacgccgcgacggcgtcggtggcggcgcgctggacgccgggcaggcccgcgggggcgcgcggcacgtggagcagccaggcggagtcggcgaagttgaggctggcggcggcgccgcagagcgcgagcatggcggcgtcgtgcgcgcgcgcggcggcctcggcggtgtcgaacgtgcccacccacaggcggtccccgcggctgcccggcacgcgcacctcgcacacccaccgccccgcgcgcccgcgccgccgcaccccgcggaacaccgggtgccgcgtctcctggaacttggtgcgccccgcgggccgcttcggcggggacggctggccgcctggtggcccgggcgaggaaggcgacgccggcgggggatcggtggagtccatggccggccgtttgcagctgggtcggtggcgctggcgcgggcttgcttgcgggggcgtatttataggtacttgcttcctccacggccggagaggggagctgatgatttattatacgtcagaaggaaaacacaaacacgagtttggtttggtctctggccggaacaacttgccttcgctggcctgtggttgacatgttccggctggcacagtagaacgaatgggctgggttgccggaagccggggctgggactcggacgtcgacttcgccgcggccgattgcttagccgcttcgaatgcgccgtcgcggactcgcggtctcccccggtttccagggccgggtgtggtgtggctggctgcccatttgtttattttacccgcttttgccactgccagcgcccagcgacat

SEQ ID NO: 88932 - DNA, 1481 bp, Zea Mays
gcggccgcgccagcaccacccagcaaccagatgcgcagccgacccgccagtatggcagcggggcccaccccatccgccgcggcggcgtcgttgcggccgccgccgccgtgtttcgactaccgggcggccgtgctcgccgacacgcgcgccgccgccgcagggaaccctgcgctggcggggctgatcgagtccggtgcgctcgtgcgcgtcccgcggcggcggttcggcccggtcccggcgtggcgcccgccagacttcgtggagcctgaggatgtgtggatcctcggcacctcgcacctctcccgggactccgtcgccgacgtggagcgcgtcctccgcgccgtccaacccgacaatgtcgtcgtcgagctctgccggagcagagctggaatcatgtacgcgtccagtgattcttccgacgagccgcttttgaagtccaacatgttctctctcggtggctccaagttcttcggcgcagtcagtagaagcatcaacctgggtgggcagagcgctcttgctctgcgtctgctcctcgctgttttttcgtctaaaattgcttccagtgcgaaccggccgtttggagaagagttccgggcagctaggagggtgtctgaagatattggagctcagcttgttcttggggatcgccccattgaaataactcttgaacgagcatggaaatcccttacatgggatcaaaaggcaaagctactaatctcactgttccgcggaattacttctaagactcacacgccgcaggatgagaaagccgccgtcagcccatacgagttgtacgagaaactgagcacatcttaccctgcactgttgcagcctctcatacatgagcgcgacatgttcctcgcatggtcgctgaagaggagcaaggctgtgaacaagagcagaactgtcgtcggagttgtagggaaggggcacatcaatggcatcgtgtacgcgctgatctctgaccagggggatctgaggttccgagaccttgttggtagagcatcatctgatacatgggtcagctcactcgtcaagggcctggtaagggacactgtaattggtctggtcctttgggctctgtatgaacagctgcaggctgtgctgtagagtagatggttcagacttccacaaggcacacaaactcggtactgttctcaacttcttacaagctgaaacagtggaactgaaatccgataccagcggaaatctaaaacttgttcgaagtgcctgtacatgaacttgatactgtccctgttcttcacaaggttgattacttgattaaagtacctgtacatgaactgtcaactgctgttttatcttctgaatacatctacattggacaacaaaacactacctgtatttttctacttttttgccatttcatatttgggtaaagcaaaaaaaaaagatgcattatgtgtagcacactttatatttgtatatatatgccgggcgaaaagcaatagattttgagaaaa

SEQ ID NO: 88933 - DNA, 300 bp, Zea Mays
aatgggtgggccatccatcatagattcatatagtataccattcatttacattacatccgggagctagcacaaggaaacacgtacgttgagaacattgtctgattcatgtacactgctgcactactatacatacaacaacatatcatatatggtcatggcaaaaaaatccttcgtcggttcggttacgaggccaccacttattttgcacacagacacaccatggacgcatgcgcttctgttctgttctgttcactagtagctcactctcactgcagttgtttcctttttttctggggtggg

SEQ ID NO: 88934 - DNA, 1684 bp, Zea Mays
ccgccccgcagccagccgtcccgccccgcaatccccgccccgccccgcaatccccgcccgcaatccgctggtaggtgctcgccgatggaaggttatcaggtccgctgccgctggaaggtgcccgccccgcagcagagaatggaaggtcctcacgcccgcacgctcgctggaaggtccttgattgagctgataatggaaggtcaccgtacacggatggaggacgcggatggaaggtccgtggccaaatccgatttgccccctcgcccgcgagatgccgccgcccaccgtgcccgcgattccgccccaatcacctctggttctcaagtatggggaggaagggaaggtggtggagcgagtgaacctcgccactcggcagctgcgcctactgccgaagcccgttgtccggatctgcggtctcctcgcgctcgacgtctcccgcgaccagctaaaggcgatagtcgagcgcgccggagcaggcagcaggccaacaacccagcagatgggggaagtagcatcaaggagggtcgcgcaccgtcgtcgacgacccgcttcttccccgatgcggaggctgcggggcaactacgaccccgtggagatggcgcgcatggccgccagcgctgcggcagccgtgcgccactcggccaagaagcgccccaaaatgagccagatcgtgagggcactcgagggggacatctcgctggaggacctcaacgacaacgagggggtgcggcctgggcagagcatggcgttcggcacggctgccgcggctgcgacctcgtacaaggccaaagctcccggaccgtacacgcacggcgtggagcggatcaggcaggcgcccacggtgtacagcggcgcggtgggccgtccctctacgatcggcaactacggcgatgagtcccgtgaaaccgcaccagtagcaggccggaagcagcagcagctgagttgctaccgtattagacacattcccatgtcacctactgatgtgtacatcacaacaaacatgtgtagttacaataagaaaataggtgtagccttgagaagtgacatcaaaggttcctgcaatagtggcatggacgaccagttcctgggtgaagctgtttcgagcaacaacgacatcgaaggagatatgcacagccgatacattcctcagcaagatcccttctcagagggactctacacgttcgatattgggcagaatgaccttgctggtgagttctattcaagaacagaggaccaggtcatcgtttccattccaactattttgctggaatttgagaatggtctcaagaaactgtatgaccaaggtgctaggaagttctggattcacaacacaggccccctcggctgcttgcctcaaaacattgccctgttcggcaaagacccatcccaactggacgagctccactggttcgagcacgccactcacgcatgctgtggatacggaggcccacccctgaactacgatggtaatgtaccatgtggacacacagtgtctctggatggtaagatggtcaccgcaaaaggtgcagcgacactactgaattcgtcaactgggatgggatacattacacggaagctgcgaatttccatatcgcgtcgcagatcgtcgcagatcctgaccgggaagtattctgatcctccgttcgtggataagatgttgttcgtcataaaacctagattctga

SEQ ID NO: 88935 - DNA, 107 bp, Zea Mays
ctgggttggctcaggcactattaaataggttgtgcctcgggccggctcgccacccatttgaccatctatacctccacacgataatgatggtcctcaccttagttgcc

SEQ ID NO: 88936 - DNA, 441 bp, Zea Mays
acagacaatggtggttccgtatttattggcgaagatacttacaacgggagtcagcaagggacagaaagcgaagactatactaaattcactatgctgaagctgaagcaggagctcaccaagcacgggtttggtgctcaactactccagttgaaaaatcccaacaagaaggatattgttgcctttatatgaaaagcatgttgtcggcaagtagttcctcggcaatacttgtatttatgctttatatacttccctctgtagcgttgaaactttaattgacacgatcagattgaagcgaaacaatgcatgtaacttagtttaaatctctggtctgtgtattgcaacaatggtgcagttcattttagcatgcatcgtcggcaagtttgtagttaggagtcgtgattgaaatgcttgtctttccaaccccggcacaggttttcttgt

SEQ ID NO: 88937 - DNA, 231 bp, Zea Mays
caaaaaggcccatatatttattaaaatcacaatttattctacattttcatgtatttgataaagaacacaaagctagagataatattagttagatgtttttttaactttgaattagagtctgtgatgtaattttatttttgttatgaacattagataatgaattgaacttaggaactttatatagacctgattatactatttttctttctaacaaaatgatttgtaaacgag

SEQ ID NO: 88938 - DNA, 1298 bp, Zea Mays
cgccaatcccgagcgctgcacggcagatcacaccgcactgctgcagtgcaggcacatccaccacgcacccacatgccgagacctcggtccagaagataaaaactaacatctggatcatcgctataccaaccaccaagatcagcaaaggcgggtagagcggctccttcctctgcccaccccgccacccgcatgcagcttgacgactcaccggaccactacgacatcctcgctccaccttcgcactcgcgttgcgtcgcgtcgcgtcacggcgggctccctccctccgcctccatgtgatgtgacgcgacagcgtagcgcgaggctgcaggctgaagatctcactcttgttggaagaagaagaagaagaagccgggggagacccaggcctgaccggaccgcgcgcctgagggaggggaaggacgacgatggggctgctgtctcagcgagtggagctgtcggacatgaagcccggggaccacatctacacctggcgcgccggctacacctactcccaccacgggatctacgtcggcggcagcaaggtggtgcacttcacgcgtaagaaggaggcgggcaacgcgggcctggactcggccgtggtcgccgcgtccagcagcctcctcctctcgcagcaggggcccgacggcgccgcgtgtcccgcctccctcccggactgcggcttccaactccccgacagcggcgtggtgctgacctgcctggactgcttcctgcgcggcggcgcggcgcaccgcttcgagtacggcgcggccgcggcggcgttcctggccaggctgcgcgggggcacgtgcaccacggcgcgcgccgacgcgggcgccgccgccgtgcgccgcgccatgcacctcctccggcacggctgcttcggcgactacgacgtgttcgggaacaactgcgaggacttcgcgctctactgcaggacggcgctgctgcccgccgccgcaaccgggatcgggcggagcgggcaggccgcgtccgccgtcggcgtgccgctggccgcgctcctctccaccccgctcaacctcctggccgccgccggcccgctcggcgtggccgccgtcaccgccggcgtgtactgcgccggccggtacgtcaccgacatcggggtgcgcaaggacgtggtgaaggtggaggcggaggacctcgcggcgcacctcggctgctgccgccgccgtgccgaggagcaggaggaggcagcggcgctcaacaacaagaaggagcagccggccaaggccaagcagagcttgcttccgctgaagcggaaacgggaggtttgcgtctga

SEQ ID NO: 88939 - DNA, 849 bp, Zea Mays
atcttcaacaccgcagccgctcgctcccctcttctcctggtcctcgtgcgcgcgcgcgagacagagagaggcgagtggcaatggcgagctctggcagctgccactcgctcctctcttcagcctcaccaatctcgcctgcgctcttctcgcgacaccgagcggccgccgtcggtggaggagccagccgggcgagtaaagtgcaatcgcaggtcaggtgtcttgctagagatgaggattcgaaggggtgcgcaaacgtttccaaggccgagactaatgaagaaaaagaaactacgccttcatcaagacgaagatgtctggtctgtctcggcgctgttaccttgatcagcgcgacaggaccaccaaacggactcgctgcggatgcgatgaacaaggccggggtacagaaagctgtttgcaggaactgtaatggcagtggtgctgtgatatgcgacatgtgtggtggcacagggaaatggaaggccctcaatcggaagagggcgaaagatgtttatgaattcaccgagtgcccgaattgctacggccgcggaaagttggtgtgccctgtctgtctcggaactggcctgccaaacaacaaggggctcctgcgacgcccagaagccaagcagctgctcgacaagatgtataacggcaagatactgccgaggtcgtagagcactctttaccacgcccaggattttgttgagtcgtcgagtaggaatgacgctcggatcgatgtagccctagtagagtgtaaaattgctgttagccgttcaagaaagattttttacacatacatgtactgacccttttttttaccaaaaagtcaaagcaagattgatgtggtcgtcc

SEQ ID NO: 88940 - DNA, 1640 bp, Zea Mays
gctcctgctcccgcaacaaatcccaaccccaagtccccccaaccaaagcagaggaaagagccgaggacgcgagggcgacgacccggaggagcaccggacccgaaggcggagccccccaagccagaacccggcgagggggtcggtgccgaccatgtcctcgcccgcgccctccccgcccgccggggcgccgtcggagccgctcctgctcccgctcccgcccccggagttctactgctaccagtgcgaggccacggtgtcgctgcccgagccggccgcgccctcctcggccaggctcctctgcccgctctgccatagcgacttcatcgaggagaaccctagcaccccgtctccaccaccacctccgccgccgccgcccccaccgcttttcctctccgactcctcctcctcctcgctctcggacgaccccgacgacgacttcgaccttgtcatggaccccgacgtggtgcgcgcctaccttagccgcttcgcccaccgccaccacctccagcagatcggccacggccccggcccgcacggccgaggggagccgcccgccacggccgcctccatcgccgcgctgcccacggtcgaggttgctgagcccaccgccgtctgcgccatctgcaaggacgacctgcccctcgcctccgaggcgcggaagctcccctgcgcccacctctatcactccttctgcatcgtcacctggctcgggatgcacaactcctgccccgtctgccgcttccgcatcccccccgccgacgaccccgaccaggccgcaccgtcgcagcaggacccgccgcccacgcggatcaccatccgcttcagcaccaccacacgccgccgcgtccgcatcggcagcgatgcgccactggcgtctcatatctcggcgtcgcccacgcagctcgcacaggctattaccggggatggagctggtggacctgccaatagcggcgagactgtgtcatctgagtggcctccgcaccccgaatcggatacagtcatgtcggaggcacgcgaggggggtggcttttttgattgagccagaggttccaattatcaggcgataaggtagctgctgttagctgtcagccaacaggagtaaaaggaggctaccacctaccatacgcttcctgtcttcgttcggacgaggtttctcgcaaggtgatggcgtgctgttacagctgaaactaaagctgtccttgttcggacgaggtttctggcgagcgagaagatggcatgttggttacagctgaactaaagttgtcctgttaggagaacaagagcattcatcgcatgggttcccggtgtcttgtatattggttaaacgtatttattcgtaataaatatataggcatgtacaatgtgcagtactccgtttctggtgtccccgtgccctccatgcaacttggtaggtacatatgggaatgaatcgagtgctgtttggttcacatatttgtaacgtgaacggtaatcaataacgtcaaaccatgtttgttgcaatcagataatacactagaaactgatatcgtcctattcaaacttattacggccagaaattattacggcgaaccaaatgacactctagtagatatggattatactctgctgatgaaactgcctatttgcttgaaggcaagtta

SEQ ID NO: 88941 - DNA, 624 bp, Zea Mays
atgggtaggcttacgggttgtgaagattgtgatgctactggttttggagatttaggaaggaaagagaaaacaataccagatgccttacaacctgaattagggaaaggattgctaattgcacatggaagtcaccaagaacttggtaaaggtgattcaatgacaaatctaatgattaacatgtgcgatgtgctcataccatacatgaatttgcaacgccatgtacttgttgatggcaaggtcaggactgacaagacctaccctgctgggttcatgggtatgcctatatctctattaatgcataaagatacctatacacctattttggttgctgatttgtggtgtcatttttttggcagatgtcatttccattccctaagacaaacaagaactacatgctgcttccgtcttcacccaatcagggatgaggatgccaagttcaagctctgcaacgggaggtctattcagtttgacgtcggcaacgtggtcatggtgaccggcgggaggaacaccgggcgtgtaggagtgatcaagaactgggagaagcacaagggcatcttcgaggaaaacatagaatggaattcaaatttggtggtcgcaaaagtgtggagacttgaattcatataa

SEQ ID NO: 88942 - DNA, 653 bp, Zea Mays
ccattcgatcgggtcgccttcagacctgacctctcaaatcaaaccgggaccgggtggcctcttgccctcttccgttccgtctcattctcatccccgacccccgcaccgcagcgtaaaccctagtccccggcggcgaccttgcggcctccgctgcgctctgactggtgcgcgtttagacgaggagctgcggcggccaagaccaatcgaccatggctacccgtatccagtttgagaacaactgtgaaattggtgttttctccaagctgacaaatgcttactgtctggtagcgattggagggtcagagaacttctacagtgcctttgaggctgagcttgcagatgccatccctgtggtcaagacctctattggtggcactagaataataggccgactttgtgttggttaatatctgaaatttggttttgctatttggcttattctctacttgttttcaccttccttttcactttgtttgcccaggaaacaagaatggacttctattgccacatactacaaccgaccaaggtaagcatttgctttatgctgtgaatgtttgctagatctgttattaatgcttacacatggctggttatttcgaatctattaatttattacccagatgttttcacacgcatgctgttatttccatttt

SEQ ID NO: 88943 - DNA, 1400 bp, Zea Mays
ccattcgatcgggtcgccttcagacctgacctctcaaatcaaaccgggaccgggtggcctcttgccctcttccgttccgtctcattctcatccccgacccccgcaccgcagcgtaaaccctagtccccggcggcgaccttgcggcctccgctgcgctctgactggtgcgcgtttagacgaggagctgcggcggccaagaccaatcgaccatggctacccgtatccagtttgagaacaactgtgaaattggtgttttctccaagctgacaaatgcttactgtctggtagcgattggagggtcagagaacttctacaggttagtcttacatatttctttgagacttgacatttgggtcattgggctcctttggtggaagtggatgaaatgctaactctaacagtgtgttctcctaatgttgtccagtgcctttgaggctgagcttgcagatgccatccctgtggtcaagacctctattggtggcactagaataataggccgactttgtgttggttaatatctgaaatttggttttgctatttggcttattctctacttgttttcaccttccttttcactttgtttgcccaggaaacaagaatggacttctattgccacatactacaaccgaccaagagcttcagcatctgaggaattgcttgcctgatcaagtggtggttcagcgcattgatgagaggttatctgcccttggcaattgcatagcctgcaatgaccatgttgcacttacgcaccctgaccttgacaaggagactgaggagttcattgcagatgtgcttggggtcgaggtgtttaggcagactattgctggaaatatccttgtggggagttactgcgccttctctaacaggggtggtttggttcatccccatacatccgttgaagaccttgacgagctctccacgctcctccaagttcctcttgtcgcaggaactgtgaacagaggaagcgaggtcattgctgcaggcatgacagtgaacgactggactgccttttgtggctcggacacgacagccaccgagctctcagtcatcgaaagcgtcttcaagctgagagaagggcagcccactgcgattgtggaggacatgaggaagtctctgatagacagttacgtgtaactggggggccagcagatgtgggtcagagtttgcctttgctaaaagatgtattgcaagctatagtcgaattatcagtagcacaacataaccctctgatatgttcgtggtttatccgtggtttctgaattgtagacttctgcgttgaagctcgtgctactgtttgttttccattgtttgttcacaccaacagctatatgcagatacatggcttctcagtgttacgccggcagatgaataagcttggggaaaaaaaggatgttatcttg

SEQ ID NO: 88944 - DNA, 1214 bp, Zea Mays
ccattcgatcgggtcgccttcagacctgacctctcaaatcaaaccgggaccgggtggcctcttgccctcttccgttccgtctcattctcatccccgacccccgcaccgcagcgtaaaccctagtccccggcggcgaccttgcggcctccgctgcgctctgactggtgcgcgtttagacgaggagctgcggcggccaagaccaatcgaccatggctacccgtatccagtttgagaacaactgtgaaattggtgttttctccaagctgacaaatgcttactgtctggtagcgattggagggtcagagaacttctacagtgcctttgaggctgagcttgcagatgccatccctgtggtcaagacctctattggtggcactagaataataggccgactttgtgttggaaacaagaatggacttctattgccacatactacaaccgaccaagagcttcagcatctgaggaattgcttgcctgatcaagtggtggttcagcgcattgatgagaggttatctgcccttggcaattgcatagcctgcaatgaccatgttgcacttacgcaccctgaccttgacaaggagactgaggagttcattgcagatgtgcttggggtcgaggtgtttaggcagactattgctggaaatatccttgtggggagttactgcgccttctctaacaggggtggtttggttcatccccatacatccgttgaagaccttgacgagctctccacgctcctccaagttcctcttgtcgcaggaactgtgaacagaggaagcgaggtcattgctgcaggcatgacagtgaacgactggactgccttttgtggctcggacacgacagccaccgagctctcagtcatcgaaagcgtcttcaagctgagagaagggcagcccactgcgattgtggaggacatgaggaagtctctgatagacagttacgtgtaactggggggccagcagatgtgggtcagagtttgcctttgctaaaagatgtattgcaagctatagtcgaattatcagtagcacaacataaccctctgatatgttcgtggtttatccgtggtttctgaattgtagacttctgcgttgaagctcgtgctactgtttgttttccattgtttgttcacaccaacagctatatgcagatacatggcttctcagtgttacgccggcagatgaataagcttggggaaaaaaaggatgttatcttga

SEQ ID NO: 88945 - DNA, 1300 bp, Zea Mays
ccattcgatcgggtcgccttcagacctgacctctcaaatcaaaccgggaccgggtggcctcttgccctcttccgttccgtctcattctcatccccgacccccgcaccgcagcgtaaaccctagtccccggcggcgaccttgcggcctccgctgcgctctgactggtgcgcgtttagacgaggagctgcggcggccaagaccaatcgaccatggctacccgtatccagtttgagaacaactgtgaaattggtgttttctccaagctgacaaatgcttactgtctggtagcgattggagggtcagagaacttctacagtgcctttgaggctgagcttgcagatgccatccctgtggtcaagacctctattggtggcactagaataataggccgactttgtgttggttaatatctgaaatttggttttgctatttggcttattctctacttgttttcaccttccttttcactttgtttgcccaggaaacaagaatggacttctattgccacatactacaaccgaccaagagcttcagcatctgaggaattgcttgcctgatcaagtggtggttcagcgcattgatgagaggttatctgcccttggcaattgcatagcctgcaatgaccatgttgcacttacgcaccctgaccttgacaaggagactgaggagttcattgcagatgtgcttggggtcgaggtgtttaggcagactattgctggaaatatccttgtggggagttactgcgccttctctaacaggggtggtttggttcatccccatacatccgttgaagaccttgacgagctctccacgctcctccaagttcctcttgtcgcaggaactgtgaacagaggaagcgaggtcattgctgcaggcatgacagtgaacgactggactgccttttgtggctcggacacgacagccaccgagctctcagtcatcgaaagcgtcttcaagctgagagaagggcagcccactgcgattgtggaggacatgaggaagtctctgatagacagttacgtgtaactggggggccagcagatgtgggtcagagtttgcctttgctaaaagatgtattgcaagctatagtcgaattatcagtagcacaacataaccctctgatatgttcgtggtttatccgtggtttctgaattgtagacttctgcgttgaagctcgtgctactgtttgttttccattgtttgttcacaccaacagctatatgcagatacatggcttctcagtgttacgccggcagatgaataagcttggggaaaaaaaggatgttatcttgaaattgta

SEQ ID NO: 88946 - DNA, 2042 bp, Zea Mays
aacccccctttcccgccacaccatctcctcgccgcttcccgccacctctctcccatggcggcgccgtcggcggccacgcgcaggaaactgcagcgcaagttccgcctgcgaggcttcaccctcaaggtggacgccctcgaggaggccgccgccttcctcgaccgcttccccgacgccgaggacgacgcgctcgatctcctcctcgacgagctcgacaaggaaccgctgcagtcgtcgatactggaccgggacgcggtcaggcgcgtggtggcgctgcttgtcgaggccgaggaggcgctcgatgtggcgtcgccagcggccacaagcgcaaggtctgcgctgcgggtggtggacgcgttcctcgtgccgcggttccactacgatccaatcaagaaagtattttacgagcacacaggcagattagctgtccatggagaagctggagataaagcttccctttatagggataggtatcaagtgctgctgcagagactgtctcgtgataaatatttctctaagccggcttttgacacagttgcgaccgaacactgtagttgcgagataacttctgtacagtcgctaattgggtgcactgggcggagatggattatgggggtcatttcgcagttggaggagcgacagttctacttggaggatcttactggagcagttccaattgacttatctaatgccaaaatcacgtcaggtttttttgttgaaaatactgtaatcgtagccgaaggtgagctgctttcaaatggcattttccaggtaaatacatgtggatttcctcccctggaggacagagaagcgtcagtctcattgctcatgggttttgatttctttgggggaggtgtaataccaactgaagaaacactaaggttatcatcactggaaaaaaaggctgtgaatgatatgtttgtcattctttcggatgtgtggctggacaatcctgagactatggagaagttggctgttgttcttgacgggtatgatagtgtggaagttgtgccttccctctttgttttaatgggcaatttctgctcccggccttgcaatctagcgttcaattcatttgaagaactcagatttcagttcggaaagcttggcgagatgattgcagctcgatctagattaaaggaacatagtcgtttcttattcattcctggacctgatgatgcaggtccttctaaagccctcccaagatgtgcacttccaaaatatctaattgaagaacttcagaagcacataccaaattcaatcttcgtaagcaacccctgcagggtgaagttttacacacaagaaattgtgtttttccggcaagatctcctttacaggatgcggcggtcatgtctcattccaccaacaacggaagaaacaagtgacccttttgaacacctggtagcaactatcacccatcagagccatctttgtccattgcctcttactgttcaacctatcatatggaattatgatcattgccttcggttgtatccaactcctcacacgattgtattgggtgacaaaagcgagcagaaagccttcaaatatactgggatcacttgctttaatccaggttcgtttgcgaatgacagcaccttcgcagcatatcgtccttgcaccaaagaggttgagctttctgcgttggaaggctaataaagggagaataaactgaagttctccaatttgatgaagtgtaaagtcttcgacaaattaaagaactgccacttccacacaaggagccgtgaaaatagcatgactttcatgacgatgtggtgtttctgtgaagagaactgatgctgatatctcatcataggctcagcaaagcagtaggagcagcacattggtgtttgtgcagcatctctagctgtttgtaacaatctttaaatactgcacgttagaccagactattttacttgtactgtttagtttttcattgaatcatggtaacaactaacaagattactttctgacagtgctcataactgctctatcttaatattttgatcacccacctttccaattgttatatttggtagtct

SEQ ID NO: 88947 - DNA, 324 bp, Zea Mays
atggttatcgtgcctctgccagcggtgcggagcctggtgaagccggccaccgtcctgcccgacggccccggccggttggcagccgacacgcgtggggcgcacgcgaactcccccacggggtgccggacggggcgagccggcggcgtgaggatccaccggttgatgtcggcgagcgtcaccccgccgtccgcgccgccgggcttcaccacggcgaacgggtacgccgccaccgcggtggagcccggcgccttgcggctcctcttgccgccttctgctcctttctctgcgtgcagagggacaagggcatgcacaggagaacagtga

SEQ ID NO: 88948 - DNA, 1203 bp, Zea Mays
atggttatcgtgcctctgccagcggtgcggagcctggtgaagccggccaccgtcctgcccgacggccccggccggttggcagccgacacgcgtggggcgcacgcgaactcccccacggggtgccggacggggcgagccggcggcgtgaggatccaccggttgatgtcggcgagcgtcaccccgccgtccgcgccgccgggcttcaccacggcgaacgggtacgccgccaccgcggtggagcccggcgccttgcggctcctcttgccgccttctgctcctttctcttctggttcggtcgccgagcgcttcgacgagctgttggcggcacgagtggttcggtgctgctgctgctgctgctgctgggcgccgccggtgtaactggcccgtaggtccacgtcgcagtgcgaaggctctgctgcttgtgccgtcgccggagtagtcttggccggggatgtcggcagatcggaatgatgatcatcatctgcggaaacacatcacctgtgtactctgtagtctgttcttcttcatcattaaatatatgaactatgcctgccaagtgccaagctaagccggccaggcgcatgatgatacgtatacatgcgctgctaatctcgagtgggcccgcgcataaatttcacaagcgccgtggtcggagtattatttaatggagtagtaatcatcaaagcttgtcctggttgttaggaaccgtgcaacaatcatgaaatcaatggcaatttatttatagtaccaaagtccttggagtcagtaaaaaaaaacaacaagaagaaagaaacggcagtgcaaactactaattaaactggagtaggtaggccaaagaaagcacttgagaagttgagagcaaattaaaccagattgtaaactcttaggagtacgttgggaagaggtggccgtcttctccttgagagcgctgcaggaactgaagaggtggcactcgccccacaggctctgaagcggtgacatgttatgacagagcaaagagttcagtgagagaatgcacactgcaagcaccataacaacaaacaagctaggctactacaaggtttgcattgcatgcatgttggatttgaattaagagagatcgattcaccatgagtagtagttcatcgtccagctccccggtggccgccgctgctgacgcctcggacaccggagactccatgcctatcacacgggcgcagtcag

SEQ ID NO: 88949 - DNA, 153 bp, Zea Mays
ctttcaacttcaaattcgaaatttaaatcccaatttatatttgagtgcagatcttgagtctagctacatgcacaatcaaagaaatactcggcatgaatacaaagcatatgtaatttatatatttaccgagattattttattccttggtttagg

SEQ ID NO: 88950 - DNA, 1938 bp, Zea Mays
tcccctcccccctatggtgttgtctgtgtagcagcaaagccaaaaaaacaacactgctcctccaaagaccttttccaccctcactctctctctctcctctcccctctcctcgccctctctctctctctcaaattcattcctagctgtacccacatctctctcccccggcccttttgttttgtttattcacaactctcctccgtcctcgctctcatctggtccgcactccggaggagtgatttacctccccctccggcctccaatcttatatagagatgcctcaattccattgccccattcccatcgcagactgatctagcgagaaggagaggcacacaagtgacggcagtgccgtgcgcgcggcgccacccccaccacaccatgttgagttcttgcgcgccaacgacggcctttccgcccccagaggcgggggccgccgcgccaccggagccgttccggtctctgcagatcgccacgaccaccagcgccgccggggccaagaagaagcggcgtcccgccggcactcctgaccccgacgcggaggtggtgtcgctgtcgccgcggacgctgctggagtcggaccggtacgtgtgcgagatctgcgggcaggggttccagcgcgaccagaacctgcagatgcaccggcggcggcacaaggtgccgtggaagctgctgaagcgggaggccggggaggcggcgcggaagcgcgtgttcgtgtgcccggagccgagctgcctgcaccacgacccctcgcacgcgctgggcgacctcgtcggcatcaagaagcacttccgccgcaagcacagcggccaccgccagtgggcctgcgcccgctgctccaaggcctacgccgtccactccgactacaaggcccacctcaagacctgcggcacccgcggccacacctgcgactgcggccgcgtcttctcccgggtggagagctttatcgagcaccaggacacgtgcaacgccggccggacgcgggccgagacgtcgtcgtccccggctagtggtggtggctacggcggcggcaccggcgccgggttctgcgtggccgcagctgcctccacgtcccagcaacgtcacctgcatgccgccgccgccgcggcggcggcgttgtctcggacggcgtctagtgcgagcccatcaagcggcggcgagtttggggtgagccagcaggtcgcctgctggcctggtccggcgatggcgagccccacggccgccgcgacgttccacaggttcgaccaggctctgtcgcctccgacgccgcacgagcgtcctggaggcatccacaacctggagctccagctcatgccgccgcgcggcagcgccgccagctactacgagggggctgcaggtgcagctcctgcagctgccgtcaggtgctgcgcctcgccgcattattcgcctgctgtacatgttccgcagccgggcgccgacccgatgcggctgcagctgtcgatcgggttcggcggcggcgacggcgagacgtcggcgccggcagcggcggcgaggctgaaggaggaggcccgggagcagctgcggctggcgatggcggagaaggcggcggccgacgacgcccgggcgcaggcgcggcggcaggcggagctggccgagcaggagctggcggccgcccggcgcatgcggcagcaggcgcaggcggagctgggccgcgcgcacgcgctccgggaccacgccgtgcggcaggtggacgccacgctgctgcaggtcacctgctacagctgccgctgcaagttccgggcgcgtgtgactggcggcggcgccatgagctccgaggtggccagctacgtctcctccgttgtcacggccgagggcggcgacgccgaggtggacgacgacgacccgtaccgccaccaccggcagctcaccgccgacgacgacgcgccgagccacgctaggatgatggacatcaactag

SEQ ID NO: 88951 - DNA, 1549 bp, Zea Mays
cccagccgcagcagcagatgcacagagagctaaggagctgagggcatcaccataaccctctcggctcaccacctcacacatacaatacaatacaatacaatacagccgttgcttactatgcttttggggtcctgtaagtgtaggtaagtagcaacaacgtggtgtcatatgatgcgccgtttttacagggtggagagctttatcgagcaccaggacacgtgcaacgccggccggacgcgggccgagacgtcgtcgtccccggctagtggtggtggctacggcggcggcaccggcgccgggttctgcgtggccgcagctgcctccacgtcccagcaacgtcacctgcatgccgccgccgccgcggcggcggcgttgtctcggacggcgtctagtgcgagcccatcaagcggcggcgagtttggggtgagccagcaggtcgcctgctggcctggtccggcgatggcgagccccacggccgccgcgacgttccacaggttcgaccaggctctgtcgcctccgacgccgcacgagcgtcctggaggcatccacaacctggagctccagctcatgccgccgcgcggcagcgccgccagctactacgagggggctgcaggtgcagctcctgcagctgccgtcaggtgctgcgcctcgccgcattattcgcctgctgtacatgttccgcagccgggcgccgacccgatgcggctgcagctgtcgatcgggttcggcggcggcgacggcgagacgtcggcgccggcagcggcggcgaggctgaaggaggaggcccgggagcagctgcggctggcgatggcggagaaggcggcggccgacgacgcccgggcgcaggcgcggcggcaggcggagctggccgagcaggagctggcggccgcccggcgcatgcggcagcaggcgcaggcggagctgggccgcgcgcacgcgctccgggaccacgccgtgcggcaggtggacgccacgctgctgcaggtcacctgctacagctgccgctgcaagttccgggcgcgtgtgactggcggcggcgccatgagctccgaggtggccagctacgtctcctccgttgtcacggccgagggcggcgacgccgaggtggacgacgacgacccgtaccgccaccaccggcagctcaccgccgacgacgacgcgccgagccacgctaggatgatggacatcaactagcggccggccggcgcccggccatctcgtactcgcatggacgagaggccgtgatggatggatcgtggatgtgcgatgtggtagcagctgcttggtggtggtctctgactagatgtggtgatagtgcagagtgctagtctagactctcacggccggcggccggcggggagtcatgcttgagcgcaaaagtgaagctagtagctaattacgacgtgcatggaatctttcgcttgtttgcttgctgttggactttcttacaataacatttgttcgatcgatccggactcagcaggagcattccggctgcagctggtgctgtcgaaaccgagaaagaatgcatgcatggcagctcttgtca

SEQ ID NO: 88952 - DNA, 2209 bp, Zea Mays
atgccctcctttgtctcccctccgaccccccgttactgcctcacacgttcttggcgcatcgtttctcttcctgccatcccatgccgttcagctgttaatttccttggcctgacaactttgtttcttcgagatttcatctctgccagaagttccagcggccaagaacgcttgtggcgtggcgtggagctggcaaccgtcgtggatttgatcttccctgggcgcctcgagcatagcggcgccggggaaggcggtgacgccaggtggtggcgctgcgccggcggtcagaagatgacgacggcgcggcagtggtggcggcgcgcagcggcggccgtcaaggacaggaggagcctgtacctgacgcgtgtggtggcgttgcggccacggccagtctccggggtggccacgcccgcgctgaggagcccgaagctggaggcggccgtgatccgcgcgaccagccacgacgagcgatccgtggaccacgggagcgcggcacgggtgttcgcactggcgcgcgcgtcgccgccgtcgcttcagccgctcatgtgggcgctagcgcgccgcgcacggcggacccggtgctgggccgtggcgcttaaagcgctcgtgctcgcgcatggcctgctcctgcggtccgacgttgcgccacgcgcggcgcgcctcggccgcgtcccctttgacctcgccgacttccgcgaccgctcgtcgccgccgtccaaatcgtcgggcttctccgccttcgtgcgcgcctactttcgcttcctcgacactcgctccctcttcaccgcccaggagctagacgccgccaacagcggcgaggccgacggcgaggacgcgcggctggacagcgtgaccaagctgcagcacctgctggacttgctcatgcagatccggccgtacggggacggcgtgcagcagggcctcattctggaggcgatggactgcgtcgtcatcgagatcttcgaggtcaacagccaaatatgcacgggcattgcccggttcctcgtcgccgttctcgggtcggccccgacgacgccacgggcacggccgggagagacgctggcggcagcgaggcggcgcaggggagtgcaggggatgcgggtgctgaggaaggccgcagagcagagcgcgcagctgtcgtcgtacttggagctgtgccgggacctgggcgtactcaacgccgccgagtttccggccgtggagcgtgtctcggacgatgacatcagggacctcgagaagatcatcatgaaccacgtcgtcgaagaacgcggcaaggacgtggagaaagaaacgaaggcgcttgtcgccgtggaggaaacccgactagcttccaagacagtggtgacaaaagagtgggtggtgttcgacgacgacgacaatgacgccgccggcgccaggccgaggtctttaggtagttacatgaatccgttcatggccgcgccttgggacaccgtagcgtgtagcagagacttattggtttagcgtgtgtttggtagctgagatggaaattggagcgccatctgatccgtcggacttttagccaaaaattactcgaaatttgtcgtctatggatttgacctactactttgtattatcattatttggattattgagttgagaatccttgtaaatatatatgtcgtacttgggacttgggagatgattgtgaatcgctccctaagcactagttttagggcccgtttggcacagctccagctcctgattctaagcgaggatctggaggagccgtgccaaacgggtatttttttaaactgattctcgtgtggagccgaaagatcgggagtcgtttttgtgaagaaaggtgggatctaaaaaaaactgctccaccctcccttaaaacagctcctcaaccaaccaaatatggacctccccttaaagtttgatcgaaattacccgcaattgccattggacaaaaacataacgagccaatttatggattaaacatttgagaccattttatgcactactatgatggaaatattttatatgttattgtttcatatttttttccgtatatgcatcctacttgttggtttgtaacaaagttgaactgcaaagggtaaaacagacaatcgtcacagaccaccaactctcagaagacaagaatcaatttacttgccaaacagttttaaaaatgattctgattttctaggagaatcaggaggatcagctcctcacgaggatcaggatc

SEQ ID NO: 88953 - DNA, 561 bp, Zea Mays
tcagttttagcagcgcaagtcaacttaccaacacaaaagggtaccacaatcactctgttgccgggcaaaacaaataattcaccaccaattctcacccaagagaatcaggatatgataagggatgttaagtacaggagtcctagaaataagcaaaagtcaagagtttaacacagtcaagttacaacaaacaaagtaggttgagcaagagcaacaaccactacccagccagtggcaacaggaaagacttgctcccagttaggaggtcttccatgcttccagttatttacttcgagattgataggaacaatgctttggatctaattgacaggcttgacaacctaaaaatacaatgagcatgaagctatccatagtcttgaaaccccgaccgcgatataaacagttatcgtgtatcagcagtaaggccatctgttagactctgtagttacaagcaacggtatgagaagttggtgtcccagatcctgtactgaatagaataggaaaaaaatgttgtaaaaattacatgtcgtttctacctgtacaagtaatggaaagtgcaagttt

SEQ ID NO: 88954 - DNA, 519 bp, Zea Mays
tacgcataacaaggcaaccactactccatatgtttagcaatgaataaattgaagcattgtaccatggagtgaataaatgagacaactgaagacaaccaatacacttgtgtcaaacatatgccgagcagtggaagggaaaacttatctaataagcgtccaacatatgtgctttctagtaacttcaccatagggtcgattgcttgcctaactatggccagtacggtcagattcatgagctccttcttaattcctccaatgtgttcctcacacggtcaacatgcacaaaaaagaggtgtgttagatcactccaatagtcatcgtgctagaggcgaaataaaaattaacagtcctattatagaatcaacatggtcaagggctcaccagaatcgacatggtcaagggatcaccgcacagaggccacacccttcgtgccaacggctcaacaaattgaggcaaaattgtttgttgggtagctgactggtggactgagatggatgattgcacaggttgcacaaccta

SEQ ID NO: 88955 - DNA, 414 bp, Zea Mays
atggtgaggatgactggtgacgcatggtgcacagcatcgcgacgcggtgtgcaccaagtatggagcgacccagcacgacatcccgagcgaagcgagcagaggtcgacgcaggtcaacgcagctgggaagaccaagcgtaggtcacggttggtacaggagttggacaccatggcgagttggagaccgacagaaagctcagcgcgcggcaaggaactcgacgtgcgcagagaaacagagactgagctaagctcgacatcggacaaaacactgcgcagtatggcgttcagctgcgcaagcacaaggagcgcgacgcagcggccatggaaggtgctgtttcgtacaagacctcggcttgggttgagcagtgagccggccatgggaaaaacctcggcgaggtcacggccagcgagctga

SEQ ID NO: 88956 - DNA, 1700 bp, Zea Mays
cgaaacccaccaccatcccagcaaacacaaatcgcgcacgctccccagtccccacactccccatccaatccgcgcacaccaagcccccaatctcggccgccactcgctgactagctgctccggcaacagtcccccccgaggtacgagggtgcgaccgcggcatggacacgctcccagaaggcgtcgtgcagcacatcctctcgcagctcagcaacgcccgcgacgtggccggctgcgccgccgtcgcccgctgctggcgcgactgtgtggccttccttccgtcgctctattttccgcggggcgcctttgaggccttggccggcggaccggcgtcggccgtggccttcgccgacgacgccatcggtcggatggtcgacgccgccgcgcgcctcgaggagctcgtcgtgtactgccccttctccgcgtccctgctcccgcactggctcgcggcgcgggccgccacgctgcgcgtgctcgagctacggatggactccgccgccgctgacaagtcggggcacctgaatctcgattctatcggggtggccgcgggcctcgaggagctcaggctgtgggggctcacgatgacgcgcgcccccgcgtggggccggatggagcggctccgcgtgctggagatcgtcagcgccatcctggtagacgcagcggtcaacgacgtcctcgccgcctgccccaacctcaccgacctctcgctgctcgggtgccagtgcgacggagaggcggtcatctcgctagcctcgctcgagcggtgccggctcgacttcctcggctctggcaactcctctctcaggttcgccgcgccccgcgtcgagtcccttgaggtccagggtttctcatttatctatctgcaaggtggcaaccgtctcaaacatctcacaatctccaagaacactggtagtgtgcatcatgtcgagatggggaagctcccggagctggaccagctctcgctgcgcggcgtccagtggagctggggcgccatcagctcggtgctgcagtgcgctagcgaggtgaagcacctggtgatgaaggtcgaattctccggtgattatgacacgctgcagccgtttccggagatcgacctcgtcgaattcttcaacagccacccgaagcttcgcaagttcgaggtccacggcgccatgttcgcggcgctgagtcaggaaaacagcctgaagaatgtaagccatgtcatacagcttctatgcttgcaatattttgcttctggacttctggttgttgtatggcctagctaactctgttcttccaaattccaacgcagttggattcaaggttcgtgatacctttcttggagcaggtcgtggtcaccgtgcggtcatctctcaatgctaagcagaagctgaacaccctcaagtccgttgtcaggtacagcgtgaggctaagaaggatgatcattaggatctcgcagatgaagaattgccatgctgctggagatgatttctttgaggagatttgcaagttcacttacatgaacagtgggacagtgtgcatagagtagaggtgttgctgcatttgccattcttgaagtgatttaacactaaatcaaggcagtttttacccatgctgtttgcttaggacagtttactggataattcattgtttgttttgttgttcaccgagcttgaatgtatcctgcacttcaggcttgaaatcgtttggttctatttgtc

SEQ ID NO: 88957 - DNA, 1746 bp, Zea Mays
cgaaacccaccaccatcccagcaaacacaaatcgcgcacgctccccagtccccacactccccatccaatccgcgcacaccaagcccccaatctcggccgccactcgctgactagctgctccggcaacagtcccccccgaggtacgagggtgcgaccgcggcatggacacgctcccagaaggcgtcgtgcagcacatcctctcgcagctcagcaacgcccgcgacgtggccggctgcgccgccgtcgcccgctgctggcgcgactgtgtggccttccttccgtcgctctattttccgcggggcgcctttgaggccttggccggcggaccggcgtcggccgtggccttcgccgacgacgccatcggtcggatggtcgacgccgccgcgcgcctcgaggagctcgtcgtgtactgccccttctccgcgtccctgctcccgcactggctcgcggcgcgggccgccacgctgcgcgtgctcgagctacggatggactccgccgccgctgacaagtcggggcacctgaatctcgattctatcggggtggccgcgggcctcgaggagctcaggctgtgggggctcacgatgacgcgcgcccccgcgtggggccggatggagcggctccgcgtgctggagatcgtcagcgccatcctggtagacgcagcggtcaacgacgtcctcgccgcctgccccaacctcaccgacctctcgctgctcgggtgccagtgcgacggagaggcggtcatctcgctagcctcgctcgagcggtgccggctcgacttcctcggctctggcaactcctctctcaggttcgccgcgccccgcgtcgagtcccttgaggtccagggtttctcatttatctatctgcaaggtggcaaccgtctcaaacatctcacaatctccaagaacactggtagtgtgcatcatgtcgagatggggaagctcccggagctggaccagctctcgctgcgcggcgtccagtggagctggggcgccatcagctcggtgctgcagtgcgctagcgaggtgaagcacctggtgatgaaggtcgaattctccggtgattatgacacgctgcagccgtttccggagatcgacctcgtcgaattcttcaacagccacccgaagcttcgcaagttcgaggtccacggcgccatgttcgcggcgctgagtcaggaaaacagcctgaagaatttggattcaaggttcgtgatacctttcttggagcaggtcgtggtcaccgtgcggtcatctctcaatgctaagcagaagctgaacaccctcaagtccgttgtcaggtacagcgtgaggctaagaaggatgatcattaggatctcgcagatgaagaattgccatgctgctggagatgatttctttgaggagatttgcaagttcacttacatgaacagtgggacagtgtgcatagagtagaggtgttgctgcatttgccattcttgaagtgatttaacactaaatcaaggcagtttttacccatgctgtttgcttaggacagtttactggataattcattgtttgttttgttgttcaccgagcttgaatgtatcctgcacttcaggcttgaaatcgtttggttctatttgtcactagtctaagttttgcgcctgttaactgcactggtaataagtggctttggtttgttgctgttctttgatccaagcaatttttcccatttggtacaatctagtttgatataataagaaatatatagttgattgttgcccttcagctg

SEQ ID NO: 88958 - DNA, 1712 bp, Zea Mays
cgcgcacaccaagcccccaatctcggccgccactcgctgactagctgctccggcaacagtcccccccgaggtacgagggtgcgaccgcggcatggacacgctcccagaaggcgtcgtgcagcacatcctctcgcagctcagcaacgcccgcgacgtggccggctgcgccgccgtcgcccgctgctggcgcgactgtgtggccttccttccgtcgctctattttccgcggggcgcctttgaggccttggccggcggaccggcgtcggccgtggccttcgccgacgacgccatcggtcggatggtcgacgccgccgcgcgcctcgaggagctcgtcgtgtactgccccttctccgcgtccctgctcccgcactggctcgcggcgcgggccgccacgctgcgcgtgctcgagctacggatggactccgccgccgctgacaagtcggggcacctgaatctcgattctatcggggtggccgcgggcctcgaggagctcaggctgtgggggctcacgatgacgcgcgcccccgcgtggggccggatggagcggctccgcgtgctggagatcgtcagcgccatcctggtagacgcagcggtcaacgacgtcctcgccgcctgccccaacctcaccgacctctcgctgctcgggtgccagtgcgacggagaggcggtcatctcgctagcctcgctcgagcggtgccggctcgacttcctcggctctggcaactcctctctcaggttcgccgcgccccgcgtcgagtcccttgaggtccagggtttctcatttatctatctgcaaggtggcaaccgtctcaaacatctcacaatctccaagaacactggtatgttccggtcttccgaagggctcttttgcgttcccttgcaaaacagatttggtccctttcacattgcctgatggttaatataccaaaaatggatattttaggtagtgtgcatcatgtcgagatggggaagctcccggagctggaccagctctcgctgcgcggcgtccagtggagctggggcgccatcagctcggtgctgcagtgcgctagcgaggtgaagcacctggtgatgaaggtcgaattctccggtgattatgacacgctgcagccgtttccggagatcgacctcgtcgaattcttcaacagccacccgaagcttcgcaagttcgaggtccacggcgccatgttcgcggcgctgagtcaggaaaacagcctgaagaatgtaagccatgtcatacagcttctatgcttgcaatattttgcttctggacttctggttgttgtatggcctagctaactctgttcttccaaattccaacgcagttggattcaaggttcgtgatacctttcttggagcaggtcgtggtcaccgtgcggtcatctctcaatgctaagcagaagctgaacaccctcaagtccgttgtcaggtacagcgtgaggctaagaaggatgatcattaggatctcgcagatgaagaattgccatgctgctggagatgatttctttgaggagatttgcaagttcacttacatgaacagtgggacagtgtgcatagagtagaggtgttgctgcatttgccattcttgaagtgatttaacactaaatcaaggcagtttttacccatgctgtttgcttaggacagtttactggataattcattgtttgttttgttgttcaccgagcttgaatgtatcctgcacttcaggcttg

SEQ ID NO: 88959 - DNA, 414 bp, Zea Mays
atgatgtcgcgcgacgggtccagggcccactcgcgcgggacgctggtgccgtacttggacccgccgccgccgccgccggggaggtcctcggcgccctcgaagcagacgttgagcgcgccgccgtgacggggcgcgacgccgcagcggcggagcacgtcgcggaggcgcgcgccgcgccacacggacgtggacacgccggcggcgccccagccgaagcccgccgtctgccgcaccatgttctgctccttgcgccggttgcccgcgcacgccagcgtcacggggatctccacggcggggaagtcccgcgccagctcgtccatggtgagccgcgcgggccgcctcacgaggcccgtcacctccacggcccacgtcgcccagtccccgcgcggcacggcgccgtggttgcgcacgtag

SEQ ID NO: 88960 - DNA, 507 bp, Zea Mays
cctcgtcttcccccaagcggcaatatatgttcgtccccaactccatccacacggaacacgaggtgtgtcaccagtctttgtctgtgcgagtacaagaaatctggtataagtatcactggtgcttctttatgtgtcattatttttggatgtatttttcttatgtgcgtttttgacgggtatgatgagttggctagcaacaacaatgttgaatatattgctggaggagccacccagaactctatcagggttgcccaatatgaactgtttgtttcatccctgaaatatttttgtgccgcagcaacttcagcaaaagcttacaatcgtgaagctgcacgcaagagcctgctgcgaaagaaggcttacattcagcagcttgagagctgtaggctgaagctttcgcagatggaacaggacatgcagcgagcccgttcgcaggctcgctttctaccacttctgtttttctgcttgctgaactgtaaccggacatctgagggcagctctatttag

SEQ ID NO: 88961 - DNA, 1522 bp, Zea Mays
gtactaactattaagggggcagtgtagactgcccccgctccctacccgcacgcgccagcgaaatcccgccccacaacggcctcccgcaccgcacggccgcgtgccacagagcgtacaccacccccgcccgccctccgcctgcccgccctccaagctcagcctaccacgctcgccccctgccagtccttccgcgaatcgggtgtccccaacaatcccgcgcacccgccgcactcgggcagatggagcgcgaccgccgcgccgcacgctccgacttcgtgcggttccgcctggtgtgcaagctgtggatggacggcagcggcatcaggaagccccgtgagttgggcgcacgcgtcatcgaccacagcttccaccctcgccggtggatcctgctgacggaggagaaggaggaggctgatgaggcgacgcccacgcccacgcgccgcacgctgcttaacctcaccacccggaagaccatccaggtggatctgccggagctcgctgggcactccgtggtccccggacccaccgcggcgccggagggcatgctggtggtgcgcgatctgagaaaccgttggggctgaagtgggaatgtgacaggcatgcctgcatgtgccccgcatgatgtctactgcctcacaggtttcattgcttttcggtggggggaccggagagcaaccgaatttgtagtagtagtactgaacaatctgaatctcagatgaaaccatagaacatgtttcccagtctgcaaaatgcacaaggcttccgtctttacagacatgcgttcaacttccaccgaattgctggtagtactatgatggaacaatttggttgacataggcctaggtgtatgtctgcaaaacgcttttttaaggtcggtctcaacagcgagtttttatgatacattgctggacatatgtactacttcctggaagatgtatacccacgtatgactgggcgtcgccccctgaagacaccgtcctccatcaaggcgttatttgctgatgacaatgttgtggtggcacagccacctaatgctgggattggtgctggtgcaaggttcggtgctattggtgtagatccccaggctcaatgatgaattactttcagtgacttgagggccgaggctgtgactgatctggaatgcggcagtttgttttctctgcgcaaactgcggaactgtacaacagtacaagccattgttcttgtgtatttatacaggctagatgagagttattgtgcataacaaaagattagtagtatcggaggcggctaagtttctcacctgttggcagggcccggagtaaaatggatcgtgatgggcaaacaggccaacccctgttgcagaaacttgttcatgtgacggtttaacatctgacctgctaccctttcatgcatcggtgagtttagtctaggaaactgtttgaagcggggaaatttggtgctttggcagcgagaatttggatggagcgttgtaattgcagaacggtgaaggaatgactcctaacattgtggacgcttggat

SEQ ID NO: 88962 - DNA, 616 bp, Zea Mays
atggagcgcgaccgccgcgccgcacgctccgacttcgtgcggttccgcctggtgtgcaagctgtggatggacggcagcggcatcaggaagccccgtgagttgggcgcacgcgtcatcgaccacagcttccaccctcgccggtggatcctgctgacggaggagaaggaggaggctgatgaggcgacgcccacgcccacgcgccgcacgctgcttaacctcaccacccggaagaccatccaggtggatctgccggagctcgctgggcactccgtggtccccggacccaccgcggcgccggagggcatgctggtgacaccgtcctccatcaaggcgttatttgctgatgacaatgttgtggtggcacagccacctaatgctgggattggtgctggtgcaaggttcggtgctattggtgtagatccccaggctcaatgatgaattactttcagtgacttgagggccgaggctgtgactgatctggaatgcggcagtttgttttctctgcgcaaactgcggaactggcccggagtaaaatggatcgtgatgggcaaacaggccaacccctgttgcagaaacttgttcatgtgacggtttaacatctgacctgctacccttt

SEQ ID NO: 88963 - DNA, 525 bp, Zea Mays
atggagggcggaccgacggtcgaccgtcgacgggcgcactccgaagtgaccggacgaacgtcgtcggtgggcggagggcggaacgcggaccggcggtcggcggacgggcaccggacgaccgacggcgacgatgcacgggcggacgggcgtgtcgtgcgcgcagagcagttaatccgcaccttcctagcccaacttgccgagatccgagcggtggtggcagccgccttcctcgcctcgccctctgccaccgtggtcatcgacgacaagggcagtgacgacgggagtatcctgcagctttcctccatcgccaacttcatagtctcccactgctcaagtgggctggacagtgatatccagcgacggtggtgtagtgggagtgggacgacgaggaggttaagggcggcgacggcgaggtgcggagctcctacgggctccgccatcaacaccatggatacactccaagaggccccttcagatccacacggcatcattctgtttgccctcttttgcaaagagggtaattga

SEQ ID NO: 88964 - DNA, 1822 bp, Zea Mays
ctccgggaaccaggctgctcggcgcctcctcgcagccgtgctccagcgacctcgcacaccacagcagcgccgctttgaagtttaattttgcaggccggagcctggagctcgatcaggacatagtaaacagggggaaaaaagggaacttttggataaaaagaaaagaaagaggatgaagatcggttcaagctagcacgagcagcgtgcatgcatggttcattcaagttggacaagttagccaattcgccggctccaccggatactcgtacatgcatgcgtctggagacgacgactcggtgttcaattgatctcgtcggcaccgtactctctgagaaatgcatagccgccgccatcaggccattgtttactctgcgaactgcaacgacgctgatgtgttgcggacgtacgcgctctcgtccgtcgtcgcgtcgcccatggcaggtgggggttagtttctttctttaattttctgccccggcgcggcccggtacggtggagacagacgatcgggcagcgcagcaggcggcggctgctactgtgttgacgcggtccagtctgactccggcctcctcctcattccttcgttcgaacgactcccgtaggctagcagtgctatataagcaccaccgtaccccatgccggaaaccgtaccctgcagatcagctagcagcacaaacgaccaaagacacgacgacatgtctccagcccgtctcgccgccgtcgccgctgcggtgctcctcgctgccgccctcctgcgcgtcgtgccgggcgccagaggccaggaggagacggagcacgaggaggagttcagctacgtgccaggcgacgagcacgggccggagcactggggcagcatcaaggcggagtgggcggcctgcggcgcgggccgcatgcagtcccccatcgacctctcccacgagcgcgtatcgctggtgcgatccctcggctacctctcccactcctaccgccccgccgaggcctccatcgtcaaccgcggccacgacatcatggtgaggttcgagggcgacgccgggagcctggtgatcaacggcacggcctactacctgaggcagctgcactggcactcgcccaccgagcacaccgtcgacggccgccggtacgacatggagctgcacctggtgcacgagagcgccgagaacaaggccgcggtgatcgccgtcctgtacgagatcggcggccacgacgacgcgctgctccgccagctggagcccgccatcaggcgcgtcgcggacgtgcgggaccgggagatgcgcgtgggcgtcgtggacccccggcgcgcgcgcggccgcgccagcgtctactaccgctacgtcggctcgctcaccgcgccgccctgcaccgagggcgtcatctggaccatcgtcaagagggttcgcagcgtgtccaagcaccagctggagcttctcagggaagctgtgcacgacgacatggagaacaacgcgaggccgcttcaggaggcgaaccacagagacgtcagcatgttccgacccaagcccaacaagcagtattagggcccggcccgtttccagcctcgtattagtgatgcgtacatatgggctcgctccgacgacatggcgggcgtctgtaggacacgttcagtcccggtgaaattagattaagaaattccgtagtttctattgttcctaattttttttcttctgtttatgttccttcgttgtatgagtaaataaagatgcttattcatgtccactttcattgaatttggagtcaaggtttattcttgtaataactgatattttttaagatgaatatttgagatcacctatgaggatgacacaac

SEQ ID NO: 88965 - DNA, 1627 bp, Zea Mays
aatcccaaatcagctcaacggccaaaacgaccaacaagcgcgccgtccgcgcacagacgacgtcaggcaacagaagggcgagggcatgggtccagctcgccacctccgcggcctcaccgcgctcttgatctccgccgccctcttgctctccgccgccatcccggccgccagaggccaggaggaaacggaggacgaggaggagttcaactacattccgggcgacgcgaacgggccggagaactggggcagcatcaagccggagtgggccaactgcagcgctgggcgcatgcagtccccgatcgacctcgcccgcgagcgcgtctcgctggtgcccgccctcggcttcctcaaccactcctaccgcccagcccaggcctccatcgtcaaccgcggccacgacatcatggtgaggttcaacggcgacgccggcagcctggtgatcaacggcacggcgtacgacctcaggcagatgcactggcactcgccctccgagcacaccgtcgacggccgcaggtacgccatggagctgcacatggtgcacgagagcgcggcgggcaaggcggcggtgatcggcatcctctacgagatcggcctcgtcccggacccgttcctacttcggctggagcccttcatccgccggatcgccgacaggaaggacagggaggagcccatcggcgtggtggacccccggctcgcgcgcggcacggccagcgcctactaccgctacatgggctccctcaccacgccgccctgctccgagggggtcgtctggaccatcatcaagaaggtccgcagcgtgtcgaagcgccagctggagcttctcagggaagccgtgcacgacggcaacgagaataacgcgaggccggttcaggacctgaacgacagagacatcagcttgtttcgccctaagctacataagcaggagcttttgagttttaaggataaattggttggtgcatgaattgaacaccactttctgtcagtttatgcttttcggatgaacggttcatggtatcaaaaccactcaggtttgaatcatggttaacacaattaaataaaataattgatgatcaaacgtagttcaggccttcagaataacgtacatgtgagttgccttcaattgttggatggttcagtgatggggagagatgtatactgtgtatgattacagttttgttctgtacttctttctacctctgttaggctatctctaatagtttactcatccttgtcttttatttcgaattccactctataaacagtacagtctagcgaaagggtctctagctgagttgattagatggtctcagtagcacttcttaggtctttaatttgactccccgtgagagtgaattttagtctttggttaaaaaaatcatttcgtctgtcccatgccgccaaagcatagatctaagtttcggtcgtggtcgttctcacatgactacaataccactgtatatggatggagtagaggttcacgatctgttgaccatagcattatttaggcgagataattggatttttgacactcataatgttgtcttcttgttatagttatcactgtgtctatgaattatgggtccagctgagtctatgaaatgtggacctgatgacaattttacaaaca

SEQ ID NO: 88966 - DNA, 828 bp, Zea Mays
gattgtaatcacccacatgtgcatgatgatcaagtacgattacagatagagaatccccgcacgtggcacacacaggtgcaaaaccggcaagatttgccatgggaacatttgaccccgagcaagaggacaccgtacatgtacaacgcacatacagtacagggcgcagcaaagaatacagagaggcactgacagatcgtctccaccgacccccatcgatacgatacccatggacgatggaggcatggagctatctaccagctcacagtctgcacaaggccgaggaagaacagtctcagcgatccagatccatcacggccggcgggcgtgaacctcttgatgatgatgaaaaccgcagcagctcaaacccttcggtggctgccatatatatactgacctctccaacacggagcacgcagttgtgctgctccggtcgcgcgaacctcagcaactaagcttgttgccacacgattcatggacccacttcacacgtcgatgaagcagaacttgccatcgaccctattctgcactgccttgatcgcggcgacacgggcggccgtggcccctcggttggcagccatgacggccccgttcacctgctcctctactctcgggaggtggaaggcgccgtccgcagccctccgagcagcctatagtagtcgcgggcacaataatgagtagtgagtgtgaaacgatttgagttcctggacagcaaggaactcatacctgtagggcgcgctggacagctgggtctgacagaggcagcgacttcttcaggactccagagtcccactcccccgcccgttcgtccccgttccggaacgcgtacgt

SEQ ID NO: 88967 - DNA, 4162 bp, Zea Mays
cccagcaatgcccgccgccacgccatagctcaccgcgcgatgcccgcgcccgcgcccaaggcgctgccccgtctcctcgccgccatatccaccgccgcctcctcggccactgacctccgtcgtctctccctcctcctcctctccccctccgctcctgtgccccccatccggtgcctcaacaccctcctcatggcgctcgcccgccacggcatgctctcggacatggagtcgctcgccgcccgcatgcctgtccgcaacctccacacctacaccaccctcatcaacgcctattgccacgctggcgacctccccgctgccaagcgccatctgtcctcgctcctgcgcgccggcctcgcaccggactcccacgcgtacacgtccttcgtcctcgggtactgccgcacggggctgttcgcgcacgcctgccgattgttcttgctaatgccgcagcgggggtgcgcgcgcaccccgttcacgtacgcagccctgctccaggggctatgtggcgctgggatggtgcgcgaggcgatggcggttttcgctgggatgtggcctgatggctgtgcccctgattcgcacgtctacagcataatggtgcacgggttatgtggggcaggacgagctggagaggcggttgcgctgctcacagacgcaatggggaagggatttgtgccgaatgttgctgtatacaatgctttgatcgatggctactgcagtactggggacttggagctcgcaattgacatcttcaaggggatgcagagtaaagggtgcttgccgaacgtccgcacatatactcagctgatatgtgggttttgcaagtcggggaaagtagagagggccatggtactatacagtcggatgattgaggcaggtttagctccaaatgtggtgacatacacaaccttaatccagggacagtgcagcgaggggcacttggaacatgcttttaggctgcttcattcaatggaggcttgtgggctggcccctaatgagtggacttgcttagtgctgattgatgctttgtgcaaacatgggagaattgaggaagctcagcagtttctcgggtctcttgttcagaagggaattaaggtgaatcaggttatctacaccagtatgatagatgcattgtgcaagtcgggaaagtttgatggtgctcataatctgatgcagaaaataatcacagaagggtttgtgccagacgcccacatgtacagttcgcttattgatggactatgcagggaaaacaagctgttggaagcaatatcactattgaatgatatgattgagagtggagtacaggccaatgctgttccatttaccattctaattgataaacatctcagggagtttagatctgattccccaaaaatgatatccgataggatggctgcggcaggtgttaagcctgatgtcgtcacttatacagtttttatacgctcctactgtcaagatggaaggatggaagatgccgaatccatgatgattcagatgatcgatcatggtgttcgtccaaatttaaccacatataacacattgattaaaggatatgcaaatcttggactagttagtcaagcattttcatctcttaagaacatgattgataatggatgcaagccaaatgacgagtcttacacagttctccttggacttctactaaagaaaaattcctaccatgacttagttgctgattctattagtttatggaaaatagttgacatgaaagttctcgaggaacttttggaggaagtgattaagcttcagtgcagctcagccagctatgtttacgattgttttattagatgtttgagcaaagtcgacagattggaggaagcaaaaagttttctcgtagggatgcagagtgctaacttaaccccaagtgaggatgtatatacttgtatgatagaatgttgctacagaatgaaattgctaaaagaagctttaaggtttcttgattcaatggtgaaaagaaactatttaccacgtttagaatcttataggtttattatttgtgctctttgtgaggaaggaagctttcatactgctaaaagcatttttggtgacatactatcaaaggaatacaaccgtgatgagattgcttggaagattttgattgatggcttattacaaaaaggaaacactgctgactgctcccgtctgctatcattcatggaggaacagaattgccgtcctggttctgcaatatattctaggcttacaggcgaaataacagttacaagtgaagctcaggaaattgctacatgaatacggacaaaccaaccaaccttagtgttggtgttgatggttccatgaatcagtacaagatgggcaaattgaaagctaaaaagactttggctgtttgacattagcagtgcccctgtaattgtgaggaaggatgtggcaacacaaataatccctgatataagcaggtcctcttctcccagcatgagatcattttcctgtttcactgtcggtgcaacaaatcaaatagctggagggttgttgctctaatcttgagattagggatgcacaggtggatgatcgggtgattctgactaggtggtccaaggcttgaggctctgcaaaaaggcaacatatattctagaatggaagaaaaaaactatggaatctaaatcttctgcctgggaagtaacacaaattgtgaagtgtatatcaaattcttggcttgtgctggaccatccctgatgcggcaattccatgggcgacaaaggggactgaggtgaatgcagtgcaaattcctgagccgactattccctgctgtgtgcctctggaatcaacagatgctacccctcggacatcgagcttgtggctgttggcaagttcctagtgccaagtgctccgagcctccaaccaacggcgaagtgggcaaagctctccagacactgctgctccaagggcctccagaatttgctgtaagatttcgccctgataacatcattgtctattctcgagcaccaagacaacagggagaatcgccagctccagcatctgagttcattgaaaaggttaccaagaagatagacacccttgtacctgttccgatcattcagaaaaggagaaagaaaatgaactacccgacccgcctgccacggcgcacccgtcgaattgcctaactgccacctgaaaggctgaaactgacctagtttcagcatcagccgcttgccgtaagcttggcttgtcagatgaagaaggaaggatatctgatgaaacccttgagaggtacatcaaactctatgatgaggatagactatgccgcgagcttggcttgtcagatgaagaaggaaggatatctgatgaaacccttgagaggtacatcaaactctatgatgaggatagactattccgcgaccatgtggcagcgcttgctgctttatttggctgggacgcgcctcctgaaggacaagcttgtcttgccgacaacaccgtgttagttgtctgacagctcctatttttggtcctgcttctgattctgcgtcaatggatagatccaatatcttgatttggaatgtacggggtcttaatgataaatcaaggcgagataatcttcggaaagtcgttgatgcatccaaaccttctgtgattgaagtctcattttgaagcgaatccaagggacattgatttgctcaagcgtgataagttgataaacaacagggaaattcatgaactgatgcacacatgcgttatgttcctgactatctaattgaccctaaatcaaaagaagccattgtcaaactttccagggctcctatgggtatggacaagccccaaagacgaaaaagacacgggtttaagggaggatcagggagaagcagagatcctcttaaaactctctgctgagggaaaacgagggagacggaggagagatacagagggagaaccagatatatagaacaaatagtaagaagcgcggaaagttgattttgcaatgagtcttgccatcaaactcactcagttttgtaggcttgttttaagccacatgtcaaacttgtatcgttgacacttgaggaactgttgtttcggtgacacttgtagctaaggagtatatatttcattgcctgatggatattcaaaggctaaaaatgtaaactcctcccagctagaacattcatattaaattcgtttgccggttatgtaaacaaaa

SEQ ID NO: 88968 - DNA, 3240 bp, Zea Mays
cccagcaatgcccgccgccacgccatagctcaccgcgcgatgcccgcgcccgcgcccaaggcgctgccccgtctcctcgccgccatatccaccgccgcctcctcggccactgacctccgtcgtctctccctcctcctcctctccccctccgctcctgtgccccccatccggtgcctcaacaccctcctcatggcgctcgcccgccacggcatgctctcggacatggagtcgctcgccgcccgcatgcctgtccgcaacctccacacctacaccaccctcatcaacgcctattgccacgctggcgacctccccgctgccaagcgccatctgtcctcgctcctgcgcgccggcctcgcaccggactcccacgcgtacacgtccttcgtcctcgggtactgccgcacggggctgttcgcgcacgcctgccgattgttcttgctaatgccgcagcgggggtgcgcgcgcaccccgttcacgtacgcagccctgctccaggggctatgtggcgctgggatggtgcgcgaggcgatggcggttttcgctgggatgtggcctgatggctgtgcccctgattcgcacgtctacagcataatggtgcacgggttatgtggggcaggacgagctggagaggcggttgcgctgctcacagacgcaatggggaagggatttgtgccgaatgttgctgtatacaatgctttgatcgatggctactgcagtactggggacttggagctcgcaattgacatcttcaaggggatgcagagtaaagggtgcttgccgaacgtccgcacatatactcagctgatatgtgggttttgcaagtcggggaaagtagagagggccatggtactatacagtcggatgattgaggcaggtttagctccaaatgtggtgacatacacaaccttaatccagggacagtgcagcgaggggcacttggaacatgcttttaggctgcttcattcaatggaggcttgtgggctggcccctaatgagtggacttgcttagtgctgattgatgctttgtgcaaacatgggagaattgaggaagctcagcagtttctcgggtctcttgttcagaagggaattaaggtgaatcaggttatctacaccagtatgatagatgcattgtgcaagtcgggaaagtttgatggtgctcataatctgatgcagaaaataatcacagaagggtttgtgccagacgcccacatgtacagttcgcttattgatggactatgcagggaaaacaagctgttggaagcaatatcactattgaatgatatgattgagagtggagtacaggccaatgctgttccatttaccattctaattgataaacatctcagggagtttagatctgattccccaaaaatgatatccgataggatggctgcggcaggtgttaagcctgatgtcgtcacttatacagtttttatacgctcctactgtcaagatggaaggatggaagatgccgaatccatgatgattcagatgatcgatcatggtgttcgtccaaatttaaccacatataacacattgattaaaggatatgcaaatcttggactagttagtcaagcattttcatctcttaagaacatgattgataatggatgcaagccaaatgacgagtcttacacagttctccttggacttctactaaagaaaaattcctaccatgacttagttgctgattctattagtttatggaaaatagttgacatgaaagttctcgaggaacttttggaggaagtgattaagcttcagtgcagctcagccagctatgtttacgattgttttattagatgtttgagcaaagtcgacagattggaggaagcaaaaagttttctcgtagggatgcagagtgctaacttaaccccaagtgaggatgtatatacttgtatgatagaatgttgctacagaatgaaattgctaaaagaagctttaaggtttcttgattcaatggtgaaaagaaactatttaccacgtttagaatcttataggtttattatttgtgctctttgtgaggaaggaagctttcatactgctaaaagcatttttggtgacatactatcaaaggaatacaaccgtgatgagattgcttggaagattttgattgatggcttattacaaaaaggaaacactgctgactgctcccgtctgctatcattcatggaggaacagaattgccgtcctggttctgcaatatattctaggcttacaggcgaaataacagttacaagtgaagctcaggaaattgctacatgaatacggacaaaccaaccaaccttagtgttggtgttgatggttccatgaatcagtacaagatgggcaaattgaaagctaaaaagactttggctgtttgacattagcagtgcccctgtaattgtgaggaaggatgtggcaacacaaataatccctgatataagcaggtcctcttctcccagcatgagatcattttcctgtttcactgtcggtgcaacaaatcaaatagctggagggttgttgctctaatcttgagattagggatgcacaggtggatgatcgggtgattctgactaggtggtccaaggcttgaggctctgcaaaaaggcaacatatattctagaatggaagaaaaaaactatggaatctaaatcttctgcctgggaagtaacacaaattgtgaagtgtatatcaaaattgaagtctcattttgaagcgaatccaagggacattgatttgctcaagcgtgataagttgataaacaacagggaaattcatgaactgatgcacacatgcgttatgttcctgactatctaattgaccctaaatcaaaagaagccattgtcaaactttccagggctcctatgggtatggacaagccccaaagacgaaaaagacacgggtttaagggaggatcagggagaagcagagatcctcttaaaactctctgctgagggaaaacgagggagacggaggagagatacagagggagaaccagatatatagaacaaatagtaagaagcgcggaaagttgattttgcaatgagtcttgccatcaaactcactcagttttgtaggcttgttttaagccacatgtcaaacttgtatcgttgacacttgaggaactgttgtttcggtgacacttgtagctaaggagtatatatttcattgcctgatggatattcaaaggctaaaaatgtaaactcctcccagctagaacattcatattaaattcgtttgccggttatgtaaacaaaa

SEQ ID NO: 88969 - DNA, 859 bp, Zea Mays
ttttttcgcccaactccacaggcgtgttgggtgcgatctactcaaacaatgtggccacaatatctgattcttccatgtaaaacatcaaagcaatagtgagtactgtactatcgatagtccaccttagtgagtactatcaatagtctaccttcacagaggggatggaccggtagctacatgcattgagtcggtggagcttggggtgttttgcgaaagctagtttatacacacagttgattttataatgctttctcattaaaaaaaacaacccttatttccttgcaggaggtttgcatatgcacttttcattttaacaccactggactataccacccagaccctcctcagcagattcgccgattcaccataaagtttattattactttagcaaacatcctttttgaaacatgaacctgaaacccaaatctcgcagttcttggcttgtgctggaccatccctgatgcggcaattccatgggcgacaaaggggactgaggtgaatgcagtgcaaattcctgagccgactattccctgctgtgtgcctctggaatcaacagatgctacccctcggacatcgagcttgtggctgttggcaagttcctagtgccaagtgctccgagcctccaaccaacggcgaagtgggcaaagctctccagacactgctgctccaagggcctccagaatttgctgtaagatttcgccctgataacatcattgtctattctcgagcaccaagacaacagggagaatcgccagctccagcatctgagttcattgaaaaggttaccaagaagatagacacccttgtacctgttccgatcattcagaaaaggagaaagaaaatgaactacccgacccgc

SEQ ID NO: 88970 - DNA, 2398 bp, Zea Mays
ggggtgcggcgctgcggtggcgcgagacgggctcggcacggcggcggtgtgacggcctcacgcggagtcgcggctgcgacgacggcgtgcatggactcgggtcagcacgggtccggtggagggccgtgcgcccgtgcctaggccgtgctgcccgtttcccatgtatcccttccccatatccatacctgtgttccatatgccatatccaaacgcctactcgcttctcccgtcgtcttccccgctcctacgacctgcgtttgtcgatgctctctccatggcaccctctcctctcccccgttgcacctcctgccatggagctacggtcaccgctgaactcacataactgctcccttacctcctccattagaccaccgccaccgcgctccttggcgcgggcgccccccacgctttccgccaccgcagcagccgtctcgtcgctgtccgccacctcagcggccatctcgtcgccttcctgtccaaagaagaaggtcaggtctccattcgccacccctgtcgccgaaagcacctcgatgttaacttttcgtcgcgccttctattgcgaaggttctcgtgcccatcgccatgggtacggaggagatggaggcggtcatcatcgccggtgtccttcggcgggcttccgctgatgtgacgcttgcctctgtggaggacggcctcgaggtggaggcgtcctgcggctcccgcatcatcgcggacacgcacattgcctcctgcgctgaccaagtgttcgatcttgtggctctcccaggaggaatgcctggttcagtgcgattgagagacagtgacatccttcagaggatcacagttagacaggctgaggagaaaagattgtatggtgctatatgtgctgcaccggcggttgttctagtgccgtggggtctccacaggagaaaaaaggagatctccctgcattccgggcagttgaatcaaatgttcaggtttcaggagagcttactacaagtcgtgggccagggacaacatttcagttcgctttatcatttgttgagcaattgtttgggcttcgtgcagctgaagatatggacaagattttgatggcacagactcatgacggtcttgaaaggagtgcagaagtcaatgagcttgagtggtcttgtggtcgcaatcctgatgtccttattccaattgcaaatgggtgtgaagagttggaaatcataattctggttgatattttaagacgggcaaagataaatgttgtattagcttcagttgaaaaatatccagctgttcttggatctcaaaggatgaagattgttgctgataaaagcattatgagtgcctctgattcgatatatgatctaattattcttcctggaggacctgctggggctgagcagctgcacaggtccagaattctgaagaagttactcaaacaacaaatgcaagctggcaggatgtatggaggggtttgttctgctctgaaggttctgcagcaagaaggtttactcgaggataaaacagtgacagctcatcatgctgtagccagtgagctcacgtgccaagttatagaccaacccaatgttgtgatcgacggaaatttgatcactggtaaggggcttgggacagttgttgattttgccctagctatcatcaggaaattttttggccatggacgagccaaagctgtggcgaatggaatagtttttgagtaccctaagagctaaaccccaagaattgctgaaatcacgaaatctacaataaggactaatgaaacacattggctgtaattgaagatttggctatctatacttctgataaaaggtgagctgatgcttttgggatagcaaaagattcctctattgttgcctttctggacagctggactgaaatctccagatccactatatatgttggggtggaccaaatttacacgggaaagcttcagtggcagtcatttcatcagcttcatgacatgatttattggtggataaattacagagtggttgctaactgattatatgcgttcagaggaaactttactgtcttctgtgtgcctgtattggtttgggggcgtattttccaaggtttgaactctgaaggcattattcctcgatgttgccatcatgctatattgctgtgtttcccatctgtgaattcatctgagaagcttgacattctaattccggacttccccagatactgggtttcaagagtgcaggctagcaactgaatcagtatttaattaaatttcgaacttctgtgctgcgttttttttattggaagtcattttgccctctttttctgtgtattgctgatggattgcggttttagcttcatgggttgagcgggacataactgctcacatggttgtccctttaagaagtaacaacagttactgaatttaaattgcagttagcataac

SEQ ID NO: 88971 - DNA, 1459 bp, Zea Mays
ttccatatgccatatccaaacgcctactcgcttctcccgtcgtcttccccgctcctacgacctgcgtttgtcgatgctctctccatggcaccctctcctctcccccgttgcacctcctgccatggagctacggtcaccgctgaactcacataactgctcccttacctcctccattagaccaccgccaccgcgctccttggcgcgggcgccccccacgctttccgccaccgcagcagccgtctcgtcgctgtccgccacctcagcggccatctcgtcgccttcctgtccaaagaagaaggttctcgtgcccatcgccatgggtacggaggagatggaggcggtcatcatcgccggtgtccttcggcgggcttccgctgatgtgacgcttgcctctgtggaggacggcctcgaggtggaggcgtcctgcggctcccgcatcatcgcggacacgcacattgcctcctgcgctgaccaagtgttcgatcttgtggctctcccaggaggaatgcctggttcagtgcgattgagagacagtgacatccttcagaggatcacagttagacaggctgaggagaaaagattgtatggtgctatatgtgctgcaccggcggttgttctagtgccgtggggtctccacaggagaaaaaagatcacctgtcacccatcttttataggagatctccctgcattccgggcagttgaatcaaatgttcaggtttcaggagagcttactacaagtcgtgggccagggacaacatttcagttcgctttatcatttgttgagcaattgtttgggcttcgtgcagctgaagatatggacaagattttgatggcacagactcatgacggtcttgaaaggagtgcagaagtcaatgagcttgagtggtcttgtggtcgcaatcctgatgtccttattccaattgcaaatgggtgtgaagagttggaaatcataattctggttgatattttaagacgggcaaagataaatgttgtattagcttcagttgaaaaatatccagctgttcttggatctcaaaggatgaagattgttgctgataaaagcattatgagtgcctctgattcgatatatgatctaattattcttcctggaggacctgctggggctgagcagctgcacaggtccagaattctgaagaagttactcaaacaacaaatgcaagctggcaggatgtatggaggggtttgttctgctctgaaggttctgcagcaagaaggtttactcgaggataaaacagtgacagctcatcatgctgtagccagtgagctcacgtgccaagttatagaccaacccaatgttgtgatcgacggaaatttgatcactggtaaggggcttgggacagttgttgattttgccctagctatcatcaggaaattttttggccatggacgagccaaagctgtggcgaatggaatagtttttgagtaccctaagagctaa

SEQ ID NO: 88972 - DNA, 1512 bp, Zea Mays
atggaatcacgcaatggcgaggctgatgaattgcctcctcgagacgcaggcgatgaagcaaagaagcactaccaagaagggtgccctgggtgccggctggacgagacgaatgagagcaacaccggcatcccctacctcaacttcttctacatctggatcgtctgcctcacctcctctctgccaatccagtcgctattcccttatatatacttcatgatgagggactttaaaatcgcaaaacaagagcaagacatcggattctatgctggatttgttggggcaacctatttccttgccagaaccgtcagttctgtgccatggggcatatttgctgacaagtatggaaggaagccctgcattgtgatcagcatcatctcagtgattgtgttcagcacactctttggccttagcacaagttactggatggccattgtgactagggggctgcttgggttgctttgtggtatactgggaccaatcaaggcctatgctacggaagtctgcaggaaagagcaccaagctctagcaatgtctgttgttacatcatcaagagcaatagctcttgttgttggaccagctattggagggtttctagcacagcctgcagagaagtacccaaatattttctccaatggatccatatttgggaggtttccatacttcctcccaggccttgtcatatcgatactagcagcaggatcatgtattgcatgcatttggcttccagaaacgctgcactttcatgataatgaaaaggtagaagctattgatgaaatggaggcacaagttggtgactctaacttagaagttggaaaagctaaagaatctggttgcacgtctacaaagaacctgctaaagaactggcaactgatgtcagcagtaatcctctactgtatcttttgtctccatgacacagcttatcttgagacattttcactctgggcagtgagcagcagaaaattccggggcctgagtttgacatcccaggatgttggcattgtgctagctgtctcaggtattggtgtgctcgtataccaacttgctgtttatcctttcattgtcaagtattttggaccagttaggccgctacgtccctctgtggtcttgtctatacttgtcctcgcaatgtatcccttcatggccaaactacaagggctggagctcaagttgctcatcaacatagcttcgcttttagagaatgtgttctctacttatgcatatgcgaacaaaataggctacagttactactgcgtgcaatattttgcaaaacaccgcagtgacaatttctatgaaacatgtgcagacacaagaacacagaggtattgcgaatggcatctcagtgacactgatgtcattgttcaaaggttttcgtggactcagaagcacatgactgggctgttattaccaggtgaccagatcctgttcttggtgataaactcggtgtcgataatcggattaatttttacgttcaagccatttttctctatgtcagatgcattgaggcgttcataa

SEQ ID NO: 88973 - DNA, 183 bp, Zea Mays
gtgtctaggggggtgaatgtaaaaaaactcaagacacgtatcttgacgaagacacagtgtcttagctctatgttcgagacagaagactatctgattggtcactttaatttattgaatactctgattggtacaatgaatatcgtaagacacatgttttagacacgaccactgtattatgttgtg

SEQ ID NO: 88974 - DNA, 1626 bp, Zea Mays
cggcgtggcagtggccagtgggtgtgcgggcgcgtgcaccggcgcagacgatccgggcgagctcggcacttttttatacgtacgcagcggcgctggtaggggacacctgtccgccgccgcactctgacccccgcccccgccgcagcgagacgagatcgcccgcaccaaagcaagccgaggcggcgagcgggacaggtagcggctgcctaccaccgccagcctccgcccacccaacaacagcaccaccaccaccaccacagtccggtcccgtgccttccaattcggtcgtcccacgcatcgattgcgcccgcgcacgcgcccgtcgctttgccgtcttcgaccacccgcaagcaacctatatagcgcgccgcgaattccgcccggcttcctcgtcgcccgccgcagtgagtgagaggaggaggtcgatggatctcaaggacagcgagaggaggggggcggcggggccggggccgctgtcgaggcaggggtcgatctactcgctcacgttcgacgagttccagaacacgctcggcgggacggggggagggctcggcaaggacttcggctccatgaacatggacgagctgctgcggagcatctggacggcagaggagagccaggccatggcgtcggcctcggagcccgcggcgggggcggccggcgacggcggggcggcgctgcagaggcaggggtctctcaccctgccgcgcacgctcagcgtcaagacggtggacgaggtctggcgggacttcgcgcgggaggggacggctggcggtccggagccgcagcccaatcgacagccgaccctcggggagatgacgctggaggacttcctggtcagggcgggggtcgtccgtgacaaccctgccgccgctgctgctgctgctgctgctgtccccgcgcagccggttgcgacgcggccgcttcaggcggtcaataatggcgcctccatctttttcggcaactttggaggcgccaatgacgccggggctggagcgatggggtttgcgccggtagggatcggggatcaggccatgggcaacggcctgatgcctggggtggctgggatggcggctggtgcggtcactgttagtccggtggatatgtcggtggcccaactagattctatgggcaaggggaatggggatctgtcatcgccgatggctccagtgccctacccctttgagggagtgataaggggaaggcggagcggtgcgggtgtggagaaggtcgtggagcggcggcagagaaggatgatcaagaacagggagtctgcagctagatcccgtgcccgtaagcaggcttatacaatggagttggaagccgaagttcagaaactgaaggaacaaaacgaagaattgcagaagaagcaggaagaaataatggagatgcagaaaaaccaggtcgtggaagtgatcagcaatccatacgcacaaaagaaacggtgcctgcggagaacattgacaggtccctggtaaccgagctgttgacgaccgaccgggcttgacaggatatttaacattatggcacctgtacatatataccttgaggatttggagaacccgagtttccggtgtatattagcgaccaacagagtgtgagtgtacctgcgcttgacttatgctg

SEQ ID NO: 88975 - DNA, 1287 bp, Zea Mays
atggatctcaaggacagcgagaggaggggggcggcggggccggggccgctgtcgaggcaggggtcgatctactcgctcacgttcgacgagttccagaacacgctcggcgggacggggggagggctcggcaaggacttcggctccatgaacatggacgagctgctgcggagcatctggacggcagaggagagccaggccatggcgtcggcctcggagcccgcggcgggggcggccggcgacggcggggcggcgctgcagaggcaggggtctctcaccctgccgcgcacgctcagcgtcaagacggtggacgaggtctggcgggacttcgcgcgggaggggacggctggcggtccggagccgcagcccaatcgacagccgaccctcggggagatgacgctggaggacttcctggtcagggcgggggtcgtccgtgacaaccctgccgccgctgctgctgctgctgctgctgtccccgcgcagccggttgcgacgcggccgcttcaggcggtcaataatggcgcctccatctttttcggcaactttggaggcgccaatgacgccggggctggagcgatggggtttgcgccggtagggatcggggatcaggccatgggcaacggcctgatgcctggggtggctgggatggcggctggtgcggtcactgttagtccggtggatatgtcggtggcccaactagattctatgggcaaggggaatggggatctgtcatcgccgatggctccagtgccctacccctttgagggagtgataaggggaaggcggagcggtgcgggtgtggagaaggtcgtggagcggcggcagagaaggatgatcaagaacagggagtctgcagctagatcccgtgcccgcttatacaatggagttggaagccgaagttcagaaactgaaggaacaaaacgaagaattgcagaagaagcaggaagaaataatggagatgcagaaaaaccagtgcttggtttcatccatgtatatcctggtataagtggtaaggttatggttatctcagtcgtggaagtgatcagcaatccatacgcacaaaagaaacggtgcctgcggagaacattgacaggtccctggtgtgattcaaacgggaaaggcggagaggaacctgctaccgcaccggagaacgaccctccgctgttcatccaggtccccccacgtctctgtacctctggtgtcacggcatcggcatccacatctgccccaaatcgcgtacctatgcctgtcagtctgtcatgtacgatacatgtccacgtcgtgctttaa

SEQ ID NO: 88976 - DNA, 743 bp, Zea Mays
cgtggtgcccatcccacatgcctgcttctcgccggcgcccgtctgtctgtacgagtacgactcgtccctcgtccgtgccaatggagaattggagccggccgaacagaaccaaatccgtgcccgtgcgaggaagatctcagcggctgctggcgcggggggtcgttggctcgttccaaactcgcctgactccgcccaccgtctcttggtcgccccacacgatctctccaccactccccacccggcgccggcgaggcgcgaggagggccagcaatgatggtctcctcccactcgcagtcgcaggcgggccgccggcggcgatggaggtgcttgctgccgctcctcgtaggcgccgccttcctcgccgagatcgccttcctcggccgcctcgacatggcgaagaacgccgaggtggtcgagagctggaccacctccttttaccgccgctcctcccattggggtgaatccgtgggccggggcgcggtcccgagggcagacggcgacggcgacggcgaggacgaagagatccggcggtgcgagcagcggctcgagagggaggacgccgtgccctacgaccgcgactttgacagggatcccgtgcttgtcggtggcgctgccaaggtctagtgcatgccttttttccctcgtgctcttagtttgagttaggaaagttagtttgttaacgaattggttccactgacctgctgctgaggtggatcgaagttacttcataagttctggcgaaa

SEQ ID NO: 88977 - DNA, 1809 bp, Zea Mays
gaaccaaatccgtgcccgtgcgaggaagatctcagcggctgctggcgcggggggtcgttggctcgttccaaactcgcctgactccgcccaccgtctcttggtcgccccacacgatctctccaccactccccacccggcgccggcgaggcgcgaggagggccagcaatgatggtctcctcccactcgcagtcgcaggcgggccgccggcggcgatggaggtgcttgctgccgctcctcgtaggcgccgccttcctcgccgagatcgccttcctcggccgcctcgacatggcgaagaacgccgaggtggtcgagagctggaccacctccttttaccgccgctcctcccattggggtgaatccgtgggccggggcgcggtcccgagggcagacggcgacggcgacggcgaggacgaagagatccggcggtgcgagcagcggctcgagagggaggacgccgtgccctacgaccgcgactttgacagggatcccgtgcttgtcggtggcgctgccaaggactggagtaaatgctatgtaggatgtcaatttggtttttctgccagtaagacacctgatgctacttttggaattgcaccagatccttctgtagagggtatcctgagatcaatggaatcatctcaatattattcagagaataatattgatgtggctcgagggagagggtacaagattgtgatgacaaccagcctttcttcagatgtcccagttggctacttttcatgggctgaatatgatatcatggcacctgtgcctccaaagactgaagaagctcttgctgtagcctttatttctaactgtggtgcacggaacttccgtttgcaagcccttgagatgcttgaaaatttggatgtcaaaatagattcatatggtagttgtcatcgtaaccgtgatggcaaagtggacaaagtggacaccttgaagcgctacagattcagcttggcatttgagaattctaatgaggaggattacgtaacagaaaagttttttcagtcactggtagcaggttctattccagttgttgttggtgctccaaatattcaggagctttctcctggagaaggcgcaatattacacattaaggagcttgatgatgttgtttcagttgctaagacaatgaaaaatattgcttcaaatcctgacgccttcaatcaatctttgaggtggaagtatgatgggccatctgattctttcaaagctcttatcgacatggcagcggttcattcatcttgtcgtctttgtatacatattgctaccaagattcatttaaaggaggaaaggactccaaaatttacaaatcgtccttgtagctgttccagcaaaaaggggacagtttaccacttgtttatccgagagagagggcggtttaagtcagagagcatttatatgagatcgggccagttaacactgggagccttggaatctgcagtgctcggtaaatttaggtccctcaaccacgttcctgtatggaaggatgaaaggccaccgagtattagaggtggggatgacctgaaactatacagaatttacccagtcggtctaacgcaacgtcaggctttgtacggtttcagatttagagatgattctaaactcgagcaatacatcaaagaccatccctgtgcaaagcttgaagtgatttttgtgtaactatgctctaggcttacgttcgcccccgattcttactgaactccgtgtgcggagtttcagttatactgtaatgtatggtgtcttgtgtagcaaacaaactcatgctagtacagatcatctgccggatgaaaattttccttgacagcg

SEQ ID NO: 88978 - DNA, 1138 bp, Zea Mays
ctggttggctacagcccatcaggagggcaaaaccgggacagaaaagaagggaaaacagagcgcattacgcgcacgtttcacacgtttactttgcgctgctgagggcgccattagcagcagcagcagcagcttgctcccactaaaaaaatcagcgcgcttctctgtccgcttctccgcgtactccgcgacgtcaaccccgtataaaacctgccccctctccagttcccgccctcagttcaaagcagcgcctcgccaccagacgaacacacagatcgctacagcccgcatgaccaacctctccgccatggcagcgtaccaatcctacgtgatccgattcgacggccacttcgacgagccgtcgccgagctccgcgggcgccgagccgccgggcccgcagccgccgttcgcagggaggatgatctcgctcgagcgggagcaccaagtcattgtcgccgccctgctgcacgtcgtctccgggtacgccacgccgccgccgcaggtcttcactccgccgccggcagcggcgcgctgccaggtgtgcgggatggagcggtgcctcggctgcgagttcttcgccgccggggagggcgcattgggcggcggcgcggagaaggcggccgcgacaggaggcgcggcggcggggcagaggaggcggaggaagaagaagaacaagtaccgcggcgtgcggcagcggccgtgggggaagtgggcggcggagatccgcgacccgcgccgcgcggtgcgcaagtggctgggcacgttcgacaccgccgaggaggccgccagggcctacgaccaggccgccatcgagttccgtggcccgcgcgccaagctcaacttcccgttcccggagcagccgacggggcacgacgagcccatcagcagcaacggcgaagcgagcgcggccgccaggtcgtcggacaccacgccgtcgccgtctctctgcagcgcggacgccgaggagcgcgggcagccagagtggccgagcgccgggcaggaggcaggggagcaactgctctgggaaggcctgcaggacctgatgaggctggacgaaggcgagccctggctccatccagcctcaagcgcttggaattgaaatttgaaacgcccgcgatcagatcccagccgttcaactagt

SEQ ID NO: 88979 - DNA, 609 bp, Zea Mays
gccattccgtccatagcttggcgagcttgaccgaacccgcacacttcactgcatgctgctgctaccggcctcctgcagctagcacacacactactagcgtcttcgtctgttcgtcgatcagtcgtcactcgacagtttggagtacgtgtagtcctagatggcacgtacgtgttgacacgtacaacccggagcagccgcggccggcagctgatggagccgccgcggatgtccttctccagcgacttcgcgctggagccgccgccgccgaggccgccggggcgcgcggacgcggacttcgagttctcgccggcgggcagccggcccatgatggacgcggaccagctcttctccaagggccgcatcctgccgctgcgggaggcggaggcggtggcggtggcggcgcggcccccgacgacgacgacgaccctgcgcgccgagctgcgcgcgcggccggacgccgccgaccgcggcggccgtcgcgcgccgccgcggtggaaggagctgctggggctgaggagggcgcaccggaagggcgacgccgccggggcgggcgctgacgctcacgtggatcttggagagcatggagatcaggcagaggcaggagagtga

SEQ ID NO: 88980 - DNA, 840 bp, Zea Mays
taattctttagtttccaatcgggcatgtaatcattatttagttgtccacaacactttggagaaatgggaatgcgtaatccaagcacgaaacccttggcttgatgaacgagaacgacacgacacagatggatcctatcctactacagtactacctagccgctctgctggatgaaggacacgacggccgccatctccgccttgtccttgtcgccgtcgccactgattttgtcgatgaagtagacgtgtccctcgtctcgccctggttctcgtacagaacagcctcctccccggcccacgcgctccccctcaggcctcagcgcgtcgacgtaccgccggcccctgtccctcatcgtgtcgagctcggccacggtcaccagagcacgccggcagccgagcctcgcccactcctccgccggcaaagccagaggattgatgaaggggtggtcgcccactcctccgccggcaaagccagaggattgatgaaggcgcgaggcggtagtccgcggacacggccaccacgcgggcagccgccacgagcgcgctcagaagtcagaaagcgggagcgcgcgccggagaaggccgagtggactgcgaaggcgccgccgtggaagtagaccagaccaggaggggcagcttctcgggcgtgccgaggacgtcgctgggtatgtagagccgcgcggcgaggccggctccggcgtcgacggcgtcctccatccctggacgtggccatgagggaggcggcgcacgcggccgctcttgtagcggatgaggaacggcgagaagtcgaagtcgacctcgcccgtccggatcgggaagagcgacaagagcgcgagcgttgct

SEQ ID NO: 88981 - DNA, 1241 bp, Zea Mays
atgccagagcaaacccataggtccagtccaaatccaatccctgttgccatcagaatttcaggggcagccatggccgaaaaggagagcaacggagtgcgggtgtgcgtcaccggaggagccgggttcatcggctcctggctcgtcaggaagctcctcgagaaaggctacaccgtccacgccaccctgcggaacaccggggacgaggcgaaggcggggctgctgcgtcggctggtccccggcgcggcggagcggctgcggttgttccaggccgacctcttcgacgccgccaccttcgcgccggcgatcgctgggtgccagttcgtcttcctcgtcgccacgccattcgggctcgatagcgccggctcccagcagtataagagcacggcggaagctgtggtggacgcggtgcgcgcgatcctccggcaatgcgaggagtcccggacggtgaagcgagtgatccacacagcctccgtagcggccgcctcgccgttgctggaggaggaggtctccgcctccggcgtcgggtacagagacttcatcgacgaatcttgttggacttcgctcaacgttgactatcctctccgaagcgcacacttcgacaagtacatactgtcgaagctgcggtcagagcaggagctcctgagctacaacggcggcgagagcccggcgttcgaggtggtgaccctgccgctggggctcgtggcgggcgacacggtcctcggccgcgccccggagacggtggagagcgccgtggcgcccgtgtcccgcagcgagccctgcttcggcctcctgcgcatactgcagcagctcctggggtcgctgccgctggtgcacgtggacgacgtctgcgacgcgctcgtcttctgcatggagcggcgcccctccgtcgccggccgcttcctctgcgccgccgcgtacccgacgatccacgacgtggtcgcccactacgccagcaagttccctcacctcgacatcttgaaagagacggaggcggtggcgacggtgcggcctgcccgggacaggttgggcgagctgggcttcaagtacaagtacggcatggaagagattctggatagcagcgttgcctgtgcggcgagattaggttcccttgacgcatccaagctcggcctacagaaaggataaaagctcgaagcttactcataagcaccatggggaacttggattgttcgctgtccactatacgcgttcgaaatttggaaactagacatactccaataaaa

SEQ ID NO: 88982 - DNA, 1238 bp, Zea Mays
atgccagagcaaacccataggtccagtccaaatccaatccctgttgccatcagaatttcaggggcagccatggccgaaaaggagagcaacggagtgcgggtgtgcgtcaccggaggagccgggttcatcggctcctggctcgtcaggaagctcctcgagaaaggctacaccgtccacgccaccctgcggaacaccggggacgaggcgaaggcggggctgctgcgtcggctggtccccggcgcggcggagcggctgcggttgttccaggccgacctcttcgacgccgccaccttcgcgccggcgatcgctgggtgccagttcgtcttcctcgtcgccacgccattcgggctcgatagcgccggctcccagtataagagcacggcggaagctgtggtggacgcggtgcgcgcgatcctccggcaatgcgaggagtcccggacggtgaagcgagtgatccacacagcctccgtagcggccgcctcgccgttgctggaggaggaggtctccgcctccggcgtcgggtacagagacttcatcgacgaatcttgttggacttcgctcaacgttgactatcctctccgaagcgcacacttcgacaagtacatactgtcgaagctgcggtcagagcaggagctcctgagctacaacggcggcgagagcccggcgttcgaggtggtgaccctgccgctggggctcgtggcgggcgacacggtcctcggccgcgccccggagacggtggagagcgccgtggcgcccgtgtcccgcagcgagccctgcttcggcctcctgcgcatactgcagcagctcctggggtcgctgccgctggtgcacgtggacgacgtctgcgacgcgctcgtcttctgcatggagcggcgcccctccgtcgccggccgcttcctctgcgccgccgcgtacccgacgatccacgacgtggtcgcccactacgccagcaagttccctcacctcgacatcttgaaagagacggaggcggtggcgacggtgcggcctgcccgggacaggttgggcgagctgggcttcaagtacaagtacggcatggaagagattctggatagcagcgttgcctgtgcggcgagattaggttcccttgacgcatccaagctcggcctacagaaaggataaaagctcgaagcttactcataagcaccatggggaacttggattgttcgctgtccactatacgcgttcgaaatttggaaactagacatactccaataaaa

SEQ ID NO: 88983 - DNA, 1201 bp, Zea Mays
aaattttgcattcccacccctatctttttttcagccgccacttccttttccctgccttcttcttcctccagcgagcagcaagcgcagggagcagcagctttcccagcgccccctctctcccatggctgagcagcagctctgctcgccccctcccatggcgcctccgcctccctgcgtgctctttcctcgctccttggcgcagcagcaaattaccatggtgcctccctctgctgtccacgaagagcagccaagcgccccactgttgaagctccctggatggcgcctagaatttcagcagagagcttcttctccatggccagccgcccctctgttgctgccgagctccagctctggccagcagccatggcgccgaggattacctgcaggcgagcagctcggcccttcttccctgcgcccagctattctccctgcgcagcacctccttcttctacctcttgccggcgcccagcagcagctcaccccatggatggcgcccagaaaatttcagccggcgccccttctttttcccctgctcgttctccctcgcgcagcagcagctcgccccacctcacctcgctgcgcagctcctcggcgaaacgccgctgttcctgcagccccggcacatcccccagcttcctcgctgctaccgctgcgcgcatgccaagtgctcggcataatgtcgagggagatgtgttgttgcagcacgccgtgacgctcgctgggtgttcaatgtttttggcgcagccccgctcgcgacgccgttgaaacccgtgctagccgtcaatcgccattcgtcacgcacgcgcgttcgatacaagaccggtcgggtgaaccacgtgcttgcataactcaaatccgatcccgctcaggttgattgatttatagtttaccatacgtatgatttggttgatgtcatgcaatgcgcgtatatgtggggatatgtgtataaaatgtcttgattatacgcattagtaggttcgcatttgcggttggagaacaagaagttgtttgatgtgtgcgatttgtagtttgtctaaatacgtttggtcgatgtggtgtgtattggtgtttgaatatatgtggctgcgatgattcatttatgcgtcacaaggatggttcgtggatggtgttagtcgtttgttaaaatacttcgtcataaagcagtgtgttagtcggggtaaatctaataaaaagtaaaaca

SEQ ID NO: 88984 - DNA, 1296 bp, Zea Mays
aatgtgaaactgtcgtcttctcgcgcggagcgtctagctattgtgccaatcttcaaatacaatcgccacggctcatccatttgccgccacaaatctgataaccaccacgccatcatcgcgctaccagggtcgacatggatcccgacgcagaggtcacgttcgagttcgtccccgtgatccggcagtacaagagcggccgtgtggagcgcctgctccccgtcaatccggtcccaccctccgtcgacgccgccaccggggtcgcctctaaggacgtcaccgttgacaaggccacgggcctgtgggcgcgcctctacctcccagacccagatctatccgcgcgccccgacggcgacatgcgtctccctatcgtcctctacttccacggcgggggcctcgtggtcggatccgcggccgacgcccccgagcacgccttcgtgaaccgcctcgcagcgcgggccggcgcgctcgccgtgtccgtggagtaccgcctggcgccggagcaccccgtccccgcctgctacgacgacgcctgggccgcgctccggtgggtggtggcgccggcggccgacccgtgggtccgcgaccacggcgacgtggcgcgcgtgttcgtgctcgggttcagcgccggcgggaacctcgcgcacaacctcaccctccgcgccggctcggagccggacctcctcccccgcggcgcccgggtgcaggggatggcgctgctgcacccgttcttcctgtcgccgccggcgccgggaagcgaggccgcggagggcgaggtagcgaagtacgcgtgggtgcgcgccaagctggcggagatgtgggcgttcgcgtgcggcgggtggacggcggggcccgacgacccgcgcgtgaacccactcgtggacggcgcggccagccttaggcgccttgggtgcgcccgggtcctcgtgtgcctcgcggatgacgcgctggctgctgagggcaaggcctactacgatggcctgctggcgagcgggtgggcggcggcggacgccaagctgctggactccgcgcccgcggaccacgagttccacctccgcgagcccgagagcgccaaggcggtgctcctcatggaccggctggctgcgctcatctccgggaactagcagtagcagtagagtcacacgcacgtcaacggagctgacgcaagagcgtacgtgcacttgctgccattgatgtactggaattggtcaaacaattccaagttctaatcggaacgatataaaatgctgacctataataaagaacttattctcagttcaggccatcttcagccgatct

SEQ ID NO: 88985 - DNA, 984 bp, Zea Mays
atggccaccgcacccgccgccccgccgccggcctccgcggacgacgagatcatctacgagtccatgccctgcatccgcgtctacaaggaccgcgtggagcgctacttcggcaccgagttcgtcgccgcctcgacgaacgactccaccggcgtggcctccagggacgtcgtcatctcccccaacgtctccgcgcgcctctacctcccgcgcctggacgacgggaacgccaagctccccatcttcgtctactaccacggcggcggcttctgcatcggctccgccttcaaccccatcttccacgactacttcaactgcctcgtggccctcgccgacatcctcgtcgtctccgtcgagtaccgcctcgccccggagcaccccgtccccgccgcctacgccgactcctgggaagcgctcgcctgggtcatctctcacctcggccccgccggcgacggcgcccgggacccgtggatcgcgggccacgccgacttctcccgcctcttcctgggcggcgagagcgcgggctccaacatcgcgcaccacatggcgatgcgcgctgccgcggaggggctggcccacggcgcccggatccggggactcgtcatgatccacccctacttcctgggcacggacaaggtgccctccgacgacctcagcccggaggtgcgcgagagcctggggtccctgtggcgcttcatgtgcccgaccaccacgggggaggacgacccgctcatcaaccccttcgttgacggcgccccgccgctagcgtccctgccgtgcggccgcgtgctcgtgtgcatcggcgagggcgacgtcctccgcgaccgcggccgcgcctactacgaccggctcagggccagcgggtggcccggcaaggcagagatttggcaggcgcccggcaagggacacacgttccacctcctggatccgtgctgcgacgaggccatcgcgcaggataaagtcatcagctacttcctcagccactga

SEQ ID NO: 88986 - DNA, 705 bp, Zea Mays
cccagctagacctacagaaaaaaaactctaaaatagttgttggtaaaccagcaggtgagcagtcgaacatcgtggccgcctctgctcagcccagatctccgatggccaccgcacccgccgccccgccgccggcctccgcggacgacgagatcatctacgagtccatgccctgcatccgcgtctacaaggaccgcgtggagcgctacttcggcaccgagttcgtcgccgcctcgacgaacgactccaccggcgtggcctccagggacgtcgtcatctcccccaacgtctccgcgcgcctctacctcccgcgcctggacgacgggaacgccaagctccccatcttcgtctactaccacggcggcggcttctgcatcggctccgccttcaaccccatcttccacgactacttcaactgcctcgtggccctcgccgacatcctcgtcgtctccggtcgagtacccgcctcgccccggagcacctcgttccccgccgcctacgcccgactcctgggaagcgctcgcctgggtcatctctcacctcgggccccgccggcgacggcgccccggggaacccgtgggatcgcgggccacgccggacttctccccgccctcttccctggggcggcgaagaagcgcggggtctccaaacattgcggaaccacaatggttaatgtcgtgctttccgcgtaagggggctgggtccacg

SEQ ID NO: 88987 - DNA, 699 bp, Zea Mays
ggagcccaaaggagacttcacaaagagtatagctgtatctctatagctctatagcgccgatagatccatcctctctttccactcctagctagctaacatatccacacatggcggccagttccaaggtcgtgtgcgcatgcattctcatcgttctcgtcatctcaagccacgccgacgcgaggcggctggtggcggcgacgtgcaacggaacggaaggcggagcatgcaagggtggcatcttcgtccaaggatatgcaggcctcagtgcaaggcagaaaatggcggccactgcaacgagcactgagcaggtcgtcggcggcggcggcgaaggcatgccggcgaccaccacggactcccggcctacggctcccggcaacagccccggtattggcaacaaagggaagatcaacaactagtttaattgccgtgtgtgttcttgtatgcgttcttatctaagtaataagcatccaattaagctgagtgctagtagcgcaccggccgtactcgtttattattgtaatctagtgcttgctgccagcgccaccatatttatgtccattttctcttttcatttggcattagtttcgtacgtgctcgtctctgtgtacaatgtccagttcacactgtgcattatgaacttttgtattattatcttgtaaccatgcatatgttcgcataaattaaataaagttctgcgtc

SEQ ID NO: 88988 - DNA, 1928 bp, Zea Mays
caccacgccacgctcaaacgagacgacgacgaatccagccaccgtcaccatcgccaccgccgacacaatcccgccgcagccccccgcgcactggtgtccgaacccagcccaatccgcgctgccgaattctggtctctgccctgcccgccccgcggcgcggccttcccaccgcctctccgtcctgctcccatccgccgcgctcgctagcgaaaccgctccccgagctccaggtggtgtggtgcctggcgcgcttcacaacgccataaatgccacccatcaaggctcctcccgccatctagccctcttctccctgaccctgcgcccgcggctcggtgcggttaccgtttccttggcgcgcgcgtcagcactccgccgatgcacgcgccgttggaggccatgaacgggagggcgcggaggccggcggcggcgcgcggcgccgccccgaggaacgagaaagcgatggagaaggagcagaggaggccacccagctcgaagacggcgccggtgtccatgaaggcgtcgcccgcaaatgcgacgccgcaatgcatgaagaacaggaaaattgcactgcagcaggacgtggacaagctgaggatgaaactgcggcacgaggagaacgtccaccgagctctggagcgggcgttcacgaggccgctcggcgctctacctcgcctccctcctttcctgccgtctcaaacgttggagcttctggccgaagtcgccgtcctggaggaggaggtcgtccggctggaggagcaggtcgtcaatttccggcaaggactgtaccgggagaccgtcatcaccacctccatggcggcgaagagcgtgtacttcccggacggttaccggagcacgccggcacggcacaagccacctgcacaaccgcagagtccagagctgtctacctcgacgcgccaaggctccgatcaagatgccgctgattggctgccatctttgaggcgagccaccaatgcgatgtggacaccaagaaggcccggtcgttccctgagccaaggcgacagtccggggaaggagaaccagtcgttcggcagtggcactaattcgtgcagagagttcggcctggcgcccttgagtaaagtgccaggatgcagggtagtacaggtagcggagacacgcgcaggttttcagacaacgagtgcagtggaagaccacaaagctgttgagggcagcaatggcactggtccaagcaaggcctcaacggcggcgaacgaagtctcggaggagctactggcgtgcctgctggccatcttctcgcagaagagcgcatccagcggccaagacgaggagcgggtgtcgctgccgccggtctccggctcctgcggaagcagctcagcagacccctactgtgtcccagaattcgggtggcgggatattggccggtacaagcagttccggtcagtcgacatgaacacttgtgccggcgacgactccgctcttggccagagactgaagtgagtttccattgatcgggcactgctccggaagctctccttggttgacctagcgggcctctcccaccagcataataggctggcgttctggatcaacacctactactcctgcatgatgaacgtaagctgcccctaataactgaggcatcctcttgcttctcacctcagcatccatgattggtccatagctttatacctcacgtccctttcctgtcgatgggggagactgacgttggtaggaacttcagttacagatttctgggaccatttggaactggaactcgtgagcaggggtgtaacctttctctcaaatttcgctgaaatttcatgaacttcagtaattttgtggaatttcgtaccacagtgatgcatgtgctttattattagtactttgtttaggtctattttttttaataaaaccatatctctctataaataatttgactgacttggctg

SEQ ID NO: 88989 - DNA, 1910 bp, Zea Mays
caccacgccacgctcaaacgagacgacgacgaatccagccaccgtcaccatcgccaccgccgacacaatcccgccgcagccccccgcgcactggtgtccgaacccagcccaatccgcgctgccgaattctggtctctgccctgcccgccccgcggcgcggccttcccaccgcctctccgtcctgctcccatccgccgcgctcgctagcgaaaccgctccccgagctccaggtggtgtggtgcctggcgcgcttcacaacgccataaatgccacccatcaaggctcctcccgccatctagccctcttctccctgaccctgcgcccgcggctcggtgcggttaccgtttccttggcgcgcgcgtcagcactccgccgatgcacgcgccgttggaggccatgaacgggagggcgcggaggccggcggcggcgcgcggcgccgccccgaggaacgagaaagcgatggagaaggagcagaggaggccacccagctcgaagacggcgccggtgtccatgaaggcgtcgcccgcaaatgcgacgccgcaatgcatgaagaacaggaaaattgcactgcagcaggacgtggacaagctgaggatgaaactgcggcacgaggagaacgtccaccgagctctggagcgggcgttcacgaggccgctcggcgctctacctcgcctccctcctttcctgccgtctcaaacgttggagcttctggccgaagtcgccgtcctggaggaggaggtcgtccggctggaggagcaggtcgtcaatttccggcaaggactgtaccgggagaccgtcatcaccacctccatggcggcgaagagcgtgtacttcccggacggttaccggagcacgccggcacggcacaagccacctgcacaaccgcagagtccagagctgtctacctcgacgcgccaaggctccgatcaagatgccgctgattggctgccatctttgaggcgagccaccaatgcgatgtggacaccaagaaggcccggtcgttccctgagccaaggcgacagtccggggaaggagaaccagtcgttcggcagtggcactaattcgtgcagagagttcggcctggcgcccttgagtaaagtgccaggatgcagggtagtacaggtagcggagacacgcgcaggttttcagacaacgagtgcagtggaagaccacaaagctgttgagggcagcaatggcactggtccaagcaaggcctcaacggcggcgaacgaagtctcggaggagctactggcgtgcctgctggccatcttctcgcagaagagcgcatccagcggccaagacgaggagcgggtgtcgctgccgccggtctccggctcctgcggaagcagctcagcagacccctactgtgtcccagaattcgggtggcgggatattggccggtacaagcagttccggtcagtcgacatgaacacttgtgccggcgacgactccgctcttggccagagactgaaggcactgctccggaagctctccttggttgacctagcgggcctctcccaccagcataataggctggcgttctggatcaacacctactactcctgcatgatgaacgtaagctgcccctaataactgaggcatcctcttgcttctcacctcagcatccatgattggtccatagctttatacctcacgtccctttcctgtcgatgggggagactgacgttggtaggaacttcagttacagatttctgggaccatttggaactggaactcgtgagcaggggtgtaacctttctctcaaatttcgctgaaatttcatgaacttcagtaattttgtggaatttcgtaccacagtgatgcatgtgctttattattagtactttgtttaggtctattttttttaataaaaccatatctctctataaataatttgactgacttggctg

SEQ ID NO: 88990 - DNA, 2433 bp, Zea Mays
caccacgccacgctcaaacgagacgacgacgaatccagccaccgtcaccatcgccaccgccgacacaatcccgccgcagccccccgcgcactggtgtccgaacccagcccaatccgcgctgccgaattctggtctctgccctgcccgccccgcggcgcggccttcccaccgcctctccgtcctgctcccatccgccgcgctcgctagcgaaaccgctccccgagctccaggtggtgtggtgcctggcgcgcttcacaacgccataaatgccacccatcaaggctcctcccgccatctagccctcttctccctgaccctgcgcccgcggctcggtgcggttaccgtttccttggcgcgcgcgtcagcactccgccgatgcacgcgccgttggaggccatgaacgggagggcgcggaggccggcggcggcgcgcggcgccgccccgaggaacgagaaagcgatggagaaggagcagaggaggccacccagctcgaagacggcgccggtgtccatgaaggcgtcgcccgcaaatgcgacgccgcaatgcatgaagaacaggaaaattgcactgcagcaggacgtggacaagctgaggatgaaactgcggcacgaggagaacgtccaccgagctctggagcgggcgttcacgaggccgctcggcgctctacctcgcctccctcctttcctgccgtctcaaacgttggagcttctggccgaagtcgccgtcctggaggaggaggtcgtccggctggaggagcaggtcgtcaatttccggcaaggactgtaccgggagaccgtcatcaccacctccatggcggcgaagagcgtgtacttcccggacggttaccggagcacgccggcacggcacaagccacctgcacaaccgcagagtccagagctgtctacctcgacgcgccaaggctccgatcaagatgccgctgattggctgccatctttgaggcgagccaccaatgcgatgtggacaccaagaaggcccggtcgttccctgagccaaggcgacagtccggggaaggagaaccagtcgttcggcagtggcactaattcgtgcagagagttcggcctggcgcccttgagtaaagtgccaggatgcagggtagtacaggtagcggagacacgcgcaggttttcagacaacgagtgcagtggaagaccacaaagctgttgagggcagcaatggcactggtccaagcaaggcctcaacggcggcgaacgaagtctcggaggagctactggcgtgcctgctggccatcttctcgcagaagagcgcatccagcggccaagacgaggagcgggtgtcgctgccgccggtctccggctcctgcggaagcagctcagcagacccctactgtgtcccagaattcgggtggcgggatattggccggtacaagcagttccggtcagtcgacatgaacacttgtgccggcgacgactccgctcttggccagagactgaaggcactgctccggaagctctccttggttgacctagcgggcctctcccaccagcataataggctggcgttctggatcaacacctactactcctgcatgatgaacgcatttctcgagcagggagcgcctagcgacccccgtatgctggtggccatgatgcccaaggcgaccatcaacgtcggcgggcgcgtgctgagcgccgtggcgatcgagcacttcattctccggctgccccactacgacgatgacgacgcaaaagcacgtaaggttgctggcctggccggctggccgcatcattcatcgccgccgtgtcgtcgtctttcctccactgaagacgctcgagcaccgtcgtatatataggactacgaatgagctctgacagtggacgttttggttggcatggggcatgccaggtgcacactgactgaagcgaggaatggcgacggccaggccgtgctcgggctggactggccggagccgctgctgacgttcgcgctctcctccggcagacggtcgtcgccggtgagggtctacgcggccggccggagtcgacgagaagctggaggcggtgaagcgggagtacctgcaggccgcggtgggcgtctcgccggcgagcgggctgccgaacctcctccttcactggtacctgctggctgcttgactccgccaaggacgtggaccgggtgtgcctgcagctgtcccgcgacccgtgtgcgccctgccggataccttctgcttctggccctgttgtcgtagaacgttggagtgtgtacacagttttggttgggccgtgattctttttgctgtttcaaccgtgaatttgttgtttgcttacgttgtacacacagttttcagttttggactacaggtctgcagagataaggccgtaagagcatgtacagtggagagacatcaaaacagttctccaagtacatgagacaacaaagagactctattgtacaa

SEQ ID NO: 88991 - DNA, 2369 bp, Zea Mays
caccacgccacgctcaaacgagacgacgacgaatccagccaccgtcaccatcgccaccgccgacacaatcccgccgcagccccccgcgcactggtgtccgaacccagcccaatccgcgctgccgaattctggtctctgccctgcccgccccgcggcgcggccttcccaccgcctctccgtcctgctcccatccgccgcgctcgctagcgaaaccgctccccgagctccaggtggtgtggtgcctggcgcgcttcacaacgccataaatgccacccatcaaggctcctcccgccatctagccctcttctccctgaccctgcgcccgcggctcggtgcggttaccgtttccttggcgcgcgcgtcagcactccgccgatgcacgcgccgttggaggccatgaacgggagggcgcggaggccggcggcggcgcgcggcgccgccccgaggaacgagaaagcgatggagaaggagcagaggaggccacccagctcgaagacggcgccggtgtccatgaaggcgtcgcccgcaaatgcgacgccgcaatgcatgaagaacaggaaaattgcactgcagcaggacgtggacaagctgaggatgaaactgcggcacgaggagaacgtccaccgagctctggagcgggcgttcacgaggccgctcggcgctctacctcgcctccctcctttcctgccgtctcaaacgttggagcttctggccgaagtcgccgtcctggaggaggaggtcgtccggctggaggagcaggtcgtcaatttccggcaaggactgtaccgggagaccgtcatcaccacctccatggcggcgaagagcgtgtacttcccggacggttaccggagcacgccggcacggcacaagccacctgcacaaccgcagagtccagagctgtctacctcgacgcgccaaggctccgatcaagatgccgctgattggctgccatctttgaggcgagccaccaatgcgatgtggacaccaagaaggcccggtcgttccctgagccaaggcgacagtccggggaaggagaaccagtcgttcggcagtggcactaattcgtgcagagagttcggcctggcgcccttgagtaaagtgccaggatgcagggtagtacaggtagcggagacacgcgcaggttttcagacaacgagtgcagtggaagaccacaaagctgttgagggcagcaatggcactggtccaagcaaggcctcaacggcggcgaacgaagtctcggaggagctactggcgtgcctgctggccatcttctcgcagaagagcgcatccagcggccaagacgaggagcgggtgtcgctgccgccggtctccggctcctgcggaagcagctcagcagacccctactgtgtcccagaattcgggtggcgggatattggccggtacaagcagttccggtcagtcgacatgaacacttgtgccggcgacgactccgctcttggccagagactgaaggcactgctccggaagctctccttggttgacctagcgggcctctcccaccagcataataggctggcgttctggatcaacacctactactcctgcatgatgaacgcatttctcgagcagggagcgcctagcgacccccgtatgctggtggccatgatgcccaaggcgaccatcaacgtcggcgggcgcgtgctgagcgccgtggcgatcgagcacttcattctccggctgccccactacgacgatgacgacgcaaaagcacgtgcacactgactgaagcgaggaatggcgacggccaggccgtgctcgggctggactggccggagccgctgctgacgttcgcgctctcctccggcagacggtcgtcgccggtgctctggactggacgcccggtctgtcctccgagctgtctcctcaaggcaaatgattttagccgccaccgcttcttgtctctgaaggtgagggtctacgcggccggccggagtcgacgagaagctggaggcggtgaagcgggagtacctgcaggccgcggtgggcgtctcgccggcgagcgggctgccgaacctcctccttcactggtacctgctggctgcttgactccgccaaggacgtggaccgggtgtgcctgcagctgtcccgcgacccgtgtgcgccctgccggataccttctgcttctggccctgttgtcgtagaacgttggagtgtgtacacagttttggttgggccgtgattctttttgctgtttcaaccgtgaatttgttgtttgcttacgttgtacacacagttttcagttttggactacaggtctgcagagataaggccgtaagagcatgtacagtggagagacatcaaaacagttctccaagtacatgagacaacaaagagactctattgtacaa

SEQ ID NO: 88992 - DNA, 1462 bp, Zea Mays
aacggacaaccgcccttctccatccggtctccaagccaacgactcgagtcgttcaaaactggacacagcagtgaaccggagctgcttgcttgctgtctcgccaagaagcaagagtaggaggagcagctggtctctcgccaagtcgcgcctctccctcctctcttctcttttctccctcgcgtcgcgcgctccacatgctgagcctgaggtcagtatccggctccaactcctcgaggggcatcgccgccgtggtcggcgtcggccccaggctgggctcggcggtggcgcgcaagttcgcctccgagggctacaccatcgccatcctctcgcgcgacctcgagaagctgtcgcagctggcggaggagatcgcgcaggcggccaaggcgcaggtgttcgcgctgcgggtggactgcgccgacgcccggtccgtgcgcgaggccttcgagggcgtgctctccctcggccccgtcgaggtgctcgtctacaacgcctgcgagccgcctgcagccaacgaggacgcgcgccccgcgcccttcctcgccgtcacccccgacgccttccaccgcgccctcgccgtgtccgccggaggggccttccactgcgcgcaacaggtcatcccgggcatggtggagaggggcaggggcaccatcatcttcacgggctcctcggcgtcggtcaccggcttcgccggctactccgatctaagcagcggcaagtttgccctgcgggggctgtcccagtcgctggccagggagttccagccggccggcgtgcacattgcgcatgtgatcatcgacggcgtcatcggcgagaggaggtcgctgacgaggagcagcagggccggcggcgacacggcgggcgcgggcgcggacccggacgcggtggcgcagagctactggcacgtccacgcccaggacaagagcgcttggacgcaggagatggacatccggtcgccgtccttcatgtagcagcagcagctagccgccgctgctgtacgtacggtccctggaatctttagtggactgctaccggccgggcgcgttcccgatcaagcaggagagagggacaagtgggtcttgttgtgtatgtatacgtcgtgccctgtaaatcgtgtgtgcgcgcgcgcggctgcgggccgggaatcgtgtccccgtcccgcgccgcacgttggcgcggctctagctagcccccccttttctcatcatttggtgtgagatgcccgtcgctggtccgaccgcgggttctgtgcgtcgattgcggccgagagcgaccgcgcgtgcgtctccgtcgcatcctgtacccgtcgccgccgccgccggcgaccggcctccggaaagctctcatgtgtgatggatgtgtgcgcccgttgttacacatgagctagtccgtatatgtggaggattgtgcttagtggtcgctacccacttgaattgagcagcatccgtgagactctgactattgt

SEQ ID NO: 88993 - DNA, 1350 bp, Zea Mays
aacggacaaccgcccttctccatccggtctccaagccaacgactcgagtcgttcaaaactggacacagcagtgaaccggagctgcttgcttgctgtctcgccaagaagcaagagtaggaggagcagctggtctctcgccaagtcgcgcctctccctcctctcttctcttttctccctcgcgtcgcgcgctccacatgctgagcctgaggtcagtatccggctccaactcctcgaggggcatcgccgccgtggtcggcgtcggccccaggctgggctcggcggtggcgcgcaagttcgcctccgagggctacaccatcgccatcctctcgcgcgacctcgagaagctgtcgcagctggcggaggagatcgcgcaggcggccaaggcgcaggtgttcgcgctgcgggtggactgcgccgacgcccggtccgtgcgcgaggccttcgagggcgtgctctccctcggccccgtcgaggtgctcgtctacaacgcctgcgagccgcctgcagccaacgaggacgcgcgccccgcgcccttcctcgccgtcacccccgacgccttccaccgcgccctcgccgtgtccgccggaggggccttccactgcgcgcaacaggtcatcccgggcatggtggagaggggcaggggcaccatcatcttcacgggctcctcggcgtcggtcaccggcttcgccggctactccgatctaagtcgctgacgaggagcagcagggccggcggcgacacggcgggcgcgggcgcggacccggacgcggtggcgcagagctactggcacgtccacgcccaggacaagagcgcttggacgcaggagatggacatccggtcgccgtccttcatgtagcagcagcagctagccgccgctgctgtacgtacggtccctggaatctttagtggactgctaccggccgggcgcgttcccgatcaagcaggagagagggacaagtgggtcttgttgtgtatgtatacgtcgtgccctgtaaatcgtgtgtgcgcgcgcgcggctgcgggccgggaatcgtgtccccgtcccgcgccgcacgttggcgcggctctagctagcccccccttttctcatcatttggtgtgagatgcccgtcgctggtccgaccgcgggttctgtgcgtcgattgcggccgagagcgaccgcgcgtgcgtctccgtcgcatcctgtacccgtcgccgccgccgccggcgaccggcctccggaaagctctcatgtgtgatggatgtgtgcgcccgttgttacacatgagctagtccgtatatgtggaggattgtgcttagtggtcgctacccacttgaattgagcagcatccgtgagactctgactattgt

SEQ ID NO: 88994 - DNA, 1509 bp, Zea Mays
aacggacaaccgcccttctccatccggtctccaagccaacgactcgagtcgttcaaaactggacacagcagtgaaccggagctgcttgcttgctgtctcgccaagaagcaagagtaggaggagcagctggtctctcgccaagtcgcgcctctccctcctctcttctcttttctccctcgcgtcgcgcgctccacatgctgagcctgaggtcagtatccggctccaactcctcgaggggcatcgccgccgtggtcggcgtcggccccaggctgggctcggcggtggcgcgcaagttcgcctccgagggctacaccatcgccatcctctcgcgcgacctcgtgagtaagtaagcaagtgacacgagaggtgcgtgcgcgtggttgcagagaagctgtcgcagctggcggaggagatcgcgcaggcggccaaggcgcaggtgttcgcgctgcgggtggactgcgccgacgcccggtccgtgcgcgaggccttcgagggcgtgctctccctcggccccgtcgaggtgctcgtctacaacgcctgcgagccgcctgcagccaacgaggacgcgcgccccgcgcccttcctcgccgtcacccccgacgccttccaccgcgccctcgccgtgtccgccggaggggccttccactgcgcgcaacaggtcatcccgggcatggtggagaggggcaggggcaccatcatcttcacgggctcctcggcgtcggtcaccggcttcgccggctactccgatctaagcagcggcaagtttgccctgcgggggctgtcccagtcgctggccagggagttccagccggccggcgtgcacattgcgcatgtgatcatcgacggcgtcatcggcgagaggaggtcgctgacgaggagcagcagggccggcggcgacacggcgggcgcgggcgcggacccggacgcggtggcgcagagctactggcacgtccacgcccaggacaagagcgcttggacgcaggagatggacatccggtcgccgtccttcatgtagcagcagcagctagccgccgctgctgtacgtacggtccctggaatctttagtggactgctaccggccgggcgcgttcccgatcaagcaggagagagggacaagtgggtcttgttgtgtatgtatacgtcgtgccctgtaaatcgtgtgtgcgcgcgcgcggctgcgggccgggaatcgtgtccccgtcccgcgccgcacgttggcgcggctctagctagcccccccttttctcatcatttggtgtgagatgcccgtcgctggtccgaccgcgggttctgtgcgtcgattgcggccgagagcgaccgcgcgtgcgtctccgtcgcatcctgtacccgtcgccgccgccgccggcgaccggcctccggaaagctctcatgtgtgatggatgtgtgcgcccgttgttacacatgagctagtccgtatatgtggaggattgtgcttagtggtcgctacccacttgaattgagcagcatccgtgagactctgactattgt

SEQ ID NO: 88995 - DNA, 888 bp, Zea Mays
aagccgatgccatctcttatcgactacagcccggccgcgctacggtcgctgctccggccgccgcccagcgacgagcgtcgggcgaagcagtccggggcggcggcgggggccggcggcgccttggggctgttcaagatgttcaagctcctgcccgtgctcaccacgggctgcaaggtggccgcgatgctggggcggcacaacaaccaccgggccctactggccgaccacgcgccgacggtgacgctgttcgggcaccggcgcgggcggctgagcctggccatccacgaggacacgcgcgccccgcccgcgttcctcatcgagctgcccatgctggcgcccgcgctgcaccgggagatggccacgggcaccgtgcgcctggcgctcgagagcgacacgcgcggcggcgccgcggcgcgccgccgccgccgcccgctgctggaggagtacgtctgggcggtctactgcaacgggcgcaaggccgggtacgccatccgccgcaaggacgcgtccgacgacgagcgccacgtcctgcgcctgctccgcggcgtgtccatgggcgccggggtgctgccgccgccgcccgacgacagggcgggagcgcgcgccacggccacggccacggccacgcccgccgcttgccccgatggcgagctcacgtacatgcgcgcccgcgtcgaacgcgtcgtcgggtccaacgactctcaggcgttctatatgatcaaccccgatgatgccagcggcaacaccgcccgtggcggcgattgcgcgccggagctgagcgttttctttgtgaggaacaagtgagaatatacaaatcgacgctagtacgtatccataaatatacactgttcttctctttgtgagtaataaatatagtacaatgcatgt

SEQ ID NO: 88996 - DNA, 124 bp, Zea Mays
cggacgtatgcggcgaggaattctacgccggggaagcaagcggttggattggaatggaagcctaccgtgccctgtgttcattgcgtgtttcgggatccgatgactcgtgtaactgtttggcagg

SEQ ID NO: 88997 - DNA, 1347 bp, Zea Mays
atggcaagcgctagttctgcacaaggcgcacacgagacagaccctgagaaggtgaagctcgtcaccgtcctgagcatcgacggtggcggcgtcagagggatcatccccgccaccatcctcgccttcctagaagagaagctgcaagaactggatggaccggacgctaggatcgccgactacttcgacgtcgttgccggcacgagcaccggtggtctcctggcggcgatgctcacggcccctggccaggaccatgacggacgtcgacggccactcttcgacgccaaggatctggcgcagttctacatcgaccactcgcccaaaatcttcccacagaagaactggatcctgtccaagatcgccggcacgctgaggatggtgagggggcccaagtacgacggcaagtacctccatggcctgcttcgccagcacctcggcgacatgaggctggacaaggcgctcaccaacgtggtcatcccgaccttcgacatcgcgctcctgcagcccacgattttctcaagcttcgagtcacaacgtcaacgaagactattttttgttgatttttttaataccaacgcgttgcatgcgtactacacgtgcgtgctgcttgcccgggttggtttcgatcagctgaagcgccggccgtcgaagaatgcactcctggcggacatctgcatcagcacctcggccgcgccgaccttcttcccggcacactacttcgagacggaagacggggacgggaggaccagggccttcaacctcgtcgacggaggcctcgccgctaacaatcccacactgtgcgccatgggccaggtgtccaaggacatcatcctcggggacgacgacttcttcccggtgaagccggcggactacggcaagttcatggtcatctccgttggctgtgggtcgaaccgggaccgcaggtacagcgccaaggccgccgccaagtggggcatcttcaactggctcatcaaggacggcacggctcccatcatcgacatgttcaactccgccagcgccgacatggtcgacatccacctctgcgtcctcttcagggccctccattccagcgaaaactacctgcgcattcagtatgatcaactgacgggcagcgcgggctccatcgacgactgctccaaggagaacatggataagctggtgcagatcgggaaggaccttctcagccagaacgtctcccgggtggacctagagactggcaagaacatggacgtccccagcgcgggcacaaacgccgagcagctcgccaagttcgcgaagcagctctctgacgagcgacgccggcgccagaagctttcaaagtagcggtactgaaaagaaaaaaagaagaaa

SEQ ID NO: 88998 - DNA, 1374 bp, Zea Mays
cgcagctcttaagtgcatagcttgctttgtgccaccaccgtaccgtaccaaacagatcaaatcagagatggcaagtcgtagtagctctgcagaaggtgcaggcaggacgttgcctgtcaatctcaagttgatcaccgtgctgagcatcgatggcggcggcatcagagggatcatcccggccaccatcctcgccttcctggaagcgaagctccaggaactggacgggccagacgctcgtatcgcggactacttcgacgtcgtcgccggcacgagcaccggcggtctcctgacggcgatgctcacggcccctgacacgaacgaacggccgctgttcgccgccaaggacttggcgcggttctacatccagcactcgcccaaaatcttccggcagaagaatgctatggggtccaagctcgtcggcaagctgaggatggcttgtgggcccaagtacgacggcaagtacctccatgcgcagctccgacggcttcttggtaatatgaggctggacaggacactgaccaatgttgtcatcccgaccttcgacattgcctacatgcaacccatgattttctccagctttgagttgaagcaccggccgtcgacaaatgcgcttctgtcagacatatgcatgagcacctctgccgcgcctacctacttcccgccgcactacttccagaccagggacgagaatggcaggaggaaggccttcaacctcgtggacggcggaatcgctgcgaacaaccccaccctgtgcgccatgggccaggtgtctaaggacatcatccttgcggacgacgacttcttcccggtgatgccggcggactacggcaagttcatggtcatctcgctcggctgcgggtcgaaccggaaccggaggtactgcgccaaggccgccgccaggtggggcgtcttcagctggctcttcaaggacggcagcgctcccatcatcgacatgttcaactccgccagcgcagacatggtcgacatccacctctgcgtcctcttcagggccctgcgctccagcgaaaactacctgcgcattcagtacgatcagctgacgggcagcgcgggctccatagacgactcgtccaagaagaacatggatagactggtgaggatagggaacaagctcctggacatgaacgtctcccgggtggacctggagaccggccggaacgtggaggtgcccggtgcagggaccaacgccgagcggctcgccaagttcgccaggcagctctctgacgagcgacggcgccggcgccagaacgagcttattatgaattccgaacaagtgtttcaaattcaacatcaagcttggtactacggtggtgacgcttgagctgcatccggcctgcagaatgaggtttcagtact

SEQ ID NO: 88999 - DNA, 534 bp, Zea Mays
atggtgggtgaggaccgtcgatggatgtatgaagaggatggtaaggaggtccctgtcacaagatgggatcaatatgcccttgcaataaatgcgcaacatgggaatgcacaagctgcagtttggcacgacttctggaaacattacaagttgcctgaaggagatactcatacggaacacgcacactccatgttccataggaatgcggcaagtgttgttggggatatgatgtactatgctcgaatccaggtgattagtaaagccatgtttggtagtgaagggcgacgtccagagagtaagaatgaggcgacacagtatggagtcgatatgactgagcaacaatatcttgagcattcgattccatggatagctgccaatgatgctgcttggcatgcgttatgtcgttactgggcttcggctgaattcaaggcaaagtctgtgcgacacagttccaatcgtggaaccgagtcgtatcataggtatggaggtgatgatcactttcgtttggcatctcgaatgttaacgaatcaagattga

SEQ ID NO: 89000 - DNA, 1504 bp, Zea Mays
ctgcctatctggcttgctactgtcacttccatgtgggttgatgaccaggtttagtttagtttctttaaaatttctgaaataagtttccagttgaaggaataatccagataactgttaatagcatatgtaaaaacattcaagcacctctagaaaattcaggaaaaaattctggagatatattatgatttacacccaatttctctttctgaactcaaggtcattgatgaatcatgtgttggtagcaagcctaagaagaaagacaagtatgattgcctagttcggctctatggaacatgtcaatatttatatgtagacccttggaagtctaactcagaatttgaaatgatgctgaagcaagaaaacaagagcgcaatggaagcattccgtgaggtgcttgagaaggagctctctggcgttaacttgcgcagtgattatgaggatggttatgaagaggaagatgtcaactcaaaaggcggtgacaacaaagggacctcaaagaagacctcttctagaaaagccagaaaacaagaaggtctgaagcaacaatataatggagaggaagaccaaaatggtgggagcaatgcaactactggaggtgctcggaaaaaaaagggtgggcatgtaagacaatcaagtgctactcatgatgccattgataaaaattatagtggcagttcagctgaaggtttaaggaacaagagacagaagtctgctgctcaaagcgcttcggtaggcagaagggaagggttgaggcaacgatctgatgccaagcaacatccagatgcagccgagggcagtacagaaccactcgctgatgtacctggaagcgatggtgcagctcaaggttcaatgcaacatggaacttcggctcctcataccgaaataaaagcgatggtcaggaacatactgttcaaggacatcgttgacaaggagcacgatgctgagatggcttatgtggaagaagtgatcaatggcatctgtaacgctactgacagcatggtcggcggcggcggcggtgatgcttccgcgaaaggtggacgaggctccaagcagagcggcagcggagtggagggtgagtctagcaatgccacagaaaggcgaagagatgaagcaactgagaatgccctcgccgtgaaagggaatacccctgtaagttgatcccatttgcccacacccgcacttcccaactgcttttatgacctcccaaatttttacttgctagtttgacgaaatttcctcagagcaggggaacaatggcgatgacgccggggcagcttagcgcacgccaaaataggcagaacaggatcatgcaaaccctagctctgatccctccatcaggatctccgtttggcaggaatgaagaggttgcagccagccgtcaaaaactctaattcacttatgagcgccctaagaaacagtccgtgagcccccctagcgttttgcagtcctgtcctctgcgcaccatgcctagtatcgctgctgccattcagcttgcttttgggag

SEQ ID NO: 89001 - DNA, 1654 bp, Zea Mays
ctgcctatctggcttgctactgtcacttccatgtgggttgatgaccaggtttagtttagtttctttaaaatttctgaaataagtttccagttgaaggaataatccagataactgttaatagcatatgtaaaaacattcaagcacctctagaaaattcaggaaaaaattctggagatatattatgatttacacccaatttctctttctgaactcaaggtcattgatgaatcatgtgttggtagcaagcctaagaagaaagacaagtatgattgcctagttcggctctatggaacatgtcaatatttatatgtagacccttggaagtctaactcagaatttgaaatgatgctgaagcaagaaaacaagagcgcaatggaagcattccgtgaggtgcttgagaaggagctctctggcgttaacttgcgcagtgattatgaggatggttatgaagaggaagatgtcaactcaaaaggcggtgacaacaaagggacctcaaagaagacctcttctagaaaagccagaaaacaagaaggtctgaagcaacaatataatggagaggaagaccaaaatggtgggagcaatgcaactactggaggtgctcggaaaaaaaagggtgggcatgtaagacaatcaagtgctactcatgatgccattgataaaaattatagtggcagttcagctgaaggtttaaggaacaagagacagaagtctgctgctcaaagcgcttcggtaggcagaagggaagggttgaggcaacgatctgatgccaagcaacatccagatgcagccgagggcagtacagaaccactcgctgatgtacctggaagcgatggtgcagctcaaggttcaatgcaacatggaacttcggctcctcataccgaaataaaagcgatggtcaggaacatactgttcaaggacatcgttgacaaggagcacgatgctgagatggcttatgtggaagaagtgatcaatggcatctgtaacgctactgacagcatggtcggcggcggcggcggtgatgcttccgcgaaaggtggacgaggctccaagcagagcggcagcggagtggagggtgagtctagcaatgccacagaaaggcgaagagatgaagcaactgagaatgccctcgccgtgaaagggaatacccctagcaggggaacaatggcgatgacgccggggcagcttagcgcacgccaaaataggcagaacaggatcatgcaaaccctagctctgatccctccatcaggatctccgtttggcaggaatgaagaggttgcagccagccgtcaaaaactctaattcacttatgagcgccctaagaaacagtccgtgagcccccctagcgttttgcagtcctgtcctctgcgcaccatgcctagtatcgctgctgccattcagcttgcttttgggagacgcctatatattgcgcctgatctgctgaattacgtagcagttgctattaatctatccagaagacttggactgagtttgattgctatgtaaccacgcggttggttctgtacttctacgcaactgtgcgacattggccaatgtggtgccgttgaaccttatgtattattgtgcacccccatcaccatgttattactagcccccttcggcatttcagttcagcattcagcagttttgcatgttc

SEQ ID NO: 89002 - DNA, 1649 bp, Zea Mays
ctgcctatctggcttgctactgtcacttccatgtgggttgatgaccaggtttagtttagtttctttaaaatttctgaaataagtttccagttgaaggaataatccagataactgttaatagcatatgtaaaaacattcaagcacctctagaaaattcaggaaaaaattctggagatatattatgatttacacccaatttctctttctgaactcaaggtcattgatgaatcatgtgttggtagcaagcctaagaagaaagacaagtatgattgcctagttcggctctatggaacatgtcaatatttatatgtagacccttggaagtctaactcagaatttgaaatgatgctgaagcaagaaaacaagagcgcaatggaagcattccgtgaggtgcttgagaaggagctctctggcgttaacttgcgcagtgattatgaggatggttatgaagaggaagatgtcaactcaaaaggcggtgacaacaaagggacctcaaagaagacctcttctagaaaagccagaaaacaagaaggtctgaagcaacaatataatggagaggaagaccaaaatggtgggagcaatgcaactactggaggtgctcggaaaaaaaagggtgggcatgtaagacaatcaagtgctactcatgatgccattgataaaaattatagtggcagttcagctgaaggtttaaggaacaagagacagaagtctgctgctcaaagcgcttcggtaggcagaagggaagggttgaggcaacgatctgatgccaagcaacatccagatgcagccgagggcagtacagaaccactcgctgatgtacctggaagcgatggtgcagctcaaggttcaatgcaacatggaacttcggctcctcataccgaaataaaagcgatggtcaggaacatactgttcaaggacatcgttgacaaggagcacgatgctgagatggcttatgtggaagaagtgatcaatggcatctgtaacgctactgacagcatggtcggcggcggcggcggtgatgcttccgcgaaaggtggacgaggctccaagcagagcggcagcggagtggagggtgagtctagcaatgccacagaaaggcgaagagatgaagcaactgagaatgccctcgccgtgaaagggaatacccctgggaacaatggcgatgacgccggggcagcttagcgcacgccaaaataggcagaacaggatcatgcaaaccctagctctgatccctccatcaggatctccgtttggcaggaatgaagaggttgcagccagccgtcaaaaactctaattcacttatgagcgccctaagaaacagtccgtgagcccccctagcgttttgcagtcctgtcctctgcgcaccatgcctagtatcgctgctgccattcagcttgcttttgggagacgcctatatattgcgcctgatctgctgaattacgtagcagttgctattaatctatccagaagacttggactgagtttgattgctatgtaaccacgcggttggttctgtacttctacgcaactgtgcgacattggccaatgtggtgccgttgaaccttatgtattattgtgcacccccatcaccatgttattactagcccccttcggcatttcagttcagcattcagcagttttgcatgttc

SEQ ID NO: 89003 - DNA, 172 bp, Zea Mays
cgtaatgatattctttgtggcatttttaaaattctttctgttgttttactttcagtttatatgtagacccttggaagtctaactcagaatttgaaatggtatgcataagcttctgtctcatatgggcagtgatatggatcttgctctatagtcgtgataattaggatttgcc

SEQ ID NO: 89004 - DNA, 720 bp, Zea Mays
atggtggcgacggacggagagggggagcgatcgacgccggcgccggcgccggcgccagcgctgcggaaggagcggggccggagccacagcgaggccgagcgcaagcggcggcagcggatcaacgcccacctcgccacgctccgcaccctcgtcccctccgcatcccggatggacaaggcggcgttgctgggcgaggtggtgcggtacgtgcgggagctgcgcgagaaggcgagcgacgcggcggcgggggtcggcctcggcgtcatcccgggggagggcgacgaggtgggcgtcgaggaggaggacggctgccggtggcggccagcaggtcgccaccacggcgctggcgggatagggacggacgccgacgtcagccagccgccgccgcggcgcgtcagggcgtgggtgtgctgcgacgaccgcccggggctcctgtccgacctgggccgcgccgtccggtcggtcagcaacgcgtgccccgtccgcgtagagatcgccaccgtcggcgggaggacccgcagcgtcctggagctggaggtctgtgacgacggcgacgacggcagcgcaactgccgcggggaacgggagggcggtggcgctgtccacgctgcgcgcggccatgcgcgccgtgctgctcaaccgcgacgagcatgttgtcgccgccgccggggaaggatacaagcggccacgcttctccgcgcagatcgccagggttcagtga

SEQ ID NO: 89005 - DNA, 810 bp, Zea Mays
tcttcacaggcatcgcccaagagcaaaacatctctaatacacccaaagcaaatacgcacgcagtgatagccatggctcgtggcggatctggttgccgtcttctcgccctgctcctagtcttgactgccttcaatggcagctttgcagctcgacatctcttggacacagcagctgcgccagaggccacgcctgctcagccgtccattccagcggttccaaccaaactgcctccagtgccgaccataccagcggttccaaccacgctgacgctgcctccaatgccttccattccggaggtccccaagatgacaatcccaccaatcccgtccattcctatcccaaagctagccctgccaccaacagctgctggcgcaatcccatctctcccaaacccggtggttccaaccaccgtaccagctatttctgcagtcccggttaccctgccaccaatgccctcgattcccactaccttgccatccattccaactacgattccaacaacaatccctaccattcccggactccaggtgcctccattcaccgccccatccccacaaaccaccagcccttgaagttcgatgtagcaggagacttttctttacatgctgttagtcaggagtttggctcatcgtatatggtcgttttcagtgtgtgtgccatgtttgttctgctattttgatgatagtggctagcatgtggtgtgcttgtgattgcagccagtctattgtaccactttgttttgctgttattgaagtattacttggtctttatacattactgagccaaatgagattcctacattattcttgt

SEQ ID NO: 89006 - DNA, 243 bp, Zea Mays
aaggacttcgtgatgactactgggttggagttttatccccttggtgaagacccaaaaaatcttgctggatacatggttaagaacaaaggattcttgcctgcaactcaatcagaaattcctatccagcgcatgcagattagggacatcatattctccttgcttcctgcttgcaaggacccggacattgatactggtgtttcttttagtgcagacgccataatagccaatccagcagcatatggt

SEQ ID NO: 89007 - DNA, 1780 bp, Zea Mays
tgagttgagacattgcagtagcaattttaattaataaaaatgttggcaatttgcatttggtcaaatccatccagatacaacaggatgcagtgaagcgcatgagcacaagtctaacacgggatgcaatgcaagcaaagggcgtaatagtagtcgcggcctctagggtggcagcgggttattattcttggcagcgaacgcggtgacgaactggcagcgcagcgtttgttgtcgtcatcatctttcctcgtcgccggtctcagaactcgacgcccttgaagaccttgcgcacctgctcgagcgtgacgaagagcacaacggtgaagggcccctggcgcatcacggtggggatgaaccccttgtacagcgccatgggtccctccgacctgacggtcttgagggcgcagtcgacggcgccggcgtagggcgggggcgcgccgggcgccaccttcatgttcatcatcctcgtcttgacgacgtcgacggggttggacgcggcggcggcgacgatgccggcggtgaagctggcggccacgtgcgtggcgaggccgtcggcgcccgggccgcggcgcgccaggatggcctccttggcctggtcgtacgtggccagctgcgacgccgtgacgatcatggcgcggttgacggtgagcgaggacccgcgccagaggctgcgcacgccctcgtcgcgcgccatccggccgatggcgtcgccgacgccgcggtagttccggcgctccgcgaggggcaggcgcccgtccgcctgcatccgcaccatggccacgtcggccgggttgcccacggcggcgccgacgccgccggcgacgaggccggccaagatcttgcggtgcagcgggaggacgccgccgttctcccgggcccacctggtcttgaggatgtcgtacagccccatccgcgtggtggagtagagcgtctgccgcagcatggtggcggacacccccgagaagaggcccgcggcgccctcggaccgcaggatctgcgcgccgacggccagcggcccgggcttccgcggcggcgccgggatgtcgtggtggtgcgggagcgcgacggcgtggcccccggcgtggaaggcgagcgccgggcgcagcgccggctgcggcgccacggcggccgccgcctccccctgcagctgcatgcggaccttgatgaggtccagcgggtgggtggagcagccggccacgatggaggcgatgccgccctcgacgaatcccttgacacccatcgcttgcttgcccggtttcttctctccttttgggtttcaggagttagggagagacggatccgagagcaaagatgccaacaaaactaaaaacggaagctgagagccagctcgatcaaacggaaacgaaatccagacgggaggaaaggaagaagaagaagaaaaaaaggaaggcggagaatagctattgctgccaataggagctggggcacatctcactggagaccaggagatgggaatggagcgcgaaggctatgcaggaggagtgtgggacgctggccctctgtgacatatgctggtcgtgcttcctacttcctcggcgtcggatgtgtgggtgggggaagaaggcggcagggaggggacgcaatttatagctgggtggcgcggtgcgggaagggccagggaaggagacgaacagggggaggctccgcggttggggttccgcttccacggcctcgcgctcgcggtcggactggggaaggcagattcgcagtcgcggcgcggcgcgggcgggtgggagaggaaggcgacctggccgcccgagct

SEQ ID NO: 89008 - DNA, 1094 bp, Zea Mays
agacacagtgacggtggcggcggcgccgacttctccggtagtactcgctgtcctcctccctcaccttgcgcgccgcggactcggaggaggaagacaacccctgggtgcttaccaacgcgccagtggcctcctcggcgccggagaaccgcggcggccggtccgtggagtcgtcactcggcgcctagatgtatctgctgctcatctactggtgcgtcctgcccgcatttccgccaccagcatgccatagcgtacgccgagggcgataaataatatggtgcaaaatccagcattaatgtttgggagcccaagattcagcaggctaacaaatttggcttgtcctagctctggatctttgggggttcatttaaggaggatgtcaacagtatagaggctggttgatagaaatagaataatgcgtaccaggccacagggtgctagatgttgtgctctggttttattcagataaacaccaagatggctatcgcgactagcattctcaacatctcaaactacgcaggctcccaatgtgatatcagcatcttgatctagaagggcagcggatttctcgagggactacgacgggatgcctctagatgtacaaccccgactcccacttcttcctcttcctcatgtactggaccgattgcagcctagctggcgcgcttgggctactcaagatcctaatctacaaggtttatgtagatgggagtaccaccgtgacttgggagctaacttggataatgatctcttagttctcaagactgtaaattaccttttcctgcaccaagttgtgaagttgtttcctctgagatgaagcaaaaccaataagtatcttttcaaatttcagaaatcgcactgaagccatgagtgcttcatggaattcagtcatctgttggggtacaaatatgaactatagtttgcccccaaattttctctctttattttttcagtgcattaacattgatagtattggttttttcctaggaaattatgtctaaatagaagttcataactaattctgtaactttgatattaagatgggtgttcgcctgatgatttttaaatggaaaaggagaatacgatgagttttaaaa

SEQ ID NO: 89009 - DNA, 1065 bp, Zea Mays
agacacagtgacggtggcggcggcgccgacttctccggtagtactcgctgtcctcctccctcaccttgcgcgccgcggactcggaggaggaagacaacccctgggtgcttaccaacgcgccagtggcctcctcggcgccggagaaccgcggcggccggtccgtggagtcgtcactcggcgcctagatgtatctgctgctcatctactgcatgccatagcgtacgccgagggcgataaataatatggtgcaaaatccagcattaatgtttgggagcccaagattcagcaggctaacaaatttggcttgtcctagctctggatctttgggggttcatttaaggaggatgtcaacagtatagaggctggttgatagaaatagaataatgcgtaccaggccacagggtgctagatgttgtgctctggttttattcagataaacaccaagatggctatcgcgactagcattctcaacatctcaaactacgcaggctcccaatgtgatatcagcatcttgatctagaagggcagcggatttctcgagggactacgacgggatgcctctagatgtacaaccccgactcccacttcttcctcttcctcatgtactggaccgattgcagcctagctggcgcgcttgggctactcaagatcctaatctacaaggtttatgtagatgggagtaccaccgtgacttgggagctaacttggataatgatctcttagttctcaagactgtaaattaccttttcctgcaccaagttgtgaagttgtttcctctgagatgaagcaaaaccaataagtatcttttcaaatttcagaaatcgcactgaagccatgagtgcttcatggaattcagtcatctgttggggtacaaatatgaactatagtttgcccccaaattttctctctttattttttcagtgcattaacattgatagtattggttttttcctaggaaattatgtctaaatagaagttcataactaattctgtaactttgatattaagatgggtgttcgcctgatgatttttaaatggaaaaggagaatacgatgagttttaaaa

SEQ ID NO: 89010 - DNA, 929 bp, Zea Mays
agacacagtgacggtggcggcggcgccgacttctccggtagtactcgctgtcctcctccctcaccttgcgcgccgcggactcggaggaggaagacaacccctgggtgcttaccaacgcgccagtggcctcctcggcgccggagaaccgcggcggccggtccgtggagtcgtcactcggcgcctagatgtatctgctgctcatctactggtgcgtcctgcccgcatttccgccaccagaaatagaataatgcgtaccaggccacagggtgctagatgttgtgctctggttttattcagataaacaccaagatggctatcgcgactagcattctcaacatctcaaactacgcaggctcccaatgtgatatcagcatcttgatctagaagggcagcggatttctcgagggactacgacgggatgcctctagatgtacaaccccgactcccacttcttcctcttcctcatgtactggaccgattgcagcctagctggcgcgcttgggctactcaagatcctaatctacaaggtttatgtagatgggagtaccaccgtgacttgggagctaacttggataatgatctcttagttctcaagactgtaaattaccttttcctgcaccaagttgtgaagttgtttcctctgagatgaagcaaaaccaataagtatcttttcaaatttcagaaatcgcactgaagccatgagtgcttcatggaattcagtcatctgttggggtacaaatatgaactatagtttgcccccaaattttctctctttattttttcagtgcattaacattgatagtattggttttttcctaggaaattatgtctaaatagaagttcataactaattctgtaactttgatattaagatgggtgttcgcctgatgatttttaaatggaaaaggagaatacgatgagttttaaaa

SEQ ID NO: 89011 - DNA, 1414 bp, Zea Mays
acagacagaggacagggagcaaacaagaagcaaaggtgggggaagcagggaggcgaggcaagcagtggtgaaggggaacggagcgaggcttcggctggtgatgtagctgaggtgcccgatctttcggcgagtagagataattccgatttggcggaagatgacccttgcgatccgactacgacgagcaagcccgaggcgccaatgcaatcgctgaaccaactccctgtggttaccgaccttgctgatgcgagatcggcctgatcacgaagatcgtttcctgtacgcaatcgaagaacgaacaagaaaaagatgcgagcaatctaatctattactcgagggtggagttctgaatacacgaagacagcgcagatttgcgcgtgttcgagagtagctaaagctaacgtaaaacaaaactcgaagaacaaaggaggcgcagctcctgtttaaatagagagggggcgcagcccctaggggcggccaaccctaggtcgtccactatgggccacagttgggctggtcgtctattcttctgggccctcattctttagtacaatgacggagttaagatctctggcacgggcccgagtgattgacccagctaatgaaggaagtggcgcttgatgttgaggtgctgctggtgtagtcgtactcataatgatgtcctcgtcagctgggttccatggtgtgggtgtggttttggcgatagatggagactcaagcgtgggtggttgtgggcacgaggagccacacgaaagctggatgccacagcgaggaggaggaagagaaggagatggtcgtctcctccatatgcgcaagtcgttcaaggactcgctcaaggtgctcgaggccgacatccaacatgccaacaccctggcagcggatttctcgagggactacgacgggatgcctctagatgtacaaccccgactcccacttcttcctcttcctcatgtactggaccgattgcagcctagctggcgcgcttgggctactcaagatcctaatctacaaggtttatgtagatgggagtaccaccgtgacttgggagctaacttggataatgatctcttagttctcaagactgtaaattaccttttcctgcaccaagttgtgaagttgtttcctctgagatgaagcaaaaccaataagtatcttttcaaatttcagaaatcgcactgaagccatgagtgcttcatggaattcagtcatctgttggggtacaaatatgaactatagtttgcccccaaattttctctctttattttttcagtgcattaacattgatagtattggttttttcctaggaaattatgtctaaatagaagttcataactaattctgtaactttgatattaagatgggtgttcgcctgatgatttttaaatggaaaaggagaatacgatgagttttaaaa

SEQ ID NO: 89012 - DNA, 2086 bp, Zea Mays
cgctccggatgtctccagtttcggcgtaccgccgcgtgcgcttcccaaaacactcccgtctccccgtgcccgatacaaagcgcgagggggcgaaagcacgccacaactgcaccgcactctctgcctccctccgtccgtccgtcctcccgtcctcttccttgtgccttgtcctgcttctccactcgccactgccgcattctgcccaagtttgccgtactgccgcattccaccagccacccaccaggccaccacccagcactccagccgccagaacagagtctacggcgccgccgtcgcacgacaggagagggagagggagagagacgcgggctttgacttgccgccggtgcgtccgtgcgtgcctggtgggaggagtgggagacgccggtacagtacaggagccatggcgccgagctgctacgacgcggcagcgtccatgctcctctgcgccgaggagcacagcagcatcctgtggtacgacgaggaggaggaggagctggaggcggtcgggagaaggagaggccggtcgccgggctacggggacgacttcggcgcggacttgttcccgccgcagtcggaggaatgcgtggccggtctggtggagcgggaacgggaccacatgccggggccgtgctacggcgacaggctgcgcggcggcggcggctgtctctgcgtccgccgggaggccgtcgactggatttggaaggcttacacgcaccacaggttccgccctctcactgcctacttggcagtgaactacctcgatcgcttcctctcgctgtctgaggtgccggactgcaaggactggatgacgcagctcctcgcggtggcgtgcgtttctctggccgccaagatggaggaaaccgccgtcccgcagtgcctggaccttcaggaggtcggagacgcgcggtacgtgttcgaggcgaagacggtccagaggatggagctcctggttctaacaaccctcaactggaggatgcatgccgtgacgccgttctcctacgtggattacttcctgaacaagctcaacaacggcggcagcacggcgccgaggagctgctggctcttgcagtccgcggagcttatcttgcgtgcggccagaggaaccggctgcgtcgggttcaggccgtccgagatcgccgccgcggttgcagccgccgtggccggagacgtggacgacgcggacggcgtcgagaacgcctgctgcgctcacgtagataaggagcgggtgttgcggtgccaggaagcgatcgggtccatggcgtcctcggcggccattgacgacgctaccgtgccaccgaaatctgcgagacgcaggagctcccccgtgcccgtgccgcagagccctgtgggggtgctggacgcggctccctgcctcagctacaggagcgaagaggcagcgactgcgactgcgactgcgacttctgctgcctcacatggggcccctggctcttcaagctcgtcctcgacctccccggtgaccagcaaaaggaggaaactcgccagccgatgtgatggatcgtgcagtgaccggtcaaagcgcgcgcccgcccaatggaccaaagagtgaattgactagggcgtctgcttgctttctgatcaaagagtgcattgagaggcggcaaaatggaggaataaaggggattttggcatgacgagggcaaaggagttgatgaataaagacgcgacgaggtggacaacacctaaattgccgatcttttctttgcaaggggagtaggggacctgcttgggcctgggggagggtagtagacagcccagcacaaaaacctggttggtgtgccacgaccacaatgggcgcgccagccatggctttgtaggaaacacaagggcgctagaggagatccgatgggatgactcagaataaagatagtggagggaccagaccgtatgcagtatgtgcaacaactaggcactggcatgcttatgctcaagtaatctgataacttgaatgttgtgtatccgacaaactgcttctgtgaagagagaaatgcaggtagacgatgaatgtatgtgacaaaaagaatgtccgacccagatgagaaaataaaatatgaatccatgacaa

SEQ ID NO: 89013 - DNA, 1002 bp, Zea Mays
gaatggcctcacttctttttttccgcgtgattactactaactcgtgaccgatcctttctgcaggcttacacgcaccacaggttccgccctctcactgcctacttggcagtgaactacctcgatcgcttcctctcgctgtctgaggtgccggactgcaaggactggatgacgcagctcctcgcggtggcgtgcgtttctctggccgccaagatggaggaaaccgccgtcccgcagtgcctggaccttcaggaggtcggagacgcgcggtacgtgttcgaggcgaagacggtccagaggatggagctcctggttctaacaaccctcaactggaggatgcatgccgtgacgccgttctcctacgtggattacttcctgaacaagctcaacaacggcggcagcacggcgccgaggagctgctggctcttgcagtccgcggagcttatcttgcgtgcggccagaggtatacagtacagacgcaacggacatggctgccgttttaacatttgtcgagggaaacgggtgcatggaccatcgatcatcacgccgtttcgtacgtgctcttgtgaactaacgaacacggtctgtgcgcgtgctgttgcctttgttgcgcgacaggaaccggctgcgtcgggttcaggccgtccgagatcgccgccgcggttgcagccgccgtggccggagacgtggacgacgcggacggcgtcgagaacgcctgctgcgctcacgtagataaggtacgtagtgcattgaaggcagcaaagcgccgccatgcatgcggaatgcgatgcgaactcggttccgtcgtctagtttgtttaagctagtaaaacaaatgcgatcgaggccacacggggtcggttcgagatccagacccattcatggctggaaatctcgtactagccgtgcttggcgtaaacgcgccggccccggtaacagatgcgtacgtgaagcgcatttatgcccgcgcgtttgggtgtgtgagctccattgggtggcgggttat

SEQ ID NO: 89014 - DNA, 1467 bp, Zea Mays
gaatggcctcacttctttttttccgcgtgattactactaactcgtgaccgatcctttctgcaggcttacacgcaccacaggttccgccctctcactgcctacttggcagtgaactacctcgatcgcttcctctcgctgtctgaggtgccggactgcaaggactggatgacgcagctcctcgcggtggcgtgcgtttctctggccgccaagatggaggaaaccgccgtcccgcagtgcctggaccttcaggaggtcggagacgcgcggtacgtgttcgaggcgaagacggtccagaggatggagctcctggttctaacaaccctcaactggaggatgcatgccgtgacgccgttctcctacgtggattacttcctgaacaagctcaacaacggcggcagcacggcgccgaggagctgctggctcttgcagtccgcggagcttatcttgcgtgcggccagaggaaccggctgcgtcgggttcaggccgtccgagatcgccgccgcggttgcagccgccgtggccggagacgtggacgacgcggacggcgtcgagaacgcctgctgcgctcacgtagataaggagcgggtgttgcggtgccaggaagcgatcgggtccatggcgtcctcggcggccattgacgacgctaccgtgccaccgaaatctgcgagacgcaggagctcccccgtgcccgtgccgcagagccctgtgggggtgctggacgcggctccctgcctcagctacaggagcgaagaggcagcgactgcgactgcgactgcgacttctgctgcctcacatggggcccctggctcttcaagctcgtcctcgacctccccggtgaccagcaaaaggaggaaactcgccagccgatgtgatggatcgtgcagtgaccggtcaaagcgcgcgcccgcccaatggaccaaagagtgaattgactagggcgtctgcttgctttctgatcaaagagtgcattgagaggcggcaaaatggaggaataaaggggattttggcatgacgagggcaaaggagttgatgaataaagacgcgacgaggtggacaacacctaaattgccgatcttttctttgcaaggggagtaggggacctgcttgggcctgggggagggtagtagacagcccagcacaaaaacctggttggtgtgccacgaccacaatgggcgcgccagccatggctttgtaggaaacacaagggcgctagaggagatccgatgggatgactcagaataaagatagtggagggaccagaccgtatgcagtatgtgcaacaactaggcactggcatgcttatgctcaagtaatctgataacttgaatgttgtgtatccgacaaactgcttctgtgaagagagaaatgcaggtagacgatgaatgtatgtgacaaaaagaatgtccgacccagatgagaaaataaaatatgaatccatgacaaggggatgtgggtttagttctatcc

SEQ ID NO: 89015 - DNA, 106 bp, Zea Mays
ggtcgcatgagggataaagtccgcgcccggcttcactcaggtactaggtttaccggttaccatttttcccggcatgtgcttagtacgttcaaaagcttgactcagg

SEQ ID NO: 89016 - DNA, 1509 bp, Zea Mays
ctagtccactcttctggtcctctcgcttttgcgctcccttggtcgtcttcgtcccctgctcgtctcccgtccgttttcggatgcccactccgaccaaaaccctagctacttcgtgaaggtggaggggaggagatggcggcagcggatgggcgcagcggcgacttccgggtcaggggtggcagcgttgggggtcggatcgaccgactggtggtggagaacttcaagtcgtacaagggtgagcagacgattgggcctttcgtcgacttcacagccatcatcggccctaacggcgccggcaagtccaacctgatggacgccatcagcttcgtgctgggcgtgcgctcaacgcaccttcgaggcgcgcagctcaaggacctcatttacgccctcgacgaccgcgacaaggaggccaagggccgcaaggcttccgtccgcctcttctactgccaacccaaccaggaggagctctgcttcacccgcagcatcaccggcgccggcggcagtgagtaccgcatcgaccgcaaccaagtcacctgggacgtctacaacgccaagctcaggtccctcggcatcctcgtcaaggcccgcaacttcctcgtctttcagggtgatgtagaatccattgcctccaagaaccccaaggagctcaccgctctcctggagcagatctcaggctctgatgagcttaggagggagtatgacgagctggaggagcagaaagccagggccgaagagaagtctgctcttgtgtatcaagagaaaaggaccattgtcatggagcggaagcagaagaaggtgcaaaaagaggaggcagagaagcatctacgccttcaacaggacctgaaactgttgaagacagagcattacctttggcaactctataccatcgaaaaagacatagagaaaattgaagctgagcttgtggaggatagagaatctcttcagcaagtgcaggaagagaatcgatccagtgactatgaactgactgcaaaaaagaaggagcaaagtgcatttctcaagaaaatcacattgtctgagaaaagcataaccaagaaaaagcttgaactcgacaagaagcaacctgagcttcttaaattaaaagagcaaatatctcgtctcaaatcaaaaatcaaaagttgcaagaaagagattgacaaaaagaaggatgatcacaaaaaacatcttggagagctgagaaggctgcaaagtgatctggttgaggtcacagaagctattgaggaattgaatgagcaaggacaagatacaagtggaaaactgttattagccgacgaccaactccaggagtatcatagaatgtgagtgtgactagacatcttatgtgcagcgttgattttatatttagtctatctaggcgtcagcacacatgcggtgtattattattctaggataggaagaacatttgtgcctatgagttgagttgtactgttttgtctcagatgtgtactgggggctaatgttttatttaaagtgtggatgacttggacgcac

SEQ ID NO: 89017 - DNA, 199 bp, Zea Mays
gatctgcacagttagtttttgatgtcattcattttgaccgagttttggagaaagcagttctgtatgctgttggaaatacacttgtctgtgataaacttgatgaagctaaagccttaagttggagtggtgaaaggtataaagttgttactgtcgatgggattctgctgactaaatctggcacaatgactggtggaacaag

SEQ ID NO: 89018 - DNA, 1908 bp, Zea Mays
gggatgacagcacaatagaatctttgaagaagaagaaaaatctgttggaaaataaaatgtcagaacttggttcccccagggagttgcagagaaaagagcttgccatatctgagaaaataactggacttgagaaaaagttgcactactcgaatgttgaacagaataaccttagagggaaactagctaaattagcatctgagaggagtaatattgagacagagattaatcgtctgaagcctggagaggaggagctcgagacccgtattggtaaaagggaagcagaagcaagaaaacttgagaaaaaaattaatgacattgtggacaaggtgtacagagattttagcatttcagttggtgtgaagaatatccgcgagtatgaagaaaagcagctaaaagatgctcaagcactacaggagaggaagctaagcctaagtaaccaaatgtcaaaattgaaataccagcttgaatatgaacaaaagcgagatatgcatgcaccaattgtgaagttaacggagacacatgagtccttagagaaagagcttaagggcttacaggagagagagtctggtgctaaggctgaagctgaacaaattttggctcagatggaagaactgaagactgaggctgatgactggaaatccaagtcggatgaatgtgagaaggttattgatgaattgaaggagcagaatggtaatgttgcatctacattggcaaagatggatcgccaagtgaaatcaaaggagggacaacttgcacaacttatatcacgccagcgagaggttcatgagaagtgtgaacttgaacagttgaagcttcctactgtaaacgacccaatggataccggaacatcctcacaagaaccaatccttgattacagccagcttagcaaaagccatctgcaggatatacgaccttctgaacgtgacaaacatgaggcagagttcaaaaaaagaactggtgtgctactagctgatattgagcgcactgctcctaatctaaaagccctggatcagtatgatgcactccaacaaaaggaaaaggaggttactgaaaggtttgaagcagctaggaaagaagaacgagagatatctgacaaatataactcagtcaagcaaaggaggtatgagctgtttatggaggccttcgatcacatatctaaaggcatcgacaaaatctataagcagctgacaaaaagccatacacatccactcggaggaacagcatatttaaatctagaaaatgaagacgaaccgtttcttaatggaatcaagtacacagctatgccacctaccaagcggtttagagatatggaacagttatccggtggggagaagactgttgcagcactggctttgctttttgccattcacagttttaggccatcaccgttcttcatattggacgaagtagatgctgctctggacaatttaaatgtggccaaggttgccgggtttatcagatcaaaatcatgtgaacgtgttggtgatgaacaaggcagcgatggcgagagtggttttcagagcatagttatatctctgaaggacagtttctatgacaaggccgaggcacttgttggtgtttatagggactcagaacgaagttgctcgaggactctcaccttcgacctgagaaagtatagggaatcgtgaagcagcttttgttgaatgtttgtactatgtgtgtagttgcctgctccatcagcttgctagatagctgtcgtgagccttcgatgttttaactatctgtatactcctagtcctacataagtgctagctgaacaaggaccctgaaatattcatttggtaggtggataactgatgtttcgaacacgcataaacttttttacctgttgtatgaagccatttctccgaattactataatctgtttaattatttcgtggtgttcaa

SEQ ID NO: 89019 - DNA, 775 bp, Zea Mays
gttctttcgttcccctttccgccgtgcctcccactaaaccctagatctctctctctagaatgccgacgccttcggctctcagcaagcgcggcggcgacggcggggacggcatcctggccgccctctcccgttcgcaggtggcggcgcacgggcgagaggcggcggccgtggcgaagaagctgctgcggagcacggggaaggcggcgtggatcgcggggacaaccttcctggtgctggtggtgccgctgatcatcgagatggaccgggagcagcagctcaacgacctcgagctgcagcagcagacgcttctgggcggggccccgccgccgccgccgaccaagtagatagatccgtgcatcgaccctttcgtccccccccccctctccctctctagaggtatctgttactatcaagttcatcattcgagttactatcaagttcatcattcgagttactatcaagttcatcattcgagtcgagttgaggctaagggagttaccgagtcgacctgttgtcggttggtcgtaatcaaagaggtcaaaactgctttgttgatgttcgttctcgatgcaacactagtttagtttcccttccatcaattgaaacggattgatcagataagttgagctcgttcgctgctgctgctgctgctgccaggcgctgcgatccgctgcctgcgtttttgcacgctgcagcttgttcttcctatacctgcctgtgttagcgtttttaatgaataaatatacttcttgctgttattcagcttatggcttta

SEQ ID NO: 89020 - DNA, 2307 bp, Zea Mays
taaattgagcaagggagagaggggcgaccctgagcctgagctgcacacctcatcatgacagcgcagcgcagcgcagactgtggcagcagagcagagtgtgcgcccagcgtcctcgtggtgagggagcgccagcattgcaagcggctggttctctgctgaaatagaattcaaggcatggccagctcggtaggtgagggtggtggtcaacatcgaatgccctcactcactcacaaacactctggtgctcatcgtctatctgtcgtcagatgctcatcttaaaacctttacatcttgagccgagctgagctgactagcagagggccatcttctactcttctctcccgtctctcccagcccccttgtccaacggttcagcctgctcaattttagtgaccagttacggcaaatgcagccctcggcggacagcaggaagaagaagcggcggcggcggcggcggaggaggctggcggcatgctgctcatcgagacctgctgccggcgccgctcaaggtcagtgtcagtgcggctcctctagccccggtggcggcggcggaagcggcagcctcgtggcaagaacaccgcgcgcgttctctagctgctcaagcgccgccgcctcgtctgcctgcgcgccggcggcggccgtccatctcggcacccagcacaagctgacggcgctcctcgtcgcgctcgcgctcctcctcgtcctccctcgccctcctctcgtggcaggggtcccggtgtcgccccgcaggatggcgaggatccgcagccacgtggagaggatcaacaagacccccgtgcgctccatccggagccaggacggcgacaccatcgactgcgtggcggcgcacgagcagcacggcctggaccacccgctcctcagggcgcacgccgtccagacggagccgcccgaggcgccgaggggcggcggcgcgctctccttcccgtctggctctgcgacgaacgggagcgggagcggcagcggcagcggcgcaggcaaggacagcaggcggggcgcgtggcagacgtggcaccacggcgggcactgtccccggggcacggtggccatccggcggacgagcgccgaggacgtgctgcgcgccggatccgtctcccgcttcggccgcaagaggaggcaccggaaggccgccgccgccgccgccgccgccgccgccgccgcgcgcgcggcctacgcgccggacgtcatcaccggcaacgggcacgagcacgcgatcgcgtacacggcgccgtcgcagcagccggtgtacggcgccaaggccaccatcaacgtgtgggatccggccatccaggagtccaacggcttcagcctctcccagctctgggtcctctccggctccttcaacggctccgacctcaacagcatcgaggcaggatggcaggtcagccctgagctgtacggggacagcaggccgaggctcttcacgtactggacaagcgacgcgtacgaggctactggttgctacaacgcgctgtgcccggggttcgtgcagacgagctcccgcatcgccatcggcgcgtccatctcgccggtgtcgtcggccggcggcgcgcagtacgacatgacgctgctggtgtggaaggacccgaagctgggcaactggtggctcagctacggggaccagctggtggggtactggccggcgcagctgttcacgcacctgtcggaccacgccaccatggtggagtggggcggcgaggtggtggacaccaggcccggcggggcgcacaccgccacgcagatgggctcgggccgcttcgccgccgagggcttcggccgcgccagctacttccgcaacctggagacggtggacgccgacaacagcctggccgaggtggcgctcgacgccatccagacgctggccgaggaccccgcctgctacgacatacgcaaggcctacgacgacgacgacgacgacgacgacgacggccagcactccgcccgcggaggctggggaacccacttctactacggtggcccgggacacaacccggcatgcccctgatggccggatctctgtcctctgatggagttgtgacgatgagcgcgcgcgcggcacctgaccggccgtacgtaccatggatggcatgcatttgatttaacttccgcctatatatgtgtacgtggccaaattttgacgtacgttcgcacgtgcctttgctagtatttcaagctttcgctaattctacctgtaaggacttgcaatatgtaattaactgttgatttatctgttatttcaatcgatcccaaggatcgtcccagatttaattttcctcgaaacatagacaa

SEQ ID NO: 89021 - DNA, 1078 bp, Zea Mays
ctcatcatgacagcgcagcgcagcgcagactgtggcagcagagcagagtgtgcgcccagcgtcctcgtggtgagggagcgccagcattgcaagcggctggttctctgctgaaatagaattcaaggcatggccagctcggtaggtgagggtggtggtcaacatcgaatgccctcactcactcacaaacactctggtgctcatcgtctatctgtcgtcagatgctcatcttaaaacctttacatcttgagccgagctgagctgactagcagagggccatcttctactcttctctcccgtctctcccagcccccttgtccaacggttcagcctgctcaattttagtgaccagttacggcaaatgcagccctcggcggacagcaggaagaagaagcggcggcggcggcggcggaggaggctggcggcatgctgctcatcgagacctgctgccggcgccgctcaaggtcagtgtcagtgcggctcctctagccccggtggcggcggcggaagcggcagcctcgtggcaagaacaccgcgcgcgttctctagctgctcaagcgccgccgcctcgtctgcctgcgcgccggcggcggccgtccatctcggcacccagcacaagctgacggcgctcctcgtcgcgctcgcgctcctcctcgtcctccctcgccctcctctcgtggcaggggtcccggtgtcgccccgcaggatggcgaggatccgcagccacgtggagaggatcaacaagacccccgtgcgctccatccgggtaagaacacgacaacagcgcggggaggccgaaccaatcgatcggttattccaacgatccatccatggatgaagcgacaacaactgtgtttttgtttttcgtttttctgtctgtctcccggttgacgaccacgcatacatacatacatgcatggctgatggacggtggggggtcgtcggctatcgtttgtttcagagccaggacggcgacaccatcgactgcgtggcggcgcacgagcagcacggcctggaccacccgctcctcagggcgcacgccgtccagacggagccgcccgaggcgccgaggggcggcggc

SEQ ID NO: 89022 - DNA, 1223 bp, Zea Mays
cttctactcttctctcccgtctctcccagcccccttgtccaacggttcagcctgctcaattttagtgaccagttacggcaaatgcagccctcggccgccgccgccgcgcgcgcggcctacgcgccggacgtcatcaccggcaacgggcacgagcacgcgatcgcgtacacggcgccgtcgcagcagccggtgtacggcgccaaggccaccatcaacgtgtgggatccggccatccaggagtccaacggcttcagcctctcccagctctgggtcctctccggctccttcaacggctccgacctcaacagcatcgaggcaggatggcaggtcagccctgagctgtacggggacagcaggccgaggctcttcacgtactggacaagcgacgcgtacgaggctactggttgctacaacgcgctgtgcccggggttcgtgcagacgagctcccgcatcgccatcggcgcgtccatctcgccggtgtcgtcggccggcggcgcgcagtacgacatgacgctgctggtgtggaaggacccgaagctgggcaactggtggctcagctacggggaccagctggtggggtactggccggcgcagctgttcacgcacctgtcggaccacgccaccatggtggagtggggcggcgaggtggtggacaccaggcccggcggggcgcacaccgccacgcagatgggctcgggccgcttcgccgccgagggcttcggccgcgccagctacttccgcaacctggagacggtggacgccgacaacagcctggccgaggtggcgctcgacgccatccagacgctggccgaggaccccgcctgctacgacatacgcaaggcctacgacgacgacgacgacgacgacgacgacggccagcactccgcccgcggaggctggggaacccacttctactacggtggcccgggacacaacccggcatgcccctgatggccggatctctgtcctctgatggagttgtgacgatgagcgcgcgcgcggcacctgaccggccgtacgtaccatggatggcatgcatttgatttaacttccgcctatatatgtgtacgtggccaaattttgacgtacgttcgcacgtgcctttgctagtatttcaagctttcgctaattctacctgtaaggacttgcaatatgtaattaactgttgatttatctgttatttcaatcgatcccaaggatcgtcccagatttaattttcctcg

SEQ ID NO: 89023 - DNA, 3499 bp, Zea Mays
tccattttttgtagaaaaacagctctgcaggaacacacatgaaaaaacaggcgtgggaggcacgcgtgatggaaaaaaaacggaggtggcacatgaaaatacagggtgtaaggcatgtgtgatggggaaacctgtaaaaagaacaggagtatggaggtgaaaggaaaaaaaagtaaaaataggaacacatggagggagaaaaattaggtggaacatggtcacagaaaaatctagaggtagtccgggagaaaatctggaggtataatgtaaaaaaagtccaggtcacatgtgggatgtaagggcgcgaggacactttaggaaggaagaaaagacggagtggggagttgaccctaccaaagagataccttcaagtgcagctacaaccaagtacactgatttcctacttgcaactgcggctggaaaagttgatggcacaaaaggttctgacaaaatggttactccatttgagaagactaaaattgctgcatacattgttggggccataactccatgcatgaggctttatgcatatctaggcaaagaactcatggctttccttaaacaagatgaaaatcatccatataagaaatggattaacacatatgcatccagtgattttgagaacaatgcactccaaatagaagaattgctggacaaactgagtgtatcattaactggtgaggaacttgagattattggcaagctctaccagcaagctatgaaactggaagtggagttcttttctgctaagcttgtagaccaacctgttgtagctccactttcaagatattgtgatccaaaatataaactcttgatcttctctgattttgatttgacatgcactgttgttgattcgtctgccattttggcggagatcgcaattttgtcattccaaaaggcaagtcaaagtgggattgataataacctcgaccgtgcaaaatcgggagaactgagaaatttgtggaacatgctctctaagcaatacatggaagagtatgaggaatgcatggaaagactacttcctccagaagaatcaaagtcactagattatgataaactgtataaaggcctggaggtgcttgctgagtttgagaaggctgcaaattctagggttgtcgactctggtgtcctgaggggaatgaatttagaagacatcaggaaagctggggagcggcttattcttcagggtggctgtaaaaatttctttcagaagattgtaaaaacaagggagatcctcaatttggatatccatattctttcctactgctggtgtgcagagcttataagatccgccttctcatcagccggctgtctagatggtttgaacatacatgcgaacgagttcgcctttgaggaatctgtttcaactggtgagattgacagaaagatccagtccccgctagacaaggttgagaagttcaagagcatcagaagcgacgcggacagcacggtgccattcctgtctgtttacatcggagactcggccggtgatttgctctgcttattggaggcagatatcggtatcgtcgttgggtcaagcacaagcttgcgtagagtgggcagacagttcggtgtttcctttgtcccgttgtttctcggtctagtggagaagcagaggcaactgatggatgaagatgcgtccgtgttcaagccgcggtctggagtcctttatacggtctctagctggtcagaaatacacgccttcgtgctgggaagcgatttcagctgatggatctgctgcttcttttctccatctttttccccttgagaagcaaaaaagcttttgccggttgattctgatgcatacgatgcgtgaatcctaatgtggtcattttatgaaagccacatgtcgattctggctaccactatgtatgaatgaatacctgtagtttgtggtgtggaatgggttaagtttgtgcccgtgaattgtgatcaatgtatcattgattcatccttgttccatttgggactaatttctgggtgttgctggcagcaactacagtatactggatgaatgatgaagtacaactcgtttttatttcagattctcagcaggaagcgtactagtactagccactagggcgaaatgcatgctactagatgtatgatgtgtcatatcggagtacaaatactgatgaactgccagcctggggttcggatgggtgcataatatatgatagaatatgaatgtggtctgttttcatatgctgtatcgtgttttagctagttgaaggtggcggcggcgcgggcgtcgacggcgaggatggtgctgaggttgagcgggtgcatgtactcctgtgggccgtccatgaactggctgacgatgatgcggttggccttctccgtggggtggaagttgtcccagaaggcgtagacgctgcggtccgggcagacgctggacgcggcggtgcagagccccacgccgttgtatggtccctggccgcagcacgcgaccttggaggtgacgaagccgtaggccgccgggtcggagatgaagtccatgtgcatccggtaggcgttgacggcgacgaagacgtcggcgccgagctccgcgttgacgcccttgatcatgtccaccagctgcgggttgtagagcgcggcggcgcgctgcagctcggcgtcgcactccccgtcgcggctgccccgcagcgccagctcggctggggcgcaccccagcgggcccgaccccgtgaccagcacccggcgcgcgcccagcgagtagagctgccgcagcaccttggcgtactcggacacgacgtagcgcacgtagtccggcagcgcgaactcgcgggaccgcgccgagaagggcaccaggtagtagttgttgatgaagtcgttgccgcccagggtgacgagcacgagcgctccgcggacgaggcgcgcggcggcgtcctcgccgacgaggcggctcaagcggtcctggtactgccggaagtagcgcagctgcttctggacgcggatgatgttggcgaactggacccccgtgtcgttgagcacgcccacgcccgccgacgcgaagttggcgcccaccagcagcttccgcccgtccaggtgcgggctcaggtacggcagcgccggctccgcgcccaggtactcgctgatgatgtccggcacgttcttgccgttggagaagcggcccgtcgcgcggtgcgtcgggtagtcgaggccgtacggcggcgagtcggcgcgcgccgtcgtggccaggtagttgttgttgccgctgtccaccagcgagtcgccgaagacgaagaaggcgcggggcggggtcggggtggccgtggctgggcgcacctgcagcagcaggaggacgaggaggaagcacgcagtggctgcgacgagcctgccacggctacctgctgctcctggaacggaaagcattctgctgctgcttcttcgccgctgctctgctcagctgctgctgcgggacgcctatataacaggaagaagataacggggagagtgggatgatcaatagtatacgggctgatggagctgctgc

SEQ ID NO: 89024 - DNA, 2449 bp, Zea Mays
gctcacgccgctccggacaccggagagggagacggacaagaaaggggaccaggcgaccacccggccctcggcaatggggtcctgtcctcctcctccgccaccgcagatggctcctgtcctctcgcgatttcccatcacccccaaacccgaccccgacggtccaagcccttcgcaatcccccatccccgtcgcagaacggtcgtcgctgatgctcgcgctcaccccggagctttgcgagattcaccaccgggagcttgctccttcccccgacgacgatccctccttcgctcactgccttcgccaataccaactccacctcgaagccctcgccgcccgtctccgcccgccctcttcctcctcacccgccgccacacctgttgcacgagtccctcctccgcctccatctcttccccctcagcaggggcagcaacaacaagcaggcgcaggcggaggatccaactccagctctaagaagcgcgcgcgcgccgccactgaggtggtgcgcgccacccacctgagcccggctgaccatctccgctaccgcgccctcgtccgccgcgcgcggctcaccttcgaggcgctccgcagcaggtaccagcgccaggagacctccgccggcgtccgcaaccgccatgacctccgcgcctcgagccagatgctctccgccggccactggctccaccgcgaggtccgcctcgtcggcgacatccccggcgtcctcgtcggcgacgccttctactaccgcgccgagatctgcgtcgtcggcctccacaccgcgcctcaggccggcatcggctacatccccggtagactcctcgacgtgggccagtccatcgccacgagcatcgtctcctccggagggtacctcgacgacgaggacaccggcgacgtcctcgtctacacaggcagcggcggccgccagcgcaaccgcgtgaaccactccgccgaccagacgctcgagcgtggcaacctcgcgctccacaacagctaccagtacggcgtggaggtgcgcgtcatccggtgccacgacgtcgaccaaggcccccaccgcaaggtctacgtctacgacggcctctacagggtcgttagctccactttcggccccggcaagtccggccacgacgtctgcaagttcaagctggtgcgtctccccggccaggacgagctagccagcaagacctggcacaacgcgaagctgctcaaggagtctatggacgccagaatccgcccgccaaggtacatctccctcgacctctcaaaggggacggaggtccttcgcgtccccgtctgcaacaagctggacgacgacaggtctcccctgatgtttatgtacattgtccgccctgagtttccagtgccgccatcgcacgggccagtcaggcagcacaggggctgccactgcgcgtcgggctgtggctccaagtgcagatgtgggaggaagaacggcggggggccagtgtacaccgaggatgagactctggtgatggggaggccggtggtgtatgagtgcggcgctctgtgtgggtgccccatgacctgcgtgaaccgtgtgacgcagcgagggatgaagcaccggttggaggtgttccgctcccatgagacaggctggggtgtccgggcgcttgacctgatacagccgggagctttcgtgtgtgagtacagtgggcatgtggtcgcgatagatgatcagtcaggcagtgcgttaatggagggtcgcagcatcattgatccaaggaggtttccggagcgatggagggagtggggagatgcatcggctgttgaaccaagcatcaggagacgccagttcaccaagtatgcagggccagactatgttcttgacgtgtcggataagaggaatgtggcctgctacattagccacagctggacccctaatgtgttccttcagtttgtgttgcgcggcaatgaggacgaatccttccctcacctgatggtttttgccatggagaccatcccacccatgcgtgagctgagcatcgattatggaattgatgaggagttgagtgcaagctgatgctggttctgaggcaacagtgtggcgaaggcttactggactttttagatggcagtgtaggcgaggaattttttggggataaccatacatgataccttggtttagttttgcgctagtttgcaccctcaaaatagttagttctagctctgagagtatcaaaaggtgctcacatttcttttgttgccactaatccttgcttcagttatagggcttacctgcaaaaggcatgctgttcttttactagtgttgtgcacttgtgctggtatgattaatggctgtcacaaaaagactgtttagcaactgtgtactgtggatgtttatgaactaatcttttgtggtagttacatgaatgaacagctgctttacataggggtttgtttgccttgtgcaaaaccctcaatctggacaattcacatg

SEQ ID NO: 89025 - DNA, 426 bp, Zea Mays
gacaacagaagagagatcaccagggtcgcttgcctgtctgagagaggaagacaacaagagatggacgagatcatgaacaaggtgggtgtttactggatggggccaccggccaacaaggagatctcggcaggcgacgaccttgaatcactctcgaccagcgtcggggatggagtggaatggctggtgaaaaagttgaagggcaagatgcagaagccactggtggacctgcttagcacaacctccctgtgggtggacaggatcaagaccaaggtgctcatctcggctagggtcaccattgttaaggccgccgctgccaaggtctacttcactatgaggatcaagtggtcgcgcaacgggacgcctatgaacaaatgtgtttgctgcacaccgagatggacaaatggttgctttcagttgcaggaataa

SEQ ID NO: 89026 - DNA, 1602 bp, Zea Mays
atctccactcgatcctccgtcttatcaccggtgaggtactgaggtgagacgatctccgccaccatggcctccagcacctccctctccctttgcttgcacgcctcgtcgccctcgtcctcgtctcctggactccgccgaccctccctcgcctcctcctcgtcctccaggtccgagagaacgcgcaagatcagggccaaggcggtcagggaggactggaggcagaaatccaagcccatccctcctggcgccgtctaccctgccaaggaccactgcagccgttgtgggctctgcgacacatactacgttgcgcatgtcaagactgcctgtgccttcctgggagacggcatgtcccgtgtcgaggatcttgagcgacaagtccacgggagaggccggaaggaaggcatggatgaaatgtactttggagtctatgaccaactcttgtatgccaggaagaccgaacctgttgaaggagcccagtggacgggaatagtgacaacaatcgctgtcgagatgctgaaagcaaacatggttgatgctgtggtttgtgtacaaagtgatcctgacgacaggcttgctccaagacctgttttggccaggacaccagacgaagtaattgcagccaaaggtgtgaagccaacattatcaccaaatctcaatacacttgccttagtcgaggcagctggtgtaaagcggcttcttttctgcggtgtgggctgtcaagtgcaagctttgagatctgtagaaaagtaccttggtttggaaaagctttatgtgcttggaacaaactgtgttgacaatggtacgcgtgaagggcttgataaattcttgaaagcggcaagcagtgagccagaaactgttatgcattatgaatttatgcaagactataaggtgcatctaaagcatttagatgggcacattgaagaggttccttatttttgcctgccagcaaacgacctggtagatgttattgcaccgtcatgctatagctgctttgactacacaaatggcttggcggatttagtggtggggtatatgggagtaccgaaatatgctggggtctccatgacacagcatcctcagtacattacagtcaggaacgatcgtggacaggagatgctgaacctggtagctggccttctggaaagcacacctacaattagcagtggctccaggcaaccgtttgttatggagacagtgaaagctgacgatgccgcaaaactgggtacctcccctaatcaccatttgtatggaatactagtacttagcattggaatagaattagtagtaacaatgacgatccgtttggcttacattcatgtaaataaacaaacgaatggatctacagggaaaggcccttcgaaaccagctcctagattcgtcggcgacattctggccttcctgctgaacttggttggacccaagggtctggagttcgcacgctactctctggactatcacaccattcggaattatctgcatgttaggcgggcatggggaaagcaaagagctgagcagcacatcccggggtatgccaagaagatcgtggaggcctacgacaaagacggacggatcgaggcaatggttacgcagtcaggtgactga

SEQ ID NO: 89027 - DNA, 2205 bp, Zea Mays
atctccactcgatcctccgtcttatcaccggtgaggtactgaggtgagacgatctccgccaccatggcctccagcacctccctctccctttgcttgcacgcctcgtcgccctcgtcctcgtctcctggactccgccgaccctccctcgcctcctcctcgtcctccaggtccgagagaacgcgcaagatcagggccaaggcggtcagggaggactggaggcagaaatccaagcccatccctcctggcgccgtctaccctgccaaggaccactgcagccgttgtgggctctgcgacacatactacgttgcgcatgtcaagactgcctgtgccttcctgggagacggcatgtcccgtgtcgaggatcttgagcgacaagtccacgggagaggccggaaggaaggcatggatgaaatgtactttggagtctatgaccaactcttgtatgccaggaagaccgaacctgttgaaggagcccagtggacgggaatagtgacaacaatcgctgtcgagatgctgaaagcaaacatggttgatgctgtggtttgtgtacaaaggcacccaaacaagaatcaaatgccacatcattctttctcagtgctatgcacaagcattaccacatggattcaaataatgttttttaccccctctgcagtgatcctgacgacaggcttgctccaagacctgttttggccaggacaccagacgaagtaattgcagccaaaggtgtgaagccaacattatcaccaaatctcaatacacttgccttagtcgagctggtgtaaagcggcttcttttctgcggtgtgggctgtcaagtgcaagctttgagatctgtagaaaagtaccttggtttggaaaagctttatgtgcttggaacaaactgtgttgacaatggtacgcgtgaagggcttgataaattcttgaaagcggcaagcagtgagccagaaactgttatgcattatgaatttatgcaagactataaggtgcatctaaagcatttagatgggcacattgaagaggttccttatttttgcctgccagcaaacgacctggtagatgttattgcaccgtcatgctatagctgctttgactacacaaatggcttggcggtaaggtttccatcattttgaatttgaatagggtcccttgttttgaataggaactttctttctagtgctcatctgcacaaatagacagaagttgtacttcctagtgctcatctgcacaaatagaaatgattggatcacgtgtcgtttagaaaagatggaataatcctgaaacacactagactgaatcatctatgtgttgcatgacgtggactgtgtcgttcttattattacgcactaacatagctgaactaattctcttgacctcgagttgcctgggtgcctcttcaaccttcatgttcagaatagcatttgttgtgagatatcatctgttatcttggtatatgtcttcagtctgctctcttggagcagacaaacagctcagagtcactatgttgtttggttaaatgtctgcaggatttagtggtggggtatatgggagtaccgaaatatgctggggtctccatgacacagcatcctcagtacattacagtcaggaacgatcgtggacaggagatgctgaacctggtagctggccttctggaaagcacacctacaattagcagtggctccaggcaaccgtttgttatggagacagtgaaagctgacgatgccgcaaaactggggaaaggcccttcgaaaccagctcctagattcgtcggcgacattctggccttcctgctgaacttggttggacccaagggtctggagttcgcacgctactctctggactatcacaccattcggaattatctgcatgttaggcgggcatggggaaagcaaagagctgagcagcacatcccggggtatgccaagaagatcgtggaggcctacgacaaagacggacggatcgaggcaatggttacgcagtcaggtgactgactcacaccattcacactctactagctggtagtatttgtatactagctggtagtatttgtactgcattgtagtaaagattaaggaatgtagaagaattgtttgtgatgtgacgtagtggcgatgtatacagtagaatgtataggctgcatggcagcagctcagatctgtatgtacatcctgcgcttgccagtttctagtttgcatttgcttttctgggc

SEQ ID NO: 89028 - DNA, 2426 bp, Zea Mays
atctccactcgatcctccgtcttatcaccggtgaggtactgaggtgagacgatctccgccaccatggcctccagcacctccctctccctttgcttgcacgcctcgtcgccctcgtcctcgtctcctggactccgccgaccctccctcgcctcctcctcgtcctccaggtccgagagaacgcgcaagatcagggccaaggcggtcagggaggactggaggcagaaatccaagcccatccctcctggcgccgtctaccctgccaaggaccactgcagccgttgtgggctctgcgacacatactacgttgcgcatgtcaagactgcctgtgccttcctgggagacggcatgtcccgtgtcgaggatcttgagcgacaagtccacgggagaggccggaaggaaggcatggatgaaatgtactttggagtctatgaccaactcttgtatgccaggaagaccgaacctgttgaaggagcccagtggacgggaatagtgacaacaatcgctgtcgagatgctgaaagcaaacatggttgatgctgtggtttgtgtacaaaggcacccaaacaagaatcaaatgccacatcattctttctcagtgctatgcacaagcattaccacatggattcaaataatgttttttaccccctctgcagtgatcctgacgacaggcttgctccaagacctgttttggccaggacaccagacgaagtaattgcagccaaaggtgtgaagccaacattatcaccaaatctcaatacacttgccttagtcgagctggtgtaaagcggcttcttttctgcggtgtgggctgtcaagtgcaagctttgagatctgtagaaaagtaccttggtttggaaaagctttatgtgcttggaacaaactgtgttgacaatggtacgcgtgaagggcttgataaattcttgaaagcggcaagcagtgagccagaaactgttatgcattatgaatttatgcaagactataaggtgcatctaaagcatttagatgggcacattgaagaggttccttatttttgcctgccagcaaacgacctggtagatgttattgcaccgtcatgctatagctgctttgactacacaaatggcttggcggtaaggtttccatcattttgaatttgaatagggtcccttgttttgaataggaactttctttctagtgctcatctgcacaaatagacagaagttgtacttcctagtgctcatctgcacaaatagaaatgattggatcacgtgtcgtttagaaaagatggaataatcctgaaacacactagactgaatcatctatgtgttgcatgacgtggactgtgtcgttcttattattacgcactaacatagctgaactaattctcttgacctcgagttgcctgggtgcctcttcaaccttcatgttcagaatagcatttgttgtgagatatcatctgttatcttggtatatgtcttcagtctgctctcttggagcagacaaacagctcagagtcactatgttgtttggttaaatgtctgcaggatttagtggtggggtatatgggagtaccgaaatatgctggggtctccatgacacagcatcctcagtacattacagtcaggaacgatcgtggacaggagatgctgaacctggtagctggccttctggaaagcacacctacaattagcaggctccaggcaaccgtttgttatggagacagtgaaagctgacgatgccgcaaaactggggaaaggcccttcgaaaccagctcctagattcgtcggcgacattctggccttcctgctgaacttggtcagttcttggtcgtctgcagaggagggatggcatgagatttgtaacgttaactgaacacgagtacataaccaggctgtgctgtatgatatgctgtttcaggttggacccaagggtctggagttcgcacgctactctctggactatcacaccattcggaattatctgcatgttaggcgggcatggggaaagcaaagagctgagcagcacatcccggggtatgccaagaagatcgtggaggcctacgacaaagacggacggatcgaggcaatggttacgcagtcaggtgactgactcacaccattcacactctactagctggtagtatttgtatactagctggtagtatttgtactgcattgtagtaaagattaaggaatgtagaagaattgtttgtgatgtgacgtagtggcgatgtatacagtagaatgtataggctgcatggcagcagctcagatctgtatgtacatcctgcgcttgccagtttctagtttgcatttgcttttctgggcatgccttttgttttaattatattgtctttgataagtccaagataaaagaagccacagagtcctcaaatgttggaaatcgccaagttaatggctgaattttgttgcgtcaatctaagcacaa

SEQ ID NO: 89029 - DNA, 1749 bp, Zea Mays
tctccactcgatcctccgtcttatcaccggtgaggtactgaggtgagacgatctccgccaccatggcctccagcacctccctctccctttgcttgcacgcctcgtcgccctcgtcctcgtctcctggactccgccgaccctccctcgcctcctcctcgtcctccaggtccgagagaacgcgcaagatcagggccaaggcggtcagggaggactggaggcagaaatccaagcccatccctcctggcgccgtctaccctgccaaggaccactgcagccgttgtgggctctgcgacacatactacgttgcgcatgtcaagactgcctgtgccttcctgggagacggcatgtcccgtgtcgaggatcttgagcgacaagtccacgggagaggccggaaggaaggcatggatgaaatgtactttggagtctatgaccaactcttgtatgccaggaagaccgaacctgttgaaggagcccagtggacgggaatagtgacaacaatcgctgtcgagatgctgaaagcaaacatggttgatgctgtgtgatcctgacgacaggcttgctccaagacctgttttggccaggacaccagacgaagtaattgcagccaaaggtgtgaagccaacattatcaccaaatctcaatacacttgccttagtcgaggcagctggtgtaaagcggcttcttttctgcggtgtgggctgtcaagtgcaagctttgagatctgtagaaaagtaccttggtttggaaaagctttatgtgcttggaacaaactgtgttgacaatggtacgcgtgaagggcttgataaattcttgaaagcggcaagcagtgagccagaaactgttatgcattatgaatttatgcaagactataaggtgcatctaaagcatttagatgggcacattgaagaggttccttatttttgcctgccagcaaacgacctggtagatgttattgcaccgtcatgctatagctgctttgactacacaaatggcttggcggatttagtggtggggtatatgggagtaccgaaatatgctggggtctccatgacacagcatcctcagtacattacagtcaggaacgatcgtggacaggagatgctgaacctggtagctggccttctggaaagcacacctacaattagcagtggctccaggcaaccgtttgttatggagacagtgaaagctgacgatgccgcaaaactggggaaaggcccttcgaaaccagctcctagattcgtcggcgacattctggccttcctgctgaacttggttggacccaagggtctggagttcgcacgctactctctggactatcacaccattcggaattatctgcatgttaggcgggcatggggaaagcaaagagctgagcagcacatcccggggtatgccaagaagatcgtggaggcctacgacaaagacggacggatcgaggcaatggttacgcagtcaggtgactgactcacaccattcacactctactagctggtagtatttgtatactagctggtagtatttgtactgcattgtagtaaagattaaggaatgtagaagaattgtttgtgatgtgacgtagtggcgatgtatacagtagaatgtataggctgcatggcagcagctcagatctgtatgtacatcctgcgcttgccagtttctagtttgcatttgcttttctgggcatgccttttgttttaattatattgtctttgataagtccaagataaaagaagccacagagtcctcaaa

SEQ ID NO: 89030 - DNA, 1908 bp, Zea Mays
ctcgatcctccgtcttatcaccggtgaggtactgaggtgagacgatctccgccaccatggcctccagcacctccctctccctttgcttgcacgcctcgtcgccctcgtcctcgtctcctggactccgccgaccctccctcgcctcctcctcgtcctccaggtccgagagaacgcgcaagatcagggccaaggcggtcagggaggactggaggcagaaatccaagcccatccctcctggcgccgtctaccctgccaaggaccactgcagccgttgtgggctctgcgacacatactacgttgcgcatgtcaagactgcctgtgccttcctgggagacggcatgtcccgtgtcgaggatcttgagcgacaagtccacgggagaggccggaaggaaggcatggatgaaatgtactttggagtctatgaccaactcttgtatgccaggaagaccgaacctgttgaaggagcccagtggacgggaatagtgacaacaatcgctgtcgagatgctgaaagcaaacatggttgatgctgtggtttgtgtacaaaggcacccaaacaagaatcaaatgccacatcattctttctcagtgctatgcacaagcattaccacatggattcaaataatgttttttaccccctctgcagtgatcctgacgacaggcttgctccaagacctgttttggccaggacaccagacgaagtaattgcagccaaaggtgtgaagccaacattatcaccaaatctcaatacacttgccttagtcgaggcagctggtgtaaagcggcttcttttctgcggtgtgggctgtcaagtgcaagccttggtttggaaaagctttatgtgcttggaacaaactgtgttgacaatggtacgcgtgaagggcttgataaattcttgaaagcggcaagcagtgagccagaaactgttatgcattatgaatttatgcaagactataaggtgcatctaaagcatttagatgggcacattgaagaggttccttatttttgcctgccagcaaacgacctggtagatgttattgcaccgtcatgctatagctgctttgactacacaaatggcttggcggatttagtggtggggtatatgggagtaccgaaatatgctggggtctccatgacacagcatcctcagtacattacagtcaggtagagcgagtaggattgtgcaattatattgtaaacagtaccctggtgagcatcattggaactctatcccttcaggaacgatcgtggacaggagatgctgaacctggtagctggccttctggaaagcacacctacaattagcagtggctccaggcaaccgtttgttatggagacagtgaaagctgacgatgccgcaaaactggggaaaggcccttcgaaaccagctcctagattcgtcggcgacattctggccttcctgctgaacttggttggacccaagggtctggagttcgcacgctactctctggactatcacaccattcggaattatctgcatgttaggcgggcatggggaaagcaaagagctgagcagcacatcccggggtatgccaagaagatcgtggaggcctacgacaaagacggacggatcgaggcaatggttacgcagtcaggtgactgactcacaccattcacactctactagctggtagtatttgtatactagctggtagtatttgtactgcattgtagtaaagattaaggaatgtagaagaattgtttgtgatgtgacgtagtggcgatgtatacagtagaatgtataggctgcatggcagcagctcagatctgtatgtacatcctgcgcttgccagtttctagtttgcatttgcttttctgggcatgccttttgttttaattatattgtctttgataagtccaagataaaagaagccacagagtcctcaaa

SEQ ID NO: 89031 - DNA, 1725 bp, Zea Mays
cgtcttatcaccggtgaggtactgaggtgagacgatctccgccaccatggcctccagcacctccctctccctttgcttgcacgcctcgtcgccctcgtcctcgtctcctggactccgccgaccctccctcgcctcctcctcgtcctccaggtccgagagaacgcgcaagatcagggccaaggcggtcagggaggactggaggcagaaatccaagcccatccctcctggcgccgtctaccctgccaaggaccactgcagccgttgtgggctctgcgacacatactacgttgcgcatgtcaagactgcctgtgccttcctgggagacggcatgtcccgtgtcgaggatcttgagcgacaagtccacgggagaggccggaaggaaggcatggatgaaatgtactttggagtctatgaccaactcttgtatgccaggaagaccgaacctgttgaaggagcccagtggacgggaatagtgacaacaatcgctgtcgagatgctgaaagcaaacatggttgatgctgtggtttgtgtacaaagtgatcctgacgacaggcttgctccaagacctgttttggccaggacaccagacgaagtaattgcagccaaaggtgtgaagccaacattatcaccaaatctcaatacacttgccttagtcgaggcagctggtgtaaagcggcttcttttctgcggtgtgggctgtcaagtgcaagctttgagatctgtagaaaagtaccttggtttggaaaagctttatgtgcttggaacaaactttgacaatggtacgcgtgaagggcttgataaattcttgaaagcggcaagcagtgagccagaaactgttatgcattatgaatttatgcaagactataaggtgcatctaaagcatttagatgggcacattgaagaggttccttatttttgcctgccagcaaacgacctggtagatgttattgcaccgtcatgctatagctgctttgactacacaaatggcttggcggatttagtggtggggtatatgggagtaccgaaatatgctggggtctccatgacacagcatcctcagtacattacagtcaggaacgatcgtggacaggagatgctgaacctggtagctggccttctggaaagcacacctacaattagcagtggctccaggcaaccgtttgttatggagacagtgaaagctgacgatgccgcaaaactggggaaaggcccttcgaaaccagctcctagattcgtcggcgacattctggccttcctgctgaacttggttggacccaagggtctggagttcgcacgctactctctggactatcacaccattcggaattatctgcatgttaggcgggcatggggaaagcaaagagctgagcagcacatcccggggtatgccaagaagatcgtggaggcctacgacaaagacggacggatcgaggcaatggttacgcagtcaggtgactgactcacaccattcacactctactagctggtagtatttgtatactagctggtagtatttgtactgcattgtagtaaagattaaggaatgtagaagaattgtttgtgatgtgacgtagtggcgatgtatacagtagaatgtataggctgcatggcagcagctcagatctgtatgtacatcctgcgcttgccagtttctagtttgcatttgcttttctgggcatgccttttgttttaattatattgtctttgataagtccaagataaaag

SEQ ID NO: 89032 - DNA, 1584 bp, Zea Mays
acacacagtcacagcacacgcagccaccgaggactgcattgctagcatccatcgccatcagtcgccatatcgatctgcgcacgaagctagtagtccagatggatcgggtgccgccgccggtctccatgcaggtggctgcgatgcagcgacatcagcagcagcagcagttcgtccaccacctgcagcaggtccaccagcaaggtacgcagcacgagcaaccgccgccaccgcaccagaacggcagcagcagcagcggcaggaccggcggcggccgcaagtgctgcccgctgcggcggtcgcgcaaggggtgcatgaagggcaagggcgggccggacaaccagcagtgccccttccgcggcgtccggcagcgcacctggggcaagtgggtggccgagatccgcgagcccaaccgcggcgcgcgcctctggctcggcaccttcggcagcgcgctcgaggccgcgcgcgcctacgacgccgcggccaggacgctctacggcgactgcgctcgcctaaacctgcagctagtgcctccgtcggcggctgcggcagccgccggaggaggaggaccggcggtcgtcgcgtctccgtcccctgacaccgtggctggccctgctgctgctgctggtggtggtggacacaactgccatcaccagtacctgcagcagcagcacgccatggcggcgcctatgatgatgatgcactcctcctgctgctccgccgacgggtcgtcgtcaaactccgattccatttccaactcctgctcgtcaccggtgaccacggcggcctcgccagcctacagccaccaccagacgatgttccagacacctgcactgcagccgtcatgcggcgcaatgacgatggcggccgctgcgccgcatgtgcagggcttccacgtcggcgacgacgacactaccaccgcgatggcgatgcaccgtcatcagcagatgatgcgcgagctggcggaggcgcctctgcaccaggaggcagacgacttcgaggacttcgtgacgcggctgcccaaggcggaggacttcggcctgcagggcttccaggaggtggcccccgaggtgttcgacgacgccgccggcatctgggaccacgcggccgcctgggagccccccaccatgatgatcgactctggcgcccagccccagcagcagctcgtcgtccctctttgactcgctcgtcgatgacgccgcgcgccctgcaccagctactgcttcgttcccagctgcatcgaactggccggtgtacgtggcggagtgatacgacgcgcgcgctatgcatgacaccactgcacaggtggttcttgcatgtgttgcttacgcctcgagacgtacgtacataataccagtatgtatgtaccggatggttactctgatatgactgtatttctcctagttattcgtgggtttcatttggataatgtttcaggttttgtaaaatatatactttagtagtagtggtgtcttaaatatatgctcctagctatatatctagtctctgtgtggtatatgcatggccgctagttagcttgtacaatattaccatatatagatatattaatttcgcttttactaaata

SEQ ID NO: 89033 - DNA, 798 bp, Zea Mays
atggcctccccgcaattgacgcccatctccttctatatccttcctcccacagaaactgcacgacattctcatcctcttcgactcttcgtaacctgctcctgctgctggtggtgcgacaagatagatcgcctgtgcaccctaagtctatccgtcacaacctcaagatgcccccggggaagaaggggccgcgagtcccacgacatcacgcaggaatctggatcgttgtatgatggtgatgatattgaagactctgaggatgagatggaatccctagttgataagtctgtagccagccacatccccaacaatggtgctgaaatctcttcgaaaaatacaagagcctctaaaagggttgttgcacctggagtgcaagaacaaccaattagagttactaggcgaaggagtgctaccataaaccaagagtccaaccaaaatataatggctgcaacaccagttgaagatggacaccattcaaagtcttcaacagaagtagtctcccaagtgctgcctaaatcaagtttattccttcagaatgtaggcttggcaacctctaacagaagctcttcaggaaatgtttcagcaaaggtgcagcaacttgagtctcaattggatactgagcggcaagaaaaagacgaactacgagatgaagtccaaagcttgaaggctaagacacaggcgtctgacgagaccattgctaagcaatctgatgagattgcagatttaaagaagtccatagcagaaaacaataacctccttcgccagattttaagcatcaatcgtagccaagtgtctccttaa

SEQ ID NO: 89034 - DNA, 1623 bp, Zea Mays
atggacggcgccgccaactggcgtcccacgcagggagccgaccctgccaccgtcgctgctgtcggcggcgtcgaccctaacgcggctgcccccaccggaagcgactggcgcacccagcttcagcccgaggcgcgccagaggatcgtcaataagataatggagactctgaagaagcacctgccagtatcagtaccggaggggctgactgagcttcacaaaattgccgtgcgatttgaagagaaaatctatactgccgccaccagccagtctgattatctgaggaagatttctctgaaaatgctgtccatggaaagccagaaaaagacacaacagaaccctggaaatgctcaagtgattccaaatcaaaaccctcctggtccaggtagtaatccagcacagtcatcagctatcccgttgatgtctcagcaacagacacggcagccaaatgcttctacatccgttcaaggttctcttcctagtgttggtcagaacttgtcgagtgtcagccagacattgacgctgcagaatctgtctggcatgccacaaaataccatgaacaatggtttagcacaaggtaggcagcagcagcaacaacaacagcaagcacataatcagtttatgtatcaacagcagaaattgttgatgaaccagaaattgcagcagaattcacgtatgcaaccacacattcagcagcagcaaactttgttgcagtcaacacagatgcaatcttcacagcagcccatggtgcaaatgtcatctggccttcagcctgggcagattgccattccacaaactcaatccatggcgatgcagtcagctacacagagtggtattcaacagaatgcactgaattcggtacaacaacctgtgcaatcgttactccagcagcctacaccgtctgtggtaaggcagcagcaacatccacagtccatgcaccagcagtcttctctgcagcaaactcaaccaactcaacagcccaacattcctttgcaacagcagccacaacaattaatgggccatcagtcaaatttacagcaaaatcagttagtgaatcaacagagtggtgctgtggagatgcaacagcaacaaaggctaccagttcagtcaactaatcttttgaatatgcatcaaacgcagcagatgatgaaccagcaatctatgcccttgcaccagccacaacaattggcaaaccagggaaatgtgtcaagtctaaatcagcagcagcagcagcttcttggaaccgtgccaaatgtccgtatgcatatgttacagcaacaaaagccaattcagcaaccacagcagcaacagcatgctcagcagacatcaatgggtttgatgcaacctcagtctcagcagaatcagcttcagcaacctcaacaacatatgatgtcgcagttccagtctcagcctaatcaaacgcagcaacaattgggaatgcaacaaaggctccagacttcagctggcatgctcttgcaacaaaataatattgatcaacaaaagcagtacgttcaggcacagaaggtcctccaagaagcacccagtaactatttaattacgctgattaagcctgccatatatgctgatcatgcctgccatatgtgtcttggtgtttatggtagttga

SEQ ID NO: 89035 - DNA, 376 bp, Zea Mays
atgaaggcaattatctttctacattctctacaacaaaagcctctcaagaaaaattataacttcaaaaataaaaaggcaattatgctagtggacaagtgtgccgggctgagcttggtgaatcggtttaatcccagggaggttagcaaatgtttcgtgcactgggggactggtgatgtgaacatggagctctggtcagaggcaagaccagtgtcgaatgagacgccgttgaggatttaccaccagtacgaggtgcggcaaacaagctaaacactgcccgacagcagaaataaaaataccaattggaggatgcttcagttcaggcttgcacttgtgttttacggtctaacgacaatctgtctgtataccttgttttctt

SEQ ID NO: 89036 - DNA, 1881 bp, Zea Mays
atgggtactgcattgcaacagggaagcactggtcccatgcagggtgcattgaatgcacagcatcagtccaatagtaacatgatatccaacaatgcaatgagtacaatgcagactaataccaatgccatgcaagcaaacgtgaattcattgcagcagctaaagcaacatcaggagcatcagatgatgcaaaatcagcaaatgaagcagcgtcagcagatgctgcagcagatgcagcaaaagaaaatacttcaacaacagctcccaatacaacaactacagaaacaacagcagcaagggccgattcaggttcaacaacttcattctggaaatgatgtgaatgagctaaaggtcaggcaaggagctgcaatcaaatctggaatgtatcaaccgctgaaccagcgtaactattatcagcagataaaacggggggatgtctttccaatttcttctccgcaaaacctccaagcatcgtccccacaaatttcacactattctcatgttgatcagcacagtctgttgcaatctcaagtgaaaaccgggacaccgttgcattcagctaactcaccatttgtcccatctccatctcctcctgttgccccatcaccggtcccactggattcagataaaccactctccaacctatcttcactcactagtgctgggcaggctggacatcagcaaacatcccttgcacctctaacacaatctatagctgttaacacaccaggtatatcagcgtcacccttgcttgcagaattcacaagtgctgatggaggtcaggttagcgtaccaactcaagttccaacaaaatcaagcgcagcagaaaggcctctcgatcgcttgcttaaagcattgagaacaacacagcctgagtcccttagtgctgcagttagcgatattggatctgtcgtgagtatgattgacaggattgctggatcagcgcctggtaatggttccagagctgctgtgggtgaagatcttgtcgctatgacaaagtgccgcttgcaagccaggaacttcataacccatgatgggagtggtgcatcaaagagaatgaagcgggacacaggtgctatgcctcttaatgtgtcatccgctggaagtttgaatgacagcttgaagcaatcatatactgttggcactccagagctacaatcaactgcaacctcacgtgtcaagtgtcaaagggctgaggtaaaccatgttctgttagaggagattcaggagataaacaaacagcttatagatacagagctccatgtctctgaggatgatgctgagtccttcactacatctgatatggccgaagggacagtcattaaatgcacattcactgctgttgctgttagccccagcttgaaatccatgtttgcttcagcgcagatgagtccaattttgccgttgaggttgcttgttcctggtagctacccaaaatgctccccggtgcttctagacaagtttcctgatgaacaatggaactcggatgacctgtctacgaaggccaagtcaaagttcagtgtgttgctccggggtctagctgagcccatgtcattgcgagaaatcgcaaggacgtgggatgcttgcgcccggaaagtgattgcagagtatgcccagcaaactggaggaggcagtttcagctcgagctatggttgctgggaaagctgcgttggcgcttcataagtttattgtatctattactccgtagtatatttattattctttattacactaagcatttatgtgttgagcaaaagaaaataacagtttatcttccttttggtatcgagtcactgttagcttgataaataagatcgtgtacagtacagtgtatggagcaagcttgggtgcttcagcccggttaatatttactatcttgtatgc

SEQ ID NO: 89037 - DNA, 1884 bp, Zea Mays
atgggtactgcattgcaacagggaagcactggtcccatgcagggtgcattgaatgcacagcatcagtccaatagtaacatgatatccaacaatgcaatgagtacaatgcagactaataccaatgccatgcaagcaaacgtgaattcattgcagcagctaaagcaacatcaggagcatcagatgatgcaaaatcagcaaatgaagcagcgtcagcagatgctgcagcagatgcagcaaaagaaaatacttcaacaacagctcccaatacaacaactacagaaacaacagcagcaagggccgattcaggttcaacaacttcattctggaaatgatgtgaatgagctaaaggtcaggcaaggagctgcaatcaaatctggaatgtatcaaccgctgaaccagcgtaactattatcagcagataaaacggggggatgtctttccaatttcttctccgcaaaacctccaagcatcgtccccacaaatttcacactattctcatgttgatcagcacagtctgttgcaatctcaagtgaaaaccgggacaccgttgcattcagctaactcaccatttgtcccatctccatctcctcctgttgccccatcaccggtcccactggattcagataaaccactctccaacctatcttcactcactagtgctgggcaggctggacatcagcaaacatcccttgcacctctaacacaatctatagctgttaacacaccaggtatatcagcgtcacccttgcttgcagaattcacaagtgctgatggaggtcaggttagcgtaccaactcaagttccaacaaaatcaagcgcagcagaaaggcctctcgatcgcttgcttaaagcattgagaacaacacagcctgagtcccttagtgctgcagttagcgatattggatctgtcgtgagtatgattgacaggattgctggatcagcgcctggtaatggttccagagctgctgtgggtgaagatcttgtcgctatgacaaagtgccgcttgcaagccaggaacttcataacccatgatgggagtggtgcatcaaagagaatgaagcgggacacaggtgctatgcctcttaatgtgtcatccgctggaagtttgaatgacagcttgaagcaatcatatactgttggcactccagagctacaatcaactgcaacctcacgtgtcaagtgtcaaagggctgaggtaaaccatgttctgttagaggagattcaggagataaacaaacagcttatagatacagagctccatgtctctgaggatgatgctgagtccttcactacatctgatatggccgaagggacagtcattaaatgcacattcactgctgttgctgttagccccagcttgaaatccatgtttgcttcagcgcagatgagtccaattttgccgttgaggttgcttgttcctggtagctacccaaaatgctccccggtgcttctagacaagtttcctgatgaacaatgcaggaactcggatgacctgtctacgaaggccaagtcaaagttcagtgtgttgctccggggtctagctgagcccatgtcattgcgagaaatcgcaaggacgtgggatgcttgcgcccggaaagtgattgcagagtatgcccagcaaactggaggaggcagtttcagctcgagctatggttgctgggaaagctgcgttggcgcttcataagtttattgtatctattactccgtagtatatttattattctttattacactaagcatttatgtgttgagcaaaagaaaataacagtttatcttccttttggtatcgagtcactgttagcttgataaataagatcgtgtacagtacagtgtatggagcaagcttgggtgcttcagcccggttaatatttactatcttgtatgc

SEQ ID NO: 89038 - DNA, 888 bp, Zea Mays
gtagttttcgcaactgcaggccactgtagcgcgtcacagcatgtcgcaaacacggttgcacaaaaaggtgcctgcccaaaacaatgtgtactattgcattgcctctctcctcccacattgaatccgtgcaatggccaagtgcctcgacttctccctaccccgcgagagaacccaaattggcgtctccaccatcactaccggtgtcgctcgtgacggcgaatgggggaggaagcgaccagtggccacgagcgaacgttcctgtccaggcccaagtccactctttgtcggcggaagaagcactggatcacctcgacagggagcggcggctccacgacttctacattgaaatcttcaaggatatcaccatctcaggggccaggatatcacaagcctgccacacatttgaaatctgttctactaaaatttttggagcttgtggattggcttgacaaggtttcaatcctttgctccaaagtggtctacaagaatggacgacagcaccccgacgacaacatcatagtggaagagttttaagcagctcatgagatagaacttgaaaggctcccaagtcctgaaactcctaaagccttgaagtgttctatgaggattggggtatgcagtatgacaacgatcaatcacgtgggatcaactaggagtaaattgtagaataatggcatgttaacgaggagtttctaactgttaatgtaatttagtaatgtgtattgtcgctttatgttcaagtctagaacgttggtcctgaattgttaagtttggggaatgaactgttagatttcttaagtgatgatgccttcctgttattttgaaatgtcttgttgtgttacccaattcaccaacaatcaggttttctatggacaacacttggtcgag

SEQ ID NO: 89039 - DNA, 3100 bp, Zea Mays
atggcctctctgaggcatcgccgcggcggcaccggagccgccaacgactacgacgacgatgacgtccatgacgacggcagcgggacaccgcctggcactgacaccgccacggacgaggagcaggaggaggaggaggaggaggaagaagaagaaaagggagaagaggaggaggaccgccagatgcatcacctgggactccactccatgactgcaaagggcatacagcacctgtgctctgagctcctcgagatcaagaaggcctcggagcaagacttcagcgccaatgtttatctcagctacctctccttcatcaggatgttccaagaagccggtgatctggacaaggacgtccaccacctgaaacgtcaggtcatggcgcacaggcggctggtgcagcaactcagcgccaactgcctgtactcgtcttcatcagcgtcgatggtgctacctcgctccggctccgaggatgacgaggccgacgcggaaggggtcctcctcccggaccgtcagggcgagcgcgacgaggacctggagctggacgcgcttctgtccgagcaccggacggacgaggccatccagctgctggagctgcaggccgcccaagcgctgcggacgatgcagcagcaagcaggggcagccgacgaagccgaaacggtcgcgcgggcgctggacgccaggaaggcgagggtcgccggccgcctggcttccgtggcgggcaacccgcggacgccgcggcccgagctcctcagggcgctgtccggcctgtgcaggctcggcgacgcggagcaggcgaaccagctgctcctcggcctgcaccgcgggagcgtcgtccgcggcgtggaggagctgcgcctgcgcgcgtcgcaaggaggtcacctgcagctgcagagcagcggcgccggcagcagtaactacatcaaggacctcgcgcgcgtggtcttctcctccatcgtgcgcacgtcgaggggcttcgtggcgctgcacgggcacccgtcgccctacaccgcccggctcgtccggtgggcgagggaggagatggaggacctgagcgccgccttctccgagtacgtgaggtccgtgtcgtcgcccgctgccgctgccggccacagcttggctctggcgctggacgccgcggagtgcgcggtctcctacactcccctgctgagggccgtcgacatcgtggactccgagcgagacgtggttggccttgtcgtgccctgcgtccgggacgccgtgaccatgtatggcaggcatctcaaggaggtggtccggctgctggtggattccgacgcctgggtgctgggcaggttcctcgtgccacctggactaatgatgcagggtgctggagcagcgctagctgagtactgcctgctgacaaccaacggaaggaaatttgtcaccctcatacaggaggttgtggaagacgtagcgtggccgttgcacaagcttgggatcgggacgaacgattcagtaggcctgcagctcgtggcggagctgttcagggagtacatgcactccatcgtggagctcatccccagaaaggaagcagcagctgctctgcaagacgaagccagcggcgacgcgcagtacacgtggcagctcgccgtgctgatcaactgcaccacgctggtgtccctgtttccggccatcgcgtccggcgtcttcaggacaccagcatcatccacgtcggggtttccggcgtcagcacagagagaggtggacagcctcgtctcgctggtcaaagaagcggccgggcaggtgtggagctgcttctgccagcagttcgtacgagacaccatggcgtcgtcagcgcagggccgcttcggaagcggcacgccgccgccgccacagggcgtgactatgccttccatggccttccaagtggtgttcctccgggtgaggcgtctggtcgaggtgtatggcgccatcatgagcggcgatgacgggacgacgaagaagctgctgcaggagctgatggaggcgatggtctgctggctctccaccaacctggaatcgtgggccgtccatggcgacgcccaggcccagctcgacgtccatttcctgctggagctcgcgcagctcggtggtttctcctccgagagcatcaggagcagcgcgatggacttgattaccaaagcacaggagaaggtggcgggtggcgaacaggacgatgccgtccgcgaggagcgctgcggcggctgggctgcagatgctgcaaagcacgctgtgcaggtgctgctagcgacggaaggtggagacgtagcggccgggaacgacgctggggaggaacgcgatgagatggcaaggaggagcagcaatgacgaagaagcaggccaagaggaagcacccgaaggtgagaatgaggatcatgaggatgagagtggggctgccaacaagtccagcgacgagttcgtaagcatggaggacgaggacgaggatgagggcgaagaggatggcgtaagaatgcctgctcgtgcagctttgtcgtcagagagtccgaagcccgggcactcagcattgggcaatggagaggagatggcgaacattcgatcaggccatcatcatcccgagcttgaccaggctgagggcggaggtgacgacagtgtgcaggctgatgacgagacacgggatggagaagggatgtgccatggtgccatacagcagcaggttgaagagcagagcagcagtagctgggaagacattgatggcgaaggaggcggtggtgggaggagcagcacgcggcgtcagtcaactcctcctgtgatggcggcagggaaggatgctcctaccgggagcagaaagaagagggaggcagtgagcagaagcagcaaacccagcaaacccagatggcatgtataactgataggggtgggtgtaatagtatcaatacgaacggatattattgaaactatatttttttatatttttattcagattcgaatacgaatatagatacgaatgttttaagatgcaaatatagataatcatgtgtcgaatacagaactaatcgaatacgaatagtgttggtaatagattttttctcaaacatcgtataagacatacgaacggatattattgaaactatattttttatattttt

SEQ ID NO: 89040 - DNA, 4672 bp, Zea Mays
ctcacacacacagtcacactcccaagccaattattataagaggcgagatgagcaactccagctcttaaccaatccactcctcctccctctccacctcctctgctttgctctgccactctgctgaggtggggggcagaggagctccccctccctcctctcccctcctcgccatgtctagcagcgacccggaggagatcagggcgcgcgtcgtcgttctcggttcgccccatgccgacggcggcgacgagtgggcccggcccgagctcgaggccttccatctgccgtctcccgcccaccagcctcctggcttcctagccgggcaaccggaagcagcagagcaacccacgctccctgctcctgctggccgcagcagcagcagcagcaacacgcctactacatctgccggtggcggcgctgctcctcctcctccttcttcgcctccccctccgccggcttctctggagaccgagcagccgcccaatgccaggccagcctccgccggcgccaatgacagcaagaagcccaccccgcccgccgccctgcgcgacctcttccgcttcgccgacggcctcgactgcgcgctcatgctcatcggcaccctcggcgcgctcgtccacggctgctcgctccccgtcttcctccgcttcttcgccgacctcgtcgactccttcggctcccacgccgacgacccggacaccatggtccgcctcgtcgtcaagtacgccttctacttcctcgtcgtcggagcggcaatctgggcatcctcgtgggcagagatctcttgctggatgtggaccggcgagcggcagtcgacgcggatgcggatccggtacctggacgcggcgctgcggcaggacgtgtccttcttcgacaccgacgtgcgggcctcggacgtgatctacgccatcaacgcggacgccgtggtggtgcaggacgccatcagcgagaagctgggcaacctcatccactacatggccaccttcgtggccggcttcgtcgtggggttcacggccgcgtggcagctggcgctggtcacgctggccgtggtgccgctcatcgccgtcatcggcgggctgagcgccgccgcgctcgccaagctctcgtcccgcagccaggacgcgctctcgggcgccagcggcatcgcggagcaggcgctcgcgcagatacggatcgtgcaggcgttcgttggcgaggagcgcgagatgcgggcctactcggcggcgctggccgtggcgcagaggatcggctaccgcagcggcttcgccaaggggctcggcctcggcggcacctacttcaccgtcttctgctgctacgggctcctgctctggtacggcggccacctcgtgcgcgcccagcacaccaacggcgggctcgccatcgccaccatgttctccgtcatgatcggcggactggccctcgggcagtcggcgccgagcatggccgcgttcgccaaggcgcgtgtggcggctgccaagatcttccgcatcatcgaccacaggccgggcatctcctcgcgcgacggcgcggagccagagtcggtgacggggcgggtggagatgcggggcgtggacttcgcgtacccgtcgcggccggacgtccccatcctgcgcggcttctcgctgagcgtgcccgccgggaagaccatcgcgctggtgggcagctccggctccgggaagagcacggtggtgtcgctcatcgagagattctacgaccccagcgcagggcaaatcctgctggacgggcacgacctcaggtcgctggagctgcggtggctgcggcggcagatcgggctggtgagccaggagccggcgctgttcgcgacgagcatcagggagaacctgctgctggggcgggacagccagagcgcgacgctggcggagatggaggaggcggccagggtggccaacgcccactccttcatcatcaaactccccgacggctacgacacgcaggttggggagcgcggcctgcagctctccggtgggcagaagcagcgcatcgccatcgcccgcgccatgctcaagaaccccgccatcctgctgctggacgaggccaccagcgcgctggactccgagtctgagaagctcgtgcaggaggcgctggaccgcttcatgatcgggcgcaccaccctggtgatcgcgcacaggctgtccaccatccgcaaggccgacgtggtggccgtgctgcagggcggcgccgtctccgagatgggcgcgcacgacgagctgatggccaagggcgagaacggcacctacgccaagctcatccgcatgcaggagcaggcgcacgaggcggcgctcgtcaacgcccgccgcagcagcgccaggccctccagcgcccgcaactccgtcagctcgcccatcatgacgcgcaactcctcctacggccgctccccctactcccgccgcctctccgacttctccacctccgacttcaccctctccatccacgacccgcaccaccaccaccggaccatggcggacaagcagctggcgttccgcgccggcgccagctccttcctgcgcctcgccaggatgaactcgcccgagtgggcctacgcgctcgccggctccatcggctccatggtctgcggctccttcagcgccatcttcgcctacatcctcagcgccgtgctcagcgtctactacgcgccggacccgcggtacatgaagcgcgagatcgcaaaatactgctacctgctcatcggcatgtcctccgcggcgctgctgttcaacacggtgcagcacgtgttctgggacacggtgggcgagaacctgaccaagcgggtgcgcgagaagatgttcgccgccgtgctccgcaacgagatcgcctggttcgacgcggacgagaacgccagcgcgcgcgtggccgccaggctagcgctggacgcccagaacgtgcgctccgccatcggggaccgcatctccgtcatcgtccagaactcggcgctgatgctggtggcctgcaccgcggggttcgtcctccagtggcgcctcgcgctcgtgctcctcgccgtgttcccgctcgtcgtgggcgccaccgtgctgcagaagatgttcatgaagggcttctcgggggacctggaggccgcgcacgccagggccacgcagatcgcgggcgaggccgtggccaacctgcgcaccgtggccgcgttcaacgcggagcgcaagatcacggggctgttcgaggccaacctgcgcggcccgctccggcgctgcttctggaaggggcagatcgccggcagcggctacggcgtggcgcagttcctgctgtacgcgtcctacgcgctggggctgtggtacgcggcgtggctggtgaagcacggcgtgtccgacttctcgcgcaccatccgcgtgttcatggtgctgatggtgtccgcgaacggcgccgccgagacgctgacgctggcgccggacttcatcaagggcgggcgcgcgatgcggtcggtgttcgagacgatcgaccgcaagacggaggtggagcccgacgacgtggacgcggcgccggtgccggagcggccgaggggcgaggtggagctgaagcacgtggacttctcgtacccgtcgcggccggacatccaggtgttccgcgacctgagcctccgtgcgcgcgccgggaagacgctggcgctggtggggccgagcgggtgcggcaagagctcggtgctggctctggtgcagcggttctacgagcccacgtccgggcgcgtgctcctggacggcaaggacgtgcgcaagtacaacctgcgggcgctgcggcgcgtggtggcggtggtaccgcaggagccgttcctgttcgcggcgagcatccacgagaacatcgcgtacgggcgcgagggcgcgacggaggcggaggtggtggaggcggcggcgcaggcgaacgcgcaccggttcatcgcggcgctgccggaggggtaccggacgcaggtgggcgagcgcggggtgcagctgtcgggggggcagcggcagcggatcgcgatcgcgcgcgcgctggtgaagcaggcggccatcgtgctgctggacgaggcgaccagcgcgctggacgccgagtcggagcggtgcgtgcaggaggcgctggagcgcgcggggtccgggcgcaccaccatcgtggtggcgcaccggctggccacggtgcgcggcgcgcacaccatcgcggtcatcgacgacggcaaggtggcggagcaggggtcgcactcgcacctgctcaagcaccatcccgacgggtgctacgcgcggatgctgcagctgcagcggctgacgggcgcggcggccgggcccgggccgtcgacctcgtgcaacggggccgcgtaggacggaatggatggatggatgggtttggttcctcgagagattgatgggtgaggaagctgaagctccggatcaaatggtggtactccatgatcgcaacaatgaggggaaaaaaagaaaggagaaaatacggtggttcatatgattgtacaatttgacgatctgtttgagtcggggttttaggatgatgtaaaccttcactcgccttttttttactcttgtttctcatccgcatcagtatcatctatctacatacagtgtcagagatgggaactgatccgcatcatcatctacctcccaaggcaccccagattgtattaatgtacttagttagcctgttttatatatacttataagtaccaaat

SEQ ID NO: 89041 - DNA, 2061 bp, Zea Mays
ggtggggggcagaggagctccccctccctcctctcccctcctcgccatgtctagcagcgacccggaggagatcagggcgcgcgtcgtcgttctcggttcgccccatgccgacggcggcgacgagtgggcccggcccgagctcgaggccttccatctgccgtctcccgcccaccagcctcctggcttcctagccgggcaaccggaagcagcagagcaacccacgctccctgctcctgctggccgcagcagcagcagcagcaacacgcctactacatctgccggtggcggcgctgctcctcctcctccttcttcgcctccccctccgccggcttctctggagaccgagcagccgcccaatgccaggccagcctccgccggcgccaatgacagcaagaagcccaccccgcccgccgccctgcgcgacctcttccgcttcgccgacggcctcgactgcgcgctcatgctcatcggcaccctcggcgcgctcgtccacggctgctcgctccccgtcttcctccgcttcttcgccgacctcgtcgactccttcggctcccacgccgacgacccggacaccatggtccgcctcgtcgtcaagtacgccttctacttcctcgtcgtcggagcggcaatctgggcatcctcgtgggcagagatctcttgctggatgtggaccggcgagcggcagtcgacgcggatgcggatccggtacctggacgcggcgctgcggcaggacgtgtccttcttcgacaccgacgtgcgggcctcggacgtgatctacgccatcaacgcggacgccgtggtggtgcaggacgccatcagcgagaagctgggcaacctcatccactacatggccaccttcgtggccggcttcgtcgtggggttcacggccgcgtggcagctggcgctggtcacgctggccgtggtgccgctcatcgccgtcatcggcgggctgagcgccgccgcgctcgccaagctctcgtcccgcagccaggacgcgctctcgggcgccagcggcatcgcggagcaggcgctcgcgcagatacggatcgtgcaggcgttcgttggcgaggagcgcgagatgcgggcctactcggcggcgctggccgtggcgcagaggatcggctaccgcagcggcttcgccaaggggctcggcctcggcggcacctacttcaccgtcttctgctgctacgggctcctgctctggtacggcggccacctcgtgcgcgcccagcacaccaacggcgggctcgccatcgccaccatgttctccgtcatgatcggcggactggccctcgggcagtcggcgccgagcatggccgcgttcgccaaggcgcgtgtggcggctgccaagatcttccgcatcatcgaccacaggccgggcatctcctcgcgcgacggcgcggagccagagtcggtgacggggcgggtggagatgcggggcgtggacttcgcgtacccgtcgcggccggacgtccccatcctgcgcggcttctcgctgagcgtgcccgccgggaagaccatcgcgctggtgggcagctccggctccgggaagagcacggtggtgtcgctcatcgagagattctacgaccccagcgcagggcaaatcctgctggacgggcacgacctcaggtcgctggagctgcggtggctgcggcggcagatcgggctggtgagccaggagccggcgctgttcgcgacgagcatcagggagaacctgctgctggggcgggacagccagagcgcgacgctggcggagatggaggaggcggccagggtggccaacgcccactccttcatcatcaaactccccgacggctacgacacgcaggtccgtcccgtatagctagctcactagctgcactgccacttctctcgcttgctccccaccgttgctgcctgttgctctccaatccacttgtcggtgtctggaccacacgtgcctgcttgcctagctgctccacatctgctttccctgtccaaccttatgcaactcactctaatactatatcaaatacatttctagagtttaaagcttatcttagaataaatgcatctttagct

SEQ ID NO: 89042 - DNA, 303 bp, Zea Mays
atggcgttcgggtttacccgaaatttcgggtcggacacgagcggcacgcaggtcggtaggcgaggctgcgagaggcgacgagctggactgctggagctggcaggcgagggtcggtggccgtgtggcggtggtccgatggcgatggacgtggaccagtggtcgggctcgggttcacacgggactgaaggagacgatgagtggagctgtggacttgtggaggtggcccctggcggcgtggcccgtgccggtgggcttctgggcggtgccgcggttgccgcctccgcctggccggtggtggtgtga

SEQ ID NO: 89043 - DNA, 393 bp, Zea Mays
atgggaaggagcagggagatgggaggagggtggcccgacggcgagcagggtcgcgcgcccggcaaggacgaccgacgcggagggcaagacgctaggcatggcagagcgacggccacggacgagctgcggcttgggatcgggctcggagacggcggcccgaggaggagctcgacgcggctaggcatggagacagacacagctggagagggaggagcagagagccgggaacagggagcagggggcgcggcagccagttgccatgaccgagcaggggggccgagcaggggatggcgagtggaggggaacctgagtgatgctgccgcgtggagaagaagacgtgagggagacggtggggaaaaaaatcagaagagtgcaaggcagataaaaatctga

SEQ ID NO: 89044 - DNA, 1249 bp, Zea Mays
tttgaacgaaaacaacagtacttgattgatctaataaagcagcatgacgcgcttggtacaacatccaggagagcacgtctatatccgacggtgacctccggttatttaggagcacgtctctgatcccatcagatcgatcgcgcaagttcaactgaacatgcacacaagcaccagacagaaaggaaacaatgacgtaacggaaggcgacggctgtgcctcgacaaacaacctcgaccagatcgaaggagaacagtgcgtgtaccctaccgtgcaacagccacacacacgacacgttacgttacgtacgtacttgttccttatataacatttgcatgcatgcatgcagatgcatctactacggctacttacacgggcactgtgcggttgttgtagttcggcgtggcggcggcggcggccgcctcgtcgttctcgccggacatctcctccagggatttgcccttggactccggcaccaggaacgtgaatgccaggcccagcaggttgcagccggcgaggaggaacagcgagttgcgcacgccgatgcccgcggggtacccgtggtccgtcttggccgggtcccggttctgcgccaggtacaggaacccgaaggagccgacgatggcgcccagcttccccgacgccgccgagatgccgtggcacgtcgaccgcagcctggccgggaagatctcagcgggcacgatgaacgtggtcgcgttgggcccgaagttggcgaagaagaaggtgaggccgtacatgacgatgaagccgatgtggtgccccggcgtcgtccagtgctcgtacggcacggccagccccagcatgaacaccgtcatcatcaggaaccccgtcacctggatcgcgaaccgccccaacacgtcgatcagcgccaccgtgaaccagtagccgggcaccgtgccgcacagcgcgatcagggactgcgcccgcgcgatgctgaacagctcctccagcgcgttcatcgtcgccgccttggggatccaccccaccgcgctgaagatgtccttctggaacaggttctgcgagtagaaggcgatgtccagcaggaaccacgtcgaggacgtgcccaggaggtgcagcccgtgccggcgcaggcgcagtcgcagccgcagccgcggcgtcctcctcgggggcgccggctgagatctccacctgcagcaccttggacatgtcagccgcggcctgcttggcgttcttggccaccagcgccgtgtaccgcgccgtctcgggcatc

SEQ ID NO: 89045 - DNA, 691 bp, Zea Mays
ggtgaacctagagtggtcatccgaggaaagaaggtcactgcattgctgatagtgaggagcagaaagttcatgttattgttggtgtgttgacccttaccactctccaattttagtccacccctattgaccacatagttcaaatgagtattatgggtgtgattacatgagtcatatctgcaacatggctcatttttgaatgtttgctggtgggatgctcatctcttctatgtctacaagaatattttgccagtgatgacgtgtgtttagaggatgggatccttgcaattgtcaaacaaggagatgagagaccccttgaattgcttgctaaagcatatgctatcaaatcttttgacatagatccccagaacccctctgatgttgttttcacgttagaatgggaatcaatcggtgtcctaccttgtggcgagatggcgagaagaaagataatttttactaccaagggatcttaatcagaattctaggctcattcatacattcactacaatgccttcgaactcatgaacatttatctctggctctattgtggtgggttacatgaatagagtttttgcatgttcttcgttttatatggtgacatacttgttactatgtgacattgtttgatgaaacccttgcggcattgtattatttattttgttctatatagtcttaacattttatcaaataaaaa

SEQ ID NO: 89046 - DNA, 758 bp, Zea Mays
ggtccgtaactgtattgtatgctcttgcacccacatatatctaataagtgagtctgagcagtgacatagtccattggtaccatgggctgtatggatataggtcactgcattgctgatagtgaggagcagaaagttcatgttattgttggtgtgttgacccttaccactctccaattttagtccacccctattgaccacatagttcaaatgagtattatgggtgtgattacatgagtcatatctgcaacatggctcatttttgaatgtttgctggtgggatgctcatctcttctatgtctacaagaatattttgccagtgatgacgtgtgtttagaggatgggatccttgcaattgtcaaacaaggagatgagagaccccttgaattgcttgctaaagcatatgctatcaaatcttttgacatagatccccagaacccctctgatgttgttttcacgttagaatgggaatcaatcggtgtcctaccttgtggcgagatggcgagaagaaagataatttttactaccaagggatcttaatcagaattctaggctcattcatacattcactacaatgccttcgaactcatgaacatttatctctggctctattgtggtgggttacatgaatagagtttttgcatgttcttcgttttatatggtgacatacttgttactatgtgacattgtttgatgaaacccttgcggcattgtattatttattttgttctatatagtcttaacattttatcaaataaaaa

SEQ ID NO: 89047 - DNA, 550 bp, Zea Mays
gcagcatgcagtgaaacacactaccatcacctagctagctactacaaacctacctacaacgaggactcgaccgatcatcgttctcgagagtgagctactgagctacgatgaggtgcacactggtggtatggctgtctctggtcgtcatggccgcggtcaccgccgccggcgatgataatacgccggagccgaggccggtgatcactccaaagccgaagccaccacggccgtaccagccgaaaccgacgcctcaaccgtaccagccgaaaccgacgccacagccctaccagccgaagccgcagccagagccaggacacccgaagcccacacctcagcccaacccaacaccggaacccaccaaaccgaagcccacgccgcagcccgagccgaaaccaaagccacagccgcagccgatgccggagccccagcctggccacggcaaacccaagcctaagcccccggcgtactccccgggcacgcccggtccttgatcgtgttcgtatataaacacgcaggccgcatgagcttcgtataaataaataagcgggcg

SEQ ID NO: 89048 - DNA, 840 bp, Zea Mays
atgatgagatccggccttctctcgctatgtttccacctagccctggccatcacactggctgcaagtgttcctggccttgctcgtagtagggtaatcgacatcgaaccgcaactcaaaccgacgctgcaactagaaccaaagcatggtgtatctcaaccagacagaaaccaagaacccaaaccgacaccacaacctgagccaaaaccggagcctaaaccggaaccaaaacctgcaccacaatcagacaccaaatcagaccctaaacccgcaccacagtcagacccaaaacctgcaccacaaccggacctaaaaccagaacccaaacctacaccacagccagacccaaaaccttcaccacaaccagacccagagccaaaacccaagccagcgccacagcctgaaccaaaaccagaacccaaacctacaccacaaccagacccaaaacctggaccacaaccagacccaaaaccagaacccaaacctacaccacaaccaggcccagagccgaaacccaagccagcgcctcaacctgagccaaaacccacgccgcaaccagatccaaaacctgagccaaaacccacgccgcaaccagatccgaaacctgagccaaaaccaacaccacaaccacctttcccacagcccgagcctcaaccagatcccaaaccccaacccgaaccatccaagccagatcctaaaccccaacccgagccatccaagccagaccctcagccagagcccaaacctacaccagagccaaaaccccaaccagaaccatcgaagccggagccaccgtcgtctcttccaccaccatttggcacgggcgtcgtggaagggaactga

SEQ ID NO: 89049 - DNA, 1209 bp, Zea Mays
atcaatttatgtgtagttctgcacggggtggccatagcgttttgttgctcctgtcctgctacttttcttttttatatataaaatggtgctccaaccatgcgcctgtgtacacatacgaacacactagctacacatgtctaccagcttggaatagagcaagtgaatatatatatataatagttcagcctgagatcatcctctccccacaagtcttctcctcacacatatagcagtgcgaagacacactgtactaaaccgcgaggaaaagtagcaaagaaattacaagggggtggacgcgcggggggcaagtcgtctccttcgatttcgttcttgcctctttgcctctctcaaggtctgctcaaactcaaagtggattcggcagaacacgcatggcgtagagcgcggggagcaagagatttcctagcttcaagaacctggaagaacaagtcgaggatccgtcgtcggcggcagcgtcgtcggcacgctcaccgcggcggggcccgtcatggtgatggcgtccacgttcgccaacgccacctacgagaggctgccgctggacgacgccgacgaggagcccgccgggcagcaggcggcgcagctgcctcccggaccgggcggagggcagcctatggtaatgggcgggatggccgacccctcagcggtgccaatgttcggcggcgccggcggtgtgccgccaagcctcatgccagcaggggccgcagccgcctcctccggtgcgggcctgcagctcgggcacgaccgacttgcatgggctcatgcacggccaccgccatactaggaagccggggaggatgcatcatccatgaccgaggaaattgatgaattagaaatggaggatcgttcagcgcaacaacagctagcagcagctcaaggacgactgccactcaccatcatatagtaactagaaccgaacgaagatcgaattaagcgctagcttccaggagctaataaaactctcttcgatcaattctacctattacagtactctgctaagaaggtaaactacttatagtgctatatatgtatgtatattactacactgctactgcatgcatgtgactgtgtggctgtgccaaatgtcagcgcaagatacgatggagcttgcattgttttttcccattgtaatgtttgatttatattaattattagatacagcatgataaatagatgatggatgattattacata

SEQ ID NO: 89050 - DNA, 1616 bp, Zea Mays
cttctcctcacacatatagcagtgcgaagacacactgtactaaaccgcgaggaaaagtagcaaagaaattacaagggggtggacgcgcggggggcaagtcgtctccttcgatttcgttcttgcctctttgcctctctcaaggcgtagagcgcggggagcaagagatttcctagcttcaagaacctggaagaacaagtcgaggatccgtcgtcgagcccgactgttctaagagaaagtaattagcaagcagctctcgattatactgtattatttatcgaaaccctatctaagctagtagcaagctagctagctagaagaggaggaggaagctggcgaactggtggtgggacgaggggcggggcggcctgccggagccatcccttggcaagaaccaagaagaaatggcaccttcctccaaggacggcgccaccgccaccgagcagccgacgagcggcgacgacgaccgggagaacggcggcacgggcgagcccaaggaaggcgcggtggtggcgggcaaccggcggccccgcgggcggccgccggggtccaagaacaagcccaagccgcccatcttcgtgacgcgcgacagccccaacgcgctgcgcagccacgtgatggaggtggccggcggcgccgacgtggccgagtccatcgcccacttcgcgcgccgcaggcagcgcggcgtgtgcgtgctcagcggcgcgggcaccgtcgccgacgtggcgctccgccagcccgcggctccgggcgccgtggtcgccctccgcggccgcttcgagatcctctcgctcaccggcacgttcctgccgggccccgcgccgccgggctccacggggctcaccgtgtacctcgcgggcggccaggggcaggtcgtcggcggcagcgtcgtcggcacgctcaccgcggcggggcccgtcatggtgatggcgtccacgttcgccaacgccacctacgagaggctgccgctggacgacgccgacgaggagcccgccgggcagcaggcggcgcagctgcctcccggaccgggcggagggcagcctatggtaatgggcgggatggccgacccctcagcggtgccaatgttcggcggcgccggcggtgtgccgccaagcctcatgccagcaggggccgcagccgcctcctccggtgcgggcctgcagctcgggcacgaccgacttgcatgggctcatgcacggccaccgccatactaggaagccggggaggatgcatcatccatgaccgaggaaattgatgaattagaaatggaggatcgttcagcgcaacaacagctagcagcagctcaaggacgactgccactcaccatcatatagtaactagaaccgaacgaagatcgaattaagcgctagcttccaggagctaataaaactctcttcgatcaattctacctattacagtactctgctaagaaggtaaactacttatagtgctatatatgtatgtatattactacactgctactgcatgcatgtgactgtgtggctgtgccaaatgtcagcgcaagatacgatggagcttgcattgttttttcccattgtaatgtttgatttatattaattattagatacagcatgataaatagatgatggatgattatt

SEQ ID NO: 89051 - DNA, 333 bp, Zea Mays
aacagatgcaattataagcgagaatgatgatgcattgctccagctgatgaacaggaggatggttggctatgcttctatgagattcttgcaaatcattttgttagagtgtctgaaagtggcatgcttatacttgagttgatagtgcaactctggagcaagtccttcgcgaccaacatatttgcacttctttttcacaaatggttgtttgaagccctcttgacgaaaaagaaatatcgctacgatatagctctcctcttgttcaaggtgctacaaatgtattttggtacggttgcaaatataaaaaaccatcattatttattgttaattattttg

SEQ ID NO: 89052 - DNA, 3372 bp, Zea Mays
caaaggcccacggcatcgccaaccagtgaaatcatcctaacatccgtaacgccatcctcgccgccgccgcagcctcctgcgctccgctccactggtggtggtagggagtgcagcggatccatcccgtgtcccgatccgatcccttcgctgctagtatcgagccttgccatcgtgctcaccgaagaggacttcatcagtaaagaattgctttagcaacacttacaatataaggaaagagggttcacgttggatacaatccggtcctcccttgttgctaaatagggtaaagtttgttggcaagaggacatcctgttctgttgcaacagagccgccgcctgctgccactgaagaaccaggcatggatgtccccaaggagatattcttgaaagattacaaggcacctgattattattttgacacggtggatttacaatttcaacttggtgaagaaaagaccatagttacatctaaaatagttgtatctcctggagttgaaggcatctcagctccactagttcttcatgggcatgacctcaagctcatatcaatcaaagtcaatggcactgaattaaagggtgaagagtataaagtcaattctcgccatctgatgctttcaacacctcctgctgttgtattcaacttggaaattgtcacagaaatatatccccagctaaacacatcactggaggggctgtacaagtctactggtaacttctgcacccagtgtgaagcagaagggtttcggaagattacctactttcaggaccgcccagatgttatggcaaaatatacttgccgcattgaagctgataaaactttgtatccggttttattgtccaatgggaatcttattgagcagggagaccttgagggtggaaagcattacgcactgtgggaggatcccttcaagaaaccaagctacctgtttgctctagttgctggtcagctgggatgccgggaggattcatttgttacatgctctggccgcaacgtaacactaagaatttggactcctgcccaagatttaccaaaaacagcacatgctatgtattctcttaaagcagcaatgaaatgggatgaggaggtctttggtctggagtatgatcttgatttattcaacattgttgttgttcctgatttcaatatgggagcaatggaaaacaagagcttgaatatatttcaatctagacttgtgttggcatcaccggagactgccactgatggtgattatgctgctattttgggtgttgttggacatgagtatttccacaactggactgggaatagagtaacttgccgtgattggttccagctaaccctgaaagaaggactgaccgttttcagggatcaggagttctcttcagatcttggctgtcgtacggtaaaacgtattgctgatgtctccaaacttagaatctatcaattcccacaggacgccgggcctatggcacatcctatccgtccccattcttatatcaagatggacaacttctatactgatcaggtttacgagaagggtgctgaagttgtcagaatgtacaagaccatgtttggagcatcagggttccgaaagggcatggatctttattttaaaaggcatgatgggcaagctgtcacttgtgaagacttctatgcagccatgtgtgatgcaaataatgcacaactgccaaactttttacaatggtactctcaagcaggtacgcctatagtcaaggtggcatcttcatatgatcctagttctcagacattctctttgaaacttagccaagaagtaccacccactcctggccagccggttaaggagcctatgttcatacctgttgctgttggacttgttgactctactggaaaagatatgcccctcacttccgtttacagtgatggaagtctccaaacagtctctactgatggccagccagtcttcactactgtgcttcagtttaaaaagaaagaagaagagtttatgtttaaaaacattcctgagaggccagttccttctttgttaaggggatatagtgctcctgtccgtctagattctgatctgagtgagggtgacctatttttcttgcttgccagtgactcggatgaatttaacagatgggaagctggccaagttttggcacgtaagttgatgctcagtctcgtagctgatttccagcaacagaaaacactggttctaaatccgaaatttgttgatgggattagatcaattctgcgcaacacaagcttggataaggaattcattgcgaaagcaataactttgcctggtcaaggggagattatggatatgatggaagttgcagatcctgatgcagttcatgctgtccgtaactttattaagaaggagcttgccgtgcaacttaaagatgatcttcttgcggctgtgaaaagcaacaggagttctgaggcttacacatttaaccatgatagtatggctcgccgtgcattaaaaaatacatgccttgcataccttgcgtcattgaatgagccagatttcgttgagcttgcactgcatgagtacaagtctgcgactaacatgacagagcagtttgctgcattagcagcattatcccaaaatccaggccaagttcgtgatgatgccctcttggatttctataacaagtggcagcatgaatacttggttgtaagcaagtggtttgctcttcaagctacttcagagattcctggaaatgttgcaaatgttcagaagctgctgtctcaccctgctttcgacctgaggaatcccaacaaggtgtactcactaatcgggggattctgtggctcacctgtgaacttccacgcgaaagatggttctgggtacaagttcttgggtgagatcgttttgcagcttgacaagataaaccctcaggtggcctcccgcatggtttcagcattttctcggtggaggcggtacgacaagaccagacaagctcttgctaaggcccagctggagatgatcgtgtcggccaatgggctctccgaaaacgtgttcgagattgcttcaaaaagcttggcggattagcttgggcagttccgaggaattgcgagtgggagtgcttaactgaatctctcttttgttggtaaaatgacaagtagagataataaacaggcgggccgaatttgcatgaactgataaaatataagtgtgatgatgcccgctttgtggggggctttggagcatgcatgcgcgctcgtctgttggaatggaactgctgtttttttttttttacgttctccgctcagcggaccgctgtggggcagaaaacatctgaagcacgacggctgctctctgtctctgtttctctctcgaactcgcggtttggttatcagtcggtcctgtggaacccttggcttcgacaaagctggaaaagt

SEQ ID NO: 89053 - DNA, 3609 bp, Zea Mays
caaaggcccacggcatcgccaaccagtgaaatcatcctaacatccgtaacgccatcctcgccgccgccgcagcctcctgcgctccgctccactggtggtggtagggagtgcagcggatccatcccgtgtcccgatccgatcccttcgctgctagtttaggattcatccttcgacgtttgggattggttcggttgggatggcgcgtcgcctgattagccccgcagcggcgtgccgaggctgcggtttggttaggaccgggtttctgcccgccatctcctccttccattatcgagccttgccatcgtgctcaccgaagaggacttcatcagtaaagaattgctttagcaacacttacaatataaggaaagagggttcacgttggatacaatccggtcctcccttgttgctaaatagggtaaagtttgttggcaagaggacatcctgttctgttgcaacagagccgccgcctgctgccactgaagaaccaggcatggatgtccccaaggagatattcttgaaagattacaaggcacctgattattattttgacacggtggatttacaatttcaacttggtgaagaaaagaccatagttacatctaaaatagttgtatctcctggagttgaaggcatctcagctccactagttcttcatgggcatgacctcaagctcatatcaatcaaagtcaatggcactgaattaaagggtgaagagtataaagtcaattctcgccatctgatgctttcaacacctcctgctgttgtattcaacttggaaattgtcacagaaatatatccccagctaaacacatcactggaggggctgtacaagtctactggtaacttctgcacccagtgtgaagcagaagggtttcggaagattacctactttcaggaccgcccagatgttatggcaaaatatacttgccgcattgaagctgataaaactttgtatccggttttattgtccaatgggaatcttattgagcagggagaccttgagggtggaaagcattacgcactgtgggaggatcccttcaagaaaccaagctacctgtttgctctagttgctggtcagctgggatgccgggaggattcatttgttacatgctctggccgcaacgtaacactaagaatttggactcctgcccaagatttaccaaaaacagcacatgctatgtattctcttaaagcagcaatgaaatgggatgaggaggtctttggtctggagtatgatcttgatttattcaacattgttgttgttcctgatttcaatatgtaagttcttttcatgaacagatatttcaatctagacttgtgttggcatcaccggagactgccactgatggtgattatgctgctattttgggtgttgttggacatgagtatttccacaactggactgggaatagagtaacttgccgtgattggttccagctaaccctgaaagaaggactgaccgttttcagggatcaggagttctcttcagatcttggctgtcgtacggtaaaacgtattgctgatgtctccaaacttagaatctatcaattcccacaggacgccgggcctatggcacatcctatccgtccccattcttatatcaaggtgctaatgctcaattattctgtgatttaagtatagggtgctgaagttgtcagaatgtacaagaccatgtttggagcatcagggttccgaaagggcatggatctttattttaaaaggcatgatgggcaagctgtcacttgtgaagacttctatgcagccatgtgtgatgcaaataatgcacaactgccaaactttttacaatggtactctcaagcaggtacgcctatagtcaaggtggcatcttcatatgatcctagttctcagacattctctttgaaacttagccaagaagtaccacccactcctggccagccggttaaggagcctatgttcatacctgttgctgttggacttgttgactctactggaaaagatatgcccctcacttccgtttacagtgatggaagtctccaaacagtctctactgatggccagccagtcttcactactgtgcttcagtttaaaaagaaagaagaagagtttatgtttaaaaacattcctgagaggccagttccttctttgttaaggggatatagtgctcctgtccgtctagattctgatctgagtgagggtgacctatttttcttgcttgccagtgactcggatgaatttaacagatgggaagctggccaagttttggcacgtaagttgatgctcagtctcgtagctgatttccagcaacagaaaacactggttctaaatccgaaatttgttgatgggattagatcaattctgcgcaacacaagcttggataaggaattcattgcgaaagcaataactttgcctggtcaaggggagattatggatatgatggaagttgcagatcctgatgcagttcatgctgtccgtaactttattaagaaggagcttgccgtgcaacttaaagatgatcttcttgcggctgtgaaaagcaacaggagttctgaggcttacacatttaaccatgatagtatggctcgccgtgcattaaaaaatacatgccttgcataccttgcgtcattgaatgagccagatttcgttgagcttgcactgcatgagtacaagtctgcgactaacatgacagagcagtttgctgcattagcagcattatcccaaaatccaggccaagttcgtgatgatgccctcttggatttctataacaagtggcagcatgaatacttggttgtaagcaagtggtttgctcttcaagctacttcagagattcctggaaatgttgcaaatgttcagaagctgctgtctcaccctgctttcgacctgaggaatcccaacaaggtgtactcactaatcgggggattctgtggctcacctgtgaacttccacgcgaaagatggttctgggtacaagttcttgggtgagatcgttttgcagcttgacaagataaaccctcaggtggcctcccgcatggtttcagcattttctcggtggaggcggtacgacaagaccagacaagctcttgctaaggcccagctggagatgatcgtgtcggccaatgggctctccgaaaacgtgttcgagattgcttcaaaaagcttggcggattagcttgggcagttccgaggaattgcgagtgggagtgcttaactgaatctctcttttgttggtaaaatgacaagtagagataataaacaggcgggccgaatttgcatgaactgataaaatataagtgtgatgatgcccgctttgtggggggctttggagcatgcatgcgcgctcgtctgttggaatggaactgctgtttttttttttttacgttctccgctcagcggaccgctgtggggcagaaaacatctgaagcacgacggctgctctctgtctctgtttctctctcgaactcgcggtttggttatcagtcggtcctgtggaacccttggcttcgacaaagctggaaaagtttggagctttccagtcatgccaggttcttctagcacactccagcaagtaggagcaagtgttctttttggctggtttgttggcaccgtatttcttttggtttcttaagttttc

SEQ ID NO: 89054 - DNA, 3484 bp, Zea Mays
caaaggcccacggcatcgccaaccagtgaaatcatcctaacatccgtaacgccatcctcgccgccgccgcagcctcctgcgctccgctccactggtggtggtagggagtgcagcggatccatcccgtgtcccgatccgatcccttcgctgctagtatcgagccttgccatcgtgctcaccgaagaggacttcatcagtaaagaattgctttagcaacacttacaatataaggaaagagggttcacgttggatacaatccggtcctcccttgttgctaaatagggtaaagtttgttggcaagaggacatcctgttctgttgcaacagagccgccgcctgctgccactgaagaaccaggcatggatgtccccaaggagatattcttgaaagattacaaggcacctgattattattttgacacggtggatttacaatttcaacttggtgaagaaaagaccatagttacatctaaaatagttgtatctcctggagttgaaggcatctcagctccactagttcttcatgggcatgacctcaagctcatatcaatcaaagtcaatggcactgaattaaagggtgaagagtataaagtcaattctcgccatctgatgctttcaacacctcctgctgttgtattcaacttggaaattgtcacagaaatatatccccagctaaacacatcactggaggggctgtacaagtctactggtaacttctgcacccagtgtgaagcagaagggtttcggaagattacctactttcaggaccgcccagatgttatggcaaaatatacttgccgcattgaagctgataaaactttgtatccggttttattgtccaatgggaatcttattgagcagggagaccttgagggtggaaagcattacgcactgtgggaggatcccttcaagaaaccaagctacctgtttgctctagttgctggtcagctgggatgccgggaggattcatttgttacatgctctggccgcaacgtaacactaagaatttggactcctgcccaagatttaccaaaaacagcacatgctatgtattctcttaaagcagcaatgaaatgggatgaggaggtctttggtctggagtatgatcttgatttattcaacattgttgttgttcctgatttcaatatgggagcaatggaaaacaagagcttgaatatatttcaatctagacttgtgttggcatcaccggagactgccactgatggtgattatgctgctattttgggtgttgttggacatgagtatttccacaactggactgggaatagagtaacttgccgtgattggttccagctaaccctgaaagaaggactgaccgttttcagggatcaggagttctcttcagatcttggctgtcgtacggtaaaacgtattgctgatgtctccaaacttagaatctatcaattcccacaggacgccgggcctatggcacatcctatccgtccccattcttatatcaaggtgctaatgctcaattattctgtgatttaagtatagggtgctgaagttgtcagaatgtacaagaccatgtttggagcatcagggttccgaaagggcatggatctttattttaaaaggcatgatgggcaagctgtcacttgtgaagacttctatgcagccatgtgtgatgcaaataatgcacaactgccaaactttttacaatggtactctcaagcaggtacgcctatagtcaaggtggcatcttcatatgatcctagttctcagacattctctttgaaacttagccaagaagtaccacccactcctggccagccggttaaggagcctatgttcatacctgttgctgttggacttgttgactctactggaaaagatatgcccctcacttccgtttacagtgatggaagtctccaaacagtctctactgatggccagccagtcttcactactgtgcttcagtttaaaaagaaagaagaagagtttatgtttaaaaacattcctgagaggccagttccttctttgttaaggggatatagtgctcctgtccgtctagattctgatctgagtgagggtgacctatttttcttgcttgccagtgactcggatgaatttaacagatgggaagctggccaagttttggcacgtaagttgatgctcagtctcgtagctgatttccagcaacagaaaacactggttctaaatccgaaatttgttgatgggattagatcaattctgcgcaacacaagcttggataaggaattcattgcgaaagcaataactttgcctggtcaaggggagattatggatatgatggaagttgcagatcctgatgcagttcatgctgtccgtaactttattaagaaggagcttgccgtgcaacttaaagatgatcttcttgcggctgtgaaaagcaacaggagttctgaggcttacacatttaaccatgatagtatggctcgccgtgcattaaaaaatacatgccttgcataccttgcgtcattgaatgagccagatttcgttgagcttgcactgcatgagtacaagtctgcgactaacatgacagagcagtttgctgcattagcagcattatcccaaaatccaggccaagttcgtgatgatgccctcttggatttctataacaagtggcagcatgaatacttggttgtaagcaagtggtttgctcttcaagctacttcagagattcctggaaatgttgcaaatgttcagaagctgctgtctcaccctgctttcgacctgaggaatcccaacaaggtgtactcactaatcgggggattctgtggctcacctgtgaacttccacgcgaaagatggttctgggtacaagttcttgggtgagatcgttttgcagcttgacaagataaaccctcaggtggcctcccgcatggtttcagcattttctcggtggaggcggtacgacaagaccagacaagctcttgctaaggcccagctggagatgatcgtgtcggccaatgggctctccgaaaacgtgttcgagattgcttcaaaaagcttggcggattagcttgggcagttccgaggaattgcgagtgggagtgcttaactgaatctctcttttgttggtaaaatgacaagtagagataataaacaggcgggccgaatttgcatgaactgataaaatataagtgtgatgatgcccgctttgtggggggctttggagcatgcatgcgcgctcgtctgttggaatggaactgctgtttttttttttttacgttctccgctcagcggaccgctgtggggcagaaaacatctgaagcacgacggctgctctctgtctctgtttctctctcgaactcgcggtttggttatcagtcggtcctgtggaacccttggcttcgacaaagctggaaaagtttggagctttccagtcatgccaggttcttctagcacactccagcaagtaggagcaagtgttctttttggctggtttgttggcaccgtatttcttttggtttcttaagttttc

SEQ ID NO: 89055 - DNA, 3339 bp, Zea Mays
atcctaacatccgtaacgccatcctcgccgccgccgcagcctcctgcgctccgctccactggtggtggtagggagtgcagcggatccatcccgtgtcccgatccgatcccttcgctgctagtatcgagccttgccatcgtgctcaccgaagaggacttcatcagtaaagaattgctttagcaacacttacaatataaggaaagagggttcacgttggatacaatccggtcctcccttgttgctaaatagggtaaagtttgttggcaagaggacatcctgttctgttgcaacagagccgccgcctgctgccactgaagaaccaggcatggatgtccccaaggagatattcttgaaagattacaaggcacctgattattattttgacacggtggatttacaatttcaacttggtgaagaaaagaccatagttacatctaaaatagttgtatctcctggagttgaaggcatctcagctccactagttcttcatgggcatgacctcaagctcatatcaatcaaagtcaatggcactgaattaaagggtgaagagtataaagtcaattctcgccatctgatgctttcaacacctcctgctgttgtattcaacttggaaattgtcacagaaatatatccccagctaaacacatcactggaggggctgtacaagtctactggtaacttctgcacccagtgtgaagcagaagggtttcggaagattacctactttcaggaccgcccagatgttatggcaaaatatacttgccgcattgaagctgataaaactttgtatccggttttattgtccaatgggaatcttattgagcagggagaccttgagggtggaaagcattacgcactgtgggaggatcccttcaagaaaccaagctacctgtttgctctagttgctggtcagctgggatgccgggaggattcatttgttacatgctctggccgcaacgtaacactaagaatttggactcctgcccaagatttaccaaaaacagcacatgctatgtattctcttaaagcagcaatgaaatgggatgaggaggtctttggtctggagtatgatcttgatttattcaacattgttgttgttcctgatttcaatatgggagcaatggaaaacaagagcttgaatatatttcaatctagacttgtgttggcatcaccggagactgccactgatggtgattatgctgctattttgggtgttgttggacatgagtatttccacaactggactgggaatagagtaacttgccgtgattggttccagctaaccctgaaagaaggactgaccgttttcagggatcaggagttctcttcagatcttggctgtcgtacggtaaaacgtattgctgatgtctccaaacttagaatctatcaattcccacaggacgccgggcctatggcacatcctatccgtccccattcttatatcaagatggacaacttctatactggtgagtttttggtatagggtgctgaagttgtcagaatgtacaagaccatgtttggagcatcagggttccgaaagggcatggatctttattttaaaaggcatgatgggcaagctgtcacttgtgaagacttctatgcagccatgtgtgatgcaaataatgcacaactgccaaactttttacaatggtactctcaagcaggtacgcctatagtcaaggtggcatcttcatatgatcctagttctcagacattctctttgaaacttagccaagaagtaccacccactcctggccagccggttaaggagcctatgttcatacctgttgctgttggacttgttgactctactggaaaagatatgcccctcacttccgtttacagtgatggaagtctccaaacagtctctactgatggccagccagtcttcactactgtgcttcagtttaaaaagaaagaagaagagtttatgtttaaaaacattcctgagaggccagttccttctttgttaaggggatatagtgctcctgtccgtctagattctgatctgagtgagggtgacctatttttcttgcttgccagtgactcggatgaatttaacagatgggaagctggccaagttttggcacgtaagttgatgctcagtctcgtagctgatttccagcaacagaaaacactggttctaaatccgaaatttgttgatgggattagatcaattctgcgcaacacaagcttggataaggaattcattgcgaaagcaataactttgcctggtcaaggggagattatggatatgatggaagttgcagatcctgatgcagttcatgctgtccgtaactttattaagaaggagcttgccgtgcaacttaaagatgatcttcttgcggctgtgaaaagcaacaggagttctgaggcttacacatttaaccatgatagtatggctcgccgtgcattaaaaaatacatgccttgcataccttgcgtcattgaatgagccagatttcgttgagcttgcactgcatgagtacaagtctgcgactaacatgacagagcagtttgctgcattagcagcattatcccaaaatccaggccaagttcgtgatgatgccctcttggatttctataacaagtggcagcatgaatacttggttgtaagcaagtggtttgctcttcaagctacttcagagattcctggaaatgttgcaaatgttcagaagctgctgtctcaccctgctttcgacctgaggaatcccaacaaggtgtactcactaatcgggggattctgtggctcacctgtgaacttccacgcgaaagatggttctgggtacaagttcttgggtgagatcgttttgcagcttgacaagataaaccctcaggtggcctcccgcatggtttcagcattttctcggtggaggcggtacgacaagaccagacaagctcttgctaaggcccagctggagatgatcgtgtcggccaatgggctctccgaaaacgtgttcgagattgcttcaaaaagcttggcggattagcttgggcagttccgaggaattgcgagtgggagtgcttaactgaatctctcttttgttggtaaaatgacaagtagagataataaacaggcgggccgaatttgcatgaactgataaaatataagtgtgatgatgcccgctttgtggggggctttggagcatgcatgcgcgctcgtctgttggaatggaactgctgtttttttttttttacgttctccgctcagcggaccgctgtggggcagaaaacatctgaagcacgacggctgctctctgtctctgtttctctctcgaactcgcggtttggttatcagtcggtcctgtggaacccttggcttcgacaaagctggaaaagt

SEQ ID NO: 89056 - DNA, 3324 bp, Zea Mays
atcctaacatccgtaacgccatcctcgccgccgccgcagcctcctgcgctccgctccactggtggtggtagggagtgcagcggatccatcccgtgtcccgatccgatcccttcgctgctagtatcgagccttgccatcgtgctcaccgaagaggacttcatcagtaaagaattgctttagcaacacttacaatataaggaaagagggttcacgttggatacaatccggtcctcccttgttgctaaatagggtaaagtttgttggcaagaggacatcctgttctgttgcaacagagccgccgcctgctgccactgaagaaccaggcatggatgtccccaaggagatattcttgaaagattacaaggcacctgattattattttgacacggtggatttacaatttcaacttggtgaagaaaagaccatagttacatctaaaatagttgtatctcctggagttgaaggcatctcagctccactagttcttcatgggcatgacctcaagctcatatcaatcaaagtcaatggcactgaattaaagggtgaagagtataaagtcaattctcgccatctgatgctttcaacacctcctgctgttgtattcaacttggaaattgtcacagaaatatatccccagctaaacacatcactggaggggctgtacaagtctactggtaacttctgcacccagtgtgaagcagaagggtttcggaagattacctactttcaggaccgcccagatgttatggcaaaatatacttgccgcattgaagctgataaaactttgtatccggttttattgtccaatgggaatcttattgagcagggagaccttgagggtggaaagcattacgcactgtgggaggatcccttcaagaaaccaagctacctgtttgctctagttgctggtcagctgggatgccgggaggattcatttgttacatgctctggccgcaacgtaacactaagaatttggactcctgcccaagatttaccaaaaacagcacatgctatgtattctcttaaagcagcaatgaaatgggatgaggaggtctttggtctggagtatgatcttgatttattcaacattgttgttgttcctgatttcaatatgggagcaatggaaaacaagagcttgaatatatttcaatctagacttgtgttggcatcaccggagactgccactgatggtgattatgctgctattttgggtgttgttggacatgagtatttccacaactggactgggaatagagtaacttgccgtgattggttccagctaaccctgaaagaaggactgaccgttttcagggatcaggagttctcttcagatcttggctgtcgtacggtaaaacgtattgctgatgtctccaaacttagaatctatcaattcccacaggacgccgggcctatggcacatcctatccgtccccattcttatatcaagatggacaacttctatactggtgagtttttggtatagggtgctgaagttgtcagaatgtacaagaccatgtttggagcatcagggttccgaaagggcatggatctttattttaaaaggcatgatgggcaagctgtcacttgtgaagacttctatgcagccatgtgtgatgcaaataatgcacaactgccaaactttttacaatggtactctcaagcaggtacgcctatagtcaaggtggcatcttcatatgatcctagttctcagacattctctttgaaacttagccaagaagtaccacccactcctggccagccggttaaggagcctatgttcatacctgttgctgttggacttgttgactctactggaaaagatatgcccctcacttccgtttacagtgatggaagtctccaaacagtctctactgatggccagccagtcttcactactgtgcttcagtttaaaaagaaagaagaagagtttatgtttaaaaacattcctgagaggccagttccttctttgttaaggggatatagtgctcctgtccgtctagattctgatctgagtgagggtgacctatttttcttgcttgccagtgactcggatgaatttaacagatgggaagctggccaagttttggcacgtaagttgatgctcagtctcgtagctgatttccagcaacagaaaacactggttctaaatccgaaatttgttgatgggattagatcaattctgcgcaacacaagcttggataaggaattcattgcgaaagcaataactttgcctggtcaaggggagattatggatatgatggaagttgcagatcctgatgcagttcatgctgtccgtaactttattaagaaggagcttgccgtgcaacttaaagatgtgaaaagcaacaggagttctgaggcttacacatttaaccatgatagtatggctcgccgtgcattaaaaaatacatgccttgcataccttgcgtcattgaatgagccagatttcgttgagcttgcactgcatgagtacaagtctgcgactaacatgacagagcagtttgctgcattagcagcattatcccaaaatccaggccaagttcgtgatgatgccctcttggatttctataacaagtggcagcatgaatacttggttgtaagcaagtggtttgctcttcaagctacttcagagattcctggaaatgttgcaaatgttcagaagctgctgtctcaccctgctttcgacctgaggaatcccaacaaggtgtactcactaatcgggggattctgtggctcacctgtgaacttccacgcgaaagatggttctgggtacaagttcttgggtgagatcgttttgcagcttgacaagataaaccctcaggtggcctcccgcatggtttcagcattttctcggtggaggcggtacgacaagaccagacaagctcttgctaaggcccagctggagatgatcgtgtcggccaatgggctctccgaaaacgtgttcgagattgcttcaaaaagcttggcggattagcttgggcagttccgaggaattgcgagtgggagtgcttaactgaatctctcttttgttggtaaaatgacaagtagagataataaacaggcgggccgaatttgcatgaactgataaaatataagtgtgatgatgcccgctttgtggggggctttggagcatgcatgcgcgctcgtctgttggaatggaactgctgtttttttttttttacgttctccgctcagcggaccgctgtggggcagaaaacatctgaagcacgacggctgctctctgtctctgtttctctctcgaactcgcggtttggttatcagtcggtcctgtggaacccttggcttcgacaaagctggaaaagt

SEQ ID NO: 89057 - DNA, 1276 bp, Zea Mays
acatctcccgccacactatttataccttccctcccgttggcatcctcccactcgctcaccatcagcgatccttctctcttgagtgtcctcccatctcatccaatccatccccgccaccacaggcaaaggcaacccaaaaggagccgccatgggctcccgctacgaggtggaggtgacggtggggtcggcgagcaacctgaagaacgtcaactggcgcaacggcgacctccggccctacgccgtgctgtgggtggacgacgggcccaagtgctccacccgcgtcgaccccgacaacggcgaggaccccgtgtgggacgagaaggtggtggtccccgtcccgcccgcctccgccgcgcgcctgggcgacgccgtcctccacatcgacgtcgtccacgccgccggcgacgacgccgacgccgtcaagccgctcgtgggctccgcgcgcctcccgctccgcgacgtcctcgatgacgccggcggcgtcggcggcgccagggtctcgcgcacgctcaggctgaagcggccctcgggccgcccgcagggccggctcgaggcccgcgtcgccgtccgcgaggccgcgccgccgccgcgctactacgacccgaacccgtacccggcgcccgcgtacgggaaccccggcgccgcccgcgacccgtactacgcggcgccgccggcgtacggcggacagccgccgtacgccgcgccgccggtggggtacccggccgacgctcctcctccctacggcggtggttatggctacggagctgctgctccgacggcgtacggcgctgaggctgctccactacctgcccagcagcagaagagcagcaagatggggatggggacggggctggccgtgggcgccgcggcggggctgctgggcggcctcgcgctggcggaaggggcgagctacgtggaggacaagttcgaggatcgcgtcgccgagagggtggaggaggagacgttcggcgacggagattacgatgacgattactagaatgaagcaggtcggagaggagatcatgatcatgcatacggaaccgaaatccaggcaacaagtcgaagtcgagtagctcaaatgtattcaaataataagtgagatcaccccagtcgagaaaaaaaatcaaaacttgaaccatggcaatatatgttaatcgccaaccatttgatcgagtacttggtttgattgtccaattcgaaccgtatcttgctttccatgtcgtacgtgggcgcctatatatattttttgcagtatgaacagaaaagaaaagaaaaa

SEQ ID NO: 89058 - DNA, 2547 bp, Zea Mays
ctaccacctccatcgcttttctccacctccaaggctccaattcaattccatcgcgctgtcgtcttcgttgcccggtcgccattttttcctcctgatttcttctttttcttccctcactatatggtcaggcctctgcctgtccctctcgtgtcgtgccgttgtgcggtgctcgatcctgcccgtcgcctctccggccaccgctgagaagatccaccattaaatgcctgatccacccacctcctcctcctggcttccctatatcactcacccatccacctcgcttcgacctcacctcacagactcctcacacttagtactgttagccaggaacaagccccagcagcagcagcagcaatggccgtggagaacggcagcgccgacgaggcggcggcggtgaccgtgaccgtgaccggcgcccgcaccgtggcgccggccaagaaccgctgcacgctcgccaccttcgacctcccctacatcaccttctactacaaccagaagctgctcctgtaccgcgccgcccccgacttcccggacgccgtggcgcgcatgacggccgcgctcgccgacgcgctccgcgtcttctacccgctcgccggccgcatccgccaggacgacggcggcgcgctggcagtcgagggcgacgagggcgccgaggtcttcgaggccgaggcccagggcgtcgccgtcgacgacctcgccggaggggactgcagcgacgaggcggagaaggtcttgcagcacctcgtgccctacaccggcgtcatgaacctcgagggcctccgccgcccgcttctcgccgtccaagtgagtgccgttgtattgtagtatttccgagatctttcggtcgcgctatggatcacagcatgcaaacaggataaacttgacacgccattcccattaattatcagttgcgtgacgccttgttcaaaatcgaaacgtacaaatcccttacattcttcatgatgtcatgttaacacagcaaacaggataaactttaaaaacatagtattttttttaaaaaaaacaaatttacgattttagacaatgcatacatcatcttgctccgatccacattaatctccacagtaaatgagtcttgaatgtcaacctacccactgtatactggcagatggaagtaatgcattgctggtaccaagtaccccaacagcggctgcctgtacagtgcacataaaccattggccaggcaacataagtcatcttgtttttacagcgatgcgtttgcatgcatgcagttcacaaagctcaaggacggtctggcggtggggtgcgccttcaaccacgcggtgctggacggcacctccacgtggcacttcatgtcctcctgggccgagctctgccgcggcgtacccctgtcgctgcagcccatccacgaccggtccctgtcccgctccgtgcgcgtgcggctggagctgccggcgtccgccgaggcccacgagaagacggacccgaacgggccgaagaaggcgctggtggcccgcgtcttctcgttcccggagcccaccgtggcgcgcatcaaggccgcggccaacgcggcgctgccgccgggcgcaaagcccttctcaacgttccagtccctgggggcgcacatctggcgcgccgtctcccgcgcccggggcctcggccccgccgacatcaccgccttcgccgtcttcgccgactgccgcgcccgcctcgacccgcccctcccgccggcctacttcggcaacctcatccaggcggtgttcacgggcgtgcccgcggggatgctcctgggcgggccccccgagctgcccgcgggcctgctgcagaaggccatcgacgagcacgacgccgccgcggtcaccaggaggctggaggagtacgaggcggcgcccaagctgttccactacagcgacgccggccccaactgcgtggccgtcggcagctcgccgcgcttcagggtctacgacgtcgacttcggcttcggacggcccgagcgcgtccgcagcggcgggaacaacaagttcgacggcatggtgtacctgtaccccggccgcggcggtgacggcggcatcgacgtcgagctggcgctgcagccggagcccatgcagaggctggagaaggacgacgacttcttcctgcgccaggcggcagcctaagcccgagtcgtcgatcgtcgtgtcagtgtccactgtccacccatccagttcgttgatcgtgctttattttagtagtaagtattgtgtacgttcctgcttgctatattattattatactagtgttttgctttgttccttgattaattgtacgagctaggcgtgcgtgttggattacactgtatttgctggactggagctgaataaggatggaccagacttcgattagtttgtgcaagctcacgagtgatcgagcatggtccctatatatgtcatcactcgttgtagtaatgcagtaatgtactcattatattgttatgcatgtacttccacttgtaccataccatggaatcgaaccaatcaaccaatgcaagaatttagaatctacgtgcaaccatggagtattttctga

SEQ ID NO: 89059 - DNA, 2098 bp, Zea Mays
ctaccacctccatcgcttttctccacctccaaggctccaattcaattccatcgcgctgtcgtcttcgttgcccggtcgccattttttcctcctgatttcttctttttcttccctcactatatggtcaggcctctgcctgtccctctcgtgtcgtgccgttgtgcggtgctcgatcctgcccgtcgcctctccggccaccgctgagaagatccaccattaaatgcctgatccacccacctcctcctcctggcttccctatatcactcacccatccacctcgcttcgacctcacctcacagactcctcacacttagtactgttagccaggaacaagccccagcagcagcagcagcaatggccgtggagaacggcagcgccgacgaggcggcggcggtgaccgtgaccgtgaccggcgcccgcaccgtggcgccggccaagaaccgctgcacgctcgccaccttcgacctcccctacatcaccttctactacaaccagaagctgctcctgtaccgcgccgcccccgacttcccggacgccgtggcgcgcatgacggccgcgctcgccgacgcgctccgcgtcttctacccgctcgccggccgcatccgccaggacgacggcggcgcgctggcagtcgagggcgacgagggcgccgaggtcttcgaggccgaggcccagggcgtcgccgtcgacgacctcgccggaggggactgcagcgacgaggcggagaaggtcttgcagcacctcgtgccctacaccggcgtcatgaacctcgagggcctccgccgcccgcttctcgccgtccaattcacaaagctcaaggacggtctggcggtggggtgcgccttcaaccacgcggtgctggacggcacctccacgtggcacttcatgtcctcctgggccgagctctgccgcggcgtacccctgtcgctgcagcccatccacgaccggtccctgtcccgctccgtgcgcgtgcggctggagctgccggcgtccgccgaggcccacgagaagacggacccgaacgggccgaagaaggcgctggtggcccgcgtcttctcgttcccggagcccaccgtggcgcgcatcaaggccgcggccaacgcggcgctgccgccgggcgcaaagcccttctcaacgttccagtccctgggggcgcacatctggcgcgccgtctcccgcgcccggggcctcggccccgccgacatcaccgccttcgccgtcttcgccgactgccgcgcccgcctcgacccgcccctcccgccggcctacttcggcaacctcatccaggcggtgttcacgggcgtgcccgcggggatgctcctgggcgggccccccgagctgcccgcgggcctgctgcagaaggccatcgacgagcacgacgccgccgcggtcaccaggaggctggaggagtacgaggcggcgcccaagctgttccactacagcgacgccggccccaactgcgtggccgtcggcagctcgccgcgcttcagggtctacgacgtcgacttcggcttcggacggcccgagcgcgtccgcagcggcgggaacaacaagttcgacggcatggtgtacctgtaccccggccgcggcggtgacggcggcatcgacgtcgagctggcgctgcagccggagcccatgcagaggctggagaaggacgacgacttcttcctgcgccaggcggcagcctaagcccgagtcgtcgatcgtcgtgtcagtgtccactgtccacccatccagttcgttgatcgtgctttattttagtagtaagtattgtgtacgttcctgcttgctatattattattatactagtgttttgctttgttccttgattaattgtacgagctaggcgtgcgtgttggattacactgtatttgctggactggagctgaataaggatggaccagacttcgattagtttgtgcaagctcacgagtgatcgagcatggtccctatatatgtcatcactcgttgtagtaatgcagtaatgtactcattatattgttatgcatgtacttccacttgtaccataccatggaatcgaaccaatcaaccaatgcaagaatttagaatctacgtgcaaccatggagtattttctga

SEQ ID NO: 89060 - DNA, 1572 bp, Zea Mays
atgccccataaactgagtctgcactgagctactcctggctaccgcaccacgcttcacccggcgtgcactccatctctctgggacgactacggccgccgccgccgccgcccccacctacgccaggtgccgaggccttcgttggcctcttcgccggtgacgagaacctaccagacttggagcaagcctctcaacatgtcgtgggccgcaatcgagaatgatcctggtgtttttacggaactgttgcagcagatgcaactgaagggtcttcaagttgatgaactctactcacttgacctggatgctctcaatgatcttcagccaatatatgggctaatattgctatacaaatggcgacctccagaaaaggatgagggtcctgtcatcaaggatgcaatcccaaaccttttctttgccaaccagataattaacaaagcctgcgcaacccaagctatcgtttcggttctcttgaactctcctggcattacccttagtgatgagcttaaaaagctcaaggaatttgcaaaggatttgccacctgagctcaaaggactggctatagtaaactgcgcaagcattcgtatgttaaacaattcgtttgcaaggtcagaggcctctgaggagcagaaaccacctagcggggatgatgatgtataccatttcataaactacgttccagtggatggtgtcctgtacgagcttgatgggctaaaggaaggaccaataagtctagggaaatgcccaggtggtgttggtgatgcagggtggtggcttaggctagcgcagcctgtgatcaaagagcacatcgacctgttctctcagaacgagataagattcagcgtgatggcgatcttgaagaaccggaaggagatgttcacggtggagatcaaagaactccagaggaagagggagggcctcttgcagcagatgggcgatcccaacgcaagcaggcatgttgagcagtcactcgcggaggtggcagctcagatcgagtctgtgacggagaagatcataatggaggaggagaaggtgaagaagtggaaagcggagaacctgaggaggaagcataactacgtgcccttcctattcaatttcctcaagattctcgaggagaagcagcagctgaagcccctgatagagaaggcgaaggcgaagcagaagtcccacggccccagctaggtgaaaagccgcaatgcacctacgtactgtctcttttagttggggttccttgtaagattggagttcgcgtatatgctttctgtttttagtttaggacaattgcaccaatagggtgcaactgcagatttatccctgttttttagactttgcgtgtgtgcctttagattttttgaaatgaaactgctgtatgtctctattccgttaaaccgttgtatgtctctacttcggttagtcgtatttagtatttaacggtgtcaagtcttgataatacgacaagggataattatgttagtgtccctgttttagggtagaactgtatatctatccttgttttttagactttgcgtgtttgcctgtacaattattatgcttaacatgatgaggatgttatgctct

SEQ ID NO: 89061 - DNA, 1785 bp, Zea Mays
cattagaaccatctggaaatgttttgcttgtttaatactttcattactttgtgtcagatgttgcctgatatagctcatgatgattatatgataaaacaaccttagtgagttgttaaggtccatttaaacatataaatgaccatcattttagtttagcctagctctttagggtgcctgaagccctgaaccatgtagctgcctttttacaagaccacaacagcctttatttaaaacatgctgtaatctattctaagcatactcggatagtaaaacagtggcaggtgtttccccttcatctgttgatccatgtagcttgttcttgtgcttttgaagcttttagttgtttctaataataaaactatagatagtatgcggcaacatagaacataaatttactttttccaaaacaagagtgaggctctcctattttgctatttcttcctttttgtgaaacttgacatttcttttacataataaaaaatcgggcagatatactctgttatctttttcattatcaggttgatgaactctactcacttgacctggatgctctcaatgatcttcagccaatatatgggctaatattgctatacaaatggcgacctccagaaaaggatgagggtcctgtcatcaaggatgcaatcccaaaccttttctttgccaaccagataattaacaaagcctgcgcaacccaagctatcgtttcggttctcttgaactctcctggcattacccttagtgatgagcttaaaaagctcaaggaatttgcaaaggatttgccacctgagctcaaaggactggctatagtaaactgcgcaagcattcgtatgttaaacaattcgtttgcaaggtcagaggcctctgaggagcagaaaccacctagcggggatgatgatgtataccatttcataaactacgttccagtggatggtgtcctgtacgagcttgatgggctaaaggaaggaccaataagtctagggaaatgcccaggtggtgttggtgatgcagggtggtggcttaggctagcgcagcctgtgatcaaagagcacatcgacctgttctctcagaacgagataagattcagcgtgatggcgatcttgaagaaccggaaggagatgttcacggtggagatcaaagaactccagaggaagagggagggcctcttgcagcagatgggcgatcccaacgcaagcaggcatgttgagcagtcactcgcggaggtggcagctcagatcgagtctgtgacggagaagatcataatggaggaggagaaggtgaagaagtggaaagcggagaacctgaggaggaagcataactacgtgcccttcctattcaatttcctcaagattctcgaggagaagcagcagctgaagcccctgatagagaaggcgaaggcgaagcagaagtcccacggccccagctaggtgaaaagccgcaatgcacctacgtactgtctcttttagttggggttccttgtaagattggagttcgcgtatatgctttctgtttttagtttaggacaattgcaccaatagggtgcaactgcagatttatccctgttttttagactttgcgtgtgtgcctttagattttttgaaatgaaactgctgtatgtctctattccgttaaaccgttgtatgtctctacttcggttagtcgtatttagtatttaacggtgtcaagtcttgataatacgacaagggataattatgttagtgtccctgttttagggtagaactgtatatctatccttgttttttagactttgcgtgtttgcctgtacaa

SEQ ID NO: 89062 - DNA, 393 bp, Zea Mays
cactggtggacgcatctccgggtggagcgtaataccttaagttttgatcataaaatccctcaattataagcgtaaatatcgagttaatgtgagaggttgatagctctagtaggttgttattacgatcctattttatgacagatccgaaaaacatggcagccgcatgcatgcggtttctatttttatacagatccaaaaattatggcaaaatcgtgggagtttccattgcatgcgcgcaaattacgaataacataaatcaaggaattgtctttccaatgtgcatacaaaaaatatgcatgcatcaaactgatatacgaacttcgtgtttaagcataaaatcgtacagtttttagcgtaaataatacatgtggtaggtataaaacacaataatcg

SEQ ID NO: 89063 - DNA, 2289 bp, Zea Mays
atggcgtgcgggtcactggacactgggtcagctgggctggaaaggcaaaacaaacagaatcatcagtgttacgtaataatccttggattttgcgctgtttaccatggtgttcccaaaaggcccctggcctttcttatagcccaagctacccccttcttcctcctctcatctctctcgggactttccccaatccactccactccaatccacttccctcctctgtcaaccctagccgcgccgccggcagtctgctcgggtggcgcatacatgacccacccttcctcgccgtcgtcctctgcgccgccaccgccgcccgccgcggcggcggcggcggcggcggccgaggccacctccctcgcgccgggtttccgcttccaccccaccgacgaggagctcgtgtcgtactacctcaagcgcaaggttctcggccgcccgctcaaggtcgacgccatcgccgaggtcgacctgtacaagctcgagccctgggacctgcccccgcgctcccgcctccgctcccgcgactcccagtggtacttcttcagccgcctcgaccgcaagcacgccaaccgcgctcgcaccaaccgcgccacgtcgggagggtactggaagaccaccggcaaggacagggaggtgcgccatgggcccagggtcgtcgggatgaagaagacgctcgtattccacgccgggcgcgcccccaagggcgagcgcaccaactgggtcatgcacgagtaccgcctcgagggcgacgccgccgtggagataccgcaggactcgtttgtggtgtgccggatattccagaaagctggcccaggtcctcagaatggggcacagtatggagcgccgttcgttgaggaggaatgggaggaggacgatgcagatgtcggtttgcttccagtggagggtgatgctgctgtcgaccctgaggttccccctggccctgtggagatccctggtgctttggagagaggctatcttcaaatgagtgatctcattcagggtttgggtgatcgaaatggaaatggtacacctagtttaccagtttctgatacttcacataacagcaaccattctgaagatgtagatggaaattctggggacattttaagtgacccaaaccttggctctaattttattcagtgtgttgaacctggggagcaaaatagcttaatgcttaatggaaatatcatatctaatgcaaatgctggagatttttttaataattccagccccagtgatgggttcctagagctgaaggattttgcagatgctgcagatctggatttccctttgggcaatggatcaaccatatggccttcagatggttgggcatggaaaacacctgactcagcggaagctgtaaatggagctaacgatgagattcctccactccctgatgaccagattttccagccagatgaactggaacaactgttgcagtcaatacaagaagattcccatttgggctcaactatcattgaccccatgcattcttccatgacaaattcagttctgcctgaggacgattatttgatgttctatgatgcacccttcgattccactatgtgtgatgggtatggacagaatggaattcttggctccgcagcagccaatctatctggcattggcatgatggaggatggtatggcatactttgatgcaatggatgataattcatttaatgatactctgggctccatacagcagtcagctggtagcagttcccatgcttttaatggcccagtccttacccaagaggtcaacaatactatgtgtacatatagtccaactcaaaaggttttagaacctaattttctagttggtgccccgtcatctgctaggttacctgaagctggtagtcagttaaattgtgttgttttaccagatggtcaggctaagagtagtactattggaaagggatttgtaaagattttggactcaatctccgctcccccagcttttgctggagaattcccagctatccaccgcaaatctttggctcatatttctggggggcgccccaacacactccatgtttctgctgaagtgatccgcgtaggaagtttagctgttccttctggcgcagataagtgggcgctgcataaagatcaagacatggagctggtcttttctgcagattttgagcctgatacccgtcttcactgtgctgcaatagccattaccgcgatgctgcgaggtgaattcaggccttttcttagtttcggcaacaatgctcaaagtgaggtatggggtggggaatgtaacctaagatatgtacaaggccgtctcgga

SEQ ID NO: 89064 - DNA, 102 bp, Zea Mays
gtaatttttctagaatttttgaagctcatagaacattttcatgcattagaaatagatttcagtattttctctaattaataaatctttaagattgaatatttt

SEQ ID NO: 89065 - DNA, 102 bp, Zea Mays
cttgtacctgcacagagtggttcgattgctagacaccacaaatcatgtaatctgtagacggtatgctaatgggttgcgcactaaacttcaccaaagttaagg

SEQ ID NO: 89066 - DNA, 1249 bp, Zea Mays
aggattaataaaagtaaaaaaattccaaccgcacacggcacctcctctcgtccgttcgccgcctggctcgcaccgctgacagtgcgtcagtccaggtcgatactccctctttccaagatccggtcattctctctcggggtcggctaccgccgccgccgtacgccaggtgccgactgccgagaccttctccgatctgtttgccggcgaagagcgcccgccaaatctgcccctggtttcaaccgattgaaccccgatgtccgacgtcgagaaccctggcgtgggtgggaagccgccgccgtacaaggaccctgacaatgggagtcagcgattcctactcgagttggagttcgtgcagtgcctcgccaaccctacctacatccactatctagcgcagaatagatatttcgaggatgaggcatttatcgggtacctcaagtatctaaaatactggcagcgaccagagtatatcaaatacataatgtatccacactgccttttctttcttgagcttctccaaaatgccaatttccgaaatgcaatggcacatccaacaaacaaggagcttgctcataggcagcaatatttcttctggaaaaactacaggaataacagactgaagcacatcataccgcgccctcctcctgaacctgcaccttcacaggcacctgctacattgcccctacaagcgtccgtgccgacacctgtagctccacctgttcctgcaccaacatcgtctatgccacctgtggtagcaggtggtgcatctgcaatgtctcctatgcagtttgtaggaactccaggcactaatatgccgaagaatgacatgagaaatgctatggacaatagaaaaaggaagatgggctaattgaagttcttgcgcaacttttcaacggacactgccggattcgagcacagttgctgcctcaggagccttattatttccttttgttttagtgctggttatttggccttgtagttgagggttcgtgagtttttagaatggaagcttctgacttagagtgaagttagaacaaatactccatgtcgcatgaacttgcacacgtgactttaggtgtcagcattctcctgaatgatcataccatttaccttaatgtttcagcatattgcttggcagcaggaaatatgtactgttcataaactatacatatgcccgttggccccaatacaaagttgacattttggcaatattctgttcatacaaaacaactgtacatgttttagtattttt

SEQ ID NO: 89067 - DNA, 1731 bp, Zea Mays
aaccgcacacggcacctcctctcgtccgttcgccgcctggctcgcaccgctgacagtgcgtcagtccaggtcgatactccctctttccaagatccggtcattctctctcggggtcggctaccgccgccgccgtacgccaggtgccgactgccgagaccttctccgatctgtttgccggcgaagagcgcccgccaaatctgcccctggtttcaaccgattgaaccccgatgtccgacgtcgagaaccctggcgtgggtgggaagccgccgccgtacaaggaccctgacaatgggagtcagcgattcctactcgagttggagttcgtgcagtgcctcgccaaccctacctacatccactatctagcgcagaatagatatttcgaggatgaggcatttatcgggtacctcaagtatctaaaatactggcagcgaccagagtatatcaaatacataatgtatccacactgccttttctttcttgagcttctccaaaatgccaatttccgaaatgcaatggcacatccaacaaacaaggagcttgctcataggcagcaatatttcttctggaaaaactacaggaataacagactgaagcacatcataccgcgccctcctcctgaacctgcaccttcacaggcacctgctacattgcccctacaagcgtccgtgccgacacctgtagctccacctgttcctgcaccaacatcgtctatgccacctgtggtagcaggtggtgcatctgcaatgtctcctatgcagtttgtaggaactccaggcactaatatgccgaagaatgacatgagaaatgctatggacaatagaaaaaggaagtatgcaccacctcccttgcaatcatccaacagtcattttatgaagttatttgtccatgcattgttttctttccttgctattttgtctgtgctatgaaatcattggtgaactattattttcgaaggacatgatccaattcagtttgatttatggccactcttccaatatagatcatgaagattctcctttccttacaggaaagatgattgagactctcaacatgttttttctgagggatgctatatcctcttccccattcactttggttgctcttcttcattgaagacggtggagaaatacttcttttacttctctgatctttggcccattatcccagtaaaattcatctgaagttctgtcaacaatgcatattgagtcaagtgttattcgttccattgtgcaaataaagactggataaagactagtcaattgaaatgtgaacgtcttgtagctgtgactgaatctgcatatttcttcagagcttataaatgtgatatgaatgtttcataaaactacagtttggctgatgatatgtatacatcttcatcgcaggatgggctaattgaagttcttgcgcaacttttcaacggacactgccggattcgagcacagttgctgcctcaggagccttattatttccttttgttttagtgctggttatttggccttgtagttgagggttcgtgagtttttagaatggaagcttctgacttagagtgaagttagaacaaatactccatgtcgcatgaacttgcacacgtgactttaggtgtcagcattctcctgaatgatcataccatttaccttaatgtttcagcatattgcttggcagcaggaaatatgtactgttcataaactatacatatgcccgttggccccaatacaaagttgacattttggc

SEQ ID NO: 89068 - DNA, 1192 bp, Zea Mays
aaatcaccgtaccattatggctggttcgtggatggcggcgccacggcctctcctgctatcgctgctggtcgccgtgctagcggtggccgcggatgtcgccaacgccggccacgccaagcccctgacgcctggcgggcgcgtggtacaccacaaccacggcaagttcacggccgggccgtggaaacccgcccacgcgaccttctacggcgggcgggacgggtccggcaccacggcgggcgcgtgcgggtacaaggacacgcgcgcgcaggggtatggcgtgcagacggtggccgtgagcacggtgctgttcggcgacggcgcggcctgcggcgggtgctacgaggtgcgctgcgtggacagccccagcgggtgcaagcccagcgcggcggcgctggtggtgacggcgaccgacctgtgcccgcccaacgaccagcagtccgcggacagcggcgggtggtgcaacccgccgcgggagcacttcgacctcagcatgcccgcgttcctccagatcgcgcaggagaaggccggcatcgtgcccatctcctaccgcagggtggcgtgcacgaagcagggcggcattcggtacaccatcaccgggaacaagtacttcaacatggtgacgatcaccaacgtgggcggcgccggcgacatcgcggcagtgtcggtgaaggggagcaagcgcgttaagtggacggagatgaagcgcaactgggggcaagtgtggcagaccggggaggacctcacatgcgagtcgctgacgttccgggtgatgaccagcgaccaccgcaaggccacctcatggcacgttctccctgctgactggaagttcggcgtcacgtaccaggcgtccaagaacttctaagtagccactttccctcctcttcttcaacctgcatgcccgcaagcagccatgcagatgataacatgcatcatgcatgcatattcattctttcgctcatgcactccgatacggtgccggagttaaaaaaatataaatcaatgtgcaaattcaaatgacatcttaaccagttgtgatcaatctgaaccgctaatgcatgcacacaccgaatgaatataccatccactattggaacaagctgctttgtggaatacttggcaaaaagccaaattctgatagtgatctccactatttagcccttgtgttgcatcaaatgaagcaactttaagagtc

SEQ ID NO: 89069 - DNA, 1761 bp, Zea Mays
gctcctccgggcctccaattacaccccgacatcaggagcctaaaaatggccaatgcgccactataaagaggggaacctcgttgcaacgaagaaatcaccgtaccattatggctggttcgtggatggctgcgccacgacctctcctgctgtcgctgctggtcgccgtgctagcggtggccgccgatgtcgccaacgccggccacgccaagcccctgacgcctggcgggcgtgtggtacacgacaaccacggcaagttcacggccgggccgtggaaacccgcccacgcgaccttctacggcgggcgggacgggtccggcaccacggcgggcgcgtgcgggtacaaggacacgcgcacgcaggggtacggcgtgcagacggtggccgtgagcacggtgctgttcggtgacggcacggcctgcggcgggtgctacgaggtgcggtgcgtggacagccctagcgggtgcaagcccgacgcggcggcactggtggtgacggtgaccgacctgtgcccgcccaaggaccagtggtgcaagccaccgcgggagcacttcgacctcagcatgcccgcgttcctccagatcgcgcaagagaaggccggcatcgtgccgatctcctaccgcagggtggcgtgcgtgaagcagggcggcatccggtacaccatcaccgggaacaagtacttcaacatggtgacgatcaccaatgtgggcggcgctggcgacatcgcggcggtgtcggtgaaggggagcaagcgcgtcaagtggacggagatgaagcgcaactgggggcaagtgtggcagaccggggaggacctcacctgcgagtcgctgacgttccgggtgatgaccagcgaccaccgcaaggccacctcatggcacgttctccccgctgactggaagttcggcgtcacgtaccaggcatccaagaacttctaagtagccactttccctcctcttcttcatcctgcatatgcccacaagcaaccatgcaaatgataacatgcatcatgcatgcatattcattctttcgctcatgcactccaatatggtgccggagttaaaaaaatgtaaatcaatgtgcaaactcaaatgacatcttaaccagttgtgatcaatctcaaccgctaatgcattgcacacaccgaatgaagctaccatccactgctggaacaggctgatttatcgaatacttggcaaaaagccaaattcttagtgatctccactatttaggccttgtgttgcatcaaatgaagtaactttaagagtctctctatattctttccaattaatataaacagatttttttaaaaaaaaacctccaacaacttatctaaatggctacctaaatataactgttgggggcatgcttcttcaccgaaggtcctccaagcaaatacaccttcggcagtatgatatgcgaactgacacagcatgaaggcacaagcaaaagctacaacccagaaagctttggcataatgacgcgccttgagacgaagggcggcaccgacttaaagaggaaaagatcgtttagtccctaatagtttgtgtcgcatttgtaatttgtcatgaaggacataaatgtaattttgaccgggctgcatcccgcgcctataaataggtgaacagtaaccctgtattgttcacgctgacttgtattcactcacacgtcacacctggatttttaccttctatcaagccgaaggtacaaatataacttgatattgttcatgcttattcatgatagtataataaaaatgttctgatg

SEQ ID NO: 89070 - DNA, 1118 bp, Zea Mays
gacatcaggagcctaaaaatggccaaatgcgccactataaagaggggaacctcgttgcaccgaagaaatcaccgtaccattatggctagttcgtggatggcggcgccacgacctctcctattgccgctgctggtcgccatgctagcggtggtcgccgatgtcgccaacgccggccacgccaagcccctgacgcctggcgggcgcgtggtacacgacaaccacggcaagttcacggccgggccgtggaaacctgcccacgcgaccttctacggcgggcgggacgggtccggcaccacggcgggcgcgtgcgggtacaaggacacgcgcgagcaggggtacggcgtgcagacggtggctgtgagcacggtgttgtttggcgatggcgcggcctgcggcgggtgctacgaggtgcggtgcgtggacagccccagcgggtgcaagcccgacgtggcggcgctggtggtgacggcgaccgacctgtgcccgcccaaggacaagtggtgcaagccgccgcaggagcacttcgacctcagcatgcccgcgttcctccagatcgcgcaggagaaggccggcatcgtgcccatctcctatcgcagggtggcgtgcgcgaagcagggcggcatccggtacaccatcaccgggaacaagtacttcaacatggtgacgatcaccaacgtgggcggcgccggcgacatcgcggcggtgtcggtgaaggggagcaagcgcgtcaagtggacggagatgaagcgcaactgggggcaagtgtggcagaccggggaggacctcacctgcgagtcgctgacgttccgggtgatgactagcgaccaccgcaaggccacctcatggcacgttctccccgctgactggaagttcggcgtcacgtaccaggcgtccaagaacttctaagtagccactttccctcctcttcttcaacctgcatgcccgcaagcagccatgcagattataacatgcatcatgcatgcatattcattctttcgctcatgcactccgatacggtgccagagttaaaaaatgtaaatcaatatgcaaattcaaattacatcttaaccagttgtgatcaatctttataaattcgtaataaattcatcttagcttag

SEQ ID NO: 89071 - DNA, 151 bp, Zea Mays
gattattgtgttttatgcctaccacatgtattatttacactaaaaactgtacgattttatgcttgaacacggggttcgtatatcagtttgttgtatgcatattttttgcatgcacattggaaaggcaattccttgatttatgatattcgta

SEQ ID NO: 89072 - DNA, 696 bp, Zea Mays
atgccgcaccgcacgcccgcatcggccgcctccctacgcgcacgggaaccgcccgcacagcccgcgcccccgtccccccgacctcggcttgctagcgcccgcccgccgccccgtaccaaacaggcacaccgcgcaagcccgcccgagacaccgccgacgctgcgcaatgcccgcccccgccgctcacccttttgcacgtcgcaacgacagaggtccatagggtacctcgtgctcccagccgcccccaattcccatggcggcaacgatagaacccggggcgccgcgtgcggcgctaggtctaggcgcccccgcggtgccccgtgctcctcctacatggcttcggcgcctcggcgacgtggcagtgggccccgtacctccacagcctcctcgcagtcggcctcgatcccatcgtcgcttcctcccccagccctgatcgtcatacagctccagccccaccccagcttgctcgtggaggtggatcatcgccgtagcagttctctcgtgcagttcttgaaggatgagggggttgttttgtcgccggaggatgaaaataagagggagaaggtgatccgggagctcaagaagatagtgatgcattgggccaacgcagtggcttatgagcagagtgtgccccaggggctggccacagctatcgtcctgacatacgattcttacacattagggggcgatgcctaa

SEQ ID NO: 89073 - DNA, 2402 bp, Zea Mays
gccacctctcggcgcatcatcagctgtgcctgtgagctctctcattcaccggcaccgctgctcttgctcttgtgttcgtaagtaacttcgcattgccttgccccgcccccttgtcctgctccctccggagctccccgcctgctccatttaattactgactgactcatacccttccccgcattcgccttcttgtttcttccatcccacccgtaccagccgccggtccccaatgcccaggcaggcagcccagcacggtgtggtggtctgatccgcggcggcgcgcccgtcgctccctccgcgaatggctcctccagcagggacaggggcagggacggaggggaggccggcgcggcggcgcggcaccggcaccagccccggacgcaccaaggtgtgggtcgagccgccgggcaagagccacggccaccaccaccaccaggctccgccgcccccgtccccgcccaagagggtggccgtggtctactacctctgccgcaaccgccacctcgagcacccgcacttcatcgaggtgccgctcgccgtaccggaggaaggcctctaccttcgagatgtgatgaaccgcctcaacgtgctgcgggggaagggcatggcctccatgtattcttggtcctgcaagaggagctacaagaacggcttcgtgtggcacgacctgtccgacgacgacctggtgctccccgcgcagggcagcgagtacatcctcaagggctccgagctcctcgaccgctcgccgccgccgccgccagatcggcagcatgatggcggcgctagcaacccgaatgtggaggagaacctcaagcaccgcaaggaagaagagtccccgcagtctcggggctcgcaggaagggtgctcgtcgtcgtcgtctccttccgcctccgccgctggcaaggagatctcgcctccgcccgccactccgcggccacagcagcaggcgcagtcggcagccctgccgccgccgccgtcgccgtcgccggcttccaccagccgcgaggacgacccgtgccggaccgcgcactcaggctcgtccggcaaccagtcccccgaacccgctgcgagaaacgctccaccgtcagaggctagctccccaggaccgtcggagtacagagtctgcagacccgtcggggctcaggacgcggccacacagacagacgacagcgagagggacgctgctgaaaaccatagtactcgcgtggccggagcgtccaccatggacacgacgtcggatgccgagatccaggaatgccaccggaggagctcgccgctgtcacccaaggtacccgagaccgttcgtgagtcaccgccggccgtgtgctcctccgatgctgcttcgcctggtggcagagtcgagacgttggagtccctgataagagcagaggccagcaggaggagtagcttcaggacattggaggagggacacatgcttggcccggtgggtgtcaaactgaagccggccaacttgctgatgcagcttatcacgtgtgggttcgtgtctgtgaaagaacaccgaggcttcgggttcatcccgacgtacaggcctcggtttacgcaggtcgagttcccttctccggtgttctccactcccgtggcgttgcggcaccttgacagaatcccttgcaatacaaaagcaactgggtcgacgagagctccggagccggaatgtttcagcgggagcttggttgttgagacgaagcagcaggacgagcccgggagagggatcgcctcactcaaacgctcgtcatcttacgacgaggatagagtgtacagagcagcacatcccaaaagcaacacggaaagctcctgtgaggcaggtagtttcaggtgcctcccacagaccatcaggatcatatcgtgtaagcagtcgaggagtggaacagtactctccccccctgcctctgacgtgagaaacggctctatccaacaagaacacagtaccatgtcctcaccgctgggctcatcgaagagcgcgagcaacaggatggccgatccgtcgccgccgggcaaactgtcttgtgcgagagccgagtcgttgttccgcgaggagaaggacatgatcaagatcgaagaaaggcttccttctggagctcgggtcataatccagtccgcgccgttgtgtgaagaagaaagcgacgacagcagcgaatgaatcacattgtaagggtccgtgttacatatgtttttgttttcttttgttctttttttttcatttcgttttgctgaggatgatggcatctgcgtgcgtagcttttggagtagagggttcaaaggtattgattgattctgtaaaccgtgtgaatgtgatagtccgggcgttttctcacacctcgaagaagagaatagtttgcctttgcttatttttttttttataaaaaaggggcccgcttttgtgt

SEQ ID NO: 89074 - DNA, 2328 bp, Zea Mays
gccacctctcggcgcatcatcagctgtgcctgtgagctctctcattcaccggcaccgctgctcttgctcttgtgttcccgccggtccccaatgcccaggcaggcagcccagcacggtgtggtggtctgatccgcggcggcgcgcccgtcgctccctccgcgaatggctcctccagcagggacaggggcagggacggaggggaggccggcgcggcggcgcggcaccggcaccagccccggacgcaccaaggtgtgggtcgagccgccgggcaagagccacggccaccaccaccaccaggctccgccgcccccgtccccgcccaagagggtggccgtggtctactacctctgccgcaaccgccacctcgagcacccgcacttcatcgaggtgccgctcgccgtaccggaggaaggcctctaccttcgagatgtgatgaaccgcctcaacgtgctgcgggggaagggcatggcctccatgtattcttggtcctgcaagaggagctacaagaacggcttcgtgtggcacgacctgtccgacgacgacctggtgctccccgcgcagggcagcgagtacatcctcaagggctccgagctcctcgaccgctcgccgccgccgccgccagatcggcagcatgatggcggcgctagcaacccgaatgtggaggagaacctcaagcaccgcaaggaagaagagtccccgcagtctcggggctcgcaggaagggtgctcgtcgtcgtcgtctccttccgcctccgccgctggcaaggagatctcgcctccgcccgccactccgcggccacagcagcaggcgcagtcggcagccctgccgccgccgccgtcgccgtcgccggcttccaccagccgcgaggacgacccgtgccggaccgcgcactcaggctcgtccggcaaccagtcccccgaacccgctgcgagaaacgctccaccgtcagaggctagctccccaggaccgtcggagtacagagtctgcagacccgtcggggctcaggacgcggccacacagacagacgacagcgagagggacgctgctgaaaaccatagtactcgcgtggccggagcgtccaccatggacacgacgtcggatgccgagatccaggaatgccaccggaggagctcgccgctgtcacccaaggtacccgagaccgttcgtgagtcaccgccggccgtgtgctcctccgatgctgcttcgcctggtggcagagtcgagacgttggagtccctgataagagcagaggccagcaggaggagtagcttcaggacattggaggagggacacatgcttggcccggtgggtgtcaaactgaagccggccaacttgctgatgcagcttatcacgtgtgggttcgtgtctgtgaaagaacaccgaggcttcgggttcatcccgacgtacaggcctcggtttacgcaggtcgagttcccttctccggtgttctccactcccgtggcgttgcggcaccttgacagaatcccttgcaatacaaaagcaactgggtcgacgagagctccggagccggaatgtttcagcgggagcttggttgttgagacgaagcagcaggacgagcccgggagagggatcgcctcactcaaacgctcgtcatcttacgacgaggatagagtgtacagagcagcacatcccaaaagcaacacggaaagctcctgtgaggcaggtagtttcaggtgcctcccacagaccatcaggatcatatcgtgtaagcagtcgaggagtggaacagtactctccccccctgcctctgacgtgagaaacggctctatccaacaagaacacagtaccatgtcctcaccgctgggctcatcgaagagcgcgagcaacaggatggccgatccgtcgccgccgggcaaactgtcttgtgcgagagccgagtcgttgttccgcgaggagaaggacatgatcaagatcgaagaaaggcttccttctggagctcgggtcataatccagtccgcgccgttgtgtgaagaagaaagcgacgacagcagcgaatgaatcacattgtaagggtccgtgttacatatgtttttgttttcttttgttctttttttttcatttcgttttgctgaggatgatggcatctgcgtgcgtagcttttggagtagagggttcaaaggtattgattgattctgtaaaccgtgtgaatgtgatagtccgggcgttttctcacacctcgaagaagagaatagtttgcctttgcttatttttttttttataaaaaaggggcccgcttttgtgtatcttaggcatacagttttacttgctttgtttttcttcaagtaaataagcatggattgtttttct

SEQ ID NO: 89075 - DNA, 2438 bp, Zea Mays
gccacctctcggcgcatcatcagctgtgcctgtgagctctctcattcaccggcaccgctgctcttgctcttgtgttcccgccggtccccaatgcccaggcaggcagcccagcacggtgtggtggtctgatccgcggcggcgcgcccgtcgctccctccgcgaatggctcctccagcagggacaggggcagggacggaggggaggccggcgcggcggcgcggcaccggcaccagccccggacgcaccaaggtgtgggtcgagccgccgggcaagagccacggccaccaccaccaccaggctccgccgcccccgtccccgcccaagagggtggccgtggtctactacctctgccgcaaccgccacctcgagcacccgcacttcatcgaggtgccgctcgccgtaccggaggaaggcctctaccttcgagatgtgatgaaccgcctcaacgtgctgcgggggaagggcatggcctccatgtattcttggtcctgcaagaggagctacaagaacggcttcgtgtggcacgacctgtccgacgacgacctggtgctccccgcgcagggcagcgagtacatcctcaagggctccgagctcctcgaccgctcgccgccgccgccgccagatcggcagcatgatggcggcgctagcaacccgaatgtggaggagaacctcaagcaccgcaaggaagaagagtccccgcagtctcggggctcgcaggaagggtgctcgtcgtcgtcgtctccttccgcctccgccgctggcaaggagatctcgcctccgcccgccactccgcggccacagcagcaggcgcagtcggcagccctgccgccgccgccgtcgccgtcgccggcttccaccagccgcgaggacgacccgtgccggaccgcgcactcaggctcgtccggcaaccagtcccccgaacccgctgcgagaaacgctccaccgtcagaggctagctccccaggaccgtcggagtacagagtctgcagacccgtcggggctcaggacgcggccacacagacagacgacagcgagagggacgctgctgaaaaccatagtactcgcgtggccggagcgtccaccatggacacgacgtcggatgccgagatccaggaatgccaccggaggagctcgccgctgtcacccaaggtacccgagaccgttcgtgagtcaccgccggccgtgtgctcctccgatgctgcttcgcctggtggcagagtcgagacgttggagtccctgataagagcagaggccagcaggaggagtagcttcaggacattggaggagggacacatgcttggcccggtgggtgtcaaactgaagccggccaacttgctgatgcagcttatcacgtgtgggttcgtgtctgtgaaagaacaccgaggcttcgggttcatcccgacgtacaggcctcggtttacgcaggtcgagttcccttctccggtgttctccactcccgtggcgttgcggcaccttgacagaatcccttgcaatacaaaagcaactgggtcgacgagagctccggagccggaatgtttcagcgggagcttggttgttgagacgaagcagcaggacgagcccgggagagggatcgcctcactcaaacgctcgtcatcttacgacgaggatagagtgtacagagcagcacatcccaaaagcaacacggaaagctcctgtgaggcaggtagtttcaggtgcctcccacagaccatcaggatcatatcgtgtaagcagtcgaggagtggaacagtactctccccccctgcctctgacgtgagaaacggctctatccaacaagaacacagtaccatgtcctcaccgctgggctcatcgaagagcgcgagcaacaggatggccgatccgtcgccgccgggcaaactgtcttgtgcgagagccgagtcgttgttccgcgaggagaaggacatgatcaagatcgaagaaagttgagttgcctctcactgtctctctcatatgcatccatcatctccgtctgctggtgtttgtctctagatactgacaaaaaaaacaccgctcttaaaaaaaaaactgcaggcttccttctggagctcgggtcataatccagtccgcgccgttgtgtgaagaagaaagcgacgacagcagcgaatgaatcacattgtaagggtccgtgttacatatgtttttgttttcttttgttctttttttttcatttcgttttgctgaggatgatggcatctgcgtgcgtagcttttggagtagagggttcaaaggtattgattgattctgtaaaccgtgtgaatgtgatagtccgggcgttttctcacacctcgaagaagagaatagtttgcctttgcttatttttttttttataaaaaaggggcccgcttttgtgtatcttaggcatacagttttacttgctttgtttttcttcaagtaaataagcatggattgtttttctt

SEQ ID NO: 89076 - DNA, 228 bp, Zea Mays
atgatggccaccaccagcgtctgcaccggctggtacaccgccacgaacaccgggcccccacggtcgatgcaccagatctgcaccgcgaacgccaccccggacgcgatgaacccggcgtataggatggtgaagagctcggatccggagtggaacttccaggcctccgcgtccctctccatgaaggcggcgatgacgaggaactggatgacaccgaagaagcaggtgtag

SEQ ID NO: 89077 - DNA, 474 bp, Zea Mays
atggatggacgcaagatcgtgggccactactggggaaaaccacacaagttctttgcaagtgtggtcaagtcctaccgtgctccgattgtcttattaaagatacaaccaaggggtgctggcaggcgtggtggtgtgggagttcatggatatgggtgtaggacggcgagagataatgtttggcgaagggtcgttgaagactccacaagcgctcagaagaaagaaactgaacatcctgaagatggagatcagaaggatgaagatgagtcacatcaacatgatccttgggagcaacaaaagaagagcccggagccaaaaggagatagtggatggagagctcccagtcaagaagtggccgatgatgatcgtcccgaggttgctattaaaaaagagctatctcgaatccctactgttgataggctctcttatgacttctatcatctaaagaatcacctgactaaggactgtcaccattga

SEQ ID NO: 89078 - DNA, 1312 bp, Zea Mays
atgctaaatgttgaggtatccatgctttgggttactggtgatgtccatggccagtactctgatctcctgaggctatttgattatggtggctatccgcctcaggccaactaccttttcttgggtgattatgtggatcatggaaagcaaagcctagaaacaatgtcttcttttggcttacaagtgtcagcattgatagatgaaaagattctctgtatgcatggtggtctatctctggagttgaacaagcttgagcaaatactcaacctaaatcgccccacagacgtgcctgatactggattgctctgtgatcttctttggtctgatccttccaatgaagcaacgggctgggccatcaatgatcgagctgaatcacttcgcccagacttttttgctggtgaagaagttgagaggctagctatgaccgagctaatagaggtattgctgctttttaggacaatgaatcctgtcgaatatgatgttatcactctgtatgatagtatgattttcatttcctgtcaggtcatttcagaagagaacaaatctggacctctgattgtgttacttaaggatgtagagaaatcattcattggagttaccgagtcactttcatctttgcggagcaaatttaatcgcttccatctggtgttcttattataggatcccacactcagatctaaataattaaatttacatgatgaagctctacttacagattggaagcagcagttggatcgtgatgttgaaacccttaaagccaaatcaaacattggtagcattcgcacggtaagctgcagaattgaagacagagttatatgggtttcttggaacttaatatatcccactgtcaactgtacatctttctttaaactgttgggtctgtgatgtctgatctaatatggcctgggtgtattattaacaaatgaccatttgcatgtgtttgatagtatttcttctgtttgatactttgttgcctttttctgtctgaatgtatattttgaccatttgtatgattttgcaattattttatgtctatgtatgcaattatctttctcttgtcgatgcaaaatagccagcctgtgcgtcttttttctcctattttttaggactgagattgatggatattgtgaaggtgaactaatcaaggtacctttgagagaggtaggaacaacaatggtcgttgttgctgcacaaacaaaggctattgctggtaacttttacttgttatattatttaagcatattatatagactagacatttgctactttgcttttctgatcatattatgtttttgatttattcctgcatctgttc

SEQ ID NO: 89079 - DNA, 914 bp, Zea Mays
aattctgaacttttgcaatttactccaaacttttgcacatagcttggaaatctccaaataagaaacttgttcacttttccaagctccacaactttgatatatggactattagcaaaacataactagatcttgaaatccacttttgggcaactttagtgttttatttgagattgtttttctccagtcaagcctctcatcttttgtccatcatttaaaggtaaagttgccctttaactcaagggcccaactttgatacatagttcccatggccaaagcatctttagcttaggagcagtttacttgcacttgatctctcattagcttagtgttgtgagagttgttttgttgtgacatgctttggactgttaggtggttgaattgtaaattttcagatttggaatagcgtctaagtctgaatttccaaagtagtttcttggacagttaacaccgtggatcctttgcacgatgcatcattttaaataacacggtgctgcgtcttgaaatgaagtttgttttcactctcatgttcatgtttatgcacaaatatggaagccacattttgtgtttatcatgctttcctatatctttgtgtacatgtgatttaatgccagttgtgtatttatgagaattttggtttattttgtaggatttcggctctcatcaagtgactcctcccctcacgttgactttgcggacagatgtctcaattccagtggtggagctacgaacaacaatctgatgtcctgatcgagagcgatggagctaatgtttgaacttatgtgtttgaacttgtgaactatggatgtgaacctatgtgaatttgtgaacttatgtatttggacttatgtgaatttgcgaacttatatatttggacttatgtgaatttgtgatatgaacatatatcaatgtgtttg

SEQ ID NO: 89080 - DNA, 2110 bp, Zea Mays
atgataccctgtatgcgtccgattttcatcggcccccatccggccatccgccatcccccaaccccgttcttctccctccgtccgaccgtccctcgacagtgccgaggcgcaacctagcagccgcccacgcggcgcgacatccactggcgcaagcgcaatccgcaagggccccccggcgcgccgccagcctcctggctcggccgcccccgcggctaacccaggggcggaaaggccggccagccgcccacaccccatccggccagccaggcggaaacgaccgtaagagggaagccgcagccggccgctgactccgatcccacctctagtcaaccccaggcagaccgatcctcttcgtctgaccacgacggccatctcgcacgcctacttccactcaaccacataagtcttttctgccaggcctaacctttcccctgcgccgcctctactggttttgcacagtgccgtgacgtgggaagacgtggagatccaacgaaaattagatttatttcttccttcttcggtgaggaactcaaaacttcccttctaggtccaacaggttcctcagcttgcgtaagatccgtctgggttgtccgccctccattggactacccaaggtgcggcgcatccaccaggtggaagatatctgcgtaagtcaaaacatagaataagagtggactgctattagttttccataggatggaatccttgtggaagctgacctacttgctcgacccggcatcagttgccctcattgccacagccatttctgtggcctatgcatcagcatcacgagctctggactatggcaaggagatggagagaaacttggatttttcagaggcttccattacattggatcgttcgcaggctctaatgattccccttgcaagctcgtgcagtctgttgctgatgttctacttgttctcgtctgtttcacatctcgtgacagcttttactgctgtggcctcagcattggcactgttcttttgcctgtctccacacatcacctatcttaaggcacgattcaatctaatggacccattcatgtccagatgttgttcgaagtcatttacacggttgcaaggtttgctgatgctcttctgcatagccacagtcttagcttggttggtttcagggcattggatgctaaataacctactggggatttccatatgtatagcgtttgtcagccatgtgaggcttcccaacataaagatctgtgcactgcttcttgcctgcttgtttgtgtatgatattttctgggtgttcttctcagaaaggttctttggagcaaatgtcatggtttctgttgccacccagaaggcatctaatcctgttcacacagtagcaaataagctcagcctgcctgggttgcaattgattacaaagaagctggagcttccagtcaagcttgtatttcctaggaatttgttgggtgggattgttccaggaagcaatcctggtgattacatgatgcttggccttggagacatggccattccagggatgcttctagctctggtactcttttttgataaccggaagttaaaggatgtgaacgttgttccatcagacgtgtctcccctgagacggcggaattatgtgtggtatgctctaacagggtatggtattggcttggtagctgcactagctgccgggatcttgtctcagtctccccaaccagccttactgtacctggtgccgtcaacactggggcctgtcatgtacttgtcatggttccggaatgagctgtgggagctatgggaagggtctggaactattctgaacgacaaagctcgtttgttggaggtctgagatccaagtggacaataagaaggatctgagctcaccgggattgaatcttaattaattattaaacattacttgagctcatactgaaagggagtatttataagctgagtgttctattcatgcatgtgagctactatctccgttctcaaatatttgttgcccactagttcatttttaaactagaccgcgacaaataaaaaagaacggagacagtactaagcagttgcccatcgtgaatcatgtaactgtttgtaatagaaaggttcagttcaatgcatttcagctttttttaccaata

SEQ ID NO: 89081 - DNA, 2101 bp, Zea Mays
atgataccctgtatgcgtccgattttcatcggcccccatccggccatccgccatcccccaaccccgttcttctccctccgtccgaccgtccctcgacagtgccgaggcgcaacctagcagccgcccacgcggcgcgacatccactggcgcaagcgcaatccgcaagggccccccggcgcgccgccagcctcctggctcggccgcccccgcggctaacccaggggcggaaaggccggccagccgcccacaccccatccggccagccaggcggaaacgaccgtaagagggaagccgcagccggccgctgactccgatcccacctctagtcaaccccaggcagaccgatcctcttcgtctgaccacgacggccatctcgcacgcctacttccactcaaccacataagtcttttctgccaggcctaacctttcccctgcgccgcctctactggttttgcacagtgccgtgacgtgggaagacgtggagatccaacgaaaattagatttatttcttccttcttcggtgaggaactcaaaacttcccttctaggttcctcagcttgcgtaagatccgtctgggttgtccgccctccattggactacccaaggtgcggcgcatccaccaggtggaagatatctgcgtaagtcaaaacatagaataagagtggactgctattagttttccataggatggaatccttgtggaagctgacctacttgctcgacccggcatcagttgccctcattgccacagccatttctgtggcctatgcatcagcatcacgagctctggactatggcaaggagatggagagaaacttggatttttcagaggcttccattacattggatcgttcgcaggctctaatgattccccttgcaagctcgtgcagtctgttgctgatgttctacttgttctcgtctgtttcacatctcgtgacagcttttactgctgtggcctcagcattggcactgttcttttgcctgtctccacacatcacctatcttaaggcacgattcaatctaatggacccattcatgtccagatgttgttcgaagtcatttacacggttgcaaggtttgctgatgctcttctgcatagccacagtcttagcttggttggtttcagggcattggatgctaaataacctactggggatttccatatgtatagcgtttgtcagccatgtgaggcttcccaacataaagatctgtgcactgcttcttgcctgcttgtttgtgtatgatattttctgggtgttcttctcagaaaggttctttggagcaaatgtcatggtttctgttgccacccagaaggcatctaatcctgttcacacagtagcaaataagctcagcctgcctgggttgcaattgattacaaagaagctggagcttccagtcaagcttgtatttcctaggaatttgttgggtgggattgttccaggaagcaatcctggtgattacatgatgcttggccttggagacatggccattccagggatgcttctagctctggtactcttttttgataaccggaagttaaaggatgtgaacgttgttccatcagacgtgtctcccctgagacggcggaattatgtgtggtatgctctaacagggtatggtattggcttggtagctgcactagctgccgggatcttgtctcagtctccccaaccagccttactgtacctggtgccgtcaacactggggcctgtcatgtacttgtcatggttccggaatgagctgtgggagctatgggaagggtctggaactattctgaacgacaaagctcgtttgttggaggtctgagatccaagtggacaataagaaggatctgagctcaccgggattgaatcttaattaattattaaacattacttgagctcatactgaaagggagtatttataagctgagtgttctattcatgcatgtgagctactatctccgttctcaaatatttgttgcccactagttcatttttaaactagaccgcgacaaataaaaaagaacggagacagtactaagcagttgcccatcgtgaatcatgtaactgtttgtaatagaaaggttcagttcaatgcatttcagctttttttaccaata

SEQ ID NO: 89082 - DNA, 2071 bp, Zea Mays
atgcgtccgattttcatcggcccccatccggccatccgccatcccccaaccccgttcttctccctccgtccgaccgtccctcgacagtgccgaggcgcaacctagcagccgcccacgcggcgcgacatccactggcgcaagcgcaatccgcaagggccccccggcgcgccgccagcctcctggctcggccgcccccgcggctaacccaggggcggaaaggccggccagccgcccacaccccatccggccagccaggcggaaacgaccgtaagagggaagccgcagccggccgctgactccgatcccacctctagtcaaccccaggcagaccgatcctcttcgtctgaccacgacggccatctcgcacgcctacttccactcaaccacataagtcttttctgccaggcctaacctttcccctgcgccgcctctactggttttgcacagtgccgtgacgtgggaagacgtggagatccaacgaaaattagatttatttcttccttcttcggtccaacaggttcctcagcttgcgtaagatccgtctgggttgtccgccctccattggactacccaaggtgcggcgcatccaccaggtggaagatatctgcgtaagtcaaaacatagaataagagtggactgctattagttttccataggatggaatccttgtggaagctgacctacttgctcgacccggcatcagttgccctcattgccacagccatttctgtggcctatgcatcagcatcacgagctctggactatggcaaggagatggagagaaacttggatttttcagaggcttccattacattggatcgttcgcaggctctaatgattccccttgcaagctcgtgcagtctgttgctgatgttctacttgttctcgtctgtttcacatctcgtgacagcttttactgctgtggcctcagcattggcactgttcttttgcctgtctccacacatcacctatcttaaggcacgattcaatctaatggacccattcatgtccagatgttgttcgaagtcatttacacggttgcaaggtttgctgatgctcttctgcatagccacagtcttagcttggttggtttcagggcattggatgctaaataacctactggggatttccatatgtatagcgtttgtcagccatgtgaggcttcccaacataaagatctgtgcactgcttcttgcctgcttgtttgtgtatgatattttctgggtgttcttctcagaaaggttctttggagcaaatgtcatggtttctgttgccacccagaaggcatctaatcctgttcacacagtagcaaataagctcagcctgcctgggttgcaattgattacaaagaagctggagcttccagtcaagcttgtatttcctaggaatttgttgggtgggattgttccaggaagcaatcctggtgattacatgatgcttggccttggagacatggccattccagggatgcttctagctctggtactcttttttgataaccggaagttaaaggatgtgaacgttgttccatcagacgtgtctcccctgagacggcggaattatgtgtggtatgctctaacagggtatggtattggcttggtagctgcactagctgccgggatcttgtctcagtctccccaaccagccttactgtacctggtgccgtcaacactggggcctgtcatgtacttgtcatggttccggaatgagctgtgggagctatgggaagggtctggaactattctgaacgacaaagctcgtttgttggaggtctgagatccaagtggacaataagaaggatctgagctcaccgggattgaatcttaattaattattaaacattacttgagctcatactgaaagggagtatttataagctgagtgttctattcatgcatgtgagctactatctccgttctcaaatatttgttgcccactagttcatttttaaactagaccgcgacaaataaaaaagaacggagacagtactaagcagttgcccatcgtgaatcatgtaactgtttgtaatagaaaggttcagttcaatgcatttcagctttttttaccaata

SEQ ID NO: 89083 - DNA, 2062 bp, Zea Mays
atgcgtccgattttcatcggcccccatccggccatccgccatcccccaaccccgttcttctccctccgtccgaccgtccctcgacagtgccgaggcgcaacctagcagccgcccacgcggcgcgacatccactggcgcaagcgcaatccgcaagggccccccggcgcgccgccagcctcctggctcggccgcccccgcggctaacccaggggcggaaaggccggccagccgcccacaccccatccggccagccaggcggaaacgaccgtaagagggaagccgcagccggccgctgactccgatcccacctctagtcaaccccaggcagaccgatcctcttcgtctgaccacgacggccatctcgcacgcctacttccactcaaccacataagtcttttctgccaggcctaacctttcccctgcgccgcctctactggttttgcacagtgccgtgacgtgggaagacgtggagatccaacgaaaattagatttatttcttccttcttcggttcctcagcttgcgtaagatccgtctgggttgtccgccctccattggactacccaaggtgcggcgcatccaccaggtggaagatatctgcgtaagtcaaaacatagaataagagtggactgctattagttttccataggatggaatccttgtggaagctgacctacttgctcgacccggcatcagttgccctcattgccacagccatttctgtggcctatgcatcagcatcacgagctctggactatggcaaggagatggagagaaacttggatttttcagaggcttccattacattggatcgttcgcaggctctaatgattccccttgcaagctcgtgcagtctgttgctgatgttctacttgttctcgtctgtttcacatctcgtgacagcttttactgctgtggcctcagcattggcactgttcttttgcctgtctccacacatcacctatcttaaggcacgattcaatctaatggacccattcatgtccagatgttgttcgaagtcatttacacggttgcaaggtttgctgatgctcttctgcatagccacagtcttagcttggttggtttcagggcattggatgctaaataacctactggggatttccatatgtatagcgtttgtcagccatgtgaggcttcccaacataaagatctgtgcactgcttcttgcctgcttgtttgtgtatgatattttctgggtgttcttctcagaaaggttctttggagcaaatgtcatggtttctgttgccacccagaaggcatctaatcctgttcacacagtagcaaataagctcagcctgcctgggttgcaattgattacaaagaagctggagcttccagtcaagcttgtatttcctaggaatttgttgggtgggattgttccaggaagcaatcctggtgattacatgatgcttggccttggagacatggccattccagggatgcttctagctctggtactcttttttgataaccggaagttaaaggatgtgaacgttgttccatcagacgtgtctcccctgagacggcggaattatgtgtggtatgctctaacagggtatggtattggcttggtagctgcactagctgccgggatcttgtctcagtctccccaaccagccttactgtacctggtgccgtcaacactggggcctgtcatgtacttgtcatggttccggaatgagctgtgggagctatgggaagggtctggaactattctgaacgacaaagctcgtttgttggaggtctgagatccaagtggacaataagaaggatctgagctcaccgggattgaatcttaattaattattaaacattacttgagctcatactgaaagggagtatttataagctgagtgttctattcatgcatgtgagctactatctccgttctcaaatatttgttgcccactagttcatttttaaactagaccgcgacaaataaaaaagaacggagacagtactaagcagttgcccatcgtgaatcatgtaactgtttgtaatagaaaggttcagttcaatgcatttcagctttttttaccaata

SEQ ID NO: 89084 - DNA, 2220 bp, Zea Mays
atcggcccccatccggccatccgccatcccccaaccccgttcttctccctccgtccgaccgtccctcgacagtgccgaggcgcaacctagcagccgcccacgcggcgcgacatccactggcgcaagcgcaatccgcaagggccccccggcgcgccgccagcctcctggctcggccgcccccgcggctaacccaggggcggaaaggccggccagccgcccacaccccatccggccagccaggcggaaacgaccgtaagagggaagccgcagccggccgctgactccgatcccacctctagtcaaccccaggcagaccgatcctcttcgtctgaccacgacggccatctcgcacgcctacttccactcaaccacataagtcttttctgccaggcctaacctttcccctgcgccgcctctactggttttgcacagtgccgtgacgtgggaagacgtggagatccaacgaaaattagatttatttcttccttcttcggtgaggaactcaaaacttcccttctaggtaggataggttcccttcttccagtagtttgttttgttctggggaaaattcctttctctcttcccaaattctttaccttgccggtcatgtctatttcgtatcgtatttgttgtagtattattctaatccatccataggtccaacaggttcctcagcttgcgtaagatccgtctgggttgtccgccctccattggactacccaaggtgcggcgcatccaccaggtggaagatatctgcgtaagtcaaaacatagaataagagtggactgctattagttttccataggatggaatccttgtggaagctgacctacttgctcgacccggcatcagttgccctcattgccacagccatttctgtggcctatgcatcagcatcacgagctctggactatggcaaggagatggagagaaacttggatttttcagaggcttccattacattggatcgttcgcaggctctaatgattccccttgcaagctcgtgcagtctgttgctgatgttctacttgttctcgtctgtttcacatctcgtgacagcttttactgctgtggcctcagcattggcactgttcttttgcctgtctccacacatcacctatcttaaggcacgattcaatctaatggacccattcatgtccagatgttgttcgaagtcatttacacggttgcaaggtttgctgatgctcttctgcatagccacagtcttagcttggttggtttcagggcattggatgctaaataacctactggggatttccatatgtatagcgtttgtcagccatgtgaggcttcccaacataaagatctgtgcactgcttcttgcctgcttgtttgtgtatgatattttctgggtgttcttctcagaaaggttctttggagcaaatgtcatggtttctgttgccacccagaaggcatctaatcctgttcacacagtagcaaataagctcagcctgcctgggttgcaattgattacaaagaagctggagcttccagtcaagcttgtatttcctaggaatttgttgggtgggattgttccaggaagcaatcctggtgattacatgatgcttggccttggagacatggccattccagggatgcttctagctctggtactcttttttgataaccggaagttaaaggatgtgaacgttgttccatcagacgtgtctcccctgagacggcggaattatgtgtggtatgctctaacagggtatggtattggcttggtagctgcactagctgccgggatcttgtctcagtctccccaaccagccttactgtacctggtgccgtcaacactggggcctgtcatgtacttgtcatggttccggaatgagctgtgggagctatgggaagggtctggaactattctgaacgacaaagctcgtttgttggaggtctgagatccaagtggacaataagaaggatctgagctcaccgggattgaatcttaattaattattaaacattacttgagctcatactgaaagggagtatttataagctgagtgttctattcatgcatgtgagctactatctccgttctcaaatatttgttgcccactagttcatttttaaactagaccgcgacaaataaaaaagaacggagacagtactaagcagttgcccatcgtgaatcatgtaactgtttgtaatagaaaggttcagttcaatgcatttcagctttttttaccaata

SEQ ID NO: 89085 - DNA, 1695 bp, Zea Mays
gtccgaccgtccctcgacagtgccgaggcgcaacctagcagccgcccacgcggcgcgacatccactggcgcaagcgcaatccgcaagggccccccggcgcgccgccagcctcctggctcggccgcccccgcggctaacccaggggcggaaaggccggccagccgcccacaccccatccggccagccaggcggaaacgacctgccgtgacgtgggaagacgtggagatccaacgaaaattagatttatttcttccttcttcggtgaggaactcaaaacttcccttctaggttcctcagcttgcgtaagatccgtctgggttgtccgccctccattggactacccaaggtgcggcgcatccaccaggtggaagatatctgcgtaagtcaaaacatagaataagagtggactgctattagttttccataggatggaatccttgtggaagctgacctacttgctcgacccggcatcagttgccctcattgccacagccatttctgtggcctatgcatcagcatcacgagctctggactatggcaaggagatggagagaaacttggatttttcagaggcttccattacattggatcgttcgcaggctctaatgattccccttgcaagctcgtgcagtctgttgctgatgttctacttgttctcgtctgtttcacatctcgtgacagcttttactgctgtggcctcagcattggcactgttcttttgcctgtctccacacatcacctatcttaaggcacgattcaatctaatggacccattcatgtccagatgttgttcgaagtcatttacacggttgcaaggtttgctgatgctcttctgcatagccacagtcttagcttggttggtttcagggcattggatgctaaataacctactggggatttccatatgtatagcgtttgtcagccatgtgaggcttcccaacataaagatctgtgcactgcttcttgcctgcttgtttgtgtatgatattttctgggtgttcttctcagaaaggttctttggagcaaatgtcatggtttctgttgccacccagaaggcatctaatcctgttcacacagtagcaaataagctcagcctgcctgggttgcaattgattacaaagaagctggagcttccagtcaagcttgtatttcctaggaatttgttgggtgggattgttccaggaagcaatcctggtgattacatgatgcttggccttggagacatgaggccattccagggatgcttctagctctggtactcttttttgataaccggaagttaaaggatgtgaacgttgttccatcagacgtgtctcccctgagacggcggaattatgtgtggtatgctctaacagggtatggtattggcttggtagctgcactagctgccgggatcttgtctcagtctccccaaccagccttactgtacctggtgccgtcaacactggggcctgtcatgtacttgtcatggttccggaatgagctgtgggagctatgggaagggtctggaactattctgaacgacaaagctcgtttgttggaggtctgagatccaagtggacaataagaaggatctgagctcaccgggattgaatcttaattaattattaaacattacttgagctcatactgaaagggagtatttataagctgagtgttctattcatgcatgtgagctactatctccgttctcaa

SEQ ID NO: 89086 - DNA, 1842 bp, Zea Mays
gtccgaccgtccctcgacagtgccgaggcgcaacctagcagccgcccacgcggcgcgacatccactggcgcaagcgcaatccgcaagggccccccggcgcgccgccagcctcctggctcggccgcccccgcggctaacccaggggcggaaaggccggccagccgcccacaccccatccggccagccaggcggaaacgacctgccgtgacgtgggaagacgtggagatccaacgaaaattagatttatttcttccttcttcggtgaggaactcaaaacttcccttctaggttcctcagcttgcgtaagatccgtctgggttgtccgccctccattggactacccaaggtgcggcgcatccaccaggtggaagatatctgcgtaagtcaaaacatagaataagagtggactgctattagttttccataggatggaatccttgtggaagctgacctacttgctcgacccggcatcagttgccctcattgccacagccatttctgtggcctatgcatcagcatcacgagctctggactatggcaaggagatggagagaaacttggatttttcagaggcttccattacattggatcgttcgcaggctctaatgattccccttgcaagctcgtgcagtctgttgctgatgttctacttgttctcgtctgtttcacatctcgtgacagcttttactgctgtggcctcagcattggcactgttcttttgcctgtctccacacatcacctatcttaaggcacgattcaatctaatggacccattcatgtccagatgttgttcgaagtcatttacacggttgcaaggtttgctgatgctcttctgcatagccacagtcttagcttggttggtttcagggcattggatgctaaataacctactggggatttccatatgtatagcgtttgtcagccatgtgaggcttcccaacataaagatctgtgcactgcttcttgcctgcttgtttgtgtatgatattttctgggtgttcttctcagaaaggttctttggagcaaatgtcatggtttctgttgccacccagaaggcatctaatcctgttcacacagtagcaaataagctcagcctgcctgggttgcaattgattacaaagaagctggagcttccagtcaagcttgtatttcctaggaatttgttgggtgggattgttccaggaagcaatcctggtgattacatgatgcttggccttggagacatggccattccagggatgcttctagctctggtactcttttttgataaccggaagttaaaggatgtgaacgttgttccatcagacgtgtctcccctgagacggcggaattatgtgtggtatgctctaacagggtatggtattggcttggtagctgcactagctgccgggatcttgtctcagtctccccaaccagccttactgtacctggtgccgtcaacactggggcctgtcatgtacttgtcatggttccggaatgagctgtgggagctatgggaagggtctggaactattctgaacgacaaagctcgtttgttggaggtctgagatccaagtggacaataagaaggatctgagctcaccgggattgaatcttaattaattattaaacattacttgagctcatactgaaagggagtatttataagctgagtgttctattcatgcatgtgagctactatctccgttctcaaatatttgttgcccactagttcatttttaaactagaccgcgacaaataaaaaagaacggagacagtactaagcagttgcccatcgtgaatcatgtaactgtttgtaatagaaaggttcagttcaatgcatttcagctttttttaccaata

SEQ ID NO: 89087 - DNA, 469 bp, Zea Mays
ggtgggatttgtatagcatggtggttgctgtttattctgaccgtttgtggctttcaggtgccgtcaacactggggcctgtcatgtacttgtcatggttccggaatgagctgtgggagctatgggaagggtctggaactattctgaacgacaaagctcgtttgttggaggtctgagatccaagtggacaataagaaggatctgagctcaccgggattgaatcttaattaattattaaacattacttgagctcatactgaaagggagtatttataagctgagtgttctattcatgcatgtgagctactatctccgttctcaaatatttgttgcccactagttcatttttaaactagaccgcgacaaataaaaaagaacggagacagtactaagcagttgcccatcgtgaatcatgtaactgtttgtaatagaaaggttcagttcaatgcatttcagctttttttaccaata

SEQ ID NO: 89088 - DNA, 1073 bp, Zea Mays
gaggactggtgtgcagcgctcgagtgctgacgcgttgagccgttgactgggccgtcatttactagcccatgggccatacggctgtctcaggtctcagcacccgatccgagtaaccgctgccgatctctcctcgtcatttcgtcgtcgtctccatctcgcttttgatcgactcagaaaattccccaccaaaatctcctccccctgaagtcccgaagctcgcggaagcgccgagatgtaccatcccacgagaggcggcgtccgcggcggcagagatcaattcaaatgggacgatgtgaaggttgacaagcatcgggagaattaccttggtcatagtgttaaggctccggttggtagatggcagaaaggaaaggatctttactggtatactcgggataagaaatccgacacggaagatgctcttaaggaagaaatcaggagagtgaaggaagaggaggaacaggctatgcgtgaggctcttggcttagctcctaagcgcagcaatcgaactcagggtaatcgcttggataagcatgaatatgctgagctgattaagagaggatcaactgcggaggacttgggagcagggcacgctgaagcagcacaagtgcagggtctaggattgtacaaggcccctcgcgatgagggtggatcaagttctttgagccttgaccctcaaatggagcctgagcaggctgaacccctactagcacccaagcaggaggatgatttggaagataataggaaggggaaaaggccacgtgaacgtgacgagaagagaggggagaaggagcggaaacgagacaggcatggtgatggaaaggagaggaggcgggacaagcacgagaggaggcacgacttggaggacagatcaaagcggcaccgcaaagacaagcagaagaggaggcacgattccgattctgattgataacggccctgcgcctgctcctgtatgactactgtatactgcgaaatttcaaacccatggagccgcttttgtttgatgtatgcctacgctttaaattatgtttgccctaatgatgtttaaggataaaatggcccgtatgctcctctcc

SEQ ID NO: 89089 - DNA, 1290 bp, Zea Mays
ttcacgattaactcacaacgaaggcaacgactaggctcggaattaatccccacccgttttcccttccaaactccaaagacacgattgtagttggattaattcccaccccacaaccccccaccacaagaacttgttcgatcgaattcttcttcaactacccgccgcgggaacccaaggaaggaggcaaagcaaaggcttctcgcaggttcgcatcctccggaaccatccactcctctcatcccgctcggagtttgacctctcccgacctgagatccgattgaatcggtactctgctcttggtttatttcctctccttggtgaattcgcgcgctgattcctgctgcggtggattacgtcctagggtttcccgtcagcggcttctgcggcgggcgccatgaacagcagcaagcaggcgctgatttacagcttcgtggccaagggctccgtcgtgctggcggagcacacggccttctccggcaacttcagcaccgttgccgtccagtgcctccagaagcttccccccaacagcaccagatccacctactcctgtgacggccacaccttcaacttcctcgtcaaccgcggcttcgtgttcctagtggtcgccgatgaggcggccgggaggagcgtccccttcgtcttcctagagagggttagggaagacttcatgcagcggtatgggtccagtatcgatgaggaggggcagcacccgctcgctgatgatgctgatgaggatgactttctgttcgaagaccggttcagcattgcctacaaccttgaccgtgaattcggcccgaggttgaaggaccatatgcagtattgtgttaatcatccagaggaaattaacaagctctccaaggtgaaagcccacctatcggatgtcaaagggatcatgatggacaacattgagaagatattggatcgcggggagaagattgagcttttggtgggtaagacagagaccctacagtcacaggcggacagcttccacaggcatggcagagagttgaggcgaaagatgtggcttcagaacctgaggtttaagctgatggtgggtggcggcattgcggctctgatccttatcatttggctgatggtctgcaggggattcaaatgttagagcacaccaagttgctcgccttttttttttcttttcaggcgtttgatatgcacagactttcaaccaaattgtgttttcagtgtcacggtatcgcaatgtagtggacttcaatccccgcagtctttcccatgttccattacttccatatgataatggtaaaaggtaggaag

SEQ ID NO: 89090 - DNA, 1134 bp, Zea Mays
ttcacgattaactcacaacgaaggcaacgactaggctcggaattaatccccacccgttttcccttccaaactccaaagacacgattgtagttggattaattcccaccccacaaccccccaccacaagaacttgttcgatcgaattcttcttcaactacccgccgcgggaacccaaggaaggaggcaaagcaaaggcttctcgcagggtttcccgtcagcggcttctgcggcgggcgccatgaacagcagcaagcaggcgctgatttacagcttcgtggccaagggctccgtcgtgctggcggagcacacggccttctccggcaacttcagcaccgttgccgtccagtgcctccagaagcttccccccaacagcaccagatccacctactcctgtgacggccacaccttcaacttcctcgtcaaccgcggcttcgtgttcctagtggtcgccgatgaggcggccgggaggagcgtccccttcgtcttcctagagagggttagggaagacttcatgcagcggtatgggtccagtatcgatgaggaggggcagcacccgctcgctgatgatgctgatgaggatgactttctgttcgaagaccggttcagcattgcctacaaccttgaccgtgaattcggcccgaggttgaaggaccatatgcagtattgtgttaatcatccagaggaaattaacaagctctccaaggtgaaagcccacctatcggatgtcaaagggatcatgatggacaacattgagaagatattggatcgcggggagaagattgagcttttggtgggtaagacagagaccctacagtcacaggcggacagcttccacaggcatggcagagagttgaggcgaaagatgtggcttcagaacctgaggtttaagctgatggtgggtggcggcattgcggctctgatccttatcatttggctgatggtctgcaggggattcaaatgttagagcacaccaagttgctcgccttttttttttcttttcaggcgtttgatatgcacagactttcaaccaaattgtgttttcagtgtcacggtatcgcaatgtagtggacttcaatccccgcagtctttcccatgttccattacttccatatgataatggtaaaaggtaggaag

SEQ ID NO: 89091 - DNA, 1054 bp, Zea Mays
aaactccaaagacacgattgtagttggattaattcccaccccacaaccccccaccacaagaacttgttcgatcgaattcttcttcaactacccgccgcgggaacccaaggaaggaggcaaagcaaaggcttctcgcagcggcttctgcggcgggcgccatgaacagcagcaagcaggcgctgatttacagcttcgtggccaagggctccgtcgtgctggcggagcacacggccttctccggcaacttcagcaccgttgccgtccagtgcctccagaagcttccccccaacagcaccagatccacctactcctgtgacggccacaccttcaacttcctcgtcaaccgcggcttcgtgttcctagtggtcgccgatgaggcggccgggaggagcgtccccttcgtcttcctagagagggttagggaagacttcatgcagcggtatgggtccagtatcgatgaggaggggcagcacccgctcgctgatgatgctgatgaggatgactttctgttcgaagaccggttcagcattgcctacaaccttgaccgtgaattcggcccgaggttgaaggaccatatgcagtattgtgttaatcatccagaggaaattaacaagctctccaaggtgaaagcccacctatcggatgtcaaagggatcatgatggacaacattgagaagatattggatcgcggggagaagattgagcttttggtgggtaagacagagaccctacagtcacaggcggacagcttccacaggcatggcagagagttgaggcgaaagatgtggcttcagaacctgaggtttaagctgatggtgggtggcggcattgcggctctgatccttatcatttggctgatggtctgcaggggattcaaatgttagagcacaccaagttgctcgccttttttttttcttttcaggcgtttgatatgcacagactttcaaccaaattgtgttttcagtgtcacggtatcgcaatgtagtggacttcaatccccgcagtctttcccatgttccattacttccatatgataatggtaaaaggtaggaag

SEQ ID NO: 89092 - DNA, 3720 bp, Zea Mays
ctccccaaatttcgaattctccctctcccccacccgcaccgcaccccgctcctccccctctggacgctgacatttcgaattctccctctcccttccccaccgccgccagccgctcttcgccgtcgcgtgcgccatgtcgtcgcggctggacaaggagaaggcggtgaacgtgcaggtcctcctccgctgcaggccgttcagcgacgatgaggtccgaagcaacgcgccgcaggtcatcacctgcaacgactaccagcgggaggtcgccgtcacgcagagcatcgccgggaagcagttcgaccgggtcttcaccttcgacaaggtttttggaccgacagcaaagcagaaggacttgtatgaccaagccattattcctatcgtcaatgaggtcttggagggtttcaattgcaccatatttgcgtacggccagacaggcactggaaaaacatacaccatggaaggcgagtgcaggagggccaagagtgggccaaaaggtcaattacctgctgacgctggagttatacctcgggcagtgaagcaaatctttgatactttggagaggcagaacaccgagtacagtgttaaggtcacgtttcttgagctgtacaatgaggaaattacagatcttcttgcacctgaagagatatctaaggccacatttgaggatagacagaagaaaaccttacctcttatggaggatgggaagggcggagttcttgttcgaggtctagaggaagaaattgtcacgaatgcaagtgaaatattctctctattagaaagggggtctgcaaagcgccgcactgcagagacattactgaacaagcaatccagtcgatcgcactccctgttctcaatcactattcacataaaagaggcaacccctgaaggagaagaactgataaaatgtggaaaactgaatctagttgacttggctgggtctgagaacatctcccgttctggagctaaggagggccgcgcaagggaggctggcgaaatcaataaaagcttgcttactctgggccgtgtgattacggcactggtagaacaccttggtcatgttccttacagggacagcaaactcacaagattgctgcgtgattcattaggaggaagaacaaagacttgcattattgctactgtttcaccctccgtgcattgcctcgaagaaaccttgagtactttggattatgcacaccgggcaaagagcattaagaacagacctgaggtaaatcagaaaatgatgaaatcaacattaattaaagatctttatggtgaaattgaccgacttaaggcagaggtatacgctgctcgagaaaaagttggagtgtacattcctaaagacagatatcagcaggaggaaaatgagcgaaaggcaatggctgatcaaatagaacaaatgaatgcttctttggaagcaaaccagaagctaattagtgacctgcaagaaaagtatgattctgagcttcgacattctgctgatttgagcaaaaagcttgaagtcacggagaaatgtatggaccacacaagcaacctactctctgcgacaaaagaagatctgaaacaggcacagtataatctaaaggagaaagattatataatttccgagcagaaaaaagcagaaaatgctttaacacaccaagcttgtgtgctgagatcagacttggaaaaatatactcgcgataatacttcactgtattcaaaaattgctagaggagacaagctaagtgcaacaaacaggtcggtcgtgaatacattccaaactgaccttgcttcgaagttggatactctttccaatacactcaatgcatcaatagaccagcaaaatatgcacctaaaagctgtggaggatttatgccaatcctgtgttgattcccatgacagggctacttctgagctgaaaaagaagattttggcttcaaaatcattatacatgtcacatatggaagctttccaaaatgttgtcctcctacataaagcaagtgcaaatgccacactagaagatatatcatcactgtctgctacaagctgctgtagtcttgatcagctactagtttgtgttgagggagaggctcaaaatatatttaatgacatccataaattgttaaccacacaccgaagcgaaatgacacacttcactcaacaattaagggagagtttccaaataagcttggacaggacaaaagaaatgtctacctatattattgggctctttgacaagtatgttgaggagacctccaaattgcagagtcactcaaataatactcatgaagcacaaatgaaaagcattgaagattttcagatggtttacgaggagcaatcaaaatcagaggagcagaagcttctagcggacattagcagtttagtgtctaaacatattactcgacagagagagttggtgggagttagattgagctctctgggtgatgctgcccgtggaaacaaggcatttttggatgaacacacatcggccatggagtttgtcacaaaagatgctaagaggaagtgggaaacatttgcagagcaggctgagaatgactgcaaagctggctccagctcttctgcagtcaagcattgccgcatggaaaccatgcttcaggagtgcgcatgcactgttgactccgcagttcagcaatggaagaagtcacatgctgctgtcaacgatctcagcagaaagcaagttgctgaagttgaagcactcgtcaggactgcaattgagaacaatgagcaacatgaagtggaagttgcatcttctcgagctgtggctgaagaagacaccaccaatagcagcaaggacatagcccagggcgttgaaaatctgttggaaaaggcacagaaatctagttcaagagtggtctcaatggtggaggctcacttcgcagagctacagaagctgcaagagagccactccacccaggctaccggtatcaacatgcacgcagacaagtctttccaaaccagttacaaggactacgagccgacgggtgaaactccagtgaggtctgagccgaacgtgccaagcaaaggctcgatcgagtcgctgcgagccatgcccatggagaccttgatgaacgagttccgtgagaaccatccgtatgaatctgaatcgagcaaagaatccaagttatctcagatccctcgcttgccgctcagcatcagaaatttgcccaagaattgcactggagtctgaatgctgcattgcattgtgcgaacaataaaaaaaattcaagcgaggtagagctgcatctccgagcggttctcctgctcgacgacctccaggaagacggggtcgacagtgatgtggctgtcgatgcggacggagaaggggcgggaccagagcagcaccgcggcctcgccggcgatctcgacggccgcgtctagctccatgtggcggcgcgcgacgtcggagaggagggcgcgggcgcggtgcgcgagctcgacgccgtcgaggcgcgccgggaggtggagcaggcggcaggaggtggcgggctgctcgccggcgtcgaggcgggcggtgccgaggtgcgcgccgccgtagaggatggagacggtggagggcccgtagcgcacgggcacgacgttggggttggtggcgtgcacggtgagggtgagcccgatgtccagcgccgccggcgggcggaagtggaaggcggacaggctgatggagatgagctcgaaccgcgggtcccgcggccggcacagcactagggccgtggcggcggc

SEQ ID NO: 89093 - DNA, 4512 bp, Zea Mays
ctccccaaatttcgaattctccctctcccccacccgcaccgcaccccgctcctccccctctggacgctgacatttcgaattctccctctcccttccccaccgccgccagccgctcttcgccgtcgcgtgcgccatgtcgtcgcggctggacaaggagaaggcggtgaacgtgcaggtcctcctccgctgcaggccgttcagcgacgatgaggtccgaagcaacgcgccgcaggtcatcacctgcaacgactaccagcgggaggtcgccgtcacgcagagcatcgccgggaagcagttcgaccgggtcttcaccttcgacaaggtttttggaccgacagcaaagcagaaggacttgtatgaccaagccattattcctatcgtcaatgaggtcttggagggtttcaattgcaccatatttgcgtacggccagacaggcactggaaaaacatacaccatggaaggcgagtgcaggagggccaagagtgggccaaaaggtcaattacctgctgacgctggagttatacctcgggcagtgaagcaaatctttgatactttggagaggcagaacaccgagtacagtgttaaggtcacgtttcttgagctgtacaatgaggaaattacagatcttcttgcacctgaagagatatctaaggccacatttgaggatagacagaagaaaaccttacctcttatggaggatgggaagggcggagttcttgttcgaggtctagaggaagaaattgtcacgaatgcaagtgaaatattctctctattagaaagggggtctgcaaagcgccgcactgcagagacattactgaacaagcaatccagtcgatcgcactccctgttctcaatcactattcacataaaagaggcaacccctgaaggagaagaactgataaaatgtggaaaactgaatctagttgacttggctgggtctgagaacatctcccgttctggagctaaggagggccgcgcaagggaggctggcgaaatcaataaaagcttgcttactctgggccgtgtgattacggcactggtagaacaccttggtcatgttccttacagggacagcaaactcacaagattgctgcgtgattcattaggaggaagaacaaagacttgcattattgctactgtttcaccctccgtgcattgcctcgaagaaaccttgagtactttggattatgcacaccgggcaaagagcattaagaacagacctgaggtaaatcagaaaatgatgaaatcaacattaattaaagatctttatggtgaaattgaccgacttaaggcagaggtatacgctgctcgagaaaaagttggagtgtacattcctaaagacagatatcagcaggaggaaaatgagcgaaaggcaatggctgatcaaatagaacaaatgaatgcttctttggaagcaaaccagaagctaattagtgacctgcaagaaaagtatgattctgagcttcgacattctgctgatttgagcaaaaagcttgaagtcacggagaaatgtatggaccacacaagcaacctactctctgcgacaaaagaagatctgaaacaggcacagtataatctaaaggagaaagattatataatttccgagcagaaaaaagcagaaaatgctttaacacaccaagcttgtgtgctgagatcagacttggaaaaatatactcgcgataatacttcactgtattcaaaaattgctagaggagacaagctaagtgcaacaaacaggtcggtcgtgaatacattccaaactgaccttgcttcgaagttggatactctttccaatacactcaatgcatcaatagaccagcaaaatatgcacctaaaagctgtggaggatttatgccaatcctgtgttgattcccatgacagggctacttctgagctgaaaaagaagattttggcttcaaaatcattatacatgtcacatatggaagctttccaaaatgttgtcctcctacataaagcaagtgcaaatgccacactagaagatatatcatcactgtctgctacaagctgctgtagtcttgatcagctactagtttgtgttgagggagaggctcaaaatatatttaatgacatccataaattgttaaccacacaccgaagcgaaatgacacacttcactcaacaattaagggagagtttccaaataagcttggacaggacaaaagaaatgtctacctatattattgggctctttgacaagtatgttgaggagacctccaaattgcagagtcactcaaataatactcatgaagcacaaatgaaaagcattgaagattttcagatggtttacgaggagcaatcaaaatcagaggagcagaagcttctagcggacattagcagtttagtgtctaaacatattactcgacagagagagttggtgggagttagattgagctctctgggtgatgctgcccgtggaaacaaggcatttttggatgaacacacatcggccatggagtttgtcacaaaagatgctaagaggaagtgggaaacatttgcagagcaggctgagaatgactgcaaagctggctccagctcttctgcagtcaagcattgccgcatggaaaccatgcttcaggagtgcgcatgcactgttgactccgcagttcagcaatggaagaagtcacatgctgctgtcaacgatctcagcagaaagcaagttgctgaagttgaagcactcgtcaggcaagttgattaatactagtgcatctcaataaattcgtttggcactctctaatagtggctactttgttgacaattttgcatgaccatgcatatttttagtgcataagaacaaacttcttataatttgtgtgtgacagcagccaagggacagtttgtgttgcctgagcatttgagccagcacctttttttctctcccaaaactatgtaatggccgataacgtagtttggttgtatttttcaggactgcaattgagaacaatgagcaacatgaagtggaagttgcatcttctcgagctgtggctgaagaagacaccaccaatagcagcaaggacatagcccagggcgttgaaagtactttcttggcactcaatttgttcatcctagcaagcgcttagagttccctacctgatctgggcgtcttgttatatcaatttgcttcagatctgttggaaaaggcacagaaatctagttcaagagtggtctcaatggtggaggctcacttcgcagagctacagaagctgcaagagagccactccacccaggctaccggtatcaacatgcacgcagacaagtctttccaaaccagttacaaggactacgagccgacgggtgaaactccagtgaggtctgagccgaacgtgccaagcaaaggctcgatcgagtcgctgcgagccatgcccatggagaccttgatgaacgagttccgtgagaaccatccgtatgaatctgaatcgagcaaagaatccaagttatctcagatccctcgcttgccgctcgcgacaatcaactgagacatctcacatcccccgtgtgcagtgtaattttattagtagagcatcaatttggtgtccttgttgtgcacttgtgctaagttaactgcggcgggtgagctgccttggctctccccccagtgcatttccccttcccccagtcaatcatctgtatcattgccttgtgcgacactgatttttgtagagcatcagaaatttgcccaagaattgcactggagtctgaatgctgcattgcattgtgcgaacaaatgataaggttttgcattttgagcactgcacaagataagcgatagggtttttgactagacttgatatgatctttgggcatcgcatctactctagtctagttggtaaaaaaaattcaagcgaggtagagctgcatctccgagcggttctcctgctcgacgacctccaggaagacggggtcgacagtgatgtggctgtcgatgcggacggagaaggggcgggaccagagcagcaccgcggcctcgccggcgatctcgacggccgcgtctagctccatgtggcggcgcgcgacgtcggagaggagggcgcgggcgcggtgcgcgagctcgacgccgtcgaggcgcgccgggaggtggagcaggcggcaggaggtggcgggctgctcgccggcgtcgaggcgggcggtgccgaggtgcgcgccgccgtagaggatggagacggtggagggcccgtagcgcacgggcacgacgttggggttggtggcgtgcacggtgagggtgagcccgatgtccagcgccgccggcgggcggaagtggaaggcggacaggctgatggagatgagctcgaaccgcgggtcccgcggccggcacagcactagggccgtggcggcggccgtcgtcgccgcgcccgccagcgccgagccccagctccaccgcctgtgcgatggcggggacgacgcgctgcccatggcgtgagacgcgcgtggggtggtggccggtgggcggtagcccttgttgggatctgggaagcctggaggtggtggttctgatgt

SEQ ID NO: 89094 - DNA, 1068 bp, Zea Mays
gttttatccgcagccacaagttttgctctgcgtctcccaagttcccgatctcggccgcgcgagtcagtgcaccccgtgcgtgatcaacaggtccttcctgctgccgcggccgcctcccacttcgactgctcccgcacctttcgttcacgcaagcgcaacctgcttctcccgctggctgtctcggacaccccctccctcctgccacgcatcctccccgcccacgagtctcccccgcaaccggataataaggaagaggaagagaaaccgtgcggtgcggcgaaaggaacagtgaaaaaggaagaatctctctgatcgaggttcctgtccggcttgcagaatcttggcggacagccatatatggatgtactgctaggttccgggaggttcttggcgcgacggcctcccctcgcgctcgtccctcgctgctctcgaggctccccggacaaaagcggcagcgacaaaggtgaaacctctgctgactgggacaaggcatggtctgccttcaagaagaaagggaagaggaccctgttttctgatttctcaccggacaagtacgtgacctggaacccacggcgcagcgagtatccattgtcagaagaggtcgatccaatcaagagaactgaaagatctaacttgatgttgtggacaagcccccagttcaccttggtcggggcgattatcatcgtcttgacattgctaatctatacactagttgttcctcctcccaagtaactgcagaggtgacaactactggggggggggggggggggtgagctgtaaactagtactatttcaactgggaagtctgtattgtacatttttacgtgtactatggcaactcactatagcagtattgattcaattgcaatcatgtagatacaacaccactgtccattccattctggaggtttttcttcaattgtgtgctaaatggctgctgtctgagtcttatattcacttgttataatgaagaaatatttggggtcaggtagaattatatgttggtcgactcctgatgtgtgtttctaaacagcaacttaccaatcctatctcccaccacatacatat

SEQ ID NO: 89095 - DNA, 126 bp, Zea Mays
ctttccggagatttccacactcgaatttgcactattcttcgtatacctaatccctttacacagaaaaagttactacccgactttgattctgtttatccctacatttgctttggtggatttttggtg

SEQ ID NO: 89096 - DNA, 543 bp, Zea Mays
ggtaatagttctggtggaaatgagaaaggaagtgaaacctctgctgattgggacaaggcatggtctgccttcaagaagaaagggaagaggaccctgttttctgatttctcaccggacaagtacgtgacctggaacccacggcgcagcgagtatccattgtcagaagaggtggatccaatcaagagaactgaaagatctaacttgatgctgtggacaagcccccagttcaccttggtcggggcgattatcatcgtcttgacattgctaatctatacactagttgttcctcctcccaagtaactgcagaggtgacaactactagggggggtgagctgtaaactagtagcatttcaattgggaagtctgcattgtacattttttacgtgtactatggcaactatagcagtattgattcaattgcaatcatgtagatacaacaccactgtccattccattctggaggttttcttcaattgtgtgctaaatggctgctgtctgagtcttatattcacttattataatgaagaaatatttggggtcagg

SEQ ID NO: 89097 - DNA, 228 bp, Zea Mays
atggctcttcagtcccctgattcccgtgccttcctgagcaagaagccacccgcggcggcaatggagcggcaggaggcggcgaggcggaccctgccgcggcacgggcagatcaagctgcgcatcttcgcgagcctgttccggtgcttcatcacccccgaggcacccgcgcgcaaggaaggcgacaagaacagagatggcggcggccgccgcgtttccccaggaggctga

SEQ ID NO: 89098 - DNA, 1127 bp, Zea Mays
ccgtacccgcatccgacggttccaagcctaacacgcgtcatccatcgggagctcgctctagggttttgcttcgagaccgttcccacttcccatcgctcatataacaccgggcgccgccgcttccgtcctcttcctctcgctccgttgctcgcctcgggtcaaaccctaagcagggagttgatttatccgctgcagccatgagtaagttgcagtctgagtctgtcaaggatgccatctcccagattgttggggatgccaaggagaagaataggaagttcactgagactgtggaacttcagattggtctgaagaattatgatccacagaaggacaagcgtttcagtggctctgttaagttgccccatatccctcgtcccaagatgaaggtgtgcatgcttggtgatgcccagcatgttgaggaggccgagaagatgggacttgactacatggatgttgaggctctcaagaaaatgaacaagaacaagaagcttgttaagaggcttgccaagaagtaccatgctttcttggcatcagaggccatcatcaagcagattccccgtctccttggtcctggtctcaacaaggcaggcaagttcccgaccctggttactcaccaggaatccctcgagtccaaggtgaacgagactaaggcaaccgtcaagttccagctcaagaaggttctttgcatgggtgttgccgttggcaacttggcgatggaggagaagcagatccagcagaacatccagatgagcgtcaacttccttgtttcccttctgaagaagaactggcagaatgtgagatgcctctacgtcaagagcaccatggggaagccatacagggtgttctaagtatgctcttttgtgaagtctgctaggttctggcaccgaggttttattgaattaaacttttgttaagagtatgtttttggacgatcctatatttcgtcctggcgctactatgtttcagaatggtggtactactataagtatcctggcgctttaagtattgcttgaaaggatcaatataatttgcgtgtcatacccacaaccttttctgccatggttgttccgccctcgtattatctacatggtagcgccctcgtaggtcacaaatctagcctagtaata

SEQ ID NO: 89099 - DNA, 1044 bp, Zea Mays
gcttcgagaccgttcccacttcccatcgctcatataacaccgggcgccgccgcttccgtcctcttcctctcgctccgttgctcgcctcgggtcaaaccctaagcagggagttgatttatccgctgcagccatgaggtactctttctcccatcgcatccgctttgttgtgcatcagttctttgcgatagaaatgccggtttcgtgtagttgtcttgtccactgccatggtaggatttggtcctacaggggacctttgcagctgaatcgtgccttagtagatcaatgtcttatgtatttgttttatttttcgtttgattattgtaggctatgttatcgatctaaggatgataagaaatctagcagcagcggtctttccagtctaggtctgctaggcttcggttagctctcaattcatatggattgagtgagattggatgggtttaaatcctaaacaagtcaaatttcttcttaattttttccaattccatctaattttttcaatcccattcaatccatgggtaacgggattaactgaacaagtcctaacggggcggttgttgcctttttttttggggggagggggttggcggattctgatttgtgctgggtgtaaatgggtggaaacttgtttgcttcgtcatggatcgggatgggttgggtgcatgggtttacaagaaacgggagctgggacaggttggcgtgtgcaggggaaatagggcggggatcgggccgccgctacggtggacggcggcgaggttgagctgtgtggcgttactggtgccaacgacccccccccccccccgcccgaaacccagagtggcagtgctctgcgtgtgggtcaccacactggacaagagggttagtatgaggagcgcaggctggcgccggagaggatgcacttgtcactcgtctcgtctacaggctgccgccagccttgatatgctgccgctggcaacttgcatagaaggcgaggagcactgatgttaaacccttattctgtgcatttccatcagtgatttgtttaacctatctgctgcagctctg

SEQ ID NO: 89100 - DNA, 964 bp, Zea Mays
gctcatataacaccgggcgccgccgcttccgtcctcttcctctcgctccgttgctcgcctcgggtcaaaccctaagcagccatgagtaagttgcagtctgagtctgtcaaggatgccatctcccagattgttggggatgccaaggagaagaataggaagttcactgagactgtggaacttcagattggtctgaagaattatgatccacagaaggacaagcgtttcagtggctctgttaagttgccccatatccctcgtcccaagatgaaggtgtgcatgcttggtgatgcccagcatgttgaggaggccgagaagatgggacttgactacatggatgttgaggctctcaagaaaatgaacaagaacaagaagcttgttaagaggcttgccaagaagtaccatgctttcttggcatcagaggccatcatcaagcagattccccgtctccttggtcctggtctcaacaaggcaggcaagttcccgaccctggttactcaccaggaatccctcgagtccaaggtgaacgagactaaggcaaccgtcaagttccagctcaagaaggttctttgcatgggtgttgccgttggcaacttggcgatggaggagaagcagatccagcagaacatccagatgagcgtcaacttccttgtttcccttctgaagaagaactggcagaatgtgagatgcctctacgtcaagagcaccatggggaagccatacagggtgttctaagtatgctcttttgtgaagtctgctaggttctggcaccgaggttttattgaattaaacttttgttaagagtatgtttttggacgatcctatatttcgtcctggcgctactatgtttcagaatggtggtactactataagtatcctggcgctttaagtattgcttgaaaggatcaatataatttgcgtgtcatacccacaaccttttctgccatggttgttccgccctcgtatt

SEQ ID NO: 89101 - DNA, 282 bp, Zea Mays
atggcgccattgcgtcccgccaggcaccaagtccatgtgcgacaggtgttcgacacgtatctcggcgaggcgcgggcgactctcactgcggccgcgcaggacaccgacgatgcggcggcggcggcactcagcctggtcacggccgccctggagatgtcgccgcgggccgaggtgacgctggagctccgggcgcgcgctcctcgtgctcaggcgctatcgcgacgtcttcatccatggctggagatcgacgaggctcgtcgtcgttgcgaccggactgggtga

SEQ ID NO: 89102 - DNA, 495 bp, Zea Mays
atggctccgcccgccgcacccaccgcgctgcaccaccgcacgcccctcctccttccccgccgcaccgtcgccttgggtgccaccgccaccgcgcgcgccgccagggccgcttctctcgccgtcagggcccagccggacaccaccgccgcagccgtctccacctccgcgcctgagccggcgcccgagttcaagcctccgccggggttcaaggcgcccgagcccaagaggtacgaggtcaagtccggccaggtgggcagcgtcctcggcgcctcgctcgccatcccccttcgcctcggcaccggcgtcttcgtcctcgggtactcgccatctcttgtttctccatcagagataccatcagaccagtatgcactggaatttggagcttggaaggtgaaagaggaatcaaaaataggacagtgcaaacgaccagaaaagcctatcgagatatatgaatttgaagggtacagcatatcttgcttcttcctcctgttctga

SEQ ID NO: 89103 - DNA, 1286 bp, Zea Mays
atggagaagagaaatcggattctcgacctgcaggacctcctctctgacgcggacttcggcccactactcgcccgacagctactgtctccgttcgtgcggcggccacctacctacctcgtagcaagacaccatatcttaagtgctgccatggatttgcacctagagctctacattggtcgccggcgccgcggcggaggcaagagtcagaagtaccctctcccatgggaggcaccgtgttccagctgctccacttctgtcggcttgatggagctcctgatggatggagaggagaggagctcgcccaacagccacaagttttgctctgcgtctcccaagttcccgatctcgtacccgcgcgagtcagtgcaccccgtgcgtgatcaacaggtccttcctgctgccgcggccgcctcccacttcgactgctcccgcacctttcgttcacgcaagcgcaacctgcttctcccgctggctgtctcggatcggaccccctccctcctgccacgcatcctccccgcccacgagcctcccccgcaaccggataataaggaagaggaagagaaaccgtgcggtgcggcgaaaggaacagtgaaaaaggaagaatctctgatcgaggttcctgtccggcttgcagaatcttggcggccagccatatatggatgtactgctaggttccgggaggttcttggcacgacggcctcccctcgcgctcgtccctcgctgctctcgaggctccccggacaaaagcggcagcgacaaaggtgaaacctctgctgattgggacaaggcatggtctgccttcaagaagaaagggaagaggaccctgttttctgatttctcaccggacaagtacgtgacctggaacccacagcgcagcgagtatccattgtcagaagaggtggatccaatcaagagaactgaaagatctaacttgatgctgtggacaagcccccagttcaccttggtcggggcgattatcatcgtcttgacattgctaatctatacactagttgttcctcctcccaagtaactgcagaggtgactactactaggggggggggggggggtgagctgtaaactagtagtatttcaactgggaagtctgtattgtacattttttacgtgtgctatggcaactatagcagtattaattcaattgcgatcatgtagatacaacaccactgtccattccattctggaggttttcttcaattgtgtgctaaatggctgctgtctgagtcttatattcacttattataatgaagaaatatttggggtcaggtaga

SEQ ID NO: 89104 - DNA, 1954 bp, Zea Mays
aacaaccacatctgcatctcccgtcatctactcgaactcaactcatcgcctcatccgtgtctcatcccattccgtctccgtctccgtctgaactctccatctataaagcttctctgaggcacaagacgagaaggccacagcccacaaagcatgcccggcgagttggaaaagcgcagaatctgcgagacaagaaagcaataggaagggagaaacagggagagaggttgcgtcccagccccacctgccatcgcctcttcttccgctccctcggcggctttccaagattcagattcagattgggggccttttgctgctgcgcggcaattctcgtcgctccagtccccacttcactgttcctgagcgggaggcaccggccggactcgcgatggggcaggacggccagcagatccgccgcgacaagctcatcatcgacacggatcccggcatcgatgatagcatgacgatcctaatggcgttcagagcacctagtgtggaaatcattgggctcacgaccatattcggcaacgtcgacacaaagggcgcaacacgtaacgcgctattgctgtgtgagagagcaggatgccctgaagttccagtagcagagggcagccatgagcccctaaagggaggaaagccccgtgttgctgatttcgttcatgggtcagatggcattgggaatctgtttcttcctgcaccctctgctaagaaggttgaggaaagtgctgctgatttcctgattaataaggtctctgagtttccaggagaggtctctgtgcttgcgttgggacccctgacaaatgtagcattggccatcaaaagagacccttcctttgcaagcaaggttaagaaaatagttgtactgggtggagctttctttgcggctggaaatgtcaaccctgctgctgaagcaaatatccatggagacccagaagcagctgacatagtttttacttcaggagcagatatcgttgtggttggcattaacataacaacacaagtctgcctgacagatgaggatctcttggagctaagaaactcgaaagggaagcatgcagcgttcttatatgagatgtgcaagttctacagagattggcatgccaagtctgatggttttcatggtatttgaaattaataatatactactgttatatgcttttgccaattaccatcaaatatgagaagaaacacgcttctgacagaaaatcgctttctgttcaggaattttccttcatgatcctgtgagcttcactgccgtacttcatccagagtacttcacattcaagaagggtgtggtgagagtagagacccagggcatttgcactggccacactttgatggatcagggattgaaaaagtatgtttttttttctctctgagtaactcataaaagattgacccgtctgatgttttttagtttcagcattcttacatacaccacattgatatgacataaatctcaccaaattactttataacttttggagtaagcaaaccaaggcaaaagttaccccacatgatctatatgtttcagcagatttcacacttgtttcttcttgttcctcctatgctgcaggtggaattcagagaacccatggtcagggtataaaccgatttcagttgcatggacggttgatgtgccaaaggtcatcagctttataaagaagctgctcatggcaccatgagcaaagtacaaccatttaacgacgtgtcgacatcagcgctctctgatgtccaagaaaatttgacgagtacagatgctctttctcagttgcactgtaattagttcctggacctaggatgattcctattcctccaatagtaagaggaacctttcattgtgaaaggtcatgcagcagtctcgaataccatgaagcaaattctggcatacgacatcatgtctcacacatttgtatcaatacatttcgaatcaataaagtttccctcactctttact

SEQ ID NO: 89105 - DNA, 1733 bp, Zea Mays
aacaaccacatctgcatctcccgtcatctactcgaactcaactcatcgcctcatccgtgtctcatcccattccgtctccgtctccgtctgaactctccatctataaagcttctctgaggcacaagacgagaaggccacagcccacaaagcatgcccggcgagttggaaaagcgcagaatctgcgagacaagaaagcaataggaagggagaaacagggagagaggttgcgtcccagccccacctgccatcgcctcttcttccgctccctcggcggctttccaagattcagattcagattgggggccttttgctgctgcgcggcaattctcgtcgctccagtccccacttcactgttcctgagcgggaggcaccggccggactcgcgatggggcaggacggccagcagatccgccgcgacaagctcatcatcgacacggatcccggcatcgatgatagcatgacgatcctaatggcgttcagagcacctagtgtggaaatcattgggctcacgaccatattcggcaacgtcgacacaaagggcgcaacacgtaacgcgctattgctgtgtgagagagcaggatgccctgaagttccagtagcagagggcagccatgagcccctaaagggaggaaagccccgtgttgctgatttcgttcatgggtcagatggcattgggaatctgtttcttcctgcaccctctgctaagaaggttgaggaaagtgctgctgatttcctgattaataaggtctctgagtttccaggagaggtctctgtgcttgcgttgggacccctgacaaatgtagcattggccatcaaaagagacccttcctttgcaagcaaggttaagaaaatagttgtactgggtggagctttctttgcggctggaaatgtcaaccctgctgctgaagcaaatatccatggagacccagaagcagctgacatagtttttacttcaggagcagatatcgttgtggttggcattaacataacaacacaagtctgcctgacagatgaggatctcttggagctaagaaactcgaaagggaagcatgcagcgttcttatatgagatgtgcaagttctacagagattggcatgccaagtctgatggttttcatggaattttccttcatgatcctgtgagcttcactgccgtacttcatccagagtacttcacattcaagaagggtgtggtgagagtagagacccagggcatttgcactggccacactttgatggatcagggattgaaaaagtggaattcagagaacccatggtcagggtataaaccgatttcagttgcatggacggttgatgtgccaaaggtcatcagctttataaagaagctgctcatggcaccatgagcaaagtacaaccatttaacgacgtgtcgacatcagcgctctctgatgtccaagaaaatttgacgagtacagatgctctttctcagttgcactgtaattagttcctggacctaggatgattcctattcctccaatagtaagaggaacctttcattgtgaaaggtcatgcagcagtctcgaataccatgaagcaaattctggcatacgacatcatgtctcacacatttgtatcaatacatttcgaatcaataaagtttccctcactctttactgtgcacttttctcaaagatcacaatcttgttgtaatgtgcctctcatgtaaagcaaagtaccaataaggcatatgatagttttgatacaacattcttc

SEQ ID NO: 89106 - DNA, 1490 bp, Zea Mays
gacttcgccaaaaacgaaaaacctcaccggctccattccaatccatcctttccttatcccctctccctcccttcgttcgccatggcaaccgtgttcctccgttccctcgccatggccatggccgacaccgcgctcccgccctcccacaagctcctccctacggtttccctgccgctcctcccctcgtccacccgcgccgcgccgctcctcctctgcgccagccgccgcctgccgcccgcgcccctcgttgcctcatccgacgccgtcgagacgaacattgaatgggtcgacgacgacgaggaggaggctggagaagccttcgacgaggagggtggggatgttgaggaggaggtgctggcctcaggcgacgagggtgagggggagtacgccgcggtggagccgcccgaggaggcaaaggtctacgttgggaacctcccctacgacatcgaaagcgagggactcgcgcagctcttcgaccaggccggcgtcgtcgaggtcgccgaggttatttacaacaaagagactggccagagccgtgggtttggctttgttaccatgagcactattgaggaagctgataaagccattgagatgttcaaccgctatgacattagtgggaggcttctgaatgtaaacagggcatctcctaggggcactcgcatggaaaggcctccgagacaatttgcgcctgctttcagagcttatgttggcaacttgccatggcaagctgatgactctaggctggtgcaattgttcagcgagtacggagaagtcgttaatgctgcggttgtctatgatagagaaaccgggcgctcacgaggattcggttttgtaacgatggtgtcgaaggaggaactcgacgacgctatctctgccctggatggacaggaattggacggccgccctcttcgggtgaacgttgcagcagagcgaccacagaggggcttttgatgcgggcggcggtacgagagagatggctgcttgtttgtgataagagcacggagacacaacggaggaggaacggtacaaattagcggaagttgatgctgtcacaagttgctagatccctcccttagcttcgtgattttggttcttgtcgacatcatcatgagttaaattatccaagtaggcttctatgtttgatctatcccgattcctgatgccttgtcacattatcatcgtggcaaatgttttgttggtaaaaccataggagcaaacggagattatttatatctggcgtataaaaccgtacccagtgtgttgcatctaacattcatctctccttgacacttcgacagtgtaatggccaaccagttatcgcttgagtctggaagcattccccgttaggtcctgtttgatttgaggcttgaaacaattttagccggattggtcctataatttagataagattctggtcgaatcctggagaaacgaatgtatcggaatgggaccaagaactatttcagctcaaataaacatatcattccaca

SEQ ID NO: 89107 - DNA, 642 bp, Zea Mays
attactctcgaaccgaggcagggagatgagggagcaggtgagcctacatctctgcggagtcgaagaagttgacgccggcgtcgtaggcggcgtcgaggaggcggagcgagcacgccgccccgctctgctctcccatcgtcattgtccctgcaggaatcacacgcacgcacaggcagagtcactcagcacggtccaccagggagagaaagagcacagtccaacggagagagaggaaaagggagtctgagctcgaaccgaagcagaggcgggatacgggcggcaggtcaggagcaaggcgtaagattcacgtacagactggattgggcgcggggtgaagccgtagaggatgggaccggagattcgaatcggccggatgagatacggagggaaggagaggaggataggattttgagatggtccagcgaactggggaacgagagtggacgacggaaccgaaccggatgccgctactcttgctgctctgaagagatgtacgtatttctgaaatcatggccgaacccaacccgacccatcgtgtaatttttttcgattttagggttagtttggaaacccattttctcaagaaatttttattttctccaaataaaattagtttatttttaagaaaataaagtttacaaa

SEQ ID NO: 89108 - DNA, 607 bp, Zea Mays
gctggtagatcaactctcgactggtattacatgaatgcaggtgtacgatgtgcgtatgccattcagacattcacagtcggcgatgttcctgtccgagcatacatggatcaatcatagtatagctatataggctatagctagtacgtagtagtgtagtgcgcaattcagagctcgtcgtggctggagccgtcctcgtcgacgacggcgtggaccttggggttgggcgaggtcttgacggggtaggatgcctccatggcgatgccgcagtgtccctccttggcggccacgtcgcgcgccatgcggatgtaccccttctcgccccactcggggccccacgagttcttgaccagccagtacttggtgccgtccgcggtgaccccgtagccgaccgccgcgacgccgtggtccagctccgtcccgcacctgccggagaagaccccctcggagtagaactggaagtgcgagccgctggcctcgatggcgacggacacgggctggtgcgccaccgccttcttgagcgccgactcgtcgttggccggcacgtcctcgtagccgtcgatggtgacgaccggggccggcgacttcttgcaggacgcctggcgcgctc

SEQ ID NO: 89109 - DNA, 306 bp, Zea Mays
atgaggcccccgttgcagccggcgttggccttggtgtcgcagtccaccagctgctgctccgacagcgacgtcaggttcttggtcttgatcgcgttgatgccctccacggcggcgatcgtcgagaacgcccagcagctaccgcattggccctggtccttgacgtcggtgacagcgcccttctgcctccagtcgacggaggccgggacgtcgcgcgcgtcggcgtacatgaacgacgacgccgacgccgaggagccctgcctgtcgccgcggaacatgcggtggtgcgcgaccctggagcccgcgtag

SEQ ID NO: 89110 - DNA, 708 bp, Zea Mays
atggatggctccggcagctgggacgctatagactggaaccaaatcgaggatccgaggccgcggaggtcgggccaggccgtcaaggagagcatggacgacttcttgctcgaggacgaggaggtgctcgcgcagggccatggagttgttctactaaacaaccgtgatgctggtacactttcagttacaaatttccgtcttctctttgtgagccaagcaaaaaaatgtgtcatagagctgggtaccattccactgacgacaattgagaagctaaatgacgatgtgaaactccaacccttgccccacctctctgataagaaccacccccgtgaacttcttcaagtaattggcaaagacatgagaatcattgtgtttgcttttatccccagaacacagcagaaaaatgaagtgtttgatgctttgaggagatacactaaacctgctaatttgtgggatctatatgcattttcttgtgatccatccaccattaagcatgattctgagccaaagtggcgtctcttgagggaatactttcgtctttttaggagaagtttaccgctacagggagtcgaggaagtttctttgtgtaatgaatggtggaggctaactagagttaattctagttattcattgtgttcaacttacccctctgaactcattgtaccaagaagcataaggtacttccatgttcttgacaataacatgtggtag

SEQ ID NO: 89111 - DNA, 965 bp, Zea Mays
gggtctggagctgttctggcaaggtcatctcagccgatggtggggttgatgatgaactttagaaacaatgcggatgagaagcttgtctgtgctctcagcagcagaaccatcgatgagaaaggatctccaaggaaattgtacataattgatgcccggccaagagcaaatgctatagcaaatggggcaaagggagggggctcagaatcatcttctaactaccataaatctgaggttctgtttttaggaatacaaaacatccacaccatgagagagagtctttctcgccttagggactatgtggatgctcatggctcaatttcatcaaatgggagcccttcagctgtatctgttgttggagatcggaggaaccgtggatcaacctggggtggaggcaatctaaatagcatgacatcattttcttcaacactgggggaatggctaaaccatatccagaatattctggttggtgcttcatggattgctgcacaaatttcagaagaagcagcgtcagttcttgtacattgcagtgatggatgggaccgcacaacccagttggtttcacttgcttgtttattgcttgatccctattatcgaactttcagtggattccaggctcttgttgaaaaggattggttagcatttggtcatccatttgcagagagaatgggagttccaacagtagctgagaatggggggtcacagtatgagctactaaggcaaccttcgctcggaaatttaagcagttccccgagtaggaacactttagggccgccagggccatcctctaattctccagtgcaatcccagacatcaaacaacacttcaccaatattgttacagtggcttgattgtatctcacagttgttacgtctgtacccatctgcatttcagttttcatctaaattcctagttgattttatggattgtgtgctatcgtgtcgctttgggaacttcttgtgcaatag

SEQ ID NO: 89112 - DNA, 300 bp, Zea Mays
aagggttggagacccatatttatagccctagaggctgcactaccacaccttctcacacacactacacaacatgattgtcctctagatgctaaagagactacagatgacagtcaaaagcgactgttgtcctctagatgctaaagcgactacagaggacagtcaaaaagcgactgctgtcctctagatgctaaagagactatagaggacagtcaagctgtcctctagatgctaaaggactacagaggacagtcaaaagcgactgttgtcctctagatgctcaagacttattccatcagtctc

SEQ ID NO: 89113 - DNA, 1295 bp, Zea Mays
atgtggtcacatttggctaatctgagagcttctggcggcagcttccatgagcactataatccattctatgacccagtaaatcataatggtgcactattgccccctgctgcagcacttgccccaacactctggccccagttttttttgaggtggacatgccccattgagtcacaaggtggtgatcttgaatcccagtggcatgctatgaataaaaaatatgcagatacaatgaaggcaaaggatattgctgagtggagggcaaaggatatcaaattgaaattggaatctatgaaacaagacctgcagagggagaaacgtattaatagtacagctctagccgcagcccgaagtgctcaaagggagaatgctgcaattaagaaggcaatagaatctatagggtgcacaattaaattttcgacaagcgaaaacgaggacagaactgaagtgctgtcatgttcattaggaagaggcacagatggtagagctcagcaagatgaaaacggtgacttctctgtagcaattgaggacagcctggtctcggatgcaccggcggaccatttttgcgaatcactctgccccttccgcacaagagaagggtgcagatggccagatgctccgtgtgcacagcttggaagtcagtttgttggtttgaaggcaaattttgatgcttttgaccggctgtcaatacatgactgctattttggaccggagtagttgatcatgaaccagccgtgtcagtacacgcttggcagttgccaatggattttttcagtagttggcacctccaggtcggcatcaatagcaaaagaatgctgagaaacaactcaatgatgcatatttgacgagtatttacaaattccttgattcaatagtttttcactgtctgggtcctccgaatctgcatcaacagaataacctggaaagcaaattaaggatgcgtacctgatatgcatcggaggatcttttttttttgttccaatggtattataagcttctgtgagggaattccagcgttctttgttagttagcaatttgtaggaaccaccgagatagaaatcaatccctttgtatagtttggcaagccattcatactataagcaaaataaagcgaaacatggaagacggtagtagtttgttactctttttctgatagtacagtgttcgacttgtaactcttagctttagaataagatccatgcaaatcctgcttggaaaggaaatgttgtacatgaaggtatagacacgtggactggttcctgatccctccttatagttgtaacgatatagattttttc

SEQ ID NO: 89114 - DNA, 566 bp, Zea Mays
agctacacaagctaagtaaaatagattagctacacaagctaacaacaagtgagcaactattttgttataggtatgactagatatacaagagcatacacgagcaacaaatacttactagcataagtatatgaacaagtaaatacaagctagtgaggaaagttgcaaaccaacgggaagatgatgacacgtggcacaatgatttttttttccgtggtgtcgatgacttgccggtcacccctagtccacgttgaggtagattcaaagctcccaaccgctcctctatcaagtctccacttgatctcttgagccggattggtcaatgaaccctcaaacctcgattccactagagttgcttttcaccgctccggcgaggcaagcacaacgcctctcacaatcaccaccgcggcctcttcacaatctcctttgaagagctcacggggaaccaccaccaagccgtctaggaggcggcaacctccaagagtaacaagccaacgacctcacttgatgatctccctagtgcctcaaagatcaacaacttgatgcaatgcactagatggctctcaatc

SEQ ID NO: 89115 - DNA, 2399 bp, Zea Mays
ctcatcaaatcacgattcacataaaaaaggtgtgggagcccgatccgatcgccagatccgccggcctgtgcgccgactcgggcgtccttccacagatcctcttccttctatcgtaggctcgccctcgccgctcgctggagcggaggtctctccctgcagcccatactccttgattcattctattgcctcgccgccggctctatggataagcaggagccagtagccaatggtgaacaaacgataggtcttgctgagaagccgaaggagctgcctgttgccagtaaggatgagaaagcaactgtgcccccgattttagttgattcaaatgctttcaatctaccaagtgaaggccaaacccaagctggcacatctaacatggatgggggccataatggtgcacacaacttttatgcttctcaggcacaaccattctattaccaaggctccggttctgaaaaccctacacaagcatgggatacatatcctccctacatgagtgttgaaggattggaagtgggtccaccagttgtatacaatgaggacccctcattgatgttccatggtggctatggttacgacccatattattctcctattgcaacacctgtaccaaatgctgttagtggagggtgatacaataatgccgattgacccaacacaaggagcttttatcgctgataccctgagtccaaacagcttcctgtttggcccaagacctgaatggttcagatcttcagaaggaactgggtcatttccatcacctgcagcttcacctcaaccttctaggggtgttccagggtcctatgaccaaaacaactttccaatggcttcaagaatgtcatcacctcaccagaagcccttctatggtttgagatccacaactgactcctatggaaggggtttttctcatggtggaatgttcccacaggccagtaattatgggggatccgtcaccagctttggccttaatggtagaagtttgatctcaaccgagaaagggcgcaggaggggaaggggcaatgcacttatttgcagctgcaatggtcctcttgactttcttaatgagcaaagtcggggtccacgtgcaactaagcctaagaagcaaccagaggttgacagtaaggatgaggtgcctactacaggagttggtcgtgagttatacaacaagcctgactttgttatggagtacacgaatgcgaggtttttcatcataaaatcgtacagcgaagataatgtgcacaagagtgtcaaatatggtgtttgggctagcaccacaaatggaaacaagaaactggactcagcctatcgcgaagctaaggagaaaggagagcactgtcccattttcctgttattttcggtgaatgccagtgcacaattctgtggtgttgctgagatgattggaccagtggactttgagaaaagtgtggattactggcagcaagataagtggactggtcaattccctgtgaagtggcacatagtgaaggatgttcccaataatcttttccgacatataattcttgaaaacaacgacaataaacctgtaacaaacagcagagatacacaggaggtgaaactagagcaaggaatggagatgctgaagatctttaagaaccatgatgatgatgcatcaatccttgacgactttgagttttacgaggagcgtgagaaagcgctgcaggaaaataaggcacgcctgcatcagcaacatctacccagttctattgttattgagcccaagaaacccttgactgcacccagtgacctcgtgggccatatcaccaagagttttgctgaggctgtgcggcttggtgaggccaagactgtaagccatttgactgagaaggtttctgggggtgatccgtctattcctgtgaagcatgttgaagttaagcagagtggtttatcttaggaactcttgatcgatgtgaatgaactgtaccaaaaattcacccatacgcttcctgatcaaaatgtcgggaatgcatatgcagatggatgatgatgaaacccaagacatcggcaaaagcatgcatgcacactagggtaggtctttgccaaccttggaagcatagtttcttgaatagtttctctctttttttcttctttcttcctagtattttctccccttctcttcgcatcatatgatgattccttagtgtctagcctcaaggagagttgctgtttttgtgtaagcctctgtaagtttcctgttccatcacatatgagtaaggcctttttgtttctttttatttaagtaaaagatccatcttttatgtactgtcgtggcagttttattatactatgtctgaacaaggcctattcactatgtaagcaaaacataaacgctatccaggtgacctggttgtgatgactacagtaataagtaactgaataat

SEQ ID NO: 89116 - DNA, 1701 bp, Zea Mays
actttgtttactctgtttgtctattgtatcaaccatctacctcagcctgttgccagtaaggatgagaaagcaactgtgcccccgattttagttgattcaaatgctttcaatctaccaagtgaaggccaaacccaagctggcacatctaacatggatgggggccataatggtgcacacaacttttatgcttctcaggcacaaccattctattaccaaggctccggttctgaaaaccctacacaagcatgggatacatatcctccctacatgagtgttgaaggattggaagtgggtccaccagttgtatacaatgaggacccctcattgatgttccatggtggctatggttacgacccatattattctcctattgcaacacctgtaccaaatgctgttagtggaggtggtcagctctactcccctcagcagttcttctcggctccttactaccagcagtcagtaccacctgacatgcaatatttaagctctcctactccaatatcacagggtgatacaataatgccgattgacccaacacaaggagcttttatcgctgataccctgagtccaaacagcttcctgtttggcccaagacctgaatggttcagatcttcagaaggaactgggtcatttccatcacctgcagcttcacctcaaccttctaggggtgttccagggtcctatgaccaaaacaactttccaatggcttcaagaatggccagtaattatgggggatccgtcaccagctttggccttaatggtagaagtttgatctcaaccgagaaagggcgcaggaggggaaggggcaatgcacttatttgcagctgcaatggtcctcttgactttcttaatgagcaaagtcggggtccacgtgcaactaagcctaagaagcaaccagaggttgacagtaaggatgaggtgcctactacaggagttggtcgtgagttatacaacaagcctgactttgttatggagtacacgaatgcgaggtttttcatcataaaatcgtacagcgaagataatgtgcacaagagtgtcaaatatggtgtttgggctagcaccacaaatggaaacaagaaactggactcagcctatcgcgaagctaaggagaaaggagagcactgtcccattttcctgttattttcggtgaatgccagtgcacaattctgtggtgttgctgagatgattggaccagtggactttgagaaaagtgtggattactggcagcaagataagtggactggtcaattccctgtgaagtggcacatagtgaaggatgttcccaataatcttttccgacatataattcttgaaaacaacgacaataaacctgtaacaaacagcagagatacacaggaggtgaaactagagcaaggaatggagatgctgaagatctttaagaaccatgatgatgatgcatcaatccttgacgactttgagttttacgaggagcgtgagaaagcgctgcaggaaaataaggcacgcctgcatcagcaacatctacccagttctattgttattgagcccaagaaacccttgactgcacccagtgacctcgtgggccatatcaccaagagttttgctgaggctgtgcggcttggtgaggccaagactgtaagccatttgactgagaaggtttctgggggtgatccgtctattcctgtgaagcatgttgaagttaagcagagtggtttatcttag

SEQ ID NO: 89117 - DNA, 544 bp, Zea Mays
ctccgatcctatagagatagagagctcatggcgaggcagccggccggcggcgacgacgtcaacctggacctgcgcctcgtccaccaccagtcggcgtccggcggtatgggcaggctgcagcaccaccacctaccgccggtggccgccgacgaccctgaccgcagcttctcgtgcacctactgccgccgcaagttcttcagctcgcaggcgctgggcggccaccagaacgcgcacaagctggagcgcagcctcgccaagcgcagccgcgagctctccagcgctgtggcggtcgtcagtgcggccatctcctcctcctctgccgcggcggcagcagcgccgcgggcggcggcttcagagctctgtagctggtacccgaccgcgcaagcgggaggcccaggggaccaggcagccgcggcggccgtcgtgagctggatcgcagacggcgggcgccggtacgcataccgcgtacaacaagccgcggcggccagcgacgccgacgacatcgacctgtcgctcaggctgtaagctagctaagcgctacgca

SEQ ID NO: 89118 - DNA, 438 bp, Zea Mays
gaaataatggtacttcatttggtactgcaggtggtcttttattctctatggggcttctagaatacatcttctccagaagcaccataagtcttgtcttgggcattgcaccagggctagccactctgttacttggcactctcagtctgaagttccggaggagcggcagatccagcttcctgcttatgttggctcaggcaacaatttctgctttcctggcatggaagtactctcatgcttacttcttgacaaatagactccttccttggggcttctacgcctcactgaggtcattttctttgtaccgtccatctccatccaaagctttttccccctttggacaaagatctgatggtctctcctgcttgaaaatcatgcaacactgcaatgggttgtttctacgcctatgtgctacttgcgggacgaaatcccgcaaataag

SEQ ID NO: 89119 - DNA, 2475 bp, Zea Mays
gagagagagagagagagagagacgggccggggatgaaagggatgaccggatgagcatcttccgatggtcctagacagggcacacgtgggccccaccgtccaggtcactgtcgtggatggctcaccccgtgcctgcactgcagccctttccctagttacatcagcgagcgctagctatgccttgcctttccatcgagctgagctgagcatcatggggtagtgtgtgtgtgaggcgatagagaagctagtgctcataaccaaccaccactcagtcctcctcctctaccctttcccttccgccgcgttcctacttggtcctagagggagagagatctcgaactccaagggcgcatgctccggttgctagctacgatgccgtgtgcgtagctgcggcagcccttgatcgatcaatcgatcgcttgtgcggaaggagccggatcgagtggagtcagctagctagatactccgtggtcgtcgtcgtcgttggacgtacgccagaagagggagctagagaagaataccgtacagctgcttccaacatggcagctgcctcgtctgcccacctgttcggactcggcgacgggcagatgcagatgcagccgcagcagcagcaggcgccgcctcctcctcttgtgaacaacccggccgcgccgccgcccaagaagaagcggaaccaacccggtaacccaacagaccctgacgcggaggtgatcgcgctttcccccaagacgctgatggcgacgaaccggttcgtgtgcgaggtgtgcaacaaggggttccagcgggagcagaacctgcagctgcaccggcgcgggcacaacctgccgtggaagctgaagcagaagaaccccaaggagacgcggcggcgggtgtacctgtgcccggagccgacgtgcgtgcaccacgacccgtcccgcgcgctgggcgacctcacgggcatcaagaagcactactgccgcaagcacggcgagaagaagtggaagtgcgacaagtgcaacaagcgctacgccgtgcagtccgactggaaggcgcactccaagacgtgcggaacccgcgagtaccgctgcgactgcggcaccctcttctccaggagggacagcttcatcacccaccgtgcgttctgcgatgcactagcgcaggagagcgcacgggtgccgcccatgggcgccggcatgtatggcactggcggcatggccctcggcctctccgggatggccacatcacagttgcagtcattccaagaccagacccactcctcggccaccaccgccatcagcaacaatccgacggcgcagttcgagcacctcatgcagtcgtccaccggctcccccgttttccgcggcgcgcaaccgacatcatcgtcttcctcgccgttctacctcggcggcgccgaggacggccatcaaagcctatccggccacacctctctgctccacggaaacaagcaggcctaccacggcctgatgctgttgccggagcagcagcaccaggcggggagtaacggcctcctcaacctggggttcttctctggcgggagcagcggtcaggatgcccgcctcgtgttcccggaccagttcaacggtgccgttggcgggaacgtccgcggtgacggcagcgagcacggcaacagcggcgctaacacggaatcagcggccatcttctccgggaacctaatgggaaaccaccaaatggcaagcagcgccggcttttcttcctccttgtacaactcgtccgagaccgctgccccggcgcagatgtcggcgacggcgctgctgcagaaggccgctcagatgggcgcgacgacgagcagcggcaacgtgaactctctgctcagggggcttggtagtagcgccggcggcaccttgaacgggaggcctgccggagcagctgctgggttcatggccggcgagagctcctcggcgaggagcacttcccaggccgagaacgagagccagttccgggacctgatgaacacgctcgcagcttccgggagcggagctgctggcacagcgttcagcgggggtttcccgggcatggacgacagcaagctgagcacgagagacttcctcggcgtcggcggcagcgtcgtgcggagcatgggtggcgcggcagggctgccgctgcggcacggcggtgccgcgggcattggcatgggctcattggacacagaaatgaagtaggcgaatcgaaatccgaaacgagcattattatgctccactcttgggcagaggctcttgcattgcatgcaaggtaagtagtagcacagcctaagcaaacgactatggaaagatgagaccatttgcgcccaaaatgacaaatgaggccgtcaaccatcatatgtttatggtgctgcatgctgcatgaatattgatccttgtttattgtagctccctcctcccagggatcatggaagaatcgatgaagaactaatagcagagaaggctggacaatttgttaaattaaatgccagtatatc

SEQ ID NO: 89120 - DNA, 2472 bp, Zea Mays
gagagagagagagagagagagacgggccggggatgaaagggatgaccggatgagcatcttccgatggtcctagacagggcacacgtgggccccaccgtccaggtcactgtcgtggatggctcaccccgtgcctgcactgcagccctttccctagttacatcagcgagcgctagctatgccttgcctttccatcgagctgagctgagcatcatggggtagtgtgtgtgtgaggcgatagagaagctagtgctcataaccaaccaccactcagtcctcctcctctaccctttcccttccgccgcgttcctacttggtcctagagggagagagatctcgaactccaagggcgcatgctccggttgctagctacgatgccgtgtgcgtagctgcggcagcccttgatcgatcaatcgatcgcttgtgcggaaggagccggatcgagtggagtcagctagctagatactccgtggtcgtcgtcgtcgttggacgtacgccagaagagggagctagagaagaataccgtacagctgcttccaacatggcagctgcctcgtctgcccacctgttcggactcggcgacgggcagatgcagatgcagccgcagcagcagcaggcgccgcctcctcctcttgtgaacaacccggccgcgccgccgcccaagaagaagcggaaccaacccggtaacccaaaccctgacgcggaggtgatcgcgctttcccccaagacgctgatggcgacgaaccggttcgtgtgcgaggtgtgcaacaaggggttccagcgggagcagaacctgcagctgcaccggcgcgggcacaacctgccgtggaagctgaagcagaagaaccccaaggagacgcggcggcgggtgtacctgtgcccggagccgacgtgcgtgcaccacgacccgtcccgcgcgctgggcgacctcacgggcatcaagaagcactactgccgcaagcacggcgagaagaagtggaagtgcgacaagtgcaacaagcgctacgccgtgcagtccgactggaaggcgcactccaagacgtgcggaacccgcgagtaccgctgcgactgcggcaccctcttctccaggagggacagcttcatcacccaccgtgcgttctgcgatgcactagcgcaggagagcgcacgggtgccgcccatgggcgccggcatgtatggcactggcggcatggccctcggcctctccgggatggccacatcacagttgcagtcattccaagaccagacccactcctcggccaccaccgccatcagcaacaatccgacggcgcagttcgagcacctcatgcagtcgtccaccggctcccccgttttccgcggcgcgcaaccgacatcatcgtcttcctcgccgttctacctcggcggcgccgaggacggccatcaaagcctatccggccacacctctctgctccacggaaacaagcaggcctaccacggcctgatgctgttgccggagcagcagcaccaggcggggagtaacggcctcctcaacctggggttcttctctggcgggagcagcggtcaggatgcccgcctcgtgttcccggaccagttcaacggtgccgttggcgggaacgtccgcggtgacggcagcgagcacggcaacagcggcgctaacacggaatcagcggccatcttctccgggaacctaatgggaaaccaccaaatggcaagcagcgccggcttttcttcctccttgtacaactcgtccgagaccgctgccccggcgcagatgtcggcgacggcgctgctgcagaaggccgctcagatgggcgcgacgacgagcagcggcaacgtgaactctctgctcagggggcttggtagtagcgccggcggcaccttgaacgggaggcctgccggagcagctgctgggttcatggccggcgagagctcctcggcgaggagcacttcccaggccgagaacgagagccagttccgggacctgatgaacacgctcgcagcttccgggagcggagctgctggcacagcgttcagcgggggtttcccgggcatggacgacagcaagctgagcacgagagacttcctcggcgtcggcggcagcgtcgtgcggagcatgggtggcgcggcagggctgccgctgcggcacggcggtgccgcgggcattggcatgggctcattggacacagaaatgaagtaggcgaatcgaaatccgaaacgagcattattatgctccactcttgggcagaggctcttgcattgcatgcaaggtaagtagtagcacagcctaagcaaacgactatggaaagatgagaccatttgcgcccaaaatgacaaatgaggccgtcaaccatcatatgtttatggtgctgcatgctgcatgaatattgatccttgtttattgtagctccctcctcccagggatcatggaagaatcgatgaagaactaatagcagagaaggctggacaatttgttaaattaaatgccagtatatc

SEQ ID NO: 89121 - DNA, 2463 bp, Zea Mays
gagagagagagagagagagagacgggccggggatgaaagggatgaccggatgagcatcttccgatggtcctagacagggcacacgtgggccccaccgtccaggtcactgtcgtggatggctcaccccgtgcctgcactgcagccctttccctagttacatcagcgagcgctagctatgccttgcctttccatcgagctgagctgagcatcatggggtagtgtgtgtgtgaggcgatagagaagctagtgctcataaccaaccaccactcagtcctcctcctctaccctttcccttccgccgcgttcctacttggtcctagagggagagagatctcgaactccaagggcgcatgctccggttgctagctacgatgccgtgtgcgtagctgcggcagcccttgatcgatcaatcgatcgcttgtgcggaaggagccggatcgagtggagtcagctagctagatactccgtggtcgtcgtcgtcgttggacgtacgccagaagagggagctagagaagaataccgtacagctgcttccaacatggcagctgcctcgtctgcccacctgttcggactcggcgacgggcagatgcagatgcagccgcagcagcagcaggcgccgcctcctcctcttgtgaacaacccggccgcgccgccgcccaagaagaagcggaaccaacccgaccctgacgcggaggtgatcgcgctttcccccaagacgctgatggcgacgaaccggttcgtgtgcgaggtgtgcaacaaggggttccagcgggagcagaacctgcagctgcaccggcgcgggcacaacctgccgtggaagctgaagcagaagaaccccaaggagacgcggcggcgggtgtacctgtgcccggagccgacgtgcgtgcaccacgacccgtcccgcgcgctgggcgacctcacgggcatcaagaagcactactgccgcaagcacggcgagaagaagtggaagtgcgacaagtgcaacaagcgctacgccgtgcagtccgactggaaggcgcactccaagacgtgcggaacccgcgagtaccgctgcgactgcggcaccctcttctccaggagggacagcttcatcacccaccgtgcgttctgcgatgcactagcgcaggagagcgcacgggtgccgcccatgggcgccggcatgtatggcactggcggcatggccctcggcctctccgggatggccacatcacagttgcagtcattccaagaccagacccactcctcggccaccaccgccatcagcaacaatccgacggcgcagttcgagcacctcatgcagtcgtccaccggctcccccgttttccgcggcgcgcaaccgacatcatcgtcttcctcgccgttctacctcggcggcgccgaggacggccatcaaagcctatccggccacacctctctgctccacggaaacaagcaggcctaccacggcctgatgctgttgccggagcagcagcaccaggcggggagtaacggcctcctcaacctggggttcttctctggcgggagcagcggtcaggatgcccgcctcgtgttcccggaccagttcaacggtgccgttggcgggaacgtccgcggtgacggcagcgagcacggcaacagcggcgctaacacggaatcagcggccatcttctccgggaacctaatgggaaaccaccaaatggcaagcagcgccggcttttcttcctccttgtacaactcgtccgagaccgctgccccggcgcagatgtcggcgacggcgctgctgcagaaggccgctcagatgggcgcgacgacgagcagcggcaacgtgaactctctgctcagggggcttggtagtagcgccggcggcaccttgaacgggaggcctgccggagcagctgctgggttcatggccggcgagagctcctcggcgaggagcacttcccaggccgagaacgagagccagttccgggacctgatgaacacgctcgcagcttccgggagcggagctgctggcacagcgttcagcgggggtttcccgggcatggacgacagcaagctgagcacgagagacttcctcggcgtcggcggcagcgtcgtgcggagcatgggtggcgcggcagggctgccgctgcggcacggcggtgccgcgggcattggcatgggctcattggacacagaaatgaagtaggcgaatcgaaatccgaaacgagcattattatgctccactcttgggcagaggctcttgcattgcatgcaaggtaagtagtagcacagcctaagcaaacgactatggaaagatgagaccatttgcgcccaaaatgacaaatgaggccgtcaaccatcatatgtttatggtgctgcatgctgcatgaatattgatccttgtttattgtagctccctcctcccagggatcatggaagaatcgatgaagaactaatagcagagaaggctggacaatttgttaaattaaatgccagtatatc

SEQ ID NO: 89122 - DNA, 2490 bp, Zea Mays
gagagagagagagagagagagacgggccggggatgaaagggatgaccggatgagcatcttccgatggtcctagacagggcacacgtgggccccaccgtccaggtcactgtcgtggatggctcaccccgtgcctgcactgcagccctttccctagttacatcagcgagcgctagctatgccttgcctttccatcgagctgagctgagcatcatggggtagtgtgtgtgtgaggcgatagagaagctagtgctcataaccaaccaccactcagtcctcctcctctaccctttcccttccgccgcgttcctacttggtcctagagggagagagatctcgaactccaagggcgcatgctccggttgctagctacgatgccgtgtgcgtagctgcggcagcccttgatcgatcaatcgatcgcttgtgcggaaggagccggatcgagtggagtcagctagctagatactccgtggtcgtcgtcgtcgttggacgtacgccagaagagggagctagagaagaataccgtacagctgcttccaacatggcagctgcctcgtctgcccacctgttcggactcggcgacgggcagatgcagatgcagccgcagcagcagcaggcgccgcctcctcctcttgtgaacaacccggccgcgccgccgcccaagaagaagcggaaccaacccgcagaccctgacgcggaggtgatcgcgctttcccccaagacgctgatggcgacgaaccggttcgtgtgcgaggtgtgcaacaaggggttccagcgggagcagaacctgcagctgcaccggcgcgggcacaacctgccgtggaagctgaagcagaagaaccccaaggagacgcggcggcgggtgtacctgtgcccggagccgacgtgcgtgcaccacgacccgtcccgcgcgctgggcgacctcacgggcatcaagaagcactactgccgcaagcacggcgagaagaagtggaagtgcgacaagtgcaacaagcgctacgccgtgcagtccgactggaaggcgcactccaagacgtgcggaacccgcgagtaccgctgcgactgcggcaccctcttctccaggagggacagcttcatcacccaccgtgcgttctgcgatgcactagcgcaggagagcgcacgggtgccgcccatgggcgccggcatgtatggcactggcggcatggccctcggcctctccgggatggccacatcacagttgcagtcattccaagaccagacccactcctcggccaccaccgccatcagcaacaatccgacggcgcagttcgagcacctcatgcagtcgtccaccggctcccccgttttccgcggcgcgcaaccgacatcatcgtcttcctcgccgttctacctcggcggcgccgaggacggccatcaaagcctatccggccacacctctctgctccacggaaacaagcaggcctaccacggcctgatgctgttgccggagcagcagcaccaggcggggagtaacggcctcctcaacctggggttcttctctggcgggagcagcggtcaggatgcccgcctcgtgttcccggaccagttcaacggtgccgttggcgggaacgtccgcggtgacggcagcgagcacggcaacagcggcgctaacacggaatcagcggccatcttctccgggaacctaatgggaaaccaccaaatggcaagcagcgccggcttttcttcctccttgtacaactcgtccgagaccgctgccccggcgcagatgtcggcgacggcgctgctgcagaaggccgctcagatgggcgcgacgacgagcagcggcaacgtgaactctctgctcagggggcttggtagtagcgccggcggcaccttgaacgggaggcctgccggagcagctgctgggttcatggccggcgagagctcctcggcgaggagcacttcccaggccgagaacgagagccagttccgggacctgatgaacacgctcgcagcttccgggagcggagctgctggcacagcgttcagcgggggtttcccgggcatggacgacagcaagctgagcacgagagacttcctcggcgtcggcggcagcgtcgtgcggagcatgggtggcgcggcagggctgccgctgcggcacggcggtgccgcgggcattggcatgggctcattggacacagaaatgaagtaggcgaatcgaaatccgaaacgagcattattatgctccactcttgggcagaggctcttgcattgcatgcaaggtaagtagtagcacagcctaagcaaacgactatggaaagatgagaccatttgcgcccaaaatgacaaatgaggccgtcaaccatcatatgtttatggtgctgcatgctgcatgaatattgatccttgtttattgtagctccctcctcccagggatcatggaagaatcgatgaagaactaatagcagagaaggctggacaatttgttaaattaaatgccagtatatctagttattttttgttttgatgcat

SEQ ID NO: 89123 - DNA, 2334 bp, Zea Mays
ctttgtttacgagtgcatcagccgcgcgcgcggctgggtttgtttggactttcttcctcctcgctccggccggcctcatcgtcatcagctcctccattttccccattactcgcttttcatttgttgtgtgttgctgtgcagagaggagacactaattcgtcctctttggcacacagatccatccgtgtccatgtccatgtccatgcatgagtttctttcgagtgtgctgcagcctgcagtacatatatactgtgatcgatcaatcgatcgcttgtgcggaaggagccggatcgagtggagtcagctagctagatactccgtggtcgtcgtcgtcgttggacgtacgccagaagagggagctagagaagaataccgtacagctgcttccaacatggcagctgcctcgtctgcccacctgttcggactcggcgacgggcagatgcagatgcagccgcagcagcagcaggcgccgcctcctcctcttgtgaacaacccggccgcgccgccgcccaagaagaagcggaaccaacccgaccctgacgcggaggtgatcgcgctttcccccaagacgctgatggcgacgaaccggttcgtgtgcgaggtgtgcaacaaggggttccagcgggagcagaacctgcagctgcaccggcgcgggcacaacctgccgtggaagctgaagcagaagaaccccaaggagacgcggcggcgggtgtacctgtgcccggagccgacgtgcgtgcaccacgacccgtcccgcgcgctgggcgacctcacgggcatcaagaagcactactgccgcaagcacggcgagaagaagtggaagtgcgacaagtgcaacaagcgctacgccgtgcagtccgactggaaggcgcactccaagacgtgcggaacccgcgagtaccgctgcgactgcggcaccctcttctccaggagggacagcttcatcacccaccgtgcgttctgcgatgcactagcgcaggagagcgcacgggtgccgcccatgggcgccggcatgtatggcactggcggcatggccctcggcctctccgggatggccacatcacagttgcagtcattccaagaccagacccactcctcggccaccaccgccatcagcaacaatccgacggcgcagttcgagcacctcatgcagtcgtccaccggctcccccgttttccgcggcgcgcaaccgacatcatcgtcttcctcgccgttctacctcggcggcgccgaggacggccatcaaagcctatccggccacacctctctgctccacggaaacaagcaggcctaccacggcctgatgctgttgccggagcagcagcaccaggcggggagtaacggcctcctcaacctggggttcttctctggcgggagcagcggtcaggatgcccgcctcgtgttcccggaccagttcaacggtgccgttggcgggaacgtccgcggtgacggcagcgagcacggcaacagcggcgctaacacggaatcagcggccatcttctccgggaacctaatgggaaaccaccaaatggcaagcagcgccggcttttcttcctccttgtacaactcgtccgagaccgctgccccggcgcagatgtcggcgacggcgctgctgcagaaggccgctcagatgggcgcgacgacgagcagcggcaacgtgaactctctgctcagggggcttggtagtagcgccggcggcaccttgaacgggaggcctgccggagcagctgctgggttcatggccggcgagagctcctcggcgaggagcacttcccaggccgagaacgagagccagttccgggacctgatgaacacgctcgcagcttccgggagcggagctgctggcacagcgttcagcgggggtttcccgggcatggacgacagcaagctgagcacgagagacttcctcggcgtcggcggcagcgtcgtgcggagcatgggtggcgcggcagggctgccgctgcggcacggcggtgccgcgggcattggcatgggctcattggacacagaaatgaagtaggcgaatcgaaatccgaaacgagcattattatgctccactcttgggcagaggctcttgcattgcatgcaaggtaagtagtagcacagcctaagcaaacgactatggaaagatgagaccatttgcgcccaaaatgacaaatgaggccgtcaaccatcatatgtttatggtgctgcatgctgcatgaatattgatccttgtttattgtagctccctcctcccagggatcatggaagaatcgatgaagaactaatagcagagaaggctggacaatttgttaaattaaatgccagtatatctagttattttttgttttg

SEQ ID NO: 89124 - DNA, 1253 bp, Zea Mays
aatccaagagtaggccttgggggaatcgcggcttcggcctccggcctcagtggctcagccaaccacgacgccgccgtgcgcgccagcctccgtgggacacggctgccggcttcggtccgctgtcggctctcgcccctcaggcctcagccacgccgcacgcggccggcacggcggcgcccgcctccacggctccacgccgcggccccagccacgctacacgcggccacgccgcacgccagcacgctcagccgcgtgcccgcctgccgcctgctcggctcctcccctgctcttgctcggctgctccgtggtgcctgatccatggcggagaaggaggcggcggctacgtggggtggcgacgacaagctcattctgcgcggccttcagttccatggcttccacggtgtcctgcaggaggagaagacgttgggacagaagttcgtggttgacatcgacgcctggatagacctcgccgctgccggcgagtccgactgcattgctgacaccgtcagctacaccgatatctacagcattgcaaaggatgttgtcgagggcacgccacgcaacctcttggagtcggtagctcactcgatcgcagaggccacgctgctcaagttccctcagatctccgcagtccgagtgaaggttggcaagcctcacgtcgcggtgcgaggcgttctggactacctgggcgtggagataacgaggcacagaaagaaagaatgagatgctgtacacatgtggtgatggggagccagttcaatgctgatggcactgcggccataaccataatccacgcacgcttgttgcttgttggcaactaggcatatccctttcacctctgaactgttggaatatcgggaatctgttcccctagttgctttattacgaattcagatcatatctggctagtaagatcaaccttcttctggtctgtaacatcttttttttttgtccatgttgctagtcgttgctcttcataccaactcatttcttgcacaaccattgagcctcagtttattgctagtaccaacaaattcgtaaccatttgatttttttttctctctctctcgatcaactattcgctgtccgaaccattttctatctttcctgatgtttatatacgatggaatatctatacaaacaacaacaacaacaaagcctttttgtcctaaacacgttgggataggctagagatgaaaccccgtataaaaaccttagagctcaaccctcaaagaaaaaaaaagggaaacaaa

SEQ ID NO: 89125 - DNA, 190 bp, Zea Mays
ataccatagatgctgtcttcatagtcagtatatgagttgagtaatggtacttcttgcctattggataaagcagaagggctattcaggatcgtcactgctaactttagccaaccataaatttacagttgaatctgttccagcactctacagaagctcatcatacgcaggattgtgccgaacagcccatgtc

SEQ ID NO: 89126 - DNA, 1694 bp, Zea Mays
cgcagaggaatcgagatccaaatcaaatcccacgccatttcacctggcagaaaaagtactactcgatcgcaatcccaccaggcgcgatgagccttcatgaacgcgagacacgcacctcgttctcctccttgaggctgagggtgccgcgcgacgggcatcggctgctccgcatcccctctccaccactcctctccaccccaaaaccccccgcggcgggccacgctaccacctgcccccgcccacgccatggcgtcgaccagcctcgccacgctgccgtcgcagctcgcctccccggtccgcctgcgccgccgcgccgcactctcctccgctagccgcccgcatttcctcctccatcgtgcaaccaaaggtggatcgcaatgcaggctggcggtgacctgcaacgcgcaggcggtggcgccgaccagctttgcgcaggggacgcccgtccggccgacgagcatactggtggtaggcgccacggggacgctggggaggcaggtggtcaggagggcgctggacgagggctacgacgttaggtgcctcgtcaggccgcgcccagcgcccgcagatttcctccgggactggggtgccaccgttgtcaatgccgaccttagcaagccggagaccatacctgcgacccttgttggtattcatgccgtcattgactgtgcgacaggacggccagaagagcccatccggacggtagactgggaaggaaaagttgctctaatacagtgtgcaaaggctatgggaattcaaaagtatgtgttctattccatccacaactgtgacaagcatcctgaggttcccttgatggaaatcaagtattgtactgagaaatttattcaggacagtggtctggattatatcatcatccgtttgtgtggtttcatgcagggtcttattgggcaatatgctgttcctatactagaagagaagtccgtctggggaactgatgctccaactcggattgcttacatggatacccaggacgtagctcgactaacgtttatagctatgcggaatgagaaggccaacaagaaactcatgacctttgctggcccacgagcttggacaactcaagaggtgattactttgtgtgagaggttagctgggcaagatgccaatgtaaccactgtacctgttgcagtcttgagatttactcgtcagttgacacggtgcttccaatggacaaatgatgtggctgacagactggcattttcagaggtgctctcaagtgacacagttttctctgctccaatgaatgagacctaccagcttcttggggtggatgggaatgacatcctcagcttagagaagtatttacaagattattttaccaacattttgaagaagttaaaggatctcaaggcacaatccaagcaaactgatatattcttttgatataggaaggatttctgtgacctagggacataattacaaatctgtgtctcaaatgacagatgagtgagcacaagttttcctgtatatttgcatttttgcatgtgcaagaatgctctgtgctattagtgatgtgtatataatcttaacattttgagctatcaaagttccgaaatttgtgcaaaacagcataaagtctatggtttcacgacgtcaacttaaattatgctcaactcatggcctcatgggttctagcataactgatcaaaaagtaaagaaaagaaaagaaaaaa

SEQ ID NO: 89127 - DNA, 935 bp, Zea Mays
accattagagcagcattcctctcccctccaaaagaagagagcgctgcatttttcgccccaagcatggcttaccgtacaagatctgcgagtgcgccttccagccgttgctccaacgaacccagcatcgaggatcagctgcagattcattaacgaaaccatccgaggaggcttggaagtgtgtctacaacgacatttaggagatcatgtgcttgactagcaaccaagtcagcctgtgccaaccaaagcaaaggaaagcagtggaggacgaggttgagcgcgcgctccctctctctctcctgttgcttgatttcttcggtgccatgcaagagagcaagctcgagcattcaggagacaggaggtgcaactgattatcaaaaggggagacgttgaagccaagattcagtttcgaaccctaaatatgctttgtaaagaagatgcagagagctggaggaggttcaagaagattaacaataggtctaccttcagctaaccaggagagctgcagggtggtcaagctgttgggtgaagctagagatattgctgtctcaattctcgagtcctcgtcacatttcctgtcaaagcagattgcagcaaagttctagcaagtggtctttcaaccacaagacatttcctaaagagaagagttctatgtgaagtggatcagttacaagcctaaagccttggagttggacattgtatatcttcagtgtagatttgggactttgttctaaaaaaaaactatccaaagcagagtttcccttctcaacactctcagcttgtagatagatgtaccaactcaaccctttggcaccccccttttagatgatcagctggtcactgcacatatatgagaaatattgtacagaaaaacagtcacttggaaacagaaacgtaattttgaacttgttttatgttataaaccatatggtacaatg

SEQ ID NO: 89128 - DNA, 959 bp, Zea Mays
agacttgaatcatcaaccaaagattttcgcttctcattacttcacctcatttcaatatacatccagccagagactagagatcgacatggcttgccatcttaggtcgataagcttgccgtctaggcctcagtccggcgaagccgcagtgcagcaagagctgtgtattctagatgcaatcatctcctcgccatcaacatgtatcgtcacgatgtgtgacggtttgaggaggcttggagacatctacaacagcgttgtggagatgactcacttgccaagcaaccaagtctgctcttcccagcaaaggaagatgctggatggagaaatcgaatcttccctcgagctgctggatctctgcaacaccatgcaagagatctttgttgagttgaaggccatcatccaagagctgcaggtggctctaagaaaaggagatggcgcaaccgttcaagccaagatccagtcctacagccgcttggtgaagaaggctaagcagtctttcaagaagtcaagcaagaaggccacttctgacaaggcagactgtgcagtggtcaggctcctgaccaaggccagggagatcgccatctctctacttgagaccacggtgcagctcctgtcaaagcaaattgaggtgccgaagcagtcacttgtctcaaaggcgttttccaagagaaaagcagttgtctgcgaggaggaccagttacaggcgttagagtgcagcgttggagatctcgagagcggagcaggacacctgttcaggatattggtccagagcagggtctctctcctgaacatccttagctcatagacactccttgttgctcttgacatcctgtgattggcatccgcgtttttgaggattagctaatcttgatgcagttttgtaatatgtatagagtacaaatgtatagggggggaaatcggaaaggaaaaaaaaagacacagttttgatccaattcattttt

SEQ ID NO: 89129 - DNA, 1493 bp, Zea Mays
ggtaaatgcaatgctatgctaattattcagcactataaaaattgcagaaacacgtgggtggccaagcatatacgctgctactgcacaagctaatccaccctgtaatgatgtgattatattggaatcgagtgattaaatgcgactaacttgggaacctggtgctggaggcgagcaagggcatctagctgttccttcctccactgacaacttgtctgttcatccatcatctcgtgatctggatcagatgctcatcttgctgcccttcaaccgtgcaggcgagtttgccgctcatattgcagacatagcatcctcctaatcaagctaagtttgtgatgcttcttgggtttggtggcttctgcggaagttcaccagttgggtacacatgagaacgattcttgctgtctgctgggtgctggctcagctatgcagttgcttccacctccttcgctttcgctatataaagaggaaagacagagccaggaagaccaccattgcagcaccttgccttctcttccccatttcaagagaaaaaagaagcttcacaacttcagcttccattcaaagacatggcttgccaccttaggtccgcgagtgtgccttccagccctcgttccaacaaagccaacatcgatgaacagctgcagagcctgaaggcaaccatctcctcaccttcagtggccattgaaaccatggttgacggtctcaacaagatggtgggcatctacagctgcattgacgagctcacatccttggccggcaaccaacgtcagcagaggaaggcagtggaggaggagctcgatcgctcccttgtcctgcttgacctctgcaacgccatgcaagagaactttgcagagctcagggtcagcgtccaggagatgcagctggctctcaagagaggagacgacgtgtctcttcaggccaaggttcagtcttacgctcgcttggccaagaaggcacagaagcagttcaagaagatcagcagcaaggctgcctctgacattgaaggatgcaagatagtcaggctgttggctgaagcaagggagattgctgtgtcgatgctcgaatcgacatcacatctcctctcgaagaagatcacgttgcccagcgctagcaagtggtctcttgtgtccaaggcatttgagaagaagaaattcgtgtgcaaggaggagcaattgcaggcgttggagttggacattgttgatcttgagagcggagttgcgactttgttcaggacgctgatccagagcagagtctctcttctgaacactctcactttgtagatagatcatacaacaactctagtgcctgcgattagcatccgtgttttagaggatctgctgatcatcgaaacaattttgatgtatatatatgagagtgtacagaaatatactcaactggaaatcgatgttttgggtctattttcctgctgtcaattttcgctttccatctttcatctcgttcaacatggaggacagctaaataaaaaaaaacaa

SEQ ID NO: 89130 - DNA, 717 bp, Zea Mays
atggcttcccatcttaggtcgataagcttgccgtctaggcttcactccagcgaagctgtagtgcaacaagagctgtgcatcctagaggcagtgatctcctcaccttccacatgtatcgtcacaatgtgtgaaagtttgaggaggcttggagacatctacagcaatgttgaagagatgactcacttgccaagcaaccaagtttgctcttcccagcaaaggaaaatgttggatgcagaaatcgaatcttctctcgagctgctggatctctgcaacaccatgcaagagatctttgttgagttgaaggccattatccaagatctgcaagtggctctaagaaaaggagatgatgccaccgttcaagccaagatccagtcttatagccgcttggtgaagaaggctaaacaatctttcaagaaggcatgcaagaaggtcactcctgccagcacagattgtgcaattatcaggctactgaccaaggctagggagatcaccatctctctacttgagtcgacgctgcagctcttgtcgaagcaaatcgaaatgcctaagcagtcgcttgtctcgaaggcattttccaagagaaaagcagctgtttgcgaggaggaccagttacaggtgttagagtccagcattggagatcttgagagcggagcaggacacctgttcaggatattggtccagagcagggtttctctcctaaacatccttagctcatag

SEQ ID NO: 89131 - DNA, 257 bp, Zea Mays
ctttttccttagacctttcatataagtttccatgttgggtctgaacgtccctctcaacaacttttcaaccaagaacctcagttcatctgtgaatttagttccaaaacctagttgttataccacagctcctcctgaacttagcacccaaaactagcttgcgtcgtcaccgatcacgtttcacctcaactaacaccttcacatccacaatccatataaccgagtacgagcataagtctatgacttgacttaagttcaat

SEQ ID NO: 89132 - DNA, 1098 bp, Zea Mays
accacccgggggccggtaccgggtaccgccgtcgccgtcagccgcgtgccgaacggatggctagcgaagcgagcgagcgcgcagtcaccatggacatggaggcggccgcggtctccggcaccggcaccgccagcgcgtcgtcctctcccgcgccgtcgtccgggtcgcgcggcggcaggagcgtctgccgcctgccggcgcgcgtcgccggcgcggtggtccggggcctgctcaccttcgtcttcgcggcagtgggcatggttctcggggccgtcacgggcgcgctgatcgggctcgccacggagagcggcctggtgcgcggcgccggcgtcggggccatctccggcgccgtcgtgtccatggaggtcgtcgactcctccgtcgccatctggcgctccgacgagtcagggatctggagcgtcctatacgtgcttgacgtgctatggagcctggtgaccggccgcctggtgcgcgagaaggtggaccccgccgtgcagagcgccgtcgacagccagatgaacgccgcggactcgcaggacacggcgccgacactggcggacatgttcgagacggccgccgcgggcatgccagccgccgccatcgcggcgctccccgtcacggccgtcaccgagagtaccgtcaccgacgcctccggggagcccatcggctgccccatctgccttcaggacttcgaggccggcgagacggcgcggaggttgccggagtgtgggcacacgttccacctgccttgcatcgacgtctggctgctccggcacgcgtcgtgcccgctgtgccgccgcgcggtctaggccgccgccgccgccgccgcgcgcgtttcgtttggagggtgtctttcagcgacacacacgtttccccgaccataccatgagcagagcattctaggatagtaggagtgcagggcacctggttctttcttgcataccttaatcttttttctattcgtcttgggcagtacgcatttacagatacagtacatggctcccattgtcacacacacacacgcgcggcgtggacgtaaaaatgtatagaggtgaatattgtaaataatgtaatatagttgtagcattgagattttat

SEQ ID NO: 89133 - DNA, 1962 bp, Zea Mays
aagtggagcgggacacaacgaagcggtgacgaagaacaagttaacccaacctggaagcgagtaagcgaccttcttgagcgtgaagccaaaggttggacctcaccgatccgccaccacgccacgaaatcatctcctactccagcagttccgctcctcgcgccgccaccgccaccgccacgatgccggaagacgtgcagatgaacgactcggagccccagtctgcggccccagctcccgccgccgccgcggcgccggcgctctccacactacaccatctgaaggagatcgcgtccgtgatcgaggctggttctctgtccaaggaggtccgccggatctcccgcgccttccgcctcaccgtcgcgctccgccgccgccttgccgcacgggacgtctccgccttcctcgccttcgcgctacccgcgtcctccgaagcctacgggcgcctcatcgccctggtgcccaaggaagatgatactgagatggacgttgatgctgtggctccagcaactcagatttcaatcaaacatggtctccctgagattgaaatatattgctacttgcttgcactgatttttcttattgatcagaagaaatacgatgaggctaaagtatgtgcaagtgtgagcattgctcgcctgaagaatctaaaccggagaactgttgatgtcttggcatctcgtctgtacttttattactcttatgtgtatgagcttaccaacagccttgctgaaatccgcgggaatctgcttgctctacacagaatggcaactttgcatcgtgacgagctcggccaggaaactctgctgaatcttctcctccgcaattacctccactacaacttgtatgatcaggcagaaaagcttagatcaaaggcacctcgttttgaagcacattccaaccaacaattctgccgatacttgttctacttgggcaaaattaggacaattcagttggagtacactgatgctaaagaaagcctcctgcaagctgctcgtaaggcaccaacaactgcccgtggttttcggatccagtgcaacaaatgggctatcatagtgaggctgctgcttggtgagattccagagaggactgttttcatgcagaaaggaatgaagaaagctctgacaccttattttgagctcacaaatgctgtcagggttggggaccttgaactgttcaggactgtcgctgacaaatttgcaagcacattcagcgcagacaggactcgcaacttgattgtgaggctgcgccacaatgtcattcgaactggactgcgcaacatcagcatttcttactcaaggatctcccttgctgacattgctaagaagctaagactagactctgagaaccctgttgctgatgcggagagcattgtagccaaggccataagagatggcgcaattgacgccaccatagatcatgcaaatggctggatggtatcgaaggaaaccggtgatgtctactctacaaatgagccacaaattgcattcaactccaggattgcgttctgcctcaacatgcacaatgaggcggtcaaggcgatgagattcccccctaattctcataaggaaaaggagagcgccgagaagcgccgagagaggcttcaacaggaggaagaactggctaagcacatggctgaggaggaggatgacgacttctaaattagctgccttttgagcaaccacttgcaattgtggacttgttggaacgcctggttaaaccctgcctctagctactcgagtcatgcaaacactgtaatgttatgttgatcagggtttttctttaaattcaatacttgagttttaatctccttgaattgttaaaccacggaatttacccaccatgcaaatggctttcttttatttcatgcattctctcctcccacttggggcttttctataatgctgtattctgtgttcaatttccgtgtcttaatttaataaaattattattggttaaagtttg

SEQ ID NO: 89134 - DNA, 1209 bp, Zea Mays
aattgttcactcccaggaccaaccctagcttcttctgttttcacttctgtctactcaatctgtcctacatttgcttttgttttttctttcaggaatctgcttgctctacacagaatggcaactttgcatcgtgacgagctcggccaggaaactctgctgaatcttctcctccgcaattacctccactacaacttgtatgatcaggcagaaaagcttagatcaaaggcacctcgttttgaagcacattccaaccaacaattctgccgatacttgttctacttgggcaaaattaggacaattcagttggagtacactgatgctaaagaaagcctcctgcaagctgctcgtaaggcaccaacaactgcccgtggttttcggatccagtgcaacaaatgggctatcatagtgaggctgctgcttggtgagattccagagaggactgttttcatgcagaaaggaatgaagaaagctctgacaccttattttgagctcacaaatgctgtcagggttggggaccttgaactgttcaggactgtcgctgacaaatttgcaagcacattcagcgcagacaggactcgcaacttgattgtgaggctgcgccacaatgtcattcgaactggactgcgcaacatcagcatttcttactcaaggatctcccttgctgacattgctaagaagctaagactagactctgagaaccctgttgctgatgcggagagcattgtagccaaggccataagagatggcgcaattgacgccaccatagatcatgcaaatggctggatggtatcgaaggaaaccggtgatgtctactctacaaatgagccacaaattgcattcaactccaggattgcgttctgcctcaacatgcacaatgaggcggtcaaggcgatgagattcccccctaattctcataaggaaaaggagagcgccgagaagcgccgagagaggcttcaacaggaggaagaactggctaagcacatggctgaggaggaggatgacgacttctaaattagctgccttttgagcaaccacttgcaattgtggacttgttggaacgcctggttaaaccctgcctctagctactcgagtcatgcaaacactgtaatgttatgttgatcagggtttttctttaaattcaatacttgagttttaatctccttgaattgttaaaccacggaatttacccaccatgcaaatggctttctt

SEQ ID NO: 89135 - DNA, 1318 bp, Zea Mays
atagaatagtttgatttatttacagttaaatagcccacaccaccacaccaccagctcctactgatgatcgatcacgcacgcggcacgcaccgacccgatctcaaaaggtaggtagctaggtagagtggatggatgatggatagatacgatgatagctcacaacacaaaccttcctatagcaaactaagctagctagtccctgctaattatccataattacaagcaagtccgccttctctctttctagctcctggcttccggcgtgccgtccgtcctgggcctgtccgccttcctgcggcgcgccccggccccgaccccgaccggctcgggactggaggccgcgtagatctcggcgatcggacggtagcgcttgttcctgcggcgcctcccgcccacctcctgctggtcctggccctcctcgtcatcctccgccgcggcggcagcaggaggaggaggaggagggataggggtagccggctgtggcggcgcgttgacggagcgcggagacgaggtggaggaggccgacgcggcggacccccgcgggagggccgcggcgtaggaggaggagcagctgctctcgctgaggtggatgagctgctccgccgccgcgagctcccgcgccgtgaaccgcgccgggttcggggcctgcgcctcgtcggccatggccccgcgcggtggactgaggacggatcgatcgacgcagacgccggcggaggttgggaggcggggggcggagcgagcgagggttggcctccggctaacttcgcgtgtgtcctgtcctgtccctccccccatctctaatttcctgtgcttttttattactatttcgttcgttcctcttttttcctcggactttggttgctttttcggtctaggctgcagttcttctgggatgtgtttggctgctgcggcgtgaccgcgtgagcgcaaaccgacctctccagggaccagggaccagggaccaggcgctgggccggacgactcgcgaaaaatggaaaaaactcagggggctctccagaaaacgcatggttttacgaagaacggaagaagatttgcctatcgtgcggaccgaggccatggatcccgtccgcgcctgtgtgtgtgtgcggcgatgtgtcgacgagttcgtcgggccgggcggttgttcctccggtccgcgtgcgtcttttgcaaactgtgccgagcgccaggcggtttgtgcaaaagggtggcgtggcgggagcccgcgggtaaaaactctgttgtaggatgcagttttggatgtgagtttatatcaaactgatgagtattttttcttgcgggtataaaaatattataa

SEQ ID NO: 89136 - DNA, 928 bp, Zea Mays
tgcgccgtgttctgccgcgcctacgctcccaccgcgtgtccgcagctctgccccacctcacatctgcgcccgcaatccacgcctccgtcgccgcagcccttcctccacgcagcgtccgtccatccatggctctccctacacgcagcgtcgtgccgctttccgcaatccgtgccttaatccccttccttcgcgcagcacccttccatccatggctcgcttccagaaatccccctacctacggcgcagcgtcgcagtccggaatccacccccaaaatcactacccactctgcggcgatggaagggaatcgaaacgcgtgcttcccccttccatcctcggcgttgcgcggattgcatggccatcgtttcgcgcccccaatccgtcgatgcaaggaacacgtgcttcccccttccatcctcgacgctgcgcgaattgcagattgcgaattgcatggtcatcgtttcgccccagttcattgcccgcatcagatggaagggcgccccgatctgcctcacctccatcaatgaggtgtctgcctttcttgcatggagacgccaaagagaaggaaccagtcactaagtcggcctctgtacggtccatgaacacacatcaacggagcgtgatgtccgctccggttcagacttcacctccttgaatgtttccgacatgagcgccgagtcgataaggaggacacagtaccccagcttcactgaccgcccatctaacctgagggtgttctcctttgctgaattgaagagtgccacccgcaacttccgccggtctctcatggttggctagggtggctttggctgtgtgtacaggggtgtcatcaagacctccgacgatctgaacgaacgaatcgagatcgctgttaagcagttgaatcgtaaaggacttcagggaagagacgacgacatggatgtagattcc

SEQ ID NO: 89137 - DNA, 2150 bp, Zea Mays
catcgcttggatcaataagtgttgtttaacaggcagaaatgggtgcttaggatcttaccactgtttatttaaaatttagatagataaagagcactgaagattgttagttaattaggaccgacgctttgaatcattagaccaaggaatatgaatgcgcaaattcaaacgtactacaccttttttgtgctttctttttaggacaggagtaattgtccatcgtaacgggggtagaaagtgcagaacgctcattgttctctttttcgttgtctaaaacgttgagtttctgatctgtataagactacaagttgctcagagggccttttctggaaccatttccctcgaactgattttaattgtttccttcttttccttatccacaataccaaactatgttacataaaaactaaatgatacgctgactgctcagaataaaaaaagtggtgctacgatcctccgtctgacttatgatcgcttctcttttcttcagccacttttcttttttgttgtctagaaaacaaaaatatattgttagtgaccagattgtaatagaaaatattgtctgctttattttctcgtcattagataaattatatacccttaaattgcttttgccattgattctagcatatgtcattaactaatgtttttaccacctttttctagaacgcttgtttgtctttgtcactttctgcaaccttggttctgatgttgcttgtcattcatttctcagcgtcgggcttgtaacttgtgtttcgtttgcttggtccatttattttggttgtctgtagggaagagacgacgacatggatgtagattccattctttgtgtgagcactaccgccatatagttgacaacgatgaccgacactgtagattccattctttgtgtgtacaccaaggtatcggtgtctacgttgatctggcgatgcgcttttcacggttactgcgaccgtgatgggcatctaggtgctcaaaccattagttggactgaggaacacggagcagcagcaacaatatcgtaaggagagtgcagaagttggacaaatggtatgccatatcttcagttctcttatgatgcttcagcgctacatcttcagttttctcggctaaaaagagatcatagtcaatagtatacctatgtgtgaaagcgctatgctatttgcttgtttgctgggagaaagaaaagatagatgaaggtaattatacaatttctaatacattgttcagcttttgttatttctgccatatgatacacactggtcatgaggacatgtcgattgtagttcactggtattgtttttttaaaggaagcggcaaaagacttgcctcttcattgtattagattaggaaaaataagataatccacaggaccgaaacacacaccggaagagaaaaaaaaacaaaatcaaaatacaaaaaaagttcactggtattgtaagctttgcagataagagcacaactttttccctcttttctaaaagggaagctcatgttcatttcagcaattcagcttcaaccatttggcattcatgtaatatttcacaggagttaaagtgcacatacctaatcaagtctgtgggtctccaattctgaaatagaaagataatttatgttctcatctttctgaaatgaacaagatgactggcttctgggttaaggttttttatagagcaccatgacttatcaggtaaagttatagttgtgcacaaaatgtcattttttaatccttaatgcgtgtgctattcacacatgtcttcttttgcagttttgtgaacaaccctaacttatgtggtcctgacaccacaaaaccttgtcctgatgctcctcccttttctccacctcctccatacaaccctacaaccccgatgcaatcaccaggaagtagctcttccactactggagcaattgctggtggagtggttgctggcgcagccttgctatttgctgttcctgctatcagttttgcctattggcggcacaggaaaccacaagagcattttttcaatgtatatggcttcaaagttagtctttgattattatctttcttgcaacataagggcaaacaacgtttatatgtagcaaacaaatacagtttgcaaacgttttaggaacatgtttttacaataaagatatacttatagtttcaccaa

SEQ ID NO: 89138 - DNA, 1364 bp, Zea Mays
gtcgccatcccgccgtgtataaagcgccctcgctccggccaggtcacggctcccgttccaactcctacctacgcagcagaggccagccacctccccgtcgctctcacgctcttcgtgcccgccgcctctcctccgtctctgcctctctccctctcccctcccgtctgacgcacatggcctccatcgccggatcttcggccctctccttcgccaggcccgtcaaggcaatcaacacaaattctctagctttctccccggcgaggaagggcaacacattcctccgcctgcaaccaatgcctatgagatctgtttcctgcgctgtgagtttcatactttgaccttataatacacaaatacatttggcgatgttttttatcataacaaaactgctagccattctatgcattattatgacaaagggtttcctacttatccttacaatatacaaatacattcggcgaagttttttttatcataacaaagctagtgattttccagagttattgcttctgtgcattattattacaaagctattgatttcctaatctaccgcctctgtggatctcaactgaactggtagtttatactaacattcaggaaccactaaggttccttattgtttatagaagaagggctatgttttcttaacctacctttgttctggattgcaagggaaaaaactggttctacttatatttgctcctagtgttgttgcagtgctcttgatctagcaagataaccatacacagtgccacctttttcaatatatattctcttatactgcaaacataatgacatttcgaaatatggattgtgacaggccaagaaggatacaacagacaaggtttgtgagattgtgaagaagcagcttgctcttcctgaccatactgaagtttgcggtgaatcgaaattctctgaactcggtgcagattcactggacacggttgagattgtgatgagtctcgaggagcacttcgatattagcgtggaggagtccagcgcacaaacaatcgccacagttgaagacgccgcggacctcatcgacaagcttgttgctggcaaagcgtagttctgtacctcctctatcgttgtcctaccactctaggtctatcccttgatctaggtttctatggtctgaagatttgtgattttctccgcactgttgttgctatccccgtgtcgtaataatacgagatgttttaagcggttgaacattacggtggtgtaatcagagtaatctgttgctgttaaggtgcattgttgtatgaattgtctctacccgagtagaagaatcagaccattcgggattctatgatcatagtacattttttgcttgaaaagatgagcaacgccgagtacttttt

SEQ ID NO: 89139 - DNA, 864 bp, Zea Mays
gtcgccatcccgccgtgtataaagcgccctcgctccggccaggtcacggctcccgttccaactcctacctacgcagcagaggccagccacctccccgtcgctctcacgctcttcgtgcccgccgcctctcctccgtctctgcctctctccctctcccctcccgtctgacgcacatggcctccatcgccggatcttcggccctctccttcgccaggcccgtcaaggcaatcaacacaaattctctagctttctccccggcgaggaagggcaacacattcctccgcctgcaaccaatgcctatgagatctgtttcctgcgctgccaagaaggatacaacagacaaggtttgtgagattgtgaagaagcagcttgctcttcctgaccatactgaagtttgcggtgaatcgaaattctctgaactcggtgcagattcactggacacggttgagattgtgatgagtctcgaggagcacttcgatattagcgtggaggagtccagcgcacaaacaatcgccacagttgaagacgccgcggacctcatcgacaagcttgttgctggcaaagcgtagttctgtacctcctctatcgttgtcctaccactctaggtctatcccttgatctaggtttctatggtctgaagatttgtgattttctccgcactgttgttgctatccccgtgtcgtaataatacgagatgttttaagcggttgaacattacggtggtgtaatcagagtaatctgttgctgttaaggtgcattgttgtatgaattgtctctacccgagtagaagaatcagaccattcgggattctatgatcatagtacattttttgcttgaaaagatgagcaacgccgagtacttttt

SEQ ID NO: 89140 - DNA, 324 bp, Zea Mays
atgggcggcaagggcggcagcggcgggggtggtggcaagggcggaggtggcggtggcaagagcggcggcgggggtggtggcaagggcggaggaggtggcaagggcggaggaggtgttggtggcaagaccggcggcggcaagtcagcaggcggcggcggtgggggctatggtggtgcagggaagtcaggctccggcggcagtggcggcgacggaatgatgaaggcgcccggcggcggcggcgagtacatctcccgctccgtcttcgaggccagcccgcaggagttcttccatggcctccaccagggaggaggcaacaacaagtag

SEQ ID NO: 89141 - DNA, 1253 bp, Zea Mays
accgcctataaaacccacgcgggccgcgccaagtcgctgccttctctagtgcaatcgcggagctacctcagctgccgtgtcctgcacagccgccgcttccgacgcagcaaaggcgaacgcgaagcagcaagcaatcaagatcgatggggcggtcgccctgctgcgagaaggcgcacaccaacaggggcgcgtggaccaaggaggaggacgagcgcctggtggcctacatccgcgcgcacggcgaagggtgctggcggtcgctgcccaaggcggcgggcctgctgcggtgcggcaagagctgccggctgcggtggatcaactacctccggcccgacctgaagcgcggcaacttcaccgccgacgaggacgacctcatcgtcaagctgcacagcctcctcgggaacaagtacgtgcgcgacgcctccgccgctgctctgctccgtaccgtagtgcactgcacgcggacatgcctgcctctagaagtctagaggctggttggttgcctgccttgccttcgtcggcctcgacgccacccaaccaaaccaagctgaacgaacgtccggtccgattgcctctgccctctgcaggtggtcgctcatcgccgcgcggctcccggggcggacggacaacgagatcaagaactactggaacacgcacgtccggcggaagctgctgggcaggggcatcgaccccgtcacgcaccgccccatcgccgccgacgccgtgaccgtgaccaccgtctcgttccagcccagccccagcgccgccgccgcagcagcagcagaagccgaggcgacggccgccaaggcgcccagatgccccgacctcaacctcgacctctgcatcagcccgccgtgccagcagcaggaggaggaggaggaggtggacctcaagccctccgccgccgtcgtcaagcgggaggttctgctgggcggccgcggccacggccacggcggggcgctctgcttcggctgcagcctgggcgtccagaagggcgcgcccgggtgcagctgcagcagcagcaacggccaccgctgcttggggctcaggggcggcatgctggactttagaggcctcaagatgaagtgaacgaagcccagcgagatgggcggattcttctggttcgtcggtttggttggttctcgccttgatggatctggatagctagttcctggtaggaggatagtggaagatgagaaggagagccaagatggcgagaggattcgtggctcgtggatagcttagttcctccg

SEQ ID NO: 89142 - DNA, 1102 bp, Zea Mays
accgcctataaaacccacgcgggccgcgccaagtcgctgccttctctagtgcaatcgcggagctacctcagctgccgtgtcctgcacagccgccgcttccgacgcagcaaaggcgaacgcgaagcagcaagcaatcaagatcgatggggcggtcgccctgctgcgagaaggcgcacaccaacaggggcgcgtggaccaaggaggaggacgagcgcctggtggcctacatccgcgcgcacggcgaagggtgctggcggtcgctgcccaaggcggcgggcctgctgcggtgcggcaagagctgccggctgcggtggatcaactacctccggcccgacctgaagcgcggcaacttcaccgccgacgaggacgacctcatcgtcaagctgcacagcctcctcgggaacaagtggtcgctcatcgccgcgcggctcccggggcggacggacaacgagatcaagaactactggaacacgcacgtccggcggaagctgctgggcaggggcatcgaccccgtcacgcaccgccccatcgccgccgacgccgtgaccgtgaccaccgtctcgttccagcccagccccagcgccgccgccgcagcagcagcagaagccgaggcgacggccgccaaggcgcccagatgccccgacctcaacctcgacctctgcatcagcccgccgtgccagcagcaggaggaggaggaggaggtggacctcaagccctccgccgccgtcgtcaagcgggaggttctgctgggcggccgcggccacggccacggcggggcgctctgcttcggctgcagcctgggcgtccagaagggcgcgcccgggtgcagctgcagcagcagcaacggccaccgctgcttggggctcaggggcggcatgctggactttagaggcctcaagatgaagtgaacgaagcccagcgagatgggcggattcttctggttcgtcggtttggttggttctcgccttgatggatctggatagctagttcctggtaggaggatagtggaagatgagaaggagagccaagatggcgagaggattcgtggctcgtggatagcttagttcctccggcctccctgctctctcttatcttccatttt

SEQ ID NO: 89143 - DNA, 87 bp, Zea Mays
gcgacaaatttactggttggattacggaccccccgggtccgaaacgccgacaaatattattatggagaagttaaaattataaatact

SEQ ID NO: 89144 - DNA, 322 bp, Zea Mays
ctgcttcaaaaatcgattgctggtgccctgaagagatcaaatccatcgaagtcaaggaatcaagccccactggccatggtgagagcgaccctcgcccgtcgccgtccaaacactgtccttgtccatccatgagcgcgaagccctcgatgtcacaacagctgagagcatcgagcatggtgtccgagaagaactccatgctcgcttagtcgcttttccgctcactgcctcggtgtccgtcgtcgtgaggtggccataagagccgccattggcaacagagtgagcagccgcagccgcgttttgtcctcgggcggcagcgcgggcg

SEQ ID NO: 89145 - DNA, 1665 bp, Zea Mays
cgctgccatgggacccacggaatccaacctcacccgccggctgccgctcggctgccctccggcctccgggcatcgccatcggagtgtgcaggaaccaggaggaggccggtagagtccgtgcacccgggtcccactcccctgaggccgtccgtggctccgtgcaagatggggattgcgcaagggtgcgaggtcaccatccccgcgcctggtcatcagtagtttggtggctcacagcatatataaaatgcaatataagcataccgatagccttgttaactcagtggttaatctagtacaagttgccagctgatagtaaattgatcaatggggagacagccgtgctgtgacaaggagggggtgaagcgagggccatggacagcggaggaggacaagaagctcattagcttcatcctgacacatggccggtgctgctggcgggcagtgcctaaacttgcagggctgcttcgttgtggcaagagctgccgtctgcggtggactaactatcttcgccctgacctcaagcgtggcctcctcagcactgccgaggagcagcttgtcattgacctccatgccaagctcggaaatagatggtcccagatcgctgccaagttacctggaagaacagacaatgagatcaagaaccactggaacacgcacatcaagaagaagcttatcaagatgggcatcaacccggccacgcaccagcctctagccaactccaaggcagctccctcacactccacaggtacagacgaatccgctaaatccagcgacaccagagaggagctgagcctgaaggatgacaaccatcatagggaggttccgctgtccaccgattcatcggagcagtccagctggccagagccaggcagcaacgtcggcgaccaagaccctgaactgctggtgaattggccgtcggagaccgacttgtcagtggacgagtcttggctgggttttatgagcaacggcaatgagcttggcgatgtcgaggggacgtcgccgtgggacggaacaacagactggctgctggactaccaagattttggcatgtgcagctccaacttggtggacgattcaatgttccgcgcctcaaatggattgaacttctaaatgtcggagaaaggctgtccaatttcaagaaatagggaggaagacagactgcaagtttgagcgcactgcacagctcccagtatagaaaatagatacaacactttcaagaataagattgtgaaaagagagagagagaggcatggggcatatcttgaccatagaatagtgataccttgcccttaaaagtaaggggtttgtattgttagaaacctaatgtttctcggtacgagaagctgaagaactagacccaaatgttcgaaccatgcaaggcatcctatcctatgaacaaagttagggtgttgcagcttttctgtgcaagctaaggctgtgctctgagcagtacaacagcgaggttttatcttgatatctccctgttgctgtccctggcaactgtggagcaattacagagttcaggacatgttgtgttagagactcacactcaccatccttgttccaacatcagactcatcacacaggcttgtggactttgatgtgcgtaatgttaagcagttgcacggcagagacgaaaggaacacgactgtacgtggatcagca

SEQ ID NO: 89146 - DNA, 171 bp, Zea Mays
gtaactgcacaatcttctattctactataatgaaacggtagagccactaccgaatgtttactcaaaaaaatgtctaaaacggttcaatacagtatcgtcaacaactattgttttcaccagtacgacattctgttcttgaatttaaaactgaatcaaacgaactccgattga

SEQ ID NO: 89147 - DNA, 2368 bp, Zea Mays
cgcgcatctggggctggggcgtccgcgttccactcccacagtccacacctcagcctcagcgacattggttttgcggtgggtcgccctcaccctgtataattgcaacactgcagtactgcaacccttcggcactcccaggctccaagacgagcacgcacgactgtctgccgtcttccttagccatggacgcccccggagcctccaccaccacgctcctcctctacggcgcgctcctcctggtgggattcctcttcatcgcggtcgcccgccggagcaacgcaggccttccgccgggtcccacgggcctgccgctcttgggcagcctgccgtctctggacccgcagctgcacgtctacttcgcgcgcctcgcggccaggtacggccccatcttctccatccgcctgggctccaagctgggcgtcgtggtgacctccccggagctggcgcgcgaggtgctgcgggagcaggacctcgtcttctccggccgcgacgtccccgacgcggcccgctccatctcctacggcggcgggcagaacatcgtgtggaaccccgtgggccccacgtggcggctgctgcggcgggtgtgcgtgcgggagatgctcggccccgcggggctggacaacgtgcagggcctccgggcgcgggagttcggggccacgctcgcccacctccacgcccaggcccgcgccgccgcccccgtcgacgtcggcgcgcagatgttcctcaccgtcatgaacgtcatcacggggacgctgtggggcggcaacgtcggcagcgagggcgagcgcgtcgcgctgggcagggagttcaggcacctcgtcgccgagatcaccgacatgctcggcgcccccaacgtgtccgacttcttcccggcgctcgcgcgcttcgacctgcagggcatccggaagaagtccgacgcgctcaaggagcggttcaaccagatgttcgccaggatcatagagcagagggtccacgccgagcgggccggcggcgagcccccggcgcccgacttcttggagtacatgctcaagctcgagaaggaaggcggcgacgggaaggcgtccttcaccatgacaaacgtcaaggcactgctaatggacatggtggtcgggggcacggagacgacgtccaacaccgtggagtgggccatggcggagctgatgcagaaaccggagctgctggccaaggtgcggcaggagctggacgcggtggtgggcagggacgccgtggtggaggagtcgcacctgccgcagcttccctacctgcacgcggtggtcaaggagacgctgcggctgcacccggcgctgccgctgatggtgccgcactgccccagcgccgacgccacggtgggcggctaccgcgtcccggcggggtgccgcgtgttcgtcaacgtgtgggcgatcatgagggaccccgccgtgtggaaggacccgcgggacttcgtcccggagcggttcctggacggcgccggcgaagggcgcaagtgggacttcacgggcagcgagatggagtacctcccgttcgggtccgggcgcaggatctgcgctggcgtcgccatggcccaacggatgacggcctactcgctggccatgctgctgcaggcgttcgactgggagctgcctgccggcgcgcggctggagctggacgagaagttcgcgatcgtcatgaagaaggccacgccgctggtggccgtgccgacgccgcggctgtccaagcctgagctctactactccgcctagtccaccaccacatccatccactgggctgggccattcggcagaggaggaaatgtaacatatttggcccacctgccctccctcgtgaatacgttacatactgaacagtgttgttttaatcgaaagctccatagattgttacctcctacataggacaaatctgccacgcatcaacaaccgctgaattgtggatgtccacgtgcgctagataatctgatcttatctatggttatctcattatctgatagcaacgtgtgtgtcattggtggatgcattgtctcacggctgcgagtgactttgaggaacaagttgcaggctgataccaaggacacctgagagatttgcatctgatggctcaatgtttgtagtccttgggcacacctttcgcattttattccataaggttgtttcacctataatataaggctggatccagcacacgtccataccgaccggtgatgtgatggcatggcccggttcagtttggccttaacgtcgatcggtttggttggttgatcggtgtggttgccgatagatcggctcgagcagtaccgaccatattggaacatgactggttgatattgacccttacgctagagaaccgatagttagttcatgtcattttgaatttc

SEQ ID NO: 89148 - DNA, 2134 bp, Zea Mays
tttagctcttcctcctcttgcaagcagagatggccaaacgggccgcccggcccggcccggcccgggcccggtgaagcccggccaaaaaccgggccgggcctgctgtgacatcgtgctcaagtttctgtccaagcccggcccgcagcgggcctaaacgggccgggccggcccgtttagcacgaaaaaaacgggccaaaaacgtgctaaacgggccggtaagcacgttttagtgtaaaaaaaccgggcttaacgggcttagaggtaaacgggccgtaccgggctagcccgccgtgcctagtttcctgtccaagcccgcccgcttattctaccgtgccggtttcggaccgggcccaaaaaccgggcttcgtgccgggctcacgggcctcgtgctttttggccatctatacttgcaaggtattttaaaattcatgagtagtctatttttagttgactatcattaaacaggctattcttttctctttatttttctttttttatattatcccaaatttgatgtgacatatacttgcttcctcttgtggcgactggtgcagccacgtttcccaccgcgcctcctcgtttccatcagaaaactgccctgattttgtgctgatttgacgccaaccaccgacccacgcgacccacgggctgacgggccacaacaccggcgcagcgccagcgcatgcatttatacctctacactctacagacaccattgcgagccgcccgcgacgactttatacatccgcttcctccagtcatcaaagaaacagagcgagcctagactgtgaggaagaaaggactaccatgggcgacgtcgctgccggcgctgccgccctgagtccacccccgatgaccaaggagaccaacctcttcatgcaaatcgtcgtcaacccggacggcacggtcacgcgccccgaggtccccctcgtcccggcctcagccgtagccgctggcggcgtcgtctccagggacgtgcccctcgacgcctccgccggcacgtacctccgcctctacctgcccgacctgtcctccgcgccggccgccaagctccccgtcgtcctctacttccacggcggcggcttcgtgatcctctccgccgccaccgtattctaccacggccactgcgaggcgatggccgccgcggtgcccgccatcgtggcgtccctcgagtaccgcctcgcgccggagcaccgcctgcccgcggcctacgaggacgccgccgcggccgtggcgtggctccgcgacggcgcgccgggggacccctgggtcgcggcgcacggcgacctctcccgctgcttcctcatgggcagcagctcgggcggcaacatggcgttcttcgcggcgctccggaccgggggcctcgacctgggccccgccacggtgcgcggcctcctgctgcaccagccctacctcggcggcgtcgaccggacgccctcggaggccaggtccgtcgacgacgccatgctgccgctggaggccaacgacaggctctggagcctcgcgctgcccctgggcgccgaccgggaccacgagttctgcaaccccgtcaaggccatggcgccggaggcccttgccggcctgccgcgctgcctggtcaccggcaacttgggcgacccgctgatcgacaggcagcgggagttcgctcggtggctgcaggaccgcggcggcgcgaaggcggaggtcgtcgtgaagttggacgtcgcggggttccacgcgtcggagctgttcgtgccggagatcgccgaggtgctgttcgccgcgatgcgcgagttcgtgtacaccggcgacgcttgacacgttgaatttcgtgccggccggtgacaagtggacatacgtgttgcatcgttgtggattgtgtgaccgtgcgcaataattctcggccgtgttgaatcttgacaaactggcaccagagccaccaggcggcgactactatgtaacacgtgagtactgtagcagctaccgcaacgcaccggaccgccggacgtgtagttttcgcgacgcgtgcagctatcggccacggcaacgaatataggagatgttttgttcggatttttttggcccgcgaccattctcagcgctatctaaaactatcttcatcacatttcttatcaaataatcatctatctcatgc

SEQ ID NO: 89149 - DNA, 1872 bp, Zea Mays
cgttggcggcgtagcaggccctcctccgtctgctgtcgctttctcccccggccccttcatcactcacctcaccacacaaagctacctcacttgagctcctctcctactacctttctctccctcctccctctccccttcctttcttcccctcctcacgcgcagacacgccaaaattctagggaacgacccccactacccctgcacgccaccttagatcggtcgacacatagctagctacccgctagctgctgccgcgcggccgggccgcgcgcgagagcgctcaaaattcgcgcgtcgcgcgcccgccacgcggcgcggtcatgctgcggctgcggggagaagcgcggtagccgagcacgggcgatccggcgctgcccgcctatggatctggccgcatggcgggcttccctctaggcggaggaggccacggccgcggcgaccaccaccaccaccaccaccctcacgtgaacccttcctccgcctccggctccgactccgccaccgccgccgcctacctctacacggccgccgcgccgcgcggcgggttccagctatggccgcaccacccggcggaggagcaccaccaccacttctacgcgcccaacatcatccgcttcgccgatgaccccttcgcgggctcctcgcgcggcggcaggggttcagacgccttcgtcgccgccggcgcgggaaccatcagctgccaggactgcggcaaccaggccaagaaggactgcgtccacatgcgctgccgcacctgctgcaagacccggggcttcgactgcccaacccatgtcaagtccacctgggtgcccgcagccaagcgccgggagcgccagcagcaggtcaccgagccctccaagcgccaccgcgacgccaccgtcggtgctcagccctcctctaccaccgccactaccacttcctcgggggagcagcaacagatggcggtggcggcggagcggttcccgcgggaggtgagctcggaggcgctgttccgctgcgtccgcctgggcccggtcgacgagcctggcgccgaggtggcgtaccagaccagcgtcaacatcgccggccacgtcttcaagggcatcctgcacgacgtcggcccggacccatcatcgtcggtcgctgcgggcggcggcggcttccgccacgccactgacgggtcctccccgggcacggcgggcgaaggcagcgtcgcgggggcggggcccgtctcgtcatcggctgtggtcatggacccgtacccgacgccgacgacgcccggaccgtacggcggctcgcatttcttccacggccatccgaggtgatcaaacggccaccacgattgacacggctagcctagctagctggtgctggtttcgttccttttgggcatgccatggccatgcatccttcaatatttcgctttattagaagaaggattatcgatcatcaccaaattgttaccaccagtagcttttatttctttccttctctcgttcatcctccatgatcgatgcataaactgacaagcaccggcgcggccgttcgtcactgtttctttaggatcatcctattactactgtagcagttgctagcccatcaggatgctagaagtatactcctataaagcttggagtagctagctagggagcagtgttcatcatgattcattcaaagcttaaaatctggcagttaggtaatctgatgctggtggcggccgggggtggtgtgagaggagagtggggggagaggagagatttcttccagtcatcatatgctcagctcagcaggatcggaagaaggctggcggagtcagatatctatgtctcgagaagagaatcaaatgacgacgagatgcttggaaaagaagaaatcttgttattatgcgcttgt

SEQ ID NO: 89150 - DNA, 1310 bp, Zea Mays
ccgcgcggccgggccgcgcgcgagagcgctcaaaattcgcgcgtcgcgcgcccgccacgcggcgcggtcatgctgcggctgcggggagaagcgcggtagccgagcacgggcgatccggcgctgcccgcctatggatctggccgcatggcgggcttccctctaggcggaggaggccacggccgcggcgaccaccaccaccaccaccaccctcacgtgaacccttcctccgcctccggctccgactccgccaccgccgccgcctacctctacacggccgccgcgccgcgcggcgggttccagctatggccgcaccacccggcggaggagcaccaccaccacttctacgcgcccaacatcatccgcttcgccgatgaccccttcgcgggctcctcgcgcggcggcaggggttcagacgccttcgtcgccgccggcgcgggaaccatcagctgccaggactgcggcaaccaggccaagaaggactgcgtccacatgcgctgccgcacctgctgcaagacccggggcttcgactgcccaacccatgtcaagtccacctgggtgcccgcagccaagcgccgggagcgccagcagcaggtcaccgagccctccaagcgccaccgcgacgccaccgtcggtgctcagccctcctctaccaccgccactaccacttcctcgggggagcagcaacagatggcggtggcggcggagcggttcccgcgggaggtgagctcggaggcgctgttccgctgcgtccgcctgggcccggtcgacgagcctggcgccgaggtggcgtaccagaccagcgtcaacatcgccggccacgtcttcaagggcatcctgcacgacgtcggcccggacccatcatcgtcggtcgctgcgggcggcggcggcttccgccacgccactgacgggtcctccccgggcacggcgggcgaaggcagcgtcgcgggggcggggcccgtctcgtcatcggctgtggtcatggacccgtacccgacgccgacgacgcccggaccgtacggcggctcgcatttcttccacggccatccgaggtgatggaggtggttgtgtcggccatggagcatatccacaacgcatttgtgacggccccataggaggatatcctcacgacactgtggcggcagcatcggcgttggcatctgaggcggcatctgcagagtcatctgaggcggcacctacagagcgtatacccacgacatcattgggggcatcatttggttgtagggacctgtcccagaaccctgtaacaagagaataagtgtcatgtttatggttaagaactctaacttgat

SEQ ID NO: 89151 - DNA, 418 bp, Zea Mays
accgatttgttcgctgacatcgcgccaaccctcctcacgctgggatatatgaacagactgcgccctggccgtagatcatccgatcgcttgaagaccagctaccaccgggagagaagaagcagagagaggtaggaggagagagggggtcgccgatctgatcctctcgctgctgggaatttgggagtgtcggggaggagctgccggagcatcgcggaggcgtccgcgtggtgctctgatgtggaatgtgaacctgggggctctggttgtgctcgtcatgcgtgaagaaaagcgaccgctgccgtggagtcacacctcgccgcggctagaagattacacgcatcaagtctcgacgagcaagccactgtggattctgaggtttaacaagtagaagtagctgagcaggagctcattgaatgca

SEQ ID NO: 89152 - DNA, 114 bp, Zea Mays
atgtggaatgtgaacctgggggctctggttgtgctcgtcatgcgtgaagaaaagcgaccgctgccgtggagtcacacctctccgcggctagaagattacacgcatcaagtctcg

SEQ ID NO: 89153 - DNA, 2337 bp, Zea Mays
aaccctccgcaccggctcctcgccgcagctataaatacacggggccgccatttccagtcctccaagacttgaaccacgcaaccctctctggtctctggtcgtcctactttcttccacagcagaaggaaacttgagtcgtgagcgcagtggtgcatccaatccacaaagagctgaggttagtcagccatggcggcaccgccgaccgaggactgcggctggctgctgtacctctccctggccgccaaatgcggcgaccctagccgcctgctcggcttggcggcggtcttcgtcggcgcctgcgtcgtaacgtcgctcctgcactgggcgtgcccgggcggccccgcctgggggcggtactggtggaccaggcgaggcgggctgggcatcgtccgcgccgccatcccgggaccccggggcctgccagtggtcggcagcatggggctgatgaccggcctggcgcaccgcaagctcgcggcggcggcggcggcggccgggggtcagggcagcagcaggcgccgccgtctcatggcgctctccctcggcgagacccgggcggtggtgaccggcgacccggacgtcgcgagggagctgctcggcagcgccgccttcgccgaccgccccgtcaaggagtccgcgtacgggctcctcttccaccgcgccatcggcttcgccccgcacggcgcctactggcgcgcgctccgccgcgtggcgtcggcgcacctcttctcgccgcgccaggtcgcggcctcctccgcgcagcgcgcggtcatcgcgcgccagatggtggacgccgtgaccacggccgcccccgcccccgcccccgccgtcgtggtggcgcgccggttcctgaagcgcgcgtcgctgcacaacgtcatgtggtcggtgttcgggcgcaggtacgacctgctgctgctggcggcggacggcgaggagctgaaggcgctggtggacgaaggctacgacctcctcgggcagctgaactggtccgaccacctcccgtggctggcccgcttcgacctgcagaggacccgggccaggtgctccgcgctcgtcccgcgggtgaaccgcttcgttggcaacatcatcgacgagcaccgtgcgcgcctcggcctcggcgacaccggcggcgtcacggacttcaccgacgtcctgctctccctccagggcgtcgacaagctctccgacgccgacatggtcgccgttctctgggagatgatcttccgaggcacggacacggtggccgtcctaatggagtgggtgctggcgcgtctcgtgctgcaccaggacgtgcagagcaaggtccaggaggagctggaccgggtggtggggccaccgggccaggccgcatccgtgacggagtcggacaccgcctcgctcgtctacctccaggcggtcatcaaggaagtgctgcgcctgcacccgccaggcccgctgctctcctgggcgcgcctggccacgtcggacgcgcgcgtaggcgggtaccacgtgcccgcgggcaccaccgccatggtgaacatgtgggccataacgcatgaccccagcgtgtgggccgagccgacggagttcaggcccgagaggttcgtgggcgcctctgctggtgctggtgctggtgctggtgccgaggacgttccgatgataatgggctcggatctccggctcgcgcccttcgggtccggcaggcggagctgccccggcaagtcgctcgcgctggctaccgtcgggttctgggtggccaccctgctccacgagttcaaatggttgccgccgtgccgcggcgtcgacctgtccgaggtgctgaggctgtcgtgtgagatggctgcaccgctggaggcgagggtggttccacgtcacgcggtgtgagatgacgaggatgagacacgtggcctggggataggagaagttgcccgatcgtctgtctagattgtactgtactatatatcttatcttagctttccttaccttgtagcagagaacgtaacgtggcccggcggcgatggatgatgagaatgagatgtgtaaaagaagaaaaagagcatgcccgagtgccatatgctttagagtggactgtgtatatatgatgatgctattgctagcagctagtggaaggcagtagtacatagcagtacctcctgcagcgccggtttgatgcctacgtgtgtaatgtaatgtaactttaccagcttgcatgcatgtgatatgtgccttgttagtgtagtgcacaagatgagatgagcgtgacagttatcttttccttttcagtagtgcctagctagagctagatgtgtgtatctctctatatatattggagtatatcataattaatgcaagcgtgtgtgt

SEQ ID NO: 89154 - DNA, 1944 bp, Zea Mays
gctagctgctctgcctctgcttcaccaatcacctcgcggaggggaaggtttccccctttgacacagccgagctcccctccatcagcagccagctcctcgtcgcaaagcaagaagatgatgctcgcgtacatggaccgcgcgacggcggccgccgagccagaggacgccggccgcgagcccgccaccacggcgggcgggtgcgcggcggcggcggcgacggatttcggcgggctggcgagcgccatgcccgcggccgtggtccgcccggcgagcgcggacgacgtggccagcgccatccgcgcggcggcgctgacgccgcacctcaccgtggccgcccgcgggaacgggcactcggtggccggccaggccatggccgagggcgggctggtcctcgacatgcgctcgctcgcggcgccgtcccggcgcgcgcagatgcagctcgtcgtgcagtgccccgacggcggcggcggccgccgctgcttcgccgacgtccccggcggcgcgctctgggaggaggtgctccactgggccgtcgacaaccacgggctcgccccggcgtcctggacggactacctccgcctcaccgtgggcggcacgctctccaatggcggcgtcagcggccagtccttccgctacgggccccaggtgtccaacgtggccgagctcgaggtggtcaccggcgacggcgagcgccgcgtctgctcgccctcctcccacccggacctcttcttcgccgtgctcggcgggctcggccagttcggcgtcatcacgcgcgcccgcatcccgctccacagggcgccccaggcggtgcggtggacgcgcgtggtgtacgcgagcatcgcggactacacggcggacgcggagtggctggtgacgcggccccccgacgcggcgttcgactacgtggagggcttcgcgttcgtgaacagcgacgaccccgtgaacggctggccgtccgtgcccatccccggcggcgcccgcttcgacccgtccctcctccccgccggcgccggccccgtcctctactgcctggaggtggccctgtaccagtacgcgcaccggcccgacgacgtcgacgacgacgatgaggaggaccaggcggcggtgaccgtgagccggatgatggcgccgctcaagcacgtgcggggcctggagttcgcggcggacgtcgggtacgtggacttcctgtcccgcgtgaaccgggtggaggaggaggcccggcgcaacggcagctgggacgcgccgcacccgtggctcaacctcttcgtctccgcgcgcgacatcgccgacttcgaccgcgccgtcatcaagggcatgctcgccgacggcatcgacgggcccatgctcgtctaccctatgctcaagagcaagtgggaccccaacacgtcggtggcgctgccggagggcgaggtcttctacctggtggcgctgctgcggttctgccggagcggcgggccggcggtggacgagctggtggcgcagaacggcgccatcctccgcgcctgccgcgccaacggctacgactacaaggcctacttcccgagctaccgcggcgaggccgactgggcgcgccacttcggcgccgccaggtggaggcgcttcgtggaccgcaaggcccggtacgacccgctggcgatcctcgcgccgggccagaagatcttccctcgggtcccggcgtccgtcgccgtgtagagcaaggggggaggaccagccagctgccagccaagacaggaggaggaggaggaggggaggctgatggatcgccgctgctgttgccggtaatgatggcgattacgctgctgatcctggtgatgatgatggacgatcgaggaagccgcagggccgggcaatgatggcgatagggccaccgttaggtgtgcatccgggggcgcaaattaaagggattgctgtgtggagatctgcacgagtttttgctccatgcat

SEQ ID NO: 89155 - DNA, 1948 bp, Zea Mays
gctagctgctctgcctctgcttcaccaatcacctcgcggaggggaaggtttccccctttgacacagccgagctcccctccatcagcagccagctcctcgtcgcaaagcaagaagatgatgctcgcgtacatggaccgcgcgacggcggccgccgagccagaggacgccggccgcgagcccgccaccacggcgggcgggtgcgcggcggcggcggcgacggatttcggcgggctggcgagcgccatgcccgcggccgtggtccgcccggcgagcgcggacgacgtggccagcgccatccgcgcggcggcgctgacgccgcacctcaccgtggccgcccgcgggaacgggcactcggtggccggccaggccatggccgagggcgggctggtcctcgacatgcgctcgctcgcggcgccgtcccggcgcgcgcagatgcagctcgtcgtgcagtgccccgacggcggcggcggccgccgctgcttcgccgacgtccccggcggcgcgctctgggaggaggtgctccactgggccgtcgacaaccacgggctcgccccggcgtcctggacggactacctccgcctcaccgtgggcggcacgctctccaatggcggcgtcagcggccagtccttccgctacgggccccaggtgtccaacgtggccgagctcgaggtggtcaccggcgacggcgagcgccgcgtctgctcgccctcctcccacccggacctcttcttcgccgtgctcggcgggctcggccagttcggcgtcatcacgcgcgcccgcatcccgctccacagggcgccccaggcggtgcggtggacgcgcgtggtgtacgcgagcatcgcggactacacggcggacgcggagtggctggtgacgcggccccccgacgcggcgttcgactacgtggagggcttcgcgttcgtgaacagcgacgaccccgtgaacggctggccgtccgtgcccatccccggcggcgcccgcttcgacccgtccctcctccccgccggcgccggccccgtcctctactgcctggaggtggccctgtaccagtacgcgcaccggcccgacgacgtcgacgacgacgatgaggaggaccaggcggcggtgaccgtgagccggatgatggcgccgctcaagcacgtgcggggcctggagttcgcggcggacgtcgggtacgtggacttcctgtcccgcgtgaaccgggtggaggaggaggcccggcgcaacggcagctgggacgcgccgcacccgtggctcaacctcttcgtctccgcgcgcgacatcgccgacttcgaccgcgccgtcatcaagggcatgctcgccgacggcatcgacgggcccatgctcgtctaccctatgctcaagagcaagtgggaccccaacacgtcggtggcgctgccggagggcgaggtcttctacctggtggcgctgctgcggttctgccggagcggcgggccggcggtggacgagctggtggcgcagaacggcgccatcctccgcgcctgccgcgccaacggctacgactacaaggcctacttcccgagctaccgcggcgaggccgactgggcgcgccacttcggcgccgccaggtggaggcgcttcgtggaccgcaaggcccggtacgacccgctggcgatcctcgcgccgggccagaagatcttccctcgggtcccggcgtccgtcgccgtgtagagcaaggggggaggaccagccagctgccagccaagacaggaggaggaggaggaggggaggctgatggatcgccgctgctgttgccggacctgccctgccaggataccagccggagagctttcaggcgacaaaagccgcggcgaggggatcagcgaggatctgccgggccaccgccaccgccgccgccccgcgttttatactggagggtgggtgtgctccaagtggtgcctttctgacaacgcgatctaggctatga

SEQ ID NO: 89156 - DNA, 1390 bp, Zea Mays
cgctggattcggtgacgggggggctgcgtcctgccaaaccaaaccaccctagactagacagacccccaggggcaggggtcgcgccattggccgcacgcggggaccggcgccagtgagtgcgccgcgccgcacggccgcgccccgatctcgctcgctcgctcgctggtgatcgaatcggcgcgtacaatgcggcatggccccgagccccacacccgcagtggccgtgacgcgattgcgctgcctccggtccggcccatgacccagcggatcgcgtcgcgtcttttggcaacgcccgcgtcatcatatcgcgctctttgtcgtccccacggagcacagcgcagcgcagcgcagcgcagccaaccttttctccgccacgcacgcttcggcggcattcattatttggattttgttcctaccggtcgatccgcgtccgtccgtgcactgcaggcgctaccgtcatgctgaccaacccattgccattggttttgtttcttctctctctctctcgctctcgttggttatggttcgtgcgtgcctgcaggcggcggtgaccgtgagccggatgatggcgccgctcaagcacgtgcggggcctggagttcgcggcggacgtcgggtacgtggacttcctgtcccgcgtgaaccgggtggaggaggaggcccggcgcaacggcagctgggacgcgccgcacccgtggctcaacctcttcgtctccgcgcgcgacatcgccgacttcgaccgcgccgtcatcaagggcatgctcgccgacggcatcgacgggcccatgctcgtctaccctatgctcaagagcaagtgggaccccaacacgtcggtggcgctgccggagggcgaggtcttctacctggtggcgctgctgcggttctgccggagcggcgggccggcggtggacgagctggtggcgcagaacggcgccatcctccgcgcctgccgcgccaacggctacgactacaaggcctacttcccgagctaccgcggcgaggccgactgggcgcgccacttcggcgccgccaggtggaggcgcttcgtggaccgcaaggcccggtacgacccgctggcgatcctcgcgccgggccagaagatcttccctcgggtcccggcgtccgtcgccgtgtagagcaaggggggaggaccagccagctgccagccaagacaggaggaggaggaggaggggaggctgatggatcgccgctgctgttgccggtaatgatggcgattacgctgctgatcctggtgatgatgatggacgatcgaggaagccgcagggccgggcaatgatggcgatagggccaccgttaggtgtgcatccgggggcgcaaattaaagggattgctgtgtggagatctgcacgagtttttgctccatgcatgct

SEQ ID NO: 89157 - DNA, 960 bp, Zea Mays
attatttggattttgttcctaccggtcgatccgcgtccgtccgtgcactgcaggcgctaccgtcatgctgaccaacccattgccattggcggcggtgaccgtgagccggatgatggcgccgctcaagcacgtgcggggcctggagttcgcggcggacgtcgggtacgtggacttcctgtcccgcgtgaaccgggtggaggaggaggcccggcgcaacggcagctgggacgcgccgcacccgtggctcaacctcttcgtctccgcgcgcgacatcgccgacttcgaccgcgccgtcatcaagggcatgctcgccgacggcatcgacgggcccatgctcgtctaccctatgctcaagagcaagtgggaccccaacacgtcggtggcgctgccggagggcgaggtcttctacctggtggcgctgctgcggttctgccggagcggcgggccggcggtggacgagctggtggcgcagaacggcgccatcctccgcgcctgccgcgccaacggctacgactacaaggcctacttcccgagctaccgcggcgaggccgactgggcgcgccacttcggcgccgccaggtggaggcgcttcgtggaccgcaaggcccggtacgacccgctggcgatcctcgcgccgggccagaagatcttccctcgggtcccggcgtccgtcgccgtgtagagcaaggggggaggaccagccagctgccagccaagacaggaggaggaggaggaggggaggctgatggatcgccgctgctgttgccggtaatgatggcgattacgctgctgatcctggtgatgatgatggacgatcgaggaagccgcagggccgggcaatgatggcgatagggccaccgttaggtgtgcatccgggggcgcaaattaaagggattgctgtgtggagatctgcacgagtttttgctccatgcatgcttgccgttcgtgtccgcgtgtccc

SEQ ID NO: 89158 - DNA, 87 bp, Zea Mays
acagaatatacacagatttcatacacagattatacacagattcacacagattgcatacacagatttcatacacatattacaagttcc

SEQ ID NO: 89159 - DNA, 2766 bp, Zea Mays
aaaccaaacccctcgcgccatcacgcttccctccctcgtgcgtttgcaccgtcacgcttccctcccttgtgcgtttgcgccgtcacgacttctgcgatgccccgcccccgttcacgcgacaaggcggcatccccgccgtcgccggccggtgcccggcaacgcacccccgcgccgtccccgtccacctctctccacctcggtatcggccccgcgtcccccgacaacgacctcggcgtcggatccctcgacctcaagcaacccgccgctgcgcctccccgacacagcctgctcctcgcgggcgccgccctccgcctcggcctcggccccgcctcccccgatgacgaccgcggcgccagatcccccaacctcagcccacccgccgccgcgcctccccgacgcagcctgcgcctcgcgggtagtcgaaacactctctccgtgtcgggcaggggcgagaagggggcgaggagggcccatgctcgagtctccgcctcctcccttgctaccaccgtctcgcctagggccgggaactctagtagcgatgacagcgggtcgggggcggatacggctttggcgagcggcgagcgttatggcagtgcggtgccgttcacgacccggtctcgtatcgtgaagcggcgggcggaggcgagccctcaggcgggcggggaggtggggatcgggtcggctggtcgaggccaggtgcctgacgaaatgctgcaccgggacgtggggacgccgtcgaagcggtgcaggaccgtattggtcggaggagtggagacagtgtatatgtctgatacagagagtgattctgatgaggattgcatgatgctgggtccaagtgggaccgaactgaatcctattgctgtggatatgactgaaaatgggagtctggatgatcctgccaatgcaagcgacgtggagtctttgcagacgcataatctgctagggacgacaaatgttggggtggttgagcaatcagtatatccttcaggaagtgcttcaagttttgaagcaagaatctctgcagatatgtatgtctcgagccattacagttctagaaagggaagcaaagtgaacgggaagcttgttttggagaataacagttctcgtgctgatgctaatgtgggctctgcagttggtaccagtccccgcaaattcaatccatacagcaaaggaaagggaaagatggttgcagaagatactttatcatctctggtctccagtgaggacgagccagatttggatccagtgcattccaaagagactcaggttaatccaggatcagtttctgcttctatggtgtcatatcgcagacaaaaagcaaaagagagagctatcaggttggctcctgaatttgctttctttaaagcagataaagatgagcatagtgaagatgatgatgaagaactagagcctggtcctgactctcaggactggccaggctcattcgtaactgctgcaaggatgtatgaagaaagagaagctaagttgagagctcgagagttgaattcttcaaagctgaacaaatctgcaaatagggtcattgtttggtcgccttcaaaggatgagaagaatccagcacgagctcaagctgccccatcacttacaagcttatgcttaaatacacttgcgaaacattctgaatgtattggaacacttgaaggtattccagaggagctaaagaataggctgttcaagattctgtgtcattctaggaagatgaatacttatcttctcaatgaactattatgtgacagtcctacagaactgcatctcagtgagtgttcatggctgagtgaggatgactttgagaaaacttttgggaaatgcagcattgaaagcttgcaggatctacagcttgatatatctgggagatgcatgcctgattacatattgccaactaccttagctaaggttcctaactgtatgccattgttgagaaaaatatctctgaagggaaattatcggctttctgataatggtttagtcacaatcatctcggctgcaccttctttatgttccataaatctgtgtgagtgttctcttctcacttcatctggaatcaatattcttgcaaacaagttacattcagttcttagagaactgtatatagatgattgcacaaacgtggatgctatggcaattcttcctgctctacagaagattaatcatctagaggttttgtcaatgtctggaatacaatctgtgtgtgacaagtttgtgaaggggctcattcctgtgcatggttcaaatctgaaggagttagcatttgctggttgcttggaacttacctcagcttccatcaagactgttggggaatattgtcaagaattaacttcattggatctccgcaacttgaataggctgcgtgactcagcactgtggcatcttcgtggttgtaggctactaaggaaactaaggcttcaaagaaacgcattcagtgatgaagctgtgtctcaatatttggaggaatctggaggaggcctgaccgagttaatgctaaacaatgttaagaaggttggagaccttactgctcttgcaatttctcgcaagtgttctgttctattgaatgccctggatctttccttctgccgtgaactgacagacgattctttggggctgattgtcgacagctgcccatcattgaggattcttaagctatttggttgtacccaggtcacggatttgttcctcaagggtcactcgaacacatcggtcgaaatcgtcggaatagaagggagtatactcgcgcagatggataaccgttag

SEQ ID NO: 89160 - DNA, 340 bp, Zea Mays
aaaccaaacccctcgcgccatcacgcttccctccctcgtgcgtttgcaccgtcacgcttccctcccttgtgtgtttggtttagctgtgagctttgaaaaagctgctgtgagctgtctactgtgtgttgagctccaaaatgagcggcggatggttcgcgcgtgcgcagagcagattagggttccgagttttgtgctacggttgttagctagattcgcggaattagctcaggagattagtttgtaaagggtttagcccccctcctctataaatagagatgtatacgatcgatttgtaatcatcaatcgaatcaataacacttttatctcgcatttatttcct

SEQ ID NO: 89161 - DNA, 2413 bp, Zea Mays
atgccccgcccccgttcacgcgacaaggcggcatccccgccgtcgccggccggtgcccggcaacgcacccccgcgccgtccccgtccacctctctccacctcggtatcggccccgcgtcccccgacaacgacctcggcgtcggatccctcgacctcaagcaacccgccgctgcgcctccccgacacagcctgctcctcgcgggcgccgccctccgcctcggcctcggccccgcctcccccgatgacgaccgcggcgccagatcccccaacctcagcccacccgccgccgcgcctccccgacgcagcctgcgcctcgcgggtagtcgaaacactctctccgtgtcgggcaggggcgagaagggggcgaggagggcccatgctcgagtctccgcctcctcccttgctaccaccgtctcgcctagggccgggaactctagtagcgatgacagcgggtcgggggcggatacggctttggcgagcggcgagcgttatggcagtgcggtgccgttcacgacccggtctcgtatcgtgaagcggcgggcggaggcgagccctcaggcgggcggggaggtggggatcgggtcggctggtcgaggccaggtgcctgacgaaatgctgcaccgggacgtggggacgccgtcgaagcggtgcaggaccgtattggtcggaggagtggagacagtgtatatgtctgatacagagagtgattctgatgaggattgcatgatgctgggtccaagtgggaccgaactgaatcctattgctgtggatatgactgaaaatgggagtctggatgatcctgccaatgcaagcgacgtggagtctttgcagacgcataatctgctagggacgacaaatgttggggtggttgagcaatcagtatatccttcaggaagtgcttcaagttttgaagcaagaatctctgcagatatgtatgtctcgagccattacagttctagaaagggaagcaaagtgaacgggaagcttgttttggagaataacagttctcgtgctgatgctaatgtgggctctgcagttggtaccagtccccgcaaattcaatccatacagcaaaggaaagggaaagatggttgcagaagatactttatcatctctggtctccagtgaggacgagccagatttggatccagtgcattccaaagagactcaggttaatccaggatcagtttctgcttctatggtgtcatatcgcagacaaaaagcaaaagagagagctatcaggttggctcctgaatttgctttctttaaagcagataaagatgagcatagtgaagatgatgatgaagaactagagcctggtcctgactctcaggactggccaggctcattcgtaactgctgcaaggatgtatgaagaaagagaagctaagttgagagctcgagagttgaattcttcaaagctgaacaaatctgcaaatagggtcattgtttggtcgccttcaaaggatgagaagaatccagcacgagctcaagctgccccatcacttacaagcttatgcttaaatacacttgcgaaacattctgaatgtattggaacacttgaaggtattccagaggagctaaagaataggctgttcaagattctgtgtcattctaggaagatgaatacttatcttctcaatgaactattatgtgacagtcctacagaactgcatctcagtgagtgttcatggctgagtgaggatgactttgagaaaacttttgggaaatgcagcattgaaagcttgcaggatctacagcttgatatatctgggagatgcatgcctgattacatattgccaactaccttagctaaggttcctaactgtatgccattgttgagaaaaatatctctgaagggaaattatcggctttctgataatggtttagtcacaatcatctcggctgcaccttctttatgttccataaatctgtgtgagtgttctcttctcacttcatctggaatcaatattcttgcaaacaagttacattcagttcttagagaactgtatatagatgattgcacaaacgtggatgctatggcaattcttcctgctctacagaagattaatcatctagaggttttgtcaatgtctggaatacaatctgtgtgtgacaagtttgtgaaggggctcattcctgtgcatggttcaaatctgaaggagttagcatttgctggttgcttggaacttacctcagcttccatcaagactgttggggaatattgtcaagaattaacttcattggatctccgcaacttgaataggctgcgtgactcagcactgtggcatcttcgtggttgtaggctactaaggaaactaaggcttcaaagaaacgcattcaggtattgccccacttcccctgatttttattgactgatccaaatttgaagtgcttcattactaagcagaatta

SEQ ID NO: 89162 - DNA, 2070 bp, Zea Mays
atggagaagcttggacggccaacgtcggtagtcaagctcatcaccggaagactcaaagacgccgacgtcgtcttcatcgacgctctgagagccgcaacctgcggcttcgacttccgcagaatcgtggagtcccatctgtgcatcccagtcgtctacttcctctctcgggattatggggtcaccggcgacgtgtctgaggctctgcagcgcactgtttgggctgccacctacgtcgtcaggaagcccctcgacgctggagaactcagcaggctgtggaaggtcatcaagtggtccaagtttttgctgcggcgcgcatggccggaatggcctcgcggcagccgagtgcgtcccgccgtcgtcggagcacttctgcccggctcctctaccgttgatggccgatgggaagacgacgacgacgacggccgcgaacatttcagggcggtgagggcaggaagaggccggaggaggaagctgggtgatcgccaataccacggcggacgatcctccggccgcggtggcggcggcggcgttgcagttggaattggaataggacgacgccagccaactgagagactggagcaaatgaacttgacaggatggcagcaggagaacgatgacgacgacggcgtgtttcctatccaccaacagcctgcacaacagaaccgaccaggagtccagaccatggacgatgtccagaaccagcagcatggtcggtccctgttcatgcagcccggcccccagacgctcaatgtgccgcacaacaaccccatgatctcccccgacgctggctggccgagcagcagcaatgtcgcagccttcgctggcgccagcaacaccaccggcccaacactgctgcagggagtgtaccaagcaccggcggcacgaggagcaagagcagcatcgccggcaccgcatgcggtgtacgcaccaccagcgccaggactgcgccctccggtgtatcagcagcagcagcaacccatggcgcccctctacgacttcggcgacatggtcgcaccgcccgcggcagtaccactaccaataccaaccatggccgccaccagcggacaccagccgcagttcaccctcaaccatcaccaccagcagcagcaggaggaggaaatgtttgcgccgcggaggcaaggcggctggatggggagtcgtcgtcgtcgcgagaccggacccatcatgctttccttccagcagccacaggccgctgatcctttcacccctatggctggcagtggccctttcacgcctatggcggctgggcaggctggcagtggcacggcctttggagcttcatcacctacaggtgctacagatgcaggagcgtacggggccgctgccgtggcacaggcacagcttcagtccccgaacgctggtgctcaaccagctgacagcagctttgatgatgtgctccgagccatgatggagatggactactatgccaacaactgcagcgccgaagcactcatggccccggctacagacgagttagcaggtatgcaagcagcagcagcacttggcagcagcggcaactacaacgctggaccattcatggtgacggatgcgaatggcggcaatggtacaccattcatggcgctggcgctagcgccacaggatcccgccgcgccaactgggaaccaaaaccaagtccaggtggagttgggagcaccggacatctacggcggatcactgctggtggggtctcatcaaggcggcgggactagtgcaatgttcaatggggatggtgacatggcaccaatgtttccttctaacgagtacggtgcgactgcgaacgccatgttctctctggatgcccttctggatttcgacgacggcgtcccaacgtaccctgaaggccaccaggtcgctgcagctgatagcaccaccgccagcaacgctacaggaatcatgtcaaatggcggggaaagtggtggctcgggaccgagctggaacatgggagctgcagctgctgatgaaggtctggatatgttggaagagttcttaatggaggacaatgagtctggttttcttctcccgcaagacatgaacaatggcctccagtag

SEQ ID NO: 89163 - DNA, 369 bp, Zea Mays
gttttttcctttctatatatgacatctttgtcattttaaattttcatggatgactggtaaatataactggtaaaatttcatatgtgttcatgtccttatctgattgtgtcagctctcttaatcatgcaaattataaaatgatcatatcatataactttgattcctttcaaataatttagtttatgaaacaactatgtttgtaaatggatatattgattccgtagcaacgcacggcggcacgggcatatatcaagttctgagtcttcacccaggacagagtctcttgtgtgcaaatcagagtgtctaccgacctcttcactttcattctgatgctctgtcttcaaagcagcaagttttgcatggttctca

SEQ ID NO: 89164 - DNA, 1158 bp, Zea Mays
atgtcgtacgccgtgcaggggcggttcctccgcgcgctcgcggctgccgccggggcggtcgtcgtcgcgccgtcgccatcacggtcgcctctgccggctgctggggcggacgacggcgctccgaggatagcagcggccgggctcttctcccgcggccgagctcttccagttgagctggccgggctcttctcccgcggcgccgtgcagcagcggaagcgcacgctggtggccggcggccaagaagcagaggcagttgtcatcgctcgaatggccggctcgtctggcaccatatcccctggctcggcgcccacgccgccaaaggtcccgtcggatgaagcagtccgtggacaggccggggacgttgaacgccacctcctcgatgctccatgcctcctccatccgcgtcttggtgtggctcatggcggcctcgccgaaccggaacagggtcgccgcggagcgccccgagtgcgcgatcatgacgccctccacgtcgcggtagtcctccagggcggagctggtggtggtctcccagtacacggcgtccccgacggcgtgcggctggatgcgggtcaggtgcgagtcctcgatgtgcaccatcaggcccacgcgggtttagggtcagctgcaggcatggagaagtttgcttcagtgccatgcggcggtggcggtggcgttggctgtgaggttgacaatgaaaagatggagctcctgctatcccaactgagcagtaaggacattaccgagctcattcctgcgggcagggagaagtttgctttagtcccatgcggcggtggcggaatgactatgatctcgcccgacttgttcagtaataatttggttgccagcaaaactcacgccttcttcttttccataggaatatggagaatacaggtggctcttttctgcatgtgcatgggaggaatcatgtattttctggagtacgagccagacacaatggctccattcctcagagggctcatcaggcgcttcctggcaagcaagatcagcaatccaagccccctgcctcccaatcggaatgcctcctactcgtaccttcagacgctgaatgctctagagcaatcaagaacccaaccaggggtggataacggactgacgacatcggagaaatacaacctcgaatcaattcctagactttag

SEQ ID NO: 89165 - DNA, 1815 bp, Zea Mays
atggaagaaaaatcaatggataagtttgctgcattgatatcatctttcagataccccggtccccgtgccagtggccttcatgctcctttaaaggatgtgaaaaacacactttctgtgagatctattcttaaagctccagaaaaaggcacattcagacacacagcaaagaaaacagtccgccaccgagaaggagaagtctctggtcgagaagaaaagtccatcgagagccgcaagctcatcttcacccgcgcaaagcagtacgccgaggaatacgatgccctggaaagggcatccaaattctacaatggcaaaacctacttgactgcaagattcctgaacagaccccttctcatgccaagcttgagtgcttctctcttctacaaagaggttgacttgctgcagcctatcagttttgacaaagtgtttgactttaacaagttcaatgcgcgttgccatggcttcgggaccggtagaaggtggacggcagacagagatttggatcaactacagcaatccatagggagcaatgcggatgactctgaagtcattgaaatcgttggggaaaatccatttctgtggcctgaccactggccagtcaaagactatgccaaaatcttcgattgccttgtcttagttcctgagatagaaactgaagtggtcaaggtgatatccaagattagagaggcaggccaaagagcaagacatgaagctgggggttctcatagtaagcagaggagagatagctcaacaaatccgcctgtatcgtatgtcgctgttcacatgagagtagaaaaagattggatgatacattgcaagaagtgggagcagcggtccaaatcacatgaaatctgcagtagcaaagaagagatcattcataaggtctcacagatcactgacctacgtcggccagttgttgtttatcttgcggtagctgacagccttcttgaagacgattcaataaccagtgggtggagagtgggtatggttgcttacgagaagaagaagcttggcgttactgacatctacgatcggcagccatatcttataaagtctgccattgactttgaggtgtgctcgagagcagacgtgtttgtcggcaacagcttctcaacattctccaacctcgtagtgctgtccaggacagaaaggctgtataacctaggaaaggcgagcttgtgtggcgagaacatcgggctttcgtcatatgcgtacaatgtcatgggcgacgatggtgaaccgcagagatggatgacagatatgtcggacacaagcctacagagtcgcccgcaatgcagtaaacctccttgcaaaaaggaccagatgcttgctatttctccaggtttggaactgaaaggggcatccaaattctacaatggcaaaacgaattctgtggcagatgctgctcaaccggcaaaaggcactgctgatcctgtgaacccatcccctaagaagtgcaagggcttcctttcattcggcttcagctggaccaagtcttggagcagacgtggtgcaaccagcagctcagagaacttcgggaagacgctgtctgcagcccttacaggcagtgctcaaggcaacaacaggggcggtggcaatgagcaccagggctgtcaagaccctgctgcccactgcctgcatctgcacaggaggtccaacacgcctggcgtctctgcttccccgtctggacctggtgcccttcggcctcagctgatctcagtgcagatgcagtcggtgtctgtggctggtgtggaggacgtggcggagtccaccgcctcagtttctcccagagagaagcgcaggaggagcttgcaatag

SEQ ID NO: 89166 - DNA, 1057 bp, Zea Mays
gcgaccgttcgagggactgcacagagtacatcttcctgcaccgacttcgtacggctacatcgaacaaacacacgagatgtctcgtgtgaatggagccactggtgccttgagcatcggtccctccgctgggtacactctgttcttcgtatttgtgcatgtttcattgctgtttactgcttatgcgagtagttatacacacatgcacatacatgtcatcacatatatcgcactgattttctggattaaattaaaactaaaaatgcctaactttctaacaactagagcccacatgtcggacttgtgaaagactatggccaagagtttagatgtgcttaaaagcgttgacagtgttgggcagtttgtagtttgtataacgctgaatgatgcgcgatggcttttacctgggacccttttgttttttatggcttcagaatcagacctacacattcaagtgtattttgttcacttgcagcgtgtgtgtttttaagatggtttgctatgttctgactttttttatttcagtcgcccgcaatgcagtaaacctccttgcaaaaaggaccagatgcttgctatttctccaggtttggaactgaaaggggcatccaaattctacaatggcaaaacgaattctgtggcagatgctgctcaaccggcaaaaggcactgctgatcctgtgaacccatcccctaagaagtgcaagggcttcctttcattcggcttcagctggaccaagtcttggagcagacgtggtgcaaccagcagctcagagaacttcgggaagacgctgtctgcagcccttacaggcagtgctcaaggcaacaacaggggcggtggcaatgagcaccagggctgtcaagaccctgctgcccactgcctgcatctgcacaggaggtccaacacgcctggcgtctctgcttccccgtctggacctggtgcccttcggcctcagctgatctcagtgcagatgcagtcggtgtctgtggctggtgtggaggacgtggcggagtccaccgcctcagtttctcccagagagaagcgcaggaggagcttgcaatag

SEQ ID NO: 89167 - DNA, 1829 bp, Zea Mays
gtctcgctcagcagctctctccaactccttcgatcccttccctcctctcgccgccggccgattcacttcttccatcattcgattaagcaagcaaaggcaaggcgcatttccctcgggtgactcgatcggccgcacgatgtctgcgacgcagccgtggaggtcgcttttctgctgcgcggcggcgggatacgacgacgccgacgagccaccgccgtcgtcgcgggggcagaggaagggccggagcaggagggaccgggaccgggagcggctccagctgctgctgctgccgtcgtcctcgtcggcggcgtcgcgggtgtcgctgtcgagcctggggggctcgtcggggacgctgacgcccgaggacctgtccctgacgctgtcgggctccagcctgcacgccttcacctgcgccgagctcagggccgccaccgcgggcttctcccgcgccaactacctcggctccggcggcttcggccccgtctaccggggccgcgtcgccgcgggcctccgcccgggcctcgacgcgcagccggtggccgtcaagtacctcgacctcgactgcggcacgcagggccaccgcgagtggctggccgaggtcttcttccttgcccagctccgacacgacaacctcgtcacgctcatcggctactgctacgaggacgaccaccgcatgcttgtgtacgagtacatgagcaaccagagcctcgagaaacacctcttcagaagtctcgacggccccatgccatggatgacgaggatgaagatcgccgtcggcgcggccaagggcctcgccttcctccacggcgcggacacgccggtgatctaccgggacttcaaggcctccaacatcctgcttgaccaggactacagcaccaagctgtcggactttgggctcgccaaggacgggcctcagggcgacgcgacccacgtcacaacgcgcgtcatggggaccaacgggtacgcggcgccagagtacatcatgacggggcacctcaccgccaagagcgacgtctacagcttcggggtagtgctgctggagctcctgacgggccgtcggtccgtcgatcggtctcggcggcccagggaacagagcctggtggactgggccagaccctacctcaagaagcccgacaagctctaccgggtcatggatccggccatggagtgccagtactcgtgccaaggggccggacgcgccgctatggtggcgtacaagtgcctgagccagaaccccaagtccaggcccaccatgagggaggtggtccaggccctggagcccgtcctggacatgaacgactaccttcagataggctcgtttgtgttcaccgtcgtggtggaagacagcaacgacgacgacagccaaggcaagatggtcgacgtgacaatagagacgacggtggaggagaagcgccagagccaccaggaccggcaccggcagaagttccccaactcggttgtcaatgccgacgtggtgctgcaccgggacggcgacctcgggaagcacattgccgcgctgcggcggcaccggaggacgtccagctacgtcaaggagagagggacgtagaagcgtagcatatagccttcgggtgaattggcaattggcatggcacgtactagtgtttaggagagaatcagcaaaagcaaaagattaatgtgtacatataattaagctagatcatagatggatgtggcacaacaaggcatacacaaccatgccgcatttggtttggtggcacaaaaaattgttcattttttgttcgtgttagtgataattggtgtaactgtccatggtgacatgattatgttcataaattgaaaacatatagata

SEQ ID NO: 89168 - DNA, 1057 bp, Zea Mays
tcccagcaacagccaacatatctcctcgcattttccttgcaaccgattgcctatccccctcccaacccaagaccgatggcgcccaaggccgagaagaagcccgcggcgaagaagccggcggaggaggagcccgcggcggagaagacgaccgccgggaagaagcccaaggcggagaagcgggtccccgcgggcaagtccgccggcaaggagggcggcgagggcaagcgtggcaagaagaagggcaagaagagcgtggagacgtacaagatctacatcttcaaggtgctgaagcaggtgcacccggacatcggcatctcgtccaaggccatgtccatcatgaactccttcatcaacgacatcttcgagaagctggccggcgaggccgccaagctcgcgcgctacaacaagaagcccaccatcacgtcccgcgagatccagacctccgtgcgcctcgtgctccccggcgagctcgccaagcacgccgtctctgagggcaccaaggccgtcaccaagttcacctcctcctaggcttgcacgctcgccctttgtaggcatctcttgtgttgatgttccccttgttgtagttatatgttgctggtttctctgtcggcgctgctcgtaactgcgtcatgtaaccctgcaaggacttgtttatttgtgaatcatcaacactttgttgttgatcactcatgttccaaaatctgagtttgacgctcgagcatgcctcatttgttcatttcggtgctggattttgagctggtggtttgcatatacatatggattttatttcggttacaagtttgcacgtctgcttgatccgctgcatggccaatgtcacaaccgtcgctgccatcagtctgggcggtggacctctccaaggaccaatgacgcaaactcaaccagagcgccacgacagggaacgaagaaacccccatgatcacttgatctcgcgtgcccccgcccttgatctcgtgtccgccagtgtgtgagcccagcccccgccgatccaagtgattccacgcaccaccccgcaccccctgtagggatgaaaacggga

SEQ ID NO: 89169 - DNA, 321 bp, Zea Mays
atgtttgagttccagttccagacgagagaaagcggaagagcgggagagggtttttattatttactcattgcaacatcgcgagacgggctgaatgcgctcgagtccctgtatctcttgctgcaaaaggcgagtagtccccgtcagtcagtcggtcagtcagggagggggctcacgacaggtgcagcagcgctgctccgtccatgtgccatgaatggatgcggcagtacgctccgcccattcattgccattgccgtgccagttgcaaatgggagaagcaaagatctggaacgctttttttttcttattgctagcagaagctga

SEQ ID NO: 89170 - DNA, 1573 bp, Zea Mays
atacgactgggtcgctttgacttacgtaggacactcccgactctagcctcctgcggcttccgcatcctccgcttcgtgtcgtctgccctgctgcccaagcctccggaggttctagcggagccggctcactctcgcgacaccgccgcggcctccggctatatatggacggcgaggaggcgccccttggcgcgctcaacctggctgagtacgcccccgccggcgcccgcaccgtcgactgctacaggcgcatccgcaagatcggcgagggcacctacggtagatgttgagtggccgtgggatcgtacggccggcggcggaatgatgatccgtttggtccatggatgcacgattcatggcgtacttggagccaattgtcggcggagactttgttgaggtgtttgaagctgtggatattattactggggaaagagcagcacttaagaaaataaaactggatgatggcaaagaagggtttccacgccaaatcttgcgtgagattaaactattaaaaaagctggatcatgagaacatcatcagattgaaagagattgtagtatctcctggttctgcacatggaacaggcggatcagatgatcacatctataggggagatatctacatggtgtttgaatacatggaccatgatttgaagaaagtattgcaccatagtgccccatcccaagtcaaggtttatatggggcagctgctaaaaggattgcagtactgccatgccaacaatgtacttcatcgggatatcaaaggggctaatcttctaataactggtggtaagttgttaaaactcgcagattttggccttgcaaggctgttcactagagacggaactttaacaaatcatgtcatcactttatggtaccgaccccctgagttgcttcttggtgccacaagttatgctgaacctgtggatatttggtctgtcggttgcatatttgcagaatttttacttaagaaaccattatttcctggcagaactgagcaagagcagttatcaaaaatatttgaactgtgtggatctccaaacgaggaaagctggccaggtgtttccaagctaccattgtataagacaatgactatccgtcctgcgactcctaccaaacgaagcctgagagatattttgcagaactttgactgtcctgcagttgaattaattgaacggatgttgatccttaatccttcacaggatttctgcacaagatgctcttggtgcggcatacttcatcaactaaactcatatgggggtgtggggtgtgtgtgtgtgttgggggggggggggggggtatagattcgctgttcttttcgagtgcgactaagttttgtttaccttgtcaggatgggtctagggatctctaattggtgtaagtactacctgaagactgaaagtcttgtttctcctgctgacattggatttaggactagcaagcagtttaactttctctgttctagctttaaacataatatatatagatgcattgtacattattactcatggggaaaaatgtatttgattattaattaatagcaagtgattcttggtatattttcatatgatagcgtt

SEQ ID NO: 89171 - DNA, 1462 bp, Zea Mays
atacgactgggtcgctttgacttacgtaggacactcccgactctagcctcctgcggcttccgcatcctccgcttcgtgtcgtctgccctgctgcccaagcctccggaggttctagcggagccggctcactctcgcgacaccgccgcggcctccggctatatatggacggcgaggaggcgccccttggcgcgctcaacctggctgagtacgcccccgccggcgcccgcaccgtcgactgctacaggcgcatccgcaagatcggcgagggcacctacggtgaggtgtttgaagctgtggatattattactggggaaagagcagcacttaagaaaataaaactggatgatggcaaagaagggtttccacgccaaatcttgcgtgagattaaactattaaaaaagctggatcatgagaacatcatcagattgaaagagattgtagtatctcctggttctgcacatggaacaggcggatcagatgatcacatctataggggagatatctacatggtgtttgaatacatggaccatgatttgaagaaagtattgcaccatagtgccccatcccaagtcaaggtttatatggggcagctgctaaaaggattgcagtactgccatgccaacaatgtacttcatcgggatatcaaaggggctaatcttctaataactggtggtaagttgttaaaactcgcagattttggccttgcaaggctgttcactagagacggaactttaacaaatcatgtcatcactttatggtaccgaccccctgagttgcttcttggtgccacaagttatgctgaacctgtggatatttggtctgtcggttgcatatttgcagaatttttacttaagaaaccattatttcctggcagaactgagcaagagcagttatcaaaaatatttgaactgtgtggatctccaaacgaggaaagctggccaggtgtttccaagctaccattgtataagacaatgactatccgtcctgcgactcctaccaaacgaagcctgagagatattttgcagaactttgactgtcctgcagttgaattaattgaacggatgttgatccttaatccttcacagaggatttctgcacaagatgctcttggtgcggcatacttcatcaactaaactcatatgggggtgtggggtgtgtgtgtgtgttgggggggggggggggggtatagattcgctgttcttttcgagtgcgactaagttttgtttaccttgtcaggatgggtctagggatctctaattggtgtaagtactacctgaagactgaaagtcttgtttctcctgctgacattggatttaggactagcaagcagtttaactttctctgttctagctttaaacataatatatatagatgcattgtacattattactcatggggaaaaatgtatttgattattaattaatagcaagtgattcttggtatattttcatatgatagcgtt

SEQ ID NO: 89172 - DNA, 108 bp, Zea Mays
gctatcagtctaccattgctgccgggttgaaagttttaggttttttatacttttcattattatattattggtttctagaatatataccggcgagggcaaaaaaaaaaa

SEQ ID NO: 89173 - DNA, 354 bp, Zea Mays
atggaatcacttgtggttggacctggagtagaagggaaagaatccaatacccctatagaagcagttgttcaagtgtttgcttcatcaaaatttcttcaaaatattggtcttgtacctgccacaaagaaaagcggcaatggtggagatcctacacgtgtggccgaccttgaggcagaacttgaatcagagaagcaaaatacattagaagttagagctcagttagatgccctcaagaaaaaggtagaagaatcagaacaagcaagggataaggagttagaaaagattaatgatctgcaaaaaggagcagatgagaccaatgctctccttcgtcttctctttagcctcaataagtag

SEQ ID NO: 89174 - DNA, 1743 bp, Zea Mays
ccgctcctcagtcagtcctcacctcctttttctctataaaatcccctccccagtccaccgttcccgagagaagaacagagggatcgtcatccgccccacccacaactgctccagatccaggcacggcacggcacggcagccgggccaacccaagcccgtcttctcttctctctcgtccgtccctcactcgccgcgacgtgacaagacaacgcgacgcgcgcgcagcgcatacgtcgtccaaggcacgcaggggccagccaaccaatcgcgtccgtccgggtctggtggtggccggaatgggcctcctcgatcagctctgggacgagacggtggccggcccgcgaccggactccggcctcggcaagctccgcaagtactcctccttctccccctcctcctcctcgtcgtcgtccatcctggctcccgcgccggcgccggcgccggcggtgacgcgcagcatcaccatcgcccgcccgccgtcgctctccgtcgagtcctacagctcctcctccgtcccgtcctccccggccagcacgcccgactcgccgctcgccgcaggtgggctccctctgtttttggtcgcctcgccgccccgttcttgggctacaaatcgtttctgtttctagttatgtctgcgcactgctgcgcagcagcgcaggactggatctccgacgaaatgggggcagtaaaagggatggaaaaaaagtatataaattttgacgttctattcacgttgtttttttttcttctacgccctcttaagcgcgacgcagtcacagatctgccgctgcacagcacgcaatgccttcgtgatagcagatgatggttcgtgggaacttgggtggggagggtgccgttgccgtgtgattgtcaggaccacccagactagctagacattcatttgctggtgcgtttggtgctgtgataacaaagggttcgttcatcagaaagctgtgcatgcaagcacgatgcacaggcacagctggtcgatatgcctcatgcctgagctgagcctcaccctctgtgtgttggcgtgtttggcgcagctaccccgcccaaggcggacgtctggaggaggttccgccggaaaaccaaggtctccgacgggccggagccggccgtcgggcccaggagccccaccgtctacgactggttcgttctcgcctcaaagcttctcttcttgtactctcgtgccacgccacctcgaatcctcgatgcacaccatgtccatagctaagctagcaggtcacgatttatgttcctgatacagcttctgtccctggttggttcgctttgcagggtggtgatcagctcgttggaccgctgagttagaacagatcaatcgccaataagcaacaaccgagctagcagagggcatgtttgcgttcttctgaatgttgtgcgcgtgtgtctgtggcagcataagtagagagtatgtcgatgatgatgatgacgacgacgaggatcagttcgcggcggggaggttagaagtagccgggcgccgatttccatcctagtttgggcgtttggcctatagccggcaggcgcgttctccagttcttggatcaggggaagaactcctgccgggcagctgcctgcttcgttttctacgcaccctcctcccctctgtaattatcccaagcaccacctcgtactggtagtagtagcagtgttttgtgtgtgtgtgatgctacgatgtagctgtgcattttcttctgctcgcctggaaaccttttgcgttcc

SEQ ID NO: 89175 - DNA, 2064 bp, Zea Mays
ccgctcctcagtcagtcctcacctcctttttctctataaaatcccctccccagtccaccgttcccgagagaagaacagagggatcgtcatccgccccacccacaactgctccagatccaggcacggcacggcacggcagccgggccaacccaagcccgtcttctcttctctctcgtccgtccctcactcgccgcgacgtgacaagacaacgcgacgcgcgcgcagcgcatacgtcgtccaaggcacgcaggggccagccaaccaatcgcgtccgtccgggtctggtggtggccggaatgggcctcctcgatcagctctgggacgagacggtggccggcccgcgaccggactccggcctcggcaagctccgcaagtactcctccttctccccctcctcctcctcgtcgtcgtccatcctggctcccgcgccggcgccggcgccggcggtgacgcgcagcatcaccatcgcccgcccgccgtcgctctccgtcgagtcctacagctcctcctccgtcccgtcctccccggccagcacgcccgactcgccgctcgccgcaggtgggctccctctgtttttggtcgcctcgccgccccgttcttgggctacaaatcgtttctgtttctagttatgtctgcgcactgctgcgcagcagcgcaggactggatctccgacgaaatgggggcagtaaaagggatggaaaaaaagtatataaattttgacgttctattcacgttgtttttttttcttctacgccctcttaagcgcgacgcagtcacagatctgccgctgcacagcacgcaatgccttcgtgatagcagatgatggttcgtgggaacttgggtggggagggtgccgttgccgtgtgattgtcaggaccacccagactagctagacattcatttgctggtgcgtttggtgctgtgataacaaagggttcgttcatcagaaagctgtgcatgcaagcacgatgcacaggcacagctggtcgatatgcctcatgcctgagctgagcctcaccctctgtgtgttggcgtgtttggcgcagctaccccgcccaaggcggacgtctggaggaggttccgccggaaaaccaaggtctccgacgggccggagccggccgtcgggcccaggagccccaccgtctacgactgggtggtgatcagctcgttggaccgctgagttagaacagatcaatcgccaataagcaacaaccgagctagcagagggcatgtttgcgttcttctgaatgttgtgcgcgtgtgtctgtggcagcataagtagagagtatgtcgatgatgatgatgacgacgacgaggatcagttcgcggcggggaggttagaagtagccgggcgccgatttccatcctagtttgggcgtttggcctatagccggcaggcgcgttctccagttcttggatcaggggaagaactcctgccgggcagctgcctgcttcgttttctacgcaccctcctcccctctgtaattatcccaagcaccacctcgtactggtagtagtagcagtgttttgtgtgtgtgtgatgctacgatgtagctgtgcattttcttctgctcgcctggaaaccttttgcgttccaactgcagcggttgtggatgtgtttgccgccatggcccagcagtctggctgcgctctcgggctgcagctcccgtgtttgtgtcgcctggcctgcttgggagtctagctgtgcgtgtacaaatttagcctctcagcctggctccacaggaacgagatcagggtctgttttctgggagcctggctgctcgtggcgcaagtatttcatgtttaggtagttttagtcttctagcccggctgtatactgggtgacaaacaccagctcgtctgagccaggctcgtatggtataagtgcgcaaacaaaataagttgcagtagctgagacaggctagcctcagcctgaactagttgaacgagccgagctggccaagcagtctcgcaaacacgccctgtgttccctccctgaattgttgttcaactcgagttcgacttttaatatacttactcgtactgaataacggattacgaaga

SEQ ID NO: 89176 - DNA, 2346 bp, Zea Mays
ccgctcctcagtcagtcctcacctcctttttctctataaaatcccctccccagtccaccgttcccgagagaagaacagagggatcgtcatccgccccacccacaactgctccagatccaggcacggcacggcacggcagccgggccaacccaagcccgtcttctcttctctctcgtccgtccctcactcgccgcgacgtgacaagacaacgcgacgcgcgcgcagcgcatacgtcgtccaaggcacgcaggggccagccaaccaatcgcgtccgtccgggtctggtggtggccggaatgggcctcctcgatcagctctgggacgagacggtggccggcccgcgaccggactccggcctcggcaagctccgcaagtactcctccttctccccctcctcctcctcgtcgtcgtccatcctggctcccgcgccggcgccggcgccggcggtgacgcgcagcatcaccatcgcccgcccgccgtcgctctccgtcgagtcctacagctcctcctccgtcccgtcctccccggccagcacgcccgactcgccgctcgccgcagctaccccgcccaaggcggacgtctggaggaggttccgccggaaaaccaaggtctccgacgggccggagccggccgtcgggcccaggagccccaccgtctacgactgggtggtgatcagctcgttggaccgctgagttagaacagatcaatcgccaataagcaacaaccgagctagcagagggcatgtttgcgttcttctgaatgttgtgcgcgtgtgtctgtggcagcataagtagagagtatgtcgatgatgatgatgacgacgacgaggatcagttcgcggcggggaggttagaagtagccgggcgccgatttccatcctagtttgggcgtttggcctatagccggcaggcgcgttctccagttcttggatcaggggaagaactcctgccgggcagctgcctgcttcgttttctacgcaccctcctcccctctgtaattatcccaagcaccacctcgtactggtagtagtagcagtgttttgtgtgtgtgtgatgctacgatgtagctgtgcattttcttctgctcgcctggaaaccttttgcgttccaactgcagcggttgtggatgtgtttgccgccatggcccagcagtctggctgcgctctcgggctgcagctcccgtgtttgtgtcgcctggcctgcttgggagtctagctgtgcgtgtacaaatttagcctctcagcctggctccacaggaacgagatcagggtctgttttctgggagcctggctgctcgtggcgcaagtatttcatgtttaggtagttttagtcttctagcccggctgtatactgggtgacaaacaccagctcgtctgagccaggctcgtatggtataagtgcgcaaacaaaataagttgcagtagctgagacaggctagcctcagcctgaactagttgaacgagccgagctggccaagcagtctcgcaaacacgccctgtgttccctccctgaattgttgttcaactcgagttcgacttttaatatacttactcgtactgaataacggattacgaagagcgatggtccaggtcagtatttcattcttcattcatcagttgtacaatgttgacgccgcagctctgcaactgggtacctcttatccaaggcccaagggtacgcatgatatgaccagcagcaaccagtctctttctcgtcattcgcttagtcagccaagccaatgcctgagctgagatgagaaacaacaaacaagccgggtcccagatcctagtcatccggtcaaatcgacacgggtgacacctgatctttacaaaaaaggtactacgtactagcattcagtggatcagattgccaagcgccaaggatctatctagtgggtaggtcaaaactcaaaacgccgggaccattgccgaggtgtaaaggcgttcagcgcccagcagctcgcacaatccatggattggaacgggaccggcaggccttgttagttttataactaaaccatgtggatggagttgtattagagtgaattacgaggactttttttttggcttccactggattgaggagaattccttgtgagagcttaggcagctcctgcgcctgtccagtccatgatgaggtttgctagcaacagggaaaaacaccctacgtcagcgaacagtggttttatttgatgagtgaatgaatggatggttcaccggtaaaaggtgatgaggcgctctctttgcatagttacttcctctgtcataaattataagtcagcttaatttttcaagtttcatcaaatttatataaagtagccaccttagcgtcacattagtagaaaaca

SEQ ID NO: 89177 - DNA, 1446 bp, Zea Mays
gcgcccctgccatttacaacgacaccaccatgtcgtctgtccaggaggagcttaataacacacaggacatgctccaaggttacgtggagctctacaattacagtctctcctacgtgaagaccatggcgatcgggtgcgcgatccagctaggcatccctagcgccatccaccgccgaggtggggcagcaacaatctcggacatcatcaccgagaccggcgtcgacccgtcgaagctcccgtatctccgacggctcatgcgcgtgcttaccgtctccagcatcttggccaccacaggcacagacgagactgagactgagagcgacgacagtactgtttacaagctcactccggcgtcccgcctcctcgtaagcggcgcgggggcaccgacctcgtgcgacatatcgccgatgctggaccttctgatgcgccccactacgtcggtcgccacctacttcagcctggaagagtggttcaaggacgcgggcgccaccgccacgctcttcgaggtggcgcacggcatgtccccgtggagcttgacgaagaacgacgcgctgtacaacaagaccttgaacgacgggtgcgcggcggacagcaacttcgccatggacacgctcctgagagagccccgggccgcgggtatattccgcgggctcggctcgctcgtggacgtcggcggcggccacggcgccgctgcgatggccatcgctagggccttcccgcacatccggtgcagcgtgttggacctcgagcaggtggtcagcggggcacctgatgatggcacggtgaagttcatcgccggcgacatgttcgagtctatcccggctgcagattgtgtcttgcttaagtatgttctgcattgctgggacgacgaaagcagcgtcaagatcctccggcagtgcaagagagcgatccctgcaagagacgccggagggaaagtggtgatcatgaacatggtggtcgggtacggttcgtcagataggtttgtcaaagagacgcaggtgatgtgcgacatgtggatgatgcggtacgttggggttgagcgggaggagcatgaatggaaaaggattttcctagaggctgggttcagcgattacagaatcacgccgacagcgctgggtttccaatcggtcatcgaggtcttcccctgaggaagaagcatatatatatatatatatatatatatatatatgatcacgctgtgtaggatgtgtcatgtgtgccctgtgcgtaaggaaaaatatataccattattaataagttattaataagacagacatgatgatgagcgtatgggcaaatatacaggagatgcataagaatgagaaagatttaacgttgtactactgccgtttggattttcacgattacccctgtttacaaggagtagttgtatggatgcaaacattatttaccagtatgcaataaagaatggaacattttcgctct

SEQ ID NO: 89178 - DNA, 519 bp, Zea Mays
actaccaccactccaccagccgcctccactcgctctcccacacagaaaaccctagccgccgccaccgaagcggcctcccaggtaagcaggagcgtccatcccgccgccgccatgaagcgcaatccccgcgtcacgagctcctgccggaagtgccgcaaggcgcacttcacgtccccgtcctccgtccgccgcgttctcatgtccgtcgggctgtcgacggagctccgccacaagtacagcgtgctctccatcccgatccgcaaggacgacgaggtgcaggtcgtgcgcggcacctacaagggccgtgaggagaaggtggtgcaggtataccgccgccgctgggtcatccacgtcgagcggatcacccgcgagaaggtgaacggctccaccgtgaacatgggtatccacccctccaaggtgatcgtcaccaagctgaagctcgacaaggaccgtaaggtgctcctcgaccgcaaggctcagaataactagacctgctgcaagatggcaggccctcatctt

SEQ ID NO: 89179 - DNA, 94 bp, Zea Mays
ctcaggaagaaatgtgaagaagctgaggaacaacaggcgaggacacaaagggagttggaggagtacaagaagataacagagaagaacagcaagg

SEQ ID NO: 89180 - DNA, 1012 bp, Zea Mays
ccgagtcctctcgctaaaccctctctgtgaatttcgtgggtgggtcgttggctaccacgaccgcgtcccatccaaagagaaagaggcgctgcggaggaggatagtagcagctagccaatggcgaagggcgggctgggcaagctgcggtgcatgataaggaggtggcactcgtcgagccgcatcgcgcgcgcgccgccggcggccagccacggcgacgacgacgacggcgccgtcgtcgccgtctccagcggcggcggggcgtcgtcgttccacggcgcggacgaggtgcccaagggcctgcacccggtgtacgtgggcaagtcgcggcgccggtacctgatcgccgaggagctcgtgggccacccgctgttccggaccctcgtggaccgcagcggcgggggagcggcggcgggcaccgtggtggtcggctgcgaggtcgtgctgttcgagcacctgctgtggatgctggagaacgcggacccgccgccggagtccctcgacgagctcgtcgactactacgcgtgttgctgaagcgctgctcatcatagccgcggtaaacccgatgattctgcgcgtctcggtccctaggggtgtagaaggatcgtcgtggcggcggcggcgtcggtgctaatccaagaggccactgcagatttacttggatccgtcgctgttaatttgattgtgattgcttgtagtttaccaccgtctatgcattgcatgcagatgcagcccaaggccgccgctgctctttcgtctctccgtcgtctcgactggattccgttccatttcctctaatttcttcggtcggtcggtcggtcgtgtaacagacattttttgcattatttttttcattccattttatcgaattaataattacctcggtcgtgtgtaatagacattcccatctggaatttccttttgtctttaagattttctggagcctggacgacgtcggtgtccacaaatgtacatttcaatgcaaaaacttatattaattggttgctttaataat

SEQ ID NO: 89181 - DNA, 1337 bp, Zea Mays
atgcccgagaggacaatggacacgcacgcagagggagctgccggctgggacaccggacaccacaccattcacatatctcgcgacagcagaaaccacgtcgcgacgctgccacagcagcaggctatgatggtgctcatgagttccatcccagttctcaggccgcgaatgcggttccaaaatactccaagcaaacaggcagtttcgattgggcgaagcgcgtggaaaatccaccgcgccaggaaatcccagagcggcgtcggatcgtggcctcgtgcagcggcatccgcagcaggaataatgaatcgtcatgatctacgttgccgagcccgcagacaggaacgggggtgtaagccgatccgcgagaaaaatccaacctacaagacctacaaggccaagcgacatcccaatccgagcgtttcatcttgccctctgctctgtcccctcacaccttctcgccaggctcagtggtgacatcagctgaggtccggtagtttgcctctgcagccatgcctcaaatccagaacaccatgcggcaaaactgcacactcctagctgttctttgtggggagtttgctgagaagcggcagacaccagcttccctggcgccagacacaaagcggctgcggctgtcataccctttccctgagctcgcttcgtctgggagactggaggtgcacacgctaatcaatcccactttggagcaatttagagaggcacagcaggcggtgcatcctgtcttcttgtatcttcaggggcagcagcaagagaatgaggaggagattggcacgcttgtctggggtgatacagatttatctgacccgcagatgtttgtctcactcatcaccccaccatttccgaccatggtttatttagaggttcccactggggaaaagcttgcccagtcacttcattcaaaggggataccatatgtggtatattggaggaatctattttcatcttatacagcatctcattttcgtcatgcgttaatgtcagtcattcagagttcctgcagccatacatgggatgcatttcaacttgcacatgcctccttccgactatactgtgtaagaaataatcatgtacaaagtgttaagcttggcccctgcctacttggggatgctccaaaaacaaatgtcatccctgctggggatgaagtgaatgaggaacaaggttgttctgaaggttttccagatataagaatatatgatgaagatgtgagcatgaaatttcttctctgtggagtaccatgcaccctggatgcatgtttgttgggggcactagaagatggtttgaatgcgctcttgaatatcgaggagctacgacaaggaagttag

SEQ ID NO: 89182 - DNA, 1247 bp, Zea Mays
aggttttgaaacatcttgcgccagaaatctcctacagaagcttggttgcacttggaattgcttgggtaaatggtacaccagtgtcctcatttgataggcaggatgcagaccggcttcttttcttttgctctaaccagtgcggagatcaagctattcaaaatggctcatatgctcatgtatccagctggtcagcaccccttaccaaggatagaaccactggaagtctcgagtcaaaacagatgtcatttggtgcaaaaggagttgtaggggataatacgatctccctatcatcattgaaaccaaggctaaagcctgcaacaatgagaccccttcctcactctcgcaagcaacaaatgcatccctttatggggtttcctcagtccatcattcacgatgctagtcaagttaagcctagcttgccagcccctcctgtgaagcacaacgcagtacctgttaccgcagtgacaccgagaaaatcatcatctgggtcaccatcatcctggtcacgtgttcagctaccaatcccattgaatcctctgccaataaagaaacatgagtgcaatcggttgcctatccacagttgctctgaagaagacttcttgaaagatgtcatgcagtttctacttcagaggggccacatccgacttgtacctcagggaggactggcagaatttcctgacgcagtgttaaattcaaagcgtcttgatttatataacttatacaaagaggtggtataccgaggtggcttttatgtaggcaatggcataaattggaaaggtcaaatcttttcaaagatgcacaaccatacagttacaaacaaaatgacgggtgttgggaacaccctaaaaaggcattatgagacgtacttgcttgaatatgaacttgcacatgacgatattgatggggaatgttgcttgatttgccacagtggtgctctgggtgactgggtgaactgtggattatgtggagaatgggcccaccttggctgcgatagacggaaagggctgtctactttcaaggactactcgaaggcggatgggatggaatacatatgtccccagtgtagccttgcgaaatacaaaccgccgttgcctgcaccatgaaatatgttgattaacttctgttactttcttaagggtgatggtttggatagaaattagtggctaaggatgtgtagtgttgacctgtactattgaatatgatcctgtacgatttgtacaatttttataaaatttctgatttccgaa

SEQ ID NO: 89183 - DNA, 677 bp, Zea Mays
tcccattaaaataaaaaactatcacatttctaggtaaaagaaattcaatgtgaaaattcttgaggtgctgttaccacccagaaaatattgccatttttttaaaaaatggtgacgctgaaatgttttggctgacaaattatctgattgtcatcgttcaggtggtataccgaggtggcttttatgtaggcaatggcataaattggaaaggtcaaatcttttcaaagatgcacaaccatacagttacaaacaaaatgacgggtgttgggaacaccctaaaaaggcattatgagacgtacttgcttgaatatgaacttgcacatgacgatattgatggggaatgttgcttgatttgccacagtggtgctctgggtgactgggtgaactgtggattatgtggagaatgggcccaccttggctgcgatagacggaaagggctgtctactttcaaggactactcgaaggcggatgggatggaatacatatgtccccagtgtagccttgcgaaatacaaaccgccgttgcctgcaccatgaaatatgttgattaacttctgttactttcttaagggtgatggtttggatagaaattagtggctaaggatgtgtagtgttgacctgtactattgaatatgatcctgtacgatttgtacaatttttataaaatttctgatttccgaa

SEQ ID NO: 89184 - DNA, 230 bp, Zea Mays
gttcaaccagcgcgcccaaccaggctgtcgggtgcgccacctgccccacgtctgttagcgcaaaaaaaggaatgcatgcatgagtcaaacacgatccaatgcatgcgcataaatttaggaaagatatgtgcgacaatttctatttttaaatcctttatttcctccataaatttaggatcgctgcaacagccatgcagctagacgcgtaaggaccattttatgatatatac

SEQ ID NO: 89185 - DNA, 1995 bp, Zea Mays
agggcagagggagagaagaaagaggaaggggaaaaaccgtcgaccatgtcgacggccttctccgacttcggtcctctcacggagcggcggcgtatcgagaggcagcggcagcagcgtaggcgcgtcatgctggccgccggcgcagcgtcggtcatacttatccttattgtcatgggcggcgctgccgtcgcgtacaacgctagcatcgaggatgactcgtcctcgtcttcctcttccccgtcgggtggtggctcgggttccgggtcgaaccttatcagcgcgtccaagagcgtcaaaatgatgtgcgcacagaccgactacagggatgcctgcgagaagagcctgtccaaggcggccgcgaatgccagcgcgtcatcgcccgaggacatcgtccgagccgccgtggcggtgatcggcgacgccctcgggaacgcgtttaaccggtcggaggtgatcaagagcgacgatccgcgcgtgaagggcgccgtcgcggactgcagggagatctaccacaacgccaaggacgacctcgcgcgcacgctccacggcatcgatgccggcggcatggcaggggtcaccaagcgcggctaccagctccgcatcttgctcagcgcggtgatcacgcacatggagacgtgcatcgacggtttccccgacgggcacctcaagaagcagatgactggcacgatggagtccgggaaggagctgaccagcaacgcgctggccatcatcgagaaggcctcatcggtcctggtcgcgctccaaattccggggttcacccatcggaggttacttggcaacgacgaagaaggaaacaaggagaatgaacccaaagtacaacactcgggtacgttgctgggcgagcgcgacgacgacgtcccggcagccgacagccggaggctactcagcattgaggaaggcaccccacagtgggtgaacggaccagagaggcggctgctcaaaggcaacttccaggccaaactcaagcccaacgtggtggtggccaaggacggcagcggcaagttcaagaccatcaacgacgcgctcggtgccatgcccaagcagtacacgggaaggtacctgatctacgtgaagcaaggggtgtacgaggagtacgtgacgatcaccagggcgatggagaacgtgaccatgtacggcgacggagccatgaagaccgtcatcagcggcagcaggaacttcgtcgacggcctcaccacctacaaaaccgcaaccttcaacgcgcaaggcgacggcttcatcggcatcgccctggggttccgcaacacggccggcgcggccaagcaccaggcggtggcgctgctggtgcagtcggacaggtccatcttcctcaactgccgcatggacgcgtaccaggacacgctgtacgcgcactccaaggcgcagttctaccgcaactgcgtcatctccgggaccatcgacttcatcttcggcgacgcggccgccgtgttccagaactgcatcctggtcctccgccggcccatggacaaccagcagaacatcgccacggcgcagggccgcgcggacgggcgcgagagcacgggcttcgtcttccagtactgccgcttcaccgccgagacggggctcaaggacgcgtcccgcccgcccatccggagctacctcgcccgcccctggcgcgagttctcgcgcacgctcatcatggagtccgacatccccgcgttcatcgacaaggccgggtacctgccgtggaatggcgacttcgggctcaagacgctgtggtacgccgagtacgccaaccgggggcccggcgccgacaccgccggccgcgtcacatggcccggctacaagaaggtgatcagcaaggaggaggccgaaaagttcaccgtgcagaacttcttgcacgccgagccgtggctcaagcccaccgggacacctgtcaagtacggcttctgggcgtgagcacatattcttgtggagaccagaggatgtcgatgaagcagaggaagtcatctatgc

SEQ ID NO: 89186 - DNA, 330 bp, Zea Mays
atttgtttggttacattctccaaacaagcctaccatttaatggatggcaaccagatagcgagactcctggcacagcatctctgtacgtacagaaggtgtttcaaagcaggttctgcactgccgcaaattatactgcaggtcctctttgtcagtccagcacgacagcttcacaaagatgcaactttggcagagcagcagtctcattccaaaccttatttagcagacacacttgccttttctttttccttttccagtttctttttctcagcctcagcgtttcgagcattttcatcacgtgattttttgaacatattcacgaaaataactaaa

SEQ ID NO: 89187 - DNA, 1008 bp, Zea Mays
attcagtccagcacaaagaccaaggagcagcaacattatgtggatacgcaatgggcattgtggttttatgagtgtggaataccattcaatgcagcagcatcaagtcagtttcaagtggcaattgaagcaacagcgcagtttggttcaggttacaagcctcctccgccatatcagtttggggagccattgctcaaggatgtcgtacagcagacaagtaaaattaggaaggagcatgagaaggcatggaaacactatgcctgcacactcatgtcagatggatggtccgataggagggggcgacatctgattaacttccttgtgaacagcctagagggggcttatttcttggagtctgtcgacgcatcaagtgaggtacacgatgcatgtatgcttgctgatttgttggagcaaaaggttaatgagattggaacggacaaggttgtacaagttgtcaccgataatggagctaactacaaagcagcgggtaagcttctaatgaagaggattcctacagtgttttggagcccatgtgcagcacattgcttggatcttatgctagaagacataggagatttgaaggcatttaagaagccaattgcacgtgcaaggtgtgtcacaactttcatctatagacatggaagaattcttggtgcaatgagggagaagacaggtggggctgatcttgtgaaacctgcagcgactcgatttgccacaactttcctcactttgagaagtctgtacaagcatagggatgctttgaaatctctatttcttagtgaagcatggactaggaacagactagcacaaacaaaagctggtgaggaggtgcataacattgtgctatctaccaagttttgaaatgaggttgaagattgcctaagagcttcagccccatttcttattgttcttagggtagttgatggtgatgagaagcccgcaatgtcagaggttgcagcacttatgaatcatgcaaaagagaagatcaagcttagctttgcaatccaaacc

SEQ ID NO: 89188 - DNA, 153 bp, Zea Mays
catataagtggaggcatggccttcactctagggaatgagagggacctaaccagcagggaaaagtgtcactacaatacaaagaatagaacaacccaaaagacaagcatatgtcctaccaccatagcccatatttacaggcatgtaacggtgagt

SEQ ID NO: 89189 - DNA, 1806 bp, Zea Mays
accactccccagcagttggaaacctgccatatacatccatccttcacatagctccgatccaggtccagctccaccaacccggaagcagcaagcctcttgtctcctgcacgtaactccagcctccagcgccacacgtacacctccgccggatcggaagaagatggtgtcgcctacggagccgcaggccgagacgacggtgttccgctcgacgcttccggacatcgccatcccggaccacctcccgctccacgactacgtcctggagcgcctggcggagcgccgcgaccgcgcgtgcctcatcgacggcgccacgggcgagacgctcacgttcggcgacgtggaccgcctgtcacgccgcgtcgcggccgggatgcgcgcctgcctcggcgtccgcagcgggggcacggtgatgctgcttctcccaaactccgtggagttcgcactcgcgttcctcgcgtgctcccgcctcggcgccgccgccaccacggccaacccgctccacaccccgcccgagatcgccaagcaggcggcggcctccggcgccaccgtcgtcatcaccgagccggctttcgtcggcaaggtgcggggtcttgccggcgtcgccgtcgtcgccaccggcgacggcgcagagggctgtgtctcgttctccgacctcgcctcctccgccgacgatggctcggcggcgctgcctgaggcggcggcggcggccacggccatcgacgtggcgaacgacgtggtcgcgctgccgtactcgtccggcacgacggggctgcccaagggggtgatgctgtcgcaccgtgggctggtgaccagcgtggcgcagctcgtcgacggcgacaacccgaacctctacttccgggaggacgacgtcgtcctctgcgtgctgcccatgttccacgtgtactcgctgcactccatcctgctgtgcgggatccgcgcccatgggcaaggagctgcaggacctgctgcgcgccaagctccctcgcgccgtgctcggacagggttatgggatgacagaggcaggcccggtgctctcgatgtgcatggcgtttgccaaggagccgttgccggtgaagtccggtgcctgcggcacggtggtgaggaatgccgagctaaagatcatcgacccggagaccgggctgtccctccaccgcaaccagcccggggagatttgcatcaggggcaagcagttgatgaaagggtacctcaacaacccggaggcaacggcgaagaccatcgactcggaggggtggctgcacaccggagacattgggtacgtcgacgacggcgacgagatcttcatcgtcgatcggctcaaggagctcatcaagtacaaggggttccaagtcgctccggcggagctcgaggccatgctcatcgcccaccccagcatcgccgacgccgccgtcgtccaaatgaaggatgactcctgcggcgagatcccggtggcgttcgtcgtggcgtccggcggctccgggatcaccgaggacgagatcaagcagtacgtggcgaaacaggtggtgttctacaagaggctgcacaagatcttcttcgtggaggccatccccaaggcgccatccggcaagattttaaggaaggatctgagagcaaagctggcgtctggattctccaacgggtcatcgtgttgatgcccctgagttctttctatgcgaaaacgaccccgattttagtaaattttttttatgctgaacaagctaaaaaagatatatatacagaaaacggtgtaaacaagaagcagtcaaccatgtacaagacatgttatctagataaatgaaagttcaggtt

SEQ ID NO: 89190 - DNA, 1797 bp, Zea Mays
gttggaaacctgccatatacatccatccttcacatagctccgatccaggtccagctccaccaacccggaagcagcaagcctcttgtctcctgcacgtaactccagcctccagcgccacacgtacacctccgccggatcggaagaagatggtgtcgcctacggagccgcaggccgagacgacggtgttccgctcgacgcttccggacatcgccatcccggaccacctcccgctccacgactacgtcctggagcgcctggcggagcgccgcgaccgcgcgtgcctcatcgacggcgccacgggcgagacgctcacgttcggcgacgtggaccgcctgtcacgccgcgtcgcggccgggatgcgcgcctgcctcggcgtccgcagcgggggcacggtgatgctgcttctcccaaactccgtggagttcgcactcgcgttcctcgcgtgctcccgcctcggcgccgccgccaccacggccaacccgctccacaccccgcccgagatcgccaagcaggcggcggcctccggcgccaccgtcgtcatcaccgagccggctttcgtcggcaaggtgcggggtcttgccggcgtcgccgtcgtcgccaccggcgacggcgcagagggctgtgtctcgttctccgacctcgcctcctccgccgacgatggctcggcggcgctgcctgaggcggcggcggcggccacggccatcgacgtggcgaacgacgtggtcgcgctgccgtactcgtccggcacgacggggctgcccaagggggtgatgctgtcgcaccgtgggctggtgaccagcgtggcgcagctcgtcgacggcgacaacccgaacctctacttccgggaggacgacgtcgtcctctgcgtgctgcccatgttccacgtgtactcgctgcactccatcctgctgtgcgggatgcgcgcccatgggcaaggagctgcaggacctgctgcgcgccaagctccctcgcgccgtgctcggacagggttatgggatgacagaggcaggcccggtgctctcgatgtgcatggcgtttgccaaggagccgttgccggtgaagtccggtgcctgcggcacggtggtgaggaatgccgagctaaagatcatcgacccggagaccgggctgtccctccaccgcaaccagcccggggagatttgcatcaggggcaagcagttgatgaaagggtacctcaacaacccggaggcaacggcgaagaccatcgactcggaggggtggctgcacaccggagacattgggtacgtcgacgacggcgacgagatcttcatcgtcgatcggctcaaggagctcatcaagtacaaggggttccaagtcgctccggcggagctcgaggccatgctcatcgcccaccccagcatcgccgacgccgccgtcgtccaaatgaaggatgactcctgcggcgagatcccggtggcgttcgtcgtggcgtccggcggctccgggatcaccgaggacgagatcaagcagtacgtggcgaaacaggtggtgttctacaagaggctgcacaagatcttcttcgtggaggccatccccaaggcgccatccggcaagattttaaggaaggatctgagagcaaagctggcgtctggattctccaacgggtcatcgtgttgatgcccctgagttctttctatgcgaaaacgaccccgattttagtaaattttttttatgctgaacaagctaaaaaagatatatatacagaaaacggtgtaaacaagaagcagtcaaccatgtacaagacatgttatctagataaatgaaagttcaggtttgagt

SEQ ID NO: 89191 - DNA, 205 bp, Zea Mays
cccccctctaggcgctctcaaaaagccacggccaccgcgtccacggccgccatccctaccaccgcgtcggccatcgaatctgccgccaccatccctgccccagatctttcaccaaatctaccaccaccacgtcggccaccagaacggtcaccaaatctcccaccagaacggccaccagatctaccaccaccacgctggtcgtcgc

SEQ ID NO: 89192 - DNA, 845 bp, Zea Mays
gccagggggacctggagagatctgaattcccagcacactcctgcccgctcctccccgccgatggagatccccaccgctgtcatccaccgcctccagtccgctctccgtgaggccaccttcgccccttctgtagaagatgcacccgcccctcccttcccctccgtcgccgatgccgtcgcagccttcgactcgtgtgccgcctccgtgtcggcggagctccgatgcgtgcgctgcggggcctcgggagggctcctgcgcggtgtgcggtctgccctctgcacctactgcgggtgccccaggcgcggggaggaggctgaaggcggtggaagcggcggcgtcgccttccgtgacggcgtggcctaccagtggctgctcggctcgcttggactcgacggatccgtgagctttccttcccacattatttgacgctaagaatctgtagatttgattcttgttgcttaggatctgttagctcttctttctagcaaagctgagccagcattcgggaaagaagatgatgttattctcctggagatcttctaatacaactgtttgtggaattgctatcgctttttttacttattacgcagtgctattcctaggaaagtgcccagtagttagagaaatgtcggttgccaacgggtctgtatgaatagtataccttgtttggaaattttgatttgctcagaattcaagagccatgaaagaaatattctgctagggttttgagttgtgaggcatgcacaatacaaaataaggaattataatgaggctgtagacatgctacattaaccagagctagtgaaatttggattttgataaaaagggcataaactgcaaataag

SEQ ID NO: 89193 - DNA, 3177 bp, Zea Mays
gccagggggacctggagagatctgaattcccagcacactcctgcccgctcctccccgccgatggagatccccaccgctgtcatccaccgcctccagtccgctctccgtgaggccaccttcgccccttctgtagaagatgcacccgcccctcccttcccctccgtcgccgatgccgtcgcagccttcgactcgtgtgccgcctccgtgtcggcggagctccgatgcgtgcgctgcggggcctcgggagggctcctgcgcggtgtgcggtctgccctctgcacctactgcgggtgccccaggcgcggggaggaggctgaaggcggtggaagcggcggcgtcgccttccgtgacggcgtggcctaccagtggctgctcggctcgcttggactcgacggatccgagattgtagaattcgatactgacactacagcttcgaataaaagcaaggatgtaccaccaccaaacagtgggatgatcatatctgatctactggacttaaaaatcacatgcctccctgaaaataaggaaacatctccaagttccataacaaaggagcaatcatcttctgtggatacactaaatttatctgctgctaacttagattcatttttcattgaaagaaaagaagagatgacttctgcttctcttccacaaactcattttttggagcaggaaaataaaagaacagatagcaaaagccatgaatctagattggaagtgcatgctgcacctaaaagcttaattagttctcaaagaacaaatcagattgaagctactccagcatttgcaagttgggatgctgattttcagtctgctagttcagaaaatgctgccaaaaactccaagcaacctgatctatttaagagcacttctgtggccgagtcttttagtttcccagcttcagagattgccatcaaacctgtagtaagtactgaaagtaaaacaaatacgagaagtgccatcctagaacatcactcagaagttttggcttcagcaagtagcacattatttggtgatgacctttctgatcaaaaggttgtccaccatatctttgagagcagcaacgctcctgggttcactgaatcctctctccccatggattttgctaaaagtgatcagttacatggaagggacgatgatggattcaatgatgatgaagcttttgatgaatggcaagaatttacaacaagtggcaatcaaggcagcctatcaaatgcggaacatattgaggaacctttaaagagagatttgtctgagaatgatgtaatagatcccttgcgagtaggcagcaaggaatcacccaacaatgttattgaaaaatcctctaatgaatggcaaggttttgcttctgtgtctggtcaaggaagagattttgtgacatctgtggaacgatcaacaagtgaccacagactaaatttggtgggaccagttggagatgaagagacaatgagcagcatctcacaccaacattcttcagaaattaatcctgttgatgtatggcatgtgggcaatgtgaaggctcaaaatactgcagaaatggttaaggaaaaaaatgattcttttgacgattggcaagattctactaccaccggtcaagtccaggacacttcgttgaatcaaactggggacatgatggaggtctcaaaagccagtcacaaagaaacagacatggactcatggttcattggacattctagggagccagcaaatacgggtaccatgaatgcaaataacatgttggacgattggcaaggtttcactggttcagatcaagcacagcaaaattcatctagcactggtgcagaaatgataagtgtgccatttgagcagcatggtggaactgtttctgccccatcatgggcaaatggcagcagtaatgatgccgcaaaaacatcctcaacaagtatagaaagcgacccatttgatgtttggcaaaattttactaaatcaggtcacctgcaagaaaatatgtctagtcttgggagagaaccgagtagtctgtcgcctgaaccagctaaaggaaatgattccttggatttgtggattaccagcaacttcaaggaatctaaaagcaatgatgttgggagaactaatgcctcatctgatggatggcaggattttgccagttttgatcaagctcagagaattactaaagttcatgtggaaggacatgttgtaaaagatccttcaggggctgaaactttggacttatgggcctcaagtcatgttaatgaaaagaaccttgaacagataagtgaacataatgatctattcgatgactggcaggatttccaaaactccaatccacagcaaacaaccttacaagtttcttcagatgcttcattatttgatataaccttggcatcaaggcctgatgcttttggagagcaggaaattgggagtgttttgcaggtagcttcatccgaaaactcaaaggataaaaaggagggttctaatgaatcaaaagcatttccatctgatgaccacttgaaaagcacaagtggaatgcagcagatgggtgatgttgattcgctgtcttcattatggccagctaataaaccagagcctgcaaatacaaatgtggaacagttgcttgctcagatgcacgatctgtcctttatgctcaaggatgaactttctgtccctgataaacccatcgatcattcaaaaccctgaagtgacaacatcaaaaattgtgctctgttactatcagccaaggaagattgttgttgcaagtccaaccttttgggtgctggacgaattgcaacgaatatcccttgagtggaaaatgcaagtcaagtcacagaaaaccctgttgttccaacagtgccttttatcagagtattggtcagcagaggattgtatttgttttctctgttgcttcgttgcattgatcgtcagagactcagagtcgggttggttccttgactgtccctgagtgaggctgaaaaccacgttttatgtctgcctcttacatgtatgtaccattttgcggtctgtattttgtagagtcgaactgagctcaccaatcaatgaattccatttcatcagattatttaagctatataatataagttcgtccttggtactaggctgccttgtttgtaacatcttattacaatgtcttgtttgcagcagatgatgttggcttccagtaattctatagtactacatcat

SEQ ID NO: 89194 - DNA, 924 bp, Zea Mays
atgaaggggagatggtcagggccccaaaagcctgatccatcatactataacctgcatgccttcttctcatcttacgcaagtctttctgcattctatggtgaaagaggatcagcccccatcgatggctccgacaacattcccgaggcatttccaccccatcaatgtcatgcctcaggagtgatcgcagccctcgtggcccatgtcaatgtccccactatcgatgatttggagtttgtgggaatggtcgaaggcggcatagaccttttctttaacgccctctgctcagacctaggctccccaacgagcggtgagagcaaacacccagcgacggggataataaagggtgctcaacgaaacacatcactgcaccccgcctccctcccgcgggaccctcgatgggaaggggacccaggacaacgtaacccgaggcccccacaaccgaacccccaaattgacgatgatgaaaaaattacagtgattgactttccgcagatggtgtctgtttctcaccgtaatgcccaaatgttttttgaccgagacattgaatgcatctacaagttctttaacaaaagattcaatctgaggtcagtgaaaaatgaagaacaagctggatttgaaaatgatgatgaaggaaacagcagaccttcctttttgtccgtggaaaagggtgctggttccttggacaaggaactagctgccagtggatttaccaggaaagagcaagtggatatggagaagtacaccgaggaagttgttgaagggcatgattccagttcagatgatgaggttggtgatgttgtgcctttggtttccttgaagatagaccaagacagttccgatgagcctgattgtgatcttacccaagtgattcagaggcgcctggaactttttctgaagaggttagttgtcttcccatcagaatga

SEQ ID NO: 89195 - DNA, 1765 bp, Zea Mays
ctagtcccgtagcttctctccctcctcgctcctcggctcctcgcttgtcgctcctcctcagccctcaccgcgttccccgagcacctcgtcatcatggtcaatggcctcgtcgggagcgcggacgattggaagttcgcggcagagcagtttgtgaggcggatgccggacaaggtgatcgtgcaccgaagtcagtgcaactctgccactcagacatttgatggtgttgatttaatgggtgaaaggttagcaaatgaggttctatcagttgtagagcaaagacgaggtgtgaagaaaatctcgtttgtggcacattctcttggtggccttgttgccagatatgctataggaaggctctatgaacctaatagtagaaggaaatcttctgggggggagagcagagatgatgttgtgcacttgaatggtcacattgctggtttagaacctatgaatttcataacatttgcatcaccacatttgggttcaagtggaaacaaacagattcttccaccagctaccttttttatgtggccttcctttccttgagcgaagagcttcagaagctgcgcatttgattgttgggagaactggaaagcatttattccttacagacaatgatgatggtagacgcccacttctccttcgaatggttgatgactctgatgatttacagttcagatcggcgttgcgttctttcaaacggcgcgtagcatatgctaatgctaattttgaccatatggttggatggagaacatcatcaatccgacgtcagcatgagttgccaaaacatcgtcttcttgttcgtgatgaaaagtatccacatattgtttatgttgaaaaggaagttacagacaacaatgaaacgaaggcccatgctgatcattatgatccagaagaggagatgataagaggccttacgcaagttccgtgggaacgtgttgatgtgagcttccagaaaagcacccaaagattagttgcgcataacacaattcagaataatcgactattcggccaatgtcaggtgaaaagctattggctaaactcggatggagcagacgtgatcaaccacatgatggacaatttcatcgtctagtccatggaggcatgaagcctacgttgtgtcgatggaggttcagtctacgctgtgggtttgacgaatgtccgtcgaaatttgttgatcagtgaccattcaattttgcctcggccaatttttccttctaggttgcagtttcccatcccaggaaatgtggttgattctttaggcccgtttgctgcaggcgcagagcagagccccgccctcgatgcttatcatcctgcaccatcagcaaggctagttcgttcaactgtatcataatctgtcccctcctttgtatacttgtattccgcaactaagctagtaaatagatgttgctggaaatagaattcttctatctggttcaattggagttgaagttcgaactgaaacttgccatattcttgtgatccatcgacgtgcttattgggcacggtacggtacttcaatcaagctgtttttttaggaacttgaagtttttttttttgggaattgtatggataacaggatcgctcttcagagagctcctgtcgttcttaaagagaagctatattctatgttgaaagtaattcttgcgattttttttttgtttttgaaaatgtattcttgcgatttcaatagactctaggtataacgtgattgtggcgtgtggcgtggagcgaatgaggagcgttttttcagctcgtagtcttctaa

SEQ ID NO: 89196 - DNA, 2212 bp, Zea Mays
ggacctgtcatcgttctctcccccagcctattgcctcgtttccatggcggccaccgcctccaacccgttcccgttcccctcccgtcgctcgccggaagatagcctcttctacgccgtctacccgatactactccccagccaccttcccgcgcccgcactccacgcctcgctccagtccctccacctctccctcctctcgcacctcgcccccttcctatcctcccatctcttccaccgggatcccttcacgctcaccctcccggcggacccggccgccccctgcgcgctttgcgcctcgccgcccgtgccccacctccacggcgcgctccgtttcggcgactccctccccgacgaatggatcgccgtttccctcctcttcgcgctcacccgcgccttccccgacatcgcggcccgcgcctgggactccgacggggagttcctcctcatcgaggccgccttcgcgctcccacggtggctcgacccggaatccgcccccaatcgcgtcttcatcttccgcggggagctccacatcctgccgccctccctcttccccgagacgccgtccctggaagccgcccttgccgccatctacgacgattccatcgacacccgcgctgccgacgccatccaggcagccatacagcgccgtatcgctgggctgcccgagaaggcggcggagaacctacacacagcacgcgttatcgtcccggcgcccgtggcaaaggtgctcaaggaggagccatgcctgatcgcgcgtgccatcgagggtttctacgaccgggacattgacaccatgaaacatgcggcgaggatggaaaaattcctcaaagggcctggtggggaagggattgagatagtgagaaccacagtacgcatgacgcgggcaatgtacgcacagcttgtgcagcagaactttcaggctcccagggggtacccgatgcctaggagggaggaggggccagagaaatggatggaggcagagctggggatgaagattgcctgtgggttcgagatgatgtatcaggagaggaaacggcagggcgaggaaggtaaatgtagcacgtgggatgtttacaggaagagtttggaggcaactgggtgcttggacgggctgtatcctgggtcaattgagtataagagggtcattgaagatgcaatgcaatattacaagagctctaatttgtattcccgaacaagggagatactgagtgaaccagtgcggcgaattgatgaaatcctatcaatgctgtactcaactgatgaatttaaaggcactgatcttcctcctagtgataatgactcttggttgtatggtggggatgatgagttaaatgcggaactctgtgaaaggcagaaagaactggaagagcatgaagctgcgaagaagcaaagaagtcaaaagcaaagtgtccctagcagttcaaaatcccagacagacaagtttaagcttggagagattacagagtccatgcaagaattcattcgcaaaatgtccagctttgagggagccgagattcctgcagacaggagagatactgaatcagtggacctagatgtcaaccagttcttcaaggccataaaatcagttttaggtggaggttcacaagagcaagctgacagtgatgatggatttgatagaaaatcctcattgtcggacatggactttgatgattctgatgaagacgacgattttgctgaagaattaggtgacaaggatgcagatgattcttttatggaatcatattcagatgctttaaataaagagctaagcagtaccactcttgagaaaagctttgctcatgcaccacgaccggaaactaacaatgagggtccatcagatgatgcagctactggtgcagagatgactccagttgatgtagatctgaaccttgtcgagagtattctgaactcgtactcctcgcaacaaggtcttcccggtccggcttccagtctgctaggactcatgggcataaaggtccctccagatgtcaaaaagatgtgatttttgtattctagtgtacacgtgacatcttgtgaagctgggatatataggaaaaacttatcttccgttccatacctgggcggtatttgttgtgatagtacagggttgttttcttgcttttaagcaattacatttaggtcggaatattttggggtccatatgttaggtttggttggcaattaaatttaggcaggaatattttggcctacc

SEQ ID NO: 89197 - DNA, 107 bp, Zea Mays
atttttttattttacaaaaaatcatatatataatttatattcaatattataaacgtctgagcataatgttctacttgttagatagcttcgcctagtgtcttatacac

SEQ ID NO: 89198 - DNA, 2378 bp, Zea Mays
acactacatcccacctacctcctcgcatcaggcaggcgggcctcgcgtttataagccacccttcctctcctccacggccctcgccctgcaaagcacagacacaaaccacgagcgcgaggcacgacctacatcgaatcggccacgaaccaccatggcggcctcacgcgcgctcctccccagcccgcaggtgagccctgcgagcgcgcgggtccgcctggccgcggccgtgccgtcgtcgctcacgctcgcggcgcgcggcggggccggggccggcgcgcgtctccgcgtgcggtgcgcgatcttgtcgtcgcccgcgcccgtggcgcccaccgagtcgaggccggtgcgccggatctcgccgtccgcgccggacggcgcgctgcggcccaagccggcggtgctggtcgccgagaagctgagcgaggccgggctggccgtgctgcggcagttcgcggacgtggagtgcgcctacggcatgtcccccgcggagctcctcgccaaggcggcgcagttcgacgcgctcatcgtgcgcagcggcaccaaggtgacgcgggaggtgctggaggccgggcagggccggctgcgggtggtgggccgcgcgggcgtcgggatcgacaacgtcgacctccaggccgccaccgaggtcgggtgcctcgtcgtcaacgcgcccaccgccaacactatcgccgcggccgagcacggcatcgcgctgctcgcctccatggcgcgcaacgtctcgcaggcggacgcggcgctcaaggccggtaaatggcaaaggaacaagtacgtgggggtttctctggtgggaaagaccctggccgtcatgggcttcgggaaggttgggtcagaggtagcgaggcgagcgaaagggcttgggatgcacgtgatagctcatgatccctacgcccctgccgaccgggcccgggccctcggggtagagctggtttctttcgacgaggccatcgcaagagccgacttcatctccctccacatgccgctgataccgacgacgtccaagatcttcaacgacgagtcctttgcaaagatgaagactggtgtccggatcatcaacgtggctaggggtggagtgatcgacgaagacgctctggtcagggcgcttgactccggcaaagttgctcaggcggctcttgatgtcttcaccgtggagcccccgcccaaggacagcaagctggtgttgcatgagaatgtcactgtaacaccccaccttggagctagtactgtcgaggctcaggaaggcgtcgctatcgagattgcggaagccgtggttggtgcgctgagaggggagctcgcagcaaccgctgtgaatgcgcccatggtcccagctgagatcctgtcagagctggctccatacgtttctctggccgagaagctcgggaggctggcggtgcagctcgtggccggcgagagcggcatcaagggcgtgaaggtggtgtacaccacagcgcgtggccccgacgacctggacactcggctcctccgcgcgatggtgaccaagggcctggtggagccggtgtccagcacgttcgtgaacctggtgaacgcggactacacggccaagcagcgcggcctccgcctcacggaggagcgcgtggcgcacgacagccccgcggcggaggcgccgctggagtccgtccaggttcgcctctcgcacgtgcagtccaagttcgcgggtgccatcagcgacggcggggacgacatcgtcctggagggccgggtcaagtacggcgtgcctcacctcaccctcgtggggccctacgaggtggacgtcagcctggagggcaacctgatcctgtgccgccagatcgaccagcccgggatgatcggcaaggtcggcaacatactcggcgacacgaacgtgaacatcaacttcatgagcgtcggacggacgttcaggggcaagcaggcgatcatggccattggcgttgacgaggagcccgacaaggacacgctggagaagatcggggccatcccggcgatcgaggagttcgttttcctcgaactatgatggctagcagcgagttttctctaggattgatatttgttatagtacgtactgaactggggtttgacgtctcatgtcatggccacagggaggaacctgatccgctctggtctgtctgtctgtctgtctgtttggtgacctctacattttttatgcggggagaaggaagcaatatatattgtaaaaggtgggtgccttggcttgcccccctgcctaaataagaggtgtgtgccgtttgtttatctgtaaactgtgtatgtgtatgtgcttaatgcgtgattctaattaagcacatcatcattgcgtctgaaatgaagacgggatgtgtactgtgtggggcaacaaattgtggtac

SEQ ID NO: 89199 - DNA, 2018 bp, Zea Mays
cacagacacaaaccacgagcgcgaggcacgacctacatcgaatcggccacgaaccaccatggcggcctcacgcgcgctcctccccagcccgcaggtgagccctgcgagcgcgcgggtccgcctggccgcggccgtgccgtcgtcgctcacgctcgcggcgcgcggcggggccggggccggcgcgcgtctccgcgtgcggtgcgcgatcttgtcgtcgcccgcgcccgtggcgcccaccgagtcgaggccggtgcgccggatctcgccgtccgcgccggacggcgcgctgcggcccaagccggcggtgctggtcgccgagaagctgagcgaggccgggctggccgtgctgcggcagttcgcggacgtggagtgcgcctacggcatgtcccccgcggagctcctcgccaaggcggcgcagttcgacgcgctcatcgtgcgcagcggcaccaaggtgacgcgggaggtgctggaggccgggcagggccggctgcgggtggtgggccgcgcgggcgtcgggatcgacaacgtcgacctccaggccgccaccgaggccatcgcaagagccgacttcatctccctccacatgccgctgataccgacgacgtccaagatcttcaacgacgagtcctttgcaaagatgaagactggtgtccggatcatcaacgtggctaggggtggagtgatcgacgaagacgctctggtcagggcgcttgactccggcaaagttgctcaggcggctcttgatgtcttcaccgtggagcccccgcccaaggacagcaagctggtgttgcatgagaatgtcactgtaacaccccaccttggagctagtactgtcgaggctcaggaaggcgtcgctatcgagattgcggaagccgtggttggtgcgctgagaggggagctcgcagcaaccgctgtgaatgcgcccatggtcccagctgagatcctgtcagagctggctccatacgtttctctggccgagaagctcgggaggctggcggtgcagctcgtggccggcgagagcggcatcaagggcgtgaaggtggtgtacaccacagcgcgtggccccgacgacctggacactcggctcctccgcgcgatggtgaccaagggcctggtggagccggtgtccagcacgttcgtgaacctggtgaacgcggactacacggccaagcagcgcggcctccgcctcacggaggagcgcgtggcgcacgacagccccgcggcggaggcgccgctggagtccgtccaggttcgcctctcgcacgtgcagtccaagttcgcgggtgccatcagcgacggcggggacgacatcgtcctggagggccgggtcaagtacggcgtgcctcacctcaccctcgtggggccctacgaggtggacgtcagcctggagggcaacctgatcctgtgccgccagatcgaccagcccgggatgatcggcaaggtcggcaacatactcggcgacacgaacgtgaacatcaacttcatgagcgtcggacggacgttcaggggcaagcaggcgatcatggccattggcgttgacgaggagcccgacaaggacacgctggagaagatcggggccatcccggcgatcgaggagttcgttttcctcgaactatgatggctagcagcgagttttctctaggattgatatttgttatagtacgtactgaactggggtttgacgtctcatgtcatggccacagggaggaacctgatccgctctggtctgtctgtctgtctgtctgtttggtgacctctacattttttatgcggggagaaggaagcaatatatattgtaaaaggtgggtgccttggcttgcccccctgcctaaataagaggtgtgtgccgtttgtttatctgtaaactgtgtatgtgtatgtgcttaatgcgtgattctaattaagcacatcatcattgcgtctgaaatgaagacgggatgtgtactgtgtggggcaacaaattgtggtactgtttgttcaactcgaaaaaaaacaggtcaccccaaaaaagaaagaaa

SEQ ID NO: 89200 - DNA, 330 bp, Zea Mays
atggacccccagccggtggcagtggggccgcggctccctgacctcgacgcgcggtggtggcggttcctcgatccggagtggcggcgactccccaatccagagggcgagcgacggcggtgcccttgtgtgggcaagcggcggcgtccccgtggttccgaggcggcggcccttccaaggccggcgagcaagcggcgcccctcgacgtgcgaggagcgacggcgacgcacgagacgcgaggttcgagcggcgttacggaaggcgcgagcagcgacaatcgcgcatgacatcctccgatccgggcattcgacgcagttcgggcggctcgattga

SEQ ID NO: 89201 - DNA, 829 bp, Zea Mays
gctccgcagaataaaattcagaaatcctactgccagtacgcgctgctgctggattgcaatcccggtttcccttccctcgacttggacaacgaccggctgccgctgctggcagaggctggccgcgcatccgtcagctccttcacgacggcagtcatggagggcctttggctcacctccctggccgcgcaccggagcgccaccgacaggaccttacgcacctcctccatctccaccgtgccgaagacttcctccatgagggccgggtcacagacggcctcgattttgtcggtgccgtccagcacggacgacacccagccgactatgtccgcgctgtcggggaacaaaggatccaccgccgtcctcctggtcaacagctccagtagcaccacaccgtagctgtacacgtcagactccatgctgctcttggtggaaaacgccaattctgcaagacagcgcatgcaatggcggcagtcatcatgaagatatgctaacccatgggcggtgccaagagctatgtcatacctcacacaccagtccaaagctggtgctggctgaattacatgcagaatatcatggaggctgcccttttccataaaatcatacagtatgaatccattatcacttctcaaccaaaattctttcagctttatcaagtttctgtgcttaatttcacccagtgtcttcagttctctaaccatgcttttgtatgaacctttgtgtgcagaaatcgcaagcttctttatagcataaacatcccctgacctcagtgttgccttgtaaacagttccgtgagcacctgtaccgatgatatacttgtcatcgaaatttt

SEQ ID NO: 89202 - DNA, 764 bp, Zea Mays
gctccgcagaataaaattcagaaatcctactgccagtacgcgctgctgctggattgcaatcccggtttcccttccctcgacttggacaacgaccggctgccgctgctggcagaggctggccgcgcatccgtcagctccttcacgacggcagtcatggagggcctttggctcacctccctggccgcgcaccggagcgccaccgacaggaccttacgcacctcctccatctccaccgtgccgaagacttcctccatgagggccgggtcacagacggcctcgattttgtcggtgccgtccagcacggacgacacccagccgactatgtccgcgctgtcggggaacaaaggatccaccgccgtcctcctggtcaacagctccagtagcaccacaccgtagctgtacacgtcagactccatgctgctcttggtggaaaacgccaattctgcaagacagcgcatgcaatggcggcagtcatcatgaagatatgctaacccatgggcggtgccaagagctatgtcatacctcacacaccagtccaaagctggtgctggctgaattacatgcagaatatcatggaggctgcccttttccataaaatcatacaaaatcgcaagcttctttatagcataaacatcccctgacctcagtgttgccttgtaaacagttccgtgagcacctgtaccgatgatatacttgtcatcgaaattttcagtggcctctgtaacctcatttaatttagatgaggaaccttcaaacatgttact

SEQ ID NO: 89203 - DNA, 1571 bp, Zea Mays
ctctcgattctttcggccgcatggcggtggcggttgttgacccacatggcacggcggcggtgtggtgcgtgtgcaggggctcggccagcggcggcgaacgcgacgaccccgacctcccccaccgggtgcgcggcgtccagcgtgagcgtgagtgcgtgacggtgtcgcaatccaacacgggcgacagggccgggtacgacccggtattcgaggtgacggtgtggtacgcctgccgctgcgccgtccccgccgtgcgcctccgctccgagggcttcgccagctcggtgcccgtggacccgcgcctgttccgccgcgccggccgcgactacctcgtcgccgacggccgccggatcgagcttggcgccgacgcgcgcttccgctacgcctgggaccgcgccttccggatgaccgccgccgccgtatatcgcaagttcttcggcgggtactgcaactgctcataccatggccttatgtcatccagcaatggcagttgccgttcagtttggactatagaattcaattatgagttcagtttgttgatattaaaggaaagatacagtggttctattgtttctcaacctggttcattttgggaagacaatagtggaaatatcgatcgatgtcttacccttggtttccaggctttggattgctgtcagctaggggacgaagtcaggaagcaggagctgaagctcgactcaccagttcaagatgcatacgcaacacagacatgcagcagcgcaaggatgaaacgaggcctatttgcatatttagttgagtccggcccggtgctgctccttgaattagtcgccttggttgtcgatgtcccaaatgtctcttggaaggatattggtgggctggagaatgtcaagagggagctccaggagactgttcaatatcctgtggagcatccggagaagttcgagaagtttggtatgtctccatccaaaggagttttgttctatggtcatcctggttgcggtaagaccttgttggcaaaggcaattgccaacgagtgcgaggctaatttcatcagtgtcaagggtcctgagttgcttaccatgtggtttggtgagagtgaagccaacgtccgtgaaatttttgacaaggctcgtcaatctgctccttgtgtcctcttctttgatgagcttgactcaattgcttctcagagaggaagcaatttgggtgatgctagaggtgtagctgatagagtgcttaatcaactactgacaaaaatggatggcatgaatgccaagaaaactgtgtttattattggagctataaacaggcctgatatcattgaccctgctctgctgaggccagggcgtcttgaccagctgatctacattccactgcctgatgagcaatataggctctagatcttcaaggcctgccttaggaagtcccctgtggcgaaggatgtggacttgaatgctcttgctgagtacacgcaacggttcagttgagcagatatcacaaaaatttgccagcgtgcgtgcaaatatgcaatcagagagaacattgagaaggtaacttcctccaaacgtcagttggtactctacaaattaata

SEQ ID NO: 89204 - DNA, 95 bp, Zea Mays
agcatgatgtgcaaaatgaaattagggataatgacaatgaggatactcaagctcgtgaacactctgatgaggaaatggattctgacgaggaacct

SEQ ID NO: 89205 - DNA, 384 bp, Zea Mays
atggcgcttggggagatggattggccgctgggcgcctgcctggtcgctggcatgcatggcatcgtggccgcagaccgctggatggccgctgggcgtgggcgcgtggccgctggccgctgggtgtcacgcttggggagatggccgcatggcgcgtggccgcatggcgcgtgccgcaggaccactggagtctggacgccgcgccggggagatgaccgcatggcgcgtggccgcaggaccgctggagtctggacgtcgcgcctggggagctggatgccgcgcctggggagaagacgaatggatgggctggcggcggccgacgcctggggagtcgaggagagaatcagagacgggcggacgcctggggaaacgactaaacctaattaa

SEQ ID NO: 89206 - DNA, 457 bp, Zea Mays
ccgcgtacacagggctctagcacctctccgtcagccacgttggcatgtacacagagctcaggcacctctctgccggacacgttagcgcatagctacacccccattgtacacctggaccctctccttgcatctataaaaggaaggtccagggccctcatgcgggagggtcgcgcgggaggacgggctgacgaacatgctcgctccctctccctcgcgaacgcttgtaacccctactgcaagcgcatccccctggcgtaggataacacgagccacgttttccccccttgtgttccatctcgcgccaacccatctgggctgggacacgcagcgacaattttactcgtcggtccagggactcccccggggttgaaacgccgacactaactagcaagttttctaattaaataatgttccaaactaaattattaactaaattacaaactaactaacaaaacta

SEQ ID NO: 89207 - DNA, 1216 bp, Zea Mays
agtcgtagccctcgcagcggcaaaaggaccacacggtttccgcagctctctcagcctcccaacgaagggaactcccaggaactttcgccaacccgtgcggcggcaaaatcagctgccagcctgccacctctacgcgcgggcgcggcgcccgctcccgctcccgctgggacgccacgccaaggcacaccaccaccaccctacaaatacgccccgctccgcacactggaacgaccacatagaccaccacgacacccttccccacaccagcagtcgagctgagcacgacacaaagccggctggggccgcctcgccatggcgatccggatgagcaacaacgtgatcggcgcgctgaacctggtgacactcctgctctcggtccccatcctcgtctcgggaatctggctgcggtcgcgcgccgacggcaccgagtgcgaccacctcctgtccaccccggccatcgcgctgggcgcggtgctcatggccgtcgctgtcgcgggcctcgccggcgcctgcttccgcgccacctggctgctatggctctacctcctcgccatgctcgtgttcatcgtcgcgctgctctgcttcaccgtcttcgccttcgccgtcaccaacaggggcgccggggaggccgtgtcgggggtaggctacagggagtaccgcctcggggactactccacctggctgcggcgccacgtcgaaagccgcaaggactgggcccggatccggagctgcctcgccgacgcgcacgtctgcaggcgcctggaggagagggagagggagagcaaggacgcggcggggtctggttcggctcggcctgtccccggtcgagtccgggtgctgcaagccgcccacgagctgcaacttcacgtacaccggcggcacggagtggaccaggacagcggcgggctccgcgcccgccggccgggactgcagcgcgtggggcaacgacgaggacgacctctgctacgggtgccagtcgtgcaaggccggcgtggtggacgcgctcaagcgggactggaagcgggccgccatcgtcaacgtcgtcatcctctccttcatcgtcgtcgtttactccgtcggctgctgcgccttcaagaacagccgccgggacaactacgcctaccacagcggccgcggatggaaacgaggcggtgacgcttaaatgcttaatcaaacttttccttatcatctgcgttagtgcaatttaccattatct

SEQ ID NO: 89208 - DNA, 1058 bp, Zea Mays
ttttcttccctcgtccccgcgtgtgcctttatccctacagcaacgacttggggcgaccaacgccacaactccacaaggtccgcatacccctttcccccgcgccctttatccctgcagcaacgacttggggtgacgagcaccacaagtattcgtgctgctttggtctttgcgtcctggagcattaatttcccttctgatttgggtagaggatgatgcttctcgccaagctcggggcgccgagcgttccaggttgtgtcatggacagaaggaaactgctgttggtccctgcgattagtatggccattgcctcctttcagtacacttttgtcaagggaatagcaaaagctgaatttgctgatatgcctgcacttcgcggtaaagattatggaaagacaaaaatgcggtatccagattacactgaaacggaatcaggcctccagtacaaggacttgcgggttggtgatggcccttctccaaaaaaaggggagactgttgttgttgattgggatggctatacaattgggtactatggtcgtatctttgaagctcgaaacaagaccaaaggaggttcatttgagggtggtgacaaagacttcttcaagttcaaagttggatcaggacaggtcataccagcttttgaggaggctatatcaggcatggccccaggaggtgttaggaggatcattgtaccaccggatcttggatacccagataatgactacaacaagttgggtccaaaaccaacgacattctcgggacaaagagctcttgattttgttctacgtaatcaaggcttaatagataaaactctcctgtttgacatcgagcttctcaagataattccaaatcagtagagattctaatgattacctttgaagaaaaaagctcatgttattcaggtccgtcgaagatcagcagtaaatgtatgcaattgaatatgaaaatatttttttaggcatacgcacatacaacatgatgtgaacacatctacctacatctccattaactacgcctcttttaaaagatgccattgtgtgcatctgcggtttctacagaag

SEQ ID NO: 89209 - DNA, 927 bp, Zea Mays
atgatgcttctcgccaagctcggggcgccgagcgttccagggaagcgtcgagttgaagaagatgctataagttgcagaatagaaacataccatggttgtgtcatggacagaaggaaactgctgttggtccctgcgattagtatggccattgcctcctttcagtacacttttgtcaagggaatagcaaaagctgaatttgctgatatgcctgcacttcgcggtaaagattatggaaagacaaaaatgcggtatccagattacactgaaacggaatcaggcctccagtacaaggattattttcatggcaaaatacaggacttgcgggttggtgatggcccttctccaaaaaaaggggagactgttgttgttgattgggatggctatacaattgggtactatggtcgtatctttgaagctcgaaacaagaccaaaggaggttcatttgagggtggtgacaaagacttcttcaagttcaaagttggatcaggacaggtcataccagcttttgaggaggctatatcaggcatggccccaggaggtgttaggaggatcattgtaccaccggatcttggatacccagataatgactacaacaagttgggtccaaaaccaacgacattctcgggacaaagagctcttgattttgttctacgtaatcaaggcttaatagataaaactctcctgtttgacatcgagcttctcaagataattccaaatcagtagagattctaatgattacctttgaagaaaaaagctcatgttattcaggtccgtcgaagatcagcagtaaatgtatgcaattgaatatgaaaatatttttttaggcatacgcacatacaacatgatgtgaacacatctacctacatctccattaactacgcctcttttaaaagatgccattgtgtgcatctgcggtttctacagaag

SEQ ID NO: 89210 - DNA, 1256 bp, Zea Mays
atgatgcttctcgccaagctcggggcgccgagcgttccagggaagcgtcgagttgaagaagatgctataagttgcagaatagaaacataccatggttgtgtcatggacagaaggaaactgctgttggtccctgcgattagtatggccattgcctcctttcagtacacttttgtcaagggaatagcaaaagctgaatttgctgatatgcctgcacttcgcggtaaagattatggaaagacaaaaatgcggtatccagattacactgaaacggaatcaggcctccagtacaaggacttgcgggttggtgatggcccttctccaaaaaaaggggagactgttgttgttgattgggatggctatacaattgggtactatggtcgtatctttgaagctcgaaacaagaccaaaggaggttcatttgagggtggtgacaaagacttcttcaagttcaaagttggatcaggacaggtcataccagcttttgaggaggctatatcaggcatggccccaggaggtgttaggaggatcattgtaccaccggatcttggatacccagataatgactacaacaagttgggtccaaaaccaacgacattctcgggacaaagagctcttgattttgttctacgtaatcaaggcttaatagataaaactctcctgtttgacatcgagcttctcaagataattccaaatcagtagtgtgagattctaatgattacctttgaagaaaaaagctcatgttattcaggtccgtcgaagatcagcagtaaatgtatgcaattgaatatgaaaatatttttttaggcatacgcacatacaacatgatgtgaacacatctacctacatctccattaactacgcctcttttaaaagatgccattgtgtgcatctgcggtttctacagaagctctattagatacgtctgtgatcatacctcgactgctgagcaaatagagaatgaccaaatggcgaattgttgaaatgaaggcattctagttggaaatgttgtaaataccccaaatattgcctgtctgtcgtaatagttcatttgggacgtctggggggtgcatggtttcttttggtgattggtcgccccagacaaatcagaactctctactttaccagaaggtaccatccaaacaggatttcaatccagttttagtgaatgttcaatatgttttagtaaataatgtaaaaacggctttttattgctccaaatatgtaattcaggtttctaattttaaatcccatttaag

SEQ ID NO: 89211 - DNA, 1264 bp, Zea Mays
atgatgcttctcgccaagctcggggcgccgagcgttccagggaagcgtcgagttgaagaagatgctataagttgcagaatagaaacataccatggttgtgtcatggacagaaggaaactgctgttggtccctgcgattagtatggccattgcctcctttcagtacacttttgtcaagggaatagcaaaagctgaatttgctgatatgcctgcacttcgcggtaaagattatggaaagacaaaaatgcggtatccagattacactgaaacggaatcaggcctccagtacaaggacttgcgggttggtgatggcccttctccaaaaaaaggggagactgttgttgttgattgggatggctatacaattgggtactatggtcgtatctttgaagctcgaaacaagaccaaaggaggttcatttgagggtggtgacaaagacttcttcaagttcaaagttggatcaggacaggtcataccagcttttgaggaggctatatcaggcatggccccaggaggtgttaggaggatcattgtaccaccggatcttggatacccagataatgactacaacaagttgggtccaaaaccaacgacattctcgggacaaagagctcttgattttgttctacgtaatcaaggcttaatagataaaactctcctgtttgacatcgagcttctcaagataattccaaatcagtagagattctaatgattacctttgaagaaaaaagctcatgttattcaggtccgtcgaagatcagcagtaaatgtatgcaattgaatatgaaaatatttttttaggcatacgcacatacaacatgatgtgaacacatctacctacatctccattaactacgcctcttttaaaagatgccattgtgtgcatctgcggtttctacagaagctctattagatacgtctgtgatcatacctcgactgctgagcaaatagagaatgaccaaatggcgaattgttgaaatgaaggcattctagttggaaatgttgtaaataccccaaatattgcctgtctgtcgtaatagttcatttgggacgtctggggggtgcatggtttcttttggtgattggtcgccccagacaaatcagaactctctactttaccagaaggtaccatccaaacaggatttcaatccagttttagtgaatgttcaatatgttttagtaaataatgtaaaaacggctttttattgctccaaatatgtaattcaggtttctaattttaaatcccatttaagaaatattttgcg

SEQ ID NO: 89212 - DNA, 1278 bp, Zea Mays
tgcagggaagcgtcgagttgaagaagatgctataagttgcagaatagaaacataccatggtgatctatacaactaatttttatctcacatcctatgaatttaaggttgtgtcatggacagaaggaaactgctgttggtccctgcgattagtatggccattgcctcctttcagtacacttttgtcaagggaatagcaaaagctgaatttgctgatatgcctgcacttcgcggtaaagattatggaaagacaaaaatgcggtatccagattacactgaaacggaatcaggcctccagtacaaggacttgcgggttggtgatggcccttctccaaaaaaaggggagactgttgttgttgattgggatggctatacaattgggtactatggtcgtatctttgaagctcgaaacaagaccaaaggaggttcatttgagggtggtgacaaagacttcttcaagttcaaagttggatcaggacaggtcataccagcttttgaggaggctatatcaggcatggccccaggaggtgttaggaggatcattgtaccaccggatcttggatacccagataatgactacaacaagttgggtccaaaaccaacgacattctcgggacaaagagctcttgattttgttctacgtaatcaaggcttaatagataaaactctcctgtttgacatcgagcttctcaagataattccaaatcagtagtgtgagattctaatgattacctttgaagaaaaaagctcatgttattcaggtccgtcgaagatcagcagtaaatgtatgcaattgaatatgaaaatatttttttaggcatacgcacatacaacatgatgtgaacacatctacctacatctccattaactacgcctcttttaaaagatgccattgtgtgcatctgcggtttctacagaagctctattagatacgtctgtgatcatacctcgactgctgagcaaatagagaatgaccaaatggcgaattgttgaaatgaaggcattctagttggaaatgttgtaaataccccaaatattgcctgtctgtcgtaatagttcatttgggacgtctggggggtgcatggtttcttttggtgattggtcgccccagacaaatcagaactctctactttaccagaaggtaccatccaaacaggatttcaatccagttttagtgaatgttcaatatgttttagtaaataatgtaaaaacggctttttattgctccaaatatgtaattcaggtttctaattttaaatcccatttaagaaatattttgcg

SEQ ID NO: 89213 - DNA, 836 bp, Zea Mays
attaaacccccaaaacctctgagagacgaaaccccaaggcggagccggaggacccgatggaaaagaaggatctgctcgccgtccggaagaggctgcctgcggcggcggccaagcggaggcacaaggtggtgacgcccgctaaggccggcgccgggcgtctcgcgaaggtgatcgctggatacctcgcgtccgactcctacatgtacgcgccgctgatctccgctccgccatctctcccaccgccgcctccggcgtcttcggtggcgccatccgcgacgcctcttatttccactcctgcccaagtttataaactctgccaatcctatggtgtcaatcctgagggaagggtaatggttaacaatctgtttgggggtcagcatgatttatggaagagaaagtcttgtgcgccagcggctaaattctaggtgaggaggatgaggcactgagcaatggattgcagcaggatagagaaagaaatcactggtgcaaaaatacagaggctctttgcaagctacattcactgtctagaagtatctgtggacatgttcttggagctgtgcttctagcatgacctttaagagctacaatacaatagttgtttctatgatctgttatgttaatgactaggtactgtggcttagcaatctgccttcttctggagttctcatgtgatcgctcactatttaatatagattgtttagttaagtagctttatcttgtggtctatgttcactaatgcatccaaacttctcatattgcccagtatatcatctgttcctgtctatttttgttaaggattcgatcaggagcgattgagcgctcccaaaactgataaa

SEQ ID NO: 89214 - DNA, 573 bp, Zea Mays
aaaacctctgagagacgaaaccccaaggcggagccggaggacccgatggaaaagaaggatctgctcgccgtccggaagaggctgcctgcggcggcggccaagcggaggcacaaggtggtgacgcccgctaaggccggcgccgggcgtctcgcgaaggtgatcgctggatacctcgcgtccgactcctacatgtacgcgccgctgatctccgctccgccatctctcccaccgccgcctccggcgtcttcggtggcgccatccgcgacgcctcttatttccactcctgagaaagaaatcactggtgcaaaaatacagaggctctttgcaagctacattcactgtctagaagtatctgtggacatgttcttggagctgtgcttctagcatgacctttaagagctacaatacaatagttgtttctatgatctgttatgttaatgactaggtactgtggcttagcaatctgccttcttctggagttctcatgtgatcgctcactatttaatatagattgtttagttaagtagctttatcttgtggtctatgttcactaatgcatccaaacttctcata

SEQ ID NO: 89215 - DNA, 871 bp, Zea Mays
ggtccagtaaattcacctttctaccccgatcaattcacaccatgtcgaccacaaccctaaccctatccctttcgacggttccacttgcaccctacccacaaccccatccatcgtaacccgccgccgccgcgatacacgcaaatcctgccggcgcatccaaccccgcccgacgtggacgccagagaggtgcacgacttccgcaactcgtggcactcagtgcggtggtcgtccaagctcgtcctctggctcgtcctcaacgccttcagcttcctcgtgccgtcgccgctcgcccagatctacgatgcaatggtgagtggctctgtgaggaggcacacaagctcacattggcggcagcaagaacggtgtcgcctccttggtgggtggcaaccaggcgcacgacacctgctccctcccacaccgcgccagcaccagaataccggcgtcgcgtcggcgagcacagcgcagcgcgcaacggcccgggtgcatgaggagggggcgtcggctgccgaggccgaggctgtgacgaaggagcgcggagggcgatgccgctggtcaggttcgaggtgcggaatgaggtggggctgggggaccccggcctctacggcggcggagcttccgctgccgcgggggaggaggaggagcccaatgcgctgctcgagggcgtcgccgtcgcgggcctcgtcgggatcctgcgccagctcggagatctcgcggagtaaggccctgctccctccctcgctgcctccttctcttgcgcggtctatgcgtgccttcgacctgccggccgccggtgcgcgtctctgtggtctagttcccgcctggatctgctgcgctacgtgttttgcggctcccggcggtgatggttgggttg

SEQ ID NO: 89216 - DNA, 1297 bp, Zea Mays
ggtccagtaaattcacctttctaccccgatcaattcacaccatgtcgaccacaaccctaaccctatccctttcgacggttccacttgcaccctacccacaaccccatccatcgtaacccgccgccgccgcgatacacgcaaatcctgccggcgcatccaaccccgcccgacgtggacgccagagaggtgcacgacttccgcaactcgtggcactcagtgcggtggtcgtccaagctcgtcctctggctcgtcctcaacgccttcagcttcctcgtgccgtcgccgctcgcccagatctacgatgcaatggtgagtggctctgtgaggaggcacacaagctcacattggcggcagcaagaacggtgtcgcctccttggtgggtggcaaccaggcgcacgacacctgctccctcccacaccgcgccagcaccagaataccggcgtcgcgtcggcgagcacagcgcagcgcgcaacggcccgggtgcatgaggagggggcgtcggctgccgaggccgaggctgtgacgaaggagcgcggagggcgatgccgctggtcaggttcgaggtgcggaatgaggtggggctgggggaccccggcctctacggcggcggagcttccgctgccgcgggggaggaggaggagcccaatgcgctgctcgagggcgtcgccgtcgcgggcctcgtcgggatcctgcgccagctcggagatctcgcggagcgaggcaggttcatatccaaacaagaagccacgatggaatctggatttcccctctatctgatggaatctggatttggtgccagtctgttttcctgtgattttgggataccagccccattccccttcatggagggtatgcgttgctgttggtcggcacactggaatggaacagatatagacagaaccttcaggttcataagcaaggagttgcgcttgaccgatctatggatctctctagatgcactgactaaggtgaattgaaagcggaactagacatgatgtttgaattcgagggtgaattagtatctgcaaaccaaaactggcagattgtttataccgacaacgagggtgatatgatgcttgtgggagatgacccgtgggagaatttgatgtggttgtgtatgatgtactttatattttggcatactatgcacaaaaacaaatgccttctatgaccatcgtgatttatacattttcaaacaaaattttatgatacttcttattgtgttttacgctttcactaaaaagcaagtgtcacattcgccgttacaaaacagatcgataatttacgtaaattttgt

SEQ ID NO: 89217 - DNA, 1665 bp, Zea Mays
cgaccacaaccctaaccctatccctttcgacggttccacttgcaccctacccacaaccccatccatcgtaacccgccgccgccgcgatacacgcaaatcctgccggcgcatccaaccccgcccgacgtggacgccagagaggtgcacgacttccgcaactcgtggcactcagtgcggtggtcgtccaagctcgtcctctggctcgtcctcaacgccttcagcttcctcgtgccgtcgccgctcgcccagatctacgatgcaatggtgagtggctctgtgaggaggcacacaagctcacattggcggcagcaagaacggtgtcgcctccttggtgggtggcaaccaggcgcacgacacctgctccctcccacaccgcgccagcaccagaataccggcgtcgcgtcggcgagcacagcgcagcgcgcaacggcccgggtgcatgaggagggggcgtcggctgccgaggccgaggctgtgacgaaggagcgcggagggcgatgccgctggtcaggttcgaggtgcggaatgaggtggggctgggggaccccggcctctacggcggcggagcttccgctgccgcgggggaggaggaggagcccaatgcgctgctcgagggcgtcgccgtcgcgggcctcgtcgggatcctgcgccagctcggagatctcgcggagcgaggcaggttcatatccaaacaagaagccacgatggaatctggatttcccctctatctgatggaatctggatttggtgccagtctgttttcctgtgattttgggataccagccccattccccttcatggagggtatgcgttgctgttggtcggcacactggaatggaacagatatagacagaaccttcaggtaagttcctcgacattacttatataattactaagggattcattttaacactataaatggatagtagaccttgatatctgtcaagtgctaaatgattttatgtcaataaagtaccatcagtttattaaatcacttatgaaaaacatgcatatataacaattcattagtaggtaaaattatttcattagtagccgaccatttcatatattgttgaaagcccgtgtgttagctcgtatcgtgtgtttattaggagttcgctattatcatttcttacagctaaagagcttcactgttaggacaggtttggtcgccaacgaaagcactactccacctcttttacactttccaactattctagtcaataccatgctaattaaagttcagcaaaataaaggaaataatattgcataattgctttgcgaccggacctatataatatcttgtgtagtcctatgatcctatcctcttcaatttacacttctgctttgaatggtcttcaggttcataagcaaggagttgcgcttgaccgatctatggatctctctagatgcactgactaaggtgaattgaaagcggaactagacatgatgtttgaattcgagggtgaattagtatctgcaaaccaaaactggcagattgtttataccgacaacgagggtgatatgatgcttgtgggagatgacccgtgggagaatttgatgtggttgtgtatgatgtactttatattttggcatactatgcacaaaaacaaatgccttctatgaccatcgtgatttatacattttcaaacaaaattttatgat

SEQ ID NO: 89218 - DNA, 829 bp, Zea Mays
ctatccctttcgacggttccacttgcaccctacccacaaccccatccatcgtaacccgccgccgccgcgatacacgcaaatcctgccggcgcatccaaccccgcccgacgtggacgccagagaggtgcacgacttccgcaactcgtggcactcagtgcggtggtcgtccaagctcgtcctctggctcgtcctcaacgccttcagcttcctcgtgccgtcgccgctcgcccagatctacgatgcaatggcgaggcaggttcatatccaaacaagaagccacgatggaatctggatttcccctctatctgatggaatctggatttggtgccagtctgttttcctgtgattttgggataccagccccattccccttcatggagggtatgcgttgctgttggtcggcacactggaatggaacagatatagacagaaccttcaggttcataagcaaggagttgcgcttgaccgatctatggatctctctagatgcactgactaaggtgaattgaaagcggaactagacatgatgtttgaattcgagggtgaattagtatctgcaaaccaaaactggcagattgtttataccgacaacgagggtgatatgatgcttgtgggagatgacccgtgggagaatttgatgtggttgtgtatgatgtactttatattttggcatactatgcacaaaaacaaatgccttctatgaccatcgtgatttatacattttcaaacaaaattttatgatacttcttattgtgttttacgctttcactaaaaagcaagtgtcacattcgccgttacaaaacagatcgataatttacgtaaattttgt

SEQ ID NO: 89219 - DNA, 1193 bp, Zea Mays
gcacagagttgcatgcacgactgcatccccagtccccagagctagctgaagtgcgtaaacttacttgactcgtcctcagtccaattcgatcgatctcgtagctagcagcgtggggtgcgaacacaaaacaatggcctattattgcacgaagaaggccgccgtcgtcctcggcgcggcggtggtggccgccttctttctcgctgctgagagccgccacattgctcggaaggacctgggcgtcagcctcggcggcggcggtggcctaggggtcggcgttggcggcggcctgggtatcggcactgggatcggcatcggcattggtggctccggctccggctcaggatccggcgcaggctcgggctctggttctgcgtccgggtcaggatccggctcgggctcggggtcctggtccggctcgaactcaggctcgaacgcggggtctggcggcgcaggatcgtacgcgggttctcacgcgggctcgaacggtggggacggagggtcgggcgcaggctcgtacgctggctcgcacgccgactcaaacggaggaggcgcaggctcgtacgcgggctccgacgccggctcgtacgctggatccaacggtggaggttcaggttcgtacgcgggctccaacgccggctcgtacgctggatctaacggcggaggttcaggttcgtacgcgggctccaacgctggctcgtacgccggctctaacggcggaggcgcgggttcgtacgcgggctccaatgccggctcgtacgcagggtccggcgctgggcctcactggggttctggtgccggctcgtacgctggctctgaggctggctcgtacgctggctctggcactggtccatatgggggttctggcgctggctcgtatgctggggctcgtgctggctcttacgctggcagtgggcacggcaagtgagccgtgaagcgaccttgggttggaggatgcggtgcacatgttagttcttctgtagtcgtgtgtttcggctagcgctaccaatatttgtgtttgtgagtataatccattatgtgcgcatgcatgtactgtactataaaataatagagacctcaagaaggagaataaggtgattgtcaatgtataaaatacctattaatgcaaacatctatattaatgtatagttcgacatggagactaatatttatgtaataattttcacaaggaatgt

SEQ ID NO: 89220 - DNA, 93 bp, Zea Mays
ggcggccgggccggccatgattccccgcctttttttcccccgtctggagccggcagcgcccgaggagccaagaaagcgaccttcacgtacatc

SEQ ID NO: 89221 - DNA, 2912 bp, Zea Mays
gaggaaaagcaaagccaaaggcactccactccactccaccctatgcactgccgcccctgcccgtcccagctctcgctcgtctttctcctcctcctctcgctcgcacccatcatttcggcactccccttcccggagccagctcttccgatggcgtgcagcggcctccgcctctcgctccccgccgccgtcctcgccctcctcctcctcccctccgcgctcgcttccgagcccctcaaccccgaagtgcaggcgttgatcgccatcaggcaggggctggtcgacccgcacggcgtgctcaggagctgggaccaggactcggtcgacccctgcagctgggccatgatcacctgctccccgcagaacctcgtcatcggcctgggagtgccgagccagggcttgtcggggactctgtccgggaggatcgccaacctcacccacctcgagcaagtgctgctgcagaacaacaacatcacggggcggctgccgccggagctgggcgcgctgccgaggctgcagacgctggacctctccaacaaccgcttctccggccgcgtgcccaacacgctgggccgcatcaccaccctccgatacctgaggctgaacaacaacagcttgtccgggccgttccccgcgtcgctggccaagatcccgcagctctccttcctggacctgtccttcaacaacctcactggccccgtcccgctcttcccgacacggaccttcaacgtcgtgggcaacccgatgatatgtgggagcaacgccggcgcaggggagtgcgccgccgcgctgccgccggtcaccgtacccttcccgctggaatccactccgggcggcagcagtgagcactcttccttcctgcctctatgtctatcattcatatctacggccagtcaggcaggccagctcgcgcgcctagcagctagtcgcgctcaatgcttttcggccctttctcggagtgcgtggcgtggcgtgcatgcatgcgtcgctgctgccgctgcttttgtgcccttgcctcgccggggtagcggtcgaggggacacggtgctgtcggcatgggggcgccgtcgctctcgcttgcggccgggaatacctgtagtaggctgtatgcctgtatgtagcgctggtggcgcggtctggcctgaaccgtgcatctgctgctgctcgcgcctggggatcagcgtttggcttttgtgtgtgtgtgcgcgcgcagggacagggacaggggcggcggcagcgggcaggtcaaaggctgctggcgcgcggctgccgatcggcgtagggacaagcctgggcgcctcctcccttgtgctcttcgccgtgtcctgcttcctctggcggcgaaagcgccggcacacgggggggcggccctcctccgttctcggcatcatccacgagcggggcggctgcgacctggaggacggcggcggcggtggcgtggtggcggcggcggcgcggctggggaacgtgcgccagttcgggctgcgggagctgcaggcggccacggacgggttcagcgccaagaacatcctgggcaagggcgggttcgggaacgtgtaccgcggccgcctcgccgacggcaccacggtggccgtgaagcggctcaaggaccccagcgcgtcgggcgaggcccagttccgcacggaggtggagatgatcagcctcgccgtgcaccgccacctgctgcgcctggtcggcttctgcgccgcctcgggcgagcgcctcctcgtctacccctacatgcccaacggcagcgtcgcgtcgcggctgcgagggaagccggcgctggactgggcgacgcggaagcggatcgcggtgggcgccgcgcgcgggctgctgtacctgcacgagcagtgcgaccccaagatcatccaccgcgacgtcaaggccgccaacgtgctgctggacgagcaccacgaggccgtcgtgggcgacctgggcctggccaagctgctggaccacggcgactcgcacgtcaccacggcggtgcgcggcaccgtgggccacatcgcgcccgagtacctctccacggggcagtcgtcggagaagacggacgtcttcggcttcgggatcctgctgctggagctcgtcacgggccagcgcgcgctccagctcggcaaggcctccggcgccctgcacagccagaagggcgtcatgctggactgggtgaggaaggtgcatcaagagaagatgcttgacctgctggtggaccaggacctgggcccacactacgacaggatcgaggtggccgagatggtgcaggtggcgctcctctgcacgcagttccagccgtcgcaccggcccaagatgtccgaggtggtccggatgctggagggagacggcctggccgagaaatgggaggccacgaaccggccgggcgtggccgcgggggcgccgtgccacgacgcgctcggctacgaccaccgcaacgactccaacggctccgtcttcttcaacgacttccacgacaacgacagcagcctcagcagcgacgaagcgcggtcgatcgacatggtggaggagatggagctgtccggaccaaggtagcaagcaagcagcccttgccgctgggcgggaagagccactcccttgatatgatagcatcaaattcaaaattcagatgttccgagagcttcaaaaaaaattacaggtagagagagagaggtgtcgagttaagagttgttgcgagtcagtttggaattaaaggtattcctaggtgctttagggtctagagttcagaccacagttgtgtagtttctggtggagccgtccttttccctttgaaaaaaagatgtaaagaaaaaggatggcttctcttttgcttcttttcacaggtttctttttcttttgctgctgctgctgctctccctgctgatccagtgacacaagcacatgcagcactgcagtcctttggt

SEQ ID NO: 89222 - DNA, 2540 bp, Zea Mays
gaggaaaagcaaagccaaaggcactccactccactccaccctatgcactgccgcccctgcccgtcccagctctcgctcgtctttctcctcctcctctcgctcgcacccatcatttcggcactccccttcccggagccagctcttccgatggcgtgcagcggcctccgcctctcgctccccgccgccgtcctcgccctcctcctcctcccctccgcgctcgcttccgagcccctcaaccccgaagtgcaggcgttgatcgccatcaggcaggggctggtcgacccgcacggcgtgctcaggagctgggaccaggactcggtcgacccctgcagctgggccatgatcacctgctccccgcagaacctcgtcatcggcctgggagtgccgagccagggcttgtcggggactctgtccgggaggatcgccaacctcacccacctcgagcaagtgctgctgcagaacaacaacatcacggggcggctgccgccggagctgggcgcgctgccgaggctgcagacgctggacctctccaacaaccgcttctccggccgcgtgcccaacacgctgggccgcatcaccaccctccgatacctgaggctgaacaacaacagcttgtccgggccgttccccgcgtcgctggccaagatcccgcagctctccttcctggacctgtccttcaacaacctcactggccccgtcccgctcttcccgacacggaccttcaacgtcgtgggcaacccgatgatatgtgggagcaacgccggcgcaggggagtgcgccgccgcgctgccgccggtcaccgtacccttcccgctggaatccactccgggcggcagcaggacagggacaggggcggcggcagcgggcaggtcaaaggctgctggcgcgcggctgccgatcggcgtagggacaagcctgggcgcctcctcccttgtgctcttcgccgtgtcctgcttcctctggcggcgaaagcgccggcacacgggggggcggccctcctccgttctcggcatcatccacgagcggggcggctgcgacctggaggacggcggcggcggtggcgtggtggcggcggcggcgcggctggggaacgtgcgccagttcgggctgcgggagctgcaggcggccacggacgggttcagcgccaagaacatcctgggcaagggcgggttcgggaacgtgtaccgcggccgcctcgccgacggcaccacggtggccgtgaagcggctcaaggaccccagcgcgtcgggcgaggcccagttccgcacggaggtggagatgatcagcctcgccgtgcaccgccacctgctgcgcctggtcggcttctgcgccgcctcgggcgagcgcctcctcgtctacccctacatgcccaacggcagcgtcgcgtcgcggctgcgagggaagccggcgctggactgggcgacgcggaagcggatcgcggtgggcgccgcgcgcgggctgctgtacctgcacgagcagtgcgaccccaagatcatccaccgcgacgtcaaggccgccaacgtgctgctggacgagcaccacgaggccgtcgtgggcgacctgggcctggccaagctgctggaccacggcgactcgcacgtcaccacggcggtgcgcggcaccgtgggccacatcgcgcccgagtacctctccacggggcagtcgtcggagaagacggacgtcttcggcttcgggatcctgctgctggagctcgtcacgggccagcgcgcgctccagctcggcaaggcctccggcgccctgcacagccagaagggcgtcatgctggactgggtgaggaaggtgcatcaagagaagatgcttgacctgctggtggaccaggacctgggcccacactacgacaggatcgaggtggccgagatggtgcaggtggcgctcctctgcacgcagttccagccgtcgcaccggcccaagatgtccgaggtggtccggatgctggagggagacggcctggccgagaaatgggaggccacgaaccggccgggcgtggccgcgggggcgccgtgccacgacgcgctcggctacgaccaccgcaacgactccaacggctccgtcttcttcaacgacttccacgacaacgacagcagcctcagcagcgacgaagcgcggtcgatcgacatggtggaggagatggagctgtccggaccaaggtagcaagcaagcagcccttgccgctgggcgggaagagccactcccttgatatgatagcatcaaattcaaaattcagatgttccgagagcttcaaaaaaaattacaggtagagagagagaggtgtcgagttaagagttgttgcgagtcagtttggaattaaaggtattcctaggtgctttagggtctagagttcagaccacagttgtgtagtttctggtggagccgtccttttccctttgaaaaaaagatgtaaagaaaaaggatggcttctcttttgcttcttttcacaggtttctttttcttttgctgctgctgctgctctccctgctgatccagtgacacaagcacatgcagcactgcagtcctttggt

SEQ ID NO: 89223 - DNA, 245 bp, Zea Mays
cagaagtggggtgctgggaataatgtcaaggatcacctcttttatttttgcagtatggctcagtttaaatcattatgatgtgcattattctcatataaatttaatggcctgcatgatgttgatccaactcagttgcttttgtaacatgaggatccctgagaggcaatctgtaagctatatggtgctcgcgctctacatattcagattccataccaatctccaggtcattgtccctattctcatag

SEQ ID NO: 89224 - DNA, 1743 bp, Zea Mays
gtcccggcaccctactataaattgcggtccaacacgcacgctaattgcacacagagctacctactgtaaacattcaacactcaagagccaagagggagagacgatgaaggttgatgtggtggggacgacgcttgtggcgccgagcgaggacacgccgcacccggagctgtggctgtcgaacctggacctggcagtccccaagacgcacacgccgctcgtgtactactacccggcgccggcggccggaggcgacaccgacggagaagcggccttcttcgcgccggagcggctcgaggcggcgctggccaaggcgctggtgccgttctacccgctggcggggaggctgggcgtgggcgagggcgggcgcctgcagatcgactgcaccggcgagggcgcgctcttcgtcgtcgccagggccgacttcgccggcgaggacgtgttcagtgactacgagccgtcgccggaggtcaggcggctgttcgtgccgttcgcggcgtccggagacccgccctgcgtcatgtccatgttccaggtgacgttcctcaagtgcggcggcgtggtgctgggcacgggcatccaccacgtgaccatggacggcatgggcgcgttccacttcatccagacctggaccggcgtggcgcggggcctcgacacggccgaggcgtgcggcccgctgccgttccacgaccggacgctcctccgcgcgcgctctccgccggccccggccttcgaccacccggtctactcgccggctctgctcaacggcgtgccccggcccttcgtcacccgcgtctacgccgtctccccgaagcttctcgctggcatcaagtcccgctgcgcgccgggcgtgtccacctactgcgccgtcaccgcgcacctctggcgttgcatgtgcgtcgcgcgcgggctcgccccgggctcggacacgcggctccgcgtgccggccaacgtccgccaccgcctgcgcccgccgctcccgcggagctacttcggcaacgccatcgtgcgcgacctcgtgaccacccgggtggaggacgtcctggaacgcccgctcgggttcgtggcgcaggcgatcaaggacgcggtggaccgcgtcaatgacgcctacgtgcgctccgtggtcgactacctggaggtggagtcggagaagggcagccaggcggcgcgcgggcagctcatgccggagtccgacctgtgggtggtcagctggctcgggatgcccatgtacgacgccgacttcgggtggggcacgccgcggttcgtcgcgccggcgcagatgttcggcagcggcacggcctacgtcacgcagcgcgccaacagggacgacggcctcgccgtgctcttcgggctggagcccgagtatctgcagtgcttcgaaaaggtgttctatggagagtgagtcgtgagattactagtgtcatccgcgtttcgtcgtgagcaccgagtgcgattactgtagcttggaacctgatgctgtggatgtgggctttgcaaattactccggtttctgtgttttttttcctagtattctcatgtggtttttaggtgctcagtcgagacttgagagagaacatagctgcgttgactttagcatggtttaatttcaactctatgggtctctatctattgtcacattagctatccaccgtactatcgattctattgtcggccgttgtcaaccatatctatagcatggtcgtacaaaaaatatgaaaataaaaaacaacatcatcataaataaaa

SEQ ID NO: 89225 - DNA, 149 bp, Zea Mays
tttttattttttagattttgtcttccaaactttttgtggtatgttcctacactatgtagacctacatgtatcatttgtggacaattataacagagttttcaatcgttagtagatttagttcgtttatttgaatttcttcggaaaattca

SEQ ID NO: 89226 - DNA, 1962 bp, Zea Mays
catcgcactgcgcgctccgatccccctccacccgtctcagctagcagcctcgccttgttgtggcctataaattccgcgccactccaacgcccacccttctcaggatgaatcggaagagagaatcctaccaaacctagctaccaactcgatcgtcgtcatcacgctcgaccgcacaactgcaccaaggggggaggagacctaaaaactactacatcttttagctacacatctagctaaagatcgagaggggtaaataaggacgagcgggcgcgagctagaagagcagctgcaggtactaccatcatcgtcgtcgtcgtcgccaggatgaccgtcgtcgacgccgtcgtctcctccaccgatgccggcgcccctgctgccgccgccaccgcggtaccggcggggaacgggcagaccgtgtgcgtgaccggcgcggccgggtacatcgcctcgtggttggtgaagctgctgctcgagaagggatacactgtgaagggcaccgtcaggaacccagatgacccgaagaacgcgcacctcaaggcgctggacggcgccgccgagcggctgatcctctgcaaggccgatctgctggactacgacgccatctgccgcgccgtgcagggctgccagggcgtcttccacaccgcctcccccgtcaccgacgacccggagcaaatggtggagccggcggtgcgcggcaccgagtacgtgatcaacgcggcggcggaggccggcacggtgcggcgggtggtgttcacgtcgtccatcggcgccgtgaccatggaccccaagcgcgggcccgacgtcgtggtcgacgagtcgtgctggagcgacctcgagttctgcgagaaaaccaggaactggtactgctacggcaaggcggtggcggagcaggcggcgtgggagacggcccggcggcggggcgtggacctggtggtggtgaaccccgtgctggtggtgggccccctgctgcaggcgacggtgaacgccagcatcgcgcacatcctcaagtacctggacggctcggcccgcaccttcgccaacgccgtgcaggcgtacgtggacgtgcgcgacgtggccgacgcgcacctccgcgtcttcgagagcccccgcgcgtccggccgccacctctgcgccgagcgcgtcctccaccgcgaggacgtcgtccgcatcctcgccaagctcttccccgagtaccccgtcccagccaggtgctccgacgaggtgaatccgcggaagcagccgtacaagttctccaaccagaagctccgggacctggggctgcagttccggccggtcagccagtcgctttacgacacggtgaagaacctccaggagaagggacacctgccggtgctcggagagcggacgacgacggaggccgccgacaaggatgcccccacggccgagatgcagcagggagggatcgccatccgtgcctgagagggcgatgccacacatgaacacaaagcaatgttcatactgctgccctgcacctgctgtgtaaacaggcctgtgtttgttctggctgatagtgatgtaccctaagacttgtaacgtcatgttcgttcttgtgaactatagcgagtgaataaaattggttaatgttggatgttcaaaattttgcagataagagagtcatcaattcaggttctgaaaagcaatcccgaaactaccaccctacctatcccctacaggctacagtagactgtacaagaccctttgttaccaaaccaaaaaaaaacatcggacaaactcaagactattcatgtttggtaacctacttgtgtagaaaagtgagctctattattggctgatgcaatatgccaacccttacatgcagcaggaaagcaaagaaagaacagtaaaacaaatgagttggtaaacagagaggactgcacaaaacaaggaatccggagaataacgatatctcaattttcaagaccaaatttggattaaaaaaaa

SEQ ID NO: 89227 - DNA, 1428 bp, Zea Mays
ctcaggatgaatcggaagagagaatcctaccaaacctagctaccaactcgatcgtcgtcatcacgctcgaccgcacaactccaccgatgccggcgcccctgctgccgccgccaccgcggtaccggcggggaacgggcagaccgtgtgcgtgaccggcgcggcaccgagtacgtgatcaacgcggcggcggaggccggcacggtgcggcgggtggtgttcacgtcgtccatcggcgccgtgaccatggaccccaagcgcgggcccgacgtcgtggtcgacgagtcgtgctggagcgacctcgagttctgcgagaaaaccaggaactggtactgctacggcaaggcggtggcggagcaggcggcgtgggagacggcccggcggcggggcgtggacctggtggtggtgaaccccgtgctggtggtgggccccctgctgcaggcgacggtgaacgccagcatcgcgcacatcctcaagtacctggacggctcggcccgcaccttcgccaacgccgtgcaggcgtacgtggacgtgcgcgacgtggccgacgcgcacctccgcgtcttcgagagcccccgcgcgtccggccgccacctctgcgccgagcgcgtcctccaccgcgaggacgtcgtccgcatcctcgccaagctcttccccgagtaccccgtcccagccaggtgctccgacgaggtgaatccgcggaagcagccgtacaagttctccaaccagaagctccgggacctggggctgcagttccggccggtcagccagtcgctttacgacacggtgaagaacctccaggagaagggacacctgccggtgctcggagagcggacgacgacggaggccgccgacaaggatgcccccacggccgagatgcagcagggagggatcgccatccgtgcctgagagggcgatgccacacatgaacacaaagcaatgttcatactgctgccctgcacctgctgtgtaaacaggcctgtgtttgttctggctgatagtgatgtaccctaagacttgtaacgtcatgttcgttcttgtgaactatagcgagtgaataaaattggttaatgttggatgttcaaaattttgcagataagagagtcatcaattcaggttctgaaaagcaatcccgaaactaccaccctacctatcccctacaggctacagtagactgtacaagaccctttgttaccaaaccaaaaaaaaacatcggacaaactcaagactattcatgtttggtaacctacttgtgtagaaaagtgagctctattattggctgatgcaatatgccaacccttacatgcagcaggaaagcaaagaaagaacagtaaaacaaatgagttggtaaacagagaggactgcacaaaacaaggaatccggagaataacgatatctcaattttcaagaccaaatttggattaaaaaaaa

SEQ ID NO: 89228 - DNA, 1355 bp, Zea Mays
ctcaggatgaatcggaagagagaatcctaccaaacctagctaccaactcgatcgtcgtcatcacgctcgaccgcacaactgcaccaaggggggaggagacctaaaaactactacatcttttagctacacatctagctaaagatcgagaggggtaaataaggacgagcgggcgcgagctagaagagcagctgcaggtactaccatcatcgtcgtgctggagcgacctcgagttctgcgagaaaaccaggaactggtactgctacggcaaggcggtggcggagcaggcggcgtgggagacggcccggcggcggggcgtggacctggtggtggtgaaccccgtgctggtggtgggccccctgctgcaggcgacggtgaacgccagcatcgcgcacatcctcaagtacctggacggctcggcccgcaccttcgccaacgccgtgcaggcgtacgtggacgtgcgcgacgtggccgacgcgcacctccgcgtcttcgagagcccccgcgcgtccggccgccacctctgcgccgagcgcgtcctccaccgcgaggacgtcgtccgcatcctcgccaagctcttccccgagtaccccgtcccagccaggtgctccgacgaggtgaatccgcggaagcagccgtacaagttctccaaccagaagctccgggacctggggctgcagttccggccggtcagccagtcgctttacgacacggtgaagaacctccaggagaagggacacctgccggtgctcggagagcggacgacgacggaggccgccgacaaggatgcccccacggccgagatgcagcagggagggatcgccatccgtgcctgagagggcgatgccacacatgaacacaaagcaatgttcatactgctgccctgcacctgctgtgtaaacaggcctgtgtttgttctggctgatagtgatgtaccctaagacttgtaacgtcatgttcgttcttgtgaactatagcgagtgaataaaattggttaatgttggatgttcaaaattttgcagataagagagtcatcaattcaggttctgaaaagcaatcccgaaactaccaccctacctatcccctacaggctacagtagactgtacaagaccctttgttaccaaaccaaaaaaaaacatcggacaaactcaagactattcatgtttggtaacctacttgtgtagaaaagtgagctctattattggctgatgcaatatgccaacccttacatgcagcaggaaagcaaagaaagaacagtaaaacaaatgagttggtaaacagagaggactgcacaaaacaaggaatccggagaataacgatatctcaattttcaagaccaaatttggattaaaaaaaa

SEQ ID NO: 89229 - DNA, 1355 bp, Zea Mays; identical to SEQ ID NO: 89228

SEQ ID NO: 89230 - DNA, 1214 bp, Zea Mays
ctcaggatgaatcggaagagagaatcctaccaaacctagctaccaactcgatcgtcgtggtcgacgagtcgtgctggagcgacctcgagttctgcgagaaaaccaggaactggtactgctacggcaaggcggtggcggagcaggcggcgtgggagacggcccggcggcggggcgtggacctggtggtggtgaaccccgtgctggtggtgggccccctgctgcaggcgacggtgaacgccagcatcgcgcacatcctcaagtacctggacggctcggcccgcaccttcgccaacgccgtgcaggcgtacgtggacgtgcgcgacgtggccgacgcgcacctccgcgtcttcgagagcccccgcgcgtccggccgccacctctgcgccgagcgcgtcctccaccgcgaggacgtcgtccgcatcctcgccaagctcttccccgagtaccccgtcccagccaggtgctccgacgaggtgaatccgcggaagcagccgtacaagttctccaaccagaagctccgggacctggggctgcagttccggccggtcagccagtcgctttacgacacggtgaagaacctccaggagaagggacacctgccggtgctcggagagcggacgacgacggaggccgccgacaaggatgcccccacggccgagatgcagcagggagggatcgccatccgtgcctgagagggcgatgccacacatgaacacaaagcaatgttcatactgctgccctgcacctgctgtgtaaacaggcctgtgtttgttctggctgatagtgatgtaccctaagacttgtaacgtcatgttcgttcttgtgaactatagcgagtgaataaaattggttaatgttggatgttcaaaattttgcagataagagagtcatcaattcaggttctgaaaagcaatcccgaaactaccaccctacctatcccctacaggctacagtagactgtacaagaccctttgttaccaaaccaaaaaaaaacatcggacaaactcaagactattcatgtttggtaacctacttgtgtagaaaagtgagctctattattggctgatgcaatatgccaacccttacatgcagcaggaaagcaaagaaagaacagtaaaacaaatgagttggtaaacagagaggactgcacaaaacaaggaatccggagaataacgatatctcaattttcaagaccaaatttggattaaaaaaaa

SEQ ID NO: 89231 - DNA, 811 bp, Zea Mays
tcaggatgaatcggaagagagaatcctaccaaacctagctaccaactcgatcgtcgtcatcacgctcgaccgcacaactgcaccaaggggggaggagacctaaaaactactacatcttttagctacacatctagctaaagatcgagaggggtaaataaggacgagcgggcgcgagctagaagagcagctgcaggtactaccatcatcgtcgtcgtcgtcgccaggatgaccgtcgtcgacgccgtcgtctcctccaccgatgccggcgcccctgctgccgccgccaccgcggtaccggcggggaacgggcagaccgtgtgcgtgaccggcgcggccgggtacatcgcctcgtggttggtgaagctgctgctcgagaagggatacactgtgaagggcaccgtcaggaacccagatgacccgaagaacgcgcacctcaaggcgctggacggcgccgccgagcggctgatcctctgcaaggccgatctgctggactacgacgccatctgccgcgccgtgcagggctgccagggcgtcttccacaccgcctcccccgtcaccgacgacccggtgagttccgtcggccgggttagttccagcactcgtcgactgactgatcagtaaagtagtaacaaggggaccgcatgcaccatgcatgtgtgcgcgtgcaggagcaaatggtggagccggcggtgcgcggcaccgagtacgtgatcaacgcggcggcggaggccggcacggtgcggcgggtggtgttcacgtcgtccatcggcgccgtgaccatggaccccaagcgcgggcccgacgtcgtggt

SEQ ID NO: 89232 - DNA, 1687 bp, Zea Mays
aggatgaatcggaagagagaatcctaccaaacctagctaccaactcgatcgtcgtcatcacgctcgaccgcacaactccaccgatgccggcgcccctgctgccgccgccaccgcggtaccggcggggaacgggcagaccgtgtgcgtgaccggcgcggccgggtacatcgcctcgtggttggtgaagctgctgctcgagaagggatacactgtgaagggcaccgtcaggaacccagatgacccgaagaacgcgcacctcaaggcgctggacggcgccgccgagcggctgatcctctgcaaggccgatctgctggactacgacgccatctgccgcgccgtgcagggctgccagggcgtcttccacaccgcctcccccgtcaccgacgacccggagcaaatggtggagccggcggtgcgcggcaccgagtacgtgatcaacgcggcggcggaggccggcacggtgcggcgggtggtgttcacgtcgtccatcggcgccgtgaccatggaccccaagcgcgggcccgacgtcgtggtcgacgagtcgtgctggagcgacctcgagttctgcgagaaaaccaggaactggtactgctacggcaaggcggtggcggagcaggcggcgtgggagacggcccggcggcggggcgtggacctggtggtggtgaaccccgtgctggtggtgggccccctgctgcaggcgacggtgaacgccagcatcgcgcacatcctcaagtacctggacggctcggcccgcaccttcgccaacgccgtgcaggcgtacgtggacgtgcgcgacgtggccgacgcgcacctccgcgtcttcgagagcccccgcgcgtccggccgccacctctgcgccgagcgcgtcctccaccgcgaggacgtcgtccgcatcctcgccaagctcttccccgagtaccccgtcccagccaggtgctccgacgaggtgaatccgcggaagcagccgtacaagttctccaaccagaagctccgggacctggggctgcagttccggccggtcagccagtcgctttacgacacggtgaagaacctccaggagaagggacacctgccggtgctcggagagcggacgacgacggaggccgccgacaaggatgcccccacggccgagatgcagcagggagggatcgccatccgtgcctgagagggcgatgccacacatgaacacaaagcaatgttcatactgctgccctgcacctgctgtgtaaacaggcctgtgtttgttctggctgatagtgatgtaccctaagacttgtaacgtcatgttcgttcttgtgaactatagcgagtgaataaaattggttaatgttggatgttcaaaattttgcagataagagagtcatcaattcaggttctgaaaagcaatcccgaaactaccaccctacctatcccctacaggctacagtagactgtacaagaccctttgttaccaaaccaaaaaaaaacatcggacaaactcaagactattcatgtttggtaacctacttgtgtagaaaagtgagctctattattggctgatgcaatatgccaacccttacatgcagcaggaaagcaaagaaagaacagtaaaacaaatgagttggtaaacagagaggactgcacaaaacaaggaatccggagaataacgatatctcaattttcaagaccaaatttggattaaaaaaaa

SEQ ID NO: 89233 - DNA, 1006 bp, Zea Mays
ggccgcccatgcaagcgggaagaatctcacctgcccacaggacaaccatgtgtttacactagagttgatcgatactgtaactgagaaccaaaaatgaatatgaacgaaacggtcttgaccttctcgctccttttttttattaggacgaccttgactgactgagatccttgactgactgtgtgcgtatgctattattagcgtttgctgctttgcttcactgactctgtgtgtgtgtgtgagcgcttggtgcaggtgctccgacgaggtgaatccgcggaagcagccgtacaagttctccaaccagaagctccgggacctggggctgcagttccggccggtcagccagtcgctttacgacacggtgaagaacctccaggagaagggacacctgccggtgctcggagagcggacgacgacggaggccgccgacaaggatgcccccacggccgagatgcagcagggagggatcgccatccgtgcctgagagggcgatgccacacatgaacacaaagcaatgttcatactgctgccctgcacctgctgtgtaaacaggcctgtgtttgttctggctgatagtgatgtaccctaagacttgtaacgtcatgttcgttcttgtgaactatagcgagtgaataaaattggttaatgttggatgttcaaaattttgcagataagagagtcatcaattcaggttctgaaaagcaatcccgaaactaccaccctacctatcccctacaggctacagtagactgtacaagaccctttgttaccaaaccaaaaaaaaacatcggacaaactcaagactattcatgtttggtaacctacttgtgtagaaaagtgagctctattattggctgatgcaatatgccaacccttacatgcagcaggaaagcaaagaaagaacagtaaaacaaatgagttggtaaacagagaggactgcacaaaacaaggaatccggagaataacgatatctcaattttcaagaccaaatttggattaaaaaaaa

SEQ ID NO: 89234 - DNA, 1740 bp, Zea Mays
ttgacgcccccccccccccccccccacaaacagtagatctcacatcattatcgaatcgagaacagtgacgcaatcactttggaaatggaactgacactgactaaactatggcaccactacgatccagaaacaatgagcgggcaggcggcagcacgggcgtcacacgacggcgggctgggggtcggccgcccagacgatgtctttgagcgccggccggagctcctcgctgcagaaggagcggtactcgagggagtcgccgccgtccttcttcacgtcgacgacgagcaccgacggcgccacgcagaagatgtcggccgccacggctagccggcccttgcggcccccgcgctccgcgccctcgagccgaacgccgcgggcgccgctcttggtcacccgcatccgcccgccgccgcgggcggccacctcctcgagacgggagacgacgccgctcgcgggctcccgcgtcgcgaaccgcatgccgccctcccggggccccctcgccggaccgccttccacgtcgaacagcggtgagaggtcgaaccccgcggagagggagatcaggtggaacgcgttcatcgtctccggtggctcgtccttgtcgccgccgtcctttgcggaggaggcaggctcggccggcggctcggttgcgccggcggcggctctgacggacctcgagacggacggcttgttgaaccacggcgtctcgacgagctgggcgatggtgatgcgggtgtcggggtcggggtcgagcagcttggggatgagcctgcgcgcctccgtggacagccacggcgggcaccggtagtcgccgcggctcatcttccggaacatggcggcaacgttgtcgtccgggaacggcagcgaccctgcgaggaggacgtagaggatgacgccgcacgaccagatgtcagccttggcgccgtcgtagcccttgttccggaacacctccggcgcgacgtacccgggcgtgccgcagagcgtgtgcagcagcccgtcgctgcgcgcgtggtcggccagcgcgctgaggccaaagtcgacgaccttgaggttccccgcgtcgtccaggaggaggttctcgagcttcaggtcgcggtggtacacgccccgcgcgtggcagaagtccacggcgtgtatgagctgccggaagtagcgccgcgccacgtcctccttgacgcgcccggcgcgcacgatccgcgcgaagagctcccctccgcggacgagctccagcgcgaggtagatcttggagcgcgtggccatcacctcgtggagctccacgatgttggggtgggacacgcgcttcatgacggcgatctcgcgcttgatctgctccatcatgcccgtgcgcagcatcttgtccttgtcgagcaccttcaccgccacggcccgcccggtgcgcaggtcccgcgccgcgtggacgcgcccgaagttgccgtgacccagcacgcggccgagctcgtagcggccctgcagcaccccgcccttcacctccgcctcgccctcacccatgcctgatcccctaactactagctagctatctgcaaagtgcaaactaccctacgacgactaacaggaggaaggaaggatggacgagtctacccgtcctcgacgtgcttgcgatggcaggttcggtcgccgcgcagctcgcgctgaccggcgacgtcagtgcctgagcgccgcctcatcgctccgcattccctgaggcgtcggggcgcttgtttcgccggggggtagatccgcagg

SEQ ID NO: 89235 - DNA, 161 bp, Zea Mays
taaaaaacataacgagcacgagttcaagtgtttagagataaccaccacttgggtggttagagctatgatcgctgccgccaccaggaggagggaacgcgaagagcgagtcaacaaattcagtccctgctgcgggatcagacccactaccaccggcttcgggc

SEQ ID NO: 89236 - DNA, 1828 bp, Zea Mays
ggatcctgtccacaagttcatgacccgcccccccacccccagtggcggtggcggcagacccgccgggcagctggaccgagccgatcggtccggtcccatctcagcggcccgcggcgcctgcccaccctctcagccaaaagccccctgcacccagtccatccaaacctgtgtccgcagctctcgccagccagtcgccgccacgagaggggatgtcgacggcgagcggcgtatccgctggctccgtgctccagctgccctcctttcgggtgccggccaagagatttctgcctcggagaacagccgctggtgctccggctggtaacttttttgtgaagagagatattatatataatagaagctaccaccaattcttaccattgaagcatataggaggcttgcaagcagcagtacttccagttactccaccactattagatggtgaggggaaaaagaaacaaatggctgaagagtatgggttcacacaaattggagatgaactaccagatgatattactcttaaagatgtcatggatactttacctaaagaggtatttgaaatcaatgatgtgaaggcttggacatcagttttgatatcagttacttcttatgcgctgggtttatatttcattgctaagtctccatggtatcttcttcccttggcttgggcttggacaggcacagcagtgactgggttttttgtgataggtcatgattgtgctcacaaatcattttcaaggaataagttggttgaagatgttgttggaaccttggctttcatgccattgatatatccttatgaaccgtggagatttaagcatgaccgacatcatgccaagacaaacatgttgatagaagatactgcatggcaacctgtttggcaaaaggaaattgaatcatcaccttttctaaggaaggcaattatttttggctatggccctatcaggccatggatgtctattgctcactggttgatttggcactttgatctaaaaaaattcagaccaaatgaagttccaagggttaagataagcttagcatgtgtgtttgcattcatggcgattggatggcccttgatcattctcaaatcaggactagctggatggtttaagttctggttcatgccatggatggtttatcatttttggatgagcacttttacaatggtacatcacacagctcctcatataccattcaagtcatctgaagaatggaatgctgcacaagctcaattaaacggcacagttcattgtaactatcctcaatggatagagatcctttgccatgacataaatgtgcatgtcccacaccatatttctccaagaattccaagctataaccttcgtgctgcttatgattccatcaaacagaactggggcaagtatgtcaatgaagccaactggaattggcgattgatgaagacgatactgacgagatgccatgtgtacgacaaggagagatactatgttccgttcgatgagctcgcgcctcaggagtcccaaccaatcaaattccttaggaagttcatgccagattacgcatgatgccatcatcacagctgttgactagttgagattattcagtattgtcggcacaggtggacagtcacattttcagtgattacgcatgtcccaaaattttgactggaatactccatgttacactattattcgtgcagtaggaaagcacgtagcgtaccaaaatatttatacttcaggaaatagacaaagacattggtgatgaaaacggacagaatcgtgtggaaaacatctcttctcttgtcatttctatattttttttccggaaacagaaacacgttcaaaattcccgg

SEQ ID NO: 89237 - DNA, 1816 bp, Zea Mays
gtccacaagttcatgacccgcccccccacccccagtggcggtggcggcagacccgccgggcagctggaccgagccgatcggtccggtcccatctcagcggcccgcggcgcctgcccaccctctcagccaaaagccccctgcacccagtccatccaaacctgtgtccgcagctctcgccagccagtcgccgccacgagaggggatgtcgacggcgagcggcgtatccgctggctccgtgctccagctgccctcctttcgggtgccggccaagagatttctgcctcggagaacagccgctggtgctccggctggtaacttttttgtgaagagagatattatatataatagaagctaccaccaattcttaccattgaagcatataggaggcttgcaagcagcagtacttccagttactccaccactattagatggtgaggggaaaaagaaacaaatggctgaagagtatgggttcacacaaattggagatgaactaccagatgatattactcttaaagatgtcatggatactttacctaaagaggtatttgaaatcaatgatgtgaaggcttggacatcagttttgatatcagttacttcttatgcgctgggtttatatttcattgctaagtctccatggtatcttcttcccttggcttgggcttggacaggcacagcagtgactgggttttttgtgataggtcatgattgtgctcacaaatcattttcaaggaataagttggttgaagatgttgttggaaccttggctttcatgccattgatatatccttatgaaccgtggagatttaagcatgaccgacatcatgccaagacaaacatgttgatagaagatactgcatggcaacctgtttggcaaaaggaaattgaatcatcaccttttctaaggaaggcaattatttttggctatggccctatcaggccatggatgtctattgctcactggttgatttggcactttgatctaaaaaaattcagaccaaatgaagttccaagggttaagataagcttagcatgtgtgtttgcattcatggcgattggatggcccttgatcattctcaaatcaggactagctggatggtttaagttctggttcatgccatggatggtttatcatttttggatgagcacttttacaatggtacatcacacagctcctcatataccattcaagtcatctgaagaatggaatgctgcacaagctcaattaaacggcacagttcattgtaactatcctcaatgagatcctttgccatgacataaatgtgcatgtcccacaccatatttctccaagaattccaagctataaccttcgtgctgcttatgattccatcaaacagaactggggcaagtatgtcaatgaagccaactggaattggcgattgatgaagacgatactgacgagatgccatgtgtacgacaaggagagatactatgttccgttcgatgagctcgcgcctcaggagtcccaaccaatcaaattccttaggaagttcatgccagattacgcatgatgccatcatcacagctgttgactagttgagattattcagtattgtcggcacaggtggacagtcacattttcagtgattacgcatgtcccaaaattttgactggaatactccatgttacactattattcgtgcagtaggaaagcacgtagcgtaccaaaatatttatacttcaggaaatagacaaagacattggtgatgaaaacggacagaatcgtgtggaaaacatctcttctcttgtcatttctatattttttttccggaaacagaaacacgttcaaaattcccgg

SEQ ID NO: 89238 - DNA, 3039 bp, Zea Mays
cggtggcggcagacccgccgggcagctggaccgagccgatcggtccggtcccatctcagcggcccgcggcgcctgcccaccctctcagccaaaagccccctgcacccagtccatccaaacctgtgtccgcagctctcgccagccagtcgccgccacgagaggggatgtcgacggcgagcggcgtatccgctggctccgtgctccagctgccctcctttcgggtaggaggacgctccgctgtctcgcatgtgccggccaagagatttctgcctcggagaacagccgctggtgctccggctggtaacttttttgtgaagagagatattatatataatagaagctaccaccaattcttaccattgaagcatataggaggcttgcaagcagcagtacttccagttactccaccactattagatggtgaggggaaaaagaaacaaatggctgaagagtatgggttcacacaaattggagatgaactaccagatgatattactcttaaagatgtcatggatactttacctaaagaggtatttgaaatcaatgatgtgaaggcttggacatcagttttgatatcagttacttcttatgcgctgggtttatatttcattgctaagtctccatggtatcttcttcccttggcttgggcttggacaggcacagcagtgactgggttttttgtgataggtcatgattgtgctcacaaatcattttcaaggaataagttggttgaagatgttgttggaaccttggctttcatgccattgatatatccttatgaaccgtggagatttaagcatgaccgacatcatgccaagacaaacatgttgatagaagatactgcatggcaacctgtttggcaaaaggaaattgaatcatcaccttttctaaggaaggcaattatttttggctatggccctatcaggccatggatgtctattgctcactggttgatttggcactttgatctaaaaaaattcagaccaaatgaagttccaagggttaagataagcttagcatgtgtgtttgcattcatggcgattggatggcccttgatcattctcaaatcaggactagctggatggtttaagttctggttcatgccatggatggtttatcatttttggatgagcacttttacaatggtacatcacacagctcctcatataccattcaagtcatctgaagaatggaatgctgcacaagctcaattaaacggcacagttcattgtaactatcctcaatggatagagatcctttgccatgacataaatgtgcatgtcccacaccatatttctccaagaattccaagctataaccttcgtgctgcttatgattccatcaaacagaactggggcaagtatgtcaatgaagccaactggaattggcgattgatgaagacgatactgacgagatgccatgtgtacgacaaggagagatactatgttccgttcgatgagctcgcgcctcaggagtcccaaccaatcaaattccttaggaagttcatgccagattacgcatgatgccatcatcacagctgttgactagttgagattattcagtattgtcggcacaggtggacagtcacattttcagtgattacgcatgtcccaaaattttgactggaatactccatgttacactattattcgtgcagtaggaaagcacgtagcgtaccaaaatatttatacttcaggaaatagacaaagacattggtgatgaaaacggacagaatcgtgtggaaaacatctcttctcttgtcatttctatattttttttccggaaacagaaacacgttcaaaattcccggaattgaaaacagggttgggatatgtggttgttcggaaacaaactaatttactaataaaatacgacttgcacaggcctgctgggccgccgcaacctaagaatggacaccgtcaaatgagcccaccccttaataaaccctagcccgcctccgccgccctataatccgacgccggacgccccatgatttcgctttcttcttcccgtcgagacccaaccataccagcggcgccgcaggctgacgaggaggcggagtagagtggccggactacctcgacacctccactgcaaccatgggtatctcacgtgattcgatgcacaagcgccgtgccaccggtggaaagcagaaggcgtggcgcaagaagcgaaagtatgagcttggccgtcagcctgctaacaccaaactgtctagcaataagacagtgaggagggtccgtgtccgtggaggcaacgtgaagtggagggctctccgattggatacaggtaactactcgtggggaagtgaggctcttacccgcaagacccgcatcctggatgtggtctataatgcatcaaacaatgagcttgtgaggactcagactcttgtgaagagcgccattgtacaagttgatgctgctccattcaagcagtggtacctcactcactatggagtggacatcggtaggaagaagaaggtgcctgttgctaagaaggatgcgactgagggacaagagggtgaggctatagctgaggaaacaaagaagagtaaccatgtgcagaggaagattgagaagcgacagcaggaccgtgcactcgacactcatattgaagagcaatttggcagtgggagattgttggcctgcatttctgcccgtcctgggcagtgtggccgagctgatggctacatccttgagggtaaagagctcgagttctacatgaagaagctccagaggaagaagggcaagggtgttgcatcttagagcattcttttagctagaactgcaaaatatcttctacttgggggttttgttgttagtctttatgcatatcatttgcggacctgatgaacacttcataagtgaatcaactctcgattccaagaattgataattttcacatgcggtggttgtaattgtgatatttaggtttgctatttattgaaacttcttgtctaaagcagttttagtttaccttgaagatgattgttagaaacgagatcctatccaatctatattgctgtttggttttcacttt

SEQ ID NO: 89239 - DNA, 875 bp, Zea Mays
taccaaaaattaagatgatatttggtaggatgtgccaaaaaacgtgtagaccatcaactctgttttatttaacaaaattattcaattgtgtgttgtccagtccttgtttagagttagtcagaggacaatatttcattgaagtttcagcaacaaatatggaatgctttttttttggatattttgggataaaggattcatgttggcttaagtgtcaatcttctactagcaaatcaatttctagtgaaattaccgtgggaacatgttggcctcttcaattgaattttcaaatgagtaatggatttctattacaggatagagatcctttgccatgacataaatgtgcatgtcccacaccatatttctccaagaattccaagctataaccttcgtgctgcttatgattccatcaaacagaactggggcaagtatgtcaatgaagccaactggaattggcgattgatgaagacgatactgacgagatgccatgtgtacgacaaggagagatactatgttccgttcgatgagctcgcgcctcaggagtcccaaccaatcaaattccttaggaagttcatgccagattacgcatgatgccatcatcacagctgttgactagttgagattattcagtattgtcggcacaggtggacagtcacattttcagtgattacgcatgtcccaaaattttgactggaatactccatgttacactattattcgtgcagtaggaaagcacgtagcgtaccaaaatatttatacttcaggaaatagacaaagacattggtgatgaaaacggacagaatcgtgtggaaaacatctcttctcttgtcatttctatattttttttccggaaacagaaacacgttcaaaattcccgg

SEQ ID NO: 89240 - DNA, 1199 bp, Zea Mays
aggaccgctgtggaaggtaggaaaagaaacagaaatctagcttaagcatccggctcgcacgcaccgacgcgcgacgcacgagaccgaccaccttcctccgccccaccactccccccgcgcgcgccgtgcgatcaccgccggcccccgccctcaccctggccgccttgaggaaaagcaaggccaacgccttctcctcctcctcctcctctccaccgaggtcgcgccgcgcgattgccgtcacgatggccgcgtcgctgctcgtgctcgccgtggcgttcctggttggcgctggccacggcggcatcgatgggggtgcagcagctcacatggaggtagagggctctgaggtgacctacgggagtgtgattaagctgttgcatgagaagacaaagcaccgtctgcactcacatgatgtgccgtacggctcaggcagcggtcagcagtctgtcaccggctttcctgaaggcgatgactcaaatagctactggatcataaagcctactccagattcatcgtctaagcaaggtgattccattcaaactggtggcatcatcaagttgcaacacatgaagactcggaggtggttgcacagtcacctgcacgcttcaccgttatctggtaaccttgaggttagctgttttggtggggatgaattgtcagatactggtgactattggaggctagaaattgaaggaagtggaaaagtatggaaaagagaccaaaaggtacgacttagacatgttgacactggaggttatctgcatagtcacagcaagaagtacaaccgccttggtggtgggcagcaagaggtctgcggtgtccgagagaagcgagctgagaacatttggttggcagcagagggtgtttatctcccggttaacggaagcaagtgaaaaagcactttcagtatttaccagttttaatgttaattagcataggatcagatattttactcgctttcattcgttcttgtttttcttaagataaatgaacatgggacatgacccctagtgatatgaaattggaatgttgggcatcgaaggtgtcgtacatgcttgtaattggatatttgtgatacatgtgtgaccgtgtagagactcagagatgcaagtgacactttgttcacaagtagagatgctgatcatcttctagatgtgacgcagaaaagacagtcgtggcaaatcttgagttttcgccgc

SEQ ID NO: 89241 - DNA, 720 bp, Zea Mays
ggctcctatatcctcgctcagggatctaggtacggcgccgtcccatggcttttcctaagggcggaggtataggttttggtacatcagatggtctctatggtaatggtggcatctgttatggctcctataatctcactcagggatctaggcatgggtatcatcccacgactttttcctgagagcggaggtataggttttggtacgtcagatagtcgctatgcaatggtcatttccaacattcgcatagtgaggaccctaggaaaaagccacatagtaaaaccttgcctactcaccttggaagtgtttaagggtctgtacaacccgaggcaaaagggataacgactcatgggtaaagtgtgcaacctctgctaagtgttatgaaactgatatatcagtcgtgctcacggttaagagcggcctcgggatcctctttgattagagatactgatggttcgagatccaatggttctattaatggtttttggttcgatgatgataatgatgttcctcgatgaggaaatgattcacgagttggttttgctaaaacctggcttctactaataataaatacctgacaaactaaaagcaactgcttgaccctaactccacataaagttagtccacctcagccaaacgggacatttgttgagtacgttgatgtgtactcacccttgctttcacaaaacaccaggttgcctttggtgcaatctatgctcatgt

SEQ ID NO: 89242 - DNA, 1136 bp, Zea Mays
ggaccgggaccaggcacaccacgcacgcagaaccctagaggcattcccaagttcgagcaatcgagctcgagccccagaggaacgagtcctgccggacgccgccacaccatctgaaactgacggcggcgggcggccgctgcttcctctcccttctccgtccagatccggcgactggcgtccctcctccgccatcttccctaccctcgacgtggcgatgagctgtgagccgtgagctgttccaacattccggaaataaggggcaagcgagaagatgaggctggtgggtttgacgggtggcatcgcatctgggaagagcactgtctctaacctctttagggactctggtgtccccgttgtggatgccgatgtcattgctcggtcttctggcaccacatatttcttatagcattgtctgggagatagcaaaactgtggatgaaaggctgcaaggttatcatccttgacatcccgctgctgtttgagacaaagatggatagatggacgaatccaatcattgttctctgggttgatccaaaagtccagattgagaggctcatttcaagagatggatgctctgaaggacaagctcagaataggatcaatgcacagcttgcactagactggaagaaatcagaagcagacatagtgattgacaattctggttccctggatgacaccaaacagcaattccaagaagtgttgatgaaagtctcggagcccttgacatggaaggaacgcttgagatctagagatggtctgatctctgttgtcgtctttactgcagtgggcgtattacttgcccagaagaatctgctatgatcatgaaggcttagggagttaaaaatgttgatacgatgttttaaaggactggcacaactaagtaagaacccttagtaagaaccactatttttagttgtccttactggataatgggtcaagtaatgaaagtctgcatttagggattgctgggcttagccaaaatcttgttgtaccaaattgtgttgatgggctgggaattacaactatattcggactacgggctatccatgttcatgtgattttttgtaccgagtataaagcatggccatgcatgcgaatccgcactgcctaattatggaagccacttgattagaagct

SEQ ID NO: 89243 - DNA, 1722 bp, Zea Mays
gaccgggaccaggcacaccacgcacgcagaaccctagaggcattcccaagttcgagcaatcgagctcgagccccagaggaacgagtcctgccggacgccgccacaccatctgaaactgacggcggcgggcggccgctgcttcctctcccttctccgtccagatccggcgactggcgtccctcctccgccatcttccctaccctcgacgtggcgatgagctgtgagccgtgagctgttccaacattccggaaataaggggcaagcgagaagatgaggctggtgggtttgacgggtggcatcgcatctgggaagagcactgtctctaacctctttagggactctggtgtccccgttgtggatgccgatgtcattgctcgggatgtagtgcagaaaggcaccagaggttggaagaagattgtaaaagcctttgggaatgatattttgctggaaagtggagaaattaacagagctctattgggacaaatcgtattttctgacccatcaaaacgtcaacttctaaaccgtcttctggcaccacatatttcttatagcattgtctgggagatagcaaaactgtggatgaaaggctgcaaggttatcatccttgacatcccgctgctgtttgagacaaagatggatagatggacgaatccaatcattgttctctgggttgatccaaaagtccagattgagaggctcatttcaagagatggatgctctgaaggacaagctcagaataggatcaatgcacagcttgcactagactggaagaaatcagaagcagacatagtgattgacaattctggttccctggatgacaccaaacagcaattccaagaagtgttgatgaaagtctcggagcccttgacatggaaggaacgcttgagatctagagatggtctgatctctgttgtcgtctttactgcagtgggcgtattacttgcccagaagaatctgctatgatcatgaaggcttagggagttaaaaatgttgatacgatgttttaaaggactggcacaactaagtaagaacccttagtaagaaccactatttttagttgtccttactggataatgggtcaagtaatgaaagtctgcatttagggattgctgggcttagccaaaatcttgttgtaccaaattgtgttgatgggctgggaattacaactatattcggactacgggctatccatgttcatgtgattttttgtaccgagtataaagcatggccatgcatgcgaatccgcactgcctaattatggaagccacttgattagaagcttgccctttagtcacagaagtgttcttttcaggcttgtcaacatttcaattttgggtacacattactctttcaatcataagtttgggggtgtttggtttcaagtttgggggtgtttagtttctggggactaatttttagtctctcaaatttattctatgctaatctctaaattaccaaatacggaaactaattagcaatttagaagggactaaaaatctctagaaaccaaacacctctttttgaaagtgatacgagtgtatttgtttttttagaaatagtatgataaatatttgccaaagtttgaaatggctgatttcaggaaacctaatacaccacttatttgtcactggacggaataatcaactctgagggctagtttaagagctaaaataccagtgggaattggaggagctaaaattctcttattttgaaaaaaaaaga

SEQ ID NO: 89244 - DNA, 1018 bp, Zea Mays
gggaccaggcacaccacgcacgcagaaccctagaggcattcccaagttcgagcaatcgagctcgagccccagaggaacgagtcctgccggacgccgccacaccatctgaaactgacggcggcgggcggccgctgcttcctctcccttctccgtccagatccggcgactggcgtccctcctccgccatcttccctaccctcgacgtggcgatgagctgtgagccgtgagctgttccaacattccggtcttctggcaccacatatttcttatagcattgtctgggagatagcaaaactgtggatgaaaggctgcaaggttatcatccttgacatcccgctgctgtttgagacaaagatggatagatggacgaatccaatcattgttctctgggttgatccaaaagtccagattgagaggctcatttcaagagatggatgctctgaaggacaagctcagaataggatcaatgcacagcttgcactagactggaagaaatcagaagcagacatagtgattgacaattctggttccctggatgacaccaaacagcaattccaagaagtgttgatgaaagtctcggagcccttgacatggaaggaacgcttgagatctagagatggtctgatctctgttgtcgtctttactgcagtgggcgtattacttgcccagaagaatctgctatgatcatgaaggcttagggagttaaaaatgttgatacgatgttttaaaggactggcacaactaagtaagaacccttagtaagaaccactatttttagttgtccttactggataatgggtcaagtaatgaaagtctgcatttagggattgctgggcttagccaaaatcttgttgtaccaaattgtgttgatgggctgggaattacaactatattcggactacgggctatccatgttcatgtgattttttgtaccgagtataaagcatggccatgcatgcgaatccgcactgcctaattatggaagccacttgattagaagcttgccctttagtcacag

SEQ ID NO: 89245 - DNA, 2982 bp, Zea Mays
gtagtagtcaattgtctattactcttatacaatgcaaaatgcatagtgcaaactgatcgctaaaaaaagaatggttaccttgcttccatcaaggacgattattattctttctgtagatggtaaaaatggttttttggttttcgtagtactatgctgaactatgttgagctttatttttgatataggtatttggtttcagaaatgacttggtctacatttcaggcctctttgggacagctccaccgctaaaaaaatgaatatggatctaggattcaacacaaagcaactccaccagtgaatctgggatctagtagggaattgtttagataacacaataaatctagatccacacaagagtatttttattggaatggctagatctacctttagcatatgttccacctgttaatgttgggaaaaagcttttcaaaatttcccccttctgctagttctgcacggcacacgcgaacggtagctcaaccacgctcgagtgtggccatgtgcggctaggggagtacactcggtggcttgggtcgggctgcctatgcaacaatgggtgtgcgcgggaggttgcttggtggtctggggcgggcacgcggtggccaggtgacatagccatggtcaggcgcggctaggtagtggccgagaaggggtgcacagtgtccaggcgggtgcacgtggactgcagcgcggccaggcacgaccatgggagggcgcgtggacgatgatgtagccacgactgggcctggccaggcatggccaggggagggcgctcggtggcctgccggccgggcgcggacggtagcgcagccatggccgagcatgaccaggagagggcgcagccatggccgagcatgaacaagagaatatgatggagaagagaaggtgggaaagaatagaacgaaacagtacattggcagtggtgggtaattttttctcaacttcgctaatttgagtttgttggagcactccttgaggtgctccaccaaaattgtgaatttggcctctagatcactacttcggttaatctgaatttcgttaagcaaggccatttgggtaactttccgtggagtagagttgttttggtggatctagagctggtggagctgtcctaaacaagcaattcctctcacttttctctttgatctgcggaagggaatgagtttatccaccaccacatcatttctcacaagctaataattagtataagcatgagcgatggagcaattctaccaaattcatgagatgaactcatgatgaaccacctctaaccaaacacccccgaaatgggacaagacctacattagctactctagctgaaaatggaagtggctggtgggcacattaaaagtgttatatcattactgccctatgttttcaagtcaagcgatcagccgatcgacctaggggtccgaccaggcaactaatctcgattagtcgaccaggcgagtatatatggtatataagatcatatatgtatagagtatataacatagtatagagtatatatgtatagagtatataacatagtatataactatatataaagggtaaacatgacatgatttctgtaatactcatttaagagaagacatttgttcatccaacttaaaacagtagctctccaatggccctaaagtaattgaggtgttcaaaacagtaaagaaacacttgctaccacactaccagtgacctaaagaagatcttcattcaactgaagttcatcaacagaagcagctccccttccacctgattcatcttcgccttcaccatcgttcatttttcttgctgtctcttgttcttgttgttcaaaacagcagcagctcccctaaaagcccacggaattttttacaggcttcggactctggtcgctcagaagcgctcgagcgactaatcgtccctagtcgtcaactagtcggacgaccagcgcgatcaggtgttctgatcgggccggcttccctaatcggccactctaaaccaaccagcccgactaatcatgactaatcgcgattagtcggacgacttgaaaatagagttactgcagcttgagcacaatgtttccttcgtactaggctactggcatatttaacacacttattcttctggatttgacataattgttcagttggctgaatcatttgttcttttttatcaatagttgacatttcttgtacagtattggtagtagtgtacaggttcgttgataatttattggtcattttcagtcttctggcaccacatatttcttatagcattgtctgggagatagcaaaactgtggatgaaaggctgcaaggttatcatccttgacatcccgctgctgtttgagacaaagatggatagatggacgaatccaatcattgttctctgggttgatccaaaagtccagattgagaggctcatttcaagagatggatgctctgaaggacaagctcagaataggatcaatgcacagcttgcactagactggaagaaatcagaagcagacatagtgattgacaattctggttccctggatgacaccaaacagcaattccaagaagtgttgatgaaagtctcggagcccttgacatggaaggaacgcttgagatctagagatggtctgatctctgttgtcgtctttactgcagtgggcgtattacttgcccagaagaatctgctatgatcatgaaggcttagggagttaaaaatgttgatacgatgttttaaaggactggcacaactaagtaagaacccttagtaagaaccactatttttagttgtccttactggataatgggtcaagtaatgaaagtctgcatttagggattgctgggcttagccaaaatcttgttgtaccaaattgtgttgatgggctgggaattacaactatattcggactacgggctatccatgttcatgtgattttttgtaccgagtataaagcatggccatgcatgcgaatccgcactgcctaattatggaagccacttgattagaagct

SEQ ID NO: 89246 - DNA, 579 bp, Zea Mays
ccgaacttgcatacgaacgggtatagaattctcaatatatttgaaattggatatgtacgaaaattatctaccatttacactctagttggaggctttcgacacatgaattacgtcgtcccttaattaggctcattctggtggagagacattcttaaaattcaagaatcttataaagagttagcttgggtggagattggagatagaaaaacaacacttctgtgtcatgacaactgggatggcatgtgcaagtctgcaagattcccagaactttggtctttcgcttccatcaaagacatcactattcaccaagcaagaacggcaacctcgcatgagatgttccacactcctctgtctgttgaagcttttgagcagtttcatgctttacaagacttattggcaaatcttccgcaacatgatcagagaggcaaatggctctgcaatggttcctctagcttgttttcctcacagaaggcctatactcacatgtctggcaaccagtggacccacatgtctggcaaccagtggacccacctcatcttctcctggttgtggaaaacaaaatgtcagcctaaacacaag

SEQ ID NO: 89247 - DNA, 133 bp, Zea Mays
tttttattttttattttatttactttctgtgatcataattaccgtattttaagtaggctaatcactgttcatgctatgggaaaataggaagtttaatttaaaattccgttatgttattgattcacgtagttaa

SEQ ID NO: 89248 - DNA, 5770 bp, Zea Mays
atggcctctccacaccccccaccccctcccccaccccaccatcacgctccacctccagccatctccaacccctcccctcccaacaccatcatcaaccatagccaaggcctctcgctgacttccaccccggactcggcgaccacctcatcaacctcccggcgtttctctcaaggcgacgagcctttcagtttccaggctcgacaaggtggacgttcaaagacccaacgctggagtgacgactcctcgtctggtggttcgtctcataagttttgctcctttaaagaggccctcgtatcaggatccaggcgcctccattctcttgtcacgactagttcaagtgccccagagggtgtgaaagacaagaaggagaaggctggtgtggtggagcagaagcagctagtggaatcacttcgggacgagcttggctggcaggtggttgagcgcaggaagaagacccagcgtgtgcatcttcctcgtcgagggtcccttgtggatctccgaggcaggtgcttcaactgtttttcttcctcccatcttgctgcagcgtgtcgacgttccacccgatgctttcgatgctttgacttcgggcatcaggtgagctcttgccccacgagacctgtggcacgtacgaggcagtgtggcggattgaagcaagaaaagaaggttgacagaatccctgtctggcagcggttgactaggatggtgggggacgttcctcttaggacggatggtcagggctcaagaccaaggaagtcggtctggaaaaggatctcaccactgcaggagggggggatgccggaatatatatctccttcatctgtgcaaggtgctagcgttggaggccatgaaggattgcgatgcaagcgaaagaggaaccgttccaagcgcggacgaggagaaaagatgacgattgatcaccctcagcaagaagctccggtgtcggttattggagcagcaagcccggacccatccctgttgtttggcaacaattctgaggagtttgactccacacttaactccaactgcgttctggattactcggatgatttggcgagggaggaaattgctctccgacgagctctatttgtctctgtggctggaacacgcccaatggtccttgcttcagaagttgtggacgaagttgcacgccagttcgatattgcagtgaagaacatgtcaatccagcgaacaatgccagaagacttccttctgttactgcctgatgaagatgctgcagctatggttttcaacgatggaaaggcactgcgggggcctcgtttcaccttgttgttcaagaagtggtcgagatttgctcatgcttccgcctcgtctttgtccaaattagtggatattgaaattagaggcattcctgagcacgctcggtctcgttctacggcggagcatattctgagaaattcatgctggataacagaggttcatcaaaattcaggatctgagagagattttgcatccttttgggtgcgtgcttggtgtttaagcccggaacggttgtgcagaaaattggatctacatatccttgagcctggagatgttatccatgagaagagatgcttaacatacaaaattgatatctcatgtcgcctagttgatctccacccggcgaactcagctgctccacctatacccccggagcccttccaggaatcggaggaagatcaggatcaagatgagcaggagccacatcgtcgtcactgcggtgatgctaacgctgctggggatccacggcggtctctccatcttcgcctgggaccgcgcccccccttgggccgtacgcatgacatgcatggatctcgggaggacccccggccgtttagtgctctgggcattaactgtgatatggctgggaggcccgaggagctgctgcctcgcgtgcctggaaagaggggagatgaggggactgctgggggacacgagcggtttgaagtgctgacgcctcgggctgcgaaaggaacgggacacgaggaggcagtttggagccaagagatgcagtcaatgtgttgcatgggaaatatggaagatatggcggcagaggagcagacgatctctacctctgaagctatcggccagcggacggtggaaaaaataaacaacctctcctcctttcgccctggtgggccgcggggctggattgctccatggacgccccagctggacatatctgctgggttgctgaattcctgtggacccagctcgccccacaaggcctcttgtaacatattttacccccttgctgagtcgctgggccctaattggacacctttgccccaacaaattcctctagttgggttgctgaagggaatcattaggagctcgcctcatcagtttctcaacgtaaatgggatgctgggccaggataggcacttttcaccccaacaggaattgtctattgggttgctggagaggcctgagcctggctcgccccgctatggtgaagaaaatgatcagttctttgaagaacactgtgaggaagatggtgatgtaactggggtacctgccccactgatgccctctggagtgactcagaatggctctaatgctgaagatgatgggcgctcagggactgccccactgatgccctctagagtgactcagaatggttctaatgctgaagatgatgggcggacagggagatcaagcagggagaagtttgtcaacggcatctgcagaaggccttcgggtattttgccggttccagaaaacatcacacaacggcaactgtcacctccctccacttttgtttcggctccgaggagaagtcgtcgggtggctggtattggggtggaatttcagatgcaggatctggggagcagatcaacaaagaaagttatgaggactttacaaatcatcacagaatatgaaggaattagccatgaggcaatcgaagaatataaaaaactcttcactcatcctctgtctcaatgtcatattgaagccctttcagccttgtttggttggaacactccgcctgatctggtgttcagttaagggctgtttccttggtgtcgtgttatttttactgtaataaatggatccttcaaaaatattggtttggaatgttagaggtctgaattcgtctatgcgtcaagattctgtgagagaacttattgattcttcaagagtagatgtggtctgtcttcaggaaaccaagatgcaagttatttcagatcgattcattctttcattgttggggacagactttagtgattttatttttctcccttctgttggggcagccgggggcattcttgtggcttggaggcgacatgtgggtttcactggacaaaaaagatgggataattatagtgtatcagttcagttttgtaatgacagggggactgattggtggctgacctgtgtttatggtcctcaaggaagcaatgagaagattatgttcctacaagaaatcagagaaataagggctgagtgtctgggaccgtggatgttggctggagacttcaacctcatttatagagactcagataggaacaacaataatttcaacagagcaatgatgggaaggtttcgaagcttaattgaggatatggccctgaaggaaatccccttacatggcaggcagttcacttggtccaaccaacaaaatgtgcctgtactggtcaagctagacagagtgttctgttctgtagattgggaattgctcttccccaatgttcttcttcagagtactgcctcacaagattcagatcattgtcctttactcctggggcttagggataataaatccggaaaaaggcgtttccactttgaatccttctggaccaagcttgaggggtttcaggatattgtccttgctgcatggaactctattgagacagctacatgtccttttaaatccctggaaatgaaatttcaaggaactgcaaaaagcttgcaggcctggagcgaaaagcagatcgggcacgtgaggtcccaacttgcccttgctaaagaaatcctccataagctggaaatagcgcaggatggtagagtgctcagccctgctgaatgctggctcaaactcagactcaagaaacaggcattacttttatcatcttgcaagagaactattgcaaggctgagagcgaggatttcatggctcaaagatggagatgctaatacaaagttattccaccttcacgcccgtcaccgtaaaagaaaaaattttgtggcatgtcttgttgatggggatcaaaacctaaccagccatgaggagaaagctgcctgtgtggaccgtttctacaccaatctattgggaaacagtatggacaggatacgggcaattgagttagaggctcttggaatgcccagttttgatctgaccgatctggaagcccccatttcagagcaggaagtttgggatgccatcaaatgtctgccctcagataaggcccctggccctgatggattcacaggaaggttctacaaggcttgctggacaattatcaagaatgatattatggcagccatctcggctgtttggggcaggaaatttaacaattttgggcgcctgaatacagcctatatcacattgatccccaaaaaagacggagttgacaatattaaagatttcaggcctatcagtttggtgcacagttttgccaagttggtcaccaaaatccttgctaacagattggccagcaagcttaacgtgatggtgtcgcctaatcagagcgcatttataaaagggagattcattcaggacaatttcatgttggttcaacaaaccgccaggttgctgcatcagcaaaacaaggccagcctgctgttaaaattagatattacaaaagctttcgattctgtctcttggccttttttgattgaggtattgaagaagttgggttttggacagatttggagggatttgatttgtgggcttctggctacctcctctactcagattcttttaaatgatgatgtggtccttttcttatgcccagcactgacagatatagacctcactcttagcattcttcaactgtttggagacgcctcggggctacacaataatgtgcaaaagtcaaatgtgtatcctattagatgctctgaggaggtgctgctcgaagtccagaccctgatgccatgtgaaatctcaacctttccgtgtcgttatttggggctccctttgtccttacacaagttgacaaagcaacagttccaaccttttgtggataagatagctgatcagcttcctaattggaaggctgacttaatgacacgggctggaagaagagtgcaagttcagcatgttcttactagcatgacggtatacttagcaatggcagtggatatcccacagtggggtttggaagctattgataaaatcagaagaggttttctatggagaggtcgcaaagaagctagaggtggccactgtcttgttgcctggggaaaagtctgtcgccccctaaagcttggagggcttggtatttctagtcttccagaattatgttgggcacttcgactaaggtggctttggttacaaaagactgaccactctcggccctggtctggacttcaaatacgagtcccaaaaaaggctagagctttcttttctgcagtagtgaccactgaagtggggaatggaaacaataccaaattctggaaggataaatggcttaatggaaaaagaattgcagatctgtttccaaggctgattggcacaattccgaagcgggtaatcaattgcaggacagttcaagaagcaattgttagcgccaaatggatttctgacatcagaggggctttgtcagta

SEQ ID NO: 89249 - DNA, 345 bp, Zea Mays
atggcgacgaatttggcgcggatgacgaggaagcggaggtggcagtactcgtggccgatggagtttacgccgaggtggtacacccacccggagtactccgccgtgctccggccgctgcccccgctaccgctaccgctgctccggctgccgaggtccggcgatcccgcctccgagagctccacctcggagacatctcccgccgcagccgacggtggaaccgtaggcagcctcgcggccgtggccatctcccgcaggacacagcgcgagtgggggtggattccgacggtgaagggcgggggtaaagtgggaaagggtccaacagaatttggagctgtaaacctgtaa

SEQ ID NO: 89250 - DNA, 1838 bp, Zea Mays
gtagtattctagctctacctgctttccccactcgtgctctcgccattcgctcgaaccccgaagaactggcagtggcaggttactagaggatcactactttgaactcattaaagtgtctaatgatggctgctgttttaaaaacaagtggcagtttttgtagtacacaacagcagcattttcagcaatcaagaagggatcagtttttgcatggttcttattcaaatttcaaacattgcaaaagcaagaagataataaagcctgctccactgtgtgctagagtgacttcctcgaaagtggaactagatgttaaggatccatattggaagcagaagtttcaggaagactgggaaagccggtttgatttgccaagtattactgatatatatgatctgaaaccaaggccaactacattctcactcaagaaaaacagaactcttacaggtgatgaaaatgtggatatgtggaatggttatgttaacaatgatgatcgggcacttttgaaggtgataaagtattcatcgcctacttctgctggagcagagtgtgttgatcttgactgtagctgggtggagcaatgggtgcatcgagcaggaccacgcaaggagatatactatgagccagaggaagtaaaagctgctatagttacctgtggaggtctatgtcctggtttgaatgatgtcatcagacaggtccttatcttaagaagtgtccagacatttctgcatttcaaacccaaaattcttgacattcatgtcgaacatcaacatgaataagatagtattcaccctagagacctatggtgttaagaatattgttggaattccatttggttatcgtggatttttcgaaaagggcctcaaagaaatgccgctttcacgtggtctagtggagaatataaatcttaatggtggaagttttcttggtgtttctcgcggtggagctaaaactagtgagattgttgatagtatacaggccagaaggattgacatgctttttgtacttggtggaaatggtacccatgcaggagcaaatgctatccatgaagagtgccgtaagagaaagctgaaggtttcagttgtagcagttccaaaaacaatcgacaatgatatacttttgatggataaaacatttggttttgatacagctgttgaagaagcccaacgagccattaattccgcatatatagaggcacgtagtgcttaccatggtattggcttggtcaaattaatgggaagaagcagcgggtttattgcaatgcacgcttccctttcaagtgggcaggtcgatgtctgcttaatacctgaggtcccgttcactctagatggagaatttggtgttttgcggcaacttgagcatttgctaaagagtaagggattttgtgtggtttgtgttgcagaagctgctggacaagatctactccaagaatcaggtgcgactgatgcatcaggaaatgtgatattgagtgacattggtgttcacatgcaacagaagattaagatgcatttcaaggacattggtgttccagctgacgtgaaatacatcgatccaacttacatggttcgtgcatgccgtgccaacgcatctgatgcaattttgtgtaccgtgctcggacaaaatgctgtccatggggcatttgctggtttcagcggcatcacttcttgcatctgcaacacgcactacgtgtaccttcccatcacggaggtcatcacagcaccgaagcgcgtgaacccgaacagcaggatgtggcatcggtgtctcacgtccactggtcagcctgacttccactgatctgccatcgtcactgcataaccaaattcgcatagtttgaggtactagat

SEQ ID NO: 89251 - DNA, 2347 bp, Zea Mays
gtagtattctagctctacctgctttccccactcgtgctctcgccattcgctcgaaccccgaagaactggcagtggcaggttactagaggatcactactttgaactcattaaagtgtctaatgatggctgctgttttaaaaacaagtggcagtttttgtagtacacaacagcagcattttcagcaatcaagaagggatcagtttttgcatggttcttattcaaatttcaaacattgcaaaagcaagaagataataaagcctgctccactgtgtgctagagtgacttcctcgaaagtggaactagatgttaaggatccatattggaagcagaagtttcaggaagactgggaaagccggtttgatttgccaagtattactgatatatatgatctgaaaccaaggccaactacattctcactcaagaaaaacagaactcttacaggtgatgaaaatgtggatatgtggaatggttatgttaacaatgatgatcgggcacttttgaaggtgataaagtattcatcgcctacttctgctggagcagagtgtgttgatcttgactgtagctgggtggagcaatgggtgcatcgagcaggaccacgcaaggagatatactatgagccagaggaagtaaaagctgctatagttacctgtggaggtctatgtcctggtttgaatgatgtcatcagacagatagtattcaccctagagacctatggtgttaagaatattgttggaattccatttggttatcgtggatttttcgaaaagggcctcaaagaaatgccgctttcacgtggtctagtggagaatataaatcttaatggtggaagttttcttggtgtttctcgcggtggagctaaaactagtgagattgttgatagtatacaggccagaaggattgacatgctttttgtacttggtggaaatggtacccatgcaggagcaaatgctatccatgaagaggttaaggaatatgtttctattattgttttcatttatcactcagtattatgttttcctgcctatatttgacgtgttaagaagttaagtgtttgtaaatgaattatccttggattttttttggaatccttttgagcctttctcattggaagccaaaataggtgcagacacgtgtgtgcataaaaaacatgttttactcttagtttactttgtcttcttgatatatcatatcgaaggttacatcaatttatattccccacaattacagtgccgtaagagaaagctgaaggtttcagttgtagcagttccaaaaacaatcgacaatgatatacttttgatggataaaacatttggttttgatacagctgttgaagaagcccaacgagccattaattccgcatatatagaggcacgtagtgcttaccatggtattggcttggtcaaattaatgggaagaagcagcgggtttattgcaatgcacgcttccctttcaagtgggcaggtcgatgtctgcttaatacctgaggtaatataaatgtagcttttactatgtttaaaactgccatatgttttcctctcacatgtaagcactaacagaagcttacaagttacaatatgaatgaaggtcccgttcactctagatggagaatttggtgttttgcggcaacttgagcatttgctaaagagtaagggattttgtgtggtttgtgttgcagaagctgctggacaagatctactccaagaatcaggtgcgactgatgcatcaggaaatgtgatattgagtgacattggtgttcacatgcaacagaagattaagatgcatttcaaggacattggtgttccagctgacgtgaaatacatcgatccaacttacatggttcgtgcatgccgtgccaacgcatctgatgcaattttgtgtaccgtgctcggacaaaatgctgtccatggggcatttgctggtttcagcggcatcacttcttgcatctgcaacacgcactacgtgtaccttcccatcacggaggtcatcacagcaccgaagcgcgtgaacccgaacagcaggatgtggcatcggtgtctcacgtccactggtcagcctgacttccactgatctgccatcgtcactgcataaccaaattcgcatagtttgaggtactagatgatttacaattctttcgctgatgtgctccattcacatcgtgaggttccaagattagttaataatgctaaactgagtggacttgtctggtttgttcacgaaggtggtgttgtccattgttccgaagctctggtatttgagaaatttgcatatttaacactataaagatgtgactccacagatttgccattttcaagatgggctacgcaaaattgccacctgtttcattgtc

SEQ ID NO: 89252 - DNA, 1911 bp, Zea Mays
gtagtattctagctctacctgctttccccactcgtgctctcgccattcgctcgaaccccgaagaactggcagtggcaggttactagaggatcactactttgaactcattaaagtgtctaatgatggctgctgttttaaaaacaagtggcagtttttgtagtacacaacagcagcattttcagcaatcaagaagggatcagtttttgcatggttcttattcaaatttcaaacattgcaaaagcaagaagataataaagcctgctccactgtgtgctagagtgacttcctcgaaagtggaactagatgttaaggatccatattggaagcagaagtttcaggaagactgggaaagccggtttgatttgccaagtattactgatatatatgatctgaaaccaaggccaactacattctcactcaagaaaaacagaactcttacaggtgatgaaaatgtggatatgtggaatggttatgttaacaatgatgatcgggcacttttgaaggtgataaagtattcatcgcctacttctgctggagcagagtgtgttgatcttgactgtagctgggtggagcaatgggtgcatcgagcaggaccacgcaaggagatatactatgagccagaggaagtaaaagctgctatagttacctgtggaggtctatgtcctggtttgaatgatgtcatcagacagatagtattcaccctagagacctatggtgttaagaatattgttggaattccatttggttatcgtggatttttcgaaaagggcctcaaagaaatgccgctttcacgtggtctagtggagaatataaatcttaatggtggaagttttcttggtgtttctcgcggtggagctaaaactagtgagattgttgatagtatacaggccagaaggattgacatgctttttgtacttggtggaaatggtacccatgcaggagcaaatgctatccatgaagagctgttgaagaagcccaacgagccattaattccgcatatatagaggcacgtagtgcttaccatggtattggcttggtcaaattaatgggaagaagcagcgggtttattgcaatgcacgcttccctttcaagtgggcaggtcgatgtctgcttaatacctgaggtcccgttcactctagatggagaatttggtgttttgcggcaacttgagcatttgctaaagagtaagggattttgtgtggtttgtgttgcagaagctgctggacaagtatgctaaaattcacagctgtctggatctactccaagaatcaggtgcgactgatgcatcaggaaatgtgatattgagtgacattggtgttcacatgcaacagaagattaagatgcatttcaaggacattggtgttccagctgacgtgaaatacatcgatccaacttacatggttcgtgcatgccgtgccaacgcatctgatgcaattttgtgtaccgtgctcggacaaaatgctgtccatggggcatttgctggtttcagcggcatcacttcttgcatctgcaacacgcactacgtgtaccttcccatcacggaggtcatcacagcaccgaagcgcgtgaacccgaacagcaggatgtggcatcggtgtctcacgtccactggtcagcctgacttccactgatctgccatcgtcactgcataaccaaattcgcatagtttgaggtactagatgatttacaattctttcgctgatgtgctccattcacatcgtgaggttccaagattagttaataatgctaaactgagtggacttgtctggtttgttcacgaaggtggtgttgtccattgttccgaagctctggtatttgagaaatttgcatatttaacactataaagatgtgactccacagatttgccattttcaagatgggctacgcaaaattgccacctgtttcattgtc

SEQ ID NO: 89253 - DNA, 1886 bp, Zea Mays
gtagtattctagctctacctgctttccccactcgtgctctcgccattcgctcgaaccccgaagaactggcagtggcaggttactagaggatcactactttgaactcattaaagtgtctaatgatggctgctgttttaaaaacaagtggcagtttttgtagtacacaacagcagcattttcagcaatcaagaagggatcagtttttgcatggttcttattcaaatttcaaacattgcaaaagcaagaagataataaagcctgctccactgtgtgctagagtgacttcctcgaaagtggaactagatgttaaggatccatattggaagcagaagtttcaggaagactgggaaagccggtttgatttgccaagtattactgatatatatgatctgaaaccaaggccaactacattctcactcaagaaaaacagaactcttacaggtgatgaaaatgtggatatgtggaatggttatgttaacaatgatgatcgggcacttttgaaggtgataaagtattcatcgcctacttctgctggagcagagtgtgttgatcttgactgtagctgggtggagcaatgggtgcatcgagcaggaccacgcaaggagatatactatgagccagaggaagtaaaagctgctatagttacctgtggaggtctatgtcctggtttgaatgatgtcatcagacagatagtattcaccctagagacctatggtgttaagaatattgttggaattccatttggttatcgtggatttttcgaaaagggcctcaaagaaatgccgctttcacgtggtctagtggagaatataaatcttaatggtggaagttttcttggtgtttctcgcggtggagctaaaactagtgagattgttgatagtatacaggccagaaggattgacatgctttttgtacttggtggaaatggtacccatgcaggagcaaatgctatccatgaagagctgttgaagaagcccaacgagccattaattccgcatatatagaggcacgtagtgcttaccatggtattggcttggtcaaattaatgggaagaagcagcgggtttattgcaatgcacgcttccctttcaagtgggcaggtcgatgtctgcttaatacctgaggtcccgttcactctagatggagaatttggtgttttgcggcaacttgagcatttgctaaagagtaagggattttgtgtggtttgtgttgcagaagctgctggacaagatctactccaagaatcaggtgcgactgatgcatcaggaaatgtgatattgagtgacattggtgttcacatgcaacagaagattaagatgcatttcaaggacattggtgttccagctgacgtgaaatacatcgatccaacttacatggttcgtgcatgccgtgccaacgcatctgatgcaattttgtgtaccgtgctcggacaaaatgctgtccatggggcatttgctggtttcagcggcatcacttcttgcatctgcaacacgcactacgtgtaccttcccatcacggaggtcatcacagcaccgaagcgcgtgaacccgaacagcaggatgtggcatcggtgtctcacgtccactggtcagcctgacttccactgatctgccatcgtcactgcataaccaaattcgcatagtttgaggtactagatgatttacaattctttcgctgatgtgctccattcacatcgtgaggttccaagattagttaataatgctaaactgagtggacttgtctggtttgttcacgaaggtggtgttgtccattgttccgaagctctggtatttgagaaatttgcatatttaacactataaagatgtgactccacagatttgccattttcaagatgggctacgcaaaattgccacctgtttcattgtc

SEQ ID NO: 89254 - DNA, 1916 bp, Zea Mays
tcttatcttaatttcttgtgcaggttactagaggatcactactttgaactcattaaagtgtctaatgatggctgctgttttaaaaacaagtggcagtttttgtagtacacaacagcagcattttcagcaatcaagaagggatcagtttttgcatggttcttattcaaatttcaaacattgcaaaagcaagaagataataaagcctgctccactgtgtgctagagtgacttcctcgaaagtggaactagatgttaaggatccatattggaagcagaagtttcaggaagactgggaaagccggtttgatttgccaagtattactgatatatatgatctgaaaccaaggccaactacattctcactcaagaaaaacagaactcttacaggtgatgaaaatgtggatatgtggaatggttatgttaacaatgatgatcgggcacttttgaaggtgataaagtattcatcgcctacttctgctggagcagagtgtgttgatcttgactgtagctgggtggagcaatgggtgcatcgagcaggaccacgcaaggagatatactatgagccagaggaagtaaaagctgctatagttacctgtggaggtctatgtcctggtttgaatgatgtcatcagacagatagtattcaccctagagacctatggtgttaagaatattgttggaattccatttggttatcgtggatttttcgaaaagggcctcaaagaaatgccgctttcacgtggtctagtggagaatataaatcttaatggtggaagttttcttggtgtttctcgcggtggagctaaaactagtgagattgttgatagtatacaggccagaaggattgacatgctttttgtacttggtggaaatggtacccatgcaggagcaaatgctatccatgaagagtgccgtaagagaaagctgaaggtttcagttgtagcagttccaaaaacaatcgacaatgatatacttttgatggataaaacatttggttttgatacagctgttgaagaagcccaacgagccattaattccgcatatatagaggcacgtagtgcttaccatggtattggcttggtcaaattaatgggaagaagcagcgggtttattgcaatgcacgcttccctttcaagtgggcaggtcgatgtctgcttaatacctgaggtcccgttcactctagatggagaatttggtgttttgcggcaacttgagcatttgctaaagagtaagggattttgtgtggtttgtgttgcagaagctgctggacaagatctactccaagaatcaggtgcgactgatgcatcaggaaatgtgatattgagtgacattggtgttcacatgcaacagaagattaagatgcatttcaaggacattggtgttccagctgacgtgaaatacatcgatccaacttacatggttcgtgcatgccgtgccaacgcatctgatgcaattttgtgtaccgtgctcggacaaaatgctgtccatggggcatttgctggtttcagcggcatcacttcttgcatctgcaacacgcactacgtgtaccttcccatcacggaggtcatcacagcaccgaagcgcgtgaacccgaacagcaggatgtggcatcggtgtctcacgtccactggtcagcctgacttccactgatctgccatcgtcactgcataaccaaattcgcatagtttgaggtactagatgatttacaattctttcgctgatgtgctccattcacatcgtgaggttccaagattagttaataatgctaaactgagtggacttgtctggtttgttcacgaaggtggtgttgtccattgttccgaagctctggtatttgagaaatttgcatatttaacactataaagatgtgactccacagatttgccattttcaagatgggctacgcaaaattgccacc

SEQ ID NO: 89255 - DNA, 1306 bp, Zea Mays
ttaaaatgctagaagggcggatcagtgatggatagctttctgtagggtgcatcgagcaggaccacgcaaggagatatactatgagccagaggaagtaaaagctgctatagttacctgtggaggtctatgtcctggtttgaatgatgtcatcagacaggtccttatcttaagaagtgtccagacatttctgcatttcaaacccaaaattcttgacattcatgtcgaacatcaacatgaataagatagtattcaccctagagacctatggtgttaagaatattgttggaattccatttggttatcgtggatttttcgaaaagggcctcaaagaaatgccgctttcacgtggtctagtggagaatataaatcttaatggtggaagttttcttggtgtttctcgcggtggagctaaaactagtgagattgttgatagtatacaggccagaaggattgacatgctttttgtacttggtggaaatggtacccatgcaggagcaaatgctatccatgaagagtgccgtaagagaaagctgaaggtttcagttgtagcagttccaaaaacaatcgacaatgatatacttttgatggataaaacatttggttttgatacagctgttgaagaagcccaacgagccattaattccgcatatatagaggcacgtagtgcttaccatggtattggcttggtcaaattaatgggaagaagcagcgggtttattgcaatgcacgcttccctttcaagtgggcaggtcgatgtctgcttaatacctgaggtcccgttcactctagatggagaatttggtgttttgcggcaacttgagcatttgctaaagagtaagggattttgtgtggtttgtgttgcagaagctgctggacaagatctactccaagaatcaggtgcgactgatgcatcaggaaatgtgatattgagtgacattggtgttcacatgcaacagaagattaagatgcatttcaaggacattggtgttccagctgacgtgaaatacatcgatccaacttacatggttcgtgcatgccgtgccaacgcatctgatgcaattttgtgtaccgtgctcggacaaaatgctgtccatggggcatttgctggtttcagcggcatcacttcttgcatctgcaacacgcactacgtgtaccttcccatcacggaggtcatcacagcaccgaagcgcgtgaacccgaacagcaggatgtggcatcggtgtctcacgtccactggtcagcctgacttccactgatctgccatcgtcactgcataaccaaattcgcatagtttgaggtactagat

SEQ ID NO: 89256 - DNA, 417 bp, Zea Mays
ggctacatcttcttctcatagtttggttgcaaggccaaggcggtgctgtaaaatttggtaagaaaggggaatgagctcgcgattacaagatctgttcttcgcccgcagccacaacgttctgcttgtatccttcctatgtttgtttcgtattttaatgtgcttcatcgtttttttttctcgtagcatgttcgtgtcttctttaccagatagatgtcgtgacgcctacctttgtcttctccaatttgcagtgtgcccatttgcttacatttaccttctcccatttgctttgttcatttacggttctgcacttttctctcttctcttcttgtttcctcagcctctctggaatccctttgtggatcacgacagctccaaacatccgatttggtgagtttgtgttgtattcggaattttgcc

SEQ ID NO: 89257 - DNA, 1912 bp, Zea Mays
ccacactaattattcgtgtgtttatttcactactcatcactctcgtgggctcggttcattcttatctcctcgcttctcttcacctccctacctgtagttttctccactcgtcctcgtcctttgtccctgtccttcggggacaaaaacaaccaaggcggcgcaagcggtaatcttccgtggtgggggcgtgctctgctgcaagcagtggtgacgccgcttggagggagggcgggcgggcgggaaaggatggaggcggtggtggacctcaagtacctgccggttttcccgaacggcggcgtggccgcggccaagaagaagacgaggctcggggccgctgcggttgccggcggccagacgggggtgtactacagggaatgcctcaagaaccacgcggcgagcctgggtggccacgcgctggacgggtgcggcgagttcatgccgtcgccggaggccgacccggcggacccgagttcgctcaggtgcgccgcgtgcggatgccaccgcaacttccaccgccggctacccgagctgtccccgccgccgcctctcctcgctttgccgccgcctccaccgccactggcgccggcgccggcgccggctgtcgcgtcgcatgccatgcgtgacagccgcacgatgcgcggcgaggaggcgccagacgaccgcctgccagccgccttcgacgacgacaccgaggagtcggacgagggctcagatttcgaagaggaccgtcccctaacgccgctgccggcgccgggcatggtgccgctgccgcccggctaccgccaggtcgcgccacacatgctcctcgcgctgagcaccagcgcgccgggcgcccaaactcccgcggcggggcccaggccgcccgcctccctggtcccgatgccggcgcccggtgctgctgctgctgctgcggcggcggcggcggcgaggaagcggttccgcaccaagttcagcccggaacagaagcagaggatgcaggctctgtcggagcggttgggttggcggctgcagaagcgcgacgaggccgtggtcgacgagtgctgccaggagatcggcgtcaccaagggcgtcttcaaggtttggatgcacaacaacaagcacaacttcgtcggtggccacagcgcgcgccgcagcgcctcagcgtctgctgccacggccatccaccatccgttcatcgacgctgcccccgtctgcccttcctcccacgccgccccagcaccagccgccgctgtgcacctttccgccccagcgccagccgcctccccggccacgcctgtcctcgctgactccaacatcaacggcaacgctgccgactacttccgtgtccaaccttccacggcgagtggcggctcgccgcagtcgtcctagtcaagttagtgctaatcagccatggttatttgtagagcttcgtgtctaattaaccaaccctaatggagcgagcaatggtgggatgcatgggactatcgaatatggaagcgctagtgagaaggctgctgctggtctttgttaatggtggagcccaaagaaggatcttaaaaaatcgtggggttttgggatctgatgatgtaatgattcaggattagcgcttatggtactagtagactgttagtgtagcaatttgttcctgaactgtacttggataatgaccgggtggatccgttgtgctttgtcttcgtctaggatatcatgttgttccatataaaaatgccatctgtctactgttggtttggctttaatacatatcgacttttacttttactatttttatattatttttgtctagataaattatagctgtaatagtctaaacaactagctttgattatagatgtccaaatgagcgagccgtaccggtctggaccgagcacggctaggttcggcacggattaggactgtgccggcccagcccgga

SEQ ID NO: 89258 - DNA, 1428 bp, Zea Mays
ccctgtccttcggggacaaaaacaaccaaggcggcgcaagcggtaatcttccgtggtgggggcgtgctctgctgcaagcagtggtgacgccgcttggagggagggcgggcgggcgggaaaggatggaggcggtggtggacctcaagtacctgccggttttcccgaacggcggcgtggccgcggccaagaagaagacgaggctcggggccgctgcggttgccggcggccagacgggggtgtactacagggaatgcctcaagaaccacgcggcgagcctgggtggccacgcgctggacgggtgcggcgagttcatgccgtcgccggaggccgacccggcggacccgagttcgctcaggtgcgccgcgtgcggatgccaccgcaacttccaccgccggctacccgagctgtccccgccgccgcctctcctcgctttgccgccgcctccaccgccactggcgccggcgccggcgccggctgtcgcgtcgcatgccatgcgtgacagccgcacgatgcgcggcgaggaggcgccagacgaccgcctgccagccgccttcgacgacgacaccgaggagtcggacaagggcgtcttcaaggtttggatgcacaacaacaagcacaacttcgtcggtggccacagcgcgcgccgcagcgcctcagcgtctgctgccacggccatccaccatccgttcatcgacgctgcccccgtctgcccttcctcccacgccgccccagcaccagccgccgctgtgcacctttccgccccagcgccagccgcctccccggccacgcctgtcctcgctgactccaacatcaacggcaacgctgccgactacttccgtgtccaaccttccacggcgagtggcggctcgccgcagtcgtcctagtcaagttagtgctaatcagccatggttatttgtagagcttcgtgtctaattaaccaaccctaatggagcgagcaatggtgggatgcatgggactatcgaatatggaagcgctagtgagaaggctgctgctggtctttgttaatggtggagcccaaagaaggatcttaaaaaatcgtggggttttgggatctgatgatgtaatgattcaggattagcgcttatggtactagtagactgttagtgtagcaatttgttcctgaactgtacttggataatgaccgggtggatccgttgtgctttgtcttcgtctaggatatcatgttgttccatataaaaatgccatctgtctactgttggtttggctttaatacatatcgacttttacttttactatttttatattatttttgtctagataaattatagctgtaatagtctaaacaactagctttgattatagatgtccaaatgagcgagccgtaccggtctggaccgagcacggctaggttcggcacggattaggactgtgccggcccagcccgga

SEQ ID NO: 89259 - DNA, 781 bp, Zea Mays
agctagcagctagggcagctgctctctctcgtcgaaccacacaagatgcagggctagccattactcccatatactatactacacgagcgaggccgagacgtcgtcgtcgagaaggagaggcgcccgagaggagaaaccaggaaacagtttgtgactgttctagtagcagctggcctgcaaaagaggatcgggtcggatcggagccgatgatgaagaggatggtgatcctgaggcggtgccacccgccgccgcctctgtctgtgctcttcggccggtgccgcagcgccggcgtgcgctacggggagtgccgccggaaccacgcggcgagcatgggcggccacgccgtggacgggtgcccgcgagttcctgccgaggggggaaggagggcaccgccgccgcgctgcgctgcgcggcgtgcgggtgccaccgcagccttcacgcgcatgtgcagcgctgctgcccctgcgacggcgctgatgccgccgacgtcgctttagccgccgccgccgcccggtgggacgactgctcgccggagtcctcggcgtccagcaccacgcccagctagaaggaaagaaataatcagaacgtacgtacgcaatccagctctgccgcctctcgcagtcgatccttctctcctctcactagcatagctagctccagcctaaattattattgcctgctatattgtaacgtacaaccaattcatcacacgctccccgtgtatgtatgccccctcttccttttgtgcatgagatttaatttcgagttgtctggtggatta

SEQ ID NO: 89260 - DNA, 294 bp, Zea Mays
taattctattagtcttcctgtttggatgagagtaaagcagttgttgcctccaagaaccatatgctacctggtcaagaaagatgaaagcggttggtggccaaggctgctgaaaaaggagggcaaggcacctgtgttcttgaaggctgactaggacaaatggcaggatgaggatgatcaagatgttggatgttagtatttcagttttggctgattctatttttctttagttgataccatactgtttattttagcttgaagctacatataattcatattacagttaatgactttggg

SEQ ID NO: 89261 - DNA, 1320 bp, Zea Mays
caggtcaggggcgcttccgcgcttatataaacaccaccaaccaacccaagtcaccatcctccgcacccgattcacctcctgggaaagtggaagggagggagaagcaaggcaaagcggagccgagggtcaaaggccctcgtcctgcttggccaagcaagcgtcgcgcacgtacgtagaggccgaccggccggccaggttgaagaaggcatggggaggccgccgtgctgtgagaaggccgggttgaagaaggggccctggtcgccggaggaggacctcttgctcgtctcctacgtgcaggagcacggtcctgggaattggcgcgccgtgccatgcagcaccggtctgatgcgctgcagcaagagctgccggctccggtggaccaactacctccgcccgggcatcaagcgcggcagcttcagcgaccaggaggagaagctcatcatccacctccaggagctgctcgggaacaagtggtccgcgattgcgtcgtacctgccggagcggacggacaatgacatcaagaactactggaacacgcacctcaagaagaagctcgccaagacgggcgccagggaaagcggtgccagcgccaagacgacgaagaagagcgatagggccgcggcgcccaaggggcagtgggagcggcggctgcagacgaacatccacaccgcacgccaggcgctccgggaggcgctgtccatggacgacactgcgccgccggcaatcaagccggagccgctgccgctgccgctggggcagctgccggcgccagccagccaggcgatgtacgcttccagcatcgataacatagcgcgtctgctggagggctggatgcgtcccagcgtcagtgggaatgcgtcggctgagtccatgtcctccttctcggcgttctccggtggtggcgacggcgcgtcggcaagccacatcggcacggcgcacacgccggaggggttcaccggcacgagaaaggaagagggcgcggggccggggccggcgtcattaccaatgttcgagaactggctgctcgatgacggcatggggaacggtgatgcgtccctcatctgcgtcccgctggcggacccgtgcgagttcttttagactgaactggagggggataaggaaaaacagaataaaagtgctaggctggaagaagaagaagaaagaagccaggaactcgattccctgataatatagatcgacacagtgcaatgctggtcttgatatatatagtatagttgttcattccagttccttgcttcttatttctatgaatttgccttttttttttctgtctcttttttgttacaaaattgggtttgg

SEQ ID NO: 89262 - DNA, 216 bp, Zea Mays
ttaatggattaatgcttttaacaaggtaatgagatgtaccaaaagtgacttatgggaaaaaacagagcttgttcatgttctaaatgaggaagtttaatcttatgcagtctcaaaagagcagagttttgggagcaatgtcatcctctttgcctattctgccaaatccttcgaaagggagcttcccaaggcctcgtaacccccagcatattcctatgt

SEQ ID NO: 89263 - DNA, 321 bp, Zea Mays
atggccgggagcagccgcctcctcccaactgtcgacgcgctcgcggacgtgcaccggggccgatggatggtcttctcctccctcacgcgtgcgagctcgacctcgagctccaatggcagcaccgacggcaagggcattttctggcaggaggacatcatccccttcttccagaacgtgaccatccccaaggattggggcaccgtccagcagtgctacatctacctctatggacaagtgaaagagaagctgagcaagattgacccctactttgtcaagctcggtgacgccatggtcacatggattgagcctgggatgagctga

SEQ ID NO: 89264 - DNA, 81 bp, Zea Mays
tttggggcaggtgtgagttcgagtactcgctctgcattattttttgcgtggtgtggtaattgcgcagacgggatcggatgc

SEQ ID NO: 89265 - DNA, 814 bp, Zea Mays
atcaatcctagccgtctgttacctcttcagagccaaccattaatacgccccaatcgccgccgccagagccgcggagctctccactcctctcttacccttcctctccccacccacgaagcctcactagggtttagcggcggcggcgagatggtgcagcgcctcacgtaccggaagcgtcacagctacgctacgaagtccaaccagacccgagtcgtcaagaccccaggcgggaagcttgtgtaccagtacaccaagaagagggcgagcgggcccaagtgccccgtcaccgggaagaaaatccaggggatccctcacttgaggcctgctgagtacaaaaggtccaggttgcctaggagccgcaggactgtgaaccgtccttatggtggagtactctctggaattgctgttagggagagaatcattcgtgctttcttggtcgaggagcagaagattgtcaagaaggtcctgaaaatacaaaaaaccaaggacaagacagctgcaaagtaaatctccaggaatggggaagcctagccctgttttgtacactgcgaaaattaattttggtggatggaaaatctaggtgccttgttgagcatttagcatgtgagtttagagattctggacactgaatccctttcacctttgaattgttggaatatcgggaatctgttcccctagttgcttttattatgaattcagatcctatctatgcaaagatcaaccttctggtttgtaacatcttttgtccatgttgctcgttgttgctcttgatgcccattcatatctatgcaagcagtgtggccgtgtattattt

SEQ ID NO: 89266 - DNA, 1964 bp, Zea Mays
atcaatcctagccgtctgttacctcttcagagccaaccattaatacgccccaatcgccgccgccagagccgcggagctctccactcctctcttacccttcctctccccacccacgaagcctcactagggtttagcggcggcggcgagatggtgcagcgcctcacgtaccggaagcgtcacagctacgctacgaagtccaaccagacccgagtcgtcaagaccccaggcgggaagcttgtgtaccagtacaccaagaagagggcgagcgggcccaagtgccccgtcaccgggaagaaaatccagggggtgagtgattgattgttagcgcagctctactcttcttctgtctcggttgtgtgattcgttggtccttggtaccgaggtggggaactggtagcgtgtttgtgctatccatattgaagtaacagattgaagtaattggtgtgaattagtagatcttaattagaagggcaagcctggtccagttgtaagaactgtctgagtcaccagcgggtttgaacccttgcttcggtttatcccttccccagatcgcacatgagttgagcctccggccctccctttattttagtagattttaattgattgcttacatggtttactgtgttttgccctgtgatgccacattgtgcttgtataggtctattggacgatgtctgtagttaaatgggcctttatatctagctctcgtctaaattttttccttgcgtaaatggctgtgtcatgtgaaattgaagtacttggtacctacatttgggggaacatattactgttactgcatgttattttgctgtttacaaatagtgttctttcttaccacatactccctccgtcccaaattaaaatttgatttaggattttaatagattcatacaatagctaagttgatttgcccgttttccctgttgagtaaatactattgtcatgtcattttcttcagaatcacttcctaggacttctgtttgtttgaggttgaagttttaattagttctatcattctgtgttatcttttcttctcttttatgtaaagcaccagtttccaccatcatcgtgctcctccgcatttaaatggtaaaatactaaaattatgcataaatggtgatttgaaccatggttgttggctccaaacccacaaccacacccgcctagccaacaaaacacacatgtctttctttgtgtctttgtgttttatattctataatcaacataaaagggaactgtagcaatatacgtgcattttgctattttttttcttctatgtgtgcttgcactatttatttggttgtttccatggcataatattctccatagtaatcatcatctggtaatttccctccctacctgaacaatgccctcagtgtcaccaaaactgggtattcatctgtcattggatatttccacctaatattgtttaatgctattgtttccatatttccagatccctcacttgaggcctgctgagtacaaaaggtccaggttgcctaggagccgcaggactgtgaaccgtccttatggtggagtactctctggaattgctgttagggagagaatcattcgtgctttcttggtcgaggagcagaagattgtcaagaaggtcctgaaaatacaaaaaaccaaggacaagacagctgcaaagtaaatctccaggaatggggaagcctagccctgttttgtacactgcgaaaattaattttggtggatggaaaatctaggtgccttgttgagcatttagcatgtgagtttagagattctggacactgaatccctttcacctttgaattgttggaatatcgggaatctgttcccctagttgcttttattatgaattcagatcctatctatgcaaagatcaaccttctggtttgtaacatcttttgtccatgttgctcgttgttgctcttgatgcccattcatatctatgcaagcagtgtggccgtgtattattt

SEQ ID NO: 89267 - DNA, 2282 bp, Zea Mays
aaaaatattggccaaagtagaaatcaagcaacccgaaatatggccatatgcccatatcctgcctcgcactcgcgcccgtcccgcgggccatggcatcctcatcctcatctcctctcacccgtgctcaccgcgcctccacctccacctcttccgtcgccgccgccctcctcgcttctgcctcgcccattcccccgcgccgcttcatccagctccacgcgcaccttcttcgcacgggccttctaatcttttcccccgtcacaaccacctccgccttcctctccctcgcggccgtctccctcccgtcccaccgcgcgctcgccgtcctcgaccaccacctcaccaccccgcactatctcccctccactttccagtgcaattccatcctccgcgccctctccgatccctccgacgcgctccgcttcctctgccgcgtgcgtgctctcggccgtcgcgggaacgccttcaccctggccatcctcctcaagccccgctgctcactcgcgcacgcgcgccagctccacgcaaacgttgtggcggagggtcacctccgcgacgccctcctcgccacctcgctgatgaggtgctatgctaaccgtggcgacggggacggcgcgcgcaagctgtttgacgaaatgccagtgagggacgcggtcgcatggaacgttctgatcacctgttatgcgaggaaccggcggacaaaggacgccctgaagctttttgaggagatgagaggcaaggacagtgagtcggagccagatgatgtcacctgcattctgctcctccaagcatgctcgagcctgggcgcacttgattttggtgagcaggtgtgggcgtatgccgaggagcacggttatgggggcgagctgaaggtgcgcaattcattgattacgatgtacttgaggtgcgggtgtgtggataaggcatacagggttttctctggcactcctcagaagagtgtggtcacatggaccgcaatgatctcaggattggcagcaaatggctttgggaatgatgctatctcagtatttgaagagatgattagatcagatgttgctcctgatgaacagacttttactggtgttctttctgcatgtagtcatagtgggctggttgacgagggttttaggttttttgatatgatgcgatgtgagtacggattgaagccaaacgttcgccactatggatgcattgttgacctaatgggccgggctggcttgcttgatgaggcttacgagttcgtgacaaatgagatgaaggttgcaccagatgcgacaatttggcgaactcttcttggtgcttgccgaatacatggtcatgttgatctcggggagcgtgtaatcggtaatctaattgaactgaaggcgcagcaagctggggactatgttctattgctgaacacttatgcagcagttggggaatggagcaaggtatctgaaatcaggaagttgatgcaggaagaaggaatacaaactactcccggctgcaccactgtggagcataatggtacagttcatgagtttattgcagatgatgatgcacacccaaggaaagtggagatttatgaaaatctcagtgagatatataagcagttaaggattgctggttatgttccaaatgtgtcatcagagttgcatgatttggattcagaagggaaggaaagtgccctcacctatcacagtgaaaagctggcaattgcttttgctttgcttgtgacgcctcaacacagaccaataaggcttgcaaagaatcttcgtgtttgtgttgactgccacaatttcacaaagatgttttctgctatttacagacgaatagttattgtcagggacagaacaaggttccatcatttccagggagggaaatgttcgtgtaatgattattggtagtccacccttgcttgttgcagttgcagcacaccacaagtgtagccaactaaggagatgtttggtttctagggactaatgtttagttccttcattttattctattttagtatataaattaccaaatataaaaattaaaatagagttttagtttttgtatttggcaattttggaactaaaattgaataaaatgtaggaactaaaaattaatccctagaaagcaaacacccctaagtgtaggcaaagtgtagccaataaatctggtgccacatgcccacatctgtgagttttacatcaaattgagtctactacatgtggtatgtatggctaagaaagttctgcacgccatactcgtggcatgaattaaacacatgtctaagaaattgtagcgtgcctaatttg

SEQ ID NO: 89268 - DNA, 836 bp, Zea Mays
gcaagcgatcactcgcttcttgaattgcacgattaggtttccgtttcctttttcttcgtccccgtgggaatatgcccccgcgcgctactgccattttgttgccatacgcatgcgtgcgcgccaccgtcgccttgccgtggatccacatccaccctagctgcctcccgatcccacgcccaaagcttcctataaattcgcacccccagcgcctcgcaaccttcatctcccacctcgatccctgcgctgcaagcaacaaagttctactctgtccacccgtccatctagctcccaagaaccaacccgtaccagcgctatccggccggccatggcggcggcgcgccggctctccctgcccctcgtcctgctggtcgtcctggccgtcgccgggcgcgcggcggcgcaggactacgacttcttctacctcgtgctgcagtggccgggggcctactgcgacaccaagcagagctgctgctaccccaagtccggcaagccggcggcggacttcgggatccacggcctctggcccaaccgcgacgacggcacgtacccgcagaactgcagccccgacaacgccttcaacccgtcgaaggtgcatgcacacgcgattcttcatcttccccttcccctcttcctctcgcgccgccccgccccgcatgtgtttgatcatgccgcggcggcgtgttcttgggtttcatccgcgcgtgccaagtgccaacacgtacgtcttttgcattgtgtcctcacgacgtacgttacgctttagattgttggcgcttttgctgttcattcggcgaggtctttctgttctctgctattggcaaaaaaaaaaaaaaaaa

SEQ ID NO: 89269 - DNA, 1214 bp, Zea Mays
gcaagcgatcactcgcttcttgaattgcacgattaggtttccgtttcctttttcttcgtccccgtgggaatatgcccccgcgcgctactgccattttgttgccatacgcatgcgtgcgcgccaccgtcgccttgccgtggatccacatccaccctagctgcctcccgatcccacgcccaaagcttcctataaattcgcacccccagcgcctcgcaaccttcatctcccacctcgatccctgcgctgcaagcaacaaagttctactctgtccacccgtccatctagctcccaagaaccaacccgtaccagcgctatccggccggccatggcggcggcgcgccggctctccctgcccctcgtcctgctggtcgtcctggccgtcgccgggcgcgcggcggcgcaggactacgacttcttctacctcgtgctgcagtggccgggggcctactgcgacaccaagcagagctgctgctaccccaagtccggcaagccggcggcggacttcgggatccacggcctctggcccaaccgcgacgacggcacgtacccgcagaactgcagccccgacaacgccttcaacccgtcgaaggtgagcgacctgctgagcagcctccgcgccaagtggccgacgctggcgtgcccgtccaacgacgggctgcgcttctggggccacgagtgggagaagcacggcacctgcgcagccgacgtcttcgacgagcacggctacttccaggccgcgctgcgcctccgcgaccagctgggagtcctcggcgcgctcacctccgccggcgtcaagcccgacggcggctactacacgctgagccagatcaagggcgccatccgccagggcaccggcttcgagccctacgtggagtgcaaccgcgacgaggccggcaacagccagctctaccagctctacttctgcgtcgacgccgccggcgacagcttcgtcgactgccccgtcctccccagcggcaggccctgcggcaaccggatcgagttcccggctttctaagctaactcactcttcacgtcagttgctgcaatatactgctagtccttttgcttgcattctatgcaagaggataatggaatgttcattccccattcttcaaagttttttttttgcaaataaaaggaggcgatcggtgttccatatttattatgttgatcataacataacattcagagaacaattcataagttcagtcaca

SEQ ID NO: 89270 - DNA, 1204 bp, Zea Mays
gatgatgtgtgcggagtcggatggagtggcttcgcatgctggacgttggcggcgttgtgcttgaagttgaagacgttgtggtcaaccacgtcgtcgcttccagaccgaatctggttttgggcacgcagaatgacttcatacaatttgtcttatcaaccatgttatgtatgaactataggcactgatggttctgacttcaatatgtgcatacatgatggttgaaagggaattaggcttacacctttttcctaattgattttggtggttgaattgtccaacacaaataattggactaactagtttgctctagtctataagttttacagatgccaaaggttcacaacaagccaataaaaagaccaaagatgggttcaaataaagagagctaaagacatcccaaagacaccctggtctggcgcaccggactgtccggtgcaccagggcactcgacgctgaacttgctaccttcgggaaaatgggaggtcgctccgctataattcaccggactgtccggtgaagcaccggacagtgtccggtgtgccagcggagcaacaactacttcgtacgcaacggtcgactgcaacgcatttaatgcgcgcctgcgcgcgcagaggacagagcacgcacagaaggcgcaccagacagtctacaggacctgtccggtgcaccaccggacagcccagaggccccaccagtcagagctccaacggtcagaacccaacggccggctgacgtggctggcgcaccggacagtgtccggtggcgcaccgaactgtccggtgcgccatgcgacaacaaccttctaacgaccactttttggtggttggggctataaataccccaaccaccccacattcaatggcatccaagttttccaccttcaacacattacaagagctatagcattcaattctagacacaacaaaggagatcaaatcctctcccaagtccggaatcactccaaatcaaatagtgactcgagagagtgacatttgtgttcatttgagctcttgcgcttggattgcttcttttctttctcattcttcttgtgatcaactcaattgtaaccgaggcaagagacaccaattgtgtggtggtccttgcggggactttgtgtcccatttgattgagaagagaagctcactcggtctaagtgaccgtttgagagagggaaagggttgaaagagacccggtcttggtgacc

SEQ ID NO: 89271 - DNA, 178 bp, Zea Mays
ttttttttggaggtcatcgaaaacaggattttttggcgaatttcaccaaattttgtatttttcaaccgggatggggttttgaaactaaccgcttgattggttgtccgcgctgtcttatcgtggctggcgtgctgatgaataattatgcaaatgacacatctatgcactaacacaaacc

SEQ ID NO: 89272 - DNA, 132 bp, Zea Mays
tggtctctttgctctttgggctctgctctgatggtttcaactttccgccatgacttgtccttgcccgcctacgggggaatcttgctttgtggacttttcgtggggtggggaaagtttgtgataggcttctaa

SEQ ID NO: 89273 - DNA, 1486 bp, Zea Mays
gtgaccatgcacttgtctatattattcattttaataaatttcttcaggattttgtgataaatttaaaagatcaaggcaggccattgatctactgttggatttgttgagtctgttataaatttcctaatctgcatgctgcaatcaagttttgctgcttgctaagcggttgccacttgccagtgcatgtattctgaaatttctctaattctatagtgcttaacgactgcagattttggatgagatgatggataatggttttccactcacaactgagccaaacatcttgaaagagatgatcaccccacctaatattgtgaacaaaatgttgaatgttgttactagcaagagttctacccttggcagcaaacttccagatgcagctgcttcttttgtaccttggcgaagaacaacggtcaaggatgcaagcaatgaagtctatgttaacatagtcgaggaacttgatgcatgtgtgaacagagagggggttcttgtgaaatgcgaagcatacggtgaagtccaagtaaattacagcctcccaggtgtgccagagctgaccatgtcctttgctaacactgcaattatcaatgatgttaccttccacccctgcgtctgattcaggccttgggaatcaaatcagatcctatcatttgttcctgccgacgggcagttcaagctcatgagttatagtgttcagaaactgaagaagacaccgatctatgtgaaaccacaattaacatcagattccgggaactgccgcgttagtgtgatggtcgggattcgaaatgatcgtgggaaacctattgattcgataacagtgcagttccagttgccccctcttattgtttctgttgatctgactgcaaactatggcacggttgacatccttgccgacaagacctgtttgtggacaattgggcagataccaaaagacaaagcaccaacactctctagaaatttacgactggaggaagggctcgcacaactgcatgcattgccgacatttcaggcgaaattcaggattatgagagttgccctatctggccttcaaatcgataagctagacgtgaagaaacaccccgaacgctccgtacaaaggttttagagcccagactcaagctgggaagtatgaggtcagatcgtaggtgcttgcaggggggcagttgttagttcattcttgtagaaaacaaatgatgttgcggacctagctcatggcctgttaacacattgttatggtcatcagttgagggttcacgaccagctgcatttgggtcgttgcatttgatgggaggtgccattgttctttgttcaggtcaataggtgtcttgtacctgaatcagattatcctctgtggtgtgaaagcaacagaatactgcgaccctaggcctatctagatcaaggttttggattctggcaccttgtgttataaaattcacttgagtatagaatctctattttttgttgtaagaaaaaaatctctttttgttag

SEQ ID NO: 89274 - DNA, 2238 bp, Zea Mays
agcaagcaagctgtatgtacttgcaaacaacacccttggtagctatccccctcccgtgcccgtgcccgtgcccgtgccctgcaatccccgacccggagcagcagccaccaccggcgcggcgtcccgcgagccagcacagacgatccctccccattcccgcccgcactgcccagcaccaggaggagcagctagcctatccaacagtgaaaagcacacacgcgttccggactccggactacgcccggccctcccctcccctccccctcctcctgcggtttttagacaggggagtgcgtgcgcccgagcgatccgtccatctgacgggaatgagagggtgcgtgcgtgcgtgggggagagtgagatgcctgcctccctgtagcgtgtaggagtagctctggcctcttcctctacctccagccgtgcggttttctgctgcggaagaaacgggagcagtgtcgctcgtcccgctcgcgcgcacatcctcaactcgtctccgtctctcccgcggcaactgacgacgatgccgtgctcgtcgccggccccgacatggctgctgcgagtgtcgccagcggctgccgcggccgaccaggccgccgcctcgtcctcgtgctcatccaagggcggaggccgcgtgctcacggccggtaccaccaccatggacacggccgccaccgctgccgccggcggcaatgccgccgacctccaggagagcagcagcagcggccagtcccggctcgcggcgcgcggccactggcgcccagcggaggacgccaagctccgtgagctcgtcgcgctgtacgggccccagaactggaacctcatcgccgagaagctggacggcagatccggtacgcgcgtccatcatcatcatcttgcattgtggtaatctcatctgactgacctcagcctcaggctcagctgcaccgatcatccatccccatacaaagacactgtatacatacattttaacaacaacaaggtttagctccgcatggcctattactgcaatgcttgctgcgcagggaagagctgccgcctccgctggttcaaccagctagacccccggatcagcaagcgccccttcagcgacgaggaggaggagcgcctgatggctgcgcaccgcttctacggcaacaagtgggccatgatcgcgcgcctcttccccggccgcacggacaacgccgtgaagaaccactggcacgtcatcatggcgcgcaagtaccgcgagcagtccacggcctaccgccgccgcaagctcaaccaggcagtccagcggaagctcgaggcagcctccgccgcggtcgcaatgccgccgggcgcgggcgcgggagacgtcgccgtcggccagcaccaccacctgctggccgccgccgcggcggcccacgcccacgacgccgcctacagcttcgccgcggacccctacggcttcggcatccgccaccaatactgcaccttcccgttcccgccaggcgccgcttcggctgaggacccgccgccgccaacgcaaatacatcccttctgcttgttccctgggcccagcagcgcggcggcgcacgccgacagcaggcgccttccctggccgccgtcgtcggacgcgcccggcgtcgcccggtacggggagccgcatcagctcctgcagctgcccgttcaaagcggctggatcgacggcgtcggcgtggccgcggccggccaccacgagccgcccttcgtcttgggcaacaacgggggcgcggccgcctttgaagggacgacaagacagcagggctccggcgctcactttgaagctgccgcggcgccgccgccgccagcgttcatagatttcctcggggtcggagccacatgaacgcgcgcgcatgtgcatgcatgctcgacttcaccacgcgccttgcagttgcatgtagtgggatctagctaggacaggtagctcgagcagcctctatctagtatctagctagctacctttgccatatatgaggagtaagtacatcgatccaaggcttaggtttaagcttatgtagtagcactatgtatgtatatgtatgtctgaatgtctctggctagataggaactagtgacggagattgagcttatttatttcggggctttgtagagggagggatgcttggactttgatcatttgggatcggattagttacttgattagcccccagccatatatgtatgtatgcaagcaagatagatcgtcgatgatggtgacttgcagagctaaatttgcaa

SEQ ID NO: 89275 - DNA, 2064 bp, Zea Mays
agcaagcaagctgtatgtacttgcaaacaacacccttggtagctatccccctcccgtgcccgtgcccgtgcccgtgccctgcaatccccgacccggagcagcagccaccaccggcgcggcgtcccgcgagccagcacagacgatccctccccattcccgcccgcactgcccagcaccaggaggagcagctagcctatccaacagtgaaaagcacacacgcgttccggactccggactacgcccggccctcccctcccctccccctcctcctgcggtttttagacaggggagtgcgtgcgcccgagcgatccgtccatctgacgggaatgagagggtgcgtgcgtgcgtgggggagagtgagatgcctgcctccctgtagcgtgtaggagtagctctggcctcttcctctacctccagccgtgcggttttctgctgcggaagaaacgggagcagtgtcgctcgtcccgctcgcgcgcacatcctcaactcgtctccgtctctcccgcggcaactgacgacgatgccgtgctcgtcgccggccccgacatggctgctgcgagtgtcgccagcggctgccgcggccgaccaggccgccgcctcgtcctcgtgctcatccaagggcggaggccgcgtgctcacggccggtaccaccaccatggacacggccgccaccgctgccgccggcggcaatgccgccgacctccaggagagcagcagcagcggccagtcccggctcgcggcgcgcggccactggcgcccagcggaggacgccaagctccgtgagctcgtcgcgctgtacgggccccagaactggaacctcatcgccgagaagctggacggcagatccgggaagagctgccgcctccgctggttcaaccagctagacccccggatcagcaagcgccccttcagcgacgaggaggaggagcgcctgatggctgcgcaccgcttctacggcaacaagtgggccatgatcgcgcgcctcttccccggccgcacggacaacgccgtgaagaaccactggcacgtcatcatggcgcgcaagtaccgcgagcagtccacggcctaccgccgccgcaagctcaaccaggcagtccagcggaagctcgaggcagcctccgccgcggtcgcaatgccgccgggcgcgggcgcgggagacgtcgccgtcggccagcaccaccacctgctggccgccgccgcggcggcccacgcccacgacgccgcctacagcttcgccgcggacccctacggcttcggcatccgccaccaatactgcaccttcccgttcccgccaggcgccgcttcggctgaggacccgccgccgccaacgcaaatacatcccttctgcttgttccctgggcccagcagcgcggcggcgcacgccgacagcaggcgccttccctggccgccgtcgtcggacgcgcccggcgtcgcccggtacggggagccgcatcagctcctgcagctgcccgttcaaagcggctggatcgacggcgtcggcgtggccgcggccggccaccacgagccgcccttcgtcttgggcaacaacgggggcgcggccgcctttgaagggacgacaagacagcagggctccggcgctcactttgaagctgccgcggcgccgccgccgccagcgttcatagatttcctcggggtcggagccacatgaacgcgcgcgcatgtgcatgcatgctcgacttcaccacgcgccttgcagttgcatgtagtgggatctagctaggacaggtagctcgagcagcctctatctagtatctagctagctacctttgccatatatgaggagtaagtacatcgatccaaggcttaggtttaagcttatgtagtagcactatgtatgtatatgtatgtctgaatgtctctggctagataggaactagtgacggagattgagcttatttatttcggggctttgtagagggagggatgcttggactttgatcatttgggatcggattagttacttgattagcccccagccatatatgtatgtatgcaagcaagatagatcgtcgatgatggtgacttgcagagctaaatttgcaa

SEQ ID NO: 89276 - DNA, 2098 bp, Zea Mays
agcaagcaagctgtatgtacttgcaaacaacacccttggtagctatccccctcccgtgcccgtgcccgtgcccgtgccctgcaatccccgacccggagcagcagccaccaccggcgcggcgtcccgcgagccagcacagacgatccctccccattcccgcccgcactgcccagcaccaggaggagcagctagcctatccaacagtgaaaagcacacacgcgttccggactccggactacgcccggccctcccctcccctccccctcctcctgcggtttttagacaggggagtgcgtgcgcccgagcgatccgtccatctgacgggaatgagagggtgcgtgcgtgcgtgggggagagtgagatgcctgcctccctgtagcgtgtaggagtagctctggcctcttcctctacctccagccgtgcggttttctgctgcggaagaaacgggagcagtgtcgctcgtcccgctcgcgcgcacatcctcaactcgtctccgtctctcccgcggcaactgacgacgatgccgtgctcgtcgccggccccgacatggctgctgcgagtgtcgccagcggctgccgcggccgaccaggccgccgcctcgtcctcgtgctcatccaagggcggaggccgcgtgctcacggccggtaccaccaccatggacacggccgccaccgctgccgccggcggcaatgccgccgacctccaggagagcagcagcagcggccagtcccggctcgcggcgcgcggccactggcgcccagcggaggacgccaagctccgtgagctcgtcgcgctgtacgggccccagaactggaacctcatcgccgagaagctggacggcagatccggtacgcgcgtccatcatcatcatcttgcattgtgggaagagctgccgcctccgctggttcaaccagctagacccccggatcagcaagcgccccttcagcgacgaggaggaggagcgcctgatggctgcgcaccgcttctacggcaacaagtgggccatgatcgcgcgcctcttccccggccgcacggacaacgccgtgaagaaccactggcacgtcatcatggcgcgcaagtaccgcgagcagtccacggcctaccgccgccgcaagctcaaccaggcagtccagcggaagctcgaggcagcctccgccgcggtcgcaatgccgccgggcgcgggcgcgggagacgtcgccgtcggccagcaccaccacctgctggccgccgccgcggcggcccacgcccacgacgccgcctacagcttcgccgcggacccctacggcttcggcatccgccaccaatactgcaccttcccgttcccgccaggcgccgcttcggctgaggacccgccgccgccaacgcaaatacatcccttctgcttgttccctgggcccagcagcgcggcggcgcacgccgacagcaggcgccttccctggccgccgtcgtcggacgcgcccggcgtcgcccggtacggggagccgcatcagctcctgcagctgcccgttcaaagcggctggatcgacggcgtcggcgtggccgcggccggccaccacgagccgcccttcgtcttgggcaacaacgggggcgcggccgcctttgaagggacgacaagacagcagggctccggcgctcactttgaagctgccgcggcgccgccgccgccagcgttcatagatttcctcggggtcggagccacatgaacgcgcgcgcatgtgcatgcatgctcgacttcaccacgcgccttgcagttgcatgtagtgggatctagctaggacaggtagctcgagcagcctctatctagtatctagctagctacctttgccatatatgaggagtaagtacatcgatccaaggcttaggtttaagcttatgtagtagcactatgtatgtatatgtatgtctgaatgtctctggctagataggaactagtgacggagattgagcttatttatttcggggctttgtagagggagggatgcttggactttgatcatttgggatcggattagttacttgattagcccccagccatatatgtatgtatgcaagcaagatagatcgtcgatgatggtgacttgcagagctaaatttgcaa

SEQ ID NO: 89277 - DNA, 3647 bp, Zea Mays
agcaagcaagctgtatgtacttgcaaacaacacccttggtagctatccccctcccgtgcccgtgcccgtgcccgtgccctgcaatccccgacccggagcagcagccaccaccggcgcggcgtcccgcgagccagcacagacgatccctccccattcccgcccgcactgcccagcaccaggaggagcagctagcctatccaacagtgaaaagcacacacgcgttccggactccggactacgcccggccctcccctcccctccccctcctcctgcggtttttagacaggggagtgcgtgcgcccgagcgatccgtccatctgacgggaatgagagggtgcgtgcgtgcgtgggggagagtgagatgcctgcctccctgtagcgtgtaggagtagctctggcctcttcctctacctccagccgtgcggttttctgctgcggaagaaacgggagcagtgtcgctcgtcccgctcgcgcgcacatcctcaactcgtctccgtctctcccgcggcaactgacgacgatgccgtgctcgtcgccggccccgacatggctgctgcgagtgtcgccagcggctgccgcggccgaccaggccgccgcctcgtcctcgtgctcatccaagggcggaggccgcgtgctcacggccggtaccaccaccatggacacggccgccaccgctgccgccggcggcaatgccgccgacctccaggagagcagcagcagcggccagtcccggctcgcggcgcgcggccactggcgcccagcggaggacgccaagctccgtgagctcgtcgcgctgtacgggccccagaactggaacctcatcgccgagaagctggacggcagatccgggaagagctgccgcctccgctggttcaaccagctagacccccggatcagcaagcgccccttcagcgacgaggaggaggagcgcctgatggctgcgcaccgcttctacggcaacaagtgggccatgatcgcgcgcctcttccccggccgcacggacaacgccgtgaagaaccactggcacgtcatcatggcgcgcaagtaccgcgagcagtccacggcctaccgccgccgcaagctcaaccaggcagtccagcggaagctcgaggcagcctccgccgcggtcgcaatgccgccgggcgcgggcgcgggagacgtcgccgtcggccagcaccaccacctgctggccgccgccgcggcggcccacgcccacgacgccgcctacagcttcgccgcggacccctacggcttcggcatccgccaccaatactgcaccttcccgttcccgccaggcgccgcttcggctgaggacccgccgccgccaacgcaaatacatcccttctgcttgttccctggtgagcactccggcaatccctacccggcccgccattacctgctagcacgacaccgcactcgcacgccacggatgggatgatgtatgtatgacaggcgggcccctgctggcacagtaactcccggctgattgttgccccccaccgagtccggccggcaacactggctaacagacgagctcgagaagctcgcggagcccatctatgagcgagtgcgacggggactggtctagtgttctcctagccgccagtgatggatcatggattttcttttatttttactgtgacctagccgggctttgtttacagtgttcgtgtgacgagacctatctatctacctgagggctgaggctgaggggaggggctagctgtacctgtacggttgcggctgctgcgtttgcactgtagagggtggaggatgatcgatcgatcgaggagaggagtccgcacggttcggcacacagtacattcaggcaggcaggcaggcgcacagcatcgatgaaccgtgattccatgatagggagagacacggggacgaatcaatggaggcctcgatcgggcggtgcactgcagcacggcctccgacccgtccgatcccgccgcagcgtgggtagccaggcacgcacagccttgctcgccaccggcccctggcgggcgtaaatgcctttgcttgaaataggaagccctgcgggcgagatctcgtcggcatcggagaccagaccaggcacgcacaggccgcgccggccgggaagactttggactttgagcacggcgccacagtggcgcgcactgcatgtcgcacagtgccgcacacgctcgctcgctgccaagaggtgagcagagcagagcagcagtgaggggctttagatgacgtgccaaggcgatgcccgccatcaatgcgcgagggcgctacctgcctgccccttgttgctcacctgctgctgtgctgtgccttctgttctcgcatacaacatatctcctgtgtgctgtgctgtgctgtgcgtgcgttttcttttcttggagggttctgtttgcttcttaattccctgctcagctgattactattggtttcttgattgtgtgccatcgcggcgtcgctttcctgctggtctctaacttccaagatgcaattaatcagtcgctagtaacaccactgtctctctctctcacgcgaccttccaatctgcttgtcttctgatccatgccaaacagggcccagcagcgcggcggcgcacgccgacagcaggcgccttccctggccgccgtcgtcggacgcgcccggcgtcgcccggtacggggagccgcatcagctcctgcagctgcccgttcaaagcggctggatcgacggcgtcggcgtggccgcggccggccaccacgagccgcccttcgtcttgggcaacaacgggggcgcggccgcctttgaagggacgacaagacagcagggctccggcgctcactttgaagctgccgcggcgccgccgccgccagcgttcatagatttcctcggggtcggagccacatgaacgcgcgcgcatgtgcatgcatgctcgacttcaccacgcgccttgcagttgcatgtagtgggatctagctaggacaggtagctcgagcagcctctatctagtatctagctagctacctttgccatatatgaggagtaagtacatcgatccaaggcttaggtttaagcttatgtagtagcactatgtatgtatatgtatgtctgaatgtctctggctagataggaactagtgacggagattgagcttatttatttcggggctttgtagagggagggatgcttggactttgatcatttgggatcggattagttacttgattagcccccagccatatatgtatgtatgcaagcaagatagatcgtcgatgatggtgacttgcagagctaaatttgcaattatccattcttttactagccaagagtagaagctagtagatttgcagatgggatagccgagtatacggggttttcttttttgctgcatagaagagtctgcttggttttaactttttttttttttgcaaggggagactataaataccatctaaaccagtcatttctcatatgtggagctcggaaacattgttagggagttgatactctaatcctttggctctagacacctaagtgctaaaagaatcagtgattagcattgatgattcgtaaagtgcttagattagttagaccgttatcataacgtttgctctaggtttgtttctagttgttagaagtgaggttagacattctcaacgcattagtgcttatgtgca

SEQ ID NO: 89278 - DNA, 599 bp, Zea Mays
gtgcacgacgggcggcgggaggttgaaccgaaccggtggcgacgacgtcgacacgccgcactccgtccggcatccgtatcctcctgtttccttctctccgttacccgagctggaagtctatacacacatagacggcataatatgcacgggaagttgatctaattaatgagtgcaaggaaagggaagcaatgcaactggcttgcttggacacctgctgcctgaatggttgtatgcaacagctatgaagcctacagggtggtactcacagcattcactgcaaggataggacgacaggatcagaatacatcatatggagggctgatacatatgtagacttgccagatctttctgcacatcttactacgttttatgcatggtaacagctagtttcaaagaagaacaccagcaaagtatcatgctatattttgctcttttattagtttatagtcatttttgtatgcatatttgatttttgtaccatattttcctttttactgtgtagtggtaaccatcaacagaaactgatggttgagctacgacttatgtaagaagtaagatgttttgtgtaaccctttatgtttagtaatttcatctcaaca

SEQ ID NO: 89279 - DNA, 771 bp, Zea Mays
accggagaaggtctggatgatggtgttgtgccatgggtcagacaggtgctgcagcaggttgtcgaagggccccttgccggtgacgttgtgctggatcaggaagcccaggaacgccagcatcgccagcctcccgttggcgagctccttctccttggcctcgagcgtgggcgcgaagttgagcgggttgaagacgctgcccgggtagccgcactcgtgcggcggcaggctgtagctcttgaagatggggtcctggttgacgctgccggggttcttgatgtcctgccaccgccggatctccacgtagtggaacaggatgaactcgaccacgaacagcgtggacgacgacgcgaagtactccgacttgccggcgtcgtaccactgcggcgcgttgatcagcccggctttggtcagcacctccgggatgagcatcccggccacgccaagcatggcccaccggccgttcaccagctccgcctgcacgaaccaccgcaggttctcggggtcctccgccaggcccaacgggtcgaagccattgtcacccgccaggctgcgctcgaggtaggagggggagggaaggccggggagccactcgcccttggcctccgccttgaggctgcgcctcgtgggagacgcggtgcggccgaggcggctagagtggccaaggaaggccgacgacgacttgagcgatgccgacgacgggcgaagggccgctaccggggcgcgggcggtgacggacgccatgcttcccggggactgggagcgaggagatgg

SEQ ID NO: 89280 - DNA, 984 bp, Zea Mays
taagagattcttgaggcatcaaaactactccaacatatctcaccaccaatataccatgcaagctaataggtaaacactatctttgacagttttacagacacagcagacgctgatgcattcttgcgaagggcgctcgcaagttacaagtgctacagcgcacttgcaaaattcgcaagattgcatttgcggaccacaattgtcgcaggtaacaatgcctgattgctctctgataatattgaaccaaaaccgcttacttcgggtagtaaatcgattggccagctggtggtgcgtgcggcggagcaccagggggcatgctatactgtgtcatctgctgcgaagcctgaaatgctactggtggggcaccggaactcgatccaatagcaggatagtgaggcatggagttggccattaatggttggttggggtatgcagtcgatgcagatgcaaaactccctgcctgcatgttaggattccaagcagccacctgtccaactccaataggagttgaagtcgctgtgcttgcataaaaaggagcagctggtactgatgcagtgttctgccatgccactcccggagaccttagaactggcgtttgtgcagcagcttgcagctgcacgttagggtctgaaagagtgtagtccctgcttctctcatcatgtgcctgaatgcaagcaaataggtagccaattagaataaggcaaaagcaggcagtactaaggggtaacaaaaaaagatgttcagaaagcgtactttgtcaatttgcatgaacaataggtattctttttttactaattgagcagaattcgttattcattagtcctgaacagtatatacttaaattatttgctaatttacacagcccaaaactactatttatacctttacattgagatcagtatgacgagagtatgacagatgaagcttacagtaaccaccatcatatatgcagtgtccctccaaagcttgtttagcaacggctgcggt

SEQ ID NO: 89281 - DNA, 462 bp, Zea Mays
ttttaccacgaacttgagcaggttctgaagatgaagcataataggacaccattgaaattgcctggttttgatctgcctgaaaatgagcatgttgaagggaaaacagagctgttttcatgctccattttgagctttccttgcaaatatcttggtttgcctctttcaattaagaagctgcccagagaccaagttcaagctattattgaccgggtagcctctctcttgcctaactggaaagcggagcttatgtcaagcgctgggaagtctatacatgttcagtttgtgatgacatcaaaactgatttatgcagctatcgctctggaccttcctatgtgggccatcaaagctattgacaagcttcggagagggttcttgtggaaaggaaggaaagatgccacattatcttctagcttggccaaaggtgactcaaccaaaggacctaggcagtttaggcttgcttag

SEQ ID NO: 89282 - DNA, 932 bp, Zea Mays
acgggtaaattcaggtacccacccgtcaccactacggcactacccttcagccccagatttctccaagcctccgggacgaggcgcatccgtccatgggggccaaggcggcacaccggcgtggggtgctggacctggaggcgcagttcgccttcttccggtcgcagcaccggcaccccgtgaacgcggcggcgcacgtgctgctcacctggcccatcctcttcaccaacctcttgatcctccacttcctgccgctgccgctgcccgtctcccccgcgctggccctcgcgctcgcatacgccgccgcctacctcgctgtcgaccgcagagccggcgcagtcgcggggctgctcttcctcgccgcatgggccgccagccgcgccctcgcggcccgcctcggcttcgctctctcctggaagcttgtcctcgtcacgcagctcttctgctggacctggcagttcctcggccacggcctcttcgagaagaaggggccgagtgttagtgatcttcctgaggtgttcttgatggagccgttcctcatcttcctgcagatactgaacaaactgttcggctatgagccgtatcctgggttctgcaagaacgtggacaggaagatcgaagccgatctcagggcgagcgagagctcaagcagaggaaggacaacctgattgattgggaattcgggagtgatcctccggagcggtgcgcgaaattgtaccatctatacatgtagcatattgcctgccatttgtgttgttttattcaggtatatgatatctgcgcaccattatatagtgtagtaaacatcagtcatgtgtgttgaagtcagcttgaatcccgggaggaaggtagagagcggtaataatctcctcgtttagagcaactccaatagttatgtaaattttagctctctaaatcacagatttaagaagttg

SEQ ID NO: 89283 - DNA, 1046 bp, Zea Mays
acgggtaaattcaggtacccacccgtcaccactacggcactacccttcagccccagatttctccaagcctccgggacgaggcgcatccgtccatgggggccaaggcggcacaccggcgtggggtgctggacctggaggcgcagttcgccttcttccggtcgcagcaccggcaccccgtgaacgcggcggcgcacgtgctgctcacctggcccatcctcttcaccaacctcttgatcctccacttcctgccgctgccgctgcccgtctcccccgcgctggccctcgcgctcgcatacgccgccgcctacctcgctgtcgaccgcagagccggcgcagtcgcggggctgctcttcctcgccgcatgggccgccagccgcgccctcgcggcccgcctcggcttcgctctctcctggaagcttgtcctcgtcacgcagctcttctgctggacctggcagttcctcggccacggcctcttcgagaagaaggggccgagtgttagtgatcttcctgaggtgttcttgatggagccgttcctcatcttcctgcagatactgaacaaactgttcggctatgagccgtatcctgggttctgcaagaacgtggacaggaagatcgaagccgatctcagggcgagcgagagctcaagcagaggaaggacaacctgattgattgggaattcgggagtgatcctccggagcggtgcgcgaaattgtaccatctatacatgtagcatattgcctgccatttgtgttgttttattcaggtatatgatatctgcgcaccattatatagtgtagtaaacatcagtcatgtgtgttgaagtcagcttgaatcccgggaggaaggtagagagcggtaataatctcctcaactactggagttgctcttactgccctataatttgctatgtttaaattactatgtttaagatgaactaaattttacatgatccaccccccttcatagaaaggggaggatgagtgtcaacacaaccaaacgacatttgggttatcatcggtagcatatctcttatcctagctaatctc

SEQ ID NO: 89284 - DNA, 1020 bp, Zea Mays
caggtacccacccgtcaccactacggcactacccttcagccccagatttctccaagcctccgggacgaggcgcatccgtccatgggggccaaggcggcacaccggcgtggggtgctggacctggaggcgcagttcgccttcttccggtcgcagcaccggcaccccgtgaacgcggcggcgcacgtgctgctcacctggcccatcctcttcaccaacctcttgatcctccacttcctgccgctgccgctgcccgtctcccccgcgctggccctcgcgctcgcatacgccgccgcctacctcgctgtcgaccgcagagccggcgcagtcgcggggctgctcttcctcgccgcatgggccgccagccgcgccctcgcggcccgcctcggcttcgctctctcctggaagcttgtcctcgtcacgcagctcttctgctggacctggcagttcctcggccacggcctcttcgagaagaaggggccgagtgttagtgatcttcctgaggtgttcttgatggagccgttcctcatcttcctgcagatactgaacaaactgttcggctatgagccgtatcctgggttctgcaagaacgtggacaggaagatcgaagccgatctcagggcgagcgagagctcaagcagaggaaggacaacctgattgattgggaattcgggagtgatcctccggagcggtgcgcgaaattgtaccatctatacatgtagcatattgcctgccatttgtgttgttttattcaggtatatgatatctgcgcaccattatatagtgtagtaaacatcagtcatgtgtgttgaagtcagcttgaatcccgggaggaaggtagagagcggtaataatctcctcgtttactgccctataatttgctatgtttaaattactatgtttaagatgaactaaattttacatgatccaccccccttcatagaaaggggaggatgagtgtcaacacaaccaaacgacatttgggttatcatcggtagcatatctcttatcctagctaatctc

SEQ ID NO: 89285 - DNA, 1147 bp, Zea Mays
tttggacggctctatctactatctcctcgacacatcctatcaaaagaaaacaccacacataaaaatcccgtccctatccgccacggcacactcatcgccatgcccgccgccatgccctctccgccgggccgcctcctcgcttctatccctctccgctgccacgctccgacccagcagccctccaccaccgccgcccgcggcctcctcctccgcggcgcgtgctccccggttgtcaagcgtgtcccggacggtggcgggtggctcctctggcaccagtccggcccccgcgtggcgctctccacctctatggacggtctccgctggagcgccccagtatcccccgacccactgctaccctcagaggattggtggacgttcgataccgcctgtgttcgcccctccgacgtccttctcgtctccagccccgcggcgtcatcccgccgcttcccgtcctctgccgtatactggctctactacatgggctccaccgacgagcggttcggctccccgtttccggatgcggacgtccccgcgcttcccggcctcgctatcagccaggacggccgccactgggcgcgtatcgagggggaccaccacaccggcgcgctgttcagcgtcgcggaggaaggggagaaatcccgagggtgggaagcgcgctgcattgtcgcacccaaggtggtcatgcacgcagacggggacctgcggatgtactaccactcgttcgacgaaatgtcgcagaggcatgcaatcggtttggctaggtccagggatggtatccgatggaagaagacggggaaggtgcttgagggggggcgtgctggttgctttgacgaatgtggggtgcaacatggacatgtcgtccgtgaccgtgctgcccggcagtatgtcatggtgtttgagggtgttgacgcagatggtagagtgagcattggaatggccgtttcagaggacgggctgaaagagtggaggcggtctagcgagatgccagtgctgtgcccatcttacgatgacgaagggtgggatgccgctggggtcggttcaccatacttggtacaaatggacggggcttatgattggaggctgtattacatgggtgttgggagggacggggaggcttccattgggatggcgtattcagagggtcagg

SEQ ID NO: 89286 - DNA, 583 bp, Zea Mays
actggcgctggtgaggaagaccctgaggccagcgctcggcggtgatgtcgaggaagtggtgaaggggctccaggtccttcattgtgaactcccgctaaagggcgacgatcgtgcgctgtagaaggtcgacggtggatgccctgagcacaatgttgtcgacgtagagcatgaggtagacggtgatatgggtgttcccgttgataggaacgagttccaggccgcagcccagatcgagtaggctggggcggcaccgggatagctcgccggcgacctatggtagcggttgacggaaccaccgaccgtttatcgtcggcgacgcctgagactggaatttgtggaacaagaatgtcccttttctcttctgcctttttctcttttatttcccacaatctctttcctaaacatagaaactatagagccgtaatgctcaataaggtaactactgctaccattacaaaaagggactatttgctaccaaataatcacagccaatcaactcagtgtttcctaaaataaactctatgcggctgggccatatcaatactccccccctcgacagcaagcttgtcctcaagcttgaaat

SEQ ID NO: 89287 - DNA, 123 bp, Zea Mays
cctggttcctctatcaagggggagaaatttggtctttcgggcttcctctcatccaagggggagaaatgtgttatttggagctattggtctctaggagagatttttgggagtattgtgataagg

SEQ ID NO: 89288 - DNA, 1543 bp, Zea Mays
atggcagagggcgtggtggcgggggtcgcggctcccatggccgtggctcgggccgtggcaggggaccgcaggctagaacagtgtctcggcgaggacaaggtgaagattctggagcaggcgttcatggaggcagcagataatgtgctgccacatccaatggaggatgcttacctcgaggcttgtcacacaaacaacatggaatggaaaatgtgcatatatggtgctgattgcagtgagattagcctcgtccaagttaagggatctggtatgttaaaggattctgcctgccatgaactagacaagattagaagtttaaagaggccttacatcaagagagtacaagatcgccataaggaaacagtaaattgtctcaaacgcaacgctattgaaatggagggatacattcgccctcttgacgtagtaataattgtgtcgcagtatataccttgctctgatgaccagcattctgatggtgttgcagatgatcatcccaacgattccttattctctccaacataccatcatcacaaggaggtctacatggtggtgtctataggtctcgatgtcaagcctggttccactgttaagtgtgagcctggatatggttttatgctgcacctttcccagaaacttgccattggaaccctctctgttgacaagaacccacacatacaatttgatctggttttcgataaagagtttgagctgtcgcacacatcaaaaactaccatcgtcttcttcactggctacaaggttgagcaaccattcaaggaagatggatatccttttttatttagcattgaattagttctatttcaaatttttacagatatttttaataatgacctcggtggaccctatgcatttcttgaggattcagataactgtatcactttctgcaatagtactactgaagcacggagcgaaccgcacaggctaagcccgcacggagcgaaccacacgggaaaagctgatgggaagaaacagaaaagtcaagaaaaggctgttcctgcagcttcaaaatcaagtccggcttccaagaagagcaaggatgacgatgattctgatgagggcgagactgatgattctaacgaggacgagacagacgattctgatgagggtgagggtttgtctcctgaagaaggcgatgatgatgattcaagtgatgaagatgataccagtgacgatgaggaggaagacacttcaactcctaagaagcatgaggtaggcaagaagagagctgctgaaagttccatgctgaaaactcctctatctgataagaaagcaaaagttgccacaccgtcagctcagaagataggtgtgccattgaacggattaacaaaactgtcgtcgaagattgtataggtgtgactctgttcaaggatagtcttgaggttctagaacagaagagtagtggtgtgcatcagtgtatctgtttacaggataatagtggttggttaggtgtgtgcagaaaaagtttagtgttatggtttgtatgtgatacatattaactgtgccttggaatgttcatgtgttgtcctga

SEQ ID NO: 89289 - DNA, 883 bp, Zea Mays
tcttttaaatctgcaaggtggtgtctgttttttattcaacaggaggtctacatggtggtgtctataggtctcgatgtcaagcctggttccactgttaagtgtgagcctggatatggttttatgctgcacctttcccaggctgctcttggggaatcgaagaagagtgataatgcgctattgccttgatgtatgtcaaaattgatgatcagaaacttgccattggaaccctctctgttgacaagaacccacacatacaatttgatctggttttcgataaagagtttgagctgtcgcacacatcaaaaactaccatcgtcttcttcactggctacaaggttgagcaaccattcaaggaagatggaatggatcttgattctgaagatgaagacgagaagctgaatgttccagtagtcaaggaaaatggcaaagctggtgggaagatacagaaaagtcaagaaaaggcagttccttgaatttttcaaaaagaaagatatttttaataatgacctcggtggaccctatgcatttcttgagccactttttgttcaaagaccccttctatataagatacaggcaaggagagaaaagaggattcagataactgtatcactttctgcaagtacaaatacacaagcacagaatatctttcccctttatgtactttttagctagacctaccagtaatatttcgcttgagggcattctccgatatatcgagcgggatgatgcttggtggacgtgtacatactaatattaatcggtctcgaagcttccaatacactcagttctcacatgaacgagtgggatggacctccctagaaaccaaacacccctgaatcgcagtcatcatcagcgaacgacaatccgtgtgctgttgcgatgt

SEQ ID NO: 89290 - DNA, 1456 bp, Zea Mays
aacaccgattcgtttccccttggcacctggcgccctgtcgccttcgaaaaacagccgccgccgtcgcccgtcccggatccgacggcccccgctccttcgtctagtatttatactagtgccttgccggcgctgctcctgttgcctctcgcatttgcccacgcccgcagcgcctcgcctcggctgctctacctctatcccgcgacccgcgagatcggaatcgcggcgccccgccgccctcctccaaaatggcaccgtctctgctcggggggttcaccaagtcgttggccatgacggtgctctccgagatcggggacaagaccttcttcgccgccgcgattctggctatgcgccatcccaggaaactcgtattggcaggctgtttaactgcactaatagtcatgacagctctatcggcttctctaggttgggttgcaccaaatctgatttcacgtaaatggactcatcatttgaccactctattgttctttctatttggcatttggtcattgtgggaaggcttcaaggaagatgggtaccgagattcggaagaattggctgaagttgaagcagagctggatgctgcctttaagagtaataaaggtgaatctaaaaataaatttaaggcgaatgatgatatgaagaaacagcaaagaccatttctcatgcagttcttctcaccaatttttctgaaggcattttctattacattctttggtgagtggggtgacaagagccagattgctacaattggcttggctgctgatgaaaacccgttcggtgttgtcctgggtggaatcatagcgcaagcactctgcactactgctgccgttcttggtggaaagagcctagcgtcccagatatctgagaagatggttgaactgtcaagcggagtgctcttcctgctcttcggtatcatgtccttactctctggaccagaaggagaattgtaatccctgcttgagcctttttcagctagctgattaacatggctttctcttcttagacctatcttatttcagtacatgaatgatggcaacgaaagccatccatccatggcgaacaggatggtgatttaacagtttagccgacacgctgtaaacatttcagtcgcccttcaaaaattactacatgttacagaagtctgtagcgattgtatatttgtattctgtcgtgcccagcacgtgaaattttgttatcgcaattacatgcgttaacaaagctttgttcgtgaaccaagtattcaggcaattaatatggggcttatagcaggcctttgtcttttttcgttgtgttattcctttaatattaaatgtcggctagttttctatggaacttcaagtcttcaattgtggcgaaggtaacgaaacaaggccaatcttattgaatgttttatcaaaattttctggacattaaataaattgatatgacaatataaatggagagataataaaagttt

SEQ ID NO: 89291 - DNA, 1450 bp, Zea Mays
aacaccgattcgtttccccttggcacctggcgccctgtcgccttcgaaaaacagccgccgccgtcgcccgtcccggatccgacggcccccgctccttcgtctagtatttatactagtgccttgccggcgctgctcctgttgcctctcgcatttgcccacgcccgcagcgcctcgcctcggctgctctacctctatcccgcgacccgcgagatcggaatcgcggcgccccgccgccctcctccaaaatggcaccgtctctgctcggggggttcaccaagtcgttggccatgacggtgctctccgagatcggggacaagaccttcttcgccgccgcgattctggctatgcgccatcccaggaaactcgtattggcaggctgtttaactgcactaatagtcatgacagctctatcggcttctctaggttgggttgcaccaaatctgatttcacgtaaatggactcatcatttgaccactctattgttctttctatttggcatttggtcattgtgggaaggcttcaaggaagatggagattcggaagaattggctgaagttgaagcagagctggatgctgcctttaagagtaataaaggtgaatctaaaaataaatttaaggcgaatgatgatatgaagaaacagcaaagaccatttctcatgcagttcttctcaccaatttttctgaaggcattttctattacattctttggtgagtggggtgacaagagccagattgctacaattggcttggctgctgatgaaaacccgttcggtgttgtcctgggtggaatcatagcgcaagcactctgcactactgctgccgttcttggtggaaagagcctagcgtcccagatatctgagaagatggttgaactgtcaagcggagtgctcttcctgctcttcggtatcatgtccttactctctggaccagaaggagaattgtaatccctgcttgagcctttttcagctagctgattaacatggctttctcttcttagacctatcttatttcagtacatgaatgatggcaacgaaagccatccatccatggcgaacaggatggtgatttaacagtttagccgacacgctgtaaacatttcagtcgcccttcaaaaattactacatgttacagaagtctgtagcgattgtatatttgtattctgtcgtgcccagcacgtgaaattttgttatcgcaattacatgcgttaacaaagctttgttcgtgaaccaagtattcaggcaattaatatggggcttatagcaggcctttgtcttttttcgttgtgttattcctttaatattaaatgtcggctagttttctatggaacttcaagtcttcaattgtggcgaaggtaacgaaacaaggccaatcttattgaatgttttatcaaaattttctggacattaaataaattgatatgacaatataaatggagagataataaaagttt

SEQ ID NO: 89292 - DNA, 1506 bp, Zea Mays
ccagcagccaccaaggtaccattacgctacctcctgtgctatagagcggcgccgcagatcgatcgaccgatccatccaccgatcgggatgtgggaaggcggcggcagccacgcccacgaggcgctcctgctgcaggccgccggatcaggagcggccgactacgggcacgccggcccgtcgctcctgcggccgtggctcggcccggccgccgcgtcggggttctcctacatggccccaaaccacgcgcagccagggcccttgggcgccgaggcggcggtcgcgagccgtttcggcttcggcggcggcgggtacagcgatggcggggtggagcaagagcaattcgtggtgatcggctcagccgagactgtgcctccgcggcacagtctgcaggctgctggagttggtgggaggacgacggcgctgctgccgcacgggccgaggatggtgtcgggacttctcgggaccctgcaggcggagctggggcggatgacggccaaggagatcatggacgccaaggcgctggcggcctctcgcagccacagcgaggccgagcgcagccgccgccagcgcatcaacggccacctcgccaagctccgcagcctgctccccaacaccaccaagacggacaaggcgtcactgctggccgaggtaatcgagcacgtcaaggagctgaagcggcagacgtcggcggcggctcggcagcggcacctgctgctgccgacggaggcggacgacctgttcggtggacgccgcggaggacggcgacgacggcaggctcgtcgcgcgggcgtcgctgtgctgcgaggaccgcgtgggcctcatccccgacatcgcccgcgcgctcgccgcgctcagcctgcgggcccgccgcgccgagatcgccacgctcggcggccgcgtccgcaacgtgctcctcatcaccactgccgacgacgacgacgaggaaggagagggccacgtcgaaggcgggtgcgccggcgcctcgtccaaccggaggcacgagctcgtcgcgtccatccaggaagcgctgcgcggcgtcatggaccgcaagacggcgagcagcgacacgttctcatctagcggcggcggcggcggcgggagcatcaagaggcagcgcgtgagcggtctgcatgagcaaggttcgctttaattagcgtgctcaaagtagctagctatgttgtcgtggtccttcctcgatcctagcatgaaatatcgaagcatgcttgcatggctagcttgcttctgcagaaactcaagttgattagtacagttataaagctataatcacttcaaagtttaaccttggaacgagctggctcttctttttttgtcgctatatatggcatggcactatggcagtggtgtgtgagatagacgtggagggggataagggtgtacacatgtataatctcgggggttattataatgtaagatggaattggtggggttggtcatttatttcttcagtgtgccatgcatggagccatggaggttcactcttttttc

SEQ ID NO: 89293 - DNA, 1904 bp, Zea Mays
aatccgatgcctccaaaccgcacgtcgaacggcccacggagcatcaccaccgcggcagctgagctcggccccaacattcagattcttcgaggcgcggcgacggcggtcggcgacatggaggccgcggtgcccagccgtgttgcgctctccgcggcgagccgcctcccaaatccccacgccgtgacaggtgctccgtctccctcgctcccgagtctggcgccggtttgtcagtttgttggaatttggatgcgattttgggagtactcctcagtagttagtactcattagtatctttcagtggataaggtcgacagggcaagtagggttcgtgctgtccacgcgtttcctgtggagctagaactgcgggggattccacggagtatgagagccgacgagtgctgttccactttggcaaggattttgccgttactgccagtattgtgaagagagagtccttctgtttcctgccatagaatggctgccttgtgttggctagaggacgtggactcgatgtatggtgaaattattgcgtctgttctagttagtggcaagaacaagtgtgcaaggtgaagattaaatggttgacatcattggcattttcaaccagctagctgttagttccttgtttgattgcttcagtatgcttttattcatggactgtgttttgcattacagctcttcccatttttagtccagattacatacatattaacaaccggctccaactgctaagtcacctacccaaacagatatcagtggtagtagactagcagttgttatattgcagagtcggtgcatttacaggaagataaataatcctgcaatgaaatctaaaatttaagatacacttaatactactagtgaagtatacaatcagttgcgactgtgtgccaatctccacaggtgcattatttcttgctggccgttaccagttgctgattattcttgatcgtgttcttgacaaccccaaatgactgagatgattattgaatccaccatatcataccctcaattgaaatgcataggaaatattgctctatcaccaactaatcctcaaccttgtagacatgtttactgttgcatgatcatgaggctattactccatctttgttcattttttttcagcctggatgcacaaatgtgcaaaagaaaactgtgctagctatatcatgacttccagtttatatggaatattgtttatcatgtcataggttcatgattactgttgcagacttgctggtataatgtttcatgttgattttcttcatattgtgcaggagatagatctttcatttacaagggaagatgccaaagtcttgcaattcctatggctttgtcagcagctgcgccaggcaaaggtggtggtgtgcttgatcggccagttgagaaaactactcctggtcgccagtctgaatttgatgtgaagaaatcccggaaaatgtcgcctccataccgtgtcatcctgcacaatgacaactacaacaggcgcgagtacgttgtcaaggtcctgatgaaagtgatccctgggatgaccgtcgacaacgctgtgaacatcatgcaggaggcgcacgtgaatgggctgtcagtggtgattgtctgttcccagtccgaggctgaggagcactgcacgtcgctcaggggcaacggcctccggagctcgatcgagcccgcgagtggtggctgctgaggttcgagacttgggggtataccttcttgttttgccagcgtatagtttgtaaatacccagcgtatcaagctaaagctgaaacggattggttatatgcacttatcgatacaacgaagctgagtacccctctcgggtaggtgtaaatcgtgcaagggtaccctgtagaagaagaaacatagtattttcggttttgatttataaaatatttagttgcaca

SEQ ID NO: 89294 - DNA, 778 bp, Zea Mays
cggagcatcaccaccgcggcagctgagctcggccccaacattcagattcttcgaggcgcggcgacggcggtcggcgacatggaggccgcggtgcccagccgtgttgcgctctccgcggcgagccgcctcccaaatccccacgccgtgacaggagatagatctttcatttacaagggaagatgccaaagtcttgcaattcctatggctttgtcagcagctgcgccaggcaaaggtggtggtgtgcttgatcggccagttgagaaaactactcctggtcgccagtctgaatttgatgtgaagaaatcccggaaaatgtcgcctccataccgtgtcatcctgcacaatgacaactacaacaggcgcgagtacgttgtcaaggtcctgatgaaagtgatccctgggatgaccgtcgacaacgctgtgaacatcatgcaggaggcgcacgtgaatgggctgtcagtggtgattgtctgttcccagtccgaggctgaggagcactgcacgtcgctcaggggcaacggcctccggagctcgatcgagcccgcgagtggtggctgctgaggttcgagacttgggggtataccttcttgttttgccagcgtatagtttgtaaatacccagcgtatcaagctaaagctgaaacggattggttatatgcacttatcgatacaacgaagctgagtacccctctcgggtaggtgtaaatcgtgcaagggtaccctgtagaagaagaaacatagtattttcggttttgatttataaaatatttagttgcaca

SEQ ID NO: 89295 - DNA, 513 bp, Zea Mays
atgccactgaacctctccccaccaagccaatccctgaacatcggtggaagatgggagaaaaagaaaagaaaacacacgccactgctttggcaaagggaggcaggaagcttgaggcagcaactgcataacttgcaagagcaccatcggaagttgttgggtcagcagctctctggcctggacgtgagagatttgcagaatttagagaatcagctggagacaagcctaagaaatattcgtctaaagatggaccaacttattttttatcagattcaagaattaaacaggaagggatacctcatgcaccaggaaaacatagaactacacaacaaagtcaaccttcttcatcaagagaacattaaattacgtagaaaggcgtatggacaaggagtaaatgagcatccaacaagtactacagttagacacagtattctgaatacagagaatgaagatgttcggatcaatcttgagctgagtgtgcaaggggacaaatcagaaacaccaagtatagggtga

SEQ ID NO: 89296 - DNA, 621 bp, Zea Mays
atggaggtcgcggagcagaagagcgaggagcgctgggatcggatgatgaagatcctggagcgtttgggcgacaaggtggaggcgatggagattgggcagcaacgtcttcaacgtcaagcagaggtgatggaggcgggacagcaacgtcttcatcaccaagttgaggctgctgcaacatctgcgaggaaggcggaagaggaacgaaccatcctggcgcgtcaagtggatgaaaccgggaaggcggtgtcgcgccttcgattggaatggatggcgaaggagatggaaggtatggaaactgagtctgagaaggaagggcgtaaccaaaggcggtctgagggtgatgatcgggagtatggagagcaggagtttcgtgtggatgatcagccggaaggaagtagagagcgtctttcctctggccccttggcgctgcgtctcatccacagaggcaacaatccacgtgggtggtcgaggctgtctacggttcctagatcccattgcggtgcaacctccagtgagggtgtcgaatccaatgagggcttcgatgagggtgcgagatctagcgagggctcagacaccaaatccgatgagagggccacacgagctctagccaccaatttatga

SEQ ID NO: 89297 - DNA, 133 bp, Zea Mays
ggtttaaaccatatttattaactctaaacatttatttacacccacataaccaacaaaaacacatgtttcttgtgttttatactctatatttaagtataatatatgtatttatatgaaaaaatagaaaaaaaaa

SEQ ID NO: 89298 - DNA, 2277 bp, Zea Mays
tttaagataatatacaaatatattacatatataaatatataaacttaattagttttgtctaaattataattattaaaataaaattcaattccaacgaaatcaacagggtcttagaattccctaggattgagtggaaaatcctcgtaatcccgaaataaatttttaatcttttccaaactagcccttaccagataattctttcccgtacgcacccacccaatcccggaaatatattcataccgacagcacagctcgccaacactccgatacgcggggatgcatagacgtcggcaggaggagctcatgtcgaacaccaatagcgttagccaccaccagtagccacagcagtcatggggtcggtgccgccggcagagggggacaggcgccagccccagcagcagccacacgtggtgatgatcccgtacccggcgcagggccatgtcacgccgatgctgcagctggccaagctactccacacacgcggattccacgtcaccttcgtcaacaacgagttcaaccaccgtcgccacctgcgcgcgcgggggccgggcgcgctccacggcgcgccggggttccgcttcaccgccattgacgacggccttccgccctccgacgccgacgccacccaggacgtccccaagctctgctactccaccatgaccacctgcctaccccggttcagggacctaattgtcaggaccaatgccgaggccgaggccgagggacgccccgccgtgacgtgcgtcgtcgccgacagcatcatgagcttcggcctccgcgccgcgcgggagctcggtctccgctgcgccacgttctggaccgccagcgcctgcggcttcattggctactactactaccgccacctcgtcgcacggggtatcgtcccgcttaagaatgaagcgcagctcaccgacggttacctggacaccgtcgtcgactggatcccttgcgcgcccaaggacctgcagctccgggacttcccgagctttgtgcgcaccacggacccggacgacatcatgctcaacttcttcatccacgaggtagaggcgatgtcgcaggcgtcggcggtggtcatcaacaccttcgatgatctcgacgcgacgctgcttcacgccatggcgaagctcctgtcccggcccatctacaccgtgggcccgctcctgctgacggtgcgaaacaacgtccccgcggacagccccgtcgcggccatcgggtccaacctatggaaggaacaagaggcgccgctccggtggctcgacggccgcgcgccgcgctcggtcgtgtacatcaacttcgggagcgtcacggtgatgtccaacgagcagctggtcgagttcgcgtgggggctggccaacaccggctacaccttcctctggaacgtgcgcccggacctcgtcaagggcggcgactccgccggcgcggggctgccaccggagtttctggccgcgacggagggccggagcatgctgtcgacgtggtgcccgcaggcagaggtgctggagcacgaggccgtggggttgttcttgacgcactccgggtggaactccacgattgagagcatctgtggcggcgtgcccatggtgtgctggcccttcttcgctgagcagcagaccaactgccggtacaagcgcaccgagtggggcatcgggatggagatcggtaatgacgtccggcggggcgaggtgaaggcgctcatacgggaggccatggagggggagaaagggcgggacatgcgccgccgcgtcacggagcttaaggggagcgccgtggccgcggcgaagctcaacggacgctctatgcgcaacgtggacaggttcatcgatgaggtgctcctagcttgagcattaaggtttttttacaatggtggccttagttttgcctctgtactcaagtctactcttatttttgcttcttcctcggttttacccaccatccagccgtccactgccttggcttagatcaaggctcgcacgccgtgtcccccactgttatgttatgaaaacaaaaacggtaattttcagataccggaaatcgttttcgaagttttatcgaaatttaggtctaaacaaaaacggttaccgaaaatatggaaacgaaattgatagaaaaatcggaatcggaaacggaaacaatttgaccctctttcgaccgtttccgaaaattaccgtttttattcggtattttaccgtcggtaataaattcggcaatttttcaggaaaatattaaatctgaactgacctttataaattcataaaaaatcatcttaacttagaaaaa

SEQ ID NO: 89299 - DNA, 1410 bp, Zea Mays
atggctgccccgccccgcgccaccgcggtcctcgcgtggtgcgctcactctcgcgcgttctctctcgtgcgcgaggggcgcggcgggcaactccgtttctcgcgtcgcggcgggccactgattgctctggttctcgttttgtacaggggttccggggaggacgggcagcttggcatgggcgggaacgaggagaaggactgggcacactgcgtggaggcactcggttcctacgccgtcaccgccgtcgtagccggtagccgcaactccctcgccatctgcgaagacggccgcctcttcacttgggggtggaaccagcgcggcacgctcgggcacccgccgaagaccaagacggagagctcccctggccccgtccacgccctcgcggggttgaagatcgtccaggcggcgattggtgggtggcattgccttgcagttgacgacaatgggcacgcctacgcctggggtaggggcactcgcttccctgcgttttccgtgactgggggaaacgagtacgggcagtgcggtgaggagcctgagaggaaggaggacgggacgagggcgctcaggagggacatcccgaccccacagcggtgcgcacccaagctcaaagtccggcaagtagctgctggagggacacattcagtggttttgactcaagaaggtcacgtttggacatggggacagccatggcctcctggtgatatcaagcaaatatcgacaccagtacgcgtgcaaggccttgagaaagtgagggtcattgctgtaggtgcattccataatttggcactcacagaggatggaattttgtgggcatggggtaataatgagtatggtcagctggggactggagatacccaaccaagatcacaccctatacgcgttgaaggactatctgatctctcactggttgacattgctgctggaggctggcattcaactgcactaactatacagggagagataaattcacttccttgctatttattcagagcatgctttaaagatgtccagattataaagtaccaaaaatatacatattatacgatgaaagtgtatgcttgggggagaggagaacacgggaggcttggatttggagatgataagagtagtcgcatggtccccctaaaggttgagcttctagctggagaggatattgttcaggtatcatgtggaggaacacattcagttgctctaactcgagatggccggatgttttcttatgggaggggcgaccatggccgtctgggctacggcaggaagctgacgacaggccagcccatgggagtggacattgacctgccgccgcccaagacccgcagcagccgggacgggcagtggcaggcgaagtacgtggcttgtggcgggcggcacaccctggctattgtggtgtgggcagagaccaccgactga

SEQ ID NO: 89300 - DNA, 624 bp, Zea Mays
atggactcccgaatctcttcgctgcaggacatggtacagaccatgtcaaaatctctggaagttgtttccaaatcagtggacaccatgaacacatcgctgaccaatgtcataggccgccagcgggacagcgataaccagcttcaagccttgaatctagcagtcacgcgattggaaaagacctctccatcctctggtctgcccgacaacaccagccataacaattgtaatgggcatagaggtggtggcggcggaggtggcagaggaggccgcaatgatggtgatggtggcggtggcagaggagaactgcgtctcattatattaaggagaaaagggtctaagaaggagctgctgcaccgtactggaagcatggatgaataccaggtggtgcctgatcaagatatccctccagtgggtgaagtgttggccttgacagtggatgacatgccagcaatatcattgcatgctcttatagggcatagctgtgcatggcattcaaacaatgaaggtgcatgttcacattatgggttgccgcctcacagcattgctggactcaggatcaacccacagtttcatcaatcacaaagtgggccaggagttgcaactgccattgcagcaatgctctag

SEQ ID NO: 89301 - DNA, 734 bp, Zea Mays
ctttcgcagacgccgctcttcgctcgctcaccgccgcttccttccacgggccatttcgtctccgtcgcccatgctcacctccttcaactctgtgaacccgcgatccgacgtgtagtgccgccgtactgcgcggcgacggcccaccggcgaggagccgccgacctatgcccctcggccagtccggcattggctaacccccaaatgcctcccgccgctaactagccgcagcctgtacatacacagacagacagacatacacaccgtaccggaggttgaagcggagaatcgatcccgacgcttcgccgccgctgtctcgtcgccggagaggagttttagcctcaaaggcgtgattttttgccttgttattttctagcttttttctttcgtgatttttggaccgtgttctcgcgatcgcgccggagagatgggagttgtggacttctcggtgctgggcgctctgcagaaggtcagatccttcgtcgccggcgccacgccggctgaagccgcagacggccggctgcccgccacgccgaggtcgcgcagcggggggccctccccagagaactcgcccccgcccgcggcgacgagatccggaggcaggcgcgccatcgccctgcgccggcagatatcctcgccggagctgctccgctgccgcgctgtcaggcgagcagatgatgaggatgatgatgagcccggggttcagtttttcacccatgggaatgacttcttacatg

SEQ ID NO: 89302 - DNA, 4046 bp, Zea Mays
gaattcccatcagctaaacagacaaataggagatcaagcaagacactgatgttctttgaaggctgcccttggcgtttgggttgcacggttctactgagagggtcatgtcgggaggagctcaagaggattaagcgtgctgtacaacttgcagtctttgctgcttatcacctttctcttgaaacatcattctttgcagatgaaggtgcaacacttcctaaattgccctcgagacatgtggtagttgatccagatacaaggaattgtacaaatagcaattcagctgcattgaccaatgttggtatgcctcatggacgtaaatcagaacatgacaaactctcacagactgctatggtcaacattatgtttgaaaatacccctgtgtcacctagttcattgccatcgaatggagaaggccacatgtttgtgggtgcatgtcagcataaagaaactgaatattctgttgatcataagaactcttgtgaacattgtgtatcccgtgcaactggttcatgcaacgggtatgaaacatctttatgttcatcagataatgattcaatgacacagaatcaaaatttgcagaactctgcaaagcttacatcaaatgctcaccaatatgagtttccagcaaaggaatgtcaacaagtagaccactgggatagacaaccacatgatgatcaatcagtagatcagcgggacctgaataaattttctggtgaatactttcctggttctgacaatcatcagagcatattagtttcgttgtccagtacgtgtatcccaaaaggcttggtatgcgagcgctcccatcttttccgcatcaagttttatggtagctttgataagccacttggtagatacctccgggacgacttatttgatgaggcatatcgctgtcagtcatgcaaagagccatcagaatcacatattaggcgttatactcaccagcatggtagcttaacaattagtgttcggaggcttcaatctcgaaagttgcctggtgagcgtgacggaaggatatggatgtggcacaggtgcctcaagtgcaaacctaaggatggtgttccacctgccacacggaggataatcatgtcagatgctgcctggggtctgtcgcttgggaaattcctagagctaagtttctcaaaccatgcttctgccaaccgagttgcaagctgtggacattcactccagagggactgccttcgtttttatgggtatggaaacatggtggcattcttcagatattctcctgttgacattctctcagttaaccttcctccaccagtactggacttcaattgttgtagtacacaagagtggctaaaaagggtggcagttgagatatttggcaaaatggaatccttgcatgtggaggtgtctgaatttcttcactgtactgaaaagaacattgtaactgaggatgaacctgtgagggaatgtgttcaaaggcagattatcgagatgaaggattggcttaaaatgcaaagaaatgaatatgagatgttgcttttaccagtcatgagggaaagcaatcaccccatgcagacatcaattgatattctggagctcaaccgcttgcggcgtggtcttcttcttgatgcttacatttgggatcggaggctatgccatatagactcggttcttaatacacatggccatatttcaaaaaccaatccagataatcttgatattctcctatgcaccagactgaaggagtggaaagctgatttgctttgtggggatactgagattgaaaaatctttagggagtccaaagaaatctttgttatccagagagggccatttgaatgataatgagtacagtgttgctgatacaaatttagagatttgtttggagggtcatcctgtggatgatgcagatgatcttgacaaagtctacaacaaattcagtggagtaaagaagcggcctactgctgaacctactgatggcttggaacctgttgagaggttaccctcacttgcatccattttctctgatactattgatttggcatggactgggtcttgtgatttgcagcatgatcttccacaagctttcaccaaaattgatgaaaatgtatcctttaatttggacagtccgaagtacagcaatttagtaacccctgttagaattcactcgtttagttctacgctggggttgcggcagagagaacgaactggattagttccagcttctttgcatctatcatcattcaaatctgctgagtacttcggagctatgagaagcatcctgaaggacccaatgccaaatatgcgaaggtcctgttctcaaaggtctcctgggacgatagagaaattaaatgttgttcttgcacgtaaacccacatatatctcatctacttcaaatattatcaatgatggggcacggctactgttaccccagactggatatgaacatgatgtcgttgttgcagtatacgaggatgagcccaccagtattatatcatatgccatgacatcagaagaatatgtagaacaagtaacacacagactgaattccagtttgagtttttctcatcaaccaaatactaatgggattagcagccatggacttgaggcgtcctctccatctcaaggagaccatttgcattccaagggaactcattttaagttatccttcgatgatgactcaccgatttctccagataaaacaaagttctctgtgatttgctattttgcaaagcattttgctgcgctgagaaagaaatgctgtcccaaagatattgattacatacgttctctaagtcgctgcaagagatggaacgcgcagggtggaaaaagcaatgtttactttgcaaagacactggatgaaaggttcataatcaaacaagtcacgagaacagagctggagtcttttgtagagtttgctcctcagtacttcaagtatttaatggaatccttggcttctggtagcccaacctgcctggccaaaatagtagggttatatcaggttggcgtcaagagcttgaaaactgggaaggaagtgaggatggatctgatggtgatggaaaatgttttctttgaaaggaagatatctcgggtgtatgacctaaagggttcattgcgctcacgctacacggctggggacagcaaagtcctcttggatgcaaacctcatagaggcattgcatacgaagcctatatttttggggagcaaggcaaaacgaagattggaaagagctgtctggaatgatacttcattccttgcgttggcggatgtgatggactactctctccttgttggcatcgacgaggagaagaaagagctcgtcatcggcatcatcgactacttgcgccaatacacctgggacaagcagctggagacgtgggtgaaggcctcgggcattcttggtggccccaagaacgaatcccccaccgtcatatctccaatgcagtacaagaagaggttcaggaaagccatgtccaagtacttcctcaccgtcccggaccagtggtcctcttgacggcctggctagctaacaagaattgtccgccttaaccagaagcgtttgccgtgccatgccatgccatgccatagtacatgtccgtcattctttctgtgcctagaccctagagagagagagagagagagagagaggtagtcaaattcattttgtgtccgcctgtaccatctgtagcagccatagataggggatcatcctccgactggggatgctggatgccaagcatatggtcactgcagtgtccagccacagatagagaggcttggtccatgactcccatctccatgtacattacggccagcatataatatgtctgaggagaaaaaaaaaggaaatctgtcgacgaaatgcagagaattcttttgatgcctttgtggcatgtatgcagactgtgaaggctattgcaatgtgtcacccccccgtaatttcgttgggagtagttgcggttcacctgccgtgagagtgaaagctattgcatgtatcactgagctcttgacggttcttgtcaaatactcctagttaagtttcacgcaacaatcagacatcatcttcttcgagtaata

SEQ ID NO: 89303 - DNA, 1193 bp, Zea Mays
acatacactgtcttgctagacacacccgaaaaacaaagggaaaaaatagtaaagaaacggagcgaggctcctcctcgtttcctatctatcctgatccaaatccgccctactcgcttcatatatcctcctgcgaggaaaacaattcattccgcgccgcatctgggaaggtctcgtcttgctcgcctccgtccgtcgccgcaccctgcgtcgtcgccatggccaccgacgaagccaccaagccgtccccgatcccaccctatcccgagatgatcctggcggcgatcgagggtctagacgacaagagcgggtcgaacaagtccgccatctccaagtacatcgagggcaagtacggctcgctgccccccgcgcacgcgtcgctgctgaccgcgcacctggcgcgcatgaaggagtccggagagctcgtcttcctcaagaacaactacttccgcgcgggcgcccccgacgcgccgccgaagcgcgggcgcgggcgccctcccaaggcgcgggacccgaacgcgccggcgccggcgcccaagtcgccgtcgtccacggggcgcggccgcgggcgcccgcccaaggccaagagcccgctggaagccgccgtgaagcaggccaccgcggggatgcccaagccccgcggccgcccgcccaagaaggccaagaccgacggcgccgcgtccccgtccccgtcccctgcccctgcccctgctggcgacgggtccacccccggcaagcgcggccgcggcaggccccccaaggtacgccccgccgtgcccagcgagacggccgcggcttgaccccgcttcttggggataatagttcgtcccgccgcgagatgggatggttagggcgtagcaattcgtcccgctgcagctgcggctgcagctgccgtgttaatgttggtaggcttggtctccatgcttcatctaattgttgtcgtcgtcggcgtcgtcgttgctcaattaattaatggagtaattaggaggattcgatgtgctgtcttctgtgctgtgttgtgttcagttcagtttcaccgtgtgtctctggtgttatgtgctggatctgttgtaagctaagctagggagcttgagtgctgtgttggtcgattaattattataagctgctaatgtggatgtgtacaattaattagaggatggtgatgatgttcgtaaaatgttgatttgagggttttg

SEQ ID NO: 89304 - DNA, 905 bp, Zea Mays
acatacactgtcttgctagacacacccgaaaaacaaagggaaaaaatagtaaagaaacggagcgaggctcctcctcgtttcctatctatcctgatccaaatccgccctactcgcttcatatatcctcctgcgaggaaaacaattcattccgcgccgcatctgggaaggtctcgtcttgctcgcctccgtccgtcgccgcaccctgcgtcgtcgccatggccaccgacgaagccaccaagccgtccccgatcccaccctatcccgagagcccgctggaagccgccgtgaagcaggccaccgcggggatgcccaagccccgcggccgcccgcccaagaaggccaagaccgacggcgccgcgtccccgtccccgtcccctgcccctgcccctgctggcgacgggtccacccccggcaagcgcggccgcggcaggccccccaaggtacgccccgccgtgcccagcgagacggccgcggcttgaccccgcttcttggggataatagttcgtcccgccgcgagatgggatggttagggcgtagcaattcgtcccgctgcagctgcggctgcagctgccgtgttaatgttggtaggcttggtctccatgcttcatctaattgttgtcgtcgtcggcgtcgtcgttgctcaattaattaatggagtaattaggaggattcgatgtgctgtcttctgtgctgtgttgtgttcagttcagtttcaccgtgtgtctctggtgttatgtgctggatctgttgtaagctaagctagggagcttgagtgctgtgttggtcgattaattattataagctgctaatgtggatgtgtacaattaattagaggatggtgatgatgttcgtaaaatgttgatttgagggttttgcactcggctctactatttatatttctgatc

SEQ ID NO: 89305 - DNA, 246 bp, Zea Mays
atacactgtcttgctagacacacccgaaaaacaaagggaaaaaatagtaaagaaacggagcgaggctcctcctcgtttcctatctatcctgatccaaatccgccctactcgcttcatatatcctcctgcgaggaaaacaattcattccgcgccgcatctgggaaggtctcgtcttgctcgcctccgtccgtcgccgcaccctgcgtcgtcgttgctcaattaattaatggagtaattaggaggatt

SEQ ID NO: 89306 - DNA, 155 bp, Zea Mays
gaagctgtcgagtgtgggctgagccggaggttggacgctgacatctggtatcagagcccggttggcccatgcctgccttggggggcttcccaaggggggtgggatgtcaggggccggtagtcagtgcctcggctttagtcccacatcggctagcc

SEQ ID NO: 89307 - DNA, 9154 bp, Zea Mays
atgcggaaggctacaactagaactatgctacatctactcctagggcaggaaaagtaagtaaggtaattggttcgattggaatgtgttcgggggttctcaatcggccgtacccctttatatttataggggaggaggtctggaccttttcctaagagatagccaacaaactcccacgtgattagatggataaccacgcacgagataaggataaacatccgagttaatctaatctcgggacacgtggaccgtccgggcccaagggccagaccgtccgctcattttggtgtccaacaaattggtatcagaggtctacgttcctcggccctctcatccatggcgtcttcatcatcgattgatgcccaacttacccagacgctggagcaccagacttgtgccatcctcgccgatctcgacaagcacttcaccgtgatcgactccaagtggggggacccgagtcaacgctctagaattccaggcggtgcaattcgctcagcaccgcgacgagttctcctctgccctccgcgcaaacgtcgaggcacatctctcaacggtcgacgagttcgtcgtcgactctgcggtcgctctcgcgcacatcaacccgctcgtccacgtcgacttcagcgttgtccccgtcgcagactccaccgaccctcatcatcaagaggatccagcgattatgtttgccccacacctgcgcggactccatgtcacgccagcgggtgtcataacgcagaatacagagaacgcgggagaggagccagaagctggagtttgaagcgaaggtgtcgaagggtgaacagggactggtgtgcgccattttgggctgtctttgggtgagtgcgtgtgtggcattatgggccgacccatgtaaggagtgatatactgttgtctgatgcttggaaaagggttgagaaaataatagagaagaaacacgctacctgagacatccgtgtgtctgttcccttagcggcgattcctggtgctcacgtcgcggcgatcgtcgtcgtcggccaagggctgtgacaactggtatcagattcaggcatcctcggcgtggatccccttcctcgtgttcccacaccgagtgccgctacggcgcccacaccgaagccgtcggcgcagcccaagattctccgggaggtgatgacgaccaaggagcgagatgatgccgatcgttgggatcgggtgatggcgcaactcgatcggctcacggagaaggtgctgagtatggatgacgttcaacaacagttgctggcgcaagcggggttggcggacgatgtggctcggcaggcgatggaagaacgggttcgcttcgcgcagcagttggatcaagcggagaaggcgctcgcggaactccgtctcgagcagatggcgcgggaaatggagtcagcgcagactgtccgcagtgagcggcatcgcggcgggcctccaacatctctgcctcttgctcctccaggtccacagcgcaggtatgcgagggtgcctttgggtcgtccgagagagactggagggcagtgggttgaggattttgaaggagggcatcttccaataccacgtatgccatttcctaaatttgaaggggcggaacctcgtatctggattgatcggtgtgtggattacttcactttgtatcgagtgcctgagtcagtttgggtgatgtcagcatcgttgaacatggaggggaatgctaagaggtggtttcagatttttaaaattcagtatggtccatgttcatgggaggaattttgtgaagctgtgatgctgaagtttgggtcggaggagtattcacaagctatgcagtccttactggagattaggcagattggatctgtggaggagtacaaaaaggtgtttgatgaggcgcgatatgcaacttctgtccataatcatgatttagatgagactttgtatgtggcccatttcattaaggggttgaagcaagagctacaaggaccggttaagtctcatttgccagcgtcaatggaacgagcagcattgttagacaggatccaacaaggtattttggacaaacagcaacagaaaccattcaagatggtcaatcagggtcgattggggggtgctgtgtccaggtccgacactagagcgactgcttccttactcgagttgtctaaagagagattggtgaaggagtataggaggcagaatggtctgtgctatacttgtggcgacaagtttgaacctggccatcaagctcgctgtccaaaaaaatccagatgcagttacatgccctcactgccgaggatttggggatgacactatctgagcacacgttgacacaaattgagcaggaggaaaaaggggaagaggagaattttatgttgtcccttaatgctcttagtggtactacaaatgatgaatgtatggctctgagagccttgttgcaaaatcaagtgatgttggtgctggttgattcgggaagctccactagtttcattaacaagcagttggtcgatcgaatggggctgcaagtgcatctgtgtgcttcagctaaagtgagagtggcaaatggggaaattttgcatagtgacacgatggtacgatcattggaatggtggaccaatgggcatacatatcaatgtgatatgagggtgttggggctgggagcatatgatgctattttgggctatgattggttgcgtcgccatagtcctatgcattgtgattgggatgataaggttattagctttgtggacaatggagtggaagttcagttggtgggcaatactgctcagcaacaggttgtgaaggaagtttctactatataggtggcgaaatggctgcgagggaatgatatctgggtgtttgcattgttggaggaggtgattgaggagaacagcaatgaggtccatctagaattgcaggtattgttgggggaattcagtgacatttttgttacaccaactgaactgccaccatctcgaccgtttgaccatcatattcctttgctccctaggtccatcccggtcaatgatcgaccctacaaatattctcctcatcataagacggagattgagaagcaggtggctgcgttgttgaaatctggtttgatcacccccagtgtgagtccatttgcttcttcggtccttttagtgcaaaagaaggatggtacgtgacggttctgtgtggattaccgtaagctcaatgatatggccatcaagaatcggtttccgatgccggtggtcgaggagattttggatgagcttgtcggcactaaattcttttccagtctggacatgacttcggggtatcatcaggtgcgtatgggcgcctccgaggagtttaagactgcgtttaaaactcaccagggtcactaccagttttgagtcatgcccttcggacttactaacgctcctgctgcattccagtgtgcgatgaacttggtgctagctccttttctccgaaaatttgttatggtctttattgatgatatattgatttatagtcccacttggcactctcatttggagcacctgcggttggtctttgctactttaagggaccacaagttctatctcaaagagaggaaatgtgtctttggtaaaaaggagctgatttatttgggccatgttatatcgggtgagggtgtggctactaatcctcagaaaaccgaagctatgctcaagtggccgacaccaatgactgtcactgatttgcgaggttttcttgggttgaccgggtattacaggcgctttgtgcaagggtacgggataattgctcgaccactaacgaagttactacagaaaggggccttcaagtggacaccagaagctgaggttgcttttcagcgtctgaagcaggccatggtttccacgccagttttggcattacctgattttaacataccctttgctgttgaaactgacgcctgtgatgacggggtaggagcagtgttgatgcagcagggcagacctatcactttcttgagcaaggcgttgggagtttccaatcagaagctttcaatctatgagaaggagttcatcgccctgattatggctgtggatcgttggcgtcattatctccaacggagtgagtttgaaatccggacgaatcacaaggctctcagtttcttgggcagtcaggagcttcattcggagttgcaacgtaaagccatggcaaagcttatggggatgcagtttaaagtaatctacaagccgggcaaggagaagaaagtcgctgatgctctttctcgggtgggctgtgtgatggcgttgacagcagtcattgaagttcaacctcgctggattcaagaagttaccaattcttatgtgactgattctgatgcgcagtcactgttgactcggttgtgtgtccacagcccggatgagtatggctactctctttctcagggagtcatcaggaagggcaatttaatttgggttggccacaattcagctctccggacgaagttggtggcagcattgcatgacagtaccatgggtggtcactcgggggtgcacgccacttatcatcgattgaagaaattgtttgtttggaagggcatgaagaccgatgtggaagattttgtcaaacagtgtcaaatttgtcaaaaggccaaaggagagagagttcacccggctggtttattgcaaccactttcggttcctcaaggcgcctggcaggatattgcaatggatttcatcgaaaaactgcccaagtccagtggctatgatacaatcttggttgtggtggaccgcttctcgaagtacgcccattttattgctctgaaacatcctttcactgcagcacaagtggctcaggttgtgttggatcaggtggtccgcttgcatggtcttccgagatctattgtcagcgacagggataaaatctttacgagcatattttggagtcaattattcaagctgttgggcactaagctgaacctgagcacagcctatcacccccagactaacggccagagtgagcgggttaaccaatgtgtggagatgtacctacggtgtgcagtccatgctcaaccttctaaatggaagaattggttgcctctggcagaattttggtacaacaccacataccacacttcactggcttgttctcctttcaaagtgttgtacggttatgaccctccatttgcagcagcacctcatatcccatctgatgctattgttgatgtggcacagctgttagaggaaagggctcagttcacttcgatgttgcgggagcagcttgccgcagcccagaaccgcattaagctgaaggcagatcggctccggaccgaacgccagtttaacgtcggtgacatggttctgctcaaactccaatcgtatacctagcacactgtggtcagtcggccgtgtcctaaacttgcctttaagttcttcggcccttacaagatattggaacgtgtgggtgcagtggcttatcgtttggagctgccggctgctgctcaggtgcacccggtgtttcatgtgtcacaactgaaaccatatattccagactacactccagtctttgctactcttcctacttcctctgatctgagtggtcacaatgtccagcctttggagatactgaatcgcagattggtcaaaaaagggaatcgggctgtgccacaggtgctgatcaggtggagtcatgttccagcggacgccacaacctgggaagattactatgttctgcgccagcgctatccggatgctcttgcttggggccaagcaagcgttcaggggggcagatgtcacgccagcgggtgtcataacgcagaatacagagaacgcgggagaggagccagaagctggagtttgaagcgaaggtgtcgaagggtgaacagggactggtgtgcgccattttgggctgtctttgggtgagtgcgtgtggcattatgggccggcccatgtaaggagtgatataatgttgtctgatgcttgaaaaagggttgagaaaataatagagaagaaacacgctacctgagacatccgtgtgtctgttcccttgacggcgattcctggtgctcacgtcgcggtgatcgtcgttgtcggccaagggctgtgacactccaggtggtgccacctctccacggcgtggccttcgaagactgtgacatcagtgaacagctcgtcggagcatgtggttgcctcgacaacctcgccaccacgtcctgtgagctgtgcccggttcgcatctcttccctggcttcctctctcctgcaggagcccgaggaggtggacacggttcctgcatcgcccgccaagtgtttgattaattgcttcagctgcaactgtggctctatgttgcatgatgacattaagattggagctcaaaagtctatgagcgctataggcagagaagagaaggaagtttgatttgagttgaaaacacatggttccaagagggatgatgaccctgttatcttggttgtgaatgcttgtgccagtcgtgatcttcatgaccatgttgttggggtgtgctttgtagcccaggatatgaccgttcacaggttactcatggacaaatttactggggttgagggagattacaagacaatcatctacaaccagaacccactaattcctccaatatttggtgatgaccaatttgggaggttgaccgagtggaatgcagccatgaccaagcttactgggtggtatagagatgaaatgggcgataagatgctctttggcgaggtttttaacaatgctttatgccttttgaagggcaaagatgcttttgtacgtccttgcatcatcatcaacaacgctatagcagcgagcgggggaaagtcgatggtgaaatatgagtgcgggtacactgtggagaagatccttgactacagtaagctggggatcgagccctactccatggaggttacccagggcagcgaaatactcatcatggacagcaacatctacagcatggcgctgccgctgtcccgagatagcagaccaaagcttgttgccggttctctcgaaggatttcctggtcatgttgatgggaacctgcgagaggggaggatataccacccgaagggagttacagtcgatgacaaaggcagaggagggcaggttgacggaccaagtgacgaggcaaaatcgtctactgattttgaagtttgttattacattggcagtagttgctcccttctggtgattgacagaggaaaccaaacaattcgggagattcagctccactttgatgactgtgtgtaccaacatgaagctgattttcctctaggagtggcactccttgctgttgccgcatttcttggctacatgcttgcactgctccaatgccaagtttaaggggccccacccatttcattggagatttggctggagggtggtacaaatcgtactatgccctggccaaattttgttttgagttgtatgagttatgcaaacttatattttagctggtcactaaaactctccaaggcggcctctaagtccaagtcaagaatattgctcagttgtcaggcaattatacatgtggttggatccaaaatctatgtaatgctttacaggaggaccttatccaaatacatgaaaaatcgtcttcagttgctgggtttgccatccttcgatcatctgatattcagtgtttgtttgctgatttttcttcatgggacttggataagtatatatcagatacacttgtctggagttaacattacacaagtatctaaatctaggaaggcaacactggaatccttgatttgtttgatctgccactggaagttatcacggaagctgcttattctagtgcaaatcagtgattatggggaacctggctgccaaagtgaccacaatagcagatgtgtgaagtttgcttattttggatatgctaattgctaaacaaagagccaatgtttcagttcaagacatgcttcgctcatggcatcatgatcctaaatttgttcagattctgcattgacttgaggacaaatcgaattttaaggaggggggaatgtgactatgtgaggatgtgagaactactacgttgacataccaagcacaggaggcagtccagggtgctcggaagcgccatgctatcagtgcacctgagtgggcatgggtgtgttgttgtctgtcatgtgaggccttgggggtttgtgtatatgtattgtggacccggtatgtcttcctcctctccctcggccccacatctccggcgagtcgcgcgccatgtcgcagcctcccttatccgcttcctgcggcgtgcgtcgatgcccaggccaggagcgcctagagctcgcccctgctttgctccggttgctcgtcttccccagcgccgtcagcctcctccaacgccggccaccaatccaccatctccagccgtcggccacaacctccaagccccggcaccgtctctgtcgcacagcttctccttcccttctccacgctccattggctttgcagccgtgacctccacccacttgtgttctttgctagaccagcatagaagaagctctctctggagtggatgataggtgggcccgagtggctaggactaaatgccttttgcttcaaatctacagatttcttaatatattcaaaaatgcatatatcatgtttggtagctgcaaaaatcgtgaaacttgttttattgacttccttatgaaatgatctacccactgaatctatattattgcatgttttagtagaaaatttatggtgtagaaatttattttaaaaaagatttagaaaataacttcttcttcgatctcggcggaagagtcctccaaatcactctccacagcatagggctttcgaggacgcaccatcttccaaatgacagacaaggtgtgtgagacaactaatacaaggtgtggtgatgaaatcgaagagggaaacatgatgaactcgttcctgaatggttcaatcgacccaagggatgggttcaactgagcatgaacagttcaaccgtgttttctctcgatctcacccaatagagtgtaaatccatagagaaatccatccatacaacacacattgcttctatcttgagtggatttacaagaaatttcaagaaatcgaagggacttccaagaacaccatgaacgtaccttggagagaagctcaaatccaatccacgcaagagagtgaaggatgggagcagatccgatttctccgtagtttttccctcataaatcaatggagatgggcggatttggtggaggagag

SEQ ID NO: 89308 - DNA, 816 bp, Zea Mays
atgaccgttcacaggttactcatggacaaatttactggggttgagggagattacaagacaatcatctacaaccagaacccactaattcctccaatatttggtgatgaccaatttgggaggttgaccgagtggaatgcagccatgaccaagcttactgggtggtatagagatgaaatgggcgataagatgctctttggcgaggtttttaacaatgctttatgccttttgaagggcaaagatgcttttgtacgtccttgcatcatcatcaacaacgctatagcagcgagcgggggaaagtcgatggtgaaatatgagtgcgggtacactgtggagaagatccttgactacagtaagctggggatcgagccctactccatggaggttacccagggcagcgaaatactcatcatggacagcaacatctacagcatggcgctgccgctgtcccgagatagcagaccaaagcttgttgccggttctctcgaaggatttcctggtcatgttgatgggaacctgcgagaggggaggatataccacccgaagggagttacagtcgatgacaaaggcagaggagggcaggttgacggaccaagtgacgaggcaaaatcgtctactgattttgaagtttgttattacattggcagtagttgctcccttctggtgattgacagaggaaaccaaacaattcgggagattcagctccactttgatgactgtgtgtaccaacatgaagctgattttcctctaggagtggcactccttgctgttgccgcatttcttggctacatgcttgcactgctccaatgccaagtttaa

SEQ ID NO: 89309 - DNA, 155 bp, Zea Mays
ctattggatttagttcgtttaatggaattttcttagataattcagatttgaactgcaagtcactcgaaacttggaaaatcgtgcatgcaaaaatgatattcatgctatttagcacaagttacgaccgatttcaggaggggaccggaaacttcgag

SEQ ID NO: 89310 - DNA, 124 bp, Zea Mays
acataacaagttcacaaggattacaaatttataatataaaaagtttacaaagatcacaagttcacaatataacaagttcacagtataacaagttcataaatatcacaagttcacagactcaaag

SEQ ID NO: 89311 - DNA, 907 bp, Zea Mays
cagcacggtgcatacccaatcagttcccgttcccctcgtcgacacctgcagtgccaagttgcatcgactcctccccggtcctccaccgcccgccgccgatggatgtggatgtggacgaggccaccgccacccctgcctccgcctctgccaagcccgcttccaacggcgaggccccctccggcgcccgcgaggtggatgtcggcgaggagtacacgctcgccggcgttctgcgcagcttcgtcgacggcgtctggtacccggacgagccgctgctccggcggctccgggcggcgtcctgcgaggccgcgccgcggctgaagggggcgtctcggaactcagcgcgggatctgctcgagtggacaaggcagggcagcggcctccgcgccatcctcgtcatctcggtgggcgcgcctcattgatccgtaacataagcacgggttttcatgtcctgtttactaaatctgactcgatgttctttaggtgattgcgtattggtacacttgttttactttgtgctatcagtcaattgggttactgtgtcatatagcattgaaatgttggtttatattggtactgtttaggtctcaggggccaaaatgtttacaagatctgtagagggaaatgaagaataggatgaattgtaatccctccttcctgaaatataataggtatatgcagggatggcaatggagaattgttcatcgcagaatagctccacacaggggcgaagctaggattcaaaattagaggggaccaaattagattagggggctattagaaacattttttgcactatttacataaaattagctaaagacctaagatatcctgcacatcccgtccccgtggcctctatgtttgccctaaatcaatctttaacatctacaacctcaaataggtaaacaat

SEQ ID NO: 89312 - DNA, 732 bp, Zea Mays
atggcatccattttagcaattattgaaatttctcagtaaataaattttcctcattttacccttttctgatctggcaggtcgggacaatcatgcctatagcattgactggccttttaatcttcatgttctttctgctaattgccactgctaatgcgatcatcgtctcagccctgatgtcactggccgctgctggcggattcttggctatcttctttgcttgcttggttgcagtgtatattggagcagtaggagttgctatctttgccatttctgccattgtcatctcatcagttgttggagttatgattactactggttgggttgggttcttctggatgatctggttcaccgcaaggaagagcatggacctgacgaagcattccatcagcatgacgagctcggcagtccaatcctattccgcgtcccgccaagtgaagcagaagcatgtcgactgaggctagttggttgcgtcttgcgtcctgtatgaagaagccctcgggtcgatctgggtgaattacggtagacgacatgcttgttttggcagttctgtttttcacggacactaggtgcataaatactagctctgaacttcggcagcgtgtacgtttgtcacggcggccaatgctgttctgtatggtatagtgatcagatgattgtacattgtgcaggtatgcagtatgtacatgccgattcatgagttgataataaaactatcactatattttttttcct

SEQ ID NO: 89313 - DNA, 225 bp, Zea Mays
atggttattgaccatatgaactacgtcgccacagatgttgaaggtgatcacaccttgattgctggtgatgatcttattcattcagatgtgataatggggtctaaaaggattgaggttaatactgatgctaagaatcttcataactcttctaactttttacacattttcatgttcattggattaaaccaaattgaggttgaatacttgtgtgcattcttattctga

SEQ ID NO: 89314 - DNA, 1438 bp, Zea Mays
gtgcaagatttatccctggatccaacttgcctcacctatatatcttccaagcaagacttgtgcacatagctggaccttctcttcttgatctggccaacaagatcggtggcgcacaggtatcgggtcatcacttggtctctgaattctcaggattggagttgaagaagagcatcatgcttggtgggcagagcgagaccgtcaagtacagggtctttgctggaacatggaacgtgggcggcttggcgccgccggatgacctggacttggaggattggctggacacgaagaacgactcctacgacatctatgttcttgggttccaggagattgtgccgctgaacgcgaggaacgtgcttggccccaagcagaggcgggcggccatgaagtggcagctgctcatcggcgacgcattgaacagcacgaggcatggagctgcaggaatgcatggtcaaggacaggggggcgcgttcaggtgcctcatgagcaagcagatggtcggaatcttcgtgtcggtctggacgaggagcagcctctgccggcacgtccgccaccccggcgtgtgcagcgtcggcgccggcgtcctcggccggctcggcaacaagggcgcggtgtccgtccggttcttgctccacggcacgagcttctgcttcgtctgctgccacctggcctcaggcggcgagaagggcgacgcgctgcgccggaacgccgacgccgcgggcatcctctccaggaccagcttcctcggcttcggcggcgtggcggcagcacccggtgaggtgcccaagaagattcttggccatgaccgcgtggtgttgctcggcgacctcaactaccggatcgccatggacgatgacgaagcacggcagctggtgagggccaggaaatggggcatgctgctggagggcgacgagctgctgctggagctctccagtggccgtcagttccacggctggcacgagggccacgtcaccttcgccccgacctacaagtatagccgcaactccgaccacctccactggtgcgctgacggcgtcgccgccggccgcgagaagcagcaccgcgcgccggcatggtgcgaccgcatcctctggcgcgggaaggggatgaagcaggtccggtacgagcgctgcggttgctaccggctctccgatcaccgcccggtcagggctttgttccacgccgtgtgcgaactggcggatggctaagctgtaggctagcttgcgtgctttgaatgaaaagcgtttaattaacaaacgagactcttaattttacaaagtgttcaaaaatttcggccagaaatttcacacggaactggttactggttcctgcatcgatgcgctttcaagctggtttgcgcctgattcctatctgctggagaaaattggagcacattttctgttctcggctgaggatatatggaaccaaaggatcattgacc

SEQ ID NO: 89315 - DNA, 1803 bp, Zea Mays
gtgcaagatttatccctggatccaacttgcctcacctatatatcttccaagcaagacttgtgcacatagctggaccttctcttcttggtcatgcccttccctcccatcaattcttcaatgctgcgtaatccctactgaaagaggcaccaatcagccattctgcaacttgccttcccgtgcttgcctcactgacatgaactcatcgtctttcttcctctgatccataagatctggccaacaagatcggtggcgcacaggtatcgggtcatcacttggtctctgaattctcaggattggagttgaagaagagcatcatgcttggtgggcagagcgagaccgtcaagtacagggtctttgctggaacatggaacgtgggcggcttggcgccgccggatgacctggacttggaggattggctggacacgaagaacgactcctacgacatctatgttcttgggttccaggagattgtgccgctgaacgcgaggaacgtgcttggccccaagcagaggcgggcggccatgaagtggcagctgctcatcggcgacgcattgaacagcacgaggcatggagctgcaggaatgcatggtcaaggacaggggggcgcgttcaggtgcctcatgagcaagcagatggtcggaatcttcgtgtcggtctggacgaggagcagcctctgccggcacgtccgccaccccggcgtgtgcagcgtcggcgccggcgtcctcggccggctcggcaacaaggtaagaagcaagcagagtcgcacgcgcgcgcggcacaccagaggcaggagaagccacaggcatgcggatgacggcgtctctacgtgcgctacgtacgcagggcgcggtgtccgtccggttcttgctccacggcacgagcttctgcttcgtctgctgccacctggcctcaggcggcgagaagggcgacgcgctgcgccggaacgccgacgccgcgggcatcctctccaggaccagcttcctcggcttcggcggcgtggcggcagcacccggtgaggtgcccaagaagattcttggccatgaccgcgtggtgttgctcggcgacctcaactaccggatcgccatggacgatgacgaagcacggcagctggtgagggccaggaaatggggcatgctgctggagggcgacgagctgctgctggagctctccagtggccgtcagttccacggctggcacgagggccacgtcaccttcgccccgacctacaagtatagccgcaactccgaccacctccactggtgcgctgacggcgtcgccgccggccgcgagaagcagcaccgcgcgccggcatggtgcgaccgcatcctctggcgcgggaaggggatgaagcaggtccggtacgagcgctgcggttgctaccggctctccgatcaccgcccggtcagggctttgttccacgccgtgtgcgaactggcggatggctaagctgtaggctagcttgcgtgctttgaatgaaaagcgtttaattaacaaacgagactcttaattttacaaagtgttcaaaaatttcggccagaaatttcacacggaactggttactggttcctgcatcgatgcgctttcaagctggtttgcgcctgattcctatctgctggagaaaattggagcacattttctgttctcggctgaggatatatggaaccaaaggatcattgaccaattaattatctgacaggttattgtccacacctgattcatgtgccggaggcatacaactttgtgcgccgggtcaactcgatgaaaccagtttttcgtggtttcaacaagatgcatgtcttcact

SEQ ID NO: 89316 - DNA, 1722 bp, Zea Mays
gcaagatttatccctggatccaacttgcctcacctatatatcttccaagcaagacttgtgcacatagctggaccttctcttcttggtcatgcccttccctcccatcaattcttcaatgctgcgtaatccctactgaaagaggcaccaatcagccattctgcaacttgccttcccgtgcttgcctcactgacatgaactcatcgtctttcttcctctgatccataagatctggccaacaagatcggtggcgcacaggtatcgggtcatcacttggtctctgaattctcaggattggagttgaagaagagcatcatgcttggtgggcagagcgagaccgtcaagtacagggtctttgctggaacatggaacgtgggcggcttggcgccgccggatgacctggacttggaggattggctggacacgaagaacgactcctacgacatctatgttcttgggttccaggagattgtgccgctgaacgcgaggaacgtgcttggccccaagcagaggcgggcggccatgaagtggcagctgctcatcggcgacgcattgaacagcacgaggcatggagctgcaggaatgcatggtcaaggacaggggggcgcgttcaggtgcctcatgagcaagcagatggtcggaatcttcgtgtcggtctggacgaggagcagcctctgccggcacgtccgccaccccggcgtgtgcagcgtcggcgccggcgtcctcggccggctcggcaacaagggcgcggtgtccgtccggttcttgctccacggcacgagcttctgcttcgtctgctgccacctggcctcaggcggcgagaagggcgacgcgctgcgccggaacgccgacgccgcgggcatcctctccaggaccagcttcctcggcttcggcggcgtggcggcagcacccggtgaggtgcccaagaagattcttggccatgaccgcgtggtgttgctcggcgacctcaactaccggatcgccatggacgatgacgaagcacggcagctggtgagggccaggaaatggggcatgctgctggagggcgacgagctgctgctggagctctccagtggccgtcagttccacggctggcacgagggccacgtcaccttcgccccgacctacaagtatagccgcaactccgaccacctccactggtgcgctgacggcgtcgccgccggccgcgagaagcagcaccgcgcgccggcatggtgcgaccgcatcctctggcgcgggaaggggatgaagcaggtccggtacgagcgctgcggttgctaccggctctccgatcaccgcccggtcagggctttgttccacgccgtgtgcgaactggcggatggctaagctgtaggctagcttgcgtgctttgaatgaaaagcgtttaattaacaaacgagactcttaattttacaaagtgttcaaaaatttcggccagaaatttcacacggaactggttactggttcctgcatcgatgcgctttcaagctggtttgcgcctgattcctatctgctggagaaaattggagcacattttctgttctcggctgaggatatatggaaccaaaggatcattgaccaattaattatctgacaggttattgtccacacctgattcatgtgccggaggcatacaactttgtgcgccgggtcaactcgatgaaaccagtttttcgtggtttcaacaagatgcatgtcttcactatgatattgttattcgcatcc

SEQ ID NO: 89317 - DNA, 324 bp, Zea Mays
aggtgttggaaggtcttgtttatctgcatgaacaaggtgtcattcatagagatatcaagggcgcaaatatactgagtaccaaagagggtcttgtcaaacttgctgattttggagttgccactaaattgactgaagctgacatcaacactcattctgtggtcgacactccatactggatggcgcctgaggtcggctattgactaaccatttgttgaatatgatgtttctactgcaaggaatgtaccatgaatcacatgaatttggtggtcatatgttcaacactctcctagaggttagaccattgcatcatttgattttgtatgc

SEQ ID NO: 89318 - DNA, 639 bp, Zea Mays
acattcagtatggaggtttctctccttgtcccttcgttccacgttcacatgggcaacgaagaggaggagccgaatgtgtggtggactggaggaggcttcgctgctgccgtccacggcctggctcgccgcgaatcggagctcggacctccaatgggagagcatccacgatgcgaatcggagctcagcggcggccggacgcccctcggcggagatggcgccctctccgacgcgcgaggcgagaccgtcgggccgtcggcgcggctgctctgcgcgaggccaccgggcgaggatgcagctgctccgccgccgccgcggggtgcggctccttcttcgctggccatcctgattctgtctccccacttcctgctctggcgcggacgaacgggtgcacatgtggccctgtagatggggattctatttgcccccggacgctcgtccggacgcatcatgccacaaacgcaagcacagcccacactttttactgcacgagaggcagtgaatgcttactgtctcagcacatggcccgggcaggctttcgcatgtacttctacctgcacgactgccactctgccaggatgtagcgagcggctcctatcgatgtagattatttcccaaaagaggttgttagattatttccca

SEQ ID NO: 89319 - DNA, 1690 bp, Zea Mays
gcggtccccactcctggctccacactcccacccgagcagcagcagaggctgccggcagcacctcccccgcgctctcccgctgcgctatcgccgccgcatcaacctcccgccgcgtcgtcctctgatcgactcggatggccgaggtcacgccgcccgccgacgggcagccggcgtcgtggtcggagatcccgcgggacctggccggcatggtgctctgcctccttccggcctatgcggatcgcgcccgcttcgctgccgtgtgcccgcagtggcgcgccgccgcgcggctgctcgccccttccttgcccccggcgctgccactgctcgcgctcccgaacggcatcttctacagcctcccctacagcaagccctgccgcttccctggctccggttgcgtcgggtacaagggcgccgcctttggcagctggctcgtcttcccgcgcgacgaaggctgcttcttggtcgaccctttcgctggggccaccgtgacgctccctgctctgtcttccgtccggctccgtccaccaaatgcagctgataattacgtcaagtatcaggagcgtgctacacccaatggcagacattatgtcacgtggctggatatcagagactccaagcatgtgcccacaatacattaaacaagctgatcatgtgctctccaaacctcgtcgctgcatttgttggcacaggacacataagtcagattctgatgtgccagccaggcgcttcctcatggtctgtttgcgcatatgatccgtgtgctgcatttgaagacatggctttctatcagggcaagctctacgcccttgctgatgatgaaaacctcctcgtggtcgacatcagccaagaccaaagcactggcgacccacatgtctgtcgaattggacaggtcatcaagggtgatcccgaccatttgtttgatgcttggatgccagatgacactactggcagaaagaagctgtacctagtcgagtcatgcggtgcattgctgatggtacgcaggaaggtatgctgcagaatggtagacgacacagttgttgctggacggatttgtgagtttgaggtgctggaggctgacttggagcactcgcagtgggtggatgtgacaactcttggggatgaccagatgcttttccttggacgaccgtgctctagggctgtgtcggcatctcagtatgggatgtctaatgatcagatcttcttcttagatgatgtgatggagaatgctgaggagtatgcctttgatgaggagaacactagtgtcaatgtctacgacatgaggaatgacgaggtctctcgtcctctgcagatggtctggaagcacgagatgtttcttgcgacatggatgttccctaggagctaaatagaaggtgttactatgcgtcctggcactgattactagctgtccctgcctgttctaaggtgatcaattacccctatgtcatatgctaacttcatcagtgttttgtggctttagtgtgttggctacttctatattgggaaaatatggtggttactggtcatgtgcctgtgcaacctatgaagtagatcaaagactaaattgtctaaccgtactttgatctatatatgcttggtacctgtaagagcatttaagttgaacgcagagtgatcatgctgtgagcttagttgtaatgaatcttgtgctaccagttgagcttatttggcttgt

SEQ ID NO: 89320 - DNA, 2458 bp, Zea Mays
ccctccgttcccccatccgccgccgcccatgtctagccgccacacgccgcaccttcggctggccgtgccgccgcggctatccgcgcaccactctttccgcttcccctccacgccgctccctaccccgtcgaaagcccgcggcctcccctcctcctccgcctcgccgtcctccccctacgccgccgcgctcctccgtctactcgtgctgcacgcgctcttcctcctcgcgcccgccgtgcgcgctctcccctctctggcccacgcgctcgcgctttccccgcccctcgcgctgctctcggccgccgccctcctcctcctccacttcgccgccgcgtcccggaagacccaccagcctcaccacccgttcccggggttccccgctctcctcggcctggccctcctccttgcgctctctatgctcctccggcttgtggccctccgcatcctcccctccccgggcctcctcgtcctagctgactccgccggctccctgctcgcccgcgccctacgccgcccctcccgccgccgtgtcctctccatagccgtcgccgccttttcccttgtgggcatctccccttctgtgatcctcgctatccccttcacctctggcttcctttcctcggtcgaacaatcggccacggcgcggcatgccactcgcagtcggcgcgcccgcgcggcggtatttgcgctcgctgccttcctctgcatgccggcgcttgtgggtctcttctttttcggtggcagcaatgcgggcgatggtcctcctgatggagcagtcccgatcagcccgctctggtggctgctgcttaactctgccttctttggcatggctttggggcgacgacaggagcatggcagcagcggtggtaggccaagtgtggattttgcaatgacgttcttatgcactcttgttctggagctgctgtactacccaaagctgtctctaccgggcttcttgatctgtgggttcctcttgtggatcgccagcagggagctggcccctgcaggatatgtggaacttggaactgaagatgtctcagaatcagtttttgaggcagttatggggccagttaggcatatcttgagtgagcgaaagtcgaggaagattgctgtgtttctattgattaatacagcctatatgtttgtggaatttggcagtgggttcatgagtgatagtcttgggctgatctctgatgcttgccatatgttgtttgactgtgctgcactggcaattggtctctatgcatcctacatcgcaagattgcctgcaaatgggatgtacaactttggaaggggcaggtttgaggtcctgtcagggtatgtcaatgcagtgttcttggttcttgttggtgcactgattgtgttggagtcatttgagaggattcttgagcctagggaaatatcaactagtagccttttggcagtttcaataggtggacttgtcgtaaacctaatcggattggtgttctttcatgaagagcaccaccatgctcatggtggtacatgttctcactcctgttcacgttctcattcatatcatggccatgaacatcaacaacaccatggccatgaagatcacaaacatcatgatcatgacagtgctaatgatgtgaatgcatgttttgatcgtcatggagatgacaaccatcgccaggatcaccatggcaatagtaatagtgagggcattcataacaatatcatggataacacctgcaaggagaagcatatccatagtcatagccatggccatgagcatcatcaccatgaacattcggaaaattgccatcagagcagagatcatgctcatcaagattgcaacagtaatactattgagcaacagcttcttgacatttctcttagcaatatatcttctcatgacacaaaaggtcactctgcaaaagcacgattgagaccatcagattctggaaacagtaataagtcaggacaccgacatcacattgatcacaacatggaaggaatcttcttgcatgtcctagctgatacaatgggaagcgttggtgttgtaatatcaaccttactgatcaagtacaaaggatggcttatagccgatcccatatgctcagtattcatttcagtgatgattgtatcttctgttcttccgttgttaaggaattctgctgaaattctgttgcagagagccccgaggagccatgaaaaggatttggctgtagctttggatgatattatgaagattgaaggtgtccttggagtcaacaatttccatgtatggaacttaactaatactgacattgtaagcacttttcacctacaggtatcagcagaagctgacaagtcttccataagaaataaagcttcacaaatatttcatgaagctggggttcaagatcttactatcgagatcgagtgtgttaaaaggtagtaagaattgtatagtatgatatgatttgacatagagaagatttttgacactcaatac

SEQ ID NO: 89321 - DNA, 824 bp, Zea Mays
aacttcaacgagtcccattttggcaaggcttcggagtaccaaactggcgaattgcgacgttggcggaattgtaatggcaataattccttcctccttcgttccccatttctcctctttctaggtttctacccctcatcggtcctcgctccacggccatggtgaggatgaagcaggtaaagatctcggtaaagaaggacgtggattcgtacacaatccgcggcactaacaaggtcgtccatgtgggcgactgcgtgctgatgcgggcgtcggactcggacaagcagccgtatgtggcgcgggtggagaagatggaggccgacggacgcggcagcgtgcgggtgcaggtgcgctggtactaccgccctgaggaatccaagggcggtcgccggcagttccacggcgccaaggagcttttcctttccgatcatttcgacctacagagcgcccacaccatcgaggggaaatgtgttgtccactctttcaagaactacaccaagcttgataatgtcgggcctgaggacttcttctcccgatttgagtacaaggcggccaccggttcgttcacccctgaccgcgtggcagtgtattgcaaatgtgagatgccatacaacccggatgacctcatggtgcagtgcgaagcttgcaaggactggttccatccatcttgcatggctatgaccattgaacaggccaaaaaactagatcactttgtttgctcagactgtttgaaagaaaatggttcaaagagactttcaaatgtatatgccacttcatcaaattcttagcccaaggtaagttaattgtttgttctttatatactttta

SEQ ID NO: 89322 - DNA, 245 bp, Zea Mays
tcttatcaaatctaatcccaagtaactaactcaatcttatctaatctaatctttatccactattcctaaccttgagcctatccctatagcctccatgccctgggctgctgacccatgacgctccccatgaatattgatgtattcagacactaatcaacaatttcaccccatgatttgcaccaaaaccttcactatgtttatttctgagccttcatggactggaacttcatgctatttttagaaga

SEQ ID NO: 89323 - DNA, 1691 bp, Zea Mays
gcttgctataaaaacctccgctcgccatcccgcttccctccactccaccaccactcgtccactcctcctccacgtcaagcgaagccactcctgatcgccgatcgctcgccaactcacgcggaccgcccctcgagctgcaacgaccggcctcccttgctccggctcccaccgagcctcgatcgatcgccgcagcagtcgccaatggctgatgcagtggagagccgcggcgggcgggcgcgcctggtctcggacctgggccgcgtgcaggacctggtgcgccagctcgagctgcagctgcgcgcgcccggggacgcagcctccgtcgacctctgccgccgcctcgtccaccagatcgtcgcgctcaccgacagctccatcggcatgctccgctcgtccccggacctcgcctcgccgctgcccgccaccgggaccgggagcccgatcagcagcgacgccgcctccgaccaccccttccgcgccgccgccagcgccagcgccagccccaagaagcgcaaggccacggcgcgctggaccagccagcaggcgcgcgtcagcgccgcgggcggcagcggcgccgagggccccgtcgacgacggctacagctggcgcaagtacggccagaaggacatcctcggcgccaagcacccgcgggcctactaccgctgcacgcaccgcaactcgcagaactgcccggccaccaagcaggtgcagcgcaccgacgaccacccggcgctcttcgacgtcgtctaccacggcgagcacacctgcaggcccgccgccgccgccgccggcggcggctccaagagggcggcacagcagcacaacccgcacgcgcaggccgcgctgcagggcctcgccgcgcgcctcacggtggccaccgccacggacgccgccgcgctcccgcccatgacgcccgagagctgccccgtgcggggcgcctcatccccgtggtcgctcgcgtcgtctgtcgcctccgactccaacggctgcatgcaccaggacgtctcgccgtgcccggtacccgggtacagggaatggacctcggacggcgacctccaggaggtggtgtcatctgcgttcgccgccgtctcgtcggttgcgcccctgccggtgctcgacgacgaattcatgcctctcgagtgctttggattcgaccataccttcgacattgacaccgcaatgccaagcctctactatccatgaggagaagagcgtccaatacaagtcgacattattgacaccgcagtgccaagcctctgctatccattaggagaagagcatcaaatacacgtctgatcggatcggcagcagccctgtcgtcgtctccatgacaggagggaggagcagaggagcctcttcctaagaactgtgcagtagcagaagccaacagggcttttagaacatcttaatgaatagcttgtttcattaccttttgtttccttctttctttactttttttgtgtcagttctcaacttgcttgatcgggttttgttgatttcagtcagcaagataaatgttaaattttactacttacggtgcaatcagtttcaatctcataaatgataaatcatcttctcttgaaattgtttcactttcatgtttgcacaccacctaaccttagagagcaacaaatcgtaaaacgcattcaacgaccaagttaaaatcaaacttgcaacatcttaaccataac

SEQ ID NO: 89324 - DNA, 1645 bp, Zea Mays
accaccactcgtccactcctcctccacgtcaagcgaagccactcctgatcgccgatcgctcgccaactcacgcggaccgcccctcgagctgcaacgaccggcctcccttgctccggctcccaccgagcctcgatcgatcgccgcagcagtcgccaatggctgatgcagtggagagccgcggcgggcgggcgcgcctggtctcggacctgggccgcgtgcaggacctggtgcgccagctcgagctgcagctgcgcgcgcccggggacgcagcctccgtcgacctctgccgccgcctcgtccaccagatcgtcgcgctcaccgacagctccatcggcatgctccgctcgtccccggacctcgcctcgccgctgcccgccaccgggaccgggagcccgatcagcagcgacgccgcctccgaccaccccttccgcgccgccgccagcgccagcgccagccccaagaagcgcaaggccacggcgcgctggaccagccagcaggcgcgcgtcagcgccgcgggcggcagcggcgccgagggccccgtcgacgacggctacagctggcgcaagtacggccagaaggacatcctcggcgccaagcacccgcgggcctactaccgctgcacgcaccgcaactcgcagaactgcccggccaccaagcaggtgcagcgcaccgacgaccacccggcgctcttcgacgtcgtctaccacggcgagcacacctgcaggcccgccgccgccgccgccggcggcggctccaagagggcggcacagcagcacaacccgcacgcgcaggccgcgctgcagggcctcgccgcgcgcctcacggtggccaccgccacggacgccgccgcgctcccgcccatgacgcccgagagctgccccgtgcggggcgcctcatccccgtggtcgctcgcgtcgtctgtcgcctccgactccaacggctgcatgcaccaggacgtctcgccgtgcccggtacccgggtacagggaatggacctcggacggcgacctccaggaggtggtgtcatctgcgttcgccgccgtctcgtcggttgcgcccctgccggtgctcgacgacgaattcatgcctctcgagtgctttggattcgaccataccttcgacattgacaccgcaatgccaagcctctactatccatgaggagaagagcgtccaatacaagtcgacattattgacaccgcagtgccaagcctctgctatccattaggagaagagcatcaaatacacgtctgatcggatcggcagcagccctgtcgtcgtctccatgacaggagggaggagcagaggagcctcttcctaagaactgtgcagtagcagaagccaacagggcttttagaacatcttaatgaatagcttgtttcattaccttttgtttccttctttctttactttttttgtgtcagttctcaacttgcttgatcgggttttgttgatttcagtcagcaagataaatgttaaattttactacttacggtgcaatcagtttcaatctcataaatgataaatcatcttctcttgaaattgtttcactttcatgtttgcacaccacctaaccttagagagcaacaaatcgtaaaacgcattcaacgaccaagttaaaatcaaacttgcaacatcttaaccataac

SEQ ID NO: 89325 - DNA, 421 bp, Zea Mays
cacgagttttttccccttgttaggcatgctcatctttccacaatcattggaggacgtttgatgtttctgcacttgtggcctttagtagatgtctcttcgtagcattacacgtgatgtaagggatggctttgggagcttgtctcgaagagggtttaaggtgaagcttctaggccaccgcaaagggagatcctatggtgttgtctatgagatgcatgatccagccctagttattcagagcagttgttgggctaatttgcccatgaactgctttaagatgtgatcgagaggttggagccttggaggccagtgaagccacatggactaacaggaagagtgtaggctctttgtgcagttgtttgtcaaacctagggagatatgcaaagagattgttaggaatctagagttttgtggaaaaatcacg

SEQ ID NO: 89326 - DNA, 1831 bp, Zea Mays
caaatatttgttcctctctttgccttgcagacaaatagcacacagcaatcaaccgtcgtcttcttcctcgacgcctcataggctcatagggttctccaaattctaaatcgttgcaagcgaaaccaccaaaactgtactcacaaccctcgtctgcgctgcgccaccactcccccgtggcggcttgtagttgtagaagttcccggaaccagacaacccctaggcgctgagttttctgatagcggcttcggatatctcgtcgtgggcggccatggcgggcccgtgctgagtgcggggcgggagcaggtgaaggtctccgagctcgagatctcgatgcagattcgggagggcccggcgcggcggcaggcgccgtccgccgctggggcgctgcggtcgcccatgtccgccatgatgctcgctatgttcgctactatggcctccttctacgtcgccggtcgattgtggcaggatgctcagaaccgacttcatctcattaaggagctcgacagacgaacaggccaggggcaatcagcaatatctgtggatgataccttgaaggttgttgcatgcaggcagcaagggaagcggttggcatcacttgagatggagctggctgcagcaaagcataaaggttttgttggcaaatatactcctgagacaaatggaactcattctgggaaaaagccactgattgttattggaataatgagtagctttgggaggaaaaactaccgtgatgctgtcaggaaatcatggcttccaacaggttcaatgctgaagaaactagaagaagaaaaaggcattgtagtacgttttgttgttggaagaagtgcaaatcgaggtgatactttcgatagggagattgatgacgaaaataggagcaccaaggatttcttgatattggatgatcatatagaatctgatgaagagcttcctaagaagacaaaaagtttctttgctaatgcagcagaaacattcaatgctgcattttatgctaaggtcaatgatgatatatacataaatgtcgatactttgagtgcaatgctcgaaactcactgggacaggcctcgtgtctatataggttgcatgaaatcgggcgaggttttctctgacttaacccacaagtggtacgaatcagactggtggaaatttggtgatgggaaatcgtactttcgacacgcttctggtgaaatgtttgtcatatccagggccatagctcagttcatttctataaacaagtccgctctccggacatatgcccatgatgatgttagtgttggatcgtggatgattggccttgccgtgaatcatgtaaatgaagcaaaactgtgctgttcatcgtggccctcaggtgcgttatgttcagcgctataacgagcaacaatgcttaatgaggaagagttttgcaaacactgtgcctgttggatcgaatcggtattgggaaaattttgttttcttctgccatcttgtgtagtcctttggaggaggcttgtacgagccagttcatactgattactggatcggatatcttgtttttcttttccaaaggaaaggtcttgcatattttctttgcaaggccactacactagaatcatgagttctgacgaaaagccctctgcagattgtatcctgttccgcgtgccatttgtagatgccccaccctttaccattcttttttctgacagacactgccattgttggagtgacagaaatcaatagcaattcgggagattactttgctccagaatacatttatgcgtaatgcgtgtcttcagacctgttgccatggttgtgattttttgacacatacataatgatgccctcttgaagtcaa

SEQ ID NO: 89327 - DNA, 2625 bp, Zea Mays
aacccagcctagcgtcgcgtggcctccttccgttactctcctcccaccactctcagatctccccacccctccccgtctcgtgtcgccaccgcccccaaaccctatccccgcctcgttggatcgggtcagacctcggcttcacgccacgaggagcagcggtggcgcccgctgcgtcgatgcggagctctatcgcgacctaccgggagagcctgtctcggctcgccggcgaggtcgacgacgccgctgccgacgaggtccctgggccgccgctcgccccggcagctaggggcgtcgacatatccgccacaccaccgtcgtcgggaaggcgccgacggtactcccgccctggccccggctccgatgccaccgagcccgacgagatttctaaactgagggatgacattcaaaagcttcaagcttctgaggctgaaataaaggcactatctttcaattatgctgcaatgttgaaggaaaaagaggagcaactgggaaaacttcgtgaagaaaatgggtctcttaaaagaagcttggagagctgtaaggcagtttcagccaattctaatggcactttggaaagatcacctagagtgcaaaggaatgcagttcaggaaaattcattgaatctcaccaagcagaacggatatggtggtggttcttctcacagtacccagacaaatggtctgcatccaatggcaggttatcagaagggaagtatatcggaggaagagagatcatcctttactaccaagcaggctagtcttgaaaatgaaatcaaacaattgaaacagcagctcagcaataattctgagaaagaaactgaaattaggaggaggctagaagatgaaaccaagcggagtgaatttcttcagcagcaactaaatgagctcaagatggacaaagagaggatgacaactagcatggaagagctacaaaaggaactgagtgagaagaaatcagagtttagacgtgttcaggatgagcaaagcaaaagggacaaggagcacgtctcggacggatctcttcagagcctaagaaatatgttgatggctttacagaaggagaactctagcctaaagatagagaaagtcaagcttgatgcagatctcaagagtatgaagagtacctcacaaaaaactgttgacagtacattagatgctaacaagatttctgacttggaaaaggttaagaaagagatggactctttgaaaagagcattacaggatgcttctcgtgagagagacaaagcagtgcaggatctggctcggctgaagcagcatttgttagataaggatcttgaagaccaagaaaagatggatgaagatagtaaactcattgaagagttgcgggtagtatgcgagcagcaaagggctcatataatgcagttagagagggctttaaaggtcgagatggcaaagcaggaggagaacaaaaaggtcataagtgaagagcaccagaggtcaaatgaacaaatagaaaatttgaactacaagcttgcaagctgtatgagtgcacttgaatcaaaaaatgtggagctgctaaatcttcagactgcccttggacagtactatgctgagagtgaagccaaggtcagagtcattaaaggtggcaaatcaaaccattgagatttcaagaagggaaaaggaagatatggctaccaaactttcacaagcagagaggatgttggcagatgggaaacgatccatgcagaagcttgaggatgacaattcaagattgcgaagagcgctagaacaaagcatgacaactgtgaataggatgtcactagattcagataactccgttgacaggcgcattgtgataaaactgctagtcacctacttccaacgaaatcacagcaaagaggttctggatctcatggtgcgcatgcttggcttctccgaggaagacaagcaaaggattggctttgcacaaagtaatgctggtaggggtgtcgttcgtggtgttttgggtctcccgggacgcctagttggaggaatcgttggtggaggtccatctggcaaatctactcaatcgtcccaggatagccagtccttcgcggacctatgggtggacttcctgctcaaggagacggaagaaagggagaaacgggaagcctcagaagctgcaaggcaatcacagcaagagagccacaccaccaccggtccaagtacatcgtcgagtatccaacagccatcacagcacaacccctcaaacgttgcacctggcccatccacaatgccacacaccgcttgggtctcccagaatcggaatcctcaacagttccgctagcatcatcatgctcgtccgtgctggctccatccccaagaccacctctaagatgatactcgacgatgccaattttctttttatggagtagaaatcaagtgcacactgtacagtatcggatacctttttgttgtgctgggagtgatcccgcatgcggacgccaaggctatttgttccattcgttgacaatgcgatgatgatagtagtagattcaaaaattggcctccttcctggagcatgtaaagagatcgatatgtaaaatggattcctaccctcgacaacagatggaggtaaaatgggagttggttatacgtatgttttgaagtaagaattttgatctgc

SEQ ID NO: 89328 - DNA, 2657 bp, Zea Mays
ccttccgttactctcctcccaccactctcagatctccccacccctccccgtctcgtgtcgccaccgcccccaaaccctatccccgcctcgttggatcgggtcagacctcggcttcacgccacgaggagcagcggtggcgcccgctgcgtcgatgcggagctctatcgcgacctaccgggagagcctgtctcggctcgccggcgaggtcgacgacgccgctgccgacgaggtccctgggccgccgctcgccccggcagctaggggcgtcgacatatccgccacaccaccgtcgtcgggaaggcgccgacggtactcccgccctggccccggctccgatgccaccgagcccgacgagatttctaaactgagggatgacattcaaaagcttcaagcttctgaggctgaaataaaggcactatctttcaattatgctgcaatgttgaaggaaaaagaggagcaactgggaaaacttcgtgaagaaaatgggtctcttaaaagaagcttggagagctgtaaggcagtttcagccaattctaatggcactttggaaagatcacctagagtgcaaaggaatgcagttcaggaaaattcattgaatctcaccaagcagaacggatatggtggtggttcttctcacagtacccagacaaatggtctgcatccaatggcaggttatcagaagggaagtatatcggaggaagagagatcatcctttactaccaagcaggctagtcttgaaaatgaaatcaaacaattgaaacagcagctcagcaataattctgagaaagaaactgaaattaggaggaggctagaagatgaaaccaagcggagtgaatttcttcagcagcaactaaatgagctcaagatggacaaagagaggatgacaactagcatggaagagctacaaaaggaactgagtgagaagaaatcagagtttagacgtgttcaggatgagcaaagcaaaagggacaaggagcacgtctcggacggatctcttcagagcctaagaaatatgttgatggctttacagaaggagaactctagcctaaagatagagaaagtcaagcttgatgcagatctcaagagtatgaagagtacctcacaaaaaactgttgacagtacattagatgctaacaagatttctgacttggaaaaggttaagaaagagatggactctttgaaaagagcattacaggatgcttctcgtgagagagacaaagcagtgcaggatctggctcggctgaagcagcatttgttagataaggatcttgaagaccaagaaaagatggatgaagatagtaaactcattgaagagttgcgggtagtatgcgagcagcaaagggctcatataatgcagttagagagggctttaaaggtcgagatggcaaagcaggaggagaacaaaaaggtcataagtgaagagcaccagaggtcaaatgaacaaatagaaaatttgaactacaagcttgcaagctgtatgagtgcacttgaatcaaaaaatgtggagctgctaaatcttcagactgcccttggacagtactatgctgagagtgaagccaaggaccgacttggaggtgatttagctgttgctagggaagaactgtctaaattgtcagagtcattaaaggtggcaaatcaaaccattgagatttcaagaagggaaaaggaagatatggctaccaaactttcacaagcagagaggatgttggcagatgggaaacgatccatgcagaagcttgaggatgacaattcaagattgcgaagagcgctagaacaaagcatgacaactgtgaataggatgtcactagattcagataactccgttgacaggcgcattgtgataaaactgctagtcacctacttccaacgaaatcacagcaaagaggttctggatctcatggtgcgcatgcttggcttctccgaggaagacaagcaaaggattggctttgcacaaagtaatgctggtaggggtgtcgttcgtggtgttttgggtctcccgggacgcctagttggaggaatcgttggtggaggtccatctggcaaatctactcaatcgtcccaggatagccagtccttcgcggacctatgggtggacttcctgctcaaggagacggaagaaagggagaaacgggaagcctcagaagctgcaaggcaatcacagcaagagagccacaccaccaccggtccaagtacatcgtcgagtatccaacagccatcacagcacaacccctcaaacgttgcacctggcccatccacaatgccacacaccgcttgggtctcccagaatcggaatcctcaacagttccgctagcatcatcatgctcgtccgtgctggctccatccccaagaccacctctaagatgatactcgacgatgccaattttctttttatggagtagaaatcaagtgcacactgtacagtatcggatacctttttgttgtgctgggagtgatcccgcatgcggacgccaaggctatttgttccattcgttgacaatgcgatgatgatagtagtagattcaaaaattggcctccttcctggagcatgtaaagagatcgatatgtaaaatggattcctaccctcgacaacagatggaggtaaaatgggagttggttatacgtatgttttgaagtaagaattttgatctgcatccaaa

SEQ ID NO: 89329 - DNA, 2368 bp, Zea Mays
atcacaagcaatcgatcaagctagcatggcggtgaaggtgtgggtgttcgccgtggcactgatgatgtgcgctggtgtagggcttggagctgacgacgacggcggcagccgccttattagccgctgtcgtctgagctcgcccaactaccgcggcgccctggcaaaggccatcctcttcttcgaggggcagcggtcggggcggctgccggcaaaccagagagtcaggtggcgcggggactcggcgctcaccgacggccaacccgaaaacgtgaacttgacgggtggctactacgacgccggagacaacgtcaagttcggtttcccgatggcgttcagcgtcaccctcctgagctggagcgccgtcgagtaccgcgacgaggtggcggcggcgggtcagctccgccacctccggtccgccatccagtggggcgccgacttccttctccgtgcccacaccacgccgaccaccctctacactcaggttggcgacggcaacgccgaccaccaatgctgggagcggccagaggacatggacacgccgcggacgctgtacaagatcacccggagctcgcccgggtccgaggccgccggcgaggcggcggcagcgctcgccgccgcgtacctggtgttcagggacgaccgggacaagaccttagccacgcagctcctggccgcgtccagatccctcttcgacttcgcaaacgactacaggggatcctaccagttgtcctgcccattctactgctcctactcaggctaccaggacgagctccagtgggcgtcggcatggctctaccgggcaaccaaggacagcaagtacctcgacttcctgcagaacaaccagggcggcagcgccaccgagttcagctgggacaacaagtatcccggagctcagctgcttgcaacacaggagtacttggctggaaggacagagctggaaggctacaagaggggcctggactcgttcgtctgcgccgtgatgcccaacagcggcaacacgcagatccgcaccacccctggagggcttctcttcacccgcgactccgttaacctgcagtacacaaccaccgccaccctgctgctgtcgatctacgcgaaggccctcctcgcttctgcagcaggagcagtccagtgcagcgccgcgaccttctctccggaccagatcagttcatttgcgacgtcacaggtggactacatcctgggagacaaccccaggagcgcgtcctacatggtcggcttcagctccaagttcccgaggcgcatccaccaccgcggctcctccattccgtccatcaaggtcctcccccggaaggtcacctgcagcgagggcttctcgtcgtggttcccgacggccaaccccaaccccaacgtccacgtcggcgccatcgtcggcgggcccgacgggaacgaccagttcggcgacaacagggaggactccacgcactccgagccggcaacgtacatcaacgcggcatttgtgggcgcctgcgctgctgcactggggcgcagccagcaggtgcctgtggacgaaacagcctcagcccacagtgatgttatgtaactagctacaacggaggagtatgcaagggcgggcaaccaaaccatgatatcgctttgtgtaacatcccaaggcccctacccccactaccactcttgatcatcctgataagaagagataaataaataattaaatacaatggcaaatctgcagtagtaaacattatctgccgagtcaaacatgcatcattcagcaaaacccaatcacatgactagagaaagcagtcaatctcgtttcaactttgatcgaaatgaagtgtcttatctacaatggtttgctgcagtactccagcaacagctggacaaatcaaaactaaactgggggggttctatttttctttatactgccatttctatatatagtagtgtgccgctaagctagctggccaatccaggaaccagccagagatgcacaattaaccgcggtgccaaagaagagttcccagaaccaaagatccaccgcgagaaccgaagagaagatgagcagggcgagcgtctcgtatctattcaaaggccagcctgaagcctcagccagcgtcttcaacaaggggagggattcgctgtctatctcccggcttcttattgaccacgcggtgacccactgcacatcggccgggaccatgtccagctcttctcgaaggcgtcttcccaggtctggcatgtgtccgccgccgtagaggaccgctattctcttgtacccaccgtttattgcttcctggatcttctcggcagcaactctgttcctctccccaatgataactgatttctcctcaacgggtgtaggcacagctgtgaatctttaataaaaaaa

SEQ ID NO: 89330 - DNA, 1585 bp, Zea Mays
atggaggctgcgggcgccgcggtggcgtgcttcggcgcgatgaacgcggtggcgcgtcccacgggcgggttggtgtcggacacggtggcgagactgttctacatgcgcgggaggctgtggcagcagcctttttgtgttgtacatatgatggtcgttggagggagaaaactgaaagggaccatgctcgtgaaaagagctggagaggaatccaggcgtcctctgtccatggcctcccatcctgagcacccggcggaaccgcgagcaccgcccgccccaacgaccataggcgatctctccgacgacctcctgcgcgagatcctcctccgcctcccttcccttccttcactcgtctgcgcctccctcagctgccgcgccttcctggccgccgtccgctcctcccgcaccttccgccgccgcttccgcgcgctgcacccgcctcctctcctcggcttcttcttcgaccccgacggcaacgaaaatcccaccttcatgcccattcgccgcggctccgaccggggccacgcggccgccgtccgcggcctggacgccttcctgacccgcgtcccgcacgaggacgacgtcttccccgggtggcagataatggagtgccgcggcggttgccttctcctcctcaactggagaaccaagcagctcgccgcctacaaccccctcacgggggccttggatctcgtccccaaactgcctgacgacatctgcaaagggcaccgcggcaagttcatctccggtgattttttcctggtagtccccgacgacgaggctcccgacaggcgttcgttccgcgtggtctcctcctgccacgacaagtaccgggtgcgcgtcgccgtcttctcgtctgccaccaggaagtggcagattctcccctggtcggagcctgtgccgacacagccggcgagcggtaagtactggcttctctcggggaggcaggtgagtgggttcctgtgctggtcacaccataagaatgcctacaaggtgttgctggacactgcgaccctgcaattctccgtcatcgatctgccgtatggcttgagtgggcaaggccacctctacaggactggggataccaaggatgggaagctctgcatcgttgccgcaatcgatttctcgctgttcgtttggttccggacaccagacgctggtggcattgacaggtgggtgctccgacatgtattgcagctggaggatgaggttcttgaggccaccgagggctcacggaatgaacttgaacagcttaaagtgtttgcaattctggacggcatcgtgtacatgacgacatttgagacgtttagagatgctaccttgccttgttggtacctatccttctgcctggaaacaaggaagctggaaaaactcttctatgtaaaagctaatggccatgctcatccctacttcatgccatggcctactgctttagtaggtaacaatttgagcccctgactaggaggaggtgcttgttcaagtgaaactggttacagtaacatgtaagtttcttgttctgtctagactcaacagtttgttcacttatcctcttatatactagtaacgggtacgcgctttgcgtggtaaa

SEQ ID NO: 89331 - DNA, 3172 bp, Zea Mays
cctcccgtaagctccacgaccggagagagagagagcgcgcgctatccaagccaagaaactccccccgtagtccgcggcccgggctcacgaccgatccggtccgggcccgatggagctcctgagcggcggcgcgctggcgtggcagcagtaccgcgcgctgctccgcaagaacgccacgctcacctggcgcaaccgccgctcggcggcgctgcagctcttctcctcgctcgtattcatcttcctcatcttctgcatcgaccgcgccgtccgctccaggttctccagtaccaccgcctaccgcaacgtgcccgacccggaggcgctcgtcgcgccgccgatcccgccctgcgaggacaagttcttcatcaagtccccatgctacgacttcctctggagcgacggcgggagcgcccgcatcaggggcctcgtcgacgccatccggaggaacaaccccggccgacccatagcacccgaaaaggttttaggttttaggactccagatgatgttgatgcttggttgtttcaaaacccaatgcgttgccctggggctttacattttcaagatataaatgccactcagataaagtatggtattcagacaaactctactccggtagcacggagaggaacatatgaagaccctaccttcaagttccagataccactccaagttgcagctgagagggaaatggcaaggcttctgattggagacccaaattttagctggactgttggatttaaagaatttgctcacccagccacggagaccttctctaccattgctcaagcagggccaactttttttcttgccattgctatgttcggatttgttttccaaatcagtgcattggtggcagagaaagaactaaagcttcgtcaggttcagacttcactcaccacagtctgcctgcatatctttatgctcaaattcgatttcttccttcataataattttggaatcctattcctcctgttcttcctattccaactgaacatgcttagttttgctttcatgatatccacgttcgtagcgaaggcagcatcagctactactgttggatttgcaatattcattattgggttcttgactcagcttgttaccacctttgggttcccttattcgtctgactacaaaaagttgtaccggacattgtggtctttatttcctcctgatttatttgccaaagccctcaacattctaggcaaggcaacagccactcctgaggataaaggttttagctggaatcagcgtggggagtgcccatcttttgagactgactgtgtcattactattgatgatatatataagtggctcatatccacatttttcttgtggtttgtccttgcgatatactttgacaacatacttccaaatgtaaacggcgttcggaagtcagttttctactttcttatgccttcatactggacgggtaaaggaggcaagatggaagagggaggcctctttagcttttttggttcaagccgtcctgcagatgatgctacccctactgacgaggatgtccttgcggagcaaaacctagtaaaggaacaagctgcaaacaatgcggtagatcctaatgttgcagttcaaatacatggtctacgtaagacatatccaggaactttcagcattggatgttgttgcaaatgctctaaatctaagccgtttcattcggttaaaggcttatgggtgaaccttgagaaggaccagctattttgtcttcttggtcccaatggagctggaaaaacaactacaatcagttgtctgactggaatcacaccaattacaggaggtgatgcattcatttatggtcactctgttcgaagcactgtgggaatgtcaaacatccgtaggatgatcggagtctgcccacagtttgatatcctgtgggatgcattaacagctaaagagcacatggaattgtttgccagcatcaagggattgcatccagcagcaatcacatcagtagcagaagagtcattagccaaagtaaagctcagccaagtaactaatgctcgagcaggcagctacagcggaggaatgaagcgccggctaagtgttgcgatcgcactgattggtgacccaaaattggtttttctcgatgaacctactactggcatggatccaataacaaggaggcatgtctgggacatcatagaggaggccaagaaaggaagagctattgtcttgaccacccattccatggaggaggctgatattcttggtgaccggatagctataatggcaaaggggaaactgcggtgcatcgggacatcaataaggctgaagtcgaaatttggaacaggatacattgctaatgttaatttctctggaaatggccacatgcagagccccaacatcaacagcaacactgaggctccggttaatccgaacatagaagctgtcaaatggttcttcaaggaacggcttgatgttaatccaaaagaggagagcaggacattcttgacatttgtcatccctcatcacaaagaaccacttctgacgagattctttggagagttgcaagacagggaaggggagtttggaatatcagacattcaactcggtctgacaacacttgaagaggtgttcctgaacattgcaaagcaggcagagctggagacctctactgctgaaggtaccctggtgactctcaacctgtcatcaggaacaacaattcagattcccaagggggctcgtttcgttggtattcctggaactgagacagaggagcatccaagaggcatcatggttgaggtgtactgggatcaggatgaaaatggatcgctctgcatttctgggcactctgacgagatgcccgtgccagttcatgctgagctgaggaggcctccgtcactttctcgtagggcctcaatggaccgtggacgtccagttgggtatatgattgacctgaaccaggtcccatgaaaaaaaggatgagtccaggtgcaacgtttagattggttttgatgcagattatctggtacatatagtatataggaatcttgtattcgtgtctttgtattagaagtcgtaaccttgtattgcagtagtaattggtaaagacatgctttgtaaaatatcctatagtgtaacacagtattttctgttgtatggcaaacaaaggctcgaaatatgacgcaatagaattacatggtaactacaccctgc

SEQ ID NO: 89332 - DNA, 3038 bp, Zea Mays
tccctaccgtcgccgtttccgcactttcctcgtcacacaagtccacctccaccgccgcacgccgccgctcctccgcatccgcgaccgcgacctcgaggtcgccctccctccgcgccagctgcaatggcggcctcgccggaccaattccgggggcatgcgcgcctcccgcacttcgcggccccgctccgctacgacctccgcctccgcccggacctcgccgcgtgcaccttcacgggcgccgcggccatcgccgttgtcgtgtccgcgcccacccgcttcctcgtcctcaacgctgccgagctggatgtcgatcgcgcctccatccgtttccaggatttggcgccgacagatgtggctcagttcgatgaggatgagatcatggtcatcagcttcgaccgggagctgcccttcggagagggcgtgctcaccatggacttcaccggcacgctcaacgatcagatgaggggattttacaggagcaaatatgtgtacaatggagagtcaagaaatatggcagttacacagtttgaagccgctgatgcacggaggtgctttccatgttgggatgatcctgcatttaaggccaagttcaagctaacactagaagttccatctgacctggtagcattgtccaacatgccagtggctaaggagactgtcagtggacttaccaagactatttattatgaggaatctccacttatgtcaacctatcttgtggctatagttgttggcatctttgattacatagagagttcaacatcagagggaactaaagttcgtgtttatactcaagttggcaagactaatcaaggaaagtttgcactagatgttgctgtaaagtcgctggatttatacaaagattattttgccactccttatccattacctaagttggacatgattgctatcccggatttttctgctggggccatggagaactatgggttagttacttaccgagatacagctttgctgtatgatgagctactatcatcagcatccaacaagcaacaggtagcaataactgttgcacatgagttggcgcaccaatggtttggcaatcttgtgactatggaatggtggactcacttgtggctaaatgagggttttgcttcctgggtaagctatttagcagtagaatctttatttcctgaatggaataactggacacaatttcttgatgagacgacctctggcctcagattggatgcacttgcagagtctcatcctatcgaggttgaggtaaaccatgctagtgaaattgatgcaatttttgattccataagctatgacaagggtgcatctgttattcgtatgctacaaagttaccttggtgcagagtgttttcagaaagctttggcttcatatataaagaaatatgcctactcgaatgctaagactgaagacctatgggttgttcttgaggaggaatctggggagcctgttaaggatttgatgactacatggactaagcaacaaggatatcctgttatttatgcaaaaatcaatggacatgatttggaacttgaacaggcacagtttctatctgatggatcgtctggtcctggaatgtggattgttcctgtaacagcatgctgtggctcatatgatgcacagaaaaagttcttattgaaagataaaatggataagataaatattaaagagttttctgactctcaaagtgctgatggggagaagaatcaaatcatttggatcaaattgaatattgatcaaactggattttatagagtgaagtatgatgatgaacttgcagctggacttgtaaatgcaatcaaagcaaagaagctctcattaatggataagattggtatcgtggaagattcatatgcgctctctgttgcttgcaagcaaacactgacgtcattgttgcgactgctgaatgcttataatgatgagtctgattacactgtactttcacatgtaacctctgtatgtttaagcatttctaaaataacagttgacgctactcctgacttgaacaaagatatcaaacagcttttgatcaaccttcttctcccagctgtcataaagttaggctgggaccccaaggatggtgagagtcatcttgatgtaatgcttagatcactgctcttgactgcgctggtcagacttggacataatgaaactataaatgaaggagttcggcgtttccacatcttctttgaagacggcaaaacttcccttcttccaccagatactagaaaggctgcatatcttgccgtgatgcgaactgttagcacctcaagcagatccggttttgatgctctccttaaaatctacagagaagcatctgaaccacaggagaaatcacgtgtcttaggctccctgtcttcatcaccggatcaggatattgttttggaggcattgaactttatgtttactgatgaggtgcggaatcaagattcattttacatccttggtggcattagcttagaaggacgagaaattgcatggacctggttgaaggaaaactgggatcacgtgttgaagacatggaaatcgagttcactcatatcagacttcattgagtccattgtcccacggtttacctccgaggagaaagctgtcgaggttaccgagttctttgctggccaagttaagccatcattcgagagagcactgaagcagagcctggagagggtgcggatcagcgcgagatggatcgagagcattaggagtgagcccaagcttggtcagacagtgcaggagctgctgcaggccgatgcgtaaacatgtggcctggaaggtagcggttcctcagtgtgatcatctcatacgggctgttcgggtcagattaaagtcggttgtttagattgctgcagttataatctatagagataaacattgtagaaacagtagaagtcggtataaattaaacctaaacgaccaggcctataaattcttgaaaaggttcaggtgggcttattctacattgtattggcagttgcttgcgtatgatttgttgagggaaaaaactgatgcaatgacgtttgtttcaaagagtggtgtactga

SEQ ID NO: 89333 - DNA, 788 bp, Zea Mays
agtcttgcagctgcctcccagtatggtagttatctgaagcaacagttcctacagcttcaacagcctatgcaatttccacatgagcagtgccatctcaatctgttgttggagcaacaaataatacaagcgagccaactgtatgctggaactgctcaccgaaggagtccctgttcatcgcatccgaggcattatcatcctgtgcctctccagttgtcagcctcagcgctgtgcttgaccccagcagctcctctagcggctcgtagccgatctctatgttgctgtggctcgaaggctgctcggcgaaatgtctaacaaggaattaaagcgtgttcgaccatggcgtctcgcctgtcctcgttgttgaaccctcgcgctcgcctcacctcgcctctatctacggtgtcgcgtcgtctgcctctcctggtgtgggtgttgacgttctcggctgtcccaccatgtcgggctcctcgctgctcacgctctgtttcctccacactcgacagtgcccatggaaggtctgattaagtgcttcaatgtccaaaatttatggtgggtgctaggagattgtctgaggaccagcgtcgttcggtaattgttggcataagagatagagttctatgtgactctagtggtgttcgatgaattgtgaaatcgggaatcattgtagatcttgtggtttcgagacagaatttgtagctgtgagctagtttgttgtccatgtggactagtttgttgagcgggtgcgatacatataggggtcgcgatgattatcttatttgaaacataga

SEQ ID NO: 89334 - DNA, 2711 bp, Zea Mays
gccatcgaccaccgtttcctgattgcctccatttctgtgggactcgtcggattcactcaccatcgatccattgttttcgtctcttgcggccttgccccacccataaagccgatgggttagctcccccgcaccgcacgcccaagaacaaagaggagccgacgccacggcgacggtcgtcctctcccggccagcaccgtcgcggactgcgttgcatccgtgcctttgcttctctcttcaccccgcgtctctctctcttggcgacgactgggggaccactgccgccgctcaacgccagttttgtgatcggtgaaaatggctgctgctgaagcaagggctgcttggcaacgtgctgcaaaccgttgtctggttcaggaggacaggaagagagctccaaaactagcttgctgtccatcatcggctgaacaacatggtacaaacaatgggaactgtcgaaattctgtagatcgtcctatctgcagtttaatgcctttgagctgcaatcccatgcattctaatctgccaccagatgtcagatggtgggttcagtcacagccaaattttgggatccagaaggatattgttagcaagcggttatgttcgttgggcagggacattcatgagaagcaagtggaagattcagtgccacaacctaaacatgaggaaacattactctgtcaagcagttgacaccagcactgaaaagattggagatgctttggagcctccatggatggtttcgccagccttcacgaagtattcccttgaaacaggcttagaagagatgaagactgttggtagctattctcaagtgtcgaagtgcatagaaactctcagcaattgtttgtacaaggataatgaattcccagattttgaatgtattgacccagcacctttgaagaacccagataaggctaattttgacatagatgcaccttggaaaggtgaaaagactcgaccatggtggcagattgctgacgaggaccagctggcttcactggttgcagaaagagcaacacagcacattgagaattgtgacctaccaaggcctacccagacagtacgcattaacaggacagaaccatatactcaaaaacatataggtgactttgggggaccttcatctcctgcaggaagagtgtcacaccctgttcctggacattgtgaccatatcgagtgtacctatagcacaggaagtacagatgagttggttctgttatatggtaatggagtttgggaacagcatggaagcagtgatacatatagtgtggttcaacatttttctagcagtagcacaaccggattggaaagcaaacaaacactccggaatggctctgagcgagacatgattttggaggcactccgccattcacaaactcgtgctagagaagctgatatggcggctaagaaggcgtacaatgagaaggacgacgtcatcaagcttttgctccgacaggcctcacatctctttgcgtgcaaccagtggctgaaaataatgcagctggagaatattgtcctgcagctcaagaacaaagagcatcagatagcagccatcatacctgaacttccatggttaaccctaaaagagaagcctacacagggtcaggggcagagagattggactaggaggaaaggtagaaggcagaagaaggcagccgggttcttcgacgcgatcttatttgctgttgggttgggtcttgctggagctgggtttcttcttggctggactcttgggtggcttctgccgaagttttaaagttgttggttatttttattttggggtacccagctaggcatgtattttgctgtgtaggatccagagggaaggccaagtgcactctgtgaaaatggtgtcaaatgatcaaatttgttagaccctagcatctgttcatttggaaacaatgatggcgcaatgagtaaatgaatggctgtccgcattccaccaagagcattttttctaaacattctgtttgttgtaaatatgtgtggtgaactgtattactttgatctgttaggttgtgtgaggtacctagatcaagctttataaaaaatgaggctgaggagaagagtctacgggctcggctatgagcagtaacttaaaagctcttttgtgggttttggtgtttggatgacaactcaattaaaggactaacaagtgtgctaagtgttgaacatgtgcttaatgcaaagctaacagggttcaacacaagtgaacaagtgatggtccaaagactgaattatctatagataatgaacactgcttaagtgagactcggtgtgcgtaacttagagacagccgatcaagccaaggatagaggcaagaagagcttcaaggtactgagtgcacgggagaaggtcaaggagaccaggaacccaaagccaggggtgaagaagaagacttgcaaagtcaaggttgatcgagttaagaagagttatggtgcatcaatgatcactacataaggacatgacttacaaccaatgaggtaacatctacagttatgtggtgtaagtcataaggctcaagatcaagctcgagaagtgaacaagcgagttagatctcagatatgccaatctagatcaagtcaagttgacttaatggtttagagtccaacatcgacctcaaacatgccaaattgggtaaaacgatgaaaaaggttaagtatgtaaggtttgagtgttcaaccatgttgcatacacctcttactacaagtttgg

SEQ ID NO: 89335 - DNA, 2699 bp, Zea Mays
gtcggattcactcaccatcgatccattgttttcgtctcttgcggccttgccccacccataaagccgatgggttagctcccccgcaccgcacgcccaagaacaaagaggagccgacgccacggcgacggtcgtcctctcccggccagcaccgtcgcggactgcgttgcatccgtgcctttgcttctctcttcaccccgcgtctctctctcttggcgacgactgggggaccactgccgccgctcaacgccaggtagtcccttcgccggcgacgagcacccactagttttgtgatcggtgaaaatggctgctgctgaagcaagggctgcttggcaacgtgctgcaaaccgttgtctggttcaggaggacaggaagagagctccaaaactagcttgctgtccatcatcggctgaacaacatggtacaaacaatgggaactgtcgaaattctgtagatcgtcctatctgcagtttaatgcctttgagctgcaatcccatgcattctaatctgccaccagatgtcagatggtgggttcagtcacagccaaattttgggatccagaaggatattgttagcaagcggttatgttcgttgggcagggacattcatgagaagcaagtggaagattcagtgccacaacctaaacatgaggaaacattactctgtcaagcagttgacaccagcactgaaaagattggagatgctttggagcctccatggatggtttcgccagccttcacgaagtattcccttgaaacaggcttagaagagatgaagactgttggtagctattctcaagtgtcgaagtgcatagaaactctcagcaattgtttgtacaaggataatgaattcccagattttgaatgtattgacccagcacctttgaagaacccagataaggctaattttgacatagatgcaccttggaaaggtgaaaagactcgaccatggtggcagattgctgacgaggaccagctggcttcactggttgcagaaagagcaacacagcacattgagaattgtgacctaccaaggcctacccagacagtacgcattaacaggacagaaccatatactcaaaaacatataggtgactttgggggaccttcatctcctgcaggaagagtgtcacaccctgttcctggacattgtgaccatatcgagtgtacctatagcacaggaagtacagatgagttggttctgttatatggtaatggagtttgggaacagcatggaagcagtgatacatatagtgtggttcaacatttttctagcagtagcacaaccggattggaaagcaaacaaacactccggaatggctctgagcgagacatgattttggaggcactccgccattcacaaactcgtgctagagaagctgatatggcggctaagaaggcgtacaatgagaaggacgacgtcatcaagcttttgctccgacaggcctcacatctctttgcgtgcaaccagtggctgaaaataatgcagctggagaatattgtcctgcagctcaagaacaaagagcatcagatagcagccatcatacctgaacttccatggttaaccctaaaagagaagcctacacagggtcaggggcagagagattggactaggaggaaaggtagaaggcagaagaaggcagccgggttcttcgacgcgatcttatttgctgttgggttgggtcttgctggagctgggtttcttcttggctggactcttgggtggcttctgccgaagttttaaagttgttggttatttttattttggggtacccagctaggcatgtattttgctgtgtaggatccagagggaaggccaagtgcactctgtgaaaatggtgtcaaatgatcaaatttgttagaccctagcatctgttcatttggaaacaatgatggcgcaatgagtaaatgaatggctgtccgcattccaccaagagcattttttctaaacattctgtttgttgtaaatatgtgtggtgaactgtattactttgatctgttaggttgtgtgaggtacctagatcaagctttataaaaaatgaggctgaggagaagagtctacgggctcggctatgagcagtaacttaaaagctcttttgtgggttttggtgtttggatgacaactcaattaaaggactaacaagtgtgctaagtgttgaacatgtgcttaatgcaaagctaacagggttcaacacaagtgaacaagtgatggtccaaagactgaattatctatagataatgaacactgcttaagtgagactcggtgtgcgtaacttagagacagccgatcaagccaaggatagaggcaagaagagcttcaaggtactgagtgcacgggagaaggtcaaggagaccaggaacccaaagccaggggtgaagaagaagacttgcaaagtcaaggttgatcgagttaagaagagttatggtgcatcaatgatcactacataaggacatgacttacaaccaatgaggtaacatctacagttatgtggtgtaagtcataaggctcaagatcaagctcgagaagtgaacaagcgagttagatctcagatatgccaatctagatcaagtcaagttgacttaatggtttagagtccaacatcgacctcaaacatgccaaattgggtaaaacgatgaaaaaggttaagtatgtaaggtttgagtgttcaaccatgttgcatacacctcttactacaagtttgg

SEQ ID NO: 89336 - DNA, 1260 bp, Zea Mays
atgacctccaccgtatccgcttcccaactgcatattaccgccacagccacggggacctctgctgtaatcacaacgccctcctcaaaccagaaccccatcaacgcgcgctcctgccatcattcggcgagcagctccccacgcagcagcaccaccaccggaggcacaggcggtggcggcggcagcggcagcgggagcacgaaccaggcgtgcgcggcgtgcaagtaccagcgtcgcaagtgcagcccggactgcccgctcgcgccctacttccctgccgaccagcagcggcgcttcctcaacgcccaccgtctcttcggtgtcagcaacatcctcaaaacgctgaagaagctcaagccggaactctgcgccgacgccatgggcacgctcatctaccagtccgacatgcgcgcgcaggatcccgtcggtggctgctaccgcctcgtcctcagtctggagcgccagctcgagatcgatactgccgagctcaccgccgtgctccaccacttggcgttctgccgccaggctaccacgacaaccaccgtgatggcaccgcaacagcaaggcggtggcatggctgacctcgacgtcacgtcctccaaccagccgcttctccccaacgagcagcaagaagtcgttgacgcactctacgtgaatcacgaagctcacaccgccatccttcaaaccgacgaggtcgtccaccgccacggtggaggccacagccccaccgatgatcatcacggtgagcagcaacagcagcagctcttcgactacttctattacgatgccaccgccagcgacgatgcaagtagcaagcctaccatagacatcaacctcgacaacatgcaacaattcgattttgacgatagttgtgccgccgccgagaaagtggatctggctccggcagctggggatggggaaataaggcatcatcagcacctcgacatgaattgccaaattgaccacaaagattatttcgagataaaggcggcgtcactcgtcgacgcctttgacatccggcaggacctgcagccggtggcagacgtgaacgccgaggttgacattgacatcaagacggtggatatgaatgccggcattggcatcgacatgaaggcgatggacatgaacgccaatgtagacgtcaatgccgacctacagggggatgatgccgctgtcaacgtctccacctgtgaagctgaagcagcaaaaatggcagccgagtcatcacattgcaggctagggttaggattttcttcgttctga

SEQ ID NO: 89337 - DNA, 783 bp, Zea Mays
atggcgacggagtacttgtccgggtggccgctgtcgtcctggatcagccccggcgcggcgttcttcctcttcgtcaacgtgctcatcggcgccatcgtggtcacgtcccgcgggcaccaagctggccgtggccgcgcggcggcgtccacgcggaggctctgccgcagcgcgtcgtccatggtcctcgaccggctccgctccttctccatgttctccgtccatcccgaccccacggaaatggaagagcgctatagcacgtcgtcccccctcgagctggaagcagaggaggagcagcagccccaaccccaaccagccgtcgtggagcccgcaaggtcacctgttgcggcagtagcagctgctgcagacggtgcatcgtccgagatcgccaaggaagaggcggcggaagcgggaaaagacctgcccaccagctcgaacgaggcccacggtctgctgttgcagttgcagcagggtcacggcggccggcagcagccaccgtcgtcagtacatgtcgtcgtcacagccgccgatgcaactgcggcggtggagataaaggaggaggaagagaagaaggcagagcaggaagcaaccatgcagcgcgcacctgcgagtaggcggggaacgacggaggaagcagcggaggggaaggcggcgctgaacgcgcgggcagagtccttcatccggaagttccgggaggatctcaagctggagcgtctcaactccattatcaactacacccgcacgctccgccgcggcgttggcgcgccacagcccactgcgcagtag

SEQ ID NO: 89338 - DNA, 2080 bp, Zea Mays
ggttggcctccgcccccgcgtcgcctcgtctctgggcctgctcgcctcattgccccccgtgctgcctacgcttttgccagcgcgcgccccaccaccaccggaaaagaaattccccaattctactccacccggcgcgctctccccacgcgcatccggatccgtccgctctgatcgagtgagttgatctggactctgtgcctgcctgtgagggcgaggagggcatggacgagttcgagctggaggacaacctcgagttcatcctccagagcatccaggagctgatggaggacccgggggacaacaacgccttcggagacgccaaccagaacgagctcttcgccagcatcgttaactacgaccaggagaacatgctgcccgacgtgtctgcagcggacgttgctgcagggaaggacattcaggggatcccgtgggagaagatgctcttcgggagggataagtaccgggagatgaagatgaagaactacagaaattaccagaatctaagttacgcacgggaggatgctttgcaggagtgcaaacaagtgacgaaggatagtccttactatgatttccactacaacacaaggcgtgctcggccatcaattgtacattttcagctacggaacctagtgtgggcaaccacgaaacatgatgtttatacaatgcatgatcaatcagtgacacactggtcctcactggagcagacaagcactgagctaatcaatgccgatgattgcatcgtcccaaaacagaggggccatggttcacagtcagtggcaatggttcaggtcacaacaatggccgtggatagtaatttattggtagttggtggctttcaaggggagattatatgcaagcgtttggatgatgagggggttgtttacagcacaagggttacagatgatgaaaatgcaatcactaactctttagagatgtatcaggatccgagcggatctagaaggttggtggctgctaacaatgactgctccatcaggatttttgacaccgagtactttgacctcctcaagcactatgtcttcccttggtccgtgaatagtgtttctgtgagcccgaatgggaaactctttgctgtcctgggagatcatgaggatggttgtgtggtggatcccaagtgtggcaaggcaattggctctctcaggggtcacttggattactcatttgcatctgcatggcatcctgatggcaatatcgtggcaactgggagtcaagacactacatgcaggctatgggacatcaggaacctatcccaatcagtagctgtgcttggtggaaggatgggctcaattcggtgtgtgaagttctcttcagacgggcgcttccttgcaacagcagagcccgtagattttgtccacatgtacgatgcttatgcggactacagcagatctcacgagattgacttgtttggcgagattggaggtttagcattcagccctgacaccgaggccttctatgtgggccttgcggaccagacgtacggaggcatgatcgagttcagcaagaggcaccaacatcattacttgaactccttgtggtgataaccacttgagcggaaatttggtcgcacagctgttggaccccattgttgcattgtgtgctccagaggagtgcatggtcctacagaggaggatctcatgagtgcatgcagaagtgtataaaattctggggggtttctttccctgttgctagtaatctgggttttgtcgctcgactcgtggaactgaaggcggtagcatatgtatagcctttctgtttctcgacacctaacaatgtacatagtttgtgtcaggatattatctccccattcaccgtctgcctgacatgtagtagtaggttggagttttatggcttccgaatcgggagccctgcatgagtcccagcattgctgtctgcggcaactactggtcggcaccttgtacgtcgctgtatcagcagttgtatcagcacattgttggtccttacgctgcagttgcagcatcagcaccagcagtggttggtggttgattgtccagtgaccaatgtgtaggagaggaaatgtgacaggcgtcctacaggttacgca

SEQ ID NO: 89339 - DNA, 1569 bp, Zea Mays
actcaacccaaacaccacaatccccttcaacaaacgcaccgcactccacggcagccagaaaacacaatccacacagtctccgtgaggtctgagcgaggtaggactagctctgagcgagttcttccgtcttccaggtataatccttgcaactctcactatcctcttcgcatcgctcgtctctttttgagactagttggatttctcttctttttccttggatcctactacctactagaacagagctccggagccttttagtttctggtatctgatctactcattttcttttcttccccttttggtgacataggtaggtctagttaagatctgtcgtgccagttctttgattttagctaagaaccaggcgatttagtcttcttccttacaaaaaaaaaatccccagaaaaaaaagttgtgagtagtatattcttgtaccatttgatggccgctgctataaatctccccgggcccagcgaggatctgatgcgagcgatggagtccttcatgcaagacgacgccccatcccctctggccatgccgccggcgccgtctttcccagcggccgcagcccagtacccggcgacccacctgagcccggcgcagatgcagttcatccaggcccagctccacttgcagcggaacccggggctgggcccgcgggcgcagcccatgaagcccgccgtcccagtgccgccggcgccggcgccgcagcggcctgtgaagctgtaccgcggcgtgcggcagcgtcactggggcaagtgggtggccgagatccggctcccccggaaccgcacccgcctgtggctcgggaccttcgacaccgccgagcaggcggcgctggcctacgaccaggcggcgtaccgcctccgcggggacgcggcgcggctcaacttccccgacaacgcggagtccagggcgccgctcgaccccgccgtggacgccaagctgcaggccatctgcgccaccatcgccgccgcgtcgtcgtcatccaagaattccaaggccaagagcaaggcgacgccaatcaacgcgtccgttctggaagcggcagcggcgtctccgagcaacagctcctccgacgaaggttccggctccgggttcgggtcggacgacgagatgtcctcgtcctccccgacgccggtggtggcgccgccggtggcggacatgggacagctggatttcagcgaggttccgtgggacgaggacgagagcttcgtgctccgcaagtacccgtcctacgagatcgactgggacgcgctgctctccaactagtcgcccttcgccgacagatgtgctgttgtagttcagtagtggcagtgtctctggccgccgcagatgaggttttaggcaatctgcaggccgccggcccatgtgtattaagtaggttttgctcagttgttggccctggacttcgccggcgtttttgtgaccggcgtccccgagtgcactgcattggtgtactggtctgtctgtaaaaaaaatggatctgtacttctatagtgtgtattcaaccattgttcttagttgtgatgttactcgtgctgcaaaattgcctttgcggatttcgtc

SEQ ID NO: 89340 - DNA, 1206 bp, Zea Mays
aacccaaacaccacaatccccttcaacaaacgcaccgcactccacggcagccagaaaacacaatccacacagtctccgtgaggtctgagcgaggtaggactagctctgagcgagttcttccgtcttccagcgaggatctgatgcgagcgatggagtccttcatgcaagacgacgccccatcccctctggccatgccgccggcgccgtctttcccagcggccgcagcccagtacccggcgacccacctgagcccggcgcagatgcagttcatccaggcccagctccacttgcagcggaacccggggctgggcccgcgggcgcagcccatgaagcccgccgtcccagtgccgccggcgccggcgccgcagcggcctgtgaagctgtaccgcggcgtgcggcagcgtcactggggcaagtgggtggccgagatccggctcccccggaaccgcacccgcctgtggctcgggaccttcgacaccgccgagcaggcggcgctggcctacgaccaggcggcgtaccgcctccgcggggacgcggcgcggctcaacttccccgacaacgcggagtccagggcgccgctcgaccccgccgtggacgccaagctgcaggccatctgcgccaccatcgccgccgcgtcgtcgtcatccaagaattccaaggccaagagcaaggcgacgccaatcaacgcgtccgttctggaagcggcagcggcgtctccgagcaacagctcctccgacgaaggttccggctccgggttcgggtcggacgacgagatgtcctcgtcctccccgacgccggtggtggcgccgccggtggcggacatgggacagctggatttcagcgaggttccgtgggacgaggacgagagcttcgtgctccgcaagtacccgtcctacgagatcgactgggacgcgctgctctccaactagtcgcccttcgccgacagatgtgctgttgtagttcagtagtggcagtgtctctggccgccgcagatgaggttttaggcaatctgcaggccgccggcccatgtgtattaagtaggttttgctcagttgttggccctggacttcgccggcgtttttgtgaccggcgtccccgagtgcactgcattggtgtactggtctgtctgtaaaaaaaatggatctgtacttctatagtgtgtattcaaccattgttcttagttgtgatgttactcgtgctgcaaaa

SEQ ID NO: 89341 - DNA, 103 bp, Zea Mays
ggggttgcttgccacggggattgcaggtgacctcaccaagtcaccaatgcttgtttctattattatttatgctagaatgctttgcggaatgtacgcgctgcac

SEQ ID NO: 89342 - DNA, 1905 bp, Zea Mays
ccgggcaccgccgcgggccccacgtctacagattcgcgtcgtgctctagggaggcttggcgccccccaaccccaactataaataacggccgtcctctccccgtcttctacactacacacaccctcctcctccggttctcctcgcaccttctcccacctctgctctgctctgctctgctctcccaggccaggccctgcagctgcaagcaccgaggacagacagagtcgctcgcttcgccaccactagctgttgcttgcctgccacccaaggatttccttccatcgagatcaagtagcgtagcggcttgcctgaccaagaggcagagctctcgatgacgaagcagggcatggtggtgccggtgcctgaagcggccgtggcggtaccgcccaactcggcgccgctgttccagtacccgccgccgcgggccgcgccgggcgtcgccgtgcgcaagaagtgcctgcagatgggcgccggcgccgggcgcatcggcggctgggtggagtccatgcgcgcgtcctcgcccacccacgccaaggcggccgccgcgctcgccgcgggcgtcgaagaggagcggtacgccgcgtggatggtgaaacacccgtcggcgctggccatgttcgaccagctggtagcggcgtccaaggggaagcagatcgtcgtgttcctcgactacgacggcacgctgtcccccatcgtcgacgaccccgacgccgcctacatgtccgacacgatgcggcgggcggtgcggagcgtcgccaagcacttcccgacggcgatcgtgagcgggcggtgccgcgacaaggtgttcgaattcgtgaagctggcagagctgtactacgccggcagccacggcatggacatcaagggccccgccaaagggtcccggcacaccaaggccaaaggaggcggcgttctctttcagccggccagccagttcctgcccatgatagagcaggtgcacgattctctggtggaaaagaccaagtgcatacctggagccaaggtggagaacaacaagttctgtgtgtctgtccacttcagatgcgtcgatgagaagagctggatcacgttggcggatatggtgaagtcggtgctcaaggactacccgaagctgaagctgacgcagggcaggatggtgttcgaggtccgccccaccatcaagtgggacaagggcaaggccctggagttcctcctcgagtccctcgggtacgccgactgcaccgacgtgctgcccgtgtacatcggcgacgaccgcaccgacgaggacgccttcaaggtgctccgcaagcgcgggcagggcgtgggcatcctcgtgtccaagcaccccaaggacacctgcgcctcctactcgctgcaggagcccgccgaggtgatggagttcctgctgcggcttgtcgagtgggagcgcctctccaaggcccgccccaagtggtgatccaatccacgacgacagatgacgatcgagctgggattaattatacactatatatgctcaatatataagttagttatactaagggtgatggattaattagagggatcgggggagccgggagcgagggagtaattaagaccgtacgcacccactccctacttgagctgagctgagctgagctgagacgagagctcgctgcgctgtgcacggcacagtcatgtgcgtccagtccacggcgcctccctatgtttttacgggagccatgtggcggctgctgcgcggcaagggtgaagaatgtacgtgcggctagctgtaacactccagtaattacttcctactctactccagccatgaaccttggctctggatcctgaattctgattgtgtacaagtacaagagagcaactgctgtcgatgcctatgtatgaaatcatctctataaattaagtagccagctttcctctgtacaa

SEQ ID NO: 89343 - DNA, 315 bp, Zea Mays
ccgagctctgtagcgagagcttgtaacccgagcgggggcattaaggtggtgcggattctttgcgatggctttctgggcccgggctcgctatgtgcctttggccggcctgcccgtcccaagttggtagtggctggcggaggctttagcggaagctttggtctctccagacctgaagtggcaggaatggcgtgaggctggcttcacagagcagcgatcactgcccgcttccaacggtgggaggataacgggccgctgcacttcgagcccaactcaggcccagagcctcactaagcagaccaccatctttttgttttt

SEQ ID NO: 89344 - DNA, 2259 bp, Zea Mays
atcactgtacatgccgtgaggtggtacaatcctgagtcctaggtcaattggtcaaatccccgctcgagcttgataaaacacgcaaggctgtctgcctgtctctgctcccatctagaaatccacttcgattcgccctggacgctcctgcctcctgctagtcgacgcgcaatccttggcaatctggcagacaggtgaggcgctgagcctgctactactaactaggagccgcggcgggaaatgagggatgcggaggcggcgtcgcgccggcggtggacgctggtgctggtgaacatggcgtcggtgctggagaaggcagacgaggtgttgctgcccgccgtgtacaaggaggtgggcacggcgctgggcgcttctccgaccgcgctgggctccctcaccctctgccgcgcgctcgtccaggccgcctgctacccgctcgccgcctacgcctccgcgcgccacgatcgggcccgtgtcgtcgccgtgggagccttcctctgggccgccgccaccttcctcgtcgccgtctccggcagcttcctccaggtccgtccgtctccccgatttcctcccaactctttccctcttcctcctgtcgctgacgtggcggacccactgctccacgtttctcccgcagcacgtggttggcattgcactggcacctacctaccaccaaacgtagcggttatccgaatattctatttcaatttcgcaacacaaaataaaagatggtcggtgatattttggtgcatctctgacacgtgggcccatccactgactagcaacctgtggctcgcgcgctcgcatacgcatacgcatacgcactgcgcagatggcgatctcgcggggcctcaacggcatcggtctcgcgctggtcctcccggcgatcagctcgctcgtcgccgactacaccgatgaccacacccgtggcgcggccttcgggtggctgcagatgacctgcaacctcggctccatcctggggggctctttcggcgtgctgctcgcgccagtcaccttcctcggcgtcgcagggtggcggctcgccttccactccgtggccgtgatcagcgtcgcgctgggcgtgctcatgtggctcttcgccgcggacccgagcccggccgccaagtgcaagaccgcggcctccgcgggggaggaggccaaagagctgctccagcacgccaggcgcgtcctcggggtgaccacgttccagatcatcgtggcgcaggggatcgccggctccatcccgtggtccgcgctcaacttctccgccatgtggctggagctcgtcgggttcacgaattggcagaccagcgtcatcacggggctgtacctgttcgccaccgctctcggcgcgctctttgggggcctcgtcggagaccctgtcgccagacggttccccaacactggtaggatcgccctggcgcagataagctcagcgtccgcgctcccactcggcgccatcctgctgctggcgttgcccaatgacccgtccaccggtgtggcgcacgccgttacattcttcgtcatggggttcgccatctcctggaacgcatcgtcgaccaacaatcccatcttcgcggagattgtgccggagaaggcgaggacgacggtctacgcactggacaagtgtttcgaagcagtgttcgcgtcgtttgcgtctcccatcgtcggtgttcttgcagagcgcgtgttcggctataagccggtctcgtccgacacgagcgtggacacggacagggagaatgctgccgcattggcaaaggctgtctacacggagatcgccgtgcccatggccatctgttgcctgacctacaccttcctgtactacacgtacccccgagacagggagcgtgctcgaaaggaccttctgatggcatcggatgaccacctcggtggagaagccaatgacaatgagtcaagtgcggttcatacactggtagacgaagaatcttctgtcagctccttaaatcagaggctaatatcttgaggaggctagctgcaggtggagatggggaagtccaccatcgtttcctggactctgtctctctcattcatgtgtggctccacggtttcagattcgccgaaaccgtcattaccggttaccacgcatggaaatgcgaaatctacagaccatatttgcatctaaactcttaggcctactttggaaactcaacccccttcggaattgaaggatgttcagagaaaaataaactaatttctctctcaataagaaacgcaactctttagacatgataaaaaaga

SEQ ID NO: 89345 - DNA, 1924 bp, Zea Mays
ggtcaaatccccgctcgagcttgataaaacacgcaaggctgtctgcctgtctctgctcccatctagaaatccacttcgattcgccctggacgctcctgcctcctgctagtcgacgcgcaatccttggcaatctggcagacaggtgaggcgctgagcctgctactactaactaggagccgcggcgggaaatgagggatgcggaggcggcgtcgcgccggcggtggacgctggtgctggtgaacatggcgtcggtgctggagaaggcagacgaggtgttgctgcccgccgtgtacaaggaggtgggcacggcgctgggcgcttctccgaccgcgctgggctccctcaccctctgccgcgcgctcgtccaggccgcctgctacccgctcgccgcctacgcctccgcgcgccacgatcgggcccgtgtcgtcgccgtgggagccttcctctgggccgccgccaccttcctcgtcgccgtctccggcagcttcctccagatggcgatctcgcggggcctcaacggcatcggtctcgcgctggtcctcccggcgatcagctcgctcgtcgccgactacaccgatgaccacacccgtggcgcggccttcgggtggctgcagatgacctgcaacctcggctccatcctggggggctctttcggcgtgctgctcgcgccagtcaccttcctcggcgtcgcagggtggcggctcgccttccactccgtggccgtgatcagcgtcgcgctgggcgtgctcatgtggctcttcgccgcggacccgagcccggccgccaagtgcaagaccgcggcctccgcgggggaggaggccaaagagctgctccagcacgccaggcgcgtcctcggggtgaccacgttccagatcatcgtggcgcaggggatcgccggctccatcccgtggtccgcgctcaacttctccgccatgtggctggagctcgtcgggttcacgaattggcagaccagcgtcatcacggggctgtacctgttcgccaccgctctcggcgcgctctttgggggcctcgtcggagaccctgtcgccagacggttccccaacactggtaggatcgccctggcgcagataagctcagcgtccgcgctcccactcggcgccatcctgctgctggcgttgcccaatgacccgtccaccggtgtggcgcacgccgttacattcttcgtcatggggttcgccatctcctggaacgcatcgtcgaccaacaatcccatcttcgcggagattgtgccggagaaggcgaggacgacggtctacgcactggacaagtgtttcgaagcagtgttcgcgtcgtttgcgtctcccatcgtcggtgttcttgcagagcgcgtgttcggctataagccggtctcgtccgacacgagcgtggacacggacagggagaatgctgccgcattggcaaaggctgtctacacggagatcgccgtgcccatggccatctgttgcctgacctacaccttcctgtactacacgtacccccgagacagggagcgtgctcgaaaggaccttctgatggcatcggatgaccacctcggtggagaagccaatgacaatgagtcaagtgcggttcatacactggtagacgaagaatcttctgtcagctccttaaatcagaggctaatatcttgaggaggctagctgcaggtggagatggggaagtccaccatcgtttcctggactctgtctctctcattcatgtgtggctccacggtttcagattcgccgaaaccgtcattaccggttaccacgcatggaaatgcgaaatctacagaccatatttgcatctaaactcttaggcctactttggaaactcaacccccttcggaattgaaggatgttcagagaaaaataaactaatttctctctcaataagaaacgcaactctttagacatgataaaaaaga

SEQ ID NO: 89346 - DNA, 774 bp, Zea Mays
atggtcaaggcaaaagcaagggtccgctatgagcctggaccggcatttgaggaggtcaaagaagaagccatgcttgatatatcaccaacagactcgacaaagttttggttaattcagtggcctaaagaccagtactattttctcatgtttgagattcttcgattccaggcaaatagaattttaaggcaaaagattgttgaggatcagtttctcgatcttgttagtgttgaaacagaagtgcgctcagtttacaaagagctctacagcatttacaaaactacactcaaatccaagagttcaataaatgaggtgaatcaggttgctcagctgaggatcatcataaaaccaaaatcctgcaatggtgttgggccattgtgcactgcacaacagttatgtcaacatgtggaagattacattgcaactccaaaacctaatggctaccaaagtctacacacaacagtgataccatttcttaacgagagtatgtttcatttggaagttcagataagaacagaagatatggatttaatagctgaaataggcattgctgcacattacagtggaagaggagtggtttctggacctgttcggcctggaatatcaagtggaagaaatgccaaggggaaagtaatctgcttgaacaacacaagatttgatggccgccgacgcgatggtagggatggcaaccgtggacgctgtggtcgtggctttggtaacaagcagagcgttggcactcccagtgcaggaaagaagaccacttttggtgatgattga

SEQ ID NO: 89347 - DNA, 1743 bp, Zea Mays
ctgagccagcgcttttttttttctcgagcggtgccacacggccacattgccacaagcccacaaccagacggggagagagcgaaaaacggggcgaccgagctagctcgccgtcgtttccggctcccctccctcctcccataccgttgccctacccccactaccgcgccccgcggccccgccgggtcctcctccctccgctcgctcggaaccagaggcctcgcgacgtctcgcgccatgcgggctcgcgatctgctagggtttcctccggcgggcgcggccatgtcgtcggcggcggcgctcctcctcctccccctcctcaccgttgctggccaggggccggtctgccagaggccgcccgtcgccgccgtcatcctgcagcaggcgtccacctgtcgagcggtggacgccccagggctccggggtcaccgcgccggcttcgtggagggggatgatggggccctgcaaaaggcagtagcacttgtgctgcagaacagggaggattttgtcgctattcttttttatgcttcgtggtgccctttttctaaaattttcaggacagattttcaaaaactgtcatcctttttcccaacaattgctcatttttcttttgaagaatctaatatcaaaccaagagtattgtcaaggtatggagttcgtgcattcccgacgattttccttctgaactctacagtgcgtgtgcgttatcatggatctcgggccatgaattccgttgctatgttctataaagatgttacaggcctgaatcctgtgtcattggacgctacatgcctggagagaatggaggattcagttactatagttgatcatggcaaaaaggctgaaaaggatgattctctgttatcgtgggcaaggtcaccagaccgattacttcatcaagatacatgtcttgcattggctagctcctttgtcctcttgaggttgcttcatttccttcttcctaagcttaatgcatgtatgaagcaagcctggaggatgcgactgtatgaattgaataggttgtttcctagcttgtcttgaggaaggcaatatggaactagaaaacttgaactgactctcgaataaggcagcatacttataagaagtgatgcagacaacaaaccggatcactaggaagccagtgtcaagttaatccacattggtgattcagtttgagtagtgaaaatataccgctaccaactctcaatatcctgaagttcaggaggtctcatcaatggatgcactgtattacatccatgtcgaactcattctgtgtcaactatgtttggtctttccttgggagatatcttgatgcaagcataagtgacattcatggaaatgctgacttaatagtaagtcatctgtaccactgtaccattagccatctcagtctgagttcagatttgtatcttggtgttactcataaacacaaaaggcatgtattataagaaagattgttcattcattttagtcataggcatgattgatgttggggacttgttctcaaatgctatgagttaagaacaaggcaacacaaaaaatgttaaacgttaaagtccttcgtccttcgaagcattattttctttggggatataataatttttggacgaaagttatgaaggacatatcttcataaacacaacatataataatgaagaagaaaacatatgaaatatagaggataacacaaacaattatatattattatcaactcatttctatattattattatggaaaaatagaaa

SEQ ID NO: 89348 - DNA, 1626 bp, Zea Mays
ctcgagcggtgccacacggccacattgccacaagcccacaaccagacggggagagagcgaaaaacggggcgaccgagctagctcgccgtcgtttccggctcccctccctcctcccataccgttgccctacccccactaccgcgccccgcggccccgccgggtcctcctccctccgctcgctcggaaccagaggcctcgcgacgtctcgcgccatgcgggctcgcgatctgctagggtttcctccggcgggcgcggccatgtcgtcggcggcggcgctcctcctcctccccctcctcaccgttgctggccaggggccggtctgccagaggccgcccgtcgccgccgtcatcctgcagcaggcgtccacctgtcgagcggtggacgccccagggctccggggtcaccgcgccggcttcgtggagggggatgatggggccctgcaaaaggcagtagcacttgtgctgcagaacagggaggattttgtcgctattcttttttatgcttcgtggtgccctttttctaaaattttcaggacagattttcaaaaactgtcatcctttttcccaacaattgctcatttttcttttgaagaatctaatatcaaaccaaggtgcgtctttctaaaacagataaacactgctgttagatttaactatatttagtatgcaactcaaacttcaatatctgaattgcagagtattgtcaaggtatggagttcgtgcattcccgacgattttccttctgaactctacagtgcgtgtgcgttatcatggatctcgggccatgaattccgttgctatgttctataaagatgttacaggcctgaatcctgtgtcattggacgctacatgcctggagagaatggaggattcagttactatagttgatcatggcaaaaaggctgaaaaggatgattctctgttatcgtgggcaaggtcaccagaccgattacttcatcaagatacatgtcttgcattggctagctcctttgtcctcttgaggttgcttcatttccttcttcctaagcttaatgcatgtatgaagcaagcctggaggatgcgactgtatgaattgaataggttgtttcctagcttgtcttgaggaaggcaatatggaactagaaaacttgaactgactctcgaataaggcagcatacttataagaagtgatgcagacaacaaaccggatcactaggaagccagtgtcaagttaatccacattggtgattcagtttgagtagtgaaaatataccgctaccaactctcaatatcctgaagttcaggaggtctcatcaatggatgcactgtattacatccatgtcgaactcattctgtgtcaactatgtttggtctttccttgggagatatcttgatgcaagcataagtgacattcatggaaatgctgacttaatagtaagtcatctgtaccactgtaccattagccatctcagtctgagttcagatttgtatcttggtgttactcataaacacaaaaggcatgtattataagaaagattgttcattcattttagtcataggcatgattgatgttggggacttgttctcaaatgctatgagttaagaacaaggcaacacaaaaaatgttaaacgttaaagtccttcgtcc

SEQ ID NO: 89349 - DNA, 2034 bp, Zea Mays
cataaagggggtttcgttttcagaagtgtcgggaaacttctttccccactcctgtagcgccgccgccgcgtgcccgtgaacctcccgccttcgttctcccctcccgcttgccccggtagtgattttcttccttggttcacggcggatcccatgccgatcgacgggatggtgtccgtggtcgcgaccgtgagtgggtaccacggcgacgagcggcacaggctcgtgaacctcatcgcggagaccggcgccagctacgtaggatccatgagccggtccatcacccacctggtgtgctggaggctcgaggggaaaaagtacgacatcgcgaggaggctggggacgctcgtcgtgagccattggtggtttacggagtgccttagggaggggaggcgcctcccagtggactcttacttgatggtaagtggtgaagaagcagggccagtcccagagttgcctactcgttcccgtacacaaggcaaaaaaagtgccatcatggaggaccgagttttccaagagttacctgatgatttctgggacactcctctagccagaaccagctataaagttaagtttgatgattctgattctgattttgagtctgccctactaaaagaaaattctgttggtgatggagattctaagaaaaatcgttcatcagatgttaagaaaagaaagcgtatgaagcatgtcaatacatcaacggacagaaatgtcttaaactcgcaggacaatgtgtcaagtgtcatggaaagacattttcttcatttgtcaagtcatacaacgtccaagagcacatcaaagcagaaggaaaacttgtcacacttgcttcacaatgaagttcctatcaggatgggagaaaggaatgatcttactgaaaactttgaaaatgatagtttgtctgacagcttcagtgaacctcaaatttcagatactctgtgtgtagaagctcaaagaaaatttaccaaaacaagtgcaccatcatcatcacttcgacaaagtaccatggattctttatatgaatttggtgaaactagtaggcatgaaccagcaggaaaaaaagaacaagacaatgttgaattaaggaagacttcaagaagcttccttccatttgatatgtcaggacaggaaccacctttctgtactcaggagcaagtagataaatgtagctttggcactctagctgatgatgaaatgggatatgataacaaacccatggaaaagtcatctaatttagaaaggcaaacagaattatcatgcgtcatatgctggacagatttttcttctacaaggggcatcttaccatgtggacatcgattctgttattcatgcattcaaggatggtcggattgtctggcttctaggggtaaagtctcaacatgtcccctttgcaaagccagtttcacatggatcagtaaggtggacgaggcaggcaccttagatcagaaagtatactcgcagaccattccttgtgaagcttctaccgatgtttttgtgctgggcagtgaaggctacgatttctctggaccaacgtctgggcaaggagcatgctaccagtgccacttccgtgagcctgaggagcttcttctaagctgccacgtctgcagatcactgtgggtacactcgtactgccttgatcctccgctgactccttggacatgcatgcactgcagagatctgcgggtgctgtttcatcggtatcgttagccccacttactgtactagtcaaaccttaattgttgaaggaaattatcagaaggcttgaacaccgtagcggcttgtcttactgaaggactattaaggggtgtttgaatgcactagagataataattagtggctaaaattagttgaaacatctaaacaacctagctaatagttcagctattagctatttttggtaaattagttaatagttagataattatttgttagctagctaatttcactaataatttttagtcaactaactattagttctagtatattcaaacactccctaagtttgcaatgtaattttctagttccatttgatgctat

SEQ ID NO: 89350 - DNA, 1560 bp, Zea Mays
gaacctcccgccttcgttctcccctcccgcttgccccggtagtgattttcttccttggttcacggcggatcccatgccgatcgacgggatggtgtccgtggtcgcgaccgtgagtgggtaccacggcgacgagcggcacaggctcgtgaacctcatcgcggagaccggcgccagctacgtaggatccatgagccggtccatcacccacctggtgtgctggaggctcgaggggaaaaagtacgacatcgcgaggaggctggggacgctcgtcgtgagccattggtggtttacggagtgccttagggaggggaggcgcctcccagtggactcttacttgatggtaagtggtgaagaagcagggccagtcccagagttgcctactcgttcccgtacacaaggcaaaaaaagtgccatcatggaggaccgagttttccaagagttacctgatgatttctgggacactcctctagccagaaccagctataaagttaagtttgatgattctgattctgattttgagtctgccctactaaaagaagaaagacattttcttcatttgtcaagtcatacaacgtccaagagcacatcaaagcagaaggaaaacttgtcacacttgcttcacaatgaagttcctatcaggatgggagaaaggaatgatcttactgaaaactttgaaaatgatagtttgtctgacagcttcagtgaacctcaaatttcagatactctgtgtgtagaagctcaaagaaaatttaccaaaacaagtgcaccatcatcatcacttcgacaaagtaccatggattctttatatgaatttggtgaaactagtaggcatgaaccagcaggaaaaaaagaacaagacaatgttgaattaaggaagacttcaagaagcttccttccatttgatatgtcaggacaggaaccacctttctgtactcaggagcaagtagataaatgtagctttggcactctagctgatgatgaaatgggatatgataacaaacccatggaaaagtcatctaatttagaaaggcaaacagaattatcatgcgtcatatgctggacagatttttcttctacaaggggcatcttaccatgtggacatcgattctgttattcatgcattcaaggatggtcggattgtctggcttctaggggtaaagtctcaacatgtcccctttgcaaagccagtttcacatggatcagtaaggtggacgaggcaggcaccttagatcagaaagtatactcgcagaccattccttgtgaagcttctaccgatgtttttgtgctgggcagtgaaggctacgatttctctggaccaacgtctgggcaaggagcatgctaccagtgccacttccgtgagcctgaggagcttcttctaagctgccacgtctgcagatcactgtgggtacactcgtactgccttgatcctccgctgactccttggacatgcatgcactgcagagatctgcgggtgctgtttcatcggtatcgttagccccacttactgtactagtcaaaccttaattgttgaaggaaattatcagaaggcttgaacaccgt

SEQ ID NO: 89351 - DNA, 195 bp, Zea Mays
atgacggcacagaggatgttcgatgcccgactgagcgtgcagacggagccggggcgaggggaagaagacgacgtgtctcggatctgcatcctgctcgctgctttctgccgctctctgctccacggttcccatgatggcacagaaatgcggaaagcagcgagcagcttctcgagatctgttggtggagctttgtag

SEQ ID NO: 89352 - DNA, 1619 bp, Zea Mays
cctcttccccacacctaaagatccgaatctagggagcgggttccaccaccccaagattctcgtggcgacctcgcaacaacctttttcagctcttcccatctcttcggttgccgaatctctctcgccttctctccttgaggcttttataatcagcctgttcttggttcatctcgtttctgtggagtggagacaattttttcgggtgatagatttcgtctcagaaactcttaaactaccgttgctttctacttgctcctctgatttgcgccgagaaacaaccactatataattatcagcgatttctttcgttccactcgatccaaccttgttgatttcctttaaaggcagcgcctttgccaatctacttttgttgagacagatgtctagttagttcttgaagaagataaggcttcctcgcagattattctgttgctttactttgattttgtcagttttgccctcaatttccacccggataggacccgagcattcttttatttctttctttccccataatggccatgtcgctgagccgcttctcccagtggatatggccggggagcagaactagaaatcctagaggccgcgagccaccggcggggagcacggccttgacggaaggcctcttcccggactccccgtcggggttccgggatccagaccctggttctggcgcggcacagcggcgtaagggcaagagccgccgtcgcggtggccgcgtggaggcgaaggtcgatggcgagcacggcatggttatcgtgcagtccgacggtgacggctgcctgtctgactcggactccgacggctccgactggtccatcggctggctcgagccgctcgcgccggacctccagagtgacgttgactccgagggaagcttcgccgtcctcgtgcggtgctatcgccgcggccgcgctgaccggcctgaccgtcctgatggcaagttccctgctcctggtggtgtcgctcacggtcacggtggtgtttctggtaacaagaattttgtggagcaatgagtgtcttcccttcagaactgatttctccatttccattcttagttggcttcaatgtgtatacagcatttttacatgacctgtcaaatttctcatgtgcgaaacatatatatgaaggaagagaggaaacccaaaatggggaagaaagaggaaagaatcacagaacaaaacactaccagtggatttttattaaaaaaatgcaatggatgggggggggggggggtgcatcgttcttcctgaggttccaggctacggtattattgcagaataaaacatgttttgtgattggattcaaatgttattgacatttctgacaatgagcaatgaattgatggcctcatcccattttcttgtaaactgcatcattgtcattggcatgattattcttccgttttcatgaacaacgggaactgaactcttttcgattccacgaatcttttttatcaaaatcattttatgtttgtgaatttcttcctttcattgtcaatctgctggagcagggatttctttttttttctttccgcagtacttcagctatcgcatgaatatttcaacaatctgttctgcaattcctgaacactgttgacaaaatttatagatcattgc

SEQ ID NO: 89353 - DNA, 1444 bp, Zea Mays
gcattcggctgcaaacaattttttccccagaacctcagccttccgacatcaccgccgacgccatggccggctctccccgccacctctccctctttcccctgcgcctcctgttacttcttccgctgctcgctgcgggtaaacccgtcctcgaggacggttacacggtcaccaccttcgccgacctcaacccgctcccggcctccgggccacacccctacgcagtcctcccgcggtcccgcgccggcgacctcctcctcctcgactccgccggctccgcgctctacactatctccctctcctcctcccccggcgagccgcgcaggctggcagggggcaaacgaggctccgggttcaacgacggcgggcccggcgacgccgcctttgaccgcccgcgcagcgtcgccgtcgatgccgccgacaacgtatacgtcgccgaccgcctccatggtgccgtccgcaaggtcgcgccctccggttacactactacaattgctggagggttctcatcagggcctggtcacagggatggaccagcacagaatgctactttctcgccagattttgcacttgtttatgtcccgaagatttgtgccttgttagtagctgacagaggaaatcgaatggttagacaaattaatctaaagccagaagattgtgcacatgaaaaacaatcaggcttgggaaatacattggtgtcgttcattgcagtattgtgtacattgctcggttcattgatcggattcttagctcgtcatttttaccctgtcaatgtgagtatgcttctgagtcaattattaagtcaaggggatgaatacatgcacaaattaagacagtgcaatctaaaacatataggcaggaagtctccgtcaaccactttttcagcaggatacggaagcaattcctgaggacacagaggaaggcaactccgatcagcttctgcgacataaaaagcgcagttgctagcttcgtgccctacaccctcctgctgaaactagtaagacttggttccggttatctacacgtgatgttatctagtgttaggttacagcaagaagttcaccgaaagccttctcgtcgacctgagttacacaagaccatcaatgctcctaacattggtcttaacaacaaagctcccgttcctcctactgagcaactgggtgatctgataagctttgccggagatgctggtgttaaggaggatagtggtaatgccgatagtcaggagggtaaggtgtcatcctatcatggtgacttgatggggcttccctacaccccaccgtgcagcgttaagaaaattgatcacatgatagaggccaacctatcgagcttttcaagtcacgagaaacgttgtagattaactgttagtggttgtagtgtaagcaggagggtgcatggagacaaataagagggtgtttggtttgatcatgacatgtaatgttaccct

SEQ ID NO: 89354 - DNA, 1549 bp, Zea Mays
gcattcggctgcaaacaattttttccccagaacctcagccttccgacatcaccgccgacgccatggccggctctccccgccacctctccctctttcccctgcgcctcctgttacttcttccgctgctcgctgcgggtaaacccgtcctcgaggacggttacacggtcaccaccttcgccgacctcaacccgctcccggcctccgggccacacccctacgcagtcctcccgcggtcccgcgccggcgacctcctcctcctcgactccgccggctccgcgctctacactatctccctctcctcctcccccggcgagccgcgcaggctggcagggggcaaacgaggctccgggttcaacgacggcgggcccggcgacgccgcctttgaccgcccgcgcagcgtcgccgtcgatgccgccgacaacgtatacgtcgccgaccgcctccatggtgccgtccgcaaggtcgcgccctccggttacactactacaattgctggagggttctcatcagggcctggtcacagggatggaccagcacagaatgctactttctcgccagattttgcacttgtttatgtcccgaagatttgtgccttgttagtagctgacagaggaaatcgaatggttagacaaattaatctaaagccagaagattgtgcacatgaaaaacaatcaggcttgggaaatacattggtgtcgttcattgcagtattgtgtacattgctcggttcattgatcggattcttagctcgtcatttttaccctgtcaatgaagtctccgtcaaccactttttcagcaggatacggaagcaattcctgaggacacagaggaaggcaactccgatcagcttctgcgacataaaaagcgcagttgctagcttcgtgccctacaccctcctgctgaaactagtaagacttggttccggttatctacacgtgatgttatctagtgttaggttacagcaagaagttcaccgaaagccttctcgtcgacctgagttacacaagaccatcaatgctcctaacattggtcttaacaacaaagctcccgttcctcctactgagcaactgggtgatctgataagctttgccggagatgctggtgttaaggaggatagtggtaatgccgatagtcaggagggtaaggtgtcatcctatcatggtgacttgatggggcttccctacaccccaccgtgcagcgttaagaaaattgatcacatgatagaggccaacctatcgagcttttcaagtcacgagaaacgttgtagattaactgttagtggttgtagtgtaagcaggagggtgcatggagacaaataagagggtgtttggtttgatcatgacatgtaatgttaccctgggcattgtgggttcgtgtgatgatgcctaagaattctgttctggcataacagctttgtagcaaacccaattactccataatgttctcttattgcatggttgatggagttcttatggatgattgatcctgtctaaagcttatattgcttaagggattgagtttttgttggcagagctcctctggtctgctc

SEQ ID NO: 89355 - DNA, 656 bp, Zea Mays
attcggctgcaaacaattttttccccagaacctcagccttccgacatcaccgccgacgccatggccggctctccccgccacctctccctctttcccctgcgcctcctgttacttcttccgctgctcgctgcgggtaaacccgtcctcgaggacggttacacggtcaccaccttcgccgacctcaacccgctcccggcctccgggccacacccctacgcagtcctcccgcggtcccgcgccggcgacctcctcctcctcgactccgccggctccgcgctctacactatctccctctcctcctcccccggcgagccgcgcaggctggcagggggcaaacgaggctccgggttcaacgacggcgggcccggcgacgccgcctttgaccgcccgcgcagcgtcgccgtcgatgccgccgacaacgtatacgtcgccgaccgcctccatggtgccgtccgcaaggtcgcgccctccggtgagcgaacccgcgcgtcccctcctccgtgcttcttttgttcccctgtgtcatggatcaaggggtgaatcagtaaggaatagtaagattcagtatgattctttgtttcttttgcatataaatggatggatgtaagcaccatcagagaacgattacgaaatgaataaaccagttacaaatcaaa

SEQ ID NO: 89356 - DNA, 1551 bp, Zea Mays
attcggctgcaaacaattttttccccagaacctcagccttccgacatcaccgccgacgccatggccggctctccccgccacctctccctctttcccctgcgcctcctgttacttcttccgctgctcgctgcgggtaaacccgtcctcgaggacggttacacggtcaccaccttcgccgacctcaacccgctcccggcctccgggccacacccctacgcagtcctcccgcggtcccgcgccggcgacctcctcctcctcgactccgccggctccgcgctctacactatctccctctcctcctcccccggcgagccgcgcaggctggcagggggcaaacgaggctccgggttcaacgacggcgggcccggcgacgccgcctttgaccgcccgcgcagcgtcgccgtcgatgccgccgacaacgtatacgtcgccgaccgcctccatggtgccgtccgcaaggtcgcgccctccggttacactactacaattgctggagggttctcatcagggcctggtcacagggatggaccagcacagaatgctactttctcgccagattttgcacttgtttatgtcccgaagatttgtgccttgttagtagctgacagaggaaatcgaatggttagacaaattaatctaaagccagaagattgtgcacatgaaaaacaatcaggcttgggaaatacattggtgtcgttcattgcagtattgtgtacattgctcggttcattgatcggattcttagctcgtcatttttaccctgtcaatgcaggaagtctccgtcaaccactttttcagcaggatacggaagcaattcctgaggacacagaggaaggcaactccgatcagcttctgcgacataaaaagcgcagttgctagcttcgtgccctacaccctcctgctgaaactagtaagacttggttccggttatctacacgtgatgttatctagtgttaggttacagcaagaagttcaccgaaagccttctcgtcgacctgagttacacaagaccatcaatgctcctaacattggtcttaacaacaaagctcccgttcctcctactgagcaactgggtgatctgataagctttgccggagatgctggtgttaaggaggatagtggtaatgccgatagtcaggagggtaaggtgtcatcctatcatggtgacttgatggggcttccctacaccccaccgtgcagcgttaagaaaattgatcacatgatagaggccaacctatcgagcttttcaagtcacgagaaacgttgtagattaactgttagtggttgtagtgtaagcaggagggtgcatggagacaaataagagggtgtttggtttgatcatgacatgtaatgttaccctgggcattgtgggttcgtgtgatgatgcctaagaattctgttctggcataacagctttgtagcaaacccaattactccataatgttctcttattgcatggttgatggagttcttatggatgattgatcctgtctaaagcttatattgcttaagggattgagtttttgttggcagagctcctctggtctgctc

SEQ ID NO: 89357 - DNA, 988 bp, Zea Mays
gctgcaaacaattttttccccagaacctcagccttccgacatcaccgccgacgccatggccggctctccccgccacctctccctctttcccctgcgcctcctgttacttcttccgctgctcgctgcgggtaaacccgtcctcgaggacggttacacggtcaccaccttcgccgacctcaacccgctcccggcctccgggccacacccctacgcagtcctcccgcggtcccgcgccggcgacctcctcctcctcgactccgccggctccgcgctctacactatctccctctcctcctcccccggcgagccgcgcaggctggcagggggcaaacgaggctccgggttcaacgacggcgggcccggcgacgccgcctttgaccgcccgcgcagcgtcgccgtcgatgccgccgacaacgtatacgtcgccgaccgcctccatggtgccgtccgcaaggtcgcgccctccggttacactactacaattgctggagggttctcatcagggcctggtcacagggatggaccagcacagaatgctactttctcgccagattttgcacttgtttatgtcccgaagatttgtgccttgttagtagctgacagaggaaatcgaatggttagacaaattaatctaaagccagaagattgtgcacatgaaaaacaatcaggtaaatactgaatgggcctccaacttgctgtataggcaccgtaacttagtatcttactcgtgtctagtgcttaagttattgtgttttaccatggccacttgttttgtcaataaaatctgtgttgtggtatcactgtctttcaatttacaaatttcacgcatagcctgagatgtgcagaaaggctttgtagaatgtgctgattcttccagtgtgtataagtagcttctttgatatgtacattgccttatctggatatgcattaaggcattggtccatcatttaacttatattttagacacttggagattcaattatgacaa

SEQ ID NO: 89358 - DNA, 967 bp, Zea Mays
ccgtattgggccttaccccggctgcttggcctgccgccagatccgcaggtttcggctttcgggcctcctctcccttttggcgaatcattccttctcgccgataagcagcagctcatcacctgaaggagagcagcccggaggagggggagcaagcagcagccgtccgtggaagaagatgtcgtacctgctgccgcatctgcactcggggtgggcggtggaccaggccatcctcgccgaggaggagcgcctcgtcatcatccgcttcggccatgactgggacgagacctgcatgcagatggatgaagtgctggcagcagtagctgagaccataaagaactttgcggtcatctaccttgttgacatcacagaggtccctgatttcaacaccatgtatgagctgtacgacccttcgacagtgatgttcttcttccggaacaagcacatcatgattgatctcgggactggaaacaacaacaagatcaactgggccctgaaggacaagcaagagttcatcgacattgtggagaccgtatacaggggcgcccggaaaggccgtggtctggtgattgctccaaaggactactccaccaagtaccgttactaagaaggcaggcattccccttatgcaatctattggggatgtttacacggacagttagtccgacaggtgatccctaactgtatcttggcataccctagtaattcaagttgctggctggagtgatgcttatccatgtcttggcatgccatagtgaacatgtaaacctgtgatttgaggtgattattcgagtgtaaagaaaccaggattgcgttcgcctatgactatgtgtctagttgtctacttaataagaaacagttattggtttggaatatcggaactgagacaatggtttcctttcggtatttctattatcaactaccctgctttgctacgttttttatatattatataaataggtacggagat

SEQ ID NO: 89359 - DNA, 1716 bp, Zea Mays
catttcttaaaatttggtcaaaaaattgtagggcaccctctcaagtgcctcaaatatactacactgtagtgggctgccctataatctagatttgaggctttactgttggagcggaatgttttgttggtgccctaaattctataaaatatactcatttttaaattatagggcattttataggttacgttgttggagatgatctcactaacctccttggctagtaccaataaagtgtaagatggtgttatctttggttttattttgttctcaggggatattgtagtaagtctctccttccccccctggtaaatcaaagcttttattccacatagggatttaaataaacttgcagctaacttcctttgtttggaagccttctgtgatgaaactgaagtgccagtaaggcagtaccttgctagtaagttatgaactggtgcaattgtttgtactttttcttttcttgcttgcggtagtctctccttttagcttgaggtatgtggaaacaatagagagttaggtgtgttttaggggtatatactgcataagagaaatttgaatggcagcagctcactgatttatgtttgtcatgtgtggtcctcatgttgattgatgaggagacataagtactcaaggtttgcagattgcgtcacaatgttgccagtttactacttggctgattcaattataaagaacaaactgttgtttagtggcctgggttgtactataacatgtcatgttacatttcatttcttttttactgccatacaatatttgttatgtttaaatttggaacagaagtggttagcatgttttatttgttaggtaacatacactgtccaatcgttgcaagcttgatttttactatttatggctcagtgaaattgaagtgaagtagccatctgatcttttcatcagtgttttctgaaaatcatgttcgttgcccttgccctttttaaaattctcacttggtcatatgatttggttccacactagtttagtactgttgttttgaatttattctgactctctcttgttaatgtttagatggatgaagtgctggcagcagtagctgagaccataaagaactttgcggtcatctaccttgttgacatcacagaggtccctgatttcaacaccatgtatgagctgtacgacccttcgacagtgatgttcttcttccggaacaagcacatcatgattgatctcgggactggaaacaacaacaagatcaactgggccctgaaggacaagcaagagttcatcgacattgtggagaccgtatacaggggcgcccggaaaggccgtggtctggtgattgctccaaaggactactccaccaagtaccgttactaagaaggcaggcattccccttatgcaatctattggggatgtttacacggacagttagtccgacaggtgatccctaactgtatcttggcataccctagtaattcaagttgctggctggagtgatgcttatccatgtcttggcatgccatagtgaacatgtaaacctgtgatttgaggtgattattcgagtgtaaagaaaccaggattgcgttcgcctatgactatgtgtctagttgtctacttaataagaaacagttattggtttggaatatcggaactgagacaatggtttcctttcggtatttctattatcaactaccctgctttgctacgttttttatatattatataaataggtacggagat

SEQ ID NO: 89360 - DNA, 582 bp, Zea Mays
atgtcatcccgtcacatccccacgaagcgctcgaccagggtcgtcgtcccctacaacccggagaccagtgttggtctccaggcggccctcgtggcgcccgcgtcggcgcacctccatgtggccgagcccgttcgccgcagtgcccgcatcatcaccctgcaggcggtgacaaccaccgaccgacgccgcaacaccccctactgcatgatgaccagctcccgtttctgcgtcgacgatggttctctcttctgcaagctctgcgaccgccgcatgcacgaccgcatcatctacatgtacatgagcatggggttctgcacggaagagtgcaggaatgagtattttttggactacaggtgtaggctcaccatggcgacggtggaggccgagggcaggagcgaggcaaggaagccggtggaggcggcggcggcgacgacggagggacaaggtgttggctacaggcgcatcttcttcacttgtgccgagcattcatctcacacagacgtcaactgttttgatcataaacctataagtcctcggatactcagtgatgtcattatattatcatctattatttatcagtga

SEQ ID NO: 89361 - DNA, 2641 bp, Zea Mays
cgtttttcttcacagttcacaccacaatctctttccctctgggctgtctggctggcctgtgccgtcgcctttccggtgcaaaagattttgttggccttgggaagcgcggagcgtgttttcctccctccgttccggtggggggtggcaactggcaacgcaaaagcctgactccaatcccattgctgctggaaagcacaaagcagcgatggtaaaagaggatgaaggccatggcgacagagtggccgccgacgctcctttccgtgtggtgtagggctgcagattccttcgcgctcctcctgctcccagcgaggaaaagagagcacgaactaaactaggaaccatccctccccggcattcattcccttgcccttttttcaccgaattgtagcggttgttgctttcctgttcaggtgccttgttcttggcctccttcgcacgcaaagaaccgccggtcgtattgctctccgcactcacccaccgcgctgctgctgctcgactgctcgtggaagggttcttattggccgcctgttcctgctttgcggtttcttgctctgcttttgagtggagccgctgtggagtggacggtgtggtgtggtgtgggtcggcggtgaggtgaaaggcttggtttctttctttcttgcgagggaggataagggaaagggaaggcgaagaggaggatggccggaggaggggcggcgccgccgccgaagcaggaggagctgcagccgcacccggtgaaggaccagcttcccagcgtgtcctactgcatcacaagcccaccgccctggcctgaggctgtcatccttggattccagcactacattgtgatgctgggcacatccgtcatcataccaagtgctcttgttccccagatgggaggaggaaacgaggagaaggccagggtgattcagacgctgctgttcgttgccggcatcaacaccctatgccagtcattctttgggactcgcctcccagcggtgatgggtggatcctacaccatcgtcgcacccaccatttccatcatcatggccggccgttacagcaacgaagcagaccctcgtgagaaattcttgcggaccatgcgaggaacacaaggcgctctcatcatcgcgtcgacaattcagatcgtgcttggtttcagtggcctttggcgcaatgtcgttaaattgctgagcccattgtctgctgtacctttggtttcgctagctggatttgggctatatgagctaggttttccaggggttgctaagtgtgtggaaattgggcttccggaaatcatcctaatgctcatattttctcagtacttacctcatgctgtccatgcggcaaagcctgtgttcgaccggttttctgtgattttcacaattgcgattgtatggctgtatgcgtacattctcacggttagcggtgcctacaagagtgcccgaacaaagacacaactccattgccgtgttgaccgctctgggcttgttggtggagctccttggattagtgtcccatatcctttccaatggggggccccaacatttgatgctggtgaatcatttgcaatgatggtggccgcatttgttgctcttgttgagtcatctggggccttcattgctgtgtcaagatatgcaagcgcgactatgatacctccttcagttcttggtcgtggcattggttggcagggcatcggtactttactgggtgcgttttttgggacagctaatggaactgcagtgtcagttgagaatgctggtctgcttgctttgacacatgttggcagccggagagtagtccagatatctgcaggcttcatgatcttcttctctgtccttgggaaattcggggcgatctttgcttcaatcccactgccgatattcgctgccctgtattgcattctctttgcatacattggtgcttgtggcctgagcttccttcagttctgcaacctgaacagcttcaggaccaagttcatcatggggttctccttgttcatgggcctgtcagtaccccaatacttcaacgagtacacgtccgtggctggctatggccccgtgcacaccggcgcccgatggttcaacgacatgatcaacgtgcccttctcgtcgaagccgttcgtggctgtgctggtggccttcttactggacaacacgatccaggtgcgtgacagcggcgtgaggagggacaggggctaccactggtgggacaagttccggagcttcaagacggacagccgcagcgaggagttctactcgctgcccttcaacctcaacaagtttttcccttccgtctgatcctgcagggtctgcacactcttcctcgcagccgcagtagccctgactggagtcaggcaagaaatgatcctatgcagatgatgctggagcatggactgatggcgttttgtacattcaggggtgaactgaactgtgcaggttgcaggggatagtgctctgggtagcatcagtattccctagtaaccgaaattgaaaaggccgcctgttaaacttctgcaaacactagcatgattacgtctcctagtgctactgttgtttagattggaaaacatggaactcaaccgtaagcatagatttaccttgaagcaacccttttcttttgcttagaaataatttgtgttggggattttttttcaccatgt

SEQ ID NO: 89362 - DNA, 103 bp, Zea Mays
caaacttgtagttttagccctccaatttggctcatatgaacttgctaccttcaatttgcctttgctacacctgtgctcatgttcatattaagagagttagttc

SEQ ID NO: 89363 - DNA, 555 bp, Zea Mays
gactcctcacactagaaacgcccacccctcccatttcctctcccccacgaaaccacctccaccgccattaaggccggccaatggcctcctccctccacccgacgccttctctgcttcctccctcctctataaagcctgtggccaagcccatggtgccggttcccatgctcccgtgctcacctcgcacctcccctgcctgcttccacaagaacgtcgccgctggtgccattggccatggagaccgagcgccgttcgccggagtcccaaagcctgagtgtcgtttcgtcaatccccactgccagtgttccactgccttgaccaccggtcggagctcctgcacagtgtcgaccatcccctgcccaccgtcctcttgtgtggacggtagaagaagcaagttttgcgatctacccctgcgagctacgtttaattttagatatgccactgctatagttcttccaatataaacgtgtacttctagcgcaaaaaaaaataaatataggattttatggttaattccatggttgtgtatgaagttttcctttgaaagattttaca

SEQ ID NO: 89364 - DNA, 1006 bp, Zea Mays
cccggagctgaattcggaaccccagcgcaagcggcgccgccagttcagcaagcaagccacatcagtccctacttggctcgtggcgctgagccacgcgtgcctgtgccgatcgatgggcaactgccaggcggcggaggcggaggccgtggtgatccagcaccccggcggcaaggtggagcggctgtacggggcggccaccgcagcggaggtcatgcgcggcaaccccgggcactacgtggcgctcgtggtgctccgcgtctcggcgggcggcggcaagcagggcgcggatccggacccctccgcgggcgcggtgtccgccggcgccggcgccggcaccaggatcaccaaggtgaagctcctgaagcccagggacgtgctgcttctggggcaggtctaccggctcatcacctcgcaagaggtggcgaaggcgatacaggcgaggagggaggacaagatgcggcggtgcggggccggcgaggtggtggtggtggacgaccagcggggtccgggacgacacgccgccgcggcgggcagccaagggcaggggcggtccagcgacgaccaggaagtgaagcggccggagaagtcggaccggcagcaccggaccggcggtagagccagagggcggcactggcagccgtcgctgcggagcatctccgaggcggcgagctgacgcgacgcgactgcaatgcaacctggacctcgaggagggggggactagtatagaatagaagcaggggactgcctgcttgggctaggagtgtagctgggctgtttgtgctgtacatttggattggggtacttgggtgggggagggagatggcttggcatggtacagtagcgatggatagaacaggcttgcaagaggtgagttaccgtgactcagctgtatgacaggtgattctatggagatctcgtctcagctgctggctgctcatgtgatcgatcatcgatgtcaatttaatctaaaatgaaaacaaaaataataggtttgtgaaatcggata

SEQ ID NO: 89365 - DNA, 230 bp, Zea Mays
aatgcatgcatgagtcaaacacatttcctgcatgcgcgtaaatttaggaaagagatgtatggcggtttctatttttaaatgctttattttcacaataaatataggatcgctgcaatatccatgcagctaggctcgtcaggaccagtttatgatatatactgatactaaatacgctacacgatgtagatatttatgtaattcgttacactgcataaaaatctgttacccgc

SEQ ID NO: 89366 - DNA, 118 bp, Zea Mays
ttactccttcgccgcctgtcctcccacaactaaactctctcttaccaaatttctgccataaagaaggaacaaataaacttagctacgaaaagctgccagttccaactctatcaaagca

SEQ ID NO: 89367 - DNA, 524 bp, Zea Mays
aaccgaagacagacacaacggtttgctttcaaatcatacaatccgaggtctcaaagtcgaagagggttaatcccctcccgttccactgttgcccaagtccaaccaccagcgagatggcggggaccgtgaccgcgaccgcaaccacggccaccaccgaggtcgggaccacagtgaccgcagccacctccgagatggaggccaccgcgaccgcagccacctccgagctggaggccaccgcgaccgcagccgccatcgggccgccttcagccatccccgaaagcacattccctccagacctccacttgcatgtgatctggcgtaagactgacaaatgatcactggcctttgttacctgtttttgtgcagaaggcccaatccctccaagcctccacttgcatgcactattccactgcctgattgtatgatgctgtcccaccattattgtttaattgtacccatcccaactggaattgtatttttgttttagtgattcaagcttgagtcagtaagggtgtgtttggatc

SEQ ID NO: 89368 - DNA, 2465 bp, Zea Mays
aaccgaagacagacacaacggtttgctttcaaatcatacaatccgaggtctcaaagtcgaagagggttaatcccctcccgttccactgttgcccaagtccaaccaccagcgagatggcggggaccgtgaccgcgaccgcaaccacggccaccaccgaggtcgggaccacagtgaccgcagccacctccgagatggaggccaccgcgaccgcagccacctccgagctggaggccaccgcgaccgcagccgccatcgggccgccttcagccatccccgataaatatatgcataaaaaccggttgcagtcatttgctgaacgaacatataagaaaacgccaatctacaaggttgagtctgaaggccagtctcatcagcctaagttcacatgcacagtggaagtgggtgatcaacagttctcatcaactggtagttttagtcgtaagaaggaagcagagcaggacgctgcgagagttgcttatgagatcttgacaacagttagtgagagtgacgttaaggaggcatttgagctaattgatcaggatgcagttttctgcaaatcaattctcattgaatttgctgtcaagacaaagaccactttgccctcttactctgtagtttgtgtttgtctcaaaaagcctttgaccctgttcgctgcaattgtggtgtttgatggaaatgcatatcatggtgaatctgcacccaacaagaaagatgcagagcagaatgcagctcgtgttgtgatcaagtcgattttagctaagcatgacacttgtatggtgagaattgttagatcgaagaaacaacttataactgctgtcagatcttctggaaacaccccagctacttttactcctatacagtttacacggcctgtttcatatgcagcatatggcagaccagatgatacaacacctgttttgccaaatgaatcttcctcattagctgttcaacgaggcatcaatgttgtacctgcagttgggacatctgtgaacccatcgtcagcaaatgtaagtcgctcaaagaagcgcaagggcagagttgaaggagcaggaggcaacgacacatgggttgccaagggtcattaacttctcagccatcaacatctaggatcctgtggtcaaccttttggcattcgattcgtcttggtacctctgcctgtcatgttgtttgctcaaaccactgcatatcgttgtaggttgcttttttaaccttaactttaattcgtaaccactgcattttgtaactgcataacaattcggctggatcagtttccaccaaagatataacgaacgaatggtaacagcctttatctacggaaagattgaacagtgatgccgacgaacggcccttgcgcactcgtggcactgaggcagctgccggctgcactcaaatctttttagtaaagtttgtggatttggcagccagagtctacggattaccatcagtactcactgagttctcgttttagtttgttatgggctgaaatatgaaatatttttaacgtgcctacaactctagttgtccatgtaaatcgaagatccttccacccaccctataaacccttctctgctccatcacgtatgaccgtagtttatccatatactcaactaaattctaaaacaccattttgcattgtagtttgtactgttcgcaaagtaaatatgagtataagaacgagtaacctgctagagatagtataaggtcattttttaaacacaatttctcatctatccattatatataattttagcatattgatttttcagactacgctgtagttgaaataaaaaattctcggtgaagatttgctctgtgattgagtttgatcaatctcatgtaaatgcgtattgttacttctgaaaagaggttgatcacatattgggaattggttaacttctgattaaccaggaattgttacttcagtcatattctcagctgtaatttcattgtcagcctcatccacaattttattactgcgacttgaatgaagccactctaacagggatgaaattatcctcaacactgactaactccatgtcaaaagaagaaaagcataattctgggtacatgtacacaaaaattgctcagctactgattaaaaatgtagcttaagaaactaggctgtaatcatttcctctcactcagaagagcctctgtatgtgtcgatcatgctgggtccaggactaacgagtgcaagaataacaaggctgctcaacaacaccagcagcattcccagggagttcataaacatggcttctgtggagaagcgctcaatcattttggcgctctgcataaagattgacttctccaggagtccagtcacacttgtggcgatagcaagaacatagatgaatataccaaagaagacatgccagggaagcaaaaatgcacggccacttcttgatccaccggggtaccaaaaggtccaaaacccagcagcccactgcagagattcgaacacaagg

SEQ ID NO: 89369 - DNA, 1625 bp, Zea Mays
aaatcatacaatccgaggtctcaaagtcgaagagggttaatcccctcccgttccactgttgcccaagtccaaccaccagcgagatggcggggaccgtgaccgcgaccgcaaccacggccaccaccgaggtcgggaccacagtgaccgcagccacctccgagatggaggccaccgcgaccgcagccacctccgagctggaggccaccgcgaccgcagccgccatcgggccgccttcagccatccccggctactgtctgtgtccagtgcaccaacatcttcctctgctgcaattattacctatactccagataaatatatgcataaaaaccggttgcagtcatttgctgaacgaacatataagaaaacgccaatctacaaggttgagtctgaaggccagtctcatcagcctaagttcacatgcacagtggaagtgggtgatcaacagttctcatcaactggtagttttagtcgtaagaaggaagcagagcaggacgctgcgagagttgcttatgagatcttgacaacagttagtgagagtgacgttaaggaggcatttgagctaattgatcaggatgcagttttctgcaaatcaattctcattgaatttgctgtcaagacaaagaccactttgccctcttactctgtagtttgtgtttgtctcaaaaagcctttgaccctgttcgctgcaattgtggtgtttgatggaaatgcatatcatggtgaatctgcacccaacaagaaagatgcagagcagaatgcagctcgtgttgtgatcaagtcgattttagctaagcatgacacttgtatggtgagaattgttagatcgaagaaacaacttataactgctgtcagatcttctggaaacaccccagctacttttactcctatacagtttacacggcctgtttcatatgcagcatatggcagaccagatgatacaacacctgttttgccaaatgaatcttcctcattagctgttcaacgaggcatcaatgttgtacctgcagttgggacatctgtgaacccatcgtcagcaaatgtaagtcgctcaaagaagcgcaagggcagagttgaaggagcaggaggcaacgacacatgggttgccaagggtcattaacttctcagccatcaacatctaggatcctgtggtcaaccttttggcattcgattcgtcttggtacctctgcctgtcatgttgtttgctcaaaccactgcatatcgttgtaggttgcttttttaaccttaactttaattcgtaaccactgcattttgtaactgcataacaattcggctggatcagtttccaccaaagatataacgaacgaatggtaacagcctttatctacggaaagattgaacagtgatgccgacgaacggcccttgcgcactcgtggcactgaggcagctgccggctgcactcaaatctttttagtaaaggttagttttggtcctgttccaatggcttcatactgttgatttacctctccatggcgtactagctgctgtgtccgcgtgccatcatctaacttgtttggttttgttacactgctgcagtttgtggatttggcagccagagtctacggattaccatcagtactcactgagttctcgttttagtttgttat

SEQ ID NO: 89370 - DNA, 79 bp, Zea Mays
gcggctgtgggtggatttgcacttgggggtgcagctgcgtctgagagtgcacctgcacttgtgggagctgttgtggctg

SEQ ID NO: 89371 - DNA, 1650 bp, Zea Mays
gaactttctacacccaacactttgcccatcgacgctggcagtgcgactcgcgccaatccaagccacaagtgtcgtctccccgagcgctacccgccactcctgacggccgcaaacggataacaacagccagtgaagcagagcagcagagaacacctgcaacgttcatcctgctccgtttgctcataagcacaggctctgaactgagttgatcagagacgagccatcgagagagagaaaaaaaaaatgcacgcgttcctctcttcgtcgatcccggccacttcgtactcgagatcatacttcttgccgcggccgcctcaggctcccgtgaagctcgtcgtcccgtcgtcagcgccgagggtcgccgccggtagaagaacagcttcggaagctggtcggtcgggacggtgcgtcgtcgcggtgtccgcgtcctcgtccccggccacggccgcggtggcgacggaggtgcccggggtgatgaaggcctgggtgtacgacgcgtacggggacgccggcgtgctcaagctcgacgaggccgcggctgtgccggccgtgggcgaggaccaggtgctcgtcaaggtcgtcgccgcggcgctcaaccccgtcgatgccaagcggcgggccggcaagttccaggccaccgactcccctctcccgaccgtgccggggtacgacttgtccggcgtcgtcgtcaaggtgggcagccaggtgaagaagttgaaggaaggcgacgaggtgtacggcatggtcagcgagaatccgctgcaggggcccaagcagtccggctcgctggcggaatacaccgccgtcgaggagaagctgctggcgctcaagcccaagggcctcgacttcgcgcaggccgccagcctgccgctagccgtcgagaccgccaacgagggcctggagagggcaggaatatccgccggcaagtccgtcctcatcctcggtggcgccggcggtgtcggctcccttgcgatccagctagcgaagcatgtctacggcgcgtccaaggtagctgcgacggccagcaccaagaagatcgagctgctcaagagcctaggtgccgatgtcgccatcgactacactaaggagaacttggaagagctaccggacaaatacgacattgtcttcgacggagtcggtcagggtgacaaagctgtcaaggtagtgaaggaaggcggcagcgtggtggttctcaccggcgccgtcagccctccagggttccggttcgtcgtcacctccaacggctccgtcttggagaagctcaacccgtacctcgagtcagggaagctgaagccactcatcgacccggaggggcccttctccttctcgcaggttgtggaggcgttctcctaccttgagaccgggagggcaaccggcaaagtagtcatctctcccatcccatgagagctgtagattgcagagcctgttcactggccatttgcgagccggcctccgattatatcaagagtgtcagtctaaaatggagttcatttcaggtatacagtccatggaattacaaagaggtgtacattgtgcccattgctgagacacttagccacgttccaggttttgtgtgaacgggtacatacagtaagaagcccctctgttgttacatacatgagttttctgtagcttcgaaaatcgctgatc

SEQ ID NO: 89372 - DNA, 840 bp, Zea Mays
cgaagactgaactcaaccttgcaatgctgctgcctctgctcttgatgtggaatgaagctagcgaagcatgtctacggcgcgtccaaggtagctgcgacggccagcaccaagaagatcgagctgctcaagagcctaggtgccgatgtcgccatcgactacactaaggagaacttggaagagctaccggacaaatacgacattgtcttcgacggagtcggtcagggtgacaaagctgtcaaggtagtgaaggaaggcggcagcgtggtggttctcaccggcgccgtcagccctccagggttccggttcgtcgtcacctccaacggctccgtcttggagaagctcaacccgtacctcgagtcagggaagctgaagccactcatcgacccggaggggcccttctccttctcgcaggttgtggaggcgttctcctaccttgagaccgggagggcaaccggcaaagtagtcatctctcccatcccatgagagctgtagattgcagagcctgttcactggccatttgcgagccggcctccgattatatcaagagtgtcagtctaaaatggagttcatttcaggtatacagtccatggaattacaaagaggtgtacattgtgcccattgctgagacacttagccacgttccaggttttgtgtgaacgggtacatacagtaagaagcccctctgttgttacatacatgagttttctgtagcttcgaaaatcgctgatcctcgatgacgcctggttccgctcggagaaggacgaccgacacgtctactgctttggggacagtctgattgggcagattgcaaatgccatgcggcgtgctgcaaacgccaat

SEQ ID NO: 89373 - DNA, 1974 bp, Zea Mays
caaccgtttagagacttcgggtaagacacgagcccaataccacggccctgccagcgatggccacattggcgccaccggcggtggaggtggagccggaggccgatgccatggccctggcgtcggaagccgcggcgcctgagctcccatcgtcgcattcgcagctcgattttttcaagaccagagttcaattattgtgtgaaagtaacacgagagattttgatgcttgggtatcattaataaatgctgcagagggaacatcagcagatgacatagaagttatgagcttggtataccataacttcttgttggaatttcctttgtgctacggttactggatcaaatatgcagctcataaggcacgactatgcacaaccagatatgtaatggatgtttatgaacaagctgtccatgctgtacctcattctgttgatatttgggtcaactactgtgagtttggtatatgtgcatttgaagaacctgctcatgtcagaagtttatttgagagggctttatctcttgttggaaaggactatttgtgttatcacctgtgggacaagtatatagaatttgaaagctctcagaagcagctgattcatcttgccaccatttttatcaacacactaaaatttcccacaaagaagttgcacatgtattatgaaagttttagaaagtttgtaacattattggaacaagaggtgacaagttgtgttgctgaaatattatcagaaaaagtgcatgcttctgaaatggtaggcactgaaggttctgaattagatatatcaactattattgctgacttatttgaccaaaaaggtgggcatcttagtcctgaagcattgaagcattacttatctgctggggagaagctctacaaaatgtccagcaagatttacaaagaaatctgttatttcgaggcatccataaaaaggcctttttttaatgtcaagacacttgatgatgatcagcttgaaaactggcaccagtatcttgactttgttgagaagaatggggattttgactgggctgtaaaactttatgagaggtgtttgatcccttgcgctaattattcggaattttggatccgctattcagagtatgttgacgctaaaggtggccgagaaattgcaaaccatgctctgggtcgagcatcatcatgttttgcgaaggaggttccagctttctgcatgtattatgcgttgtttaaagagcaaattggtgatgcactggttgcacgctctgtttttactaaaacaagaagttacttcacttcagggttttatgcaaatattaataggctggccaacatggaaaaacgaatgggaaatactaaagcagcttctgagatatacgagacagcaattgaggatgcaatgcagaagaacaacatagagttgcttcctgacctgtacagcaattttgctcagttcatatatgtggcaagtcatagcattattcaggctaaacaagtctttgtcgacggaataaatcgtgcaccttgtaaaccattgattaagggattcatacagttcatgagtacacatggagggcctaaagacatacctcttcttgattctgttatttctaatgccgtgactccaggatctgacgtatccacagctttaagcagagaggaccgcgaagatatctcactgttgtttttggaggttagagagtttccaatagctaagcaattatttcctctccacgtgtttctttagtagggggtgtacctgttacatttgtattttgcaaattggccatctatgtacttgtgcagttcgattgaatcaccaagcagatggtgacttggatgactagcccacttagcattctcggagtactaagttaccttttctcttagtcataaaaattttggtgctttttacaaagacagccaaatctttcttgcatcaaactccatgtacatgtacagatttaatttaggacatcaaaattgcatgtctgttaaagttc

SEQ ID NO: 89374 - DNA, 2495 bp, Zea Mays
atggggaatagccttcaagagactaagaagaggagaaacacagaacctttgatgattgctcgtgatcattctttagaagatacaatgaaactgaaacagacactcaaaaccgatgatttttctcttatagttgataaagagagtgagccacaagtagacaaggacattgtggattcaggaaaaagacatggggatgcgggagcgcagaaagctttagatttggtcaattcacacaaagagaccatcacgacagctcaggaatgcactgacatggtttacagtgaacatatcctggacaaaaacagaatagagaagcaaatgaattcacatgccaaagaagatattaatcaagacctaatcttgcatgaacaaaatgatgagaaaacaaattctcatgaggcggagactcctgtagctgagtcaggtgactgtgattctccttccaaagcaattgctagctctgagaacatcaattttcagggcaaggtcattgaggtatctgcaagcagccatctagaaacagtatgctcaaaatatgactcgccgtctggaccaaacatgcacaaagaaggaagttcttctggtccagctcgaatatctccagagctggaggaaaggcaccatgtggaggttcaggtaaaagtcgacacagagcatcatttttctgtcagtaatgcaaacctagagatatcttttgatggtccaaatccaactgaatgtgacaaggaaatctctgccattggtcatgggagtcaagactatattcaatcttcgcagtcacatcaactctcagcctgtgcaaaaccttggagcttggactcagcgaaaacaaaatcggatactgtcagtattcaagctcaacttcgaaaccagttggagaatgctcaaacatatcaatctaataacctttcacaaaacatgcaacaacaagagcttacaatgcctcacaatgttcaaacatctgcacaaattcaagatcaattgcttgcacagcctaatcacagaaaccaacagtatctccaaatgatgcaagggtatgcaacacaaatgggggaatattaccaacaacaactgtattacctgcaggctcagcacaatcaacagatgcagagtctgcaacagcaacagctcccgactgagcatcttcagcaaacttttatgcagcaagtacagcagctgaaccagcaattggtactttggcagcaacaagtgcaacagcagccacaagtagtactgcaacaggcactgccagttcagcaacttcctgacgaaaaacagggtcagtgtccttccggggatagcaaacacggccaaaataaacagcagcaacaagcacctcaaatggatcaacaaagccagcagttgcagcaacaacagcttctttatcttcagcagcaacaacaaatgtatcttatacagcagcagcagatgtatcaacaacagcaagctcagcagcaacagctcttacagcagcagttaatgcaacaacaacagtatgtactgcagatgccacagcaccagcaagactcagttcggcagcaacaacagcaactgtttgagcaacagcagcagcagatgatgcttcttcagcgacagcaacaacatattatgcaacaacagatccaaccgtacgtgcaacagcaacaaaaccaacaagggcccaaggatcagacttacaagtcaaatcatcaggatggaaggaacaggcaaatggagcatggacaactgtctgaagcttcacagagcgatggttccaaactgcgcagcggtgagcaatctgagttatcctacccgtcaactcctcagtcagaacgctcaaatcactaaggccttgttcggttattcccaatacacatgaattggatgagattggaaaaaattaagaagtttgacttgtttgggattcaaacccatccaatcctactcaatccacatagattgagagctaaccgaacaagcactaaatcactcaggatcatgtatcaaggaacatacttaagaaacatggaagcatgcatccatttccttgccctgctgccagtggaggctgattccatactgtgtcagagtgatgatgatgtgctgaccttcccgaatggtgatgaagctccatctccacggtgctctcttctttctaaattataaggcatttcaactttttttgagagtcaaaacatctcaattataatgccagctatggtttgatagcttggtattagattctcagtaatgctcgcatgtaaggggcgatgtgatgtgttggagacttcagtcaagcagttacatatcaagaacatatttggatgaagcgtgtgatatcttgtcatgactcatatgtatatgtatacgatatcctttatggtatagctctcggcatctgcactggcacgatagggctgattagacagcaactagcataagcctggaaatttacagttctgtcgtcagcctggtggtacacatttttgcctggatcaaactgccgttgtgctcat

SEQ ID NO: 89375 - DNA, 723 bp, Zea Mays
ccaatcttgattccctaaaacggttctcaaatcctgctgtacttgtctcctgtagagcgatggttccaaactgcgcagcggtgagcaatctgagttatcctacccgtcaactcctcagtcagaacgctcaaatcactaaggccttgttcggttattcccaatacacatgaattggatgagattggaaaaaattaagaagtttgacttgtttgggattcaaacccatccaatcctactcaatccacatagattgagagctaaccgaacaagcactaaatcactcaggatcatgtatcaaggaacatacttaagaaacatggaagcatgcatccatttccttgccctgctgccagtggaggctgattccatactgtgtcagagtgatgatgatgtgctgaccttcccgaatggtgatgaagctccatctccacggtgctctcttctttctaaattataaggcatttcaactttttttgagagtcaaaacatctcaattataatgccagctatggtttgatagcttggtattagattctcagtaatgctcgcatgtaaggggcgatgtgatgtgttggagacttcagtcaagcagttacatatcaagaacatatttggatgaagcgtgtgatatcttgtcatgactcatatgtatatgtatacgatatcctttatggtatagctctcggcatctgcactggcacgatagggctgattagacagcaa

SEQ ID NO: 89376 - DNA, 1192 bp, Zea Mays
gtacagtactatcatttccacggagccttccggataggatttgtctcccctccactgcgcctctccgtttccgccatggctccggccgccgccttcctgtcggcgtgcgccgctggttccattccccgtgcgcccttcctgatcccgaggcctcttcttctcccaattccgctctcccctgcgcgctgggaccgctcccgcagctgcagcctctttggcgtaggcgccaacactcgccgcgcgccaacccttcgacggaacgcctccacggagacggtggttccctacgtgccgggctctggcaagtacatagcgccggactacctcgtgaagaaggtgtcagccgaggaggtgcaggagctggtgagggggcagaggaaggtgccgctcatcgttgacttctacgcgacctggtgcgggccctgtgttcagatggcgcaggacatcgagatgcttgcagttgagtatgaggacaatgccctgtttgtgaaggtggacacagatgatgaatatgaatttgcaaaagacatgcaggtaagagggcttccgaccctttacttcttcagtccagaccaaaacaaagatgccatacgcaccgaggggctaattcctatggatatgatcagaaacatcattgacaacgagttatgacagctgatagatcactgtattaggaacataggcaatgttttatctttgtagcagaaaattttttgtcatgaggctaagcattaccgctaggtgctagtttgtgtgcttgatgttttcttttgctccaatggtaggtttcatctgtgcaaatccattctgctgtttctgtatcgtgttgtttattctcatcaaactctaggttgtgtcgtgctgttgtcggttaggcctgtgtgaccattttcatccctcgaatgataagatggctttggctcagattggtcctcaaattatgatagaaccaatttggtccttgaggtggcattctgggcttaaattttgtcgagaacatgggatgacttctgcttgcaaggaatgggagcagacaattcgattctcgcatggatggtttaagggaagttcatatttaccacatctctttattaacatgacgaacatggataagcagcaaagatcccgtctgcttgagctccaactccacaacatacccaagatcaacctcccaaccattatcctcacatag

SEQ ID NO: 89377 - DNA, 1188 bp, Zea Mays
gtacagtactatcatttccacggagccttccggataggatttgtctcccctccactgcgcctctccgtttccgccatggctccggccgccgccttcctgtcggcgtgcgccgctggttccattccccgtgcgcccttcctgatcccgaggcctcttcttctcccaattccgctctcccctgcgcgctgggaccgctcccgcagctgcagcctctttggcgtaggcgccaacactcgccgcgcgccaacccttcgacggaacgcctccacggagacggtggttccctacgtgccgggctctggcaagtacatagcgccggactacctcgtgaagaaggtgtcagccgaggaggtgcaggagctggtgagggggcagaggaaggtgccgctcatcgttgacttctacgcgacctggtgcgggccctgtgttcagatggcgcaggacatcgagatgcttgcagttgagtatgaggacaatgccctgtttgtgaaggtggacacagatgatgaatatgaatttgcaaaagacatgtaagagggcttccgaccctttacttcttcagtccagaccaaaacaaagatgccatacgcaccgaggggctaattcctatggatatgatcagaaacatcattgacaacgagttatgacagctgatagatcactgtattaggaacataggcaatgttttatctttgtagcagaaaattttttgtcatgaggctaagcattaccgctaggtgctagtttgtgtgcttgatgttttcttttgctccaatggtaggtttcatctgtgcaaatccattctgctgtttctgtatcgtgttgtttattctcatcaaactctaggttgtgtcgtgctgttgtcggttaggcctgtgtgaccattttcatccctcgaatgataagatggctttggctcagattggtcctcaaattatgatagaaccaatttggtccttgaggtggcattctgggcttaaattttgtcgagaacatgggatgacttctgcttgcaaggaatgggagcagacaattcgattctcgcatggatggtttaagggaagttcatatttaccacatctctttattaacatgacgaacatggataagcagcaaagatcccgtctgcttgagctccaactccacaacatacccaagatcaacctcccaaccattatcctcacatag

SEQ ID NO: 89378 - DNA, 1176 bp, Zea Mays
gtacagtactatcatttccacggagccttccggataggatttgtctcccctccactgcgcctctccgtttccgccatggctccggccgccgccttcctgtcggcgtgcgccgctggttccattccccgtgcgcccttcctgatcccgaggcctcttcttctcccaattccgctctcccctgcgcgctgggaccgctcccgcagctgcagcctctttggcgtaggcgccaacactcgccgcgcgccaacccttcgacggaacgcctccacggagacggtggttccctacgtgccgggctctggcaagtacatagcgccggactacctcccgaggaggtgcaggagctggtgagggggcagaggaaggtgccgctcatcgttgacttctacgcgacctggtgcgggccctgtgttcagatggcgcaggacatcgagatgcttgcagttgagtatgaggacaatgccctgtttgtgaaggtggacacagatgatgaatatgaatttgcaaaagacatgcaggtaagagggcttccgaccctttacttcttcagtccagaccaaaacaaagatgccatacgcaccgaggggctaattcctatggatatgatcagaaacatcattgacaacgagttatgacagctgatagatcactgtattaggaacataggcaatgttttatctttgtagcagaaaattttttgtcatgaggctaagcattaccgctaggtgctagtttgtgtgcttgatgttttcttttgctccaatggtaggtttcatctgtgcaaatccattctgctgtttctgtatcgtgttgtttattctcatcaaactctaggttgtgtcgtgctgttgtcggttaggcctgtgtgaccattttcatccctcgaatgataagatggctttggctcagattggtcctcaaattatgatagaaccaatttggtccttgaggtggcattctgggcttaaattttgtcgagaacatgggatgacttctgcttgcaaggaatgggagcagacaattcgattctcgcatggatggtttaagggaagttcatatttaccacatctctttattaacatgacgaacatggataagcagcaaagatcccgtctgcttgagctccaactccacaacatacccaagatcaacctcccaaccattatcctcacatag

SEQ ID NO: 89379 - DNA, 1951 bp, Zea Mays
cctccctcccaacccccgcgtcagtccttccgcgccgcaatcctccgtccatgccaggtccaacgccgtcttccacgccgccggcggcagccgcaaaccccagccacaactcgaggcggaagcggaagcccaggccgaaaacagcgcccccctctgccctaaatcctaactgggcgctgctccagtccaagctcccccaccgccccgctgcgacccacctcggcaagcgcaagcacgacggtgccactccggcgcccgcggagccgtctccaccacccacagcgcaggaggtcagactcgagccaacctccgacgataccagcttgactaaggtggtggcgattgattgcgagatggtcggggtaggatttgatggcggtaaaagcgccctcggcagggttaccttggttaattcctttggcaatattgtatatgatgaatatgttcgcgccgtggagcgaattgtggactaccggacatggattagtgggattagacctaagcacatgaacaaagccaaagaattctgggctgtgcagaaggaagtagctgagctgattaaaggaagaattcttgttggtcatgcactgcacaatgacctcaaggtgctgctactaagccacccaaagaaggacatcagggatacatcagaatatgaggttttcagaagggagagaaagaggcgatcattgaaggatcttgctgctgaagtccttggtgctaaaatacaacagaatgaacactgccccgtacgctctacattatatgcatgatttgtgttgtgttgttcttaatactttctgtactcttacagatcgaggatgcgagagctgcgatgctcatttacaacaagcacaagaaagcatgggagaagaacatgaaggaacagttcagattcaaaaagaagctcaagaagcgaggcaagaagaaaactactgagtccaatgggaatgatcccaatgtccccactgttcttctatgaagataaagaagtaacaaagggagaacttgtcctagttttggaaacaatatctgtaatgaaatttttgtagttcaacattaatgaaaattcaggttctgcaatgattgtctcaagtgaaaaaggtaacaggtgacaagaccgggttgctgagcattgggttctgcggactggtctgctgtctcgtagtcgtggcgatggttggcgtgagagcttgccgtttcctaactgtgaattggtgttggtgcaggggcagggagttggtgtccagcatgtgcaggatgagcaccatgagcacggagcaggcgaacatgggtatgggcccgaagacccacatgagcagcgtggtggccaggtagagcgcccggaggcccatggaccagaagttgccgccccggatgacggcgtgctgcacgtaggtcgccggcacgtcggagtcgagggtggtgacgaggaagctggcctgcacgtagtacctggcggagtggatgaagcaggtgaaggaggcgaggaagcagacgaggagggagatgtacttgacggtggccgtggactggctgcggtcgccgtagacgagctccgtcatgaacatcttggtggtgctgctgacccaggcgccgatgagggagcccagcgcgatggacagcgacgccaggttggtggacgccgagatgttgctggagatgacgctcagcgccagccccgtctcgtcgggggtcgcctgcaccatgcgccgcacccaggcgagcttgttgtggttctcgtagccgatcacggtcgtggcgggatgccggagaatgcggtagaggagtaggaggtggtagctcagcatcaccaccagcccgcatggcaccagcaccaggtccagggaccccttctccagctgcatcgtctcgtctcgtctctcttcaggctttctgctccctagctactaggcttcatttgctattgctttagcatttcgatgctatt

SEQ ID NO: 89380 - DNA, 1968 bp, Zea Mays
cctccctcccaacccccgcgtcagtccttccgcgccgcaatcctccgtccatgccaggtccaacgccgtcttccacgccgccggcggcagccgcaaaccccagccacaactcgaggcggaagcggaagcccaggccgaaaacagcgcccccctctgccctaaatcctaactgggcgctgctccagtccaagctcccccaccgccccgctgcgacccacctcggcaagcgcaagcacgacggtgccactccggcgcccgcggagccgtctccaccacccacagcgcaggaggtcagactcgagccaacctccgacgataccagcttgactaaggtggtggcgattgattgcgagatggtcggggtaggatttgatggcggtaaaagcgccctcggcagggttaccttggttaattcctttggcaatattgtatatgatgaatatgttcgcgccgtggagcgaattgtggactaccggacatggattagtgggattagacctaagcacatgaacaaagccaaagaattctgggctgtgcagaaggaagtagctgagctgattaaaggaagaattcttgttggtcatgcactgcacaatgacctcaaggtgctgctactaagccacccaaagaaggacatcagggatacatcagaatatgaggttttcagaagggagagaaagaggcgatcattgaaggatcttgctgctgaagtccttggtgctaaaatacaacagaatgaacactgccccatcgaggatgcgagagctgcgatgctcatttacaacaagcacaagaaagcatgggagaagaacatgaaggaacagttcagattcaaaaagaagctcaagaagcgaggcaagaagaaaactactgagtccaatgggaatgatcccaatgtccccactgttcttctatgaagataaagaagtaacaaagggagaacttgtcctagttttggaaacaatatctgtaatgaaatttttgtagttcaacattaatgaaaattcaggttctgcaatgattgtctcaagtgaaaaaggtaacaggtgacaagaccgggttgctgagcattgggttctgcggactggtctgctgtctcgtagtcgtggcgatggttggcgtgagagcttgccgtttcctaactgtgaattggtgttggtgcaggggcagggagttggtgtccagcatgtgcaggatgagcaccatgagcacggagcaggcgaacatgggtatgggcccgaagacccacatgagcagcgtggtggccaggtagagcgcccggaggcccatggaccagaagttgccgccccggatgacggcgtgctgcacgtaggtcgccggcacgtcggagtcgagggtggtgacgaggaagctggcctgcacgtagtacctggcggagtggatgaagcaggtgaaggaggcgaggaagcagacgaggagggagatgtacttgacggtggccgtggactggctgcggtcgccgtagacgagctccgtcatgaacatcttggtggtgctgctgacccaggcgccgatgagggagcccagcgcgatggacagcgacgccaggttggtggacgccgagatgttgctggagatgacgctcagcgccagccccgtctcgtcgggggtcgcctgcaccatgcgccgcacccaggcgagcttgttgtggttctcgtagccgatcacggtcgtggcgggatgccggagaatgcggtagaggagtaggaggtggtagctcagcatcaccaccagcccgcatggcaccagcaccaggtccagggaccccttctccagctgcatcgtctcgtctcgtctctcttcaggctttctgctccctagctactaggcttcatttgctattgctttagcatttcgatgctatttcttggttggagttggagttgatctgtgcagactgaactgccctcatggcttgtggcttgcgctttcatttggattgctagt

SEQ ID NO: 89381 - DNA, 115 bp, Zea Mays
tcaggatctcaaggtggcggtagcaacaacggcagggggagcaaatcgatttctgacagaaaaaacagaacgagtgggtaaaccttgcaattttttcattgccgcaagttcttgg

SEQ ID NO: 89382 - DNA, 603 bp, Zea Mays
gtttctggtactattagtttatatgagtttagaatttcacattgtaatttgaatacgatcaagatacttagtttattttcctatgttgaaggtatacaaataccttccaagagtaccacccagtgcaggcaacgttctcggtcaaataaagcgccactaaggaatcacttgcataaattgttgccttcgaggtgccatacttgataaagaatggaactggcaaagcttttggatcgtgtgccaatacctgtgaaagagggcttggaggaacccagtgcaaagatcaatggtctgctgcaagcgtatatttctaggttgaaactagacggcctttctcttaattctgatatcgtctacattagacagttctcgggtgttcttgcttggcccttctcagcactagtgtctactacactccaaaatgtgcttttaaccagggttgttgtctattgtacctcagttggggatttgccagtagaccagggatgctgatttaacatttttagtgtttcatgcaaagatggtataggatatatgcaattaattgcaacgatgtacggttgctatttccgtatacagttattgtgtccctctctttggata

SEQ ID NO: 89383 - DNA, 3302 bp, Zea Mays
tgcttaacacctccctcctcttgatgacggttaagcggaagcccccactcgctccatatcgccactccacacctcccccatgactcccctgctcctcctccgcctgctctgcctcgtccccctcgtcaccgccgcctgcgccgaagccaaactaccggcagatttcaccacgctcctcgccgcgaagttctccctcgctgaccccggttccgcgctcgacgcatgggactcaaggctctctccgtcgccctgccgctggccgcacatcctctgctccaaccgctccgtctctgatgccccggccgtcgcctctctcctcctctccaacctctctcttgcgggcgccttcccgtcctctctatgctctcttaggtcgctcgttcatctcgacctctccttcaactccctaactggacccctgctgccttgcctcgctgcgctgccgtcgctcacgcacctcgatctcgccggcaacgagttctcaggccaggtgccaggagcctatggcgcaggtttcccttaccttgccacgctcagcctcgctggcaacaacctctacggcgcattcccggggttcttgttcaacatcaccacgctccatgagctcctcctcgcgtacaaccccttcgcgccgtcgccgctgccggaggacgtctccggccccacgcagctcagccagctgtggctcgccgggtgcggcctcatcggtgaaatcccgccttcgatcgggagcctcagcagcctcgtcaacctcgacctctccacgaacaacctcaccggcgagatcccgtcaagcatccggagaatggacaacgtcatgcagatcgagctctactcgaatcggctcaccggaagcgtgccggaggggctgggggcgctcaagaagctgcggttcttcgacgcgtccatgaaccgcctctccggcgagataccagcggacgtgttcctcgctccgaggctggagagcctgcacctataccagaacgaactgtccggccgcatgccagcgacgttgggacaggcgccagcgttggcagacctcaggctgttcacgaaccgtctcgtcggggagctgccgccggagttcgggaagaactgcccgctcgagtttctggacttgtcggacaaccggatctctggccttattccagcggctctgtgcaacgccgggaagctggagcagcttctgatactcaacaacgagctgatcggtcccatcccggcagagctcgggcaatgccgaacactaacgcgggtgcgactgccgaacaaccggctgtccggacccgtgccgcagggcctgtggtccctgccgcacctgtacctcttggagctcgccgggaacatgctatccggcaccgtggacccgaccattgccatggcgaagaacttgtcgcagctgctcatttccgacaacctcttcactggcgcgctgccggcgcagatcggcaccctgcctgctctgttcgagctatcggccgcgaacaacatgttctccgggatgctgccggcgtcgctagcagatgtttctacgcttggtcggcttgatttgaggaacaactcgctgtccggcaatctgccgcaaggtgttcgacgctggcagaagctgacgcagctggaccttgcccacaaccacctcacaggaaccatcccgccagaacttggcgagctgcccgtgctgaactcgcttgacctgtcgaacaacgagctcactggcgacgtgccggtgcagcttgagaacctcaaactgagcctgttcaacctatccaacaaccggctcagcggcatcttgcctcctctgttctccggctccatgtatagggacagcttcgtgggcaacccggccctgtgccgcggcacgtgcccgagcggccgccaatccagaaccggccgtcgaggtctcgtgggccccgtcgccaccatcctcactgtggccagcgctatcctgctcctaggcgtcgcgtgtttcttctacacgtaccaccggagccacaacggtggacaccccgcggagcctggcggcggcgacggcggcggcaagcccaggtgggtgatgacgtcgttccacaaggtggggttcgacgaggacgacatcgtgggctgcctcgacgaggacaacgtggtcggcatgggcgcggcgggcaaggtgtacaaggccgtcctgaggcgcggcggcgaggacgtcgccgttgccgtcaagaagctgtggagcggtggcggcaaggcaacgggcagcactgccaaggaaagcttcgacgtggaggtggcaacgctgggcaagatccggcacaggaacatcgtgaagctgtggtgctgcttccacagcggcgactgccggcttctggtgtacgagtacatggccaacggcagcctcggcgacctcctccacggcggcaagggatgcctcctggactggccggcgcggcaccggatcatggtcgacgccgcggagggcctcgcgtacctgcaccacgactgcgggccaccgatcgtgcaccgcgacgtcaagtccaacaacatcctcctcgacgcccagctcggcgccaaggtcgccgactttggcgtcgccagggtcatcggcgacgggccggccgccgtcacggccatcgccggctcctgtggctacatcgctcccgagtactcgtacaccctgcgcgtcacggagaagagcgacgtgtacagcttcggcgtggtgatgctggaactcgtcaccggcaagaagcccgtcggggcggagctcggggacaaggacctggtgcggtgggtgcacgccggcatcgagaaggatggcgtggactcggtgctggacccgaggctcgccggcgagtccagcagggacgacatggtcagggcgctccacgtcgcgcttctctgcacgtccagcctgccgatcaaccgcccgtccatgaggatcgtcgtgaagctgctgctcgaggctgcgccgcgcgcgcggcctctggagagcaagccaaaggcggccgaggaggaaccgcttgatgtctgacgacatcgtcggacaagatctatcgcgtctcagaaataaggatcattggcagtgaattgctaacctccagtagcacacgcttcatccacatttcgcaatctatagctctcaaatgtcagtacagaatctagtgcgtagtagttgcttaaaaatgaacgcaacacaagcctgagttttctagggcttgactcatttcgtcacattatctatgatagtatattgttcacttgggtctctttaccatgcacagtaccagtttcttactgtactttgtagagggatattagtttatcttatg

SEQ ID NO: 89384 - DNA, 1761 bp, Zea Mays
cttctctcgctgcttcaacatctaggcttcccttctcggtggagagattggattgcagccatcctctcaacatccacctcaagggtctttgttaatggggccccgaatccccccttgtctcatggtcgaggacttagacagggagacccactctcaccattgttatttgtgcttgccattgacccattgcagaaaattttagaaatggcaacagagacgggacttctcagcaaaatcaggggccgctcgccttgccttcgtctctcattgcatgctgatgatgcggccttgtttattgcaccaaaaaaagaggagatcgagacaatactaaagttgctcgggctatttggtgaggcgtcagggctgttgacaaacttccataagtccacagttgtgcctatccgttgtcaaggcattgacctcaacgcggtcctaaggaatttgccagccagaagggctaccttccccttaaaatacctgggcctcccactctcatcatccggattgaagaagagcgactttcagttcttaattgacaaaatttcgaacaagctcagtggctggaatgggaaaaacctctctatggctggcagactgactttagttaagtcagtcattacctcccaagcaatctaccttctctctgctttacgggctcctaaggaaatattgaatctaattgactcgagaaggaaaaaattcctttgggttgggtgtgcacaaattacgggaggtaaatgcaaggtaaattggatccgttccgcaaggccaaaagagtgcggaggcttgggtatccttaatttaactaaatttgcaagggccctgcgtatgcgttggctgtggcaagaatgggcttcatcaactaggttctggacagccttggaactcccttgcacgacaaaagatcgacagctcttcatagcaacgacatcgatttcggtgggagacgggacaaaggtgtccttgaggaatgatgcgtgggtgcaagggttaagaccgaaggacattgcgcctctcattttcaatgtgtcctgaagaaagaacagatctttgagtgaagcgttgtggaatcatacttggattagggacctcaacctgttttctgttgaggtgacagaacaacacattgtggagtactgtaggctttggtcaattttgcaaagagtatccttgcaactgggtatttgcgactctattagttggaaactctcagaagaccgacagtatttggcgaaatcagcataccttgcccaattcctcggctcagagcttacaaatatgaactggatcatttggaaggtatgggcgccaccgaaatgtaaattcttcagttggttagccatccaaaatagaatttggacggcggatcgtcttgcgaagagggattggccccacaacgctacctgtgcattgtgtgggcaaactttggagtcaggattgcatctcttcgttgagtgtcgtttaaccaagcggatttggggagaggtggctgtatgggcagcggtggagggccttagtccaagtaactgggaccacaatgagtctatcctacaatggtggacgtccctagctacaactcaagattgcaacaggaagggcttgagaagcctcttaattctagtgaattggatcgtctggcgtgagagaaatgctaggattttcgactacaaatcctccacatgtgctcagattctcgcatctattatatctgaggcatcagcctggatacgtgcaggagccaaccaactggctaatctccta

SEQ ID NO: 89385 - DNA, 592 bp, Zea Mays
tcgcccccgcacgcgtcgccacccctccctccattccatcgtcttcgcttccactccccacgttccccgcctgcttcctccaggccccggccagatccgcgcgcccgcggggaagagggcctcctctcctccctcctcccttggctcgcgctctggtcgaggaggcggaggccggtgccggcgggcgggcggggaggtaggtagcagcttgcggttgcgggagggaagctgcgcgcgctaggctgccatggcggtggagaagacgctgcccggcgcgagtgcggggaggaccgtgctggtcacgggcggggcgggctacatcggtagccacgccgtgctgcagctcctcctcgcgggcttccgcgccgtcgtcatcgacaacctcaacaactcctccgagctggccgtccgccgcgtcgccgcgctcgcgggggaccactcccgcaacctctctttccacaagattgatctccgtgacaagggagcactggaaatggtttttgcttctacaaggtagaatcaccttctttccgctgtactagccctgttcaacttcacgacattaacgaatcaagctgaatcttagaattaa

SEQ ID NO: 89386 - DNA, 574 bp, Zea Mays
ggttaatgattttgaatcaaatatttagcgatatcattgtgacatctgtgattcacatgcgtcatggaatcatcccatctttaatcaggctattgtttttacaggtccgagattacatccatgtggttgaccttgctgacggacatattgctgcattgcagaagctttttgagaactctagcatagggtgtgaagcgtacaaccttggaaccggaagaggtacatctgtgctggagattgttaaagcatttgagaaggcttctgggaagaaaatacctctgatttttggtgaaagacgcccaggtgatgcagagattctgttttcagagactactaaagcagagagggagcttaactggaagtaagtcatatatcgaggtataatatgttatcatgacaaaatggctttattgtatattatatgatcaacttcgtcttcctctagagcaaaatacggtattgaagagatgtgccgcgaccaatggaactgggccagcaagaacccttatggctatggatcacctgactctatcaagcagaatggtcaccaaacaaacggatccgctgactcctc

SEQ ID NO: 89387 - DNA, 1126 bp, Zea Mays
ggttaatgattttgaatcaaatatttagcgatatcattgtgacatctgtgattcacatgcgtcatggaatcatcccatctttaatcaggctattgtttttacaggtccgagattacatccatgtggttgaccttgctgacggacatattgctgcattgcagaagctttttgagaactctagcatagggtgtgaagcgtacaaccttggaaccggaagaggtacatctgtgctggagattgttaaagcatttgagaaggcttctgggaagaaaatacctctgatttttggtgaaagacgcccaggtgatgcagagattctgttttcagagactactaaagcagagagggagcttaactggaaagcaaaatacggtattgaagagatgtgccgcgaccaatggaactgggccagcaagaacccttatggctatggatcacctgactctatcaagcagaatggtcaccaaacaaacggatccgctgactcctccaagcagaatggccaccgcacaaacggttcaactgactcacccaagcggaacggccaccatgcgtatgggtctgctgactcacccaagcgcaacgggcactgcgtttttggatcatcagacctcaagccgaatggtaatggccacctgcgctgagcagaactgtttggcctgtgagctccctgtacattcggttgcgatgtgagctccctgcacgttcggtcgaggtctatcgtgaacccactatccgagattgatgtggatcattgggttgacaggtcatacagtatagagccggtggcagaggaattcctgtttgctgtgggtaaagcttatcttctgctttcgtgttttttcttgcttctttcgattatggtgtaggaatgtggtcataatgtattagctgattatcctttccctgctaattggactttattacgcttcattaagtttggctgattactgtttaacggggaaaagttgcacctgtgtacgattatttatttgtacctgtaatatttatggagaactagcctcgccgcaaatagccctgatgaattcagctgcagtttattcccagattggactgttgtttaatgtgaatgtaaatatgatgcctctgcaaacattgagcagat

SEQ ID NO: 89388 - DNA, 1632 bp, Zea Mays
ctaaggaaaacgtgcacatatttgtacgtgttctccgctagtaccgttcctcttcctcgtgcagggccaaataaagagcaggtaaatggaaaacaggcagataggaacgtagaagagaacacgatccttttttacagcctagaagagaagaattgcatcactacgacgctattccatccctcttgcatcaatcgaccccccttcaattcgatccatcgatctgatgttctgcagtttcaagctaaggagcctcctcttcctttggcgagctctaacgctggcgttggtctcctttatctcccaattcctctggtgaaccatcgctgcgacggcttggatttggttctgggttcgcagtctgcctcttgtgatgcatcaccatcgccggtggagggccgacgacgatgggatcaagggattactatgagatcctcaacgtcgaccggagcgccatcgatgacgacctccgcagggcctaccggcggctggccatgcggtggcaccccgataagaaccccgccggcaaggcagaggccgagacccggttcaaggagatcaccgaggcgtacaacgtgctcagcgacgcagacaagagggcggtgtacgaccagtacggggaggagggcctccggggagatgtgccgcagcccggcggcggcggaggcaccgacgacatcttcgcggagttcttcgggagcacgccgttcacgtactgcagcacggccagcagcgggaggcagcccccaccgcccccgaagtgggacagcgggtttggcagggcgttccggcgcgcccagggtggtggtggtggtgccgcgtcgtcgagaatggcgccgccgccgccgcccgtggagagcaggctggcgtgcaccctggaagagctctgcatgggcggcaccaagaagatgaggatctcccggaacttggtcgatgccagcgggaagacgaagacagagtccgagattttgtggatcgaggtgaagcccggttggaagaagggcaccaaaatcacgttcgccggtaagggcaaccagcagtggaaccagctccccgccgatctggtcttcgtggtcgacgagaagccccaccccgtgtaccggcgtgacggcaacgacctgttggccgaggtccgtgtgacgctcgcccaggcgctgggcggcacggtcgtcgtcctcaccgcgctcgacggccgcgagctcgccgtcgacgtgggcggcggcggcgaggacgaggacgatgaggacgacgcgcccgtggtgtgccccggctacgagctggtgctgcctggcgaaggcatgcccatcgcgcgcgagcccgggcgccgaggcaacttaaggatccggttcgacgtcgcgttcccggagcggctcacgcgccggcagcgggcagagatcaagcgcgcgctcgaggacagtaccggtgtctgctagcaagtagcaatacaggtgtgatgtgtccgctgtccgcttggcgatgacagtgtggcgttgtgctcctgctgctgcgtgcgcctcgaacccttgaatatgggaaacagattcgtggcctcgtgggtgttgacgtccattttataaacactacactggaatgaactatttggtggtgctctctacaaggtgcggatggtttgtg

SEQ ID NO: 89389 - DNA, 1052 bp, Zea Mays
ccgtccgcgtgcttttcgtgacttgcgttcccgggcccgaccccgagcgagtggaaacgcacccgcgccccgagcagaaacgcacgtcgccaactttgccgtgccgttacggcggtttggctaccatgccacgccatttttatgttttttatttttactgctcctccccgtcctcttgattccactccatgctgctgcctctcatggttttcttttctttattaataaaaagaaatgtaccgcttcatttgacgccgcactgcactggtcccgagtacagcgctagccctcttcctcttcctcgctatacagtacttcccagcagagcagagagctgagacgaaaacgagaagatcccatccactaccgcccggtcgccgtcctcccttcccgccgcgcccctcctgttccacccgctccgctttgctcgccgcagatcgccctcaggattttattccgccctccgtctccgggctcgcttggatcgagatgggcgtctgcgcgtccaaggccgcctactcctgctgctgctgctgctgctgccgcgagccgcacaacggggttactaacgagaggaccgatgctgtaacggatgacgaggaggcatacgacctgcctgcgttccaggagtttaccttcgagcagttgcggctagctacatcagggtttgcggtggagaacatcgtgtctgagcagggtgagaaggctcccaatgtggtatacaaggggaagctccatgcccagcgccgcatcgccgtcaagcgcttcaaccgctctgcctggcccgacccgcgccagttcctggaagaagctagatcagttggcctgctccgaagcaaaaggttggcaaatttgcttggctgttgctgcgaaggtgatgaaaggttgcttgttgcagaatacatgcccaatgatacgctcgcgaaacatcttttccactgtgagtcctttgaaaacattctatcataaagctgcaaaggcctgatgggcatgattaagtcagggatcagtccacacaagtgactcgatcacgcttcacccgagcctagcct

SEQ ID NO: 89390 - DNA, 832 bp, Zea Mays
gctgctcatactcttaagaccgatccgacccaaagccaaacccgattgccctcgtagtcgtttgtcatcgcgcgaccgattaccccgccgccgccgcgtcggcagcggcgatggcgtcgtcgttgtcgcgggcgctgctccgccgcgtcgcagaactggctagaggacgcctccgcgccaaccaccgcatgctctcatccgcgtcgtccaccgccgccatcgagagggcttcgcagttgccggcggaggcccaggccgtgcgcatgacggagggttgcgtgcggagattaaaagaattacatgctaaaaaaccatctgctgaaggtaagatgctgcgcttaagcgttgaagctggtggatgttctgggttccaatattctttcgctcttgatgacaagaaaaatgcagatgacaggttttttgagactgatggtgttagattggtcgtggatgacatctcatataatttcgtaaaaggtgccactgtggattacgaggaggaacttatacgttcaacatttgtggtttcaacaaatcccagtgctgttggaggctgcagttgcaagagttctttcatggtgaaatagcttcaatgttaccttgaagagatcaataaccggagttctgtagcgaaacatacgctttagatctgagtgtacaattggtattttttggtagctcttgagatgtttctttttgagttttattaccttaaagagaacaataaccagaaatatcaatcacaaactgtctggttcaatttgtatctctaacatgtgaaatgatgacaaatttatgtacatgtaatcttatggctattaacatttgactc

SEQ ID NO: 89391 - DNA, 878 bp, Zea Mays
ttggcctcatccctaatgttctgcataacatctttgacatttggaagctccctaaaaaacatatatttttatgcctcaaaattttgcacttcgctgtttttatattaaatttctctgcactcatggttttatggtctttctttccaagagttgctttggctacatcgttatcattgaaatagtgcaatgaatttttaaatgctcaagaattattatgatttgaatctttatctcggggtaaaagcatactatttttgtttttggtgtatcacctggccaatctaacaacacatgttttatgttacagacgcagttatcacagatggaaaatatttaatactacgactgctacagaggaaacaagatacctgtactgatggaatatgagtcgtgtattattccttgggaacttgaacttatcatatggagttgtaaattattttgtcatttcgacttatgttcacttcatcattgccttgtatgatcatgtaattcagagaccgcagagcaaaggtgggctggggcttagggcttatttggaaacaaagtattttaaaactatagttttggaataatatggttttaagatgttatgacataatcgtagtatattttacatgactcttaacaatacatttgtagacaaagtatcttaaactgtgatatttagtatacatgtgcaatgttagttataggcaaaaacttttggttggcgtgaagtttcaagtatcatggtatctacaaaaccatggtatttaaaacagtgttttttataatgtagtcaaacattttttggcaaaaatattatggtattatctaatactatgatttttcttaaaactttaaaaatactttgcttccaaacacctccttacatg

SEQ ID NO: 89392 - DNA, 1616 bp, Zea Mays
cggcacgcaacaccgcttccgcccttttctgatttctccatcggactccgatgccgaaccccaaacaccgcttccgccctttctgtttaccaaatccacacggtcccttataaaaacaaaaacaaaacaaatccacacggccccaatccacacccgcgtgccgccgccgccgccgccctcctttctgataaacgccctccccatcggcgtatggccattgaccacatcgtccgcgccgccctccgccaccgaggaaaccgcaagcagtcatcagcaatgccgccgtacgcaccgagagagcagcggcacgacgggccgccaggggaagtcccgccgatgagcgccaaggacgtgaccgccatcgaagccctcctcggatactgcttcatcgacaaatctcttgtcgagctggcgctgacgcatggctccttctactggcccaaccgccccggggatacctacgagcgcctcgagtacctcggcgacggcgtcctcacctgcctcatgtcgcgcgaggtcttccgcacctaccgcacgctccagcccggcccgctcacaaggctccgcgccgctaacgtcgacactgagaagctcgcgcgcgttgccgtccaccgcgggctccaccgctttttgagacacaaggcacctaaacttcaagatcagatctgttttttcatagaagaaatgcgcaaatatccagttcactcaaatggactattggatcctcctaaagttctgtgtgacattgtggaatctcttattggtgccatatacttggactccaacttcgaccaagaggaggtttggcgggtctttcgaacattggctgatccacttattggcttagagacattaggcaagcaccctgtaagcgagctttttgagttttgccaaaagactcaccgaggggtgaaatttctgaaagacgaatgggataagagtttgaaggttcaggtgttgattgatggtgaggtagttggaagtgctatttatggtccaaagaaggagatagctcagaaccgtgctgcgaaggatgctctggataagctaaaggacacacatggacacacccaaagtgaatcagcatcagtagatgtttctgaggcattggacgaattagacaacacccaaagtgaatcagcatcagtagatgtttctgaggcattggacgaattagacatagctggaacactaaattgagtgacatatatagaaatgcataataggtgcaattaatggcaatgaagttttgaatcatagcaacacttggttggtccattttcattgaatttctgtgttgctatgtaattatctctactatatgaaaataccagttttcatggttccatggtttctaccatcaaagtgctccataatatttaggtaaaaagggtaaaattataggtatatgagaattcgaactatggtcgttggctccaaacccatatatatacccacctagttaacaacagaacacgtataaataaaaaaaacgtagttttgtacgtgcactttgctagtcgatattcaaacaccggttaccatcaattttgatgacaaactacaaagaaattgttcattcgatttaatttcaaggctaacctttaattttgaag

SEQ ID NO: 89393 - DNA, 1466 bp, Zea Mays
acacggccccaatccacacccgcgtgccgccgccgccgccgccctcctttctgataaacgccctccccatcggcgtatggccattgaccacatcgtccgcgccgccctccgccaccgaggaaaccgcaagcagtcatcagcaatgccgccgtacgcaccgagagagcagcggcacgacgggccgccaggggaagtcccgccgatgagcgccaaggacgtgaccgccatcgaagccctcctcggatactgcttcatcgacaaatctcttgtcgagctggcgctgacgcatggctccttctactggcccaaccgccccggggatacctacgagcgcctcgagtacctcggcgacggcgtcctcacctgcctcatgtcgcgcgaggtcttccgcacctaccgcacgctccagcccggcccgctcacaaggctccgcgccgctaacgtcgacactgagaagctcgcgcgcgttgccgtccaccgcgggctccaccgctttttgagacacaaggcacctaaacttcaagatcagaagaaatgcgcaaatatccagttcactcaaatggactattggatcctcctaaagttctgtgtgacattgtggaatctcttattggtgccatatacttggactccaacttcgaccaagaggaggtttggcgggtctttcgaacattggctgatccacttattggcttagagacattaggcaagcaccctgtaagcgagctttttgagttttgccaaaagactcaccgaggggtgaaatttctgaaagacgaatgggataagagtttgaaggttcaggtgttgattgatggtgaggtagttggaagtgctatttatggtccaaagaaggagatagctcagaaccgtgctgcgaaggatgctctggataagctaaaggacacacatggacacacccaaagtgaatcagcatcagtagatgtttctgaggcattggacgaattagacaacacccaaagtgaatcagcatcagtagatgtttctgaggcattggacgaattagacatagctggaacactaaattgagtgacatatatagaaatgcataataggtgcaattaatggcaatgaagttttgaatcatagcaacacttggttggtccattttcattgaatttctgtgttgctatgtaattatctctactatatgaaaataccagttttcatggttccatggtttctaccatcaaagtgctccataatatttaggtaaaaagggtaaaattataggtatatgagaattcgaactatggtcgttggctccaaacccatatatatacccacctagttaacaacagaacacgtataaataaaaaaaacgtagttttgtacgtgcactttgctagtcgatattcaaacaccggttaccatcaattttgatgacaaactacaaagaaattgttcattcgatttaatttcaaggctaacctttaattttgaag

SEQ ID NO: 89394 - DNA, 344 bp, Zea Mays
ttttttatttttattttttatacatattaaaacaaactcttcaccacatgattggcgaccaaaggaagcattacggaaataatatccataatatgctgagcacgacactcggatacccagttaaaagacggaacgtaaattttcatggcacgccactgggacttgccagcaccataaatgtaaggtttgtcctccgattcagcagaattaacatgaggatacaatctagcttagatcataagcatcttcaactgctctgagccgcctcaatcttggtttccgctgactccgtctcctcagcctcaacagccttgtccgcagcttgaggtttcgacacttcttct

SEQ ID NO: 89395 - DNA, 917 bp, Zea Mays
aaatcactcacgcagacgcacacaccactgacacgcacagaagagcagacagggagagagtcgagggaggcggtcccaatggcgacgctgccgcagcggttcaagctgctggcgacgcggtgcgcggcgggggcgccgagcccgtcgcgcagccccgcgccggcttacgcgggggccgccagccctgggtaccgcctgcggcgccgggtccggggcaccggggccaccaccagcgccaggcgtcgcggccgccttcgccgcttcctatgccgcggccgcgaggccggggcagagacgctagcggccacgcggcaggaggacgacaggaagccgcttttcggcggccgaccgggcggcgggggccgcacgctgcgagatctgttcgtcgcgtccccggaagccgggcgccgccacagcgggtgccgctgcgactgcggcgaagacgaagacgacgacgaggacggaagggcgggcggtgccagcgcggatcccggcgccggcgtcggcgcgtggcgagtgggccggaggttcggctccggcgggctgcggagcctgctcatgcgacggagctggcggccggtgctggtggccatcccggagggggacggcaacaagatcgagctcggagccatcgaggaataaacagaaacggctgggggaattcttccgccgccttctatccctcgtaccgtagctctgttcttcttccgccgttttcctcttcgttgttggcttccccttcccgtaggcgcagtgccggtcctgacattagagaggcccaggacaagacttataaaggaggctctttataataataattattacacgtaaatatagtgtgtatatattgtcaataaagtatttatatgtatctgaaaaagttattcatattaaataaaaataattaaaatatagcc

SEQ ID NO: 89396 - DNA, 1262 bp, Zea Mays
aaattctactcggtccactaattcagctaagtgactagaatagcgaaataattcgccatagctgaatctggctcgataatcgcaagaactgcgaagtcggcgagaggttcgtgacttacacaatttatcgagcaccctaatgcgcctcgtactagcacatcaatctatgcaacgatcgaactattttggataatttatcagcttaccgtttcaatagccgactcgaatccgcgagatcggtaatgattttccgatcgaggcaatttgccgagcgcatggcaggtgccacacgaacttcacgctgctagcttcatcttcacccgattcttggaatttcttgctgacgcgcggaacaacgacgactttcgattcaagtctggagcgagctggtgaggtggggttgagcaggggatgacgggtttgacgactcgacggtaaacgcgaacacgccgaaacccgatggatgaagagcgagcgcacacgaggcaagcaacacggatttgaagcatggagaaattgcccacagcgaaatgagccgagcaaggagcgctcgtgaactttatggcggaatcggtagcagccgatgccagagcgcacggcgaggggacttcggcggtgcggacagcaagcaggcgattcgacggcgtgggagttcgacacgccgtggcgagcaaacaaaatttgtgcgcgcggcaaacaaagaaagagcgagctgcgcgtgcgcagagagttcgacaatccacagcaggggcaaacgcagtccgagcagggaccagcagcagatatggacgccgatcttgaagacgcggctgcgcgcggaagctgtaacaacacgcgatagagacagagctccgcggctgggaaaaaggctcaacgccgccatggttgggagcttagggcagttagccgagctagagcaagggacgacacgggccatcacaaactccggcgaggaccagggagatccggttgagcctggcaaggaaaggcgcggagaagagaagccgcgagggagaaacgcactgcgcagggggttcggctatgcgcaggagcgagcaaggagatggacgtcgagcagagcgcggccataggcaagatggaggaagcgtcggccggaagatgcaccagcgacgtatcctgtattcctgtgcgacggtgaaatatcagatggaaggaagatagacagcggctagaggataagaacgagagcttgagcggctgctggtggactccatccgagctgggcgacggcggcggcaaaa

SEQ ID NO: 89397 - DNA, 1841 bp, Zea Mays
aaacaatcctggcctcaagaggccagacaattctcccgactcgcctccgacggacgccagccgcaacgccgcgaaccccatcctcgggagcctctcctccgacggtcgatggcccggctccctgacgccatcctcgcaacgccaaccccagcctcgagaccgtcatctccgacgccatccccaagtgcctccgccgctgctccacatcctcttcccctctacaaggtgattctgatatcatcaagactacaccaggtgagcagtaaaagagtggtggcagtacatcctctctagagttgttactcaggtttgtatgttggcagcagtatgctcctagttaccttctaaagtttctcctaatttctcaatgggtttgtgataacttgccttttgttcttagtttcatgagtcatatatatatatatatataagagctatctccatgttttgcatgcttaagttccttataagagctatctccacttctctatatatgggttcttgggagcagcaagttagacaatttttgttagatgaggaagaagatgatgatgagttgttctttgctattctccctgctataattccatatctctcagaagagaaagagcccatccacacctcctcactcactggtgctaaaaaggttagagaaattcttgaaggacatgagagttggtgcaaatctgagtttcaaatggagccagcaatattcgaaaccacaacaaattttcttagaagagagaatttactacgagacacacgaggagttatcgttgagaagcagcttgggatgttcatgtacatgatctccaacaatgctagtaaccaaatgctacagaaggcttttcaacatagtggagagactatccataggaaaatatctgaagtatttgatatagttcccacactaactcaatgttttgtgaagcttcctagctctatccaaactcacaccaaaattgctacagattctaggttcatgccatttttagaactgcattggtgcaatcgacggcacacatatacccaccaccatagcagaacatagggcccctccatatagaaacatgaaaggaactctttcacacaatgttatggtagcctgcgactttgacctcaatttcacatttgtttcatgtggatgggaggggtcagcctcagatgcaggggtgcttcgatctgctattagcaaaggatttagtgtgccagaaggaaagttttatgtagtagatggtgggtatgcaaatacatcatccttcattgcaccatatagaggggttcgataccatctcaatgagtttaggaggcgtcgttcatcacaaagtggttatgcgaactacaaagagctgttcaaccatcgccatgcaattctctgtaaccatatagagagggccatcgatgttctaaagaaaaggttcccgattctaaaagtaggcacatttcgtcccatagagaaccaaatcaagatcgcaactgcaactattgcatttcacaacataattagagggcaaaatggagacaaaagatggcttgacaaccaaccagattacatctctccaagtcaatatgttgatgtcccagagggagataccaactatctcaatgacacagaatcaagtgatggaagctctctaagagatcagatcacacttcagatgtgggctgcctacaatagctagatgggtgcttataatggcttctagtttgtcatgtagctagttgcctagttcgtcggttatgtactattattacttatgaagtctttatggtttgtagtttgtcatgtagctagttgctgagttcatttgttatgtacaattattacttatgaacttaaa

SEQ ID NO: 89398 - DNA, 743 bp, Zea Mays
agtccaaatcccttgagtactaattcacttgatttggatggacaagaaaccacaagtgtgttcaatctgtctactaatgctcactctgtcccagtcagtactaatgaacccaccgaagctcagtttgtcccatctaatcaagaatcaagccaaagagaaggtgccagtgggagaaagcgtaagcaaagccatgttggattagccttgaaagttatgtggagtttaaaaagatcaattttctattagcaagtgtcaggctgaattgaaagaaatggatggattaacagtcgtggacaaatcatatgctttggagcttttcgtatctacgacaaacagagagattttcttaacaacaacagagcatgatgttagagaaatttggctcaagcacaaaattaggttgcttcatggcagtgatgcatggcctggacaattgatatgaggaaatttgagtgcaaagtgaaagcaactcatggagccgacatggagaagaaaaatgcaacgacagtctacatgaagcttgtgaaaaaagagttaaatctcaaagttcataataaagagacttgtattacagttttatgttatattgtttatctttttgtgatggatggatgtattacagttttagtttgttgttgcttcagtttgctgcccatacttcagtttgcttgacaaactattgtgatgatggataaagcgtgatgtgatgacggccaaccagtttactacttcagtttgctttc

SEQ ID NO: 89399 - DNA, 2287 bp, Zea Mays
cttccttgagggaagcagaaccgccttgaccgacgtgactacggtacggcccccaaacccggaacggcagcgaaacgacagccatgcttctccagccgatccccaccgccaccctcgccgctcgaccgagatcaagcgaagcttccttcccctttcgttgccaccgccgccgccgcgtgctcctcccagtccgcgccgacttgaccccgatctccctctcggcctccgccccctcgcggccggccaagccggccgtttgcaccgccgacgagctccactacgcctccgtcgacggtgccgggtggcgactcgcgctctggcggtacaggccaccgcgcaatgctcccgtcaggaatcacccgctgatgctgctgtcgggagtcgggacgaacgccgtcggattcgacctctcacccggggcttcgtttgcccgtcacatgtctagccaaggatttgatacatggatagttgaagtaagaggtgctggtctgagcatgcgtgaatatgatgattctactccatctggctcagtcacttttgaggatgtctctagtggtattcaacctcttaatagtacattcgaggccacttccattcagagttctggtggctatgctagtgattgtgatgaccttggaatagttgctttggatgaaccacctttacttgctgaactttctaatttttttgatcgaatctcaaaactcatggaagaggctgtagttaatggaaattttcatgagatcacagaaaaagtttctgttctctcagaaatggtagagagctctaccattattggtccagtgagagaagaaagtctacgtcttcttaagaattttcaggaccagttggattcatgggagcgttttgtagcaacacaaatggatctgacttctgagtataattgggacttcgaccattacctagaggaggatataccagccgcgctggagtatattaaacaacacagcagagcaaaagatggcaagttgcttgccattggacactcaatggggggaattttgttgtatgcaatgctgtcaagatctggttaggcactgatactgctctttatctgagctttcatgcagactcctgtctccttcacattttatcccttttgttctgaagcacacatgaagtgtgtatttctatgagtatttaattaattgagccagcaagcatcttttgtatgtattagttaagttgcccatttgttgagaaatatcataattctttagagcttctatgtatcaccatatcttatttgtttttccccacccttcaaggttttgaaggagtttcgtcaaatttagcagctattgtcactttggcttcttctgttgactatacaacatccaattcatcgctgaagctgttactgcctcttgctcatcctgcacaagctcttaatgtccctgctgttccattgggtacattgttggcagcggcgtatccgtgggcatctggtccaccatatcttttttcctggcttaatcctcaaatatcagctcaggacatgatgcatccggagttgctggctaagcttgtttcaaacaacttttgtacagtgcctgcaaaggttgttctgcaacttacaaccgctttcagggaaggtgggctgtgcaaccgaaatggaaccttctcatacaaggatcatttgcgagagtgtcagactcctgtccttgcattggctggagataaagacctaatctgccctccagatgctgtttatgaaactgtgaaactcattccgaatcacaaggtggactatagagtgtttggaaagccacaaggcccgcattatgcacattatgacttggttggaggccgactggcgatcaatgaggtgtatccatgtatcatagagttcctctctcgtcatgatggttattgatttgattatatgatgctaatacagagtaacttacaacaccatgttcatctcaaaggttttttaagttgagctgaacagtcttttccatggcttggccagaaaataggtgcatgcacgaattctcgtgtgtgttgaagagagagaaaaaaacacgagctcatctgatgtatccttgtaacaagcatcggttagtgcttctctgtttcccgttttgaggaaaagttaatggtaatcttgtagaaaaagggttgaaaaaatttacagtaggcttacatgtactcccacgaacaagaagccaagatcaaagaaattgtacaattgatctcttactatgatgtaacacttctaatataatgatacgcatctcacatttccacttgcattttcatg

SEQ ID NO: 89400 - DNA, 2068 bp, Zea Mays
cttccttgagggaagcagaaccgccttgaccgacgtgactacggtacggcccccaaacccggaacggcagcgaaacgacagccatgcttctccagccgatccccaccgccaccctcgccgctcgaccgagatcaagcgaagcttccttcccctttcgttgccaccgccgccgccgcgtgctcctcccagtccgcgccgacttgaccccgatctccctctcggcctccgccccctcgcggccggccaagccggccgtttgcaccgccgacgagctccactacgcctccgtcgacggtgccgggtggcgactcgcgctctggcggtacaggccaccgcgcaatgctcccgtcaggaatcacccgctgatgctgctgtcgggagtcgggacgaacgccgtcggattcgacctctcacccggggcttcgtttgcccgtcacatgtctagccaaggatttgatacatggatagttgaagtaagaggtgctggtctgagcatgcgtgaatatgatgattctactccatctggctcagtcacttttgaggatgtctctagtggtattcaacctcttaatagtacattcgaggccacttccattcagagttctggtggctatgctagtgattgtgatgaccttggaatagttgctttggatgaaccacctttacttgctgaactttctaatttttttgatcgaatctcaaaactcatggaagaggctgtagttaatggaaattttcatgagatcacagaaaaagtttctgttctctcagaaatggtagagagctctaccattattggtccagtgagagaagaaagtctacgtcttcttaagaattttcaggaccagttggattcatgggagcgttttgtagcaacacaaatggatctgacttctgagtataattgggacttcgaccattacctagaggaggatataccagccgcgctggagtatattaaacaacacagcagagcaaaagatggcaagttgcttgccattggacactcaatggggggaattttgttgtatgcaatgctgtcaagatctggttttgaaggagtttcgtcaaatttagcagctattgtcactttggcttcttctgttgactatacaacatccaattcatcgctgaagctgttactgcctcttgctaatgtgtttgttatcaggctcatcctgcacaagctcttaatgtccctgctgttccattgggtacattgttggcagcggcgtatccgtgggcatctggtccaccatatcttttttcctggcttaatcctcaaatatcagctcaggacatgatgcatccggagttgctggctaagcttgtttcaaacaacttttgtacagtgcctgcaaaggttgttctgcaacttacaaccgctttcagggaaggtgggctgtgcaaccgaaatggaaccttctcatacaaggatcatttgcgagagtgtcagactcctgtccttgcattggctggagataaagacctaatctgccctccagatgctgtttatgaaactgtgaaactcattccgaatcacaaggtggactatagagtgtttggaaagccacaaggcccgcattatgcacattatgacttggttggaggccgactggcgatcaatgaggtgtatccatgtatcatagagttcctctctcgtcatgatggttattgatttgattatatgatgctaatacagagtaacttacaacaccatgttcatctcaaaggttttttaagttgagctgaacagtcttttccatggcttggccagaaaataggtgcatgcacgaattctcgtgtgtgttgaagagagagaaaaaaacacgagctcatctgatgtatccttgtaacaagcatcggttagtgcttctctgtttcccgttttgaggaaaagttaatggtaatcttgtagaaaaagggttgaaaaaatttacagtaggcttacatgtactcccacgaacaagaagccaagatcaaagaaattgtacaattgatctcttactatgatgtaacacttctaatataatgatacgcatctcacatttccacttgcattttcatg

SEQ ID NO: 89401 - DNA, 192 bp, Zea Mays
ttttttttgttttctgatttatatggcctcgaaatgctatcctatataatgaacctaaccgtaagaaaaaatgttctagtaaatccccactttaacattaataagttatggcataaccacatatcagtacctctttcttttataggaaaacaaggctaaatataccattgaaattttaattcaggtgtctcc

SEQ ID NO: 89402 - DNA, 1405 bp, Zea Mays
atggaggagggggcggcatacctggagccctggagagcggcctacctggagggcggatggaggagggagaggagggaggagggggcggcatacctggagccctggagagcggccgacggcgtctggcggctcctggcggctggagcgtctgcgcgcgatggctggagcgcgcaaggcctctggctgctcgtgggcgcggtggatagcaggccggttgggtgggtaaagatggttggttgtaaatcaaggggttatttgttcacacgtgcacatttaggactttgttcagatgaacttcatgtctgcggtgacccagctgttgttccccttatccagcgaattcttgaagataccggtgatgtagttacgactccaaagcaatgcagcaagcatgctaaattgcgtaacagatgcatacaggtcatgaaactgaatgagcatggagtaaccaaagacctaggcctctcaatctctggcggggccacgggagtctccaacaccggaactgacaccggcgccggcggagacgtgggcttcgacgggtgccatcttccggagatgaccttctccactgcgctcgcctgggcgatgcgtgtcgcggaccagatctggcatgcggcgatgcgcacggggagggaggccgggttgcgggaggggatttgcggcgtgggtgggcggttccctgatatcggtggccagcagccgactttgtggttagtccattctcttccggcgggatacgttgcggaccacttcgctcagctgctcgcgacggcggcttgtaccctgatttgggtggggaggatgcctgatatccagctgggatgccacactataaggtcccatggtaccaaagtggcaacattacacatgtatgactggattatacttttatgtcttgctgtacttgatggactgttaaacataatcgagccctttcaccgctttgttggacgcgacatgatgaccgacttgagttatcccctcaagggcaacacaatcccattttgggctgttccactgattgcgatcgtgctacccttggttatctttgctgtcatttacttcaaaaagaaaaatgtctatgatttacaccacggcatactaggtatcttgtattcagtgcttataactgctgtgatcactgatgcaattaaggatggtgttggtcgccctcggccagatttcttttggcgttgttttcctgatggcaaacctaattttaataatataaccaccgatgtgatatgccatggagaaaagagtgtcatcaaggaaggtcataagagtttcccaagtgggcattcttcatggtctttcgctggtctaggttttcttgcatggtacttggctggaaaacttaaagcttttgatcgcaagggtcacattgcaaaactgtgcttag

SEQ ID NO: 89403 - DNA, 1325 bp, Zea Mays
gtcggtaacaaaagtctggcgctgaacctggaagagtttttccggctatcgttgtgcttatctcttcccaaggagagacccaccgcccattatccaaccctactacttgcttttgtctccactctcagtctcctctccaaatctccaaccctacttgttccagaaaagaaaaagaactatccatcccgctgtgagccaagccagcccagctccggcgactggcagatgtttcagggtccccgtccgtttgccgcaggttccctgatatcggtggccagcagccgactttgtggttagtccattctcttccggcgggatacgttgcggaccacttcgctcagctgctcgcgacggcggcttgtaccctgatttgggtgtggttcttgtagagcggtcgtgtcgtccgagcgttgatctgaaccagcgcagtttatcagggacgtagcactgtagcagtgagttggggaggatgcctgatatccagctgggatgccacactataaggtcccatggtaccaaagtggcaacattacacatgtatgactggattatacttttatgtcttgctgtacttgatggactgttaaacataatcgagccctttcaccgctttgttggacgcgacatgatgaccgacttgagttatcccctcaagggcaacacaatcccattttgggctgttccactgattgcgatcgtgctacccttggttatctttgctgtcatttacttcaaaaagaaaaatgtctatgatttacaccacggcatactaggtatcttgtattcagtgcttataactgctgtgatcactgatgcaattaaggatggtgttggtcgccctcggccagatttcttttggcgttgttttcctgatggcaaacctaattttaataatataaccaccgatgtgatatgccatggagaaaagagtgtcatcaaggaaggtcataagagtttcccaagtgggcattcttcatggtctttcgctggtctaggttttcttgcatggtacttggctggaaaacttaaagcttttgatcgcaagggtcacattgcaaaactgtgcttagtttttctgcctctacttgtcgcgtcacttgtggctgtttctcgagttgatgattactggcatcactggcaagatgtctttgccggcggcatcataggtcttacagttgcttcattctgttacctgcagttcttcccatatccctttgacaatgatggtacctttttcgcccttctctacaatatatgctgatgagatattaatacattttattacatgttcctgttcctatttatttgtagccctatggccacac

SEQ ID NO: 89404 - DNA, 1999 bp, Zea Mays
gtcggtaacaaaagtctggcgctgaacctggaagagtttttccggctatcgttgtgcttatctcttcccaaggagagacccaccgcccattatccaaccctactacttgcttttgtctccactctcagtctcctctccaaatctccaaccctacttgttccagaaaagaaaaagaactatccatcccgctgtgagccaagccagcccagctccggcgactggcagatgtttcagggtccccgtccgtttgccgcaggtccaccctctaattctttctccttttattttactttttaataaataaaaggggtttcctctttacaagattcttatgccgatgacccgatcgggttctttttatacggagtgttttttttttgaaacgaagtacaggttccctgatatcggtggccagcagccgactttgtggttagtccattctcttccggcgggatacgttgcggaccacttcgctcagctgctcgcgacggcggcttgtaccctgatttgggtgagcggtcgtgtcgtccgagcgttgatctgaaccagcgcagtttatcagggacgtagcactgtagcagtgagttggggaggatgcctgatatccagctgggatgccacactataaggtcccatggtaccaaagtggcaacattacacatgtatgactggattatacttttatgtcttgctgtacttgatggactgttaaacataatcgagccctttcaccgctttgttggacgcgacatgatgaccgacttgagttatcccctcaagggcaacacaatcccattttgggctgttccactgattgcgatcgtgctacccttggttatctttgctgtcatttacttcaaaaagaaaaatgtctatgatttacaccacggcatactaggtatcttgtattcagtgcttataactgctgtgatcactgatgcaattaaggatggtgttggtcgccctcggccagatttcttttggcgttgttttcctgatggcaaacctaattttaataatataaccaccgatgtgatatgccatggagaaaagagtgtcatcaaggaaggtcataagagtttcccaagtgggcattcttcatggtctttcgctggtctaggttttcttgcatggtacttggctggaaaacttaaagcttttgatcgcaagggtcacattgcaaaactgtgcttagtttttctgcctctacttgtcgcgtcacttgtggctgtttctcgagttgatgattactggcatcactggcaagatgtctttgccggcggcatcataggtcttacagttgcttcattctgttacctgcagttcttcccatatccctttgacaatgatgccctatggccacacgcatacttccaacagctagctgagacacacagtaatggtaatgcaaactcaatcaacataagacctacagagtttgaagatgaaccagatgaccatggtgacattgtcctgagggacaccagccctatcttggagtcaatggagtctggcaggagaccatgaagaagcatgccactgggtttgtccaaggtgccctgaagcgtgatgagttttgtggtttcatcatgtagccgtccaacgtaaaaacagtatggaggtatatctaccaccacctgatgatttgatgaaccacagactgtcgtggttagctgtaaatgacagcgaatgtttatgtttctagtgacaatgtgaatatttggttttgcacggctgtgatatggaaagtttgtttcgaggttaccctttggcagtaatgaaattgtccgacgacctgcaggtggattgcaaacggtctctagggggtaatcactccatccaagatgagatgagttggtgtattatgggtctattccttaaatttggtgtgatgaatttattcctcatattagtactaactcacacgaggaatttgatggtgatggattaaatcatttcataaatcaaacaaaaaataggactaatttagtatgaggaa

SEQ ID NO: 89405 - DNA, 1889 bp, Zea Mays
gtcggtaacaaaagtctggcgctgaacctggaagagtttttccggctatcgttgtgcttatctcttcccaaggagagacccaccgcccattatccaaccctactacttgcttttgtctccactctcagtctcctctccaaatctccaaccctacttgttccagaaaagaaaaagaactatccatcccgctgtgagccaagccagcccagctccggcgactggcagatgtttcagggtccccgtccgtttgccgcaggttccctgatatcggtggccagcagccgactttgtggttagtccattctcttccggcgggatacgttgcggaccacttcgctcagctgctcgcgacggcggcttgtaccctgatttgggtgtggttcttgtagagcggtcgtgtcgtccgagcgttgatctgaaccagcgcagtttatcagggacgtagcactgtagcagtgagttggggaggatgcctgatatccagctgggatgccacactataaggtcccatggtaccaaagtggcaacattacacatgtatgactggattatacttttatgtcttgctgtacttgatggactgttaaacataatcgagccctttcaccgctttgttggacgcgacatgatgaccgacttgagttatcccctcaagggcaacacaatcccattttgggctgttccagtatgttctgctctgctgattgcgatcgtgctacccttggttatctttgctgtcatttacttcaaaaagaaaaatgtctatgatttacaccacggcatactaggtatcttgtattcagtgcttataactgctgtgatcactgatgcaattaaggatggtgttggtcgccctcggccagatttcttttggcgttgttttcctgatggcaaacctaattttaataatataaccaccgatgtgatatgccatggagaaaagagtgtcatcaaggaaggtcataagagtttcccaagtgggcattcttcatggtctttcgctggtctaggttttcttgcatggtacttggctggaaaacttaaagcttttgatcgcaagggtcacattgcaaaactgtgcttagtttttctgcctctacttgtcgcgtcacttgtggctgtttctcgagttgatgattactggcatcactggcaagatgtctttgccggcggcatcataggtcttacagttgcttcattctgttacctgcagttcttcccatatccctttgacaatgatgccctatggccacacgcatacttccaacagctagctgagacacacagtaatggtaatgcaaactcaatcaacataagacctacagagtttgaagatgaaccagatgaccatggtgacattgtcctgagggacaccagccctatcttggagtcaatggagtctggcaggagaccatgaagaagcatgccactgggtttgtccaaggtgccctgaagcgtgatgagttttgtggtttcatcatgtagccgtccaacgtaaaaacagtatggaggtatatctaccaccacctgatgatttgatgaaccacagactgtcgtggttagctgtaaatgacagcgaatgtttatgtttctagtgacaatgtgaatatttggttttgcacggctgtgatatggaaagtttgtttcgaggttaccctttggcagtaatgaaattgtccgacgacctgcaggtggattgcaaacggtctctagggggtaatcactccatccaagatgagatgagttggtgtattatgggtctattccttaaatttggtgtgatgaatttattcctcatattagtactaactcacacgaggaatttgatggtgatggattaaatcatttcataaatcaaacaaaaaataggactaatttagtatgaggaa

SEQ ID NO: 89406 - DNA, 1788 bp, Zea Mays
gtcggtaacaaaagtctggcgctgaacctggaagagtttttccggctatcgttgtgcttatctcttcccaaggagagacccaccgcccattatccaaccctactacttgcttttgtctccactctcagtctcctctccaaatctccaaccctacttgttccagaaaagaaaaagaactatccatcccgctgtgagccaagccagcccagctccggcgactggcagatgtttcagggtccccgtccgtttgccgcaggttccctgatatcggtggccagcagccgactttgtggttagtccattctcttccggcgggatacgttgcggaccacttcgctcagctgctcgcgacggcggcttgtaccctgatttgggtggggaggatgcctgatatccagctgggatgccacactataaggtcccatggtaccaaagtggcaacattacacatgtatgactggattatacttttatgtcttgctgtacttgatggactgttaaacataatcgagccctttcaccgctttgttggacgcgacatgatgaccgacttgagttatcccctcaagggcaacacaatcccattttgggctgttccactgattgcgatcgtgctacccttggttatctttgctgtcatttacttcaaaaagaaaaatgtctatgatttacaccacggcatactaggtatcttgtattcagtgcttataactgctgtgatcactgatgcaattaaggatggtgttggtcgccctcggccagatttcttttggcgttgttttcctgatggcaaacctaattttaataatataaccaccgatgtgatatgccatggagaaaagagtgtcatcaaggaaggtcataagagtttcccaagtgggcattcttcatggtctttcgctggtctaggttttcttgcatggtacttggctggaaaacttaaagcttttgatcgcaagggtcacattgcaaaactgtgcttagtttttctgcctctacttgtcgcgtcacttgtggctgtttctcgagttgatgattactggcatcactggcaagatgtctttgccggcggcatcataggtcttacagttgcttcattctgttacctgcagttcttcccatatccctttgacaatgatgccctatggccacacgcatacttccaacagctagctgagacacacagtaatggtaatgcaaactcaatcaacataagacctacagagtttgaagatgaaccagatgaccatggtgacattgtcctgagggacaccagccctatcttggagtcaatggagtctggcaggagaccatgaagaagcatgccactgggtttgtccaaggtgccctgaagcgtgatgagttttgtggtttcatcatgtagccgtccaacgtaaaaacagtatggaggtatatctaccaccacctgatgatttgatgaaccacagactgtcgtggttagctgtaaatgacagcgaatgtttatgtttctagtgacaatgtgaatatttggttttgcacggctgtgatatggaaagtttgtttcgaggttaccctttggcagtaatgaaattgtccgacgacctgcaggtggattgcaaacggtctctagggggtaatcactccatccaagatgagatgagttggtgtattatgggtctattccttaaatttggtgtgatgaatttattcctcatattagtactaactcacacgaggaatttgatggtgatggattaaatcatttcataaatcaaacaaaaaataggactaatttagtatgaggaa

SEQ ID NO: 89407 - DNA, 1813 bp, Zea Mays
gtcggtaacaaaagtctggcgctgaacctggaagagtttttccggctatcgttgtgcttatctcttcccaaggagagacccaccgcccattatccaaccctactacttgcttttgtctccactctcagtctcctctccaaatctccaaccctacttgttccagaaaagaaaaagaactatccatcccgctgtgagccaagccagcccagctccggcgactggcagatgtttcagggtccccgtccgtttgccgcaggttccctgatatcggtggccagcagccgactttgtggttagtccattctcttccggcgggatacgttgcggaccacttcgctcagctgctcgcgacggcggcttgtaccctgatttgggtgtggttcttgtagagcggtcgtgtcgtccgagcgttgatctgaaccagcgcagtttatcagggacgtagcactgtagcagtgagttggggaggatgcctgatatccagctgggatgccacactataaggtcccatggtaccaaagtggcaacattacacatggcaacacaatcccattttgggctgttccactgattgcgatcgtgctacccttggttatctttgctgtcatttacttcaaaaagaaaaatgtctatgatttacaccacggcatactaggtatcttgtattcagtgcttataactgctgtgatcactgatgcaattaaggatggtgttggtcgccctcggccagatttcttttggcgttgttttcctgatggcaaacctaattttaataatataaccaccgatgtgatatgccatggagaaaagagtgtcatcaaggaaggtcataagagtttcccaagtgggcattcttcatggtctttcgctggtctaggttttcttgcatggtacttggctggaaaacttaaagcttttgatcgcaagggtcacattgcaaaactgtgcttagtttttctgcctctacttgtcgcgtcacttgtggctgtttctcgagttgatgattactggcatcactggcaagatgtctttgccggcggcatcataggtcttacagttgcttcattctgttacctgcagttcttcccatatccctttgacaatgatgccctatggccacacgcatacttccaacagctagctgagacacacagtaatggtaatgcaaactcaatcaacataagacctacagagtttgaagatgaaccagatgaccatggtgacattgtcctgagggacaccagccctatcttggagtcaatggagtctggcaggagaccatgaagaagcatgccactgggtttgtccaaggtgccctgaagcgtgatgagttttgtggtttcatcatgtagccgtccaacgtaaaaacagtatggaggtatatctaccaccacctgatgatttgatgaaccacagactgtcgtggttagctgtaaatgacagcgaatgtttatgtttctagtgacaatgtgaatatttggttttgcacggctgtgatatggaaagtttgtttcgaggttaccctttggcagtaatgaaattgtccgacgacctgcaggtggattgcaaacggtctctagggggtaatcactccatccaagatgagatgagttggtgtattatgggtctattccttaaatttggtgtgatgaatttattcctcatattagtactaactcacacgaggaatttgatggtgatggattaaatcatttcataaatcaaacaaaaaataggactaatttagtatgaggaatgaggtgatgattgattaactcattctataaactaaacaaaaaaaatgaaaagataa

SEQ ID NO: 89408 - DNA, 1594 bp, Zea Mays
tccaaccctactacttgcttttgtctccactctcagtctcctctccaaatctccaaccctacttgttccagaaaagaaaaagaactatccatcccgctgtgagccaagccagcccagctccggcgactggcagatgtttcagggtccccgtccgtttgccgcaggttccctgatatcggtggccagcagccgactttgtggttagtccattctcttccggcgggatacgttgcggaccacttcgctcagctgctcgcgacggcggcttgtaccctgatttgggtgagcggtcgtgtcgtccgagcgttgatctgaaccagcgcagtttatcagggacgtagcactgtagcagtgagttggggaggatgcctgatatccagctgggatgccacactataaggtcccatggtaccaaagtggcaacattacacatgtatgactggattatacttttatgtcttgctgtacttgatggactgttaaacataatcgagccctttcaccgctttgttggacgcgacatgatgaccgacttgagttatcccctcaagggcaacacaatcccattttgggctgttccactgattgcgatcgtgctacccttggttatctttgctgtcatttacttcaaaaagaaaaatgtctatgatttacaccacggcatactaggtatcttgtattcagtgcttataactgctgtgatcactgatgcaattaaggatggtgttggtcgccctcggccagatttcttttggcgttgttttcctgatggcaaacctaattttaataatataaccaccgatgtgatatgccatggagaaaagagtgtcatcaaggaaggtcataagagtttcccaagtgggcattcttcatggtctttcgctggtctaggttttcttgcatggtacttggctggaaaacttaaagcttttgatcgcaagggtcacattgcaaaactgtgcttagtttttctgcctctacttgtcgcgtcacttgtggctgtttctcgagttgatgattactggcatcactggcaagatgtctttgccggcggcatcataggtcttacagttgcttcattctgttacctgcagttcttcccatatccctttgacaatgatgccctatggccacacgcatacttccaacagctagctgagacacacagtaatggtaatgcaaactcaatcaacataagacctacagagtttgaagatgaaccagatgaccatggtgacattgtcctgagggacaccagccctatcttggagtcaatggagtctggcaggagaccatgaagaagcatgccactgggtttgtccaaggtgccctgaagcgtgatgagttttgtggtttcatcatgtagccgtccaacgtaaaaacagtatggaggtatatctaccaccacctgatgatttgatgaaccacagactgtcgtggttagctgtaaatgacagcgaatgtttatgtttctagtgacaatgtgaatatttggttttgcacggctgtgatatggaaagtttgtttcgaggttaccctttggcagtaatgaaattgtccgacgacctgcaggtggattgcaaacggtctctag

SEQ ID NO: 89409 - DNA, 1463 bp, Zea Mays
atccatcccgctgtgagccaagccagcccagctccggcgactggcagatgtttcagggtccccgtccgtttgccgcaggttccctgatatcggtggccagcagccgactttgtggttagtccattctcttccggcgggatacgttgcggaccacttcgctcagctgctcgcgacggcggcttgtaccctgatttgggtgagcggtcgtgtcgtccgagcgttgatctgaaccagcgcagtttatcagggacgtagcactgtagcagtgagttggggaggatgcctgatatccagctgggatgccacactataaggtcccatggtaccaaagtggcaacattacacatgtatgactggattatacttttatgtcttgctgtacttgatggactgttaaacataatcgagccctttcaccgctttgttggacgcgacatgatgaccgacttgagttatcccctcaagggcaacacaatcccattttgggctgttccagtatgttctgctctgctgattgcgatcgtgctacccttggttatctttgctgtcatttacttcaaaaagaaaaatgtctatgatttacaccacggcatactaggtatcttgtattcagtgcttataactgctgtgatcactgatgcaattaaggatggtgttggtcgccctcggccagatttcttttggcgttgttttcctgatggcaaacctaattttaataatataaccaccgatgtgatatgccatggagaaaagagtgtcatcaaggaaggtcataagagtttcccaagtgggcattcttcatggtctttcgctggtctaggttttcttgcatggtacttggctggaaaacttaaagcttttgatcgcaagggtcacattgcaaaactgtgcttagtttttctgcctctacttgtcgcgtcacttgtggctgtttctcgagttgatgattactggcatcactggcaagatgtctttgccggcggcatcataggtcttacagttgcttcattctgttacctgcagttcttcccatatccctttgacaatgatgccctatggccacacgcatacttccaacagctagctgagacacacagtaatggtaatgcaaactcaatcaacataagacctacagagtttgaagatgaaccagatgaccatggtgacattgtcctgagggacaccagccctatcttggagtcaatggagtctggcaggagaccatgaagaagcatgccactgggtttgtccaaggtgccctgaagcgtgatgagttttgtggtttcatcatgtagccgtccaacgtaaaaacagtatggaggtatatctaccaccacctgatgatttgatgaaccacagactgtcgtggttagctgtaaatgacagcgaatgtttatgtttctagtgacaatgtgaatatttggttttgcacggctgtgatatggaaagtttgtttcgaggtt

SEQ ID NO: 89410 - DNA, 591 bp, Zea Mays
agcatttgttttcagcatatcattttgaagcatgcatgacctttgcgagcatgttgtttatactttctcaatctcagtatggctgagagggttttctgctgagtgtttgcaacaatatgctaatttttgcccttcagtaaataaattgctgaatctatttctgttctttgtcacctactccagggtctttcgctggtctaggttttcttgcatggtacttggctggaaaacttaaagcttttgatcgcaagggtcacattgcaaaactgtgcttagtttttctgcctctacttgtcgcgtcacttgtggctgtttctcgagttgatgattactggcatcactggcaagatgtctttgccggcggcatcataggtttgctagtatttgatgctcttttgtatttagcatttcgaacacccttcacaatcaaaagtcaatcatggagtgtcattctcttatttcttttcaggtcttacagttgcttcattctgttacctgcagttcttcccatatccctttgacaatgatggtacctttttcgcccttctctacaatatatgctgatgagatattaatacattttattacatg

SEQ ID NO: 89411 - DNA, 611 bp, Zea Mays
ataaacatcgcaatacaaacagtttcaaggtcatccttaaaggaaggaaaaggaagttgtgggagagtatcatggacactattggtccacatgtactcatagttgatgacacctttgttgatcgccttgtggcatctcgagttttgaagacttgtaacattcaagtgacaatggtggagggcccaaagcaagccttagattttctagatgtggagaatgatgtaaatttgattctgaccgattattgtatgcctggtatgactggatatgatctcctaatggaggtgaaggaatcaccaaagctaaagcacatcccagtggtggtcatgtctagtgaccacatccctcaaagaatgcaaaagtgcatggatgcaggggcaaaggaatacatcataaagcctatcaaagctattgatgtgcctcgtatcttgagctatatttgataagatgatgtgggaagagaatatagaacaagacaactcactatagggttctattttcaattgtcaaggaattattctaagaagaccttgcatggtcttgttttatgtcattaattctatgtaatttgcttcaacttcaattatattatttttgttatgtccaaataa

SEQ ID NO: 89412 - DNA, 111 bp, Zea Mays
atgaaggttggaacccagatgaagcagctgaacaagtctctcagggagaagagggccaagctctacatcgtccgccgctgcgttgtcatgctcctccgctggagtgattga

SEQ ID NO: 89413 - DNA, 2069 bp, Zea Mays
aaaccaatcacgtccttgtcaccaaatcgacgttttgctggtaactgccaaacaacgttgatcacccaaccaagtggcaaacccccggaccctgtccacggtgcacccacccgtaggccccacgtgtcaccctctaatatacgcagcctccgttcaagtttagagtcacccgctaatatacggagcagctgcaatgctgaacgctgcacacctgtaaaagatagagctatcccctccctccccatcccttggagccagcaactccactcctgagtcctcacctcgtgctgcccgcgccatttccacctcccactgtcctttcgtccagtccccagccctgcagcccaaccgtggaggttctggaaggcggtgtatcccttctagaaccttctcgagatgcagagcgccgcggctttccggccatgccccactcggctgctggtgagcagcccttgtcgccccctcctctcggcccgcccgcttcgtgcctccgccgctggcgccgtcgctaccagaagcagcgccgtgggccctcgcggtctggggctcgggctgctgccagcctcgcccgatcgggatggcaagtgccgccagcgacaggtgtcatgcagcgcggccggggatgctgtggcggccccgaaggcggaagaaggaggcgggctcatgaagacgctgtggctcggctcgctcttcggcctctggtacctgttcaacatctacttcaacatctataacaagcaggtactcaaggttttcccataccctataaacatcacagaagttcaatttgctgtcggaactgtagcagctctgttcatgtggatcactggtattattaagaggccaaagatttctggagcacagcttgtagccatcctacctctggctattgttcatactatgggcaatctcttcaccaacatgagccttgggaaagttgcagtgtcatttacgcacaccatcaaggctatggagcctttcttttctgttattctttctgcaattttccttggcgagctacctactatttgggtagtatcttctcttcttccaattgttggtggtgttgcattggcatctcttactgaggcatcctttaactgggctggcttttggagtgcaatggcttcaaatgttacctttcaatcccgaaatgtattgagcaagaagctcatggttaagaaagaggaatccttggacaaccttaatctcttctctatcattacagtgatgtcatttttccttttggcccctgttaccttctttacagaaggtgtcaaaattactcctacatttttgcaatctgctggtctgaatgtaaaccaagtccttacaaggtgtcttttcgctggactgtgtttccatgcataccaacaggtgtcttacatgattttggcgatggtgtctcctgtcactcattctgtgggcaactgtgttaaacgtgttgtggtcattgtaacatcagtgctgttcttcaggacacctgtttctcctatcaactctctcggtactgcgattgcacttgccggagttttcctgtactcacagctcaagcgacttaagcccaagccgaagacggcttaaatagggattgtattttccatctctttgtgttaatggagttaaacacttctatgtttcaggtgactgcattttaaaagatttgtgcttataacaacaacaaagtcttttagtctcaagcaagttagataggctagggttaaaaaccgaaacacctccccccaccccccaaattaaagatcagtcacatggataagtgttttccatgtacttctatttaagtctaaatctttagatatatatcatcatttgaaaccttcttttattgtcttttttcttgttaacttcgagctttctcttctcttttctcattgctatcacaccttagaattccattacgcaatggcgcttttggaggtatatgttcaaaccatctcaaccgatagacaagctttttctttaaatggtgttatctctagcctataatgtatatcataattctggactcgattattttctatatgaccacaaaattaatgtaacatata

SEQ ID NO: 89414 - DNA, 1953 bp, Zea Mays
cctccgttcaagtttagagtcacccgctaatatacggagcagctgcaatgctgaacgctgcacacctgtaaaagatagagctatcccctccctccccatcccttggagccagcaactccactcctgagtcctcacctcgtgctgcccgcgccatttccacctcccactgtcctttcgtccagtccccagccctgcagcccaaccgtggaggttctggaaggcggtgtatcccttctagaaccttctcgagatgcagagcgccgcggctttccggccatgccccactcggctgctggtgagcagcccttgtcgccccctcctctcggcccgcccgcttcgtgcctccgccgctggcgccgtcgctaccagaagcagcgccgtgggccctcgcggtctggggctcgggctgctgccagcctcgcccgatcgggatggcaagtgccgccagcgacaggtgtcatgcagcgcggccggggatgctgtggcggccccgaaggcggaagaaggaggcgggctcatgaagacgctgtggctcggctcgctcttcggcctctggtacctgttcaacatctacttcaacatctataacaagcaggtactcaaggttttcccataccctataaacatcacagaagttcaatttgctgtcggaactgtagcagctctgttcatgtggatcactggtattattaagaggccaaagatttctggagcacagcttgtagccatcctacctctggctattgttcatactatgggcaatctcttcaccaacatgagccttgggaaagttgcagtgtcatttacgcacaccatcaaggctatggagcctttcttttctgttattctttctgcaattttccttggcgagctacctactatttgggtagtatcttctcttcttccaattgttggtggtgttgcattggcatctcttactgaggcatcctttaactgggctggcttttggagtgcaatggcttcaaatgttacctttcaatcccgaaatgtattgagcaagaagctcatggttaagaaagaggaatccttggacaaccttaatctcttctctatcattacagtgatgtcatttttccttttggcccctgttaccttctttacagaaggtgtcaaaattactcctacatttttgcaatctgctggttaattttgattggctttgtgtttgtagggtctgaatgtaaaccaagtccttacaaggtgtcttttcgctggactgtgtttccatgcataccaacaggtgtcttacatgattttggcgatggtgtctcctgtcactcattctgtgggcaactgtgttaaacgtgttgtggtcattgtaacatcagtgctgttcttcaggacacctgtttctcctatcaactctctcggtactgcgattgcacttgccggagttttcctgtactcacagctcaagcgacttaagcccaagccgaagacggcttaaatagggattgtattttccatctctttgtgttaatggagttaaacacttctatgtttcaggtgactgcattttaaaagatttgtgcttataacaacaacaaagtcttttagtctcaagcaagttagataggctagggttaaaaaccgaaacacctccccccaccccccaaattaaagatcagtcacatggataagtgttttccatgtacttctatttaagtctaaatctttagatatatatcatcatttgaaaccttcttttattgtcttttttcttgttaacttcgagctttctcttctcttttctcattgctatcacaccttagaattccattacgcaatggcgcttttggaggtatatgttcaaaccatctcaaccgatagacaagctttttctttaaatggtgttatctctagcctataatgtatatcataattctggactcgattattttctatatgaccacaaaattaatgtaacatata

SEQ ID NO: 89415 - DNA, 1997 bp, Zea Mays
cgacagaccgtgtgtcagtgtgtggcctcactcactcaccgatccctcgccaagccacaggctccccgtgagctccgccacgcgggcgcctcgcctccttcgtccttcctcaccgcagtcagcaggagcaatggcgatggcagccatagcctccccgtcgtcgaggaccctgatccctccgcgacaccacggcgccgcgccctccccgtccacctccggcgactcctcgctccgcctcctctgcgcacacccgcgccacggacggcgcggccgggcgatgtccgtctcgacgcccgcggcgcggagccggccgttcgtcttctccccgcgcgcggtgtccgactctaagagctcccagacctgcctcgaccccgacgccagcacgagtgttcttggaatcattctcggaggtggtgctgggactagattgtaccccttgacaaagaagcgtgccaagcctgcagtgccattgggtgccaactatagactgattgatatccccgtcagcaattgtctcaacagcaacatatccaagatctatgtgctaacacaattcaactctgcttccctcaaccgtcacctctcaagagcctacgggaacaacattggagggtacaagaatgacgggttcgttgaagtcttagctgcacagcagagcccagataatccaaactggtttcagggtactgcagatgctgtaaggcaatacttgtggttatttgaggaacataatgtgatggagtttctaattcttgctggcgatcacctgtaccggatggattatgaaaagttcattcaggcacacagagaaacggatgctgatattactgttgctgccctaccaatggatgagaaacgtgcaaccgcatttggcctcatgaaaattgacgaagaagggaggattattgagtttgctgagaaaccgaaaggagatcagttgaaagcaatgatggttgacaccaccatacttggccttgatgacgagagggcaaaggaaatgccttatattgctagcatgggtatatatgtttttagcaaggatgtaatgcttcagctcctccgtgaacaatttcctggagccaatgattttggaagtgaggttattccaggtgcaacaagcattggaaagagggttcaggcttatctatatgatggttattgggaagatattggtacaattgaggcattttataatgcaaacttgggaataaccaagaagccaataccagatttcagcttctatgaccgttctgctccaatctatacacaacctcgacatctgccaccttcaaaggttcttgatgctgatgtgacagacagtgttattggtgagggatgtgttattaaaaactgcaagatacaccattctgtagttggactccgttcttgcatatctgaaggtgctatcatagaggacactttactaatgggtgcggactactatgagactgaagctgacaagaaactccttgccgaaaatggtggcattcccattggtattgggaagaattcacacatcagaaaagcaatcattgacaagaatgctcgaattggagataatgtgaagatactcaacgctgacaatgttcaagaagctgcaagggagacagacgggtacttcatcaaaggtggaattgtcacagtgatcaaggatgctttactccctagtgggacagttatatgaagcggatgtgcgacatgcaagccagagtgtcatcgacaatgatcagcatctggttacatgcctgatctgcagttcagtgtgctggagatcatggaaacaataaaatgtgtcattcaaggcactttttctctctctctgatcttttgtccttaaatgttgtgggttatatataatgttgtagcagaaacagttagtacaatgctgaatcaaaactggatggctggatttgggatacatcttcgatgctgtgtcattgatcagtttaattaccataccgtgctgctttgagcgaagccataaaggccatgctctg

SEQ ID NO: 89416 - DNA, 1970 bp, Zea Mays
agaccgtgtgtcagtgtgtggcctcactcactcaccgatccctcgccaagccacaggctccccgtgagctccgccacgcgggcgcctcgcctccttcgtccttcctcaccgcagtcagcaggagcaatggcgatggcagccatagcctccccgtcgtcgaggaccctgatccctccgcgacaccacggcgccgcgccctccccgtccacctccggcgactcctcgctccgcctcctctgcgcacacccgcgccacggacggcgcggccgggcgatgtccgtctcgacgcccgcggcgcggagccggccgttcgtcttctccccgcgcgcggtgtccgactctaagagctcccagacctgcctcgaccccgacgccagcacgagtgttcttggaatcattctcggaggtggtgctgggactagattgtaccccttgacaaagaagcgtgccaagcctgcagtgccattgggtgccaactatagactgattgatatccccgtcagcaattgtctcaacagcaacatatccaagatctatgtgctaacacaattcaactctgcttccctcaaccgtcacctctcaagagcctacgggaacaacattggagggtacaagaatgacgggttcgttgaagtcttagctgcacagcagagcccagataatccaaactggtttcagggtactgcagatgctgtaaggcaatacttgtggttatttgaggaacataatgtgatggagtttctaattcttgctggcgatcacctgtaccggatggattatgaaaagttcattcaggcacacagagaaacggatgctgatattactgttgctgccctaccaatggatgagaaacgtgcaaccgcatttggcctcatgaaaattgacgaagaagggaggattattgagtttgctgagaaaccgaaaggagatcagttgaaagcaatgatggttgacaccaccatacttggccttgatgacgagagggcaaaggaaatgccttatattgctagcatgggtatatatgtttttagcaaggatgtaatgcttcagctcctccgtgaacaatttcctggagccaatgattttggaagtgaggttattccaggtgcaacaagcattggaaagagggttcaggcttatctatatgatggttattgggaagatattggtacaattgaggcattttataatgcaaacttgggaataaccaagaagccaataccagatttcagcttctatgaccgttctgctccaatctatacacaacctcgacatctgccaccttcaaaggttcttgatgctgatgtgacagacagtgttattggtgagggatgtgttattaaaaactgcaagatacaccattctgtagttggactccgttcttgcatatctgaaggtgctatcatagaggacactttactaatgggtgcggactactatgagactgaagctgacaagaaactccttgccgaaaatggtggcattcccattggtattgggaagaattcacacatcagaaaagcaatcattgacaagaatgctcgaattggagataatgtgaagatactcaacgctgacaatgttcaagaagctgcaagggagacagacgggtacttcatcaaaggtggaattgtcacagtgatcaaggatgctttactccctagtgggacagttatatgaagtaagctctctccccctgttcctacacaaactgctatcactgttctgtactgtgctgcaggcggatgtgcgacatgcaagccagagtgtcatcgacaatgatcagcatctggttacatgcctgatctgcagttcagtgtgctggagatcatggaaacaataaaatgtgtcattcaaggcactttttctctctctctgatcttttgtccttaaatgttgtgggttatatataatgttgtagcagaaacagttagtacaatgctgaatcaaaactggatggctggatttgg

SEQ ID NO: 89417 - DNA, 1669 bp, Zea Mays
tttccaaggagtgctaatagattttgaatttcagagctgtcagtgtccatttctgatagtgttcttggaatcattctcggaggtggtgctgggactagattgtaccccttgacaaagaagcgtgccaagcctgcagtgccattgggtgccaactatagactgattgatatccccgtcagcaattgtctcaacagcaacatatccaagatctatgtgctaacacaattcaactctgcttccctcaaccgtcacctctcaagagcctacgggaacaacattggagggtacaagaatgacgggttcgttgaagtcttagctgcacagcagagcccagataatccaaactggtttcagggtactgcagatgctgtaaggcaatacttgtggttatttgaggaacataatgtgatggagtttctaattcttgctggcgatcacctgtaccggatggattatgaaaagttcattcaggcacacagagaaacggatgctgatattactgttgctgccctaccaatggatgagaaacgtgcaaccgcatttggcctcatgaaaattgacgaagaagggaggattattgagtttgctgagaaaccgaaaggagatcagttgaaagcaatgatggttgacaccaccatacttggccttgatgacgagagggcaaaggaaatgccttatattgctagcatgggtatatatgtttttagcaaggatgtaatgcttcagctcctccgtgaacaatttcctggagccaatgattttggaagtgaggttattccaggtgcaacaagcattggaaagagggttcaggcttatctatatgatggttattgggaagatattggtacaattgaggcattttataatgcaaacttgggaataaccaagaagccaataccagatttcagcttctatgaccgttctgctccaatctatacacaacctcgacatctgccaccttcaaaggttcttgatgctgatgtgacagacagtgttattggtgagggatgtgttattaaaaactgcaagatacaccattctgtagttggactccgttcttgcatatctgaaggtgctatcatagaggacactttactaatgggtgcggactactatgagactgaagctgacaagaaactccttgccgaaaatggtggcattcccattggtattgggaagaattcacacatcagaaaagcaatcattgacaagaatgctcgaattggagataatgtgaagatactcaacgctgacaatgttcaagaagctgcaagggagacagacgggtacttcatcaaaggtggaattgtcacagtgatcaaggatgctttactccctagtgggacagttatatgaagcggatgtgcgacatgcaagccagagtgtcatcgacaatgatcagcatctggttacatgcctgatctgcagttcagtgtgctggagatcatggaaacaataaaatgtgtcattcaaggcactttttctctctctctgatcttttgtccttaaatgttgtgggttatatataatgttgtagcagaaacagttagtacaatgctgaatcaaaactggatggctggatttgggatacatcttcgatgctgtgtcattgatcagtttaattaccataccgtgctgctttgagcgaagccataaaggccatgctctg

SEQ ID NO: 89418 - DNA, 3650 bp, Zea Mays
cgcaaggaccaccgcacgacggccaccgcccgtctcctcctcatatccttcccgctgtcgccggcctccatacttggtttgcaaaccatcgcatggccgtggatggggagcacgctcgtgtggcaggcgagtgatcgaaccatgggcacgtaacaaaagcaaggaagccagcgagtgaagaaggacggaagatgtcaaacccgccgccaaagaaggcgatccggaatcccggcggcggcgctggggggccggcgggcggcccgcgggggccggcggggaacacggtgaagttcgcgcggcggacatcgagcgggcggtacgtgagtctgtcccgggaggacatcgacatggagggcgagctggcggcggattacaccaactacacggtgcagatcccgcccacgcccgacaaccaaccgatgatggacccggcgtccgtggccatgaaggccgaggagcagtacgtctccaactcgctcttcaccggcgggttcaacagcgtcacgcgcgcccacctcatggacaaggtcatcgagtccgaggtgacgcacccgcagatggccggctccaagggctcccgctgcgccatgcccgcctgcgacggcaaggtcatgcgcaatgagcgcggcgaggacatcgacccctgcgagtgcagattcaagatctgccgcgactgctacctggacgcacagaaggaaggctgcctctgcccggggtgcaaggagcactacaagatcggcgagtacgccgacgacgaccccaacgacgcgtcctcggggaagcactacctgccagggccgggcggcggcatgatgaacaacagcaagtctctgctggcgcggaaccagaacggcgagttcgaccataatcggtggctcttcgagagctccggcacctacggctacggcaacgcgttctggcccaagggcggcatgtacgacgacgacctggacgacgagggcggccccggcggcggtggaggcgacggtatgctcccggagcagaagccgttcaagccgctgacccgcaagatacccatgccgacgtccatcatcagcccctaccggatcttcatcgtcatccggatgttcgtgctcatcttctacctcacgtggcgcgtccgcaaccccaacatggaggcgctctggctctggggcatgtccatcgtgtgcgagctctggttcgctttctcctggctgctggacatgctcccaaaggtgaaccccgtgaaccggagcacggacctcgccgtgctcaaggagaagttcgagacgccgtcgccgtccaacccgcacggccgctccgacctgccggggctggacgtgttcgtgtccacggccgacccggataaggagccggtgctcaccacggccaccaccatcctgtccatcctggccgctgactacccggtggagaagctggcgtgctacgtgtccgacgacggcggcgcgctgctcaccttcgaggccatggcggaggctgccagcttcgccaacatttgggtgcccttctgcaagaagcacgacatcgagccccgccagccggacagctacttcagcatcaagggcgacccgaccaagggcaagcggcggtcggacttcgtcaaggaccgccgcaaggtgaagcgggagttcgacgagttcaaggtgcgcatcaacggcctgcccgactccatccgccggcgctccgatgccttcaacgcccgcgaggacatgaagatgctcaagcacctgcgcgagaccggcgccgatccggccgagcagcccaaggtgaagaaggcaacgtggatggcggacggcacgcactggcccggcacctgggccgtgtcggcgcccgaccacgccaagggaaaccacgccggcatcctacaggtgatgctgaagcctccttctcccgaccctctgtacgggatgcacgacgaggagcagctgatcgacttcagcgacgtggacatccgtcttccgatgctggtgtacatgtcccgcgagaagcgtcccgggtacgaccacaacaagaaggctggcgccatgaacgccctggtgcgctgctccgccgtgatgtccaacgggcccttcatcctcaacttcgactgcgaccactacatcaactacgcgcaggccatccgcgaggccatgtgcttcgtgatggaccgcggcggcgagcgcatcgcgtacatccagttcccgcagcgcttcgagggcatcgacccctccgaccgctacgccaacaacaacaccgtcttcttcgacggcaacatgcgcgcgctggacggcctgcagggccccatgtacgtcggcacaggctgcatgttccgccgcttcgcgctctacggcttcgacccgccgcgcacaaccgagtacacgggctggctcttcaagaagaagaaggtgacgacgttcggcaaggcggaccagggcgagacggacacgcagtcgctcaacagcaagggggcggaggacttcgacgccgagctcacgtcgatgcttgtgcccaggcggttcggcaactcgtcggcgctgatggcgtccatccccgtggccgagttccaggcgcgaccgctggcggaccacccggccgtgctgcacgggcggccccccggctcgctgacggtgccccggccgccgctggacccgccgaccgtggcggaggccgtgtccgtcatctcctgctggtacgaggacaagacggagtggggggaccgcgtgggctggatctacggctccgtgacggaggacgtggtgagcggctaccgcatgcacaaccgcgggtggcgctccgtctactgcatccccaagcgcgacgcgttcctgggcacggcgcccatcaacctgacggaccgcctccaccaggtgctgcgctgggcgaccgggtcggtggagatattcttctcgcggaacaacgcgttcctggcgtcgcggaggctcatgttcttgcagcgggtggcctacctcaatgtcggcatctaccccttcacctccatcttcctgctggtctactgcttcatcccggcgctgtccctcttctcgggcttcttcatcgtgcagacgctcaatgtcgccttcctctgctacctgctgaccatcaccgtcaccctcatcgcgctcggcgtgctcgaggtcaagtggtcgggcatcgagctcgaggactggtggcgcaacgagcagttctggctcatctcgggaacaagcgcgcacctgtacgcggtggtgcaggggctgctcaaggtgatggccggcatcgagatctccttcaccctcacggccaaggcggccgtggacgacaacgaggacatctacgccgacctctacgtggtgaagtggtcgtcgctgctcatcccgcccattaccatcggcatgatcaacgtcatcgccatcgccttcgccttcgcgcgcaccgtctacagcgacaacccgcgctggggcaagttcatcggcggcggcttcttcagcttctgggtgctggcgcacctctaccccttcgccaaggggctcatgggccgccgcggcaagacacccaccatcgtcttcgtttggtcgggactcatctccatcaccatctccctgctctgggtcgccatcagcccgccggaggccagcgccggcggccgcggtgctggcttccagtttccttgacaacgaccgcctagcttt

SEQ ID NO: 89419 - DNA, 188 bp, Zea Mays
tgcaggcacctgatctttgctttgggaaagaagggatgtagcagcacggccaccacacttttaaataaaggaataactgtttattaatgatgttaaacaggaagggtcaagtctagggaattactacattctaatctttcatggtagttgaactgtttagtttggtgggctgagatgtctatcttttg

SEQ ID NO: 89420 - DNA, 1332 bp, Zea Mays
gaaaaaatgggagccacttcctctttattagattcaaatcgcgtagtcttgtccctcctgcatctgcatgcatggtgacggatgtcaacgttccaattcggtttgatatgaaaccgtgcgatcgtcgtggttgctccaggatcgagcgctccgtcgttggtgctagattccgacctcaagttgccaagaagcgatgcaggcaagcgttgcggttgcggaggcgcttgatgctgggaagctcacgcctcagccagtcgccggtgtggccgacttcgtggccgccggtctcgccgtggccattggcacactcgccgtcgcagcgtcgttcgtgctcgtctccttcgacgcgcgggcggggcagggccagctgcgtcgcatcctcgacctcggtccgtcgctgtgtggtccacgcttgctgctcgtcttctttgtggggctcctggctgccgccgagatgctccgcctcccgttcttccacagcgccatgctgccgccgcaccgccacgtcatgccatgcctcgcgtacccactcgtcgcccacggcatcgccgagccagggctgctcgcctgtgtgctcctgctgctgcgtgcgtccgttggcggcgcgcggctgccggcgtctgcgcttgccgtgccgctcgcctgcttgccattcctcaccgcacatattctcgtgctcgccacgccggccaccgtcgccgcctacccaggccagctcgcccacgctgcggacggcattgggcactgcgcgtatccggcgtatgccgccacgctgctcctcgccctcgtcgcggtctacctgccgttgctcgccaccgcgtgctgggacgtcgcagccgtagccatcaacaagcggctgcgcgcgagggcgtatgcgctctccgtgctcatccttgtgccactgccgctacaggtgctggcgctcaccctgacctcggtgtgggacatgcaccagtacacgtcccccaccgtcggcctggttgggtttgtcgcggtggcggtagccgcagaggcaacacttgtcatcctcgtcatgctgccggttcacgatgctcttgtccttgtccagaagttgccgtcagcgaccaccgggctagaggagacacctgatgaccctggacgatgaccaaggaaattgcattgcccatacaataaaaaaatttccacggggagatcagtagagatgtaatgtaactgacatagttgaggtcactttttttttctttcgtacatatcgtattttgtaaattactcctgtatatgtaagtatacacttagcatacaccaactgtacattttttagtctacaataacaattactcaaatgtacac

SEQ ID NO: 89421 - DNA, 750 bp, Zea Mays
gatttagcggcaaacacatcaaaagatgtgtgcacaaccaatttaggtatagccacaactgtagctccgagtagatgtgaggaaaatgaaaagttaatcagtgatttagcttcagagatgaccatgagcatcaacgatggcatgcagcaaccgtcaaatcaggtttcttcagaagacgacttattgggtcagtgtatggttgcagatgaacttttgcaaggtcacgggcttagttgggtttctgatcatgttgtcgggatttctaaacctaacgcagaacctaatgatttaaaaagtccgtgaacttctgatgtggagtctgagtcaaaaagaataaagtctgctaatgaattagcaatggatgagaagaaatttaatcaaagggctgaaggtttggcttttagaattgaagaggagctgttcagattgtttcgtggggtaaataagaagtacaaggaaaagggcagatctcttttgtttaatttgaaagacaaaagcaaccctgagctaagagagagggtttcgtctggagatattgcgcctaaacgcatttgttcaatgactacagaagaacttgcctccaaagaactctcagagtggcggctggctaaagctgaggagtttgcacatatggttgtccttccgaatatggaggttgaccgaaggcgtttggttagaaaactcacaagggagagttccaagttgttgaagaaccagatggaactgaaatgtatatttataacaaattaa

SEQ ID NO: 89422 - DNA, 104 bp, Zea Mays
gaatcacatgcaccagcaaagctttccaccgagtacttgtacttcaattccatcgcagtcgcaacctaacattcatgggaacctctccaggaaactaacccaga

SEQ ID NO: 89423 - DNA, 178 bp, Zea Mays
ccttttgagttgttacataataaatggtccagtcgatgcgttttacgttcaaaaatttcaacgcgacatgcatggaaactaacgctaacgagacatgcatggaaactaatgctaaacatgcgcgatttaaacgtcgtaattcgttacgaaacagatcaacgatttatgctaaaattca

SEQ ID NO: 89424 - DNA, 1242 bp, Zea Mays
atggcacaggacggccgcgcccgcgagagctccagcaaggcggcgtcggctggcagcggcggctgctccatgccgttcaggctcaacgtgcacgcgcgggagttcgtcccggtggccagccctttggcggcggccgccgccggcggcggctactattctccgttcgtgcagctttccggcgatggcgggctgggcacggactggatgaacttctttgccgagccggaccccacgtcgccgtcgtccttcctgccggactttggacactgcgacatcctcagagctaccggcggcatcaatggctaccctaaccccaaaggcggcgcaagtgtggccgacatcgcagataagattgtcaagcaggtcgagtaccaattcagtgacacgaacttggttgcgaacgattttctgacaaagatcatgaacaaggatcccgagggctatgtccctttgtctgtcatatcatcctggaagaagatcaaggccatgggggtaacaagccagctgctggtcatggctctccggacctcggacaagctcgttgtcagcgacgacggcaggaaggtgcggcgggcgcagccattcaccgagcgacacaaagaagagctgcagtgccggatggtcatcgccgagaacttgccgcaggattccacgagaaacagcctcgagaagatcttcggcgtcatcggcagttgttctcttctgtccttcctgacacagctgcatgcgcttatagagtacgagacctcgcaccaagccgacagagcagtggacaagctgaacgacgaaaggaactggaggaagggcctccgcgtgcgccccgtgctgcgacgatcgcccaagacggtggcacggatgaagcggccggacttggaccaccacgtcgccgcctccgacgaggagcgtgtctccacgtccgactccccgacggcgacagcggcagcgcaccctcctgacaacactcagcagcagcaggaggaggaggaggaggaccagcaccagcaccagcacggcggcgccaagaagccgtggggcagcagagggcggggcaggccgccgccgcactcctccgcgcactctgctggcgcgcccgggcattcggtggacagcctcgcggcgagcccccggcacgcggcgcaggggcctaggatgcccgacggcacgcgcgggttcaccatgggccgcgggaggccggcgccgcctgccgcgccgtcggctgctgctgccgtccgggtcgtgtag

SEQ ID NO: 89425 - DNA, 3198 bp, Zea Mays
atggcagccggcgagcatgctctggtcgaggagtccaccgtccctgtcgtctccgacgtcgctgacgccgccgccaaaccctacgtccggccggcccttttcctgcgcccccgcgcgggggacggcgcccctgcccctgctccgcccggcgacccgggccccgtcctcccccgcgggatcgaggcggagttcatgggctgggcgggcgtgccccggctgtggccggagtgggtggccaagctccgccggcgccacgagccgctgtggcgggaggtcgggatcctgggcggcatcctcgccagcacgtgccgggtgcgccaccaccaccacgagcgcgtgctgctgcagctcgccgccttctggtacggcgccaccagcaccttcgtcttcccctggggcgaggtcacgctcaccctcgaggacgtcgccacgctcgccggcctgccgctcctcggcgacccagtacgcgcgcccgtgtcggacagcctggagaaggacgtggccgcgatcgaggccgtccgggcggtgatgaaccggagcaagaagaagaaatcttcttacggcgcgtgggttaagcgcttcgtcgagcgcacgccggaggaggagatgccgccgcccgcgaccggtgacggtggcagagacggcgaggcgcaccagctggtcgagcatggcgctttcctctccatgtggctgtcccttttcgttctacccggcccaccgttcgacgtcgtccgccgggagatcattccgctcgcggcccgtctggcgcgcggcgagagcgtggcgctcgcccccgccgcgctcgccaccatctaccacgatctctccgcgctcaaacgccacataacctcgggcgacaaaaacggacccttcgtcatctcggcaccgatccacatcctccagctctgggtctgggagcatttcacccagctccgccctgaaacagtgggctcgtctactcctgatgatcatgacatgccaagggctgcccgatggcgtgaagctggaaaaaggctgagctccaaggacttgcacgcagtgctcatgtcaccgaaggggtttgagtggaggccctataaaaatagcaggttttttggtctgcacccaggtacaggtggttcttgggtccgcggtcaggatatagcaacaagtgaagcgctcttgtcttttgcacggtgtttgcacccttgtgagctcgtgggcatgaactgcattgagcagtataatcctcatcgtgttgcgaggcagctcggcttcgatcaggacatccctgggacggttccccgtgcaagctcaggttgggagaaagcatgggagacatacaacatagaggccaagagttctgcttttatctttccaaatcacaagcctggcgtgacggttcagtatgcaaagtggtggaagccttactcatcagcatgcggtagtgccgttgctaatgctgcaaagatcaaagaaggccacgatcttgttagtccagtgaaaaggaaaatggaaggggttcttgctggaaattctggcaaaaaggtgcgtctgcgtgtggccactgctaccctgggctgcccgcccaatataccagcaggaattaacgtctacccgtcccagtcctcaggcagccatgctgcaacaagacgagctgcggcagcaccagggcttgttctccgcgcgtgtccaccccacctaaggtttaaagctgtgtcccccacagggatgcctcagccactacgagatgcagcctacgatccgcttgatcacgtttctctttctgaaaggctcgatggcattactaagatgcctaagcagcacaacacagaatgtttggtgaaggatagtgagcaggagagaattgtcaaacgtgtgaagattgttacaccaaagcctccaagtgctggcccagagaaggcagttctacacaaagttgttgagcaagctttgcctgacgcagttgcaagctcagctataattcatgactcgtctagtgtatttggtactgaaaggccacatgcaaggtgtctccaacaaagtaaagatgaagatcttaatagtgccaatggggaaaatattagcagaagaacagagcattgtgatgtcgtgcttcttaatgttgtccagggtgcagtgagtactgtaaagagtgaagccattggagctgggactgaagttgatatgcttccaacacatgaagacttattggtggtcagtgacggtgacaggtgtgataaatcaagtagcatgggacatgaggtgcatctggaatctcatatgtcgggagcaaaaatgtcctttataagagagcgaaacgaaggtaccgagctggttgatgcaagaaacgacgaggaagacagccaagttctgaaggaagcgacaaaacaaggcaattttggtgataccgttaaattcaatgacgatgagcttgataaactaacaaggaaggaagccagggtgtttgttgaagcaatgagcaacaaagatgcgccgagtgccatgcatctgaaatgtcctgagatggaaccaacgcggaccatcttacaggagtgtaatgaagaaaagcagatggtcagggaaacaaatgatgagcacgacaacccagtgatgaaagaaggcacggtgcaaaacagttatgaccgtcagcttgcaagtgttctagatggcacgactccaagacaacagccagatgtattaactcatgctgctactgtccaaacctatgatggtctcttaaaagaaccagctaaagaaatggatacatgcattgtcacaggggatatcgacaataccgacaaggtgctcaatgaaaaatttggttctctgaatttcagtgagaagggaaatgaagataccttcgtgtcaaaccaagggttagaatatcctatggaacactcagcaggagccagtagaaagaaatcaggaaacagtgagagattctctagcagtctgttagatggaaatactaaactggttagccatgaagtttgtactaaaacactgtactatcttagtcggtttgaccggatgaaagacgcttgggacaaagatgcaaatagcctaccaaggagggctgttggtacgatggaaatgataggaaaagcatctgcaattcgacatgccgaaattgctgagttggacaaaaagattaatactctgaaggaagagattctggcgctagaggcagctgagaaagggaaatctcctgagtga

SEQ ID NO: 89426 - DNA, 2933 bp, Zea Mays
cggcttcaagtcacggtgccgcactgcttcttcctcttcccttctgttcgccagcgcgcaagttctggaagtggaagtggaagctttcgtttgttccctttcacccgccttcttgtcaattgctcccaatacccaaggtcccaacaactacaatccccttgacccatttgcttcatttgcaccgccggcctctgagcttaccatcccttgtagcccagaagaacgcgcaccaaatgcttgcgacattgtcacaatggccgccacgtcgtacctagcttccttctcccgcgcttcgccagcaccagcggcggcgtctgcgtgcctgtgcaatgtccatgcctggccacccgcgctgcggcctcggcctcgccggcgtcgtccccgtcccgcgcccctccgggtttacgccatctccgaccaagaccggctcctcaccgctctgcgcgagcaggcggaccccgaggcagcgctccagatgctgaactcggcgctcgcgcgggaggacttcgcccccagccgcgccgtgtacgaggagatcatccagaagctcggcacggccggcgcgttcgacttgatggaggggcttgtccgggagatgcggcgggaagggcatgaggccggggctggcgtggtgcggtcttttgtcgagagctacgcgcggctgcggcggttcgacgatgccgtggacctagttcggaaccagctgaacaccttcggggttcaggcggacacggcggtgtacaaccacctcctcaatgtccttgcggaggggagcaggatgaagctcctggagtcggtctacaacgagatgactgatcgcgggattcagcctgatgttgtgacactcaacacgctgatcaaggcgctgtgccgggcgcatcaggtcaggaccgcggtcttgatgctggaggagatgtcgagccatgctgtggcgcctgatgagaccacattcaccacgttgatgcaaggatttattgaggagggaagcattgaggcggctctgagggtgaagacaaagatgatggaaactggatgctcaccaacaagggtaactgtcaatgttctgattaatggctactgcaagatgggaagagtggaagatgcgcttggctacatacagaaagagattgctgatggatttgaacctgatcaggtcacatataatacttttgttcattgtttgtgccaaaacggacatgtcagccatgccttgaaagtcatggatctgatgcttcaggagggccatgatcctgatgttttcacctacaatactgttatcaactgcctcagtaaaaatggagagcttgatgaggccaagggaattgtaaatcagatggtggataggggttgtttgcctgacaccacaacgttcaacactctcattgttgctctgtgctcacagaatcgacttgaggaagcattggaccttgcacgtgagctaactgtgaagggactttctccagatgtctatactttcaatattttgataaatgccctttgcaaggtaggagatcctcatcttggcattcgattgtttgaggagatgaagagcagtggatgcgctcctgatgaagttacatacaacattttgattgatcatctttgctcaatggggaagcttgtaaatgctttggatttattgaaggagatggaatccaatggttgccctcggagtacagtgacatataacacaataattgatgcattatgcaagcaaatgagaatagaagaagctgaggaggtttttgatcaaatggatgcacatggtatttcaaggagtgctgtcacatttaatactcttattgatggcttgtgcaaggccaagaggatcgatgacgcaacagaacttattgagcaaatggtgaaggaaggattacaacctagtaatatcacttataattctattctaacacattactgcaagcagggggacctcaagaaggcagctgatattttagaaactatgacagcaaatggatttgaaattgatgttgtcacatatggaacactcattaatggtctatgcaaggctggtaggactcaggttgctttgaagcttttaagaggcatgcgaattaaagggattagacctactccaaaagcttacaacccggtgatacagtctttgtttagacggaataatttaagagatgctcttagtcttttcagggagatgactgaggtgggtgagcctcctgatgccctcacatataagattgttttccgtggtctgtgtcgtggtggagggcctatcaaagaagcttttgatttcttggtggagatggtgaataagggtttcatgcctgagttttcatcctttcgaatgctagctgaaggtctattgaatctgggcatggatgattatcttattagtgctattgaactaattatagagaaggccaaattcagagaatctgatgtttctgctataagaggatatctcaagatccgcaagtattatgatgcattagcaactttcggccgtctcctagagataaacaaccctcagtggacgtatcgttgatacagcatgcctgagaatgtatcatgtaaatgatggagcagatgaaaaattccgcggttgctagattggcttaaacttttgcagcagtggtgtaatagatgttaatctcattgctctgtaggattgaagtcagctgaatttggaatgctctcttgcttttggagagctgctcatgtccactgtgaatcgtcttttgacgctcctgtatatcttgggtagctagctaatgatcatatttttggtgctgctctttcaaatgatgctacatttatcattacttctcttttaataattagggagtcttttaggattttttgttttccacatccagaaactttaggggcaacagactttagctgtcttacagtgtattcttcataaacttttgtgagtgacatcatattaagca

SEQ ID NO: 89427 - DNA, 1534 bp, Zea Mays
taggattcagcccattgtgagtcttctgtcttctcttccacctttgtccgttgtctctaggcaagtctacacccgccggtctcctgctcttcagatctgcccatcctccatggcacctccaccgcaccgccacctgctgctgctcctccttctactccctctggtcctcctcgccggcacacccgccagcgccgatgaccttgtatcggagctccaatctctccgcgcgcggtccccgtccggcgtgatccacctcaccgacacctccgtcacccgtttcctctccgccccctccgcgcgccgcccctactccgtgctcgtattcttcgacgccgcttcgctccactcaaagcctgacctccacctgccccagctccgcaccgagttcgcgctcctctccgcctccttcctcgctcacaaccccgattccggcgacctcttcttcgccgacatcgagttcgccgagtcgcagcactcctttcaccagtttggtgtcaactcgctgccccatatccgcctcatccgttccgatcacgccaccctgtcgggatccgagcagatggaccagtcccacttcgcgcgcctcgccgactccatggccgagtttatcgagtcccgcacgggcctcgaggtcgggcccatcgtacgcccgccgctcctctcccgcaaccagatcatcctgctcggcatcctcttccttatctccatccccttcatgatcaagaggattatcgatggggagaccctgctgcatgacccccgggtctggatggctggggcgctcttcgtctatttcttcagcgtctcggggggcatgtatgggattatcaggcacacgcccatgttcctcaccgaccgcgcggatcccaacaagctcgtgttcttctaccaggggtcagggatgcagttgggggctgaggggtttactgtcgggttcttgtacacactcgtgggtctcatgatcgctgtggtgacacacttgttggtgaaggtggagagcctgcagacacagcgccttgcgatgctcgctgtcatggtggtcgggtggtgggctgttaggaaggtgatctacttagataactggaagactggctatagcattcataccttcttcccgagcagctggaggtgaaattcttgctgggtggggtggatgcttctctcctttggtctcagaggggaccaagtccgcccaaatttgcattgctggaatagagcatcgcgttgtgatggcatgccgaaagtttaaggttgcagtttctccgctgctgctctagtatgaaatagagagagaactcgaagttattttagctgaatttgcaattctgttactcaacaagaaagagtcccaattttgaacttctatatgtgatggtactgctaattggttcaacgacaatggtagtaaattttagttgatcactgtgttatggacttgtttgtatccagggaaattttgcccgtattgtgatatctgatttgcgaggctgtcgcatgcagtcgctatcttttataaaaacccattcatgagttc

SEQ ID NO: 89428 - DNA, 1211 bp, Zea Mays
tcttccacctttgtccgttgtctctaggcaagtctacacccgccggtctcctgctcttcagatctgcccatcctccatggcacctccaccgcaccgccacctgctgctgctcctccttctactccctctggtcctcctcgccggcacacccgccagcgccgatgaccttgtatcggagctccaatctctccgcgcgcggtccccgtccggcgtgatccacctcaccgacacctccgtcacccgtttcctctccgccccctccgcgcgccgcccctactccgtgctcgtattcttcgacgccgcttcgctccactcaaagcctgacctccacctgccccagctccgcaccgagttcgcgctcctctccgcctccttcctcgctcacaaccccgattccggcgacctcttcttcgccgacatcgagttcgccgagtcgcagcactcctttcaccagtttggtgtcaactcgctgccccatatccgcctcatccgttccgatcacgccaccctgtcgggatccgagcagatggaccagtcccacttcgcgcgcctcgccgactccatggccgagtttatcgagtcccgcacgggcctcgaggtcgggcccatcgtacgcccgccgctcctctcccgcaaccagatcatcctgctcggcatcctcttccttatctccatccccttcatgatcaagaggattatcgatggggagaccctgctgcatgacccccgggtctggatggctggggcgctcttcgtctatttcttcagcgtctcggggggcatgtatgggattatcaggcacacgcccatgttcctcaccgaccgcgcggatcccaacaagctcgtgttcttctaccaggggtcagggatgcagttgggggctgaggggtttactgtcgggttcttgtacacactcgtgggtctcatgatcgctgtggtgacacacttgttggtgaaggtggagagcctgcagacacagcgccttgcgatgctcgctgtcatggtggtcgggtggtgggctgttaggaaggtgatctacttagataactggaagactggctatagcattcataccttcttcccgagcagctggaggtgaaattcttgctgggtggggtggatgcttctctcctttggtctcagaggtatggaataacatcccaccttttttcagttctgtggttggcatattggtcgtgattgttgggtta

SEQ ID NO: 89429 - DNA, 1274 bp, Zea Mays
ccatcctccatggcacctccaccgcaccgccacctgctgctgctcctccttctactccctctggtcctcctcgccggcacacccgccagcgccgatgaccttgtatcggagctccaatctctccgcgcgcggtccccgtccggcgtgatccacctcaccgacacctccgtcacccgtttcctctccgcctccttcctcgctcacaaccccgattccggcgacctcttcttcgccgacatcgagttcgccgagtcgcagcactcctttcaccagtttggtgtcaactcgctgccccatatccgcctcatccgttccgatcacgccaccctgtcgggatccgagcagatggaccagtcccacttcgcgcgcctcgccgactccatggccgagtttatcgagtcccgcacgggcctcgaggtcgggcccatcgtacgcccgccgctcctctcccgcaaccagatcatcctgctcggcatcctcttccttatctccatccccttcatgatcaagaggattatcgatggggagaccctgctgcatgacccccgggtctggatggctggggcgctcttcgtctatttcttcagcgtctcggggggcatgtatgggattatcaggcacacgcccatgttcctcaccgaccgcgcggatcccaacaagctcgtgttcttctaccaggggtcagggatgcagttgggggctgaggggtttactgtcgggttcttgtacacactcgtgggtctcatgatcgctgtggtgacacacttgttggtgaaggtggagagcctgcagacacagcgccttgcgatgctcgctgtcatggtggtcgggtggtgggctgttaggaaggtgatctacttagataactggaagactggctatagcattcataccttcttcccgagcagctggaggtgaaattcttgctgggtggggtggatgcttctctcctttggtctcagaggggaccaagtccgcccaaatttgcattgctggaatagagcatcgcgttgtgatggcatgccgaaagtttaaggttgcagtttctccgctgctgctctagtatgaaatagagagagaactcgaagttattttagctgaatttgcaattctgttactcaacaagaaagagtcccaattttgaacttctatatgtgatggtactgctaattggttcaacgacaatggtagtaaattttagttgatcactgtgttatggacttgtttgtatccagggaaattttgcccgtattgtgatatctgatttgcgaggc

SEQ ID NO: 89430 - DNA, 429 bp, Zea Mays
cgctctctccaccctcctatcctgcaacccaagaccataccgtctccctctccagccgtccagcgcagcgcagcagccatggttcctcaagccgcattcctcctggcactcgttgccgccgccgccgccgccgcctccacctggccgtcgacggaggcggcgggctcctggaccacgacgaacgcgcccgccgcgtcgtgctccggctgcggggaccttcgcggcagacagcgcgtcaacatgtttggtgttctgtgtcgtgggcggctttggaaatgcaggaatgttgtggtattccgcggggaaagatcgccgcttgcaacaaccatgctactgtgccgctctaaagctgaattatggagacacaggctacgacatgaggactaccagatcgtggttgcctggtatcgtgctttgtatgtaacatag

SEQ ID NO: 89431 - DNA, 841 bp, Zea Mays
tcgacggaggcggcgggctcctggaccacgacgaacgcgcccgccgcgtcgtgctcgggcgcggggaccttcgcggcagacagcgcgttcgcgggcaacctgcgccggctcatgtccgtcctcgaggccagggccgccgccggcggcggcttcgacatcgccacggtgggcgccggagccggcggcgcgcgcgtgcacggcctggcgctgtgccgcggcgacgtggcgcgcgcggcgtgcgcgcggtgcgtccggtccgcgcgggcccacgcgcggcgcctgtgcgcgtccaggacggacgccgtcgtctggctcgacgcctgcacgctccgctactccgcgcgcgccttcttcggcgaggtcgaccgggaccaccgcgccgtcgcggcgctccgggacgcgaggccggccgagctcggccgcgaggtcgtcgccggcctgctgacgcggctcactaggacggcgtacctctcgccgctgctgttcgccgccggggaggaggacgctgcagtcggccagcagcagaggctgcgcgccatggtgcagtgcaccaaggacctctccggcggggactgcaaggcctgcctggaggctgccattgcgcagctgctggccaggggacgggcgccggagggcgccagggtgctgggcggaagctgcagcctcagatacgagctgtccccgttcatttctgactcctaacacaagatagctactgtgactccatagtttttgcttaattgcacctgtaatctgtaaattgcggtgtcagagctcacgttcgagattccaagggaatcaaatacagcaaaagtgtttatttcaaggatcgatttcgttc

SEQ ID NO: 89432 - DNA, 108 bp, Zea Mays
gacaatttgagtatgtgttatactctcttctgatagtttttgctaaatatagtagcataacttgctctcttggtaaaaacaagacacggagacaaaaactaaaatcac

SEQ ID NO: 89433 - DNA, 428 bp, Zea Mays
ctagcggctataacccctaatcctaccagtaatccccaacatgcctcctaccagaagaaggagaccgcgggaccagcgcgccgggagatgggttacaaggcgacgccgcgccggaacgtactttgggctctcaacaatgccgaggccaacggcgggacgacgtctgtgccgcggatggaggcggcgcccatgattaagttcagtgggaggcaggatgtggagcgcctgctaaaatgaagggcaaaagcaagagcgatttcaaggggagaatcaatcagatgagcgtctacatcaagaagctcagggcgtgcatccggtgcagttgaagatagctaatcgacaatgcaaggtcaaggcctctaccggttgtaacagattggtaattagcatgtatctgaaacctcgtttgcaaccaaagttcactgcta

SEQ ID NO: 89434 - DNA, 726 bp, Zea Mays
ctagcggctataacccctaatcctaccagtaatccccaacatgcctcctaccagaagaaggagaccgcgggaccagcgcgccgggagatgggttacaaggcgacgccgcgccggaacgtactttgggctctcaacaatgccgaggccaacggcgggacgacgtctgtgccgcggatggaggcggcgcccatgattaagttcagtgggaggcaggatgtggagcgcctgctaaaatgaagggcaaaagcaagagcgatttcaaggggagaatcaatcagatgagcgtctacatcaagaagctcagggcgtgcatccggtgcagttgaagatagctaatcgacaatgcaaggtcaaggcctctaccggttgtaacagattgtttattgaatagaatgatagaatgattactttacaccgatgtcgctcctccacgagcccgcgcacgccgaggccgatcttcttttatggccaccgtgccccgcatcggaggtgccttaccctccgtcgcgcccgtggactggacgatgacttcgagtagaggcggcggtggctgcaacaatatctgcgatctacggtccacgcgacagcgacagaggccgaggggtcgcttgtacatcggcggaacctgttgctggaggagcttgcgtgtgaggtggggctctcgcccgaccggtggctctaggtgccgctgcccaaggtctggagtgtccgtgtcttcgcatgtat

SEQ ID NO: 89435 - DNA, 998 bp, Zea Mays
tccgtgcctagaccccgcgtagtgcgggaagcctaggacacggggtacaccctttaacagatatccatctaagatgctcctgtctgcaattgatgagcttcacagaggaacttatgacttacctgccaattgatttcaagaacaaatgcaatgttggatacgcgttcgttaacatgatatcgtcggtgcacattatatcattctaccaggcttttaatggtaagaaatgggagaagttcaacatctagaaggtagcctcgttggcttatgctagaattcatggacggtctgcactgataagaggtgtcgcccgattctttttaatcccaatggttagtactctgaatcaggaagcatttccaatcaatggcatatgcatccacatgctttcgaaagatgattaccctgacaacgaagaagacgacaagggtctaaacgagaaggtaggagagagctcgaccgatatggctgagggtttgtgacgtctgatagcagacaggatcagaatggccatacatataaatctaactgtctagagagtatccacccccatattgtataaaaagcgtggaaagttgatggttagtgatgaattttgtggtctggtttggcatggcacatcttttggtttcagatgttgccccggaaatgaaagttgaagtgggagctaaagctgaagcgattagcttcgaactggagcttgtttgtcgaatcctccccctccccttctgttggtagtcgtgcttgtttttgcttgcttgctgaggggggtggaaccgctgctcctcatagtcttgtttgttattgcttgttataaaaaggtgaactgaactgaagaaaaaaaaaggttagccaaactgtacagtttagaacttttgtgcatattttgcattctggcgtcttaatgtgcagtgcagtaactgggccttgattatgcaaataattgatgtacacgttctttgcataattgtattcaaggtatctgaccaaaactcaga

SEQ ID NO: 89436 - DNA, 213 bp, Zea Mays
atggcgccgaggacgccgagagagaccttggcggcgtccaggtccgggttgccggcggtgagcacgcgcaccttggcgtagccctcggcggcgggcgccggcgtgacgatgcgcatcccgacgacgtactcgtgcacggcgctgccgttgccccagagcgagctgccatgcgcgcccgtgccgagcatgccgcctacggtgagcccccaccag

SEQ ID NO: 89437 - DNA, 834 bp, Zea Mays
tttgcatatccttcccgctaggataagccaattattcaaggattctcattgtccatccccgcaggtaaagtcatcacattggtaggaagcagtggctgtggaaagagcaatgtcatttcactacttcaaaggttttatgatccaactttaggtgacatattcattgatggccacagtctcaagaaaattgatctgaattcgctgcgcagaaacatagcttcagtctctcaggaaccatcactattttctagtaacataaaggacaatttgaagattggtaaaatggatgcaagtgacaaggagataactgaagcagcaagaacaactaatgttcattcattcatatccaaactaccaaatgagtacttgatcgaggtaggagaaaggggtgtgcagttatcgggtggccacaaacaaagaatagctattgcaagggcaaagaagtaggatccaccaatcctacttctggacgaagcaacaagtgcccttgattcagaatcagagaagctagttcaagatgcacttgagagagcaatgcgtggaaggactgttatcttgatagcccacatgatgtccacaattgtaaatgatgacactattgttgtcgtcgaaaatggaagagtagcacacactgggacacattatgagttgcttgacaaaagcacattctactccaatgtatgcagcatgcaaaatatagacaaggaagctgaaaataaagtggcgagggaaccagagctgaggtctactgcaccagacttattaaagcatccttttgtcactggagaattggatgacctgcagccactcaatcatgctgcacgcaagttttga

SEQ ID NO: 89438 - DNA, 1526 bp, Zea Mays
acctaatcagagattctcgtacaattctgcgggactccactcgaccggaccaaaactggctacgaaattcggagattcggatggatttctcgcttctccgcagtttggacgcgctcaaaccttcccaccacctcctccccctcctcccaacagtcaccacgtcgcactaccgagccatgtcctccgctaccaacctccgtttattgtcgtgggactgcgccgaggacccgctggatttcggtgcgttcgccgacacctcgtttctcccgctccagcggcgcgcggcgacgcggaaacgcgcggtgtcgtcggaggccgttcaggtgcgcgccgttgacaagctgggtgttggcgcggtggagggagatgagaaggcacgcgccgccaagaaagggaattcaaataatcattcggataataagactgtcaaaataatgacatacaatgtatggttccgagaggaattggaactgattagaaggatgaatgctattggagatcttatccagcatcacagcccagatctcatatgcttccaggagatcactccaaacatttacctgcttttcgagaaatcagactggtggcaagcatacaaatgctccttgccgcataagatggccatggaaagatcatactactgcatgcagatgagcaggttgccggtgaagtcgtttgaccgcaaaccattcttgaactcaaagatgggacgggagctgtgcgtagccgatgtgaccgttggaggttcgatcgagctggtgctggctacaagccacctggagagcccatgccccggacctccgacgtgggaccagatgttcagcaaggaaagagtagctcaggcaagcgagtctttgaaaactctgggagccttccgcaacgcaatactctgtggggacatgaactgggacgacgaaggagacgggcccttcccgctcccagaaaacggggggtgggtcgacgcctgggctgagctgaagcccggcgaagatggctggacctacgacacgaaggccaacgccatgctgacgggtaaccgtaagctgcagaagcggctggaccggttcgtgtgcaagctgccggatttcaaggtcgagagcgtcgagatggtcggggaggaagccataccgcgcgtcacgtacgtcaaggagaagaaggctcgccgggagattcgtcagctggtgttgcctgtcttgcccagcgaccacttcgggcttgttctgactatcagctcagtctctgaagatctgatcgatcatggtccagagactacccttgatgtgtaatagtcatgcaatggccctctttttgtatatactcttaggcagtagcatctcctaacttcctaaagggcgtcatggaagctagcgtctgacagtgatcggttattttgcttcactgacagccttttagtcagaatgccctactatgagggtggtggtggagagctcttagagctgttgctaggtggaagaagagaatgactattactcttctagtctacttgcatcagtgtataggagagc

SEQ ID NO: 89439 - DNA, 908 bp, Zea Mays
gatgaggactgcatatatcctgatctactttgtcacaaacaaatccagatgagcaggttgccggtgaagtcgtttgaccgcaaaccattcttgaactcaaagatgggacgggagctgtgcgtagccgatgtgaccgttggaggttcgatcgagctggtgctggctacaagccacctggagagcccatgccccggacctccgacgtgggaccagatgttcagcaaggaaagagtagctcaggcaagcgagtctttgaaaactctgggagccttccgcaacgcaatactctgtggggacatgaactgggacgacgaaggagacgggcccttcccgctcccagaaaacggggggtgggtcgacgcctgggctgagctgaagcccggcgaagatggctggacctacgacacgaaggccaacgccatgctgacgggtaaccgtaagctgcagaagcggctggaccggttcgtgtgcaagctgccggatttcaaggtcgagagcgtcgagatggtcggggaggaagccataccgcgcgtcacgtacgtcaaggagaagaaggctcgccgggagattcgtcagctggtgttgcctgtcttgcccagcgaccacttcgggcttgttctgactatcagctcagtctctgaagatctgatcgatcatggtccagagactacccttgatgtgtaatagtcatgcaatggccctctttttgtatatactcttaggcagtagcatctcctaacttcctaaagggcgtcatggaagctagcgtctgacagtgatcggttattttgcttcactgacagccttttagtcagaatgccctactatgagggtggtggtggagagctcttagagctgttgctaggtggaagaagagaatgactattactcttctagtctacttgcat

SEQ ID NO: 89440 - DNA, 966 bp, Zea Mays
tgtccacggcggccatccgtcattccacagctttgctctctctctctctctctctctctctctctctctctctctctctctctctctctctctctctctctctctctctctctctctctctctctctctctctctatccatggctgaatcggcgcctcgactcctcgtcctcgtctctctcgtggcggcgctcgccatggccactgggccagcggcagcagcgcacgcagggggccgcagccgcctcatccacctgcacttgtacatgcacgacatcacgggcggcccggggcagacggcggtgcaggtcgtcaagggcccagggccggcgcacccggcgatgcccggctaccacttcggcgacaccacggtgatcgacgacgcgctgacggacgggcccagcgcgtcgtcgtcgcggctcgtcgggcgcgcccagggcacctacatgctggcgtcgctcacggagcccgtgctggcggtgtccatgaccgtggcgctcacggccggggcctacaacggcagcgccgtcgtcatcgtgggccgcgacgacgtctcggcgggcgtcagggagctcgcggtggtcggcggcaccggcgcgttccggagagctacgggccacgtgctgtggcggacggccaggatggagtcccgggaccacatggtgctggagctcgacgtctacgccaccgtgccggccgctagtccggctccgcctccgcgcgccggagtggcgcgtcaggtggcctgagtgcctgacctcaaccgtacctcgacgtgatgtcaccggacttggttttgattttaccatgcacgctgctcgcctgccgctgtgtgtatggtcaatcgtataaaattgcttcagctccgcgcctccgcacatacgttggaaaattgaacagtagtgattactatactgctgcagtgctgctggtgctaccgctaccgtcggtcataaactcataataa

SEQ ID NO: 89441 - DNA, 1435 bp, Zea Mays
tctgtctgattggattgggttggggcctgggtgtaggataatatcttggcctgtgtcgcctgatggatccatccagttcagcaagtatccaaggccagagatacggggcccggcgccagtccgcttttttttttttggtttgattaaaaaaagggttccattcttatctactttgctgcgtcatcgctgggtggtctcagacggacctgcagaggaggtccgctcaccgcgcgccccagctgaaattccaggccaccggctgaacgcatccctctcaccgcgcccttggcggtggtacgttcacctcgccggttccccgacagccgtcccctccgtgatttaagagaggcccatgagctcgctgctcttgtgcccgcggtgctactgacggttgctctagatccgttcatcctggtggttttgtgaggtcgaaagcggcgagcgaattagaagatgctggacaagctgtgggacgacgtggtggccgggcctcgcccggagacgggcctcgagaagctccgcaaggccaccaccgcccgcccgctcgtcatcaacaaaggtacttactgagctatactgctgatcgtgtcggggatcgggatggagtcgaacaagtaccagcggcaagcaactaataacagtaggaaattaatgaatggatctctccactctaactaacaataatatgtgtaaattaaagacgcggacggcggcagctacaagcgggcgcagtcgatgccgtcgaccccgacgacgccggtgacgccgtcgtcgtcgtcgtcgtcgacgacgccgcgcggcgccggcaacgtgtggcgcagcgtcttccacccggggagcaacctggccaccaagggcatgggcgccaacctcttcgaccggccgcagcccaactcccccaccgtctacgactggctctacagcgacgagaccaggagcaaccaccgctagatcgggcgagatggatggacagtgaagaggccatgtttgctggtccttgtggttatctaaaacgcacgcatgctctattatagctagtcatcactatatatatacttgtgtttgtgtattgttgttcttgttctgctggtgtctccgccgtttaatttgacctatgttatggagtgagtgatatatgtgccgtcactcctagtatatagtagtgagtgactagttggtatgtgtagtactgtactatcttttctccatatgcatgttttgccagcgcgtaatgaatgtaatgtcagtactgctactacgtgctctgctacttccaattcagtttccttaatcttgatgcataatcaccggccccggcccggcgctgaggacatggataacagcaacgactttaatttgcacggacttggtcaaggaactcctcgctcgccccctgttggtttaaataaacaaacaatacagatcattagacaaa

SEQ ID NO: 89442 - DNA, 1252 bp, Zea Mays
tctgtctgattggattgggttggggcctgggtgtaggataatatcttggcctgtgtcgcctgatggatccatccagttcagcaagtatccaaggccagagatacggggcccggcgccagtccgcttttttttttttggtttgattaaaaaaagggttccattcttatctactttgctgcgtcatcgctgggtggtctcagacggacctgcagaggaggtccgctcaccgcgcgccccagctgaaattccaggccaccggctgaacgcatccctctcaccgcgcccttggcggtggtacgttcacctcgccggttccccgacagccgtcccctccgtgatttaagagaggcccatgagctcgctgctcttgtgcccgcggtgctactgacggttgctctagatccgttcatcctggtggttttgtgaggtcgaaagcggcgagcgaattagaagatgctggacaagctgtgggacgacgtggtggccgggcctcgcccggagacgggcctcgagaagctccgcaaggccaccaccgcccgcccgctcgtcatcaacaaaggctctacagcgacgagaccaggagcaaccaccgctagatcgggcgagatggatggacagtgaagaggccatgtttgctggtccttgtggttatctaaaacgcacgcatgctctattatagctagtcatcactatatatatacttgtgtttgtgtattgttgttcttgttctgctggtgtctccgccgtttaatttgacctatgttatggagtgagtgatatatgtgccgtcactcctagtatatagtagtgagtgactagttggtatgtgtagtactgtactatcttttctccatatgcatgttttgccagcgcgtaatgaatgtaatgtcagtactgctactacgtgctctgctacttccaattcagtttccttaatcttgatgcataatcaccggccccggcccggcgctgaggacatggataacagcaacgactttaatttgcacggacttggtcaaggaactcctcgctcgccccctgttggtttaaataaacaaacaatacagatcattagacaaatttacagtacgtattgaatcgttccatgaatggcctggacgggaatgcgagatttaccgcgtgtatcacagcgtagtgcaccgtgatggttaacggatcggaacccaggatttgctcctaaccgaactaacaatcttacaaatggttgccacgtcgtcgtcaagctgccgtg

SEQ ID NO: 89443 - DNA, 1099 bp, Zea Mays
ctcagacggacctgcagaggaggtccgctcaccgcgcgccccagctgaaattccaggccaccggctgaacgcatccctctcaccgcgcccttggcggtggtacgttcacctcgccggttccccgacagccgtcccctccgtgatttaagagaggcccatgagctcgctgctcttgtgcccgcggtgctactgacggttgctctagatccgttcatcctggtggttttgtgaggtcgaaagcggcgagcgaattagaagatgctggacaagctgtgggacgacgtggtggccgggcctcgcccggagacgggcctcgagaagctccgcaaggccaccaccgcccgcccgctcgtcatcaacaaagacgcggacggcggcagctacaagcgggcgcagtcgatgccgtcgaccccgacgacgccggtgacgccgtcgtcgtcgtcgtcgtcgacgacgccgcgcggcgccggcaacgtgtggcgcagcgtcttccacccggggagcaacctggccaccaagggcatgggcgccaacctcttcgaccggccgcagcccaactcccccaccgtctacgactggctctacagcgacgagaccaggagcaaccaccgctagatcgggcgagatggatggacagtgaagaggccatgtttgctggtccttgtggttatctaaaacgcacgcatgctctattatagctagtcatcactatatatatacttgtgtttgtgtattgttgttcttgttctgctggtgtctccgccgtttaatttgacctatgttatggagtgagtgatatatgtgccgtcactcctagtatatagtagtgagtgactagttggtatgtgtagtactgtactatcttttctccatatgcatgttttgccagcgcgtaatgaatgtaatgtcagtactgctactacgtgctctgctacttccaattcagtttccttaatcttgatgcataatcaccggccccggcccggcgctgaggacatggataacagcaacgactttaatttgcacggacttggtcaaggaactcctcgctcgccccctgttggtttaaataaacaaacaatacagatcattagacaaa

SEQ ID NO: 89444 - DNA, 1104 bp, Zea Mays
tcttgtgcccgcggtgctactgacggttgctctagatccgttcatcctggtggttttgtgaggtcgaaagcggcgagcgaattagaagatgctggacaagctgtgggacgacgtggtggccgggcctcgcccggagacgggcctcgagaagctccgcaaggccaccaccgcccgcccgctcgtcatcaacaaagacgcggacggcggcagctacaagcgggcgcagtcgatgccgtcgaccccgacgacgccggtgacgccgtcgtcgtcgtcgtcgtcgacgacgccgcgcggcgccggcaacgtgtggcgcagcgtcttccacccggggagcaacctggccaccaagggcatgggcgccaacctcttcgaccggccgcagcccaactcccccaccgtctacgactggtgagcagcaccgtctccgtcgtctccatctcttgcccagcctagctacgtgcgtggtctgcgtgctcaaacaggacagcagcagcagatccaggaccaaactaattgagcaagaaccacgcgaatggttcgattttattttttttttaaaaaaaatcagtttttcatgtgtgtaataatttctcaggctctacagcgacgagaccaggagcaaccaccgctagatcgggcgagatggatggacagtgaagaggccatgtttgctggtccttgtggttatctaaaacgcacgcatgctctattatagctagtcatcactatatatatacttgtgtttgtgtattgttgttcttgttctgctggtgtctccgccgtttaatttgacctatgttatggagtgagtgatatatgtgccgtcactcctagtatatagtagtgagtgactagttggtatgtgtagtactgtactatcttttctccatatgcatgttttgccagcgcgtaatgaatgtaatgtcagtactgctactacgtgctctgctacttccaattcagtttccttaatcttgatgcataatcaccggccccggcccggcgctgaggacatggataacagcaacgactttaatttgcacggacttggtcaaggaactcctcgctcgccccctgttggtttaaataaacaaacaatacaga

SEQ ID NO: 89445 - DNA, 1641 bp, Zea Mays
tccatagttctatgtccatcatggaacaatccaaccaacgagctttttgtgggaccaactcatccaaaaaaacgtccacaggtgttctacatggttgggttccataccagtcaatcgaacaaaccaaacacgctgtagagttacctacatgtcgagtttccacacctgtcggttcaaaaaacctaccccacaacatctggcataagaaacatggttacttcattgttcccaatactggcaacaatcctcgaaacctgaaataagttctagtgaattgcacagcgaaaaccaaaaaaagaaaaaaaaaaccttgtggaatgaactacgcgaaagtttcgacgagttggagcctgaccccaagtccccacatatcacatcatgattgagtcataagtgcatcctgaaaaccacttgtaagaaattatctaaacaccaaaaaaaacatggttattgttgttttaagtggatgaaaaacatataaaatattaaaccatactgcttacatcttcattgtctgagacttactacagctgcagagtgtcccttgtaaaatttggcgcatcttctgtttataagcatatttaatcggtgatgacatggatacgtattttatgtttttcccctccatgttcaacaaaatcccagagtgagcgatttatgtacaggtgatgccactgtctggattttttgtgagcaaactgttgaaattgccgtcccattatgccgctggactaattttagtggcctgttgccctggaggcacagcgagcaacatcgtgacctatttagcaagggcaaatgttgctctttcagttctgatgacagcagcaagcacttttgctgcagcgttcatgacccctctcctgacgtccaaactcgctgggcagtatgtcgcagtagatccaatgggactgttcgtgtccacatctcaggtcgtcctggcacctgtccttctgggtgctctgcttaatcagtactgcaatggtctggtccaactggtgtccccgttgatgcccttcattgcggtagcagcagtagccgtcctctgtggcaatgctattgcgcagaatgcttcggcagtcctggcatctggctcgcaggtggtcttgtctgtcggttgcttgcatgcatctggctttttcttcggctacgttctctcaagagtacttggcatcgatacctcctccgcgagaacaatctctattgaggttggtatgcagaactcagtgttgggccttgtccttgcaaacaagcacttgggcaaccctctcacggctgttccgtgtgctgtttcgagcatctgccactcggtctacggtagcattttggctgggatctggaggtctatgccaaacaaggacaagggagaatgatgcgatgatcaattcaaccatcagaattctttgttctccaacgatgaaagattttacccgtgagaataaacaccgcagagtggtgagcgctatataaaagcactgggcttgcactgttgttagtggttcatttgctttcttagattcggatagtacagttggtggatccatgattgatgtggatacatataccatgttgccatggcagcctgtttatcacacattcacttcaactagaacattgcggcgccctcacgggcgccctacc

SEQ ID NO: 89446 - DNA, 255 bp, Zea Mays
ttaagaaggtggacaaaggcccgggtagcaactaggacatggttgagtcagtaccacctatctcactggcctagaatgtccgaggtgatcaggatgttggaaggagacaggctcacagagagatgggaggtgtcgcagaacgtggacacgccagagttcgtctcatcggagctcctacttcaaaagtacatggattttgcagcggacgaatgctcgcttggtgtagaagccatggagctctctggactaaggtga

SEQ ID NO: 89447 - DNA, 1487 bp, Zea Mays
ttagccatggctgtgctgtttccatgggttgcttggctgcttgtctccctcgtcggcgcctgcctcctcgcgcgcaaccgtcggcgtggcctaccgccgggaccccacccgttgcccgtcatcggcagcctccacctgctcggtgaccagccgcaccgctccttcgccaggctcgccgagatccacggcccgctcatgtccctccgcttgggcgcagtgaccacggtggttgcctcctccccggccgtcgcccgggagttcatgcagaggcacgacgccttcttcagcaacaggaccattccggacgctcttggcgatcatgccaagaactcgacgatctggctgcccaacaacccacgctggcgcgcgctgcgaaagatcatgaccaccgagctgttcgcgccgcacaggctggacgcgctccagaacctccgacgcgagaaggtgcaggagctcgtggaccacgtcgggcggctggcgtgcaggggggaggccgtgaacgtcggccgagtggcgttcatcaccagcctgaacctcctgtcgcgtaccatgttctcacgcgacctgacgagcctcgacgacaacgacggcgcgtccaaggagttccaggaagtggtgacggacatcatggaagccgtgggaagtccgaacgtctccgacttcttcccgccgctcgcggccgccgacctgcagggctggcggcggcgtttggcgaagctgttcgcgcagcagcaccgggtcttcgatcgagagatcgacgggaggctgcgtagccgcgaggctggtgagtccaagaagaacgacttcctcgaccttctgctggacgccgctcaggacgacgacaatacggcgaagctggatcgcgacacactccgttcactctttacggacttgttttcagctgggagcgacacaagttccagcacggtggagtgggcaatggcggagttgctggaaaacccagcttccatggataaagctcgcgacgagcttgctacagtgattggtccaggaaagaacattgaagaaactgatattgggcagctgccctatctccaagctaccgcggagaaactttcaggctacatccctccgtcccgctgctaccgcggcgtgctccagtcgacacaaaagtaatggggtacaccatccctagaggctgtcgtatgttcataaacatatgggcagttggtcgagacaaagaaacatggcctgaacccgagacgtttatgcccgagaggtttttggggaagacagttgatctgagaggtggggattttgatctcatcccgttcggcggaggacgccggatctgccctgggatgccgctggcgattaggatggtgcatctgcttcttgcgtcactgttgaatcagttcacatggaggcttccagttgagattgaaggaagaggagttggcatggatgaaaaatttggcctgactttgatcaaggctgtgcctctgtgtgctatggctacaccaatt

SEQ ID NO: 89448 - DNA, 1408 bp, Zea Mays
tttttttccaacagtccctaataaaatattttgggaagaattttttagggaatttttggagttgccgtaagtccctgatcatttccacgaaggcttttctcaccggaaaaagatcggaattccggcgggaatataggccgccaaagtaggacctcgcaaaaggcggctaccaaaacgctccgttgcctttcctttccccacttccccggctcctgcctcccgccgccgacaccaccaaaaaccctagcagctccaccccgccgccgccgccgccgccatggatgaccctcggatgttcccatcaggatccgacgaccgctccgacgccgaacgccggctgtacaacccgtaccaggacctcaacatgccctacagctaccggacgctctacgacctccccacttcgccggagttcctcttccaggaggaggccctggcgcaacgacgctcgtggggtgagaacctcactttctatacgggcgtcgggtacctctccggcgccgttggcggcgccgtcctgggcctccgcgacgccgccaggggcgctgagcccggggagaccgccaagatccgcgccaaccgcgtgctcaacgcctgcggcagctctggccgccgcgtcgggaatacgctgggcgtcattggcctcatgtacgccgggatcgagagcgccatggtcgcggcccgtgaccgcgacgactggatgaacagcgtcgccgctgggcttggcacgggcacgctcttccgcgccgccaacgggccgcgatccgccgccgtcgcaggcgccctcggtgggatcctagccgccgccgccgcggggggcaagcagctagccaagagatacgtgaatgtcatatgatcgtgttttttttgtggtagcaatgatgagcgaacaatgatatcgtctagtgctctagtagggaaggggtttgccttttctgaaaactagctgagggcttgttcggttctaccccaatccatatggattgaggggtcaaaatcacctccaatccatatcaatcccctccaatccatatggattgaaaataaccgaacaagccctgaatgggaaattttgagcttgcattggaattgcaatgcaacatcgtgcttcaagatgctttagttctgctttgtccttatatgttaagggctagatgaaggtatttttatctccttgtttggatgcacatgtattgtcgtcaatccatttcatgttctcaatccatacatagaaaagtggattagggtgaacgttagtttaaattctaactaaatccacttctcacacatatggattgctaaacatgcccttagagtgtgtgtgtgtgtgtgtgttgtggtgatgtgtggagtgaaattctctgagatttgacactgcacccttaagtttagtgcctttgagataagc

SEQ ID NO: 89449 - DNA, 1751 bp, Zea Mays
ctcctctgctcgccgaaacaaaacgagccaacgagaccggatcaaaagaaggagacagcaacagccaacggcctgttccgctacggagtagggtaggccggggggcgcccgcgatggggccggacggcggaggggtgatcggggccgtggtctacggggcgctggcggtgctggcggtgcggctggtgctgtcgtacaagtcggcggcgcacgcgctgcggcgggcgtggcggtgggcggacgagcgggcgcaggcgtaccagcactacgaggtgccgcgcctcgccgcggacggcgcggagaacccgctgttccggaaggcggcggcgtacgtggcgtcgctgccgtcgctcgaggacgcggacgccgcctgcgtgctctcgtcggcggccaagagcaacggcttcgcgctgcgcctggggccgggccacgccgcgcgggacgcgttcctcggcgcccgcctcgcgtggaccagcgccggcgccgaccgcctcgtgctgcgcgtgcgccgccacgaccgcacccgcgtgctgcgcccctacctgcagcacctcgagtccgtcgccgacgagatggaggcgcgccgccgcgagctgcggctctacgccagcgccagcggagccggttcctcgccggcgccgcggtggacgtccgcgcccttcacccacccggccacgctcgacacggtggccatggaccccgagctcaaggcgcgcgtccgcgccgacctggagagcttcctcaagggccgcggctactaccaccgcctcggccgcgtctggcgcaggagctacctgctctacggcgctcccggcacgggcaagtccacgttcgccgcagcgatggcgaggttcctgggatacgacgtctacgacgtggacctgtcccgcgccggcgtcggcgacgacctccgcgccctgcttctggacaccaccccgcggtcgctcatcctcgtggaggacctcgaccgctaccttcgcggcggcggggacggcgagacggcggcggcgaggacggcgcgcgtgctcggcttcatggacggggtctcctcgtgctgcggcgaggagcgcgtgatggtgttcaccatgagcggaggcaaggacggcgtggacccggcggtgctgcggccggggcggctcgacgtgcacatccacttcaccatgtgcgacttcgaggccttcaaggcgctggcgagcagctacctggggctcaaggaccacaagctgtacccgcaggtggaggaggggttccaggccggcgcccgcctcagccccgccgagctcggcgagatcatgctcgccaaccgcgggtccccgagccgcgcgctccgcaccgtcatcagcgcgctgcagcacgtggcgccgtcagcgccgccagctgcgcagccgcagcggaccctcgccgcggcacggccgccgagactgacgtcgagatggtcggggcacttcgacgaggccagcgggagcgcgggtggtttcgccaaggacgcaccgatcagggagatcaagaagctgtacggtctgatcaagtaccggagccgcaaggacgccggcgtcgtgccggtggacgacagcgcggcgtcgcagaacgggcggggcagcgacgttagctacgagaaggaccggtgatagtttatctgggctttgctctctctcctctttttttcttcttcttcctgttttcacttttgatactgatttctaagtacaaattcttgtttattcgaaacgtcggggctgtacattgtgagt

SEQ ID NO: 89450 - DNA, 1659 bp, Zea Mays
atgggttccgtgcaggtgcagcgtgtcgccactgactccgcgtccgtccgtcccccatacggccacgcctctgggtctcccgcgctgccatggacgggggaagagagcagcaggcgccgccggagtcgcagcccggtaagaacctcatcaagatcccgtcctatcaggaggtcttcggcaccggcgcctccacctcttcctcgaagccgccatcctacaaccctcctgtagccacctccgccgccgccgccgcttcatcctcgtcgtcgtcctcgggatcattctcgcaggctttttctttcctcaagtcctccgagttctactcacctccgccgccgccgcctccccagcccaccaccaccccgaggccgactcaagctagcccctcagcgccgactccccaaagcaagaactccattctcgtcagtcataggcagagaggaaaccctctgctgaagcacattaggaatgctagatggacgttcgccgatgtcgtgccggactatgtgcttgggcaatcgtcatgtgccttgtacttaagtatcaggtaccatcttctacatccagactacttgtactatcggataagagagctgcagaagaatttcaggctgcgtgtcatcttgtgccatgttgatgttgaagatgtaatcaagcctttgcatgaaattacaagaacagcgctgcttcatgactgcacccttttgtgtggttggagcctggaggaatgtggtcggtacttggagactattaaagtatatgaaaacaagccagctgacagtattcgtgagcacatggataacgactatctatcacggttgacgcacgggcttacatccattcggcatgttaataaaacggacgttgtcacactcggttcatcttttgggtcgctctcacagatcatgaatggttctatggacgagctggctcgatgcccaggaatcggtgagcggaaggtaaggcggctctatgataccttccatgagccgttcaaacgggttcctgcccgaccacgaccaaacctcgtagtacccgataccccggaccgggagaaagcaaaaggccaaccttcgtctacagatggcagcagtttgcaagatgcggtagagaagccagatgcgtcgaagaagacgaagaaaggctctgatgtaagatcagccctcaccgttgcctttgccaagtattcggagaagatccgcagtcagggccgcgatgcgccaaacgaggccggtgagagtactggcggctcgaccgtggaagctgagagggcgggagactagatttagctgtaggatggttaacggtgctggagtaatgctagtttgttccttcctgttgggtgcttgttgttgtgactcggccgccgatttgcgcgtgcggcaccagtatttcccgcggcgtcctaggcatgtgtttttttaggctaaagaggggccagagaatcttcaacgatatcgaaacatttaagtgagattcctagacggtggcagccattccatcaccatataaatcacacttagaatctctctaaaacataatctgtattgccttctctacctcttaatatatttatatctctaaaacataatctgttgggtgctatatcctttccggcttcagttccaaaattaaaaagggaaaagaaaaagaaagaaa

SEQ ID NO: 89451 - DNA, 1655 bp, Zea Mays
atgggttccgtgcaggtgcagcgtgtcgccactgactccgcgtccgtccgtcccccatacggccacgcctctgggtctcccgcgctgccatggacgggggaagagagcagcaggcgccgccggagtcgcagcccggtaagaacctcatcaagatcccgtcctatcaggaggtcttcggcaccggcgcctccacctcttcctcgaagccgccatcctacaaccctcctgtagccacctccgccgccgccgccgcttcatcctcgtcgtcgtcctcgggatcattctcgcaggctttttctttcctcaagtcctccgagttctactcacctccgccgccgccgcctccccagcccaccaccaccccgaggccgactcaagctagcccctcagcgccgactccccaaagcaagaactccattctcgtcagtcatagagaggaaaccctctgctgaagcacattaggaatgctagatggacgttcgccgatgtcgtgccggactatgtgcttgggcaatcgtcatgtgccttgtacttaagtatcaggtaccatcttctacatccagactacttgtactatcggataagagagctgcagaagaatttcaggctgcgtgtcatcttgtgccatgttgatgttgaagatgtaatcaagcctttgcatgaaattacaagaacagcgctgcttcatgactgcacccttttgtgtggttggagcctggaggaatgtggtcggtacttggagactattaaagtatatgaaaacaagccagctgacagtattcgtgagcacatggataacgactatctatcacggttgacgcacgggcttacatccattcggcatgttaataaaacggacgttgtcacactcggttcatcttttgggtcgctctcacagatcatgaatggttctatggacgagctggctcgatgcccaggaatcggtgagcggaaggtaaggcggctctatgataccttccatgagccgttcaaacgggttcctgcccgaccacgaccaaacctcgtagtacccgataccccggaccgggagaaagcaaaaggccaaccttcgtctacagatggcagcagtttgcaagatgcggtagagaagccagatgcgtcgaagaagacgaagaaaggctctgatgtaagatcagccctcaccgttgcctttgccaagtattcggagaagatccgcagtcagggccgcgatgcgccaaacgaggccggtgagagtactggcggctcgaccgtggaagctgagagggcgggagactagatttagctgtaggatggttaacggtgctggagtaatgctagtttgttccttcctgttgggtgcttgttgttgtgactcggccgccgatttgcgcgtgcggcaccagtatttcccgcggcgtcctaggcatgtgtttttttaggctaaagaggggccagagaatcttcaacgatatcgaaacatttaagtgagattcctagacggtggcagccattccatcaccatataaatcacacttagaatctctctaaaacataatctgtattgccttctctacctcttaatatatttatatctctaaaacataatctgttgggtgctatatcctttccggcttcagttccaaaattaaaaagggaaaagaaaaagaaagaaa

SEQ ID NO: 89452 - DNA, 837 bp, Zea Mays
caacacaagaaatccaccaaataaaatatgcaaatgtataaatgttactgttcttcatgtatttgcagtcgctctcacagatcatgaatggttctatggacgagctggctcgatgcccaggaatcggtgagcggaaggtaaggcggctctatgataccttccatgagccgttcaaacgggttcctgcccgaccacgaccaaacctcgtagtacccgataccccggaccgggagaaagcaaaaggccaaccttcgtctacagatggcagcagtttgcaagatgcggtagagaagccagatgcgtcgaagaagacgaagaaaggctctgatgtaagatcagccctcaccgttgcctttgccaagtattcggagaagatccgcagtcagggccgcgatgcgccaaacgaggccggtgagagtactggcggctcgaccgtggaagctgagagggcgggagactagatttagctgtaggatggttaacggtgctggagtaatgctagtttgttccttcctgttgggtgcttgttgttgtgactcggccgccgatttgcgcgtgcggcaccagtatttcccgcggcgtcctaggcatgtgtttttttaggctaaagaggggccagagaatcttcaacgatatcgaaacatttaagtgagattcctagacggtggcagccattccatcaccatataaatcacacttagaatctctctaaaacataatctgtattgccttctctacctcttaatatatttatatctctaaaacataatctgttgggtgctatatcctttccggcttcagttccaaaattaaaaagggaaaagaaaaagaaagaaa

SEQ ID NO: 89453 - DNA, 109 bp, Zea Mays
accgccgcctgaccagggagcaccgccgccggttcttgttgagtgattggcgcttccaaaaaggtgtcaacaactacactgtatattatatatattctattattaataa

SEQ ID NO: 89454 - DNA, 1812 bp, Zea Mays
cagccgtccacagcatcgagagtctcccagccacagaagatcctggcatcgcctataaattgcccatcacctcatgttcccttccccgcaccgctctgaaaaccattcccaggcccgcccgacttcctgcccttgtacaacgcacggtccccgtcccaatggcccagactctgtccgccgcctccgagctggccaccctgaagcgcccgttcggcaacgacgggttcggcgatggcagcaacaacggcagcgccaccggcgagaagcccaaggcgcggcggcgggaggcggacccggcggcggcgctggccgcggcgcggcacgagttcggcgagcacggcggcgtgaacatgtccatcgaggcgtcggcgacgttcacggtgatggagccggacacgatgcggcggctgttcgcgggcgagctgggccccgaccgcggcgacatgtacatctacagccggcacttcaacccgacggtgctggcgctggggcggcagatggcggcgctggagggcacggaggcgggctactgcacggcgtccgggatgtccgccatctcgtccgtgctgatgcagctggtgggcgccggcgggcacgtggtggcgtcgcggtgcctgtacggcgggacacacgcgctgctggcccggttcctgccgcgcgcctccggggtgcgcgccaccttcgtggacgccgacgacgaggccgccgtgcgcgccgcggtggtccccggcgagacgcgggtggtgtacgtggagaccatgtccaacccgacgctcgccgtcgccgacatccccatgctggcgcgggtggcgcacgaggccggcgccaagctcgtggtggacaacaccttcacccccgtggtggtgtcgcccgcgcgcctcggcgccgacgtcgtcgtccacagcgtctccaagttcatcagcggcggcgccgacatcatcgccggcgcgatctgcgggccggcgagcctggtgaacgcgatgatggacctgcaggagggggcgctgatgctgctgggccccacgatgaacgccaaggtggcgttcgagctgtcggagcggctgccgcacctgccgctgcggatgcaggagcactcgcgccgcgcgctggcgttcgccgagcggatgcaggggctgggcctgcgcgtgctgtacccgggcctcccgggccacccgcaccacgcgcgcctggccgccatgggcaacccgggctacggctgcggcggcatgctgtgcctcgacatgggcaccgaggagcgcgccaaccgcctcatgcaccacctccagaacaccacccagttcggcctcatggccgtcagcctcggctactacgagacgctcatgtcctgctccggcagcagcaccagcagcgagatgccgcccgaggaccgcgcgcgcgcgggcatctccccgggcctcgtccgcatgtccgtcggctacaacggcacgctggagcagcgctgggcgcagttcgagcgcgcgctcgcgctcatgcagacgccgacgcccacgcaccacctcaagcaggccgccgaccgcgacggccccgaagccgccaacaaccaccaccgcaagcactgacgcgcttgcgcttccgagcgtgcgtgcgtgcatgcatggcctgtggacttgtgtttgtcgtgttcgtgtatatactactagtgccattcaagcaagaatattaaacaccatctgatccctctggttcagatggatcgatatgccagtgcaagcggctcgatctctggggaacctgggaatggacctgaataaatgggatttgtctttaacggtgtcctccttactctctatt

SEQ ID NO: 89455 - DNA, 1568 bp, Zea Mays
ttctatctcttctctctcactcccatctcttccaccaggacgaagccgccgccgcctctgccagcgcacccgcctcgcccccgctcgctgcggccgcctctgccagcgcacccgccccgcccccacccgccgcggccgccctcgcccgttgctctcgccgacgcggccacctccggccccgcccgccgtggccgccctgctgtacggctacaagaacaacaacctcaagtggctggagcgcttcgcctacatcaacaccaccatctaccccttcgccttgctcccactgctcgcctactgtaccctgccagccgtctgcctcctcaccggcaagttcattatgccgtcggtggatgcgtgcaggtcacaggatcttcaggggctgtagcctgcaggaaaagagggcttttgataatactgagagatgagataatgaatttggtggccgagcctcacatggtgatggtgatccttgtaccttgtccttctctggttcatccataggcgcatgagaggctgctgcatttatcatcgggggctatccgggtctggaccggagctaggaatttatgaggttttgtcactctctagcagaccagctggcaagtggcaactgaacttctgttatttatcaattaaaagaaagaaacttaacttgtgatcgagaaaaaaaagaaaacaacttattagcaaagtatgtattcacatgatcacatccatgttatggctactgggtctattcttttagacaaggattaccccccatgattaatctgactttggtctcccttatcattagaatctagtgagcacgattcttttttttaaaaaatatattagaaatagtaagtacaaacctcttcttgttaattaccctacgaatttgatatgtttcatattaggttcctttataatttatgttcacacacgctaatcaagctaatttctttactttaataaataactataattggtttttgcagcaagaatcttgaagtgagaattgggagaaggaaatggttcttgaagatatgaaaagggaggaagatttgctgaaacaagttaaggaattatacaggaagcagaagcaagagctcatggattatgtcactcaaccagcagcgacacagacgtcacgtgattcgccagcaactcattcacccgcaactcctgagagtaatctgtttggagccaagctctccaacaagtggcggtaacattttggtggcgtacgtccctattttgttggggcttattgcctgttctggcatcagcacgacgtaactagcttttgccacaagcttggtgttagtttgtgagggtgataggccagtgaaattgttctgctgcttagcatagttggccctatggataccaattgatctataggcagccggaaacttggctaatttattatgactatggatgagacttttgtgatgtaattgatgagactattgatttaaatattgttatatgattgtgtgtgagatgttttatatgaaaatatgttgtgatgttgatatatttgttatgttgtgggatgtggtgtaaaataaaaataaaca

SEQ ID NO: 89456 - DNA, 1187 bp, Zea Mays
ttctatctcttctctctcactcccatctcttccaccaggacgaagccgccgccgcctctgccagcgcacccgcctcgcccccgctcgctgcggccgcctctgccagcgcacccgccccgcccccacccgccgcggccgccctcgcccgttgctctcgccgacgcggccacctccggccccgcccgccgtggccgccctgctgtacggctacaagaacaacaacctcaagtggctggagcgcttcgcctacatcaacaccaccatctaccccttcgccttgctcccactgctcgcctactgtaccctgccagccgtctgcctcctcaccggcaagttcattatgccgtcggtggatgcgtgcaggtcacaggatcttcaggggctgtagcctgcaggaaaagagggcttttgataatactgagagatgagataatgaatttggtggccgagcctcacatggtgatggtgatccttgtaccttgtccttctctggttcatccataggcgcatgagaggctgctgcatttatcatcgggggctatccgggtctggaccggagctaggaatttatgaggttttgtcactctctagcagaccagctgcaagaatcttgaagtgagaattgggagaaggaaatggttcttgaagatatgaaaagggaggaagatttgctgaaacaagttaaggaattatacaggaagcagaagcaagagctcatggattatgtcactcaaccagcagcgacacagacgtcacgtgattcgccagcaactcattcacccgcaactcctgagagtaatctgtttggagccaagctctccaacaagtggcggtaacattttggtggcgtacgtccctattttgttggggcttattgcctgttctggcatcagcacgacgtaactagcttttgccacaagcttggtgttagtttgtgagggtgataggccagtgaaattgttctgctgcttagcatagttggccctatggataccaattgatctataggcagccggaaacttggctaatttattatgactatggatgagacttttgtgatgtaattgatgagactattgatttaaatattgttatatgattgtgtgtgagatgttttatatgaaaatatgttgtgatgttgatatatttgttatgttgtgggatgtggtgtaaaataaaaataaaca

SEQ ID NO: 89457 - DNA, 1044 bp, Zea Mays
ttctatctcttctctctcactcccatctcttccaccaggacgaagccgccgccgcctctgccagcgcacccgcctcgcccccgctcgctgcggccgcctctgccagcgcacccgccccgcccccacccgccgcggccgccctcgcccgttgctctcgccgacgcggccacctccggccccgcccgccgtggccgccctgctgtacggctacaagaacaacaacctcaagtggctggagcgcttcgcctacatcaacaccaccatctaccccttcgccttgctcccactgctcgcctactgtaccctgccagccgtctgcctcctcaccggcaagttcattatgccgtcggtggatgcgtgcaggtcacaggatcttcaggggctgtagcctgcaggaaaagagggcttttgataatactgagagatgagataatgaatttggtggccgagcctcacatgcaagaatcttgaagtgagaattgggagaaggaaatggttcttgaagatatgaaaagggaggaagatttgctgaaacaagttaaggaattatacaggaagcagaagcaagagctcatggattatgtcactcaaccagcagcgacacagacgtcacgtgattcgccagcaactcattcacccgcaactcctgagagtaatctgtttggagccaagctctccaacaagtggcggtaacattttggtggcgtacgtccctattttgttggggcttattgcctgttctggcatcagcacgacgtaactagcttttgccacaagcttggtgttagtttgtgagggtgataggccagtgaaattgttctgctgcttagcatagttggccctatggataccaattgatctataggcagccggaaacttggctaatttattatgactatggatgagacttttgtgatgtaattgatgagactattgatttaaatattgttatatgattgtgtgtgagatgttttatatgaaaatatgttgtgatgttgatatatttgttatgttgtgggatgtggtgtaaaataaaaataaaca

SEQ ID NO: 89458 - DNA, 887 bp, Zea Mays
actttaattaggaagttatcaggtgcatgtcatctcatcttctttgacgtaatggtgtcatgagcatactttaattaggtgaataaatttacatgcccatactttctcgtcgccatggacagtagtgcctttggcctttattatgcgtgccttcatttgtgtgctggtgactctctcatgctattgtggcaggtggatgcgtgcaggtcacaggatcttcaggggctgtagcctgcaggaaaagagggcttttgataatactgagagatgagataatgaatttggtggccgagcctcacatgcaagaatcttgaagtgagaattgggagaaggaaatggttcttgaagatatgaaaagggaggaagatttgctgaaacaagttaaggaattatacaggaagcagaagcaagagctcatggattatgtcactcaaccagcagcgacacagacgtcacgtgattcgccagcaactcattcacccgcaactcctgagagtaatctgtttggagccaagctctccaacaagtggcggtaacattttggtggcgtacgtccctattttgttggggcttattgcctgttctggcatcagcacgacgtaactagcttttgccacaagcttggtgttagtttgtgagggtgataggccagtgaaattgttctgctgcttagcatagttggccctatggataccaattgatctataggcagccggaaacttggctaatttattatgactatggatgagacttttgtgatgtaattgatgagactattgatttaaatattgttatatgattgtgtgtgagatgttttatatgaaaatatgttgtgatgttgatatatttgttatgttgtgggatgtggtgtaaaataaaaataaaca

SEQ ID NO: 89459 - DNA, 734 bp, Zea Mays
tttacaccagccttgtgtgaatataccatgctctacaaaaccatgtgagcacagtaacaacaatctgtgcaagcatagcggagagacggagaggaagaacaatgaatacgaagaagcagagacagataacgggcaagagaagctagagaggagagagagagagagcgaagtttctcccaatcaaaaatgtaatgatgaaaactttcatcacctgccagatacacataagaaagagagaagtggaagcaggccatcattacaccaatcttgttgctcctcgacctcgatctccgcagcaagcaagcaagcaaacaaaaaggcaccatgtggaaaagtaagatctagctagctaggagtggaaaacacagtagtactccacaccgtactacaagaacaaccaggaaactcacgaacactccaagcaaatatttcagaaccaaagaccaagaacacaagtttatgtagtactagcagctcctcctaataactctccgacggtattattttgaagctattcctgaggggaatgaagcctggtccgagatcttgcatatccgaggaataaaaaacaacacatgcaagcatggatcatcctcaaatcgcaaagcaagaccttgaaccagacaacatttcactcaaaagcaagtagcttcatatctttcccccttctcccaccaggtccctcgctctcaacccgcccggaccccctctcatcctctcatctctatttcttg

SEQ ID NO: 89460 - DNA, 270 bp, Zea Mays
atggcgctcaccgctcgtgtcctgctagttctcgcggccacccttaccgttgccgtggctattctgccggcgacggcgcgggcggcgtgggtggactacccgtccggggtgccgtgcggggtgaccatccccgtggagcagtgcgaccccggggacgcagcggcgaacagcgcgtgcatggacgtgtgccactacggcgggtgccggcgcggcggccagtgcgtgtcgctggggctcgccaggggccggggctgccactgcaagtgctag

SEQ ID NO: 89461 - DNA, 608 bp, Zea Mays
atattcgtagcgcccatcccaccgagcgccacacggccgccagccagacgacgttgttgccgtcgcctcgcatcccagtcccagcgagccgccgcccggagagcagagactgagaaacagagatcgcatggcgcgctccctcgtcctcgtggccacgctcaccgcggtcctactggcggcggcgcctcctccgacgcgggcggcgtgggtggagtcggactacccgtcgagcgtgccgtgcggggtgaccatccccgtggagcagtgcgacccggcggtcacggcggcgaacgccgcgtgccgggacatgtgccactacgggggccggcgaggcgggcggtgcgtgtccccgggccggctcgcgctggtgcagggatgccattgcaggtgctagctcgccggcccgggcggccgccaacgcgcgtgacgtgacgggcggcggccgggccggggcaggggggacgcagtgccttccccgtgggaaataacaggcctgcatgacggcgtgcggatagcagtgtgacctaatcgtatctagctctgtttgttgatgctgtgatctgttgacttggtacaatgctacagcacgcaatgtgttttgtcctgca

SEQ ID NO: 89462 - DNA, 848 bp, Zea Mays
gagggggcgcggttgcctctgagcactcggcgctgtcgaatgcgggcgccgcagccccgggccccggcgcggcctcgtctctctcgctcggccacatcgtctttggcgttgcggggtcggcgcatctctggccacgccgccgcgagtacgtccacttgtggtgaaccctccagcctccactatgcgcggcaacgtcgggctcgacgcgggcgcgcccggcgcgccggggcctagcaccccctgggtgggctccctcccgccgatccgggtgtccgcggacacctcgcggttcaggtacaccaaccccacgggccacccgtcggggctccggatcgcacgcatcgccgctgaggtcgtgcggctcgtcggcggaggggcgggggcgcggtgggttgcgcttgtcgacgacgacaccgtcctgcgcgcggacaacctggtcgccgtgctcagcaagtacgactagagggaaatggtgtacgtcggggcgctgtccgagagccactccgctaacacatacttcagccatagcatggctttcggaggtggcggcatcgcgctcagcttcccactcgccgctgcactcgcacagacgctcgacgtgtgcatcaagaggtaccccaagttgtatggaagcgacgatcgcctccatgcttgcattacagagctcggtgtgcccctatcccgcgaatacggattccaccagtgggatatcagaggcaatgctcatgggttattggcgtctcatccaattgttcctttcatcagtattcaccatgtggagcttgtggaccccatataccctggattgaactcccttggaaagtctggagctgtttatgaaggctatg

SEQ ID NO: 89463 - DNA, 469 bp, Zea Mays
aagctttggggtgttcacggagaggttgagttgatgcggtgaaaacagcacgtgaaagggtaatgagagatcgatcgcgcggttaaggagacaaggtgacaagaaaggcagatgacgcagtgggtgtttgcactgttactgcggtaaattttgtgcatgcggctactactctacagtgggctagtttgttgcaagggagctgcggaaaaaaatggaaaagaagagcttgctcgtcatgtgccatgcagaacagtcagtttgatgcatgcgggattttttttatatttatccttgttttcccctctttttcatttttcaccatttcttttatgttctgcaacaagtaaactgtccattaagtattacctaagttttttctttctttctttctttctcaaactgctgttaccgaaatttacagtgtatacttgagaaatgttatatgttaaaattcttgctgttaattata

SEQ ID NO: 89464 - DNA, 1991 bp, Zea Mays
gcttacatcatcccctccacagtttacatcctgtgatcctgataagttggcacttcacagttcaaaccccccaccaaatctgaatcccccatacacctctcccatatatatatcagccttccgcccatcccaaccccaagtacacagagaaacaaatacagagaggcagaggcgccatcatctcccttcttcttcacccacaagcctctaggtgcctcacaagtcctcctccgctgtcatctcccctctccactcctccctggtttgttcaagaaactttctttggacaagatgggagtgcagaggtacaggttcttctgctgcgggtgtggcgccaatgcggcggccgacggccgggaacgcgacgaggacgggggcttcggggtgtccgacggcaaggccgagaagggggtcgaggccggcccgcgggggctgtcgtgggcgcaggttgaggcgatgacgggcgggttcacctcggccgtggtcggcgagggcgggttcagcaccgtgtacctggcgcgcctctccggcgcgctcgccgccgtcaaggtccaccgcagcagcgagcgcctccaccgcgtgttccgccaggagctcgacgcgctccagcgcgtccggcacccgcacatcgtccgcctcctagccttctgcgaccagcaaggtgggtcatctcctctgctctgctttctcgcgctccgcctagtgcgccttccttgtgctgtgctgagtgctgacggaaggctctggcttttttttccccccgagtcgcagacgaaggcgtgctggtgctcgagttcgcggcgaacgggaacctgcacgagcggctccacggcgggggcaaggccgcggggacgatgccgtgggcgcggcgggtgtcggtggcgctgcaggtggcgcgcgcgctcgagcacctgcacgaccgctgcgagccgcaggtggtgcacggcgacgtgaaggcgtccaacgtgctcctggacgcgtccatgtccgccaagctgtgcgacttcgggtcggcgcggatggggttctcggccgccgtccgcccgcgctcgtccgcgcgcaccatgctgggctcgccaggctacgtcgacccgcactacatccgctccggcgtggtcaccaagaagagcgacgtgtacagcttcggcgtcctgctcctggagctgctcacggggatggaggccttctgcgcggaggaaggccggctcctcactgccgtcgtcgcgccgcggctcagggcaggcgacccgccctgcgacgcgcgcgggttggtcgacgagaggctcggcaccgcctacgacgccgccgaggccgccgcggtggcggcgctggccgcggcctgtgtcggcgacaaccccagcctccggccgtccatggccgacgtggtgcgcaccctggagcagcgcgcgcagggatccatctccgccgtggagaggagatcggacggccagaggaaggtgtgagccacgagggcggggtcgtcgcgtcctccgaggcgcccagatctggcttgccgacttgttaacttgcggtgctgacgtgcgtgcatcgcacacgtggcgcgcgaacattggttgctaggagaacaaagcgttgctggtgtgcgagcacatcaaaaggacgaatcaaaaaagaagtggagaaaagcgtggtgaaaattgaagagagagagagagagagagttgattaggggaaaggtttggaggaggtaaaaaggcagggctaatctgtgtgctgatggggggtttgcatcatatgttatgtgccaaagcagcatctacttgggagagcccaaaaaatatggatcgtgcagcacacgattctaagattttgttgattcttattggtagtttcttttgttattttggcaaagtacatggagtgtttcttctttgtacctataatttagctagatttcaatttgtattggatttgttgagagcttggtttgttaaacctgtgtgaatggggaaaaaatcgcttcttgagaa

SEQ ID NO: 89465 - DNA, 1794 bp, Zea Mays
tccgcccatcccaaccccaagtacacagagaaacaaatacagagaggcagaggcgccatcatctcccttcttcttcacccacaagcctctaggtgcctcacaagtcctcctccgctgtcatctcccctctccactcctccctggtttgttcaagaaactttctttggacaagatgggagtgcagaggtacaggttcttctgctgcgggtgtggcgccaatgcggcggccgacggccgggaacgcgacgaggacgggggcttcggggtgtccgacggcaaggccgagaagggggtcgaggccggcccgcgggggctgtcgtgggcgcaggttgaggcgatgacgggcgggttcacctcggccgtggtcggcgagggcgggttcagcaccgtgtacctggcgcgcctctccggcgcgctcgccgccgtcaaggtccaccgcagcagcgagcgcctccaccgcgtgttccgccaggagctcgacgcgctccagcgcgtccggcacccgcacatcgtccgcctcctagccttctgcgaccagcaagacgaaggcgtgctggtgctcgagttcgcggcgaacgggaacctgcacgagcggctccacggcgggggcaaggccgcggggacgatgccgtgggcgcggcgggtgtcggtggcgctgcaggtggcgcgcgcgctcgagcacctgcacgaccgctgcgagccgcaggtggtgcacggcgacgtgaaggcgtccaacgtgctcctggacgcgtccatgtccgccaagctgtgcgacttcgggtcggcgcggatggggttctcggccgccgtccgcccgcgctcgtccgcgcgcaccatgctgggctcgccaggctacgtcgacccgcactacatccgctccggcgtggtcaccaagaagagcgacgtgtacagcttcggcgtcctgctcctggagctgctcacggggatggaggccttctgcgcggaggaaggccggctcctcactgccgtcgtcgcgccgcggctcagggcaggcgacccgccctgcgacgcgcgcgggttggtcgacgagaggctcggcaccgcctacgacgccgccgaggccgccgcggtggcggcgctggccgcggcctgtgtcggcgacaaccccagcctccggccgtccatggccgacgtggtgcgcaccctggagcagcgcgcgcagggatccatctccgccgtggagaggagatcggacggccagaggaaggtgtgagccacgagggcggggtcgtcgcgtcctccgaggcgcccagatctggcttgccgacttgttaacttgcggtgctgacgtgcgtgcatcgcacacgtggcgcgcgaacattggttgctaggagaacaaagcgttgctggtgtgcgagcacatcaaaaggacgaatcaaaaaagaagtggagaaaagcgtggtgaaaattgaagagagagagagagagagagttgattaggggaaaggtttggaggaggtaaaaaggcagggctaatctgtgtgctgatggggggtttgcatcatatgttatgtgccaaagcagcatctacttgggagagcccaaaaaatatggatcgtgcagcacacgattctaagattttgttgattcttattggtagtttcttttgttattttggcaaagtacatggagtgtttcttctttgtacctataatttagctagatttcaatttgtattggatttgttgagagcttggtttgttaaacctgtgtgaatggggaaaaaatcgcttcttgagaatgcgcctttggtgaacggcacagtcattgttc

SEQ ID NO: 89466 - DNA, 835 bp, Zea Mays
acgtttcctagggcacggtaatgccatgccgtgagagcaagagaggaggtagggaaaaggaagttggctttcctggcggcggcgcgctgcagcctggtctttcggccgtgctgcagcctggtctttcggcgctcgcgaattcctggccgtcagctgcgcaacctcctctagttcggctccataactatggagatttgctccctgctcagcaactcgcctaaaatcgctagctctctgttcctattcctcctctcggttccagtcacggtttggatcgattccttcgattcttggtgttctggtgttaatcctgctggtggaagaaggtggaggtggccctgcttgtgcgcagcgcggttttcctgcgctccgttgtctcaccagtgcacctgtgtggtgctctgtctgttctgattattgtccaccgtggactggtgcctgggctccctgttgcgtggtgttcgtcttctcgggctggtgtcgtggacgtctccctcggctccggcagcggctctagtatctccgtcaacctcccgccgtgcaggcccggacgtgggcgacggaattggttttctgggacagaaccttgtgttcgctgagctggtcttcccacgtagacaatctacgtgttgtgagttattcgttgtcttactttatttactgtttaattttgtgcaatctgctagtatcaaatacttgggtgtgattgcactgttgtgggcggatttatgtgttcgatgatgatagcggtgtagtgagacagcgtgacagtctgggttttagtgtattatcattttcagcattgatattatttgtgcctaattaaatctctctt

SEQ ID NO: 89467 - DNA, 749 bp, Zea Mays
tttaagataaacgatcatgtttatttatttaatctgccttcttcatgtgcaagccatgtttaattataaaatggacctgagaagctattttacatgtttacatgttctagaattgctactgttcattgctgcaataattacatatggcatttatctgagttatatgcttgttttattcggaattagaatatttaatctatttaaatatgtagaaagcatgtcacttatttctctaagcttacaacatgaactctttgccaaaatgtagccttagtttgattcgtcccttttgttggatccatactgacattcaaccgtgctccaatgagaagtggtggctgctgccactcatattgtgtattgcaagcgtctgtgaaactctcgtcatataaggcttgttccagcagaccgttctccctaccccgacaaaaactactcaatcatagtaaatcgatgtatctatgggaccaatctggtggaacggctgaataataagaatcacaaccatgttctgtggaggattccttacatcgatttatcacatgaggtcctgacgcacctggtcaccctggcggcgcgtcggcaagaacactggtcttgacgcacggaagagaaggcctggtctccctaacggcgcgtgcgtcccggctgcacgaactgctatatttagaagtctatttagagagcttttgaagaaacgactttttatttaactattggagttgcgccctatgggactagattgcatc

SEQ ID NO: 89468 - DNA, 1084 bp, Zea Mays
gcaagaggatcctagccagtgccggccagaacgcgagcaggctcgtgttcttggccacgaacatgagccagccgtactgcgcggacgcgatggcgcgcaccgcgggctcgtccagccgctcgccgaagcacatgagcacgaggaggcagaacatggcgtaccggaacgcctccatcgcggggggcggcgcctgggccctcgcctgcgcctcctcggcctcccgcccgagcttctcagcgagcacgcggcgcacccacgcgcgcgccggcgcgaacagcttcacccgcgacgggtgcagcgtctcggagacgaggttgcggcgcaggaggcgccacacgggcccgtagctggaccgcgagatggtgttgccgctctcccccaggagcgcgcgcgtgaccgcggggcggtcggcgagcgcggccccgctctcgaccagggccgcgtgcgcgacgcggcggtcagcgatgaagaccgacaggctcggccctgcccgcagggacacgacggggccgtaacgcgcgacgaggcgccggagcagcgcctccacgtcggacgagtagcgcctcagcaacagcaggttgccgaggaacggcagacccggtgggcccggcgggagccgggcgccgttcttgcccttgcggggcccgtgccgcttcccgagcaggatggcggcgagaggcaggaggaggagggcggcgaggagtaggagttgcgtagcagccatggccaaatcttcttgctctgctttgcctcgtcgtcgtcggtcacctgtggtctataccgagctggagagcaaggaaacctcactctctctcagtacctatcgacgtcatggctgatggaaatagattcttttggcatctttttcttgaacgggtagaggagatgacaccggcatgattgaaatctgcgccaaaacaagatagcgttgtttacttaatgcatggcgtgaacaatgagcccatttcaaaaaagaaaaaacaagcagtccaatgcatagaacacggatcagatattcagatcgtcgtgtgaccaccggagaatattttgggtggagatgaaagggatctttgacagagcggag

SEQ ID NO: 89469 - DNA, 2100 bp, Zea Mays
atacaccatctcgccctccaggcccatcatcacccccagcacccaccccacctgcccacttcgtcttcctcctctctgtcacctcgccacccttcttcttgcgttctccatcgcattgcatctgtagcacgcagttctccctggtcttcttccgcacgcgtctctccccgttctgccagtcctagttgaaccagagaggctgttcttgtgcgtgtgagagagagagctggacaccgtcgccccacccattacgccgtagccaaacctggagaaaaacctgtgaagcatgtaactccagtccctgtccaaaatccaaacccaagccccccaaaaaaaatcacaaaaaaaaaaacaccttcaagatcgttctccaaaagctagcaccggtaatcagcggcgaggcgtaagtcggtaggctggatacgcccccactaattccttagcacaaaatcaacaaaagcctccggatcatgtaagtttcgccaccatcatctttgctcgccgcccagctaaaaaaacaaaaaaaaaataagaaacccagcagcatgcatcgtcattagtagccatcagtcgtagcctatcgatcgtcctgggagccatcccagcattatcgtagcattacctcagcaaaaaccatcaaatcatgtaattagtgtgctcccgcgtcctatttctgctgcactgccggcagtcgaaaaaaaaaccaaaaaaaaaagattgtccttgagagtgagtgagagagcaagcaggttgctagctgctggtagagagagctagcagttacagccgaccaggtagctagatagctagccatggagccggggtcgacgcccccgaacgggtcggcgccggcgacgcccggcacgccggcgccgctgttctccagcggcgggccccgggtggactcgctgtcgtacgagcgcaagtcgatgccgcggtgcaagtgcctgccgctgccggcggtggaggggtggggcgtggcgacgcacacctgcgtcgtcgagatccccgcgccggacgtctcgctcacccgcaagctgggcgcggagttcgtgggcacgttcatcctcatcttcttcgcgacggcggcgccgatcgtgaaccagaagtacggcggcgcgatcagcccgttcgggaacgcggcgtgcgcggggctggcggtggcgaccgtgatcctgtcgacggggcacatctccggggcgcacctgaacccgtcgctcaccatcgccttcgcggcgctgcgccacttcccctggctgcaggtgcccgcgtacgtggccgtccaggcgctggcatccgtctgcgccgccttcgcgctcaagggcgtcttccacccgttcctctccggcggcgtcaccgtgcccgacgccaccgtctccaccgcccaggcgttcttcaccgagttcatcatctccttcaacctcctcttcgtcgtcaccgccgtcgccaccgacacccgcgcagtgggtgaactcgccgggatcgcggtgggagcggccgtaacgctgaacatcctcgtcgccgggccgacgacgggcgggtccatgaacccggtgaggacgctggggccggccgtggcggcggggaactaccggcagctctggatctacctgctggccccgacgctgggcgcgttggcgggggccagcgtgtacaaggcggtgaagctcagggacgagaacggtgagacgccgcgcacgcagcgcagcttccgccgctgacgacgcacactggccacgggcgcgagacattgtccggccgtgtcacgcacgcccgcgtcctcctccgccgccgcgtaacgcacggccacgacgtgtccgcggtcgtacgtgctgtgtctgtgtgtaccaataaataagccccgttttgcttcgtccagaacggtccagtgctatgtgtacgtggtctgtgttgtgatttgcgaattggattattgtgggtcgtctcgtcgaggtctctcgggtgtcgggtgggtctgatgcgatccatcagcgtcgtgtccgaataaaagccacgccgatgcgccggctgacgggcatctggatgtgtgatttctgaacaagatttgcttaatttcacttgcttaatttccgctgcgtc

SEQ ID NO: 89470 - DNA, 1674 bp, Zea Mays
atacaccatctcgccctccaggcccatcatcacccccagcacccaccccacctgcccacttcgtcttcctcctctctgtcacctcgccacccttcttcttgcgttctccatcgcattgcatctgtagcacgcagttctccctggtcttcttccgcacgcgtctctccccgttctgccagtcctagttgaaccagagaggctgttcttgtgcgtgtgagagagagagctggacaccgtcgccccacccattacgccgtagccaaacctggagaaaaacctgtgaagcatgtaactccagtccctgtccaaaatccaaacccaagccccccaaaaaaaatcacaaaaaaaaaaacaccttcaagatcgttctccaaaagctagcaccggtaatcagcggcgaggcgtaagtcggtaggctggatacgcccccactaattccttagcacaaaatcaacaaaagcctccggatcatgtaagtttcgccaccatcatctttgctcgccgcccagctaaaaaaacaaaaaaaaaataagaaacccagcagcatgcatcgtcattagtagccatcagtcgtagcctatcgatcgtcctgggagccatcccagcattatcgtagcattacctcagcaaaaaccatcaaatcatgtaattagtgtgctcccgcgtcctatttctgctgcactgccggcagtcgaaaaaaaaaccaaaaaaaaaagattgtccttgagagtgagtgagagagcaagcaggttgctagctgctggtagagagagctagcagttacagccgaccaggtagctagatagctagccatggagccggggtcgacgcccccgaacgggtcggcgccggcgacgcccggcacgccggcgccgctgttctccagcggcgggccccgggtggactcgctgtcgtacgagcgcaagtcgatgccgcggtgcaagtgcctgccgctgccggcggtggaggggtggggcgtggcgacgcacacctgcgtcgtcgagatccccgcgccggacgtctcgctcacccgcaaggtgggtgaactcgccgggatcgcggtgggagcggccgtaacgctgaacatcctcgtcgccgggccgacgacgggcgggtccatgaacccggtgaggacgctggggccggccgtggcggcggggaactaccggcagctctggatctacctgctggccccgacgctgggcgcgttggcgggggccagcgtgtacaaggcggtgaagctcagggacgagaacggtgagacgccgcgcacgcagcgcagcttccgccgctgacgacgcacactggccacgggcgcgagacattgtccggccgtgtcacgcacgcccgcgtcctcctccgccgccgcgtaacgcacggccacgacgtgtccgcggtcgtacgtgctgtgtctgtgtgtaccaataaataagccccgttttgcttcgtccagaacggtccagtgctatgtgtacgtggtctgtgttgtgatttgcgaattggattattgtgggtcgtctcgtcgaggtctctcgggtgtcgggtgggtctgatgcgatccatcagcgtcgtgtccgaataaaagccacgccgatgcgccggctgacgggcatctggatgtgtgatttctgaacaagatttgcttaatttcacttgcttaatttccgctgcgtc

SEQ ID NO: 89471 - DNA, 1238 bp, Zea Mays
gagtttgatcgaggcgtccgtgactggagtggttgcatacttgcatgcgttgttttgtctctctctctgtgtcgctgaaatattggtcacgtccattccaatctcatctcaaatctgtccatgggctgacaagaccgcgcgctgaaaacatttgcgtggtggctgctgcacgcagctgggcgcggagttcgtgggcacgttcatcctcatcttcttcgcgacggcggcgccgatcgtgaaccagaagtacggcggcgcgatcagcccgttcgggaacgcggcgtgcgcggggctggcggtggcgaccgtgatcctgtcgacggggcacatctccggggcgcacctgaacccgtcgctcaccatcgccttcgcggcgctgcgccacttcccctggctgcaggtgcccgcgtacgtggccgtccaggcgctggcatccgtctgcgccgccttcgcgctcaagggcgtcttccacccgttcctctccggcggcgtcaccgtgcccgacgccaccgtctccaccgcccaggcgttcttcaccgagttcatcatctccttcaacctcctcttcgtcgtcaccgccgtcgccaccgacacccgcgcagtgggtgaactcgccgggatcgcggtgggagcggccgtaacgctgaacatcctcgtcgccgggccgacgacgggcgggtccatgaacccggtgaggacgctggggccggccgtggcggcggggaactaccggcagctctggatctacctgctggccccgacgctgggcgcgttggcgggggccagcgtgtacaaggcggtgaagctcagggacgagaacggtgagacgccgcgcacgcagcgcagcttccgccgctgacgacgcacactggccacgggcgcgagacattgtccggccgtgtcacgcacgcccgcgtcctcctccgccgccgcgtaacgcacggccacgacgtgtccgcggtcgtacgtgctgtgtctgtgtgtaccaataaataagccccgttttgcttcgtccagaacggtccagtgctatgtgtacgtggtctgtgttgtgatttgcgaattggattattgtgggtcgtctcgtcgaggtctctcgggtgtcgggtgggtctgatgcgatccatcagcgtcgtgtccgaataaaagccacgccgatgcgccggctgacgggcatctggatgtgtgatttctgaacaagatttgcttaatttcacttgcttaatttccgctgcgtc

SEQ ID NO: 89472 - DNA, 640 bp, Zea Mays
catacgtgcacgcatgtggttggttgagctgacctgatgtgagcgcgtgtctccgggccgggcaggccgacgacgggcgggtccatgaacccggtgaggacgctggggccggccgtggcggcggggaactaccggcagctctggatctacctgctggccccgacgctgggcgcgttggcgggggccagcgtgtacaaggcggtgaagctcagggacgagaacggtgagacgccgcgcacgcagcgcagcttccgccgctgacgacgcacactggccacgggcgcgagacattgtccggccgtgtcacgcacgcccgcgtcctcctccgccgccgcgtaacgcacggccacgacgtgtccgcggtcgtacgtgctgtgtctgtgtgtaccaataaataagccccgttttgcttcgtccagaacggtccagtgctatgtgtacgtggtctgtgttgtgatttgcgaattggattattgtgggtcgtctcgtcgaggtctctcgggtgtcgggtgggtctgatgcgatccatcagcgtcgtgtccgaataaaagccacgccgatgcgccggctgacgggcatctggatgtgtgatttctgaacaagatttgcttaatttcacttgcttaatttccgctgcgtc

SEQ ID NO: 89473 - DNA, 3708 bp, Zea Mays
cacctcctgtcgtcttggcctcgctttaaaatcccgcgacgcagtggccgctcgcctcttttggagcaggccatgtgatgtgaagcctctgacctcccgataccttccccttcctcccgtgctgctgcagcaggacagcgcggcgttcgcggttcgcctcacggggcggtggagttccgcgagatccgtgtgcaatgtcgtcgcggccgtcgtcgtcgtcgtcctcgcggcggagcagctcgccgttctccgcggggcaccgccgcccgcccaccgcgtcatcctcctcctcaagctcgtacttcagctccggccgcctcattccgcggtcgtccccgtcctccgccagctccagcttctacggcggcgggggcgggggcagcactcggtccaccacgcctggccgccgcagctcatctgtagcgcctgcgccgacgccggcgcccgcgcttgcgccagtgccgttctcgagctcggacgagctcgtcatcgaggacacctcccgatccggcgacagcatctccgtcaccatccgcttccgaccgctcagcgagcgcgagttccagcgcggggacgagatctcgtggtatccagatggggatcggcttgtgcggtgcgagtacaacccggcaacggcttatgcttatgatagagtttttgggccttcgacaaccactgaggctgtctatgatgttgcagcccggcctgttgtaaaaggtgctatggagggcataaatggtacagtttttgcctatggtgtaacaagtagtgggaagacccacacaatgcacggcgagcacaattgtcctggaataatcccactagccatcaaggatgtcttcagcatgatccaagatagtcctggaagagaatttttgctccgtgtgtcgtaccttgaaatctataatgaggtgataaatgatctacttgatcctactggccaaaatttgcgtgtgcgggaggatgcacagggaacctatgtagaaggaataaaagaagaagtagttctgtctccaggacatgctctttcttttattgcagcgggtgaagaacatcggcatgttggctctaacaacttcaacttatttagcagccgaagtcatactattttcacattgatgattgaaagtagcgcccgtggtgatgagtatgatggcgtcatgtattcacagctcaatttgattgatctagctggctctgagagctccaagacagagactacagggctaagaagaagggaagggtcatacattaacaagagccttttaacgcttggaacagtcattggcaagctcagtgaagggagggcaacacatataccctatcgtgattctaagttgacccgtctgctacagtcatcattaagtggccatggtcatgtctcactaatttgcacaattaccccagcatcaagtaacatggaagaaacccataatacattgaaatttgcaagcagagcaaaacgtgttgaaatttacgcctctcgtaaccggataattgatgagaaatcattgatcaagaagtatcagaaagaaatatcctctctaaagcaagaactcgatcagctaaggagaggaattgttggtggtgccagccaggaagaaattatgagtttacgtcagcagttggaggagggtcaggtcaagatgcagtctcgtctagaggaggaagaggaagcgaaagctgctctaatgagcaggatacaacgcttgaccaagttgatacttgtttccaccaaaaacaatattcctgccttgacagatggtcatcagcggcataattctgtcagcgagcaagataagttaagcacttcacaagatagctctacacttgtccaaaatgagggcacaacaaaagaccacctaccagactccttagatgagatcaaccaattaagatctggcagtggtgaacattcttcagctacttgttctgctacagattcaatgcaggcaggattcacggcatcagatcatatggacctactgattgagcaaattaagatgctcgctggggaggttgcatttggtaccagttcgctgaaaaggctaatcgaacagtccatagatgatcctgaagggtcaaaggaccaaatagagaatttagagcgtgaaatccagcaaaagagaagacatatgcgagccttggaaaaacaaatcatggaaagtggcgaggcatcagttgctaatgcatccatggtggatatgcagcagactattacaaaactaactgctcagtgcagtgagaaggcttttgagttagagttaaagtcagctgataatcgtgttctccaggagcagctacaacagaagaatgcggaagtcaacgatttacaagaaaaagtttttcaccttgagcaacaactctccgcaaaagtgggtatatcccctgagcaggaaactgattgcgcacagcaggaggctattgatttgaaatctaaacttcagtccaaggaagctgaattcgaaaagctaaaattcgagcatctgaaaattactgaggaacagtgcgacttgatcaatcaaaaccataaattaagtgaggaagctgcatatgcaaaagaattggcatcttcggctgctgttgaactcaagaatttggctgaagaagttacaaagctatctgtactaaatgtgaagcaagcaaaggagttactagttgctcaggagatggcacattcaagggttcatggtagaaagggtcgtacaaccagtaggggtagggacgaggttgggacatggagccttgatttagaggacatgaaaatagagctacaggccagaagacagagggaggctgctttggaagctgctttggcagagaaggagcttctcgaagaggagtacaagaaaaagtttgacgaggcaaagaaaaaggaactgtctttggaaaacgatctagcaggcatgtgggttcttgttgctaagttaaaaagaggggctttaggcatatccgattttaatgttgatgatcgaactgttaacctagctgatataactaatggcacaaaggaaaacaaaggtgaaaagaattttgctctagttgagaagcaagtttcagaagattctgtgaagtcgctgagcacagaagaacatagaagtccagagtttgaaccacttcttgttcgtctgaaggctaaaattcaggagatgaaggaaaaggacactgatcccctgagcgataaagatgggaactcacatgtctgcaaagtttgcttcgaatctgcaaccgctgcagtattgcttccttgccggcatttttgcttgtgcaagccttgctcgcttgcctgttcagagtgccctctgtgccgcacaagaatagcagacaggataatcacgttcacatgaacggcgtgctagcttcaggtgccaaacacttagatgcttgcatgttggtgctcatgccaacgctatccctctgaaatgtacctaatgatgtgctgtgtatctctgacaggccattctgaagcatggcgcactcttgtaaaatggtcggtggtatatgtttctctttttttccttagcaaagaaggtgccttttatgttccttctgtgttgtatcgccattctttgggttcccctatatggctatatagcttcaccttacgttctttatcaaggagctgcaaacgatgagaccccattggaatgcaggaattgtacaggaatttcacaaaagttcattttcatagaaaaaacacaacaaaaa

SEQ ID NO: 89474 - DNA, 3672 bp, Zea Mays
cacctcctgtcgtcttggcctcgctttaaaatcccgcgacgcagtggccgctcgcctcttttggagcaggccatgtgatgtgaagcctctgacctcccgataccttccccttcctcccgtgctgctgcagcaggacagcgcggcgttcgcggttcgcctcacggggcggtggagttccgcgagatccgtgtgcaatgtcgtcgcggccgtcgtcgtcgtcgtcctcgcggcggagcagctcgccgttctccgcggggcaccgccgcccgcccaccgcgtcatcctcctcctcaagctcgtacttcagctccggccgcctcattccgcggtcgtccccgtcctccgccagctccagcttctacggcggcgggggcgggggcagcactcggtccaccacgcctggccgccgcagctcatctgtagcgcctgcgccgacgccggcgcccgcgcttgcgccagtgccgttctcgagctcggacgagctcgtcatcgaggacacctcccgatccggcgacagcatctccgtcaccatccgcttccgaccgctcagcgagcgcgagttccagcgcggggacgagatctcgtggtatccagatggggatcggcttgtgcggtgcgagtacaacccggcaacggcttatgcttatgatagagtttttgggccttcgacaaccactgaggctgtctatgatgttgcagcccggcctgttgtaaaaggtgctatggagggcataaatggtacagtttttgcctatggtgtaacaagtagtgggaagacccacacaatgcacggcgagcacaattgtcctggaataatcccactagccatcaaggatgtcttcagcatgatccaagatagtcctggaagagaatttttgctccgtgtgtcgtaccttgaaatctataatgaggtgataaatgatctacttgatcctactggccaaaatttgcgtgtgcgggaggatgcacagggaacctatgtagaaggaataaaagaagaagtagttctgtctccaggacatgctctttcttttattgcagcgggtgaagaacatcggcatgttggctctaacaacttcaacttatttagcagccgaagtcatactattttcacattgatgattgaaagtagcgcccgtggtgatgagtatgatggcgtcatgtattcacagctcaatttgattgatctagctggctctgagagctccaagacagagactacagggctaagaagaagggaagggtcatacattaacaagagccttttaacgcttggaacagtcattggcaagctcagtgaagggagggcaacacatataccctatcgtgattctaagttgacccgtctgctacagtcatcattaagtggccatggtcatgtctcactaatttgcacaattaccccagcatcaagtaacatggaagaaacccataatacattgaaatttgcaagcagagcaaaacgtgttgaaatttacgcctctcgtaaccggataattgatgagaaatcattgatcaagaagtatcagaaagaaatatcctctctaaagcaagaactcgatcagctaaggagaggaattgttggtggtgccagccaggaagaaattatgagtttacgtcagcagttggaggagggtcaggtcaagatgcagtctcgtctagaggaggaagaggaagcgaaagctgctctaatgagcaggatacaacgcttgaccaagttgatacttgtttccaccaaaaacaatattcctgccttgacagatggtcatcagcggcataattctgtcagcgagcaagataagttaagcacttcacaagatagctctacacttgtccaaaatgagggcacaacaaaagaccacctaccagactccttagatgagatcaaccaattaagatctggcagtggtgaacattcttcagctacttgttctgctacagattcaatgcaggcaggattcacggcatcagatcatatggacctactgattgagcaaattaagatgctcgctggggaggttgcatttggtaccagttcgctgaaaaggctaatcgaacagtccatagatgatcctgaagggtcaaaggaccaaatagagaatttagagcgtgaaatccagcaaaagagaagacatatgcgagccttggaaaaacaaatcatggaaagtggcgaggcatcagttgctaatgcatccatggtggatatgcagcagactattacaaaactaactgctcagtgcagtgagaaggcttttgagttagagttaaagtcagctgataatcgtgttctccaggagcagctacaacagaagaatgcggaagtcaacgatttacaagaaaaagtttttcaccttgagcaacaactctccgcaaaagtgggtatatcccctgagcaggaaactgattgcgcacagcaggaggctattgatttgaaatctaaacttcagtccaaggaagctgaattcgaaaagctaaaattcgagcatctgaaaattactgaggaacagtgcgacttgatcaatcaaaaccataaattaagtgaggaagctgcatatgcaaaagaattggcatcttcggctgctgttgaactcaagaatttggctgaagaagttacaaagctatctgtactaaatgtgaagcaagcaaaggagttactagttgctcaggagatggcacattcaagggttcatggtagaaagggtcgtacaaccagtaggggtagggacgaggttgggacatggagccttgatttagaggacatgaaaatagagctacaggccagaagacagagggaggctgctttggaagctgctttggcagagaaggagcttctcgaagaggagtacaagaaaaagtttgacgaggcaaagaaaaaggaactgtctttggaaaacgatctagcaggcatgtgggttcttgttgctaagttaaaaagaggggctttaggcatatccgattttaatgttgatgatcgaactgttaacctagctgatataactaatggcacaaaggaaaacaaaggtgaaaagaattttgctctagttgagaagcaagtttcagaagattctgtgaagtcgctgagcacagaagaacatagaagtccagagtttgaaccacttcttgttcgtctgaaggctaaaattcaggagatgaaggaaaaggacactgatcccctgagcgataaagatgggaactcacatgtctgcaaagtttgcttcgaatctgcaaccgctgcagtattgcttccttgccggcatttttgcttgtgcaagccttgctcgcttgcctgttcagagtgccctctgtgccgcacaagaatagcagacaggataatcacgttcacatgaacggcgtgctagcttcaggccattctgaagcatggcgcactcttgtaaaatggtcggtggtatatgtttctctttttttccttagcaaagaaggtgccttttatgttccttctgtgttgtatcgccattctttgggttcccctatatggctatatagcttcaccttacgttctttatcaaggagctgcaaacgatgagaccccattggaatgcaggaattgtacaggaatttcacaaaagttcattttcatagaaaaaacacaacaaaaaggcaaaattactgtgttctagtggagccctgacttctcgctctgcaaatctctat

SEQ ID NO: 89475 - DNA, 1536 bp, Zea Mays
cttgctcctacaggttcagatctctcatcggcccccactccattagtccatttccattcccatcccgaccccgtcttgccaccggctacacgctctcggagtctcggacgccgcccaaatggaggccatccggaagcaggcctcaaagctccgggagcaggtagctcggcagcagcaggcggtgatgaagcagttcgggggcgggtacggcgcagacggcgtgttcgctgacgaggctgaggcgcaacagcactccaagctcgagaaactctacatctctacgcgcgcggccaagcacttccaaagggatatagttcggggcgtcgagggctacatagtcacggggtcgaagcaagtcgagatcgggaacaagttatgtgaggatgggaagaagtatggcactgagaacacttgtaccagtggtagcacactgtcgaaggcggcattaagttttgctaaggcacggtccatgatggaaaaggaaaggggtaacctgctgaaagcccttggcacacaggttgcagaaccactgagagctatggttatgggagctcctttggaggatgcccgccacctcgcccaaaggtacgacagaatgcgtcaagaagctgaagcgcaggctattgaagtttcaaaacgccaaatgaaactaagagaagcatctggaaatagtgatatgatttcaaggctagaagcggctgagtcaaagctgcaggagttgaaatcaaatatgggggttttgggcaaagaagctttggccgcaatgactgccgttgaaggccaacagcaaagactgacactgcagcgtcttattgcattggttgaatcagagagaaactaccaccaaaaggtcctacaaattcttgatcaacttgagagagagatggtatctgagcgccaaagaattgaaggggcacctcctccggtggttgagagttccatgcctccaccgcctgcatatgaagaagtcaatggtatattcatgaggaatacggtcgcagagttggtcgagaccgtggagtatttcctggctgaggcaatccaatcatatcgagcagagagcgacactgagctcaacctttcagctggtgactacatagtggtccgaaaggtgtcgaacaatggatgggccgaaggtgaatgcagggggagagctggctggttcccctacgactacatcgagaaacgagagcgtgtgcttgcaagtaaagtcgcgcaagttttctaaaacttttgctgagacatccatatattcccggggatgtgcaatgtgtattatgcttgatcgtcagaagagaagatctgtaattttgctggaagctgcctgttggatggcttgttcctgcctggccgtctgcattgttcaaattcatgtggcaggaactgaacattattaatgcttaatcttcattcttcagttatcccgttaatatgtatccatactttttgtttgtttgtttgaagcatacaacaagacgagaaatcaagcgctaattattctgtatcgacaacaagatttatttgaaatcgattctt

SEQ ID NO: 89476 - DNA, 1723 bp, Zea Mays
acaggttcagatctctcatcggcccccactccattagtccatttccattcccatcccgaccccgtcttgccaccggctacacgctctcggagtctcggacgccgcccaaatggaggccatccggaagcaggcctcaaagctccgggagcaggtagctcggcagcagcaggtgaacactacacgcctccccctttcgcaagatctccgccatccgttcctccgcgacccggccacgggctcgcaccgcccggctcccgccctttctcttaacgcgggtccttcgagatctggtcatcatctctaggtttgttattgatcactgatgccgcgtccgtgctcgcggccgcccgtgtcctgtttcgcaggcggtgatgaagcagttcgggggcgggtacggcgcagacggcgtgttcgctgacgaggctgaggcgcaacagcactccaagctcgagaaactctacatctctacgcgcgcggccaagcacttccaaagggatatagttcggggcgtcgagggctacatagtcacggggtcgaagcaagtcgagatcgggaacaagttatgtgaggatgggaagaagtatggcactgagaacacttgtaccagtggtagcacactgtcgaaggcggcattaagttttgctaaggcacggtccatgatggaaaaggaaaggggtaacctgctgaaagcccttggcacacaggttgcagaaccactgagagctatggttatgggagctcctttggaggatgcccgccacctcgcccaaaggtacgacagaatgcgtcaagaagctgaagcgcaggctattgaagtttcaaaacgccaaatgaaactaagagaagcatctggaaatagtgatatgatttcaaggctagaagcggctgagtcaaagctgcaggagttgaaatcaaatatgggggttttgggcaaagaagctttggccgcaatgactgccgttgaaggccaacagcaaagactgacactgcagcgtcttattgcattggttgaatcagagagaaactaccaccaaaaggtcctacaaattcttgatcaacttgagagagagatggtatctgagcgccaaagaattgaaggggcacctcctccggtggttgagagttccatgcctccaccgcctgcatatgaagaagtcaatggtatattcatgaggaatacggtcgcagagttggtcgagaccgtggagtatttcctggctgaggcaatccaatcatatcgagcagagagcgacactgagctcaacctttcagctggtgactacatagtggtccgaaaggtgtcgaacaatggatgggccgaaggtgaatgcagggggagagctggctggttcccctacgactacatcgagaaacgagagcgtgtgcttgcaagtaaagtcgcgcaagttttctaaaacttttgctgagacatccatatattcccggggatgtgcaatgtgtattatgcttgatcgtcagaagagaagatctgtaattttgctggaagctgcctgttggatggcttgttcctgcctggccgtctgcattgttcaaattcatgtggcaggaactgaacattattaatgcttaatcttcattcttcagttatcccgttaatatgtatccatactttttgtttgtttgtttgaagcatacaacaagacgagaaatcaagcgctaattattctgtatcgacaacaagatttatttgaaatcgattctt

SEQ ID NO: 89477 - DNA, 1586 bp, Zea Mays
ctccattagtccatttccattcccatcccgaccccgtcttgccaccggctacacgctctcggagtctcggacgccgcccaaatggaggccatccggaagcaggcctcaaagctccgggagcaggtagctcggcagcagcaggcggtgatgaagcagttcgggggcgggtacggcgcagacggcgtgttcgctgacgaggctgaggcgcaacagcactccaagctcgagaaactctacatctctacgcgcgcggccaagcacttccaaagggatatagttcggggcgtcgagggctacatagtcacggggtcgaagcaagtcgagatcggtggacagctgaaaccctgttgccatttcggtgaacacataaatttgaatttcgaaattgttaatttaatgtgctttgtgttaatagggaacaagttatgtgaggatgggaagaagtatggcactgagaacacttgtaccagtggtagcacactgtcgaaggcggcattaagttttgctaaggcacggtccatgatggaaaaggaaaggggtaacctgctgaaagcccttggcacacaggttgcagaaccactgagagctatggttatgggagctcctttggaggatgcccgccacctcgcccaaaggtacgacagaatgcgtcaagaagctgaagcgcaggctattgaagtttcaaaacgccaaatgaaactaagagaagcatctggaaatagtgatatgatttcaaggctagaagcggctgagtcaaagctgcaggagttgaaatcaaatatgggggttttgggcaaagaagctttggccgcaatgactgccgttgaaggccaacagcaaagactgacactgcagcgtcttattgcattggttgaatcagagagaaactaccaccaaaaggtcctacaaattcttgatcaacttgagagagagatggtatctgagcgccaaagaattgaaggggcacctcctccggtggttgagagttccatgcctccaccgcctgcatatgaagaagtcaatggtatattcatgaggaatacggtcgcagagttggtcgagaccgtggagtatttcctggctgaggcaatccaatcatatcgagcagagagcgacactgagctcaacctttcagctggtgactacatagtggtccgaaaggtgtcgaacaatggatgggccgaaggtgaatgcagggggagagctggctggttcccctacgactacatcgagaaacgagagcgtgtgcttgcaagtaaagtcgcgcaagttttctaaaacttttgctgagacatccatatattcccggggatgtgcaatgtgtattatgcttgatcgtcagaagagaagatctgtaattttgctggaagctgcctgttggatggcttgttcctgcctggccgtctgcattgttcaaattcatgtggcaggaactgaacattattaatgcttaatcttcattcttcagttatcccgttaatatgtatccatactttttgtttgtttgtttgaagcatacaacaagacgagaaatcaagcgctaattattctgtatcgacaacaagatttatttgaaatcgattctt

SEQ ID NO: 89478 - DNA, 2064 bp, Zea Mays
agctctactcgaagagcgttctaccaccacaccacaatctaactaaaacccaaacgaaataaaaggaagaggtcaaaaaataaaaggtgttgtgcaatcgatcatggtgaccgtggccaagatcgccatggagtggctccaagaccctctgagctgggtgttcctgggcacgctggccttggtggtcctgcagctgcgacgacggggcaaagcgccgctgccgcccgggccgaagccgctgccgatcgtgggcaacatggcgatgatggaccagctgacccaccgcgggctggcggcgctggccgagaggtacggcgggctgctgcacctccgcctgggccggctgcacgcgttcgcggtgtcgacgcccgagtacgcgcgcgaggtgctgcaggcgcaggacggcgcgttctcgaaccggccggccactatcgccatcgcgtacctgacgtacgaccgcgccgacatggcgttcgcgcactacgggcccttctggcgccagatgcgcaagctgtgcgtgatgaagctgttcagccggcgccgcgccgagacgtgggtggccgtgcgcgacgagtgcgcggcgctggtccgcgccgtggcgtccggcggcggcggcggcggcgaggccgtgaacctgggcgagctcatcttcaacctgaccaagaacgtgacgttccgcgccgccttcggcacccgcgacggcgaggaccaggaggagttcatcgccatcctgcaggagttctcgaagctgttcggcgccttcaacgtcgtcgacttcctgccgtggctgagctggatggacctgcagggcatcaaccgccgcctccgcgccgcacgatccgcgctggaccggttcatcgacaagatcatcgacgagcacgtgaggcgggggaagaaccccgacgacgccgacgccgacatggtcgacgacatgctcgccttcttcgccgaggccaagccgcccaagaaggggcccgccgccgccgcggacggtgacgacctgcacaacaccctccggctcacgcgcgacaatatcaaggctatcatcatggacgtgatgtttggcgggacggagacggtggcgtcggcgatcgagtgggcgatggcggagatgatgcacagccccgacgacctgcgccggctgcagcaggagctcgccgacgtcgtgggcctggaccggaacgtgaacgagtcggacctggacaagctccccttcctcaagtgcgtcatcaaggagacgctccggctgcacccgccgatcccgctgctcctgcacgagaccgccggcgactgcgtcgtgggcggctactccgtgcccaggggctcccgcgtcatggtcaacgtgtgggccatcggccgccaccgcgcctcgtggaaggacgccgacgcgttccggccgtcgcgcttcacgcccgagggcgaggccgcggggctcgacttcaagggcggctgcttcgagttcctgcccttcggctccggccgccgctcgtgccccggcacggcgctgggcctgtacgcgctggagctcgccgtcgcccagctcgcgcacggcttcaactggtcgctgcccgacggcatgaagccctcggagctggacatgggcgacgtcttcggcctcaccgcgccgcgcgccacgaggctctacgccgtgcctacgccccggctcaactgccccttgtactgacgccatgcgcgggcgactgccattaccatcgtcccctcgggtgggtgtggggtacgggggtaggagtttggtgcctttctctgtcgtcttttttccctttaaaaaacatgcctggtcgatgttgtagggtgtgttgtagacagccattatcaattttttttattctcaattctcatgttgcgtgtgcctagctaggaagtaaaaggatcaagctgtggctgtacgggctcatcaaactatatgaaaaaaacatgtcagccacagattcctggaactttcatgcacggcaaatttcatagatatttctttggcacctcttatctatcgtgtatcccatatatattaatctctgtattaacaaaattggagcttcctcacgt

SEQ ID NO: 89479 - DNA, 2260 bp, Zea Mays
cagtcactcacgctgcacccccggcccggccccgcgtacaccctctcccaagtcccaccgctcgcgcgccggcgatcaggcagggggctcccaggttgtactgcggtgatggctacgtcgtcgacactgggccagacgcagcggtacgcggcgggggcactgctggcgctcgcgctccgccaggcgcagacgcaccagaccgtcctccttggctcccacggcctcgacgacgagccccaccccgacgcggccaccgcagtcgaacccgacgcccgtgacctctggacccacgagtcccgcggcctcctccgccccgtcctcaggtttcttgagatcgacccgaaggcctgggtcggggtggagaagacggccgcgtcgtctgatcccaagcaccacattggcgcgttccttcgcaaagtgttcgaggacgaagacgacgacgagaaggcccggtcagagcgatccgatcacgagctggcgctcgccaaggccgtggacgcgatggcgatgggcctggagagcggcggtgtcggatcggtggctgaggcgctcagaccggagagccacggctccgacgacgacgacggcgacccggcgctggcggcgtcgacgcgcaccaaggactaccggaagatggcggtgctgtacatgctcctctccgcgtgcgtcgcggacgtgaacatggccgaggagggcatggggtccccgcgcgtcaccaagggttacgacgcccgccaccgcgtcgcgctccggctgctggccacctggctcgacgttacctggaacaagatggaagctgtcgagataatggttgcttgctctgctatggctgcagcaagggaggaggaacagtcacgtgagaattcgtcaccgaacagcagatgggagaactggaagcgtggcggcatcatcggcgcagctgcactgacaggaggaacattgatggcaatatctgggggcttagcagccccggcaattgctgcagggttcactgctctagtcccaacattgcatacacttgtgcctctaataggtgctagtggttttgctgctatagctaccgctgctggtcacactgctggctctgtagcagttgcagcatcgtttggagctgctggagctgggttgactgggacaaaaatggccacaagaattggaaacgtaaaagaatttgagttcaagactatcggccagaaccatagccagggtcgcctagcagttggcatctttgtttctggatttgccttctccgaggacgattattcaaagccttgggaaggatggaaaactaacttagagaggtatgttctgcagtgggagtctaagcatgtaattggcgtcagcacagcaatacaggattggctggcatcaagggtagcgatcgagctgatgagggaaggtgcgatgcagacggtgttaaatggcatcatttcagcatttgcgtggcctgctaccttggtatctgccgcggacttcatcgacagcaaatggtctgttgctattgacaggtcagacaaagctgggaaaatgcttgctgatgttctgctcaagggactgcaaggaagcaggcctgtcactctagtcgggttctcgctgggggctcgtgtggttttcaagtgcttgcaggagttagcgcagctgggaaataatgtggggatcgttgagagggcggtgctcatcggtgcgccggtctcagttcaaggtgagatgtgggagcctgccaggaagatggtcgccggaaggtttgtgaatgtttactccaccaacgactggatcctcggcgtcactttccgcgctagcttgttcacgcaaggtttggccggcatccaggacgtgcatgtccctggagtagagaacgtcgacgttaccgagctcgttgtcgggcactcttcgtacttgtcgcttctccagaagattctagaccatcttgagctaaacacctactaccctgtgttctatccctgcacgcccaggacaaaataaggagcgccgtgaaatgcccgtgcagggggttacatgctgtgtttcagagtttgcacagctcgcagctagcctgaatttagcggtacactagtaaataaagggatgttatgctggagtgcctccagaaaatgtcgtggtgtcatctgcatttttttttggcagataatacaaatatggaccgaacaagacatagaattttatgtggaaaacatttgcagcaaaaaaatctagatcatctaccgacagcctttcatggaatacaataatttgtctgtct

SEQ ID NO: 89480 - DNA, 504 bp, Zea Mays
gctgtggctgtgatgactgacagaatgttgtacgctgactcagcttgttcacgcaaggtttggccggcatccaggacgtgcatgtccctggagtagagaacgtcgacgttaccgagctcgttgtcgggcactcttcgtacttgtcgcttctccagaagattctagaccatcttgagctaaacacctactaccctgtgttctatccctgcacgcccaggacaaaataaggagcgccgtgaaatgcccgtgcagggggttacatgctgtgtttcagagtttgcacagctcgcagctagcctgaatttagcggtacactagtaaataaagggatgttatgctggagtgcctccagaaaatgtcgtggtgtcatctgcatttttttttggcagataatacaaatatggaccgaacaagacatagaattttatgtggaaaacatttgcagcaaaaaaatctagatcatctaccgacagcctttcatggaatacaataatttgtctgtct

SEQ ID NO: 89481 - DNA, 660 bp, Zea Mays
atggagaaaatccatgtttgcaaatgcccacacctccgtttaactgaacaaaaggggcgcattcctgcaccaaagcggagaatctttagtcatgctcctgctctgaaggatatgtactactacgaactagtggtcccgccgacacagttcctccttttactgactacgacgagaccatatgctgctatacaaaaatgtgagggcgttccgcttcccacggtcacggcagtcatcggtgcaggtactggcatttcgagcccttccagcagtggccattctcgtagtatttacaaacccccctctggggctgccctcttgacgagggtcttgacgaaccaccactgccatggtcatgacgatggtcggacctccgagggtagtttgagctaccccgccgcgaatcactgccgtgagaatgcctgtcatgttggtgattcccctggctgctccgactggggttaccagacgatgggtgccaggtcctgttgcttccgagagcctctccgcagcctgcattcttgtcgctgtttctctgttgtctctttgatgcttcccaagtgtttcctagactctcttcccaaccagcagcacccttgtcgctgcttccctgcctccttgccaaagagtgtctccctgttggtgtcgtcgcttggtggctag

SEQ ID NO: 89482 - DNA, 423 bp, Zea Mays
atggccgacgccaagcgaatgctggaagagatcctcgccgccaccaccgacttgcagaagcgcatggtggcacaggaggacaagctggtagccctgaacagcgccgtatcatcgctcaaggttgatcaaggcaggctccacgtcgccgtcaacaacgtccaataccaacagatggacgcaaaggggaaatccagcatgtcgaccgacaacatccacgagcacataacgggaactgagtcgtcccaagccggggggatggctagcgccctcctcaccgcggctgtccacaagctgtgcttccccaagtatgacggtaccgaagatcccctgtcgtggctggatcgctgcgatcaattttccaggcaactgcaaccccaggcaacgaaagggttcgtctggcggccttctacatgcagggtgtag

SEQ ID NO: 89483 - DNA, 330 bp, Zea Mays
atggcgtccatagggacctccaatttacagaaaagtattaggactcacgagattcttaaaatggtttataagcttttggcttgcattatcccaaaagttatgtatctattcaataatgattcggcattaaacaccgagaagatgcagtccacaagagaaaagctcaccacaatcccacttgacccgacaccgaaagaaggattcatctcgcttgatgcacgcaggatggtacaccttcgggcaacccctaaaggcaaagtgaagcttatcagcatgcgcaatcaagtggaaaccgccaaccgcattactgttccgcaatacaagagctaa

SEQ ID NO: 89484 - DNA, 2184 bp, Zea Mays
atggggcagtgctacgcgaggaacgtgcacggcgtcgacgcggacggcggcggcgtggaggcgaccaccatcacggtctcggcggcgggcgggccggaggatgcggcgtcggtagggggagggcgaggaggaggagggaggcggagcgcgcggccgtcgccggccgggacgccgcgcgggggcagggccggggcgactccggcgcggtcgtcggcggcgggcagcccctggacggggagcccgctcggcctccccgacggcatcgcgccgtcgcccgcgacctcggcgtccacgccgcgccggttcttccgccgccccttcccgccgccttccccggccaagcacatcaaggcgtccctcgctcgccggctcggccatcgctcgccggcctccgcgtcgcaggtgcccaggccgcccgtcgaggtcccgatcccggagcaaggggccggcggcgctggggaggtggagcgggagcttgacaagagcttcggctacgaccgccacttcgccgccaagtacgagctggggaaggaggtgggccgcggccatttcggccacacctgcctcgcgcgcgcccgcaagggagacatgagaggccaggtcctggctgtcaaggtcatctccaaagccaagatgacaacagcaatatctattgaggatgtgcgcagagaggtgaaaattttgaaggcgttatctggacattccaaccttgtcaagttttatgatgcttgtgaggacgcccttaatgtctacataatcatggagctttgtgaaggtggagaactactggatagaatcttgtccagaggtggaagatacaatgaaggggatgcaaaaattattgttgaacagatattaaaagtagttgccttttgccatcttcagggtgttgttcaccgtgatctgaagccagagaatttcttattcagcactagggaagagcattctcctatgaagataattgattttggtctctcagattttataagaccagatgaaaggcttaatgacattgttggaagtgcatactatgttgctccagaagtcttgcataggtcatatagcacagaagcagacatgtggagcattggtgttatcacttatatattgctgtgtggtagcaggccattctgggcacgaactgaatcaggtatttttcgctcagtgctgagagctgatcctaattttgacgactcaccatggcaatcagtatcgcctgaagctaaagattttgtcaaaagacttcttaacaaggattacagaaaaagaatgactgctgcacaggcactctctcacccctggctgcgagatgaacaccgacaaatacctttggatatgctagtattcaagttggttaaagcataccttcgatcgacgcctctcaaacgggcggcattgaaggccttgtcaagagcaataacagaagatgagcttatctacatcagggcacaatacaacttgttagaaccagacagcggagatggtagaatatgtattgataatttcaggatggctcttttacagaactgtactgatgctatgaaagaatctagaacacttgagatcttgaatgcgctggagccactcgcgtataggagaatggactttgaggagttccgtgcagctacaataagcccttaccagcttgaggctgtgccgcgctgggaagaaatcgccagtactgcattcgagtactttgagcaggaaggcaaccgtgctatcacaatcgaggagcttgctcaggagatgaatctttctgcagcagcgtattccatcgtccgtgactggatcagaccgttggacggcaagcttagctttgtaggctacaccaagtttttgcatggactaacgatgcgaagcggcaacacaaggcggcaccattgattcccttgctgccgcggtggttgcttgaattggttccattggttttgttgatggggatttggagagatggtgttttgtccctcttcttttcttgccttagctttttgtagaatgcttgtagagagagagagaaagggtaaaaggaaaaaaagaaacggaaagtgatagctcaaaattgagttgtagaagaaaaggtcattttttttttgccttggttctggtacattgtttgctttcggctatgatgaatggcattgtacagttgtcagttggcacatgctacatggtgctgtgtcgaac

SEQ ID NO: 89485 - DNA, 1119 bp, Zea Mays
ggcaccgcagctagctctcctcacaaacagcaaaccgactgactccagtccacacaaggcaaggcagacccgaatcgtcttcgtcgtcgttgttgcgaagagacatactagtggaggagtaggcggccatgtccaacgtgcccacctccctacgcgactcccccctcaccgtcttccgcctcgccatctccagctccgacccgtggcccttctcttcctgcctctaaccaccagcccctcgagtccgtcccttccccttgttcttcttgcaaccgagcagcgaccaaccaagcaagcgacaccgatcgagagctccaccgatctggcgaccgtcatgcccggaaagcaccagcagcacatgacggcaacggcaacggcggcggcggcggcagcagcgcccaaggggtgcgtgacggtgcgcgtgggcctggagggggaggagcagcgccggttcgcggtgccgctgggccacctcaagcacccgctcttcggcgcgctgctggaggaggccgagcgcgagtacggcttccggcaccagggcgccctcgccatcccctgccgcgtcgaccgcttcgtccagctcgagcgcctcatcggccgggacctccacggcgcctgcgcccaccacctcgtcgacctcgacggcgccgccgccgccgccgcgcagcaccagcaccagcaccacctccacctgccgcgcttcgttggctgcttccgcgcctgacgacacggtccgtccgtccgtccgtcgaggcggtcgctgctgcttgttttactacttgattaaccagcctttggtgtggctcgtcctccctctccggatctctcccgtttctgcttgaagctctgtggcgagagagacatgggccagggtgggaggacgatgcatctagctgttgacgatggcgaaaaatttgtgatgatcgtggatatcaagtgtaaagatctagagaggatgatgatgtagcttttctctattttcttttcatttccttatacgtcaacacttactctgctaataccatgctctgcagaagtacttgtgctagctctattcttgtaaactattactccttcggtttcaaattataatttgtttgactttttttctctatattt

SEQ ID NO: 89486 - DNA, 299 bp, Zea Mays
gccgccgtccccgatgcccgtgtcgcagaggtaggtccccgttatctccttcacgtcgccgtccccgatgcccatgccacgccggagcccgcgatctccaaggacttcattgacttcgagttcagcctcggcagctccgccaccatgctccccgccgacgagctattcgccgacggcaagctgctaccgctgagaaaggcggcgactttgccggatccggaggccgccgcgccaccccggcgtagccagaggaggcaatgccggcgactagcacggagccgatcaagcctctccgcgcc

SEQ ID NO: 89487 - DNA, 2210 bp, Zea Mays
ccggccggagccggacgcgccgagccgccgacgggcgtccccatgccgttgccgctgcgggtgccggcgcggctgctgttcgcgcggcacaagactaccgcggcgcagcacgtggcggcgcggcacctggaccacgccttcgagcggctcgcggcggcgcacctgcccctcgtcgcggcgtcgccgctggtcgacgcgctgcgggcctcccccgaaccgctcgcgctgccgaacctggcgcgccgcctcccgctccgcctccaccgccgcggcccactccacttcctccgcctcttcccgcgcgtgttcgacctccgcgccccgctcccgctctccctgtccctgacccccgccgccgcgggcctcctcgcagtcgccagctcccccgccgacgcagcgcggacgctccaccgcctcctagcgatgtcggtcacccgctccctgcccctccgcgccgtcttccgcgtctggcgcgagctcgccctccccgacgacttcgaggactccgtcgtcgaggggcacccacacctcttccgcctcgtctccaatcccgccgagcccaacactcacatcctccacctcgtcgccgaccaggcgaccgaggacttcaccccggcggtggagaaggcccgcccggacaggtacgccttcaaactgcagtttccgccggggttcaggctggccaaggaatatcggaagaaggtgaaggagtggcagctgctgccttacaccggaccgtatcaggtcgtcagtccgagcgctggaggtagcaagagggtgtcgaagttggcgaggaggaagatggagaagagggcagtagggattgcgcacgagttcctgagcctgaccgtggagaagatggtggaggtggagaagttcagtcagttcaggaagtggtttgggatcgaggtcaatgtccgggacgtgttcttggatcatcccgggatattctacctctcggcgaaagggaagcggcacacggtgtttctgagggagatgtatgatcgtggaaagcttctcgagtcgaatgatgtctctgaggcaagagccaaactcgttgagctcatgctccttcgtcggcgtggtctcgggaatgccaattcaagtgccaacatggcttcaggtgccactgctgatgccagagagagtggtgatgattttgttgatcatgaggattgtttgttggatgtatcagagaagtgatggtagaaggatgttgtcaacttcatgggaactcatgtcagtaagccatgttgaacggtgcttagcgcacttctgatggagaatggattaatggtaccacggacaggaggtttgtgtgctggagataaccaaatgagaaggtgcatggatttccagagtggtatgacttggtcgacaaagctagaggccatggatatgcttggaactcaaaagtcatgtttcaactgtgcgctaccatgttggtaggtcgagattcatgaggaaatgttgaacctttgaatttcggtccccttcagttctctgctcagattctttttcctgacaaatcattctgccaaggttgcttcattccatttgatttgtcaggattcatgagtttgctctacttcttcactttgatctggcagatgtactttttggttgtggcaatcgcctgaagtacaaccactggttggtgtcattgcctgaatcttattatttgaacaaagcattgcctgaattgaagagccaggcatcattcttcagcaatttttgcaacccgggtcgtttttgcaacattcttaggttcaacagaccagcaagatgtgcaaacatgcttcatgttgttggaccacttcaggcacctacatcgctagttcagcttttgagttccttattcgtacgatataactttatcctttcaacaattacgcctactctgatgtggggacattgagcacctatgaatcttaaggttttctgctggttgtcatcacaaaactagttcctgatgttcaaatatcaagaagagatggtggttgaatagccctatatgttggctaatggagagacagtccggcaccttgtgataggcagataggggtggagtaatggtactgcattgttgctagctgtttctctatatctaacaattttgtggcaaggaaacttaccagccagtctgtgtgctgaagattggtggttaccgtctgcctcgctgcagctgtatcttcaattcttcatacaca

SEQ ID NO: 89488 - DNA, 90 bp, Zea Mays
aagcctgaaaactttgaagagtataagcttgacctctacaataacgctggagtacattattgtatcagcagcatctcgctcgtagccatg

SEQ ID NO: 89489 - DNA, 79 bp, Zea Mays
gagagatgtgctccattcatccatcctataataaacgtacttgtaaatttaaaatttgtgccaagataattacgtctct

SEQ ID NO: 89490 - DNA, 962 bp, Zea Mays
acttgtgttgttatttcttgtattatgaaccaagactgttgggttggattttgagggaatgatagctaacatttaggctgctcctgaaggatcttttgttctgctacatggttgtgctcacaacccaactggaataaacccaactcttgaacagtgggagaaaattgcatatgtcattaaatagaaaaggcatatgcatttctttgatgttgcatattagggttttgccagtggaagccttgatgaagatgcatttcctgtcaagctttttgttaagcgtggcgtgaaagtgtttgttgcacaatcttacagcaagaatcttggtctatattctaaaaggattggtgcaataaatgtgtgtgctcagcaccagaagttgcaaataggtattatttttttactgattgcttgcgtggtaccctcggcccaatgtcattcagtagttgcaaatgcttaagcaagcacaataggcaagccatttgtatttttcccttcattaacaatcatttttttctaatagttgcttcaattatagaattgacaagtaatagtcttcctgttgctgcaattaacttatcttcttatggcattccacgatgcttcctttcaaggtaaaaagctagctaaaaagattgacacgacccatgtactcgaacccccccattcatggtgccaggatagttgttaatgttgttggtgatccaaccatgtttggtgaatggaaacaagacatggagctaattgatatgcgaatcaagaatgtaagatggaagctctatgacagtttgtttgcgaaggacaagacggcaaggacgggtctttcattctaaggtagattagcatgttctcctacactggcttgaacaaagcgtagggtgacaacatgatagataagtggcatgtttacatgacaaggatgggcagatctcataagttgggctgtctctggaaaagtgtgatta

SEQ ID NO: 89491 - DNA, 1518 bp, Zea Mays
gaagcgacgggcaccggcaagcagtctccccaaacccaaacgccgcgactacagcaaccatggccaggcctcctccgctgaaactcccgtgcgaccgcccaatgccgtatctgcacgacagcctcatcgatgagatcctcctccgcgtcccgccgcacgaccctgggtgcctcgtgcgctgctcggccgtctgcaagccctggcgccgccacctcactgaccccaacttccttggccgctaccgcgcgttccacagggtgcctcccatgctaggcttcctcttcaacctagccgatggttgcttcgttgtgcggttcgtccgcaccacctccttccgccctcgtaccctcgaccacgccggctgctacgtgcgcgacgcccgccacggtcgcatcctcttccgcaacatcatcagcgagaagagaggatttcacctcttcgtatggagccccgtcacggatgagcggtgggggctgttcataccgttaccgttttaccatttcgtggcggctgtggcggtgctctgcgctaaggccgcgcgcgaagggggctgtgactgcgaccacctcgactgccacagcgggcccttcctcgtcgcatttgttgccaccgacgataatggggtgacgtgtggctgcgtctactcctcggagaccggcgcctatagcatcatgacctgtgctcaacacccgaatgaccccgtggacatggacatattggatcccatcgtgcttgtgggaaataggatctacttccccgctggagagagcaagaccatcgtggagtacgacttgggtcgccagaaactcgcatttctcgagccgccgccgttagcgcaccaaggtcactgtatgctcatgccggcaatgggaggtggtctggggttcgccagcgtgcgggagtcctgcctctacatgtggtcgagagagaccggttctgatagaactgcggcgatatggacgcagagcagggtattggaactcaacacactgcccgattgcgaaactgcgcttggcttcagggagagcttgatggggaaagatgtagctgtggttggctttgcggagggcctcgacgtcatcttcgtgaggacagatgttggcgtcttcgtgattaacctggagtcaggccaagtcaagaagataaccagcagaagcaccaaccttgtcatttcttacatgagcttctatactccagatcatgctatgggctgaccaccagtgccattatgagaacactgagatccattcgtttcatgatgatgaaccttctgtcggtgtgttgccctatgtcagacatgatgctttaagtgctttgtttttacttgagtatataagcaagcgaagcattagtgatcatggtcaattagttgtctccactcctgttgaatccttaggatcgtgaactgaaatctgtcaggttaacattccatttcttttaaattctttgcatatgcttggttagggaactagtgaaactgagagatcgatgaatccatctttttttcatgcagtgaac

SEQ ID NO: 89492 - DNA, 660 bp, Zea Mays
atgtcacgcagcaacgccttgatgtggttgttgcttctcgcgctctcgtgctggtcgtggtgcggcgccgtcacggcgcggccgaccccgagcgccagcaccagcaccagcacagccggcggcggcttcatcaggtcgtggtgcgcggggacggactacccggccctgtgcaacgcgacgctggccccgtacgcggcggaggtcggggccagcccggcgcgcctgtcgctggcggcgctgacggtcacgctggacggcgcgcggagggcgacggccgcgatgaaggcaatggcggcgggcggcgcgagcagccaccacctcgtgcccgtggcggccgaggcggcggcagactgcgtgggcatgctcgaggacgccgtggacctgctgcggcagtcggtggaggcaatggagcgcctcggcaaggagccggccagcgccagtgccagcgccagcgggcaggccgggcggagcgtcaggttccaggtgaacagcgtgcagacgtgggcgagcgccgcgctgacgaacgacggcatgtgcatggaggggttcaagggccagcccgccgtcgtgagggaggccgtgcggaggaacgtcgccggcgccatgcacctcacggccatcgcgctcgccatcatcaacgccatggccaagcaaatgtag

SEQ ID NO: 89493 - DNA, 1980 bp, Zea Mays
atggcggtcatttcggcggccctttcggctccccgccctcccgcctcccccgcatgcccttccgcctcccccacccatcgccccgttaacggcgctcgccccaccgtccccgcaccacctagcccctcgccggcgctcaccccgactccggcgaccactgcctcctccccctcccgtgtggcgacattgtctcccgcggctcgtccgttctcccctgttggacgttccaaggcgcagcggtgggcatcttcctgccttgacagcccgtcatcatcggccctgagtgttggtgtcgttggatgtggtgcctcgcagaggactttcaaggacgtgttgctgctccctccgccccagccggttgcgcggctgtccctccctagacctccgcacaggccgaagtttgcggtggtgcaacgtcctggaactgtgcgtaggcctgttcctgaccgggagggctgggttagggtcgaacctcgtcgacgtcaacttcctccttcaccacctccccgtcgatcgatccctgaggatctccggggtaggtgttttaactgtctgacctcctctcatcgggcggcggattgccgacgttcggtgcgctgcttcaagtgttgggggctcggacatcgtgtagttaagtgcaaggttcgtgctgcgccggtgatcaaagcttcagtatcggtgtgggatcgtcttggccctcagctggttcacaagcctttggacattcctagacgcgccatggagtggcgcagggtctcttcgccgatcccggccatccagaggtctggtgtggctgatcctaccttgggtggcacgaagaaacgccgccatcgtacgcggggtcgaaggcctaagaccgcccccgttgcaccttcggaggattccagtgtagttgtacctccacccggttcctcttccccagagccggtcagggtgcatgcccctcgacaacctgttgttcctgatatggtggaagccacacatctctgcattttgaaccgtgcggatgcgcttgcacgggaagaactgcggttgcaacggtgtgctctgttcgtcgttgtcactggttcaagaccgagggtggctgctgaaactcttgctgatgaggtggctgctggtttcgggctggatgtgtcgtccttctccgttcatcgttcgtgcccagaagattttgtcttgatcctgaattcggaagcgttggctaatcaggttgggttgtccgtgaaagactcggcgccttccgttgccttggttactggggacacgcatgcagacgctgtggagccggtgattggctacattgatgctgggttgagtctgcccctggagaatgttcatgggcctgacactgtgactttgggtgtggcggtttctagcctgtctcctagttctgcgagcccagtgggtcttatgccatcatcagagattccaggtgctcacgatggcccgaatggcgaggtcttcttgtccatagccgatgttgacgttgactcttctgttccggcggtggagactttgagtgcatcttcatccctcccaggtggtcctgccatcgctacccgagtggggactgggttgaagccgtctatgaaggctgttggggcagggctcaggatgtggccttgttcccccatcaaatatttcagaaggaagcgcagaggggctgctgctcaacaatcccctctctcggctgctcagtcagcgaccaccgctgatttcatcgccaaaatgtccaggccggtcgctcgggtcctgtgtgtgccgcagaagcagaagcggcagcgtcgccccagggcacctcgtgagggggctcttcctcggcggagcaggcgcttggctggagcagatgttgaaaaggttctcgataattatgccaaggttttcggtgagcggttgactgatttgcaagttaaagctcttgcggctctcttcaactggactgtcccagaagacttgcagggtgcggtggtgcaggtctga

SEQ ID NO: 89494 - DNA, 513 bp, Zea Mays
atggacagcacggcgaacttgttcaccgccgcccccttggacaacgacagcaatagaagcaagcctccggccactaggtgcagcgcctggaggagcaaaccaccacgaacactcatcagatcaataaccgccaatgacggcaagagatggaggagcgaatccaggaggcaagcttgccgtcacctgcacgaggatgaggcgcgcgaggcgggatctgccctcggcgaccctctggaaaccggagccaccgccgctgctcccgctgcttgggtatctaacgccgccacgacggccccatctgagcccacaggatcccctgctgatgtcgaagccttcgctgatcctactgccgtcggtgacgatgagcacgactccaaggaggtcttcctgcgcaggtacttcctccatgagtgggagctggtctccgcgatcctccgccgtatcgtcgccggcggcggcgttgtccaatccgtcgatgtccacagtgtccgctttctcgataacaaaggctga

SEQ ID NO: 89495 - DNA, 1125 bp, Zea Mays
gttcctactgtagcatatccaccattggtgaaacttcttcaggttagctattatagcaagcatgtgctctcagggctcgtgatctctacaggtggattgcaagtgtctttgaagaaaacttcaacgtcagctttggtagggtatctccaggattcagacatcaatactaattgtgaagggaaaagtagagagtatatattgagttgtgatctcctatcggtccttcagcactaccagaaatgtgatcgcgtaattactcccacattgaagactattgaggctctcgagtaaaaaggttttcttgaacaaggaggggtacagtgagttctacggtggactggtagattcggcgggttttgagatgaagggatccaaggatttcacaaagttatgtgcaggtccctcaatccttggatacatttcttcacagtcagatggaatttgcactacggcattttctcaactcctcacattcctaggccacagataccccaagatagcatttatcatttcttgcctgagaacgcagaactccgtgcaaggatcagctcagctgagctcaaatactctgcattctgcaatcttacagatccgaaaagctgcagccgaccaggtgtacgtgtaccttgtgctgctgcaaaatgatggtcttattacgtcggagaatatggataaagcccgggaattacttgtggagacatgctgggaaggagatgtgaaggaagcagcgcaggaggtcagaaatcaacgagatggctggtcaccactacacaggagtctggaaaccaagaaacaaaaaagaacgcttgccacttcgactgatgagaacaaatcttattcgtcgttggtcgatttcagtggatactaaggatgattggggttttcgttggccttccatcttattttcgaccaaaagtttgtatgagtgttgctctccgcatttaactgtactagcgcagtagcgctcactgtcgaatgtcgctatctgtttggatgagtgtggttgttttgagattttcgttattttgtctggtggtggactggtggttggggtggggaggagagagttgtactgctggacgatgtaatttttggaacgtctgatcaaagtagtaagttactctt

SEQ ID NO: 89496 - DNA, 1916 bp, Zea Mays
tctctctctagttgccaaatcggagcggcagcaacgacagatccaatacatataggttccattgcatcacacatcagtcactccaaaaccatcaaatcacacgcccatcagatcacacaggcaaagaggagagagagagagaggagggtgggtgaggaggaagatgatgagagatatatcctactaaactatccatccatccatcaatcaggtagcccggcagcaatcgcgtgccgcctttccactcacgtacaccaccaccaccaccacctctcagcacagcagtcggctcggttcgttcgttgccgcgtcaaatcggggcaagaagccagcagctagccagccccctgtcgcagtgttgcttcgcgtgccctgctgttgcttgcaccgcgcacgtacgtacctggagcaagctgcggtcgattgatcgaccggtggttcgctgtcgccgcggtcggcatgtcgtcctcgtcctcgtcctcctcggccgccacggtgttcccgccgtccccgcagctgccgccgcctctcctggtggagaacctgccgccgctgcatcagcttacgccgccggtagccgcggcggccgcgccggcctccgagcagctctgctacgtgcactgccacttctgcgacaccgtcctcgtcgtgagcgtgcctacgagcagcctgttcaagacggtgacggtacgatgcggccactgcagcagcttgctcaccgtcaacatgaggggcctcctcttcccgggcacgccggcgaacacagccgcggccgccgcggccgcgccgccaccaccaccagctgctgctgtcaccagtactaccgccaccatgaccacggcgccgccgccgccgccagccacctcggtcaacaacaacgggcagttccacttcatcccccactcgctcgacctcgcgctgcccatccctccccaccaatccctcctgctggacgagatatccagcgccgcgaacccgagcctgcagttgctggagcagcacggcctcggcggcatgattaccagcggcaggaacgcggccgcgccgcacccgcacccgccccagccccaggcgcctgcagcgggtaaaggggccaaagagccgtcgccgcgcgctaactccgccatcaacagacctccggagaagaggcagcgcgtgccgtcggcgtacaaccgcttcatcaaggacgaaatccaacgcatcaaggctggcaatcccgacatctcgcacagggaggccttcagcgcggcggccaagaactgggcgcactttccacacatccactttggactcatgccagatcaccaggggcccaagaagacaagcctgctacctcaggatcaccagagaagcgacggcggcgggctactaaaggaagggctgtacgctgcggcagccaacatgggggttgctccatactaatattagagtagcaaagctgctacgtactgttagggctctatggactactacgaagctatggacgtgtttggtaggctgcatatgggccggccaggctggtaagatacagcgtacgcttgtttggttgcttgtctctgtatctggtgggctgaggggcggtgtttggttgcctgtatgtctgtgctcacctgcactgcgggatgcaacatctcgctgtgagccaggctgtggagaaacgagtttcatttctgtatctcgggagccaggccctggctagcctgtttggagcgggcaggctccactgcgaaacgaaccaaacacgccctatatgtatctagctagctagggctgttacgttaagttagacaaggccgggcttagcgtgacctcataaattggcttgttaaacgttgcagtcacgtacgtatccgctatactagctgtgtaaacgacatgcatggtcgatcgatggagcttgttaaaccttgcatgtt

SEQ ID NO: 89497 - DNA, 912 bp, Zea Mays
agtgaggaacacatgcacgtactgctagctggtcgtgtttcgattttcatgcgcgcggcatatatatatgactgtgtgtgtctaacatgtttctgtgtgcgtgcctcgatcgtgtctctctgtctctgcagctccggagaagaggcagcgcgtgccgtcggcgtacaaccgcttcatcaaggacgaaatccaacgcatcaaggctggcaatcccgacatctcgcacagggaggccttcagcgcggcggccaagaactgggcgcactttccacacatccactttggactcatgccagatcaccaggggcccaagaagacaagcctgctacctcaggatcaccagagaagcgacggcggcgggctactaaaggaagggctgtacgctgcggcagccaacatgggggttgctccatactaatattagagtagcaaagctgctacgtactgttagggctctatggactactacgaagctatggacgtgtttggtaggctgcatatgggccggccaggctggtaagatacagcgtacgcttgtttggttgcttgtctctgtatctggtgggctgaggggcggtgtttggttgcctgtatgtctgtgctcacctgcactgcgggatgcaacatctcgctgtgagccaggctgtggagaaacgagtttcatttctgtatctcgggagccaggccctggctagcctgtttggagcgggcaggctccactgcgaaacgaaccaaacacgccctatatgtatctagctagctagggctgttacgttaagttagacaaggccgggcttagcgtgacctcataaattggcttgttaaacgttgcagtcacgtacgtatccgctatactagctgtgtaaacgacatgcatggtcgatcgatggagcttgttaaaccttgcatgtt

SEQ ID NO: 89498 - DNA, 2015 bp, Zea Mays
agaacatcattacaaacgagctccctacaaagtatacagactaaaaaaaatagaaaaggaattccgcataaacccctcccagccaaaaaaaaccacccccgccgcggccgccgagcgagcggtaagcagccgccgcaccacgagagcgggatggcgtcggctccggagccggagaacgggagggaactctacgcgctgctccacctctcgccggacgcctccagcgaggaagtccgcagggcgtaccgccagtttgcgcaaatctaccaccccgataaataccaggacccgcagatgaaggatgtagcaactgaaaacttccaacgaatatgtgaagcttatgagatactatcagatgataacaaaagacaggtgtatgacatctatggtatggaaggtttaaattctggcctggaacttggtcccaagctaactaaaccagaagaaatcaaggaacagttagaacgactgcggcggcgcaaggaggaagaaaaacttttcaagcatgctctacccaatggctcaatcattgctaatttctcagtgccacaatatttaaatgacgggagcatcatgagaggaatggcgatgcttagtcaagttgagttgccagtgtccaagcaaaatactgtcgttgttggtgggaatttgattgtaaatggctcagctggatctggagcagcaaccactgtgctgcgacaccagttgtctcctgtttcctctattgagtttatggccacagctggactacgttctgttattggtgggcagatgtttcgtcaaatttcaccacattctacagcaacttctggacttgctgtttctttgagagatgggtctatcaacttgtcaaatgcctggactcgccaattgtctgacaatactgttggaaatatacagctagtccttggcgatgaatcaagtatttctgttggatggcaaaagaaggatgaaaaacgtactgcaactggagaagtaaagtttggaactaatttttttggtgcatctgctcattatacacatcgcttctcctccaaatctcatgcacgcatcgctggtagagttggaagcacaatccttgattttgaaattggaggagggaggcgaatatcagaatttagtactgtaaggatgatgtataacataggaattcagggcgtatcttggaagtttgagttacatcgtgctggtcaaaagttaatcatcccagtcttgctttcaactgatttaaatccattatttgttaccagtgcatttgctattccttcaacactgtattttctacttcagacatatgttgtaaagccttactaccttaagcgagaaaagcagaaaacactagaaaagatggaaggcttatctacacagctaactgaagccagaaaggcagctgaaaaagctcaaaaattactggaacctgtctccaaccgtaagaagaatagacagctagagaacaacggattggtgataacgaaggctctatatggcagtcgccaaaaaatcaaaatgagcagtgaattgaatgatatacacaatgacatggcttcacaagtatttgatgtgaccatcccactgaacttcctcgttactgaggcaggccagctcaagcttcatgacgggataaagaagtctggaataatgggtttctacgatccttgtcctggagacccgaagctattacttgtcgagtatacgtttcatggtcataaatacaaggtcatggtggatgactatgaggcgctgttgataccacaagatatccatcaattttgaacggttcctgatgtaaaagccacatcaaaacgattttgggtcatcagctccctttctcacattttttgttccttttgtgttgagctatctctgttttcggtcattccttaatgcgcctcgtatttgtatacacatgtcggtttgtgccacctcgaggtcatacacaccaacagcaggtaataaagctgtagccagtagttttccagaaagaaaaaaaataaaaataaaagtaaaactcaatg

SEQ ID NO: 89499 - DNA, 1911 bp, Zea Mays
gagagagcgagagagaggtttgccaccttcgcaactgtgccaatggcgacctgctgcagcatctccctgccgtcgtcgccatggctcctcctgctggcggtcctcatcatcggcgacgccgcggctgtgatggcggtgcccaccaggccgctgctgcgcatcgccgagccgccaaccgcgccgggcacggcagcggggcccgccggcgcgtcgcggcccgggggcggccgaggcgggaggctgcctgaccggtcggtggccggcgccgaggtgatcctcgccgggttcgctgccgcggtgatggtcatcgtcttctgctatatcagggtcaccaggagaaacagcggcggcgtaggactgggagggaagcagcagcgcttcaacaactccgtactggaacgcgacgtctttttcatggcatttaatttgctggacaaagtccacgcctgcaactttggactacgtacgccagagcgagctaccaaaccgtcgcaaagaaatgcgcgcaaggaagctccagtcagcagtcagcagcagggatccagctacgccacagcacggcggcgcccgacctcccacctcccagtccctcccgcccgccaccgaacacggagccgtcctgatatgggtcccgggacgggaaacggtgctggcgctgcactgcagtatctagcagcagcagcatctgctgcgacaggaaacaacgtctccactgttccgcatagccgtacactattttatagtatagagtatagatgtctaaatgacgtcttttacgtccacagcaagctcctacaggctacagactacagtcctaccatgcccgagggctcgaggggagcagcgcaggacgacaagacagacagtagaaaggggtcacacacacagtcacagccatgcgcgaaggcctaccctaggctgccgagggcagcgtccaccaggtacgatacaaccctccccgatcccgacctcgatccttcttcaaacaagccgggtacgggagtagagcgctgcggcgtcacatcacggcgcagcagagtccagaggagatccagcacaccgtcgcctcgattctcatgtgccagccaggcgcatgcaagaccacggtcagactccgacgcccccacccctgctttcctctcacacgtccacctcactcccgtccgtgcgaccgtgcctcgtctcacttgcccacatatataccagataccagttaccaccaccaccaccaccacgagctccctccaccctcctcgcatttcccacccaaccttctggagcaagctcagagagacctccagagcaacagaccagttgcgacttgcgagcagtgcagtagcagtacaaatggctagccgccgcggcagcttcttgtcactgccaaggcagctcctcctcatggcggcggttcttggcaccgtcgtccttctcggcgagggcgcgacggccaggccgctgctgggcatcgccgagccaccggcctcgccaggcgccgcggcggcggcgccgggaccgggggtcgccgcgcaggctgcggaggcaggcggcggcagggcccccgaccgctcggaggccggcgtggaagtgatcctcgccgggttcgcggcggcggtggccgttgtcatcgtctgctacatccgggtcaccagggagagcaagaacggcagcggcagtgtgggagagaagcgcggaagcttgggagggttctgagctcgctcgctctgtctagtgtgggcagatgtagatgtaccagcgagtaggcacttcttgtaaatgaaatgaggtgtagggagtgagatgagaagaagcgtcgtgtttgtcgaactcttaatcaatctttaggaaacattctgtgtgcatcatgttaccgggcattctgtccgatcgagcgaaattcgcaactgaatttgc

SEQ ID NO: 89500 - DNA, 1043 bp, Zea Mays
gtagctgccatggcctcttgcgacctccttgatgtcgaccctctggagcttcagtttccgttcgtgctcgacaagcagatcccctgcccgctgcggctcgccaacaggactgaccgtaccgtcgcctttaaggtgaagacgacgaacccgaggaagtactgcgtgcgccccaacaatggcatcgtaccgccccgatccttgtgtacggttgtagtcacgatgcaggcgcagacggtggtgcctccggatttgcagtgcaaggacaagttcatggtgcagagcgtggtcatcagtgatagcttgtcagccaaggacataacctctcaaatgttcgcgaaagaggggggtaatgtgctccaggaggtaaaattgaaggttgcttatgtgatgccacctgaaccaccatcagagattgcagaggagcacgatggtttagatcgagttttagtgcctatgcagaggatcgtggataatgggaaaagtacttcagagctatcgagtggctccgtgtcattgaggtcagctgaggagtttggatcacctgttggtcgaattgtgaagagtgaggagtttctgaaggctgcaggacctgctatggaaacaaaaacatatgcaggacctggtgaacaatctcatcagctgtcagctataattacaaagctgactgaagaaaagaattctgctcttgagcaaaacagaaagcttcaagttgaattggaacttgtaaggtgcgaagccaggaaacagcaaagcgcgttctcgttggttctcctaatagcgtttgggctccttggcattgttctaggttacattgttaagaaatgataatttcatagtctaatcgagcaatcgctatggtaaataaaaggtaacatgtcgtgtgattcttacattcatcagccagctgccaatgctacagagaagtgcaagcgtcagttgacaaaccgggggtgggggtgggggtgcggagtacaatagcatgtattttgatccacatgatgtatttacacgaatcactggaaaagtgattgttgtttggtttc

SEQ ID NO: 89501 - DNA, 189 bp, Zea Mays
atggcgcagatttgtcaggctggtccagacaaaaacagtaccatgacgaattgggttttcattggccacgattgcctgacaactctacttgactctagatccaccgataacttcattgacgaagatccgccagctgatccaagaggatgctcggtccgcaatcaggacaacgacggagtcaatgggtga

SEQ ID NO: 89502 - DNA, 1963 bp, Zea Mays
atggcttgggagcagttggccctcgacaccgcttcctacgtagtgaagccatcactcgacccactatcgggctcgtgggtcgtgtggctccagggcatatgttacgtttgtcccagctctacacatcaaaaccggatatctcaggatgtccccccatttctgcctttggtgctaccttttctcgaccgagttgccccgcaattggtagacgctagacgccctggcgagggtgacccaaatcggatgtgcgaccatccatatgcgtggggcacaatccaggggaattacctccgcgccgagcgtggctcctctcatggccaggcggctaccgctactcaggatgaccgccgaggctccatcagaggcacttggctaagcgccccaccccctagtgacgcagagattgctcgttggctcacgaaagccatggaaattcgtaaaggcacagacggggtcatcatcccatacgtcttcccaattcataatggagaaggaggcggcttgcgtgtgggtggagcaatagcagagggacaaaaagacagggtggagaagccacgacggagggctgagcatcagatgcgcagccgtggcaccgagaccttctcgatcgacgaggatggagacgacgatgatgatgcgaacgcaggctccgagctttgggccattcctaatgcctcccttgatgcctcaacggttgatcccgtcccaactttacctgtggtcccggctgacacacctctagggccgcccgtgcttgcaaccaaagcgggtgatgggaccaacgctttgcccgagtgccatgaaggcgaggtgcctttcagagggcaaagggagttgaatgaggagagcgatgcaactgagaaggtgttgcgggacggccttgatcggctttcaaccatgcgccaaagtctagcgtcgctcacaaggtcgctagcgagcagattctgccttcttcttgaccaaagggaagcgtgggagcattccgtcagtgatcttccagtagcaaaaagtgggaccatcgatgcccgcgccagtgccgcgttgatccaaaatgcctacggcgccctagtcggagcagcgaggagtgatgcggattcgatgacccttgcacgtgttcagagcacgaaagcgagctctcaccttcgtattctggagcgagggaaagaggtcgtcgaggcccaagtcgcggtcttggaggaggagctgggcagtcagaccaagaaggaggagaaattcctaccctacatgcaagataacaccttttattagtctcttctgaagctagggtccgttgcctacttcctccctctgattgctcatgtcttctctggtcaaccatacaagggaaatttgacgccaccgaggggaacttcgtcaaggtgcaaagccgcctggaggagctagataaggagaggcatctcctatcggaggtggtgagcaccatgtgtgtgcacttcggagcacctccttcgtcggagtctgaatcgctcatcttgagggcctcgctagcctagaggagcttgagaaggaatccttctgccaagggatctaccaggtcttcgctgtcgtaacgtctcactacaaagggggatcgagttggaggacctaagcaagcactactacgatgcctggagtgattcgaattttgctggcatgatgaaggccgtggagcctttcgctcgaaagctaggagccgccctgcttggaaacaccccacctagggggttaaggtggaagggtaccattgtaatggctgtggaacaaaaaagggggggttcctttcttatagcaacttatccaacttctcgtgaacttctgtgcttactagagccttgagagcgcttttcttaaacaagcctatagctaaaaagaaggcttgccacttgagttgcgttcgttgatgtaacacccaaaaccctgtgctaggtattataaatgtctctctaaaagatttgagataaaa

SEQ ID NO: 89503 - DNA, 1468 bp, Zea Mays
cactttgtagaaattcgctcaatagcccggctgacgtcactaattcaccctctctttccggccgccgccacgggctctccatggaacggctcaaatcggcggtgccgcccgacctccggcgggccgtcggcgagggcacggccgccgatctagctaacaccacctctcgcctgttcgccttcttcgacagccttcctctcttccaccaggttatgcaagaactgaccgaccccgagcttgcgttgtgtcgcaaagacaaggtgaaggctgtagagttgaagggccacggcaacgcgtgcttctctaggagggagttcgggaaagctctcaggttctattcgcaggcattgcgccatgtcccaattaattcgggtggcatggatgtgaacttggtatcttcattatatgtcaatcgagcctccaccatgcataaattaggtctgttcgaagaatctctaagggactgtgacagggccataaccatttctcctaattattctaaggcttggtacaggaagggaatggtaaaaacagcgctcaagaattattcatctgcaatacatgatttagaggtggcattgagccaggaagtgacttcttcggggaagagtaacatagaacaagagctgaagttgattttagagaagcatgaaagtgtcaatgaagctgggacatcaaactgtgatagcaaggatagagatttgcctcttgcaggacaacctcataaaattgttatagagagtatttcaacaccaaacaaaggtagaggaatgatttctacagatgatatccccccagcttcgttgattcatgttgaggaccctcttgctgcgattatcatgaaatcttcccgtgaaacacactgccacttttgcttcagtgaaactccagccgatgttgtattctgtccttcatgtacaataccaatttattgttcaaaaaggtgccaggagcaatcagcaggtcatatttctcgtgatgaagatactaatcttggatattcaacgaatgttgcaaacctgagtataacttcgagttgcaagtctccaagatctaagctatttgctgaacataggcatgaatgtggaggtgcccactgggcagctgttttaccagctgatgtagttttagctggacgaataatagcacacagcatagtaaaaaggatgccgtctgggaagagctttgctttctctggcccaaatttggatctagttcaccattatgatcaacattctcctgccaacaagttggaatcacatatatatgcaattgtcctattgttatgcctccaaaatcattatagatcagaccttttgtggacagaagattctttatcacaggtatatatggcgtttatcttcagacattattgttctgatatacctggttaatgagtatgatctgaaattgatggcgatttcagctcaagattttttataaattttcacaatgctaattgttatca

SEQ ID NO: 89504 - DNA, 2036 bp, Zea Mays
gctgacgtcactaattcaccctctctttccggccgccgccacgggctctccatggaacggctcaaatcggcggtgccgcccgacctccggcgggccgtcggcgagggcacggccgccgatctagctaacaccacctctcgcctgttcgccttcttcgacagccttcctctcttccaccaggttatgcaagaactgaccgaccccgagcttgcgttgtgtcgcaaagacaaggtgaaggctgtagagttgaagggccacggcaacgcgtgcttctctaggagggagttcgggaaagctctcaggttctattcgcaggcattgcgccatgtcccaattaattcgggtggcatggatgtgaacttggtatcttcattatatgtcaatcgagcctccaccatgcataaattaggtctgttcgaagaatctctaagggactgtgacagggccataaccatttctcctaattattctaaggcttggtacaggaagggaatggtaaaaacagcgctcaagaattattcatctgcaatacatgatttagaggtggcattgagccaggaagtgacttcttcggggaagagtaacatagaacaagagctgaagttgattttagagaagcatgaaagtgtcaatgaagctgggacatcaaactgtgatagcaaggatagagatttgcctcttgcaggacaacctcataaaattgttatagagagtatttcaacaccaaacaaaggtagaggaatgatttctacagatgatatccccccagcttcgttgattcatgttgaggaccctcttgctgcgttgaatgcagattatcatgaaatcttcccgtgaaacacactgccacttttgcttcagtgaaactccagccgatgttgtattctgtccttcatgtacaataccaatttattgttcaaaaaggtgccaggagcaatcagcaggtcatatttctcgtgatgaagatactaatcttggatattcaacgaatgttgcaaacctgagtataacttcgagttgcaagtctccaagatctaagctatttgctgaacataggcatgaatgtggaggtgcccactgggcagctgttttaccagctgatgtagttttagctggacgaataatagcacacagcatagtaaaaaggatgccgtctgggaagagctttgctttctctggcccaaatttggatctagttcaccattatgatcaacattctcctgccaacaagttggaatcacatatatatgcaattgtcctattgttatgcctccaaaatcattatagatcagaccttttgtggacagaagattctttatcacaggtcagggttgcacaagctctttatgtatctggtagcctgttcaatcactcatgtcagcccaatgtgcacgcatattttctttcacgtgcgttcgtgctgagaactactgaatttataaagtccgggagcccagttgaactgtcatatggtccacaggtttcactgaaccccagctccctccaggcctccatttctctctgaatcagatatgaatgtcttctgctttgaacttttcatgcttctgatttctaggttggcgagatgcatatttcagagagacagaagtcacttcaagagaattactacttcagttgtcaatgttcaagttgttcagagctaaacctatcagaccttgttatgaattcattctgttgtccacaaagcaactgccttggtgccatatcggaatcaacttactacaggtccaaagagaatttcgtgaatgtttcccttggaggatcttatgtctgcaaactatcattgcccgtacggttattttcattaccatggtttttaatatcttctcatttactctagtcacaaataattgaccttttaaacattgatatgatcttcaaaacacaactttgagtactgtttttgttacaaaatatttatgaatcaaagaaaattggttacttttatgaaactatatttaatgaaaactctgacaaatctgctcgtgctattttgaaatatccaaactcaacat

SEQ ID NO: 89505 - DNA, 2527 bp, Zea Mays
gctgacgtcactaattcaccctctctttccggccgccgccacgggctctccatggaacggctcaaatcggcggtgccgcccgacctccggcgggccgtcggcgagggcacggccgccgatctagctaacaccacctctcgcctgttcgccttcttcgacagccttcctctcttccaccaggttatgcaagaactgaccgaccccgagcttgcgttgtgtcgcaaagacaaggtgaaggctgtagagttgaagggccacggcaacgcgtgcttctctaggagggagttcgggaaagctctcaggttctattcgcaggcattgcgccatgtcccaattaattcgggtggcatggatgtgaacttggtatcttcattatatgtcaatcgagcctccaccatgcataaattaggtctgttcgaagaatctctaagggactgtgacagggccataaccatttctcctaattattctaaggcttggtacaggaagggaatggtaaaaacagcgctcaagaattattcatctgcaatacatgatttagaggtggcattgagccaggaagtgacttcttcggggaagagtaacatagaacaagagctgaagttgattttagagaagcatgaaagtgtcaatgaagctgggacatcaaactgtgatagcaaggatagagatttgcctcttgcaggacaacctcataaaattgttatagagagtatttcaacaccaaacaaaggtagaggaatgatttctacagatgatatccccccagcttcgttgattcatgttgaggaccctcttgctgcgttgaatgcagattatcatgaaatcttcccgtgaaacacactgccacttttgcttcagtgaaactccagccgatgttgtattctgtccttcatgtacaataccaatttattgttcaaaaaggtgccaggagcaatcagcaggtcatatttctcgtgatgaagatactaatcttggatattcaacgaatgttgcaaacctgagtataacttcgagttgcaagtctccaagatctaagctatttgctgaacataggcatgaatgtggaggtgcccactgggcagctgttttaccagctgatgtagttttagctggacgaataatagcacacagcatagtaaaaaggatgccgtctgggaagagctttgctttctctggcccaaatttggatctagttcaccattatgatcaacattctcctgccaacaagttggaatcacatatatatgcaattgtcctattgttatgcctccaaaatcattatagatcagaccttttgtggacagaagattctttatcacaggtcagggttgcacaagctctttatgtatctggtagcctgttcaatcactcatgtcagcccaatgtgcacgcatattttctttcacgtgcgttcgtgctgagaactactgaatttataaagtccgggagcccagttgaactgtcatatggtccacaggttggcgagatgcatatttcagagagacagaagtcacttcaagagaattactacttcagttgtcaatgttcaagttgttcagagctaaacctatcagaccttgttatgaattcattctgttgtccacaaagcaactgccttggtgccatatcggaatcaacttactacaggtccaaagagaatttcgtgaatgtttcccttggaggatcttatgtctgcaaactatcattgcccgatgtatcgaaggttgatatggatatggagaatgtcgccaaatctctcttgcaaaatagtggtgtcagtctgaacatagatcatggatgttgcatgagttgtagatcctgtattgatctgtcgtctgctctggctacatcacacagggaagaatctaccatcgataggttgaagaaacatacattcctagacaagactctcatcacagaggcattacaatctctaaaacaactcaagaagttgaggcacccatatagcaaggctctcgcgcaggccgaagacacaatcgcagaggcctttgcgaaggtcggagaccaagaactagcacgaaagcactgtgaagcatcaattcagatcctcgagaagctgtaccacccaaaacacatcatcattgctcacgagcttattaagcttgtttcgattctgctgtccctgggagatggggcaagcgccgcagccacattcgctcaagcagaggcaatattctctctttactacggatctcatgtggagaaggttttgacatacatgggtgccctgaagaaagctgtcattgacgtgtagcgtgctgacaatcctcacgcgggaatggccaacacggttctgcagaatcatctcaccttttgcgcttcttcgaggagttaatgtaggggaaaacccaaaaaatatttacaaagcagtgtggtattgcttgtagtttagtttgttctagaaaacacaaactagctcaaccaaacttcctggctaatgagtttggtggatgttctgagtgcctatgttaatgacttgtttcataaatttttttcgtatata

SEQ ID NO: 89506 - DNA, 2880 bp, Zea Mays
gctgacgtcactaattcaccctctctttccggccgccgccacgggctctccatggaacggctcaaatcggcggtgccgcccgacctccggcgggccgtcggcgagggcacggccgccgatctagctaacaccacctctcgcctgttcgccttcttcgacagccttcctctcttccaccaggttatgcaagaactgaccgaccccgagcttgcgttgtgtcgcaaagacaaggtgaaggctgtagagttgaagggccacggcaacgcgtgcttctctaggagggagttcgggaaagctctcaggttctattcgcaggcattgcgccatgtcccaattaattcgggtggcatggatgtgaacttggtatcttcattatatgtcaatcgagcctccaccatgcataaattaggtctgttcgaagaatctctaagggactgtgacagggccataaccatttctcctaattattctaaggcttggtacaggaagggaatggtaaaaacagcgctcaagaattattcatctgcaatacatgatttagaggtggcattgagccaggaagtgacttcttcggggaagagtaacatagaacaagagctgaagttgattttagagaagcatgaaagtgtcaatgaagctgggacatcaaactgtgatagcaaggatagagatttgcctcttgcaggacaacctcataaaattgttatagagagtatttcaacaccaaacaaaggtagaggaatgatttctacagatgatatccccccagcttcgttgattcatgttgaggaccctcttgctgcgttgaatgcagattatcatgaaatcttcccgtgaaacacactgccacttttgcttcagtgaaactccagccgatgttgtattctgtccttcatgtacaataccaatttattgttcaaaaaggtgccaggagcaatcagcaggtcatatttctcgtgatgaagatactaatcttggatattcaacgaatgttgcaaacctgagtataacttcgagttgcaagtctccaagatctaagctatttgctgaacataggcatgaatgtggaggtgcccactgggcagctgttttaccagctgatgtagttttagctggacgaataatagcacacagcatagtaaaaaggatgccgtctgggaagagctttgctttctctggcccaaatttggatctagttcaccattatgatcaacattctcctgccaacaagttggaatcacatatatatgcaattgtcctattgttatgcctccaaaatcattatagatcagaccttttgtggacagaagattctttatcacaggtcagggttgcacaagctctttatgtatctggtagcctgttcaatcactcatgtcagcccaatgtgcacgcatattttctttcacgtgcgttcgtgctgagaactactgaatttataaagtccgggagcccagttgaactgtcatatggtccacaggttggcgagatgcatatttcagagagacagaagtcacttcaagagaattactacttcagttgtcaatgttcaagttgttcagagctaaacctatcagaccttgttatgaattcattctgttgtccacaaagcaactgccttggtgccatatcggaatcaacttactacaggtccaaagagaatttcgtgaatgtttcccttggaggatcttatgtctgcaaactatcattgcccgtacggttattttcattaccatggtttttaatatcttctcatttactctagtcacaaataattgaccttttaaacattgatatgatcttcaaaacacaactttgagtactgtttttgttacaaaatatttatgaatcaaagaaaattggttacttttatgaaactatatttaatgaaaactctgacaaatctgctcgtgctattttgaaatatccaaactcaacatataaaaactagtatacgatcaaaattttgaatggttaacttgagataacttcaaaacgacacttgtgactggagtgagtacttaatgctgatggatcacatatgacatgatgctgagtttcttttaggatgtatcgaaggttgatatggatatggagaatgtcgccaaatctctcttgcaaaatagtggtgtcagtctgaacatagatcatggatgttgcatgagttgtagatcctgtattgatctgtcgtctgctctggctacatcacacagggaagaatctaccatcgataggttgaagaaacatacattcctagacaagactctcatcacagaggcattacaatctctaaaacaactcaagaagttgaggcacccatatagcaaggctctcgcgcaggccgaagacacaatcgcagaggcctttgcgaaggtcggagaccaagaactagcacgaaagcactgtgaagcatcaattcagatcctcgagaagctgtaccacccaaaacacatcatcattgctcacgagcttattaagcttgtttcgattctgctgtccctgggagatggggcaagcgccgcagccacattcgctcaagcagaggcaatattctctctttactacggatctcatgtggagaaggttttgacatacatgggtgccctgaagaaagctgtcattgacgtgtagcgtgctgacaatcctcacgcgggaatggccaacacggttctgcagaatcatctcaccttttgcgcttcttcgaggagttaatgtaggggaaaacccaaaaaatatttacaaagcagtgtggtattgcttgtagtttagtttgttctagaaaacacaaactagctcaaccaaacttcctggctaatgagtttggtggatgttctgagtgcctatgttaatgacttgtttcataaatttttttcgtatata

SEQ ID NO: 89507 - DNA, 790 bp, Zea Mays
agaaaacaggcagaaaagatgcaaaacagtgggttggcgagataaacaagctcacctcctcagcctgcagtgccaaccagaacagtccctccctcggcctatccggctactcagcaccaagaacagacggccaagtgcactcgcgcctttatataaaggaatccaccagcagcattagctttggtttcttctccttgtatgcacacaaacccatcgcagggcattctcgagcatagcttctctgcctctctctcccctcctctcctctcgtccactcctttgtccaaagcttcgagatggctcagcagcagaaggtggtggtcagggttccaaccatgacagatgacaagatcaagcagaaggccatcgaagctgttgcggacatttacggtattgactccatagcagcggatctgaaggagaacaagatgaccatcataggcgagatggatgcagtagcgattgccaagaagttaaagaagattggaaagattgacattgtgtctgttggacctgcaaaagaagaaaagaaggaagaaaagaaagaggagaaaaaggaggaaaagaaagaagagaagaaagaggagaagaaagaagagaagaaagaagagaagaaagaagaaaagaagtgataaacctataaaacatatatatcatcgcatggcctcacttatcttcagttgcattgactttgcactgttgttgctatgtggagttactatgtaatacttatactacagagtacatattagttaataataaaagtgcaatttgtgcatttcttttagca

SEQ ID NO: 89508 - DNA, 1408 bp, Zea Mays
agaaaacaggcagaaaagatgcaaaacagtgggttggcgagataaacaagctcacctcctcagcctgcagtgccaaccagaacagtccctccctcggcctatccggctactcagcaccaagaacagacggccaagtgcactcgcgcctttatataaaggaatccaccagcagcattagctttggtttcttctccttgtatgcacacaaacccatcgcagggcattctcgagcatagcttctctgcctctctctcccctcctctcctctcgtccactcctttgtccaaagcttcgagatggctcagcagaaggtggtggtcagggttccaaccatgacagatgacaagatcaagcagaaggccatcgaagctgttgcggacatttacggtattgactccatagcagcggatctgaaggagaacaagatgaccatcataggcgagatggatgcagtagcgattgccaagaagttaaagaagattggaaagattgacattgtgtctgttggacctgcaaaagaagaaaagaaggaagaaaagaaagaggagaaaaaggaggaaaagaaagaagagaagaaagaggagaagaaagaagagaagaaagaagagaagaaagaagaaaagaagtgataaacctataaaacatatatatcatcgcatggcctcacttatcttcagttgcattgactttgcactgttgttgctatgtggagttactatgtaatacttatactacagagtacatattagttaataataaaagtgcaatttgtgcatttcttttagcatctatgctccctgctaagcaacttatgttcataagtaagtaggtgttccccttttttgtagtaaagtgaaaagctctgcctttcaattaaggtagaaaagagagactataggctagatgcaggggcggacccagcgggtggtccatatggtccacggcacaccctaagatcacataagtgtagttagcatagtggtgtaagtgctatattttaaacttagtggtcaaggttcgagtcttgttgatcattattttttgtttgtttttttatttttttcttggcacaccctaaacatagcagctgtgtccgccactggctagatgctcaatctaactaacaattatcaggaaactcaaatatcctgccagacctgtatctaaaaaaagaataatatgcatactccttgaagcaacggaggactggacatactgaatcttgaaatctacatgaacaataattaatatacttaaactgccatgttgcacctatcgctactacttaaagaaaaggtaagctttttaacaggtatgagtaccaataaagcagtcaagtgaccagatgctgccaattatcttaaacagcaccagaatccagaaaggggcaataatgcagactttcacc

SEQ ID NO: 89509 - DNA, 1424 bp, Zea Mays
agaaaacaggcagaaaagatgcaaaacagtgggttggcgagataaacaagctcacctcctcagcctgcagtgccaaccagaacagtccctccctcggcctatccggctactcagcaccaagaacagacggccaagtgcactcgcgcctttatataaaggaatccaccagcagcattagctttggtttcttctccttgtatgcacacaaacccatcgcagggcattctcgagcatagcttctctgcctctctctcccctcctctcctctcgtccactcctttgtccaaagcttcgagatggctcagcagcagaaggtggtggtcagggttccaaccatgacagatgacaagatcaagcagaaggccatcgaagctgttgcggacatttacggtattgactccatagcagcggatctgaaggagaacaagatgaccatcataggcgagatggatgcagtagcgattgccaagaagttaaagaagattggaaagattgacattgtgtctgttggacctgcaaaagaagaaaagaaggaagaaaagaaagaggagaaaaaggaggaaaagaaagaagagaagaaagaggagaagaaagaagagaagaaagaagagaagaaagaagaaaagaagtgataaacctataaaacatatatatcatcgcatggcctcacttatcttcagttgcattgactttgcactgttgttgctatgtggagttactatgtaatacttatactacagagtacatattagttaataataaaagtgcaatttgtgcatttcttttagcatctatgctccctgctaagcaacttatgttcataagtaagtaggtgttccccttttttgtagtaaagtgaaaagctctgcctttcaattaaggtagaaaagagagactataggctagatgcaggggcggacccagcgggtggtccatatggtccacggcacaccctaagatcacataagtgtagttagcatagtggtgtaagtgctatattttaaacttagtggtcaaggttcgagtcttgttgatcattattttttgtttgtttttttatttttttcttggcacaccctaaacatagcagctgtgtccgccactggctagatgctcaatctaactaacaattatcaggaaactcaaatatcctgccagacctgtatctaaaaaaagaataatatgcatactccttgaagcaacggaggactggacatactgaatcttgaaatctacatgaacaataattaatatacttaaactgccatgttgcacctatcgctactacttaaagaaaaggtaagctttttaacaggtatgagtaccaataaagcagtcaagtgaccagatgctgccaattatcttaaacagcaccagaatccagaaaggggcaataatgcagactttcacctcttagtgcttag

SEQ ID NO: 89510 - DNA, 210 bp, Zea Mays
atactatcttgtttttatttatctctgctatacttaaagcatcagtttcaacggtcgtcctgcgtcatatttttacaaataaccccttacatctatctcaaattaacccgttgcatccctccatgcacacaacctccacgtccggcccgttagtcggtcgttcgaacccaagccctgatggaagtagagcaagagacattgagtgaagtc

SEQ ID NO: 89511 - DNA, 1500 bp, Zea Mays
gtttttaggccgaggcccatatacctcgtcgtcctctccgcgggtcccagacaaggacacggtgttgactatctcgagtccgttgacattgacaagggggccaggtcgaggctttccgagctccgatccctctccaacgcctgagggatggccgtgccggcgcccgcgaaggcggcgcgcttgcttgcggcctccgcggcggtgctcgtgctgctgtggtgtgtccatttccgcggtgggctctccttcggctcccccaccaacaagggcctcatcttcaacgtgcatcctgtgcttatgctaataggattcatcatcctagggagcgaagccataatgagctacaaaatatggccatggagtcatgatacaaacaagatggttcacatgcttcttcatgctgttgcactcttcctgggttctgttgggatatatgctgccttcaagttccacaatgaaagtggaattgataatctgtacagcttgcattcgtgggttggacttggaactatctgcctgtacggtatacagtggctatttggcgttgctaccttcttcttccctggtgcttcgccaacagtccggcgcagaatgctcccatggcacactcgcgctggacttgttgtctacatactggcactgcttgcttcagagctggggttcctggagaagctcaccttccttcaggctgccggcctcggcaggtacagctcggaagctctgctggtgaacttcacagctcttgtgatcctactgcttggcgcttctgttgttctgtatgtcaccgctccaatgcacaatgagcacgcgcatgggtattcagcagtgcacaagccctgaaccacagatgcagcttcatcggttccagttggcgtatccttgtacgagtaggaatcaaatccaatcaaattttgtccgccggaattatgagactttagagtgtctccggcagtcagtgtaaaatagaggacacaaaactgtagatgacactttttgacactgtttgtagagtgtaattttaaataagggatgagatagaggatctattggagatagccttagggctagtttagaaaacccattttcccatttttctaagagatttttatttttaaagggaaattatttcattttatcttgagaaaataggaatctcttgggaaaaaaagagtcccaaactagcccttagagggtgtttgtttaaaattataatctgtcagattatatgatccagcaaattttgactcaaacacccccttaataaccagttcagttcagtggcgtgttgtgtgtaaatgtgtaatggtgctgcaaaatgcattttcctcttaacaatagcaggaattcaaagatctacgtgaaagagtatgaacatgcttcggtgtatttgattgataaggctgcgtttggtactttggtttttggtttcctcccgataaggctgtctccagcaacgtcctctatatctatcctctatatctgtactttacagtctcctct

SEQ ID NO: 89512 - DNA, 1019 bp, Zea Mays
gaccagttcagaatgaacttgagccttaatgcattggtttcatatttcagtggctatttggcgttgctaccttcttcttccctggtgcttcgccaacagtccggcgcagaatgctcccatggcacactcgcgctggacttgttgtctacatactggcactgcttgcttcagagctggggttcctggagaagctcaccttccttcaggctgccggcctcggcaggtacagctcggaagctctgctggtgaacttcacagctcttgtgatcctactgcttggcgcttctgttgttctgtatgtcaccgctccaatgcacaatgagcacgcgcatgggtattcagcagtgcacaagccctgaaccacagatgcagcttcatcggttccagttggcgtatccttgtacgagtaggaatcaaatccaatcaaattttgtccgccggaattatgagactttagagtgtctccggcagtcagtgtaaaatagaggacacaaaactgtagatgacactttttgacactgtttgtagagtgtaattttaaataagggatgagatagaggatctattggagatagccttagggctagtttagaaaacccattttcccatttttctaagagatttttatttttaaagggaaattatttcattttatcttgagaaaataggaatctcttgggaaaaaaagagtcccaaactagcccttagagggtgtttgtttaaaattataatctgtcagattatatgatccagcaaattttgactcaaacacccccttaataaccagttcagttcagtggcgtgttgtgtgtaaatgtgtaatggtgctgcaaaatgcattttcctcttaacaatagcaggaattcaaagatctacgtgaaagagtatgaacatgcttcggtgtatttgattgataaggctgcgtttggtactttggtttttggtttcctcccgataaggctgtctccagcaacgtcctctatatctatcctctatatctgtactttacagtctcctct

SEQ ID NO: 89513 - DNA, 2268 bp, Zea Mays
ttttttattgttctacgttataaactgtaatgttagtagagttagagtttaaataagacgagctggagatagttttacacattggaacgcgaacgctctcggatccatccacctccaaagtccaaaagcgaagcctacgcccgccccaacggtgaaaacgtcggaaccctagatccctctcacggtcgcgcctgtgctccaaaaccttagatccgacatgcatcagcccagagcccgctacccacccgggtatggctccagcgggggaggcggtggcgggggaggcggtagtggaggaggaagaggaggcagcggcggcggaggaaaccacaactactacggccggaacacacatccacagcatcaacaccactaccagcagcagcagcagcactcgcataggaactcctcgcaccagcagcagtggctgcggcgagaccagggccccgccgttgcggggccagtgtctggaaacgctgtgcctaagacggcgcctcagcttgacgctgttgactcgagttctcaagattggaaggctcaactaaatataccagctccagacacacgctacaggacagaggatgtcactgcaacaaaaggcaatgagtttgaggattatttcttgaaacgtgagttgcttatgggaatatatgagaagggatttgaaaggccatctcctattcaagaagaaagcattcctattgcgttgactggaagtgatattcttgcaagggcgaaaaatggcactggaaagactgctgccttttgcattccggcacttgaaaaaattgatcctgaaaataatgcaattcaagttgttatactagtaccaacaagggaactggctctgcaaacttcacaagtgtgtaaagagcttgggaaatacctaaacattgaagttatggttagcactggaggaaccagcttgaaggatgacatcatgcgtttataccaacctgttcatctactcgttgggactcctggccgaatacttgatcttaccaggaagggcatttgtgtgctgaaagattgttcaatgcttgtcatggatgaggcagacaagctattagctccagagtttcagccttctgtggaggcacttattcatttccttccacctagtcgacaactgttgatgttttcagcaacctttcctgtaactgtcaaggaattcaaagagaaatatctgcctagaccttatgtgattaatctaatggacgaactgaccctgaaaggaatcacacaatattatgcttttgttgaagaaaggcagaaagttcattgcctgaatacacttttctcaaagcttcaaattaatcaatccattatattctgcaactctgttaatagagttgagctgctggctaaaaaaataactgaactcggttattcatgcttctacattcatgctaagatgttgcaagaccacagaaatcgagtatttcatgattttcgtaatggtgcttgcagaaaccttgtgtgcacagatctgtttaccagaggaattgatattcaggctgttaatgtggttattaattttgacttccctaagacatctgagacatatttacacagggtgccttttttatcttttcttctctagttgtttgctttatgaccttcctgaatttcaaatttgtgtgctgtcatgttcctaggttggccgttctgggagatatggacaccttggtttagcagtgaacttgatcacttatgaggaccgtttcaacttgtataggattgagcaagagcttggaacagaaattaagacaatacccccgcagatcgacctggccgtatactgccaatgatgaatgcgacattcaggagcatcaaacacttctctttctatttgagaaacttatcaggcaaatacgtttgtacatagcaacccatcagggctttgttttggcaccttgatgacgtttgtaagcttacctggattagtagaggaagtgcttcctgtaggcactgatactaacccgtttagctgaggacatgcacgctgggctgcttggaggcccagaactatgatgagatgagacaatatcttacctcacttgacattttcactcgacttgtttgccagtctcagttctacttgacttgcctgttctcatttgattcatcttccgttttcttctttcctaatgttatgatgcatatggatgtctttctgtagctgtatgatgtgttgagtttattttttcttggtgtatgtatacagcttaacttgaaattatttccatatcaacttctttgcgagaa

SEQ ID NO: 89514 - DNA, 2204 bp, Zea Mays
ttttttattgttctacgttataaactgtaatgttagtagagttagagtttaaataagacgagctggagatagttttacacattggaacgcgaacgctctcggatccatccacctccaaagtccaaaagcgaagcctacgcccgccccaacggtgaaaacgtcggaaccctagatccctctcacggtcgcgcctgtgctccaaaaccttagatccgacatgcatcagcccagagcccgctacccacccgggtatggctccagcgggggaggcggtggcgggggaggcggtagtggaggaggaagaggaggcagcggcggcggaggaaaccacaactactacggccggaacacacatccacagcatcaacaccactaccagcagcagcagcagcactcgcataggaactcctcgcaccagcagcagtggctgcggcgagaccagggccccgccgttgcggggccagtgtctggaaacgctgtgcctaagacggcgcctcagcttgacgctgttgactcgagttctcaagattggaaggctcaactaaatataccagctccagacacacgctacaggacagaggatgtcactgcaacaaaaggcaatgagtttgaggattatttcttgaaacgtgagttgcttatgggaatatatgagaagggatttgaaaggccatctcctattcaagaagaaagcattcctattgcgttgactggaagtgatattcttgcaagggcgaaaaatggcactggaaagactgctgccttttgcattccggcacttgaaaaaattgatcctgaaaataatgcaattcaagttgttatactagtaccaacaagggaactggctctgcaaacttcacaagtgtgtaaagagcttgggaaatacctaaacattgaagttatggttagcactggaggaaccagcttgaaggatgacatcatgcgtttataccaacctgttcatctactcgttgggactcctggccgaatacttgatcttaccaggaagggcatttgtgtgctgaaagattgttcaatgcttgtcatggatgaggcagacaagctattagctccagagtttcagccttctgtggaggcacttattcatttccttccacctagtcgacaactgttgatgttttcagcaacctttcctgtaactgtcaaggaattcaaagagaaatatctgcctagaccttatgtgattaatctaatggacgaactgaccctgaaaggaatcacacaatattatgcttttgttgaagaaaggcagaaagttcattgcctgaatacacttttctcaaagcttcaaattaatcaatccattatattctgcaactctgttaatagagttgagctgctggctaaaaaaataactgaactcggttattcatgcttctacattcatgctaagatgttgcaagaccacagaaatcgagtatttcatgattttcgtaatggtgcttgcagaaaccttgtgtgcacagatctgtttaccagaggaattgatattcaggctgttaatgtggttattaattttgacttccctaagacatctgagacatatttacacagggttggccgttctgggagatatggacaccttggtttagcagtgaacttgatcacttatgaggaccgtttcaacttgtataggattgagcaagagcttggaacagaaattaagacaatacccccgcagatcgacctggccgtatactgccaatgatgaatgcgacattcaggagcatcaaacacttctctttctatttgagaaacttatcaggcaaatacgtttgtacatagcaacccatcagggctttgttttggcaccttgatgacgtttgtaagcttacctggattagtagaggaagtgcttcctgtaggcactgatactaacccgtttagctgaggacatgcacgctgggctgcttggaggcccagaactatgatgagatgagacaatatcttacctcacttgacattttcactcgacttgtttgccagtctcagttctacttgacttgcctgttctcatttgattcatcttccgttttcttctttcctaatgttatgatgcatatggatgtctttctgtagctgtatgatgtgttgagtttattttttcttggtgtatgtatacagcttaacttgaaattatttccatatcaacttctttgcgagaattccgatcttgcatttta

SEQ ID NO: 89515 - DNA, 1672 bp, Zea Mays
accgctgccagcttctgcagctcgcaccgctcccgagtccgagtccaacaaggcttgagcagccgacgccaccccggtcggtcgacctccctctccccaccgacaccgcgggcccgcacgcagagaccccgcatgtcaccgtctacactcggtgacggcgcgagcaggtttccagccgcgagccccgcgactgatctgagctcgtgcctggctagctagtagatgtctccgaccgttgcctttaagctcgcacgcgaaccgtcccacactctgcgcaagccactgccgctgccgctgccgccgccgccgccgccttcagtctccgtctccaccggtgccctcgtctcccagccgctgccgccgccgccgccgccccgtgagagccggcgcagcaatccggttgcttggggacgcagcgaggatgggcagcaccagcgcgttcgtcatcaggtggatcaacttcttcaccatgatactggcgctactggtggtgggcttcgggttctggatgagcacccacgacgacgagtgcaggcggaccttgaccgtccccgtcatcgccctcggtggagtgatcttcctcatatcgctcgtcggattccttggtgcctggaagaacatctcctgcttgctctggacatatctgatcatgctgttcgtggtcttggtggcaatcatggtgttcacggtgctcgcgtttatcataacaaactccggaagtggccatactgttcctggggctaggtataaagagtaccgtctccaggactacagctcctggtttgtcaaacagctcgatgacacggagaaatgggctcgcctgaaaagctgcctggtgaagacagatgactgcaatagcctgtcgagaagatacaagaccgcgagagaatacaagctcgcggacctcactcccatggagtcgggttgctgccgcccgccagcagagtgcgggttcccagctctgaacgcgtcctatttcgatctgagctatcacccggcgagcgccaacgccgactgcaaactgtacaggaacgcgcgctctgtccggtgctacgactgcagctcttgcaaagctggtgtcgcgcagtacatgaagacggagtggcgagtggtggctatcttcaacgtgatattgttcgtcatcctgtcgttcgtgtacttcgttggctgctgcgcgcggcgaaacgctggaggaggcgacgcgaaaggccgtggcaggtgacgggatcacttcttcgaggtgaagtgaagcgcttggccatcctatgtggagttagttaagcttagtatcaacaccccccctgtaaaattgttccatcaaatattcaaagttcctttgatgaagtaccaggacctgtcgctgcctagtaatactctgttgcaaatgtgggctgtgtttcttggtggtaaaagggaatgtcatttcgctcagcaaatcgcgcatgcttttgcacggcagattatacttagacgtggcaggctgtggaataggaagtttgctagagatacgtgcagtgtgatgtgccaaatactgcaggtcttcactcttcagcaacgcccgtcagccaggtgttcagcaacagcagcgcggacgactgctgcgccgacacgtgcagtgatgtgcctaatactgcagggtttagtgcttgtaattggacgaccatcagtgtga

SEQ ID NO: 89516 - DNA, 1948 bp, Zea Mays
accgctgccagcttctgcagctcgcaccgctcccgagtccgagtccaacaaggcttgagcagccgacgccaccccggtcggtcgacctccctctccccaccgacaccgcgggcccgcacgcagagaccccgcatgtcaccgtctacactcggtgacggcgcgagcaggtttccagccgcgagccccgcgactgatctgagctcgtgcctggctagctagtagatgtctccgaccgttgcctttaagctcgcacgcgaaccgtcccacactctgcgcaagccactgccgctgccgctgccgccgccgccgccgccttcagtctccgtctccaccggtgccctcgtctcccagccgctgccgccgccgccgccgccccgtgagagccggcgcagcaatccggttgcttggggacgcagcgaggatgggcagcaccagcgcgttcgtcatcaggtggatcaacttcttcaccatgatactggcgctactggtggtgggcttcgggttctggatgagcacccacgacgacgagtgcaggcggaccttgaccgtccccgtcatcgccctcggtggagtgatcttcctcatatcgctcgtcggattccttggtgcctggaagaacatctcctgcttgctctggacatatctgatcatgctgttcgtggtcttggtggcaatcatggtgttcacggtgctcgcgtttatcataacaaactccggaagtggccatactgttcctggggctaggtatgtggatgactggatgttagtattttcatagaaagatcatgaccctgcgagttccagctctacagtacggaaacttacggataggggatagtagcctaaaccgatctacccaccgctacatacaggttttgagctttttttccatgacctcacagtttaaaaatgtcatcgaagctctgatcctaggagagagtttaactctggtttcttgtcttaaagtgcccctgcctgcgcatcagaaatacactgaagcatttcaaatgttctatgtaggtataaagagtaccgtctccaggactacagctcctggtttgtcaaacagctcgatgacacggagaaatgggctcgcctgaaaagctgcctggtgaagacagatgactgcaatagcctgtcgagaagatacaagaccgcgagagaatacaagctcgcggacctcactcccatggagtcgggttgctgccgcccgccagcagagtgcgggttcccagctctgaacgcgtcctatttcgatctgagctatcacccggcgagcgccaacgccgactgcaaactgtacaggaacgcgcgctctgtccggtgctacgactgcagctcttgcaaagctggtgtcgcgcagtacatgaagacggagtggcgagtggtggctatcttcaacgtgatattgttcgtcatcctgtcgttcgtgtacttcgttggctgctgcgcgcggcgaaacgctggaggaggcgacgcgaaaggccgtggcaggtgacgggatcacttcttcgaggtgaagtgaagcgcttggccatcctatgtggagttagttaagcttagtatcaacaccccccctgtaaaattgttccatcaaatattcaaagttcctttgatgaagtaccaggacctgtcgctgcctagtaatactctgttgcaaatgtgggctgtgtttcttggtggtaaaagggaatgtcatttcgctcagcaaatcgcgcatgcttttgcacggcagattatacttagacgtggcaggctgtggaataggaagtttgctagagatacgtgcagtgtgatgtgccaaatactgcaggtcttcactcttcagcaacgcccgtcagccaggtgttcagcaacagcagcgcggacgactgctgcgccgacacgtgcagtgatgtgcctaatactgcagggtttagtgcttgtaattggacgaccatcagtgtga

SEQ ID NO: 89517 - DNA, 1897 bp, Zea Mays
accgctgccagcttctgcagctcgcaccgctcccgagtccgagtccaacaaggcttgagcagccgacgccaccccggtcggtcgacctccctctccccaccgacaccgcgggcccgcacgcagagaccccgcatgtcaccgtctacactcggtgacggcgcgagcaggtttccagccgcgagccccgcgactgatctgagctcgtgcctggctagctagtagatgtctccgaccgttgcctttaagctcgcacgcgaaccgtcccacactctgcgcaagccactgccgctgccgctgccgccgccgccgccgccttcagtctccgtctccaccggtgccctcgtctcccagccgctgccgccgccgccgccgccccgtgagagccggcgcagcaatccggttgcttggggacgcagcgaggatgggcagcaccagcgcgttcgtcatcaggtggatcaacttcttcaccatgatactggcgctactggtggtgggcttcgggttctggatgagcacccacgacgacgagtgcaggcggaccttgaccgtccccgtcatcgccctcggtggagtgatcttcctcatatcgctcgtcggattccttggtgcctggaagaacatctcctgcttgctctggacatatctgatcatgctgttcgtggtcttggtggcaatcatggtgttcacggtgctcgcgtttatcataacaaactccggaagtggccatactgttcctggggctaggtataaagagtaccgtctccaggactacagctcctggtttgtcaaacagctcgatgacacggagaaatgggctcgcctgaaaagctgcctggtgaagacagatgactgcaatagcctgtcgagaagatacaaggtgactcctgtcctgtcctgtccttcacatgattcacttggttcaactctgctggagctgctccctttttgcagccgttgctttcgttgagatcttaattaccagcccccaacttcgcgtgcagaccgcgagagaatacaagctcgcggacctcactcccatggagtcgggttgctgccgcccgccagcagagtactgcgcctggatgcccatctcaaccttttcttttcattagtggtcagcgtagtctctcaggcacgggcatcatcacaagattgctctggttttttcaggtgcgggttcccagctctgaacgcgtcctatttcgatctgagctatcacccggcgagcgccaacgccgactgcaaactgtacaggaacgcgcgctctgtccggtgctacgactgcagctcttgcaaagctggtgtcgcgcagtacatgaagacggagtggcgagtggtggctatcttcaacgtgatattgttcgtcatcctgtcgttcgtgtacttcgttggctgctgcgcgcggcgaaacgctggaggaggcgacgcgaaaggccgtggcaggtgacgggatcacttcttcgaggtgaagtgaagcgcttggccatcctatgtggagttagttaagcttagtatcaacaccccccctgtaaaattgttccatcaaatattcaaagttcctttgatgaagtaccaggacctgtcgctgcctagtaatactctgttgcaaatgtgggctgtgtttcttggtggtaaaagggaatgtcatttcgctcagcaaatcgcgcatgcttttgcacggcagattatacttagacgtggcaggctgtggaataggaagtttgctagagatacgtgcagtgtgatgtgccaaatactgcaggtcttcactcttcagcaacgcccgtcagccaggtgttcagcaacagcagcgcggacgactgctgcgccgacacgtgcagtgatgtgcctaatactgcagggtttagtgcttgtaattggacgaccatcagtgtga

SEQ ID NO: 89518 - DNA, 1796 bp, Zea Mays
accgctgccagcttctgcagctcgcaccgctcccgagtccgagtccaacaaggcttgagcagccgacgccaccccggtcggtcgacctccctctccccaccgacaccgcgggcccgcacgcagagaccccgcatgtcaccgtctacactcggtgacggcgcgagcaggtttccagccgcgagccccgcgactgatctgagctcgtgcctggctagctagtagatgtctccgaccgttgcctttaagctcgcacgcgaaccgtcccacactctgcgcaagccactgccgctgccgctgccgccgccgccgccgccttcagtctccgtctccaccggtgccctcgtctcccagccgctgccgccgccgccgccgccccgtgagagccggcgcagcaatccggttgcttggggacgcagcgaggatgggcagcaccagcgcgttcgtcatcaggtggatcaacttcttcaccatgatactggcgctactggtggtgggcttcgggttctggatgagcacccacgacgacgagtgcaggcggaccttgaccgtccccgtcatcgccctcggtggagtgatcttcctcatatcgctcgtcggattccttggtgcctggaagaacatctcctgcttgctctggacatatctgatcatgctgttcgtggtcttggtggcaatcatggtgttcacggtgctcgcgtttatcataacaaactccggaagtggccatactgttcctggggctaggtataaagagtaccgtctccaggactacagctcctggtttgtcaaacagctcgatgacacggagaaatgggctcgcctgaaaagctgcctggtgaagacagatgactgcaatagcctgtcgagaagatacaaggtgactcctgtcctgtcctgtccttcacatgattcacttggttcaactctgctggagctgctccctttttgcagccgttgctttcgttgagatcttaattaccagcccccaacttcgcgtgcagaccgcgagagaatacaagctcgcggacctcactcccatggagtcgggttgctgccgcccgccagcagagtgcgggttcccagctctgaacgcgtcctatttcgatctgagctatcacccggcgagcgccaacgccgactgcaaactgtacaggaacgcgcgctctgtccggtgctacgactgcagctcttgcaaagctggtgtcgcgcagtacatgaagacggagtggcgagtggtggctatcttcaacgtgatattgttcgtcatcctgtcgttcgtgtacttcgttggctgctgcgcgcggcgaaacgctggaggaggcgacgcgaaaggccgtggcaggtgacgggatcacttcttcgaggtgaagtgaagcgcttggccatcctatgtggagttagttaagcttagtatcaacaccccccctgtaaaattgttccatcaaatattcaaagttcctttgatgaagtaccaggacctgtcgctgcctagtaatactctgttgcaaatgtgggctgtgtttcttggtggtaaaagggaatgtcatttcgctcagcaaatcgcgcatgcttttgcacggcagattatacttagacgtggcaggctgtggaataggaagtttgctagagatacgtgcagtgtgatgtgccaaatactgcaggtcttcactcttcagcaacgcccgtcagccaggtgttcagcaacagcagcgcggacgactgctgcgccgacacgtgcagtgatgtgcctaatactgcagggtttagtgcttgtaattggacgaccatcagtgtga

SEQ ID NO: 89519 - DNA, 1773 bp, Zea Mays
accgctgccagcttctgcagctcgcaccgctcccgagtccgagtccaacaaggcttgagcagccgacgccaccccggtcggtcgacctccctctccccaccgacaccgcgggcccgcacgcagagaccccgcatgtcaccgtctacactcggtgacggcgcgagcaggtttccagccgcgagccccgcgactgatctgagctcgtgcctggctagctagtagatgtctccgaccgttgcctttaagctcgcacgcgaaccgtcccacactctgcgcaagccactgccgctgccgctgccgccgccgccgccgccttcagtctccgtctccaccggtgccctcgtctcccagccgctgccgccgccgccgccgccccgtgagagccggcgcagcaatccggttgcttggggacgcagcgaggatgggcagcaccagcgcgttcgtcatcaggtggatcaacttcttcaccatgatactggcgctactggtggtgggcttcgggttctggatgagcacccacgacgacgagtgcaggcggaccttgaccgtccccgtcatcgccctcggtggagtgatcttcctcatatcgctcgtcggattccttggtgcctggaagaacatctcctgcttgctctggacatatctgatcatgctgttcgtggtcttggtggcaatcatggtgttcacggtgctcgcgtttatcataacaaactccggaagtggccatactgttcctggggctaggtataaagagtaccgtctccaggactacagctcctggtttgtcaaacagctcgatgacacggagaaatgggctcgcctgaaaagctgcctggtgaagacagatgactgcaatagcctgtcgagaagatacaagaccgcgagagaatacaagctcgcggacctcactcccatggagtcgggttgctgccgcccgccagcagagtactgcgcctggatgcccatctcaaccttttcttttcattagtggtcagcgtagtctctcaggcacgggcatcatcacaagattgctctggttttttcaggtgcgggttcccagctctgaacgcgtcctatttcgatctgagctatcacccggcgagcgccaacgccgactgcaaactgtacaggaacgcgcgctctgtccggtgctacgactgcagctcttgcaaagctggtgtcgcgcagtacatgaagacggagtggcgagtggtggctatcttcaacgtgatattgttcgtcatcctgtcgttcgtgtacttcgttggctgctgcgcgcggcgaaacgctggaggaggcgacgcgaaaggccgtggcaggtgacgggatcacttcttcgaggtgaagtgaagcgcttggccatcctatgtggagttagttaagcttagtatcaacaccccccctgtaaaattgttccatcaaatattcaaagttcctttgatgaagtaccaggacctgtcgctgcctagtaatactctgttgcaaatgtgggctgtgtttcttggtggtaaaagggaatgtcatttcgctcagcaaatcgcgcatgcttttgcacggcagattatacttagacgtggcaggctgtggaataggaagtttgctagagatacgtgcagtgtgatgtgccaaatactgcaggtcttcactcttcagcaacgcccgtcagccaggtgttcagcaacagcagcgcggacgactgctgcgccgacacgtgcagtgatgtgcctaatactgcagggtttagtgcttgtaattggacgaccatcagtgtga

SEQ ID NO: 89520 - DNA, 675 bp, Zea Mays
atggcggcgccggacttgccgccgcgggcgttcacgatgcagatcatccgcatcacctcgtcggcgtccggggcgagcgccgcggtgcggcacttccacaggagccccgtgaggaggtcgaacctggaggcgcgcgagcggaggcccggcgggaggttggcgcggacggccgccacctcccggcgcccgaagaagaaggagcggtgcaccatgtcgtccagcgggatgatggtgcccttggtgtccggcacctcgtcgtactcgcggtgcgcgaaggccggccgcggcgggtcgcgcgcctccagcagctcccgcccccacaccggccggaccgtcggtgccgccgcgccccgcgccagctccgccacggcgtcgaggaactgcaccagcccctgcgcgtccgccatcgtgtggtgcagccgcaccccgaggatgaagcccccgcacgccagccgcgtcacctggaagaggaggagcggcgagcccagcacctcggacgagccggggacgtcgaagatgagctcctcgaggcacgggaacggcggctgcagcgcgtccccgaagtggtcgaggcgcacgtcggtgtcggcctcgatgaacagcacgccctcgcccgtgcactccacggcgagcttgcggccttccagctccctgagccgaccggcgaacgggtag

SEQ ID NO: 89521 - DNA, 2390 bp, Zea Mays
atcgaacatcggagagatgcgcgcgggcggcggcgcgcctccccgacacgcaccactctccccgaccgcctccgccactgccacgctagtacccgcttctgtcgccatgcccacgccgcgcctcgtacacctccgccacctcctctcattccgctccgcccttccccgcccgctgggtcccaaccaaagccacccgctccccgggtcggttcacccgtcccttctcctcccccgtgccatggctggtgtcgcatacgcaggtctggcgacggggtcggcggaatacgaggaggtgctcgggtgcctcgcgtcgctgataacgcagaaggtgcgcgcggacaccggcaaccgcggcaaccagtgggagctcatgtccaagtacgtccagatactggaactggaggaatccatcgcgcagttgaaagtggttcacgttgctgggaccaaagggaagggttcaacatgcacatttgctgagtcaatccttcgatcatgtggtttccacactgggctcttcacttcaccacatttgatggatgtccgcgagcgatttcggcttgatgggctggacatttcagaagaaaagtttattaggtatttctggtggtgctggaagacactgaaggacaagactggtgatggtgtaccgatgccggcctactttaggtggatgtcgtagtgctcgaggttggtttgggagggaagtatgatgcaacaaatgtggtcagagcacctgtagtttgtggaataacatcccttgggtatgatcatatggaaattcttggaaacacacttggagaaattactagagagaaggctgggatactgaagaaaggagttccagcgtatacagttccacagccagaagaggcaatgtctgtactgatgaagcgagctactgaattgggtgtttctcttcaagttgtccaccctttggacccacagaaattagaggatcaacctcttggactccatggtgagcaccaatacatgaatgcaggtcttgcaattgcattggctaatacctggcttgagaggcaaggccatttgaacagattacatgtcaaacattctggtaccttgccagatcagttcatcaaagggctgtcgagtgcttgtctgcaaggtcgaggacagattattccaaattcacaagtgaactcagaaaatgatcgtgattcttcattggttttctatttggatggggcacatagctcagaaagcatggaaatgtgtgcaagatggtttgcccacgctacaaatagtgatggaatacagccaggtccttcggagcagcctcacactgatagggattccaggaagtttctccttttcaattgcatgactgtaagagatcctcagagattgctcccacgtcttctagatacatgtgctcaaaatggtctccactttgagcatgccttatttgtgccaaaccaatcacagtacaacaagcttggatcccttgcatccccaccttcagagcgtgaacaaattgatttgtcatggcagttgtcgcttcaaaaggtgtggggaaacctgcctcatcacaataaaggtctaaatgatgtaaactctagcggagctacctcggtttttgaatctcttccattggcaattaaatggctaagggaaactgctcaacaaaatcaatcgattcagtttcaggtcttagttaccggctcgctgcaccttgtcggcgatgtcttaagattgctcaagaacaataagtaacttcatttggaatggcacattgttcagattgaactggctgcctacggaccactaaggcactaactggagcttatcgaaatttgtgattgggatagcacaacataccaacttggttacaaggctggaagaaattgaaagacatttttatttcagttccaatcagcggtaaaattgttgtatttaatcgtttctttaagttcctggcgttatgtgccatcacatcctcactccagaaggatgtaaccaatttttagaatgtacaattagtggattctcagcgacacatctttgtatgattggtggacgggtctgcgtagcctttgcaacagacaatcaagaagacgctttgacggcctgctaattcatttttggtggaatttatggctggaacgaaataacagaattttccaaagtcagcatagaagcgttaatcaagtggcccttgcagtcatcagatattgctagtagctgaggtcttgttgatctggtctagtgggtttttgttcttctccttttattttttcttttttaccctctcccctccggttctctggttttgtatcttccatttctttgctctctaatctaatatatttcggagtggcaagtcttttgccccttcctttcaaaaaaaaaaaaacaattagtggattata

SEQ ID NO: 89522 - DNA, 2433 bp, Zea Mays
atcgaacatcggagagatgcgcgcgggcggcggcgcgcctccccgacacgcaccactctccccgaccgcctccgccactgccacgctagtacccgcttctgtcgccatgcccacgccgcgcctcgtacacctccgccacctcctctcattccgctccgcccttccccgcccgctgggtcccaaccaaagccacccgctccccgggtcggttcacccgtcccttctcctcccccgtgccatggctggtgtcgcatacgcaggtctggcgacggggtcggcggaatacgaggaggtgctcgggtgcctcgcgtcgctgataacgcagaaggtgcgcgcggacaccggcaaccgcggcaaccagtgggagctcatgtccaagtacgtccagatactggaactggaggaatccatcgcgcagttgaaagtggttcacgttgctgggaccaaagggaagggttcaacatgcacatttgctgagtcaatccttcgatcatgtggtttccacactgggctcttcacttcaccacatttgatggatgtccgcgagcgatttcggcttgatgggctggacatttcagaagaaaagtttattaggtatttctggtggtgctggaagacactgaaggacaagactggtgatggtgtaccgatgccggcctactttaggttccttgcactgctagcattcaagatcttttcagatgagcaggtggatgtcgtagtgctcgaggttggtttgggagggaagtatgatgcaacaaatgtggtcagagcacctgtagtttgtggaataacatcccttgggtatgatcatatggaaattcttggaaacacacttggagaaattactagagagaaggctgggatactgaagaaaggagttccagcgtatacagttccacagccagaagaggcaatgtctgtactgatgaagcgagctactgaattgggtgtttctcttcaagttgtccaccctttggacccacagaaattagaggatcaacctcttggactccatggtgagcaccaatacatgaatgcaggtcttgcaattgcattggctaatacctggcttgagaggcaaggccatttgaacagattacatgtcaaacattctggtaccttgccagatcagttcatcaaagggctgtcgagtgcttgtctgcaaggtcgaggacagattattccaaattcacaagtgaactcagaaaatgatcgtgattcttcattggttttctatttggatggggcacatagctcagaaagcatggaaatgtgtgcaagatggtttgcccacgctacaaatagtgatggaatacagccaggtccttcggagcagcctcacactgatagggattccaggaagtttctccttttcaattgcatgactgtaagagatcctcagagattgctcccacgtcttctagatacatgtgctcaaaatggtctccactttgagcatgccttatttgtgccaaaccaatcacagtacaacaagcttggatcccttgcatccccaccttcagagcgtgaacaaattgatttgtcatggcagttgtcgcttcaaaaggtgtggggaaacctgcctcatcacaataaaggtctaaatgatgtaaactctagcggagctacctcggtttttgaatctcttccattggcaattaaatggctaagggaaactgctcaacaaaatcaatcgattcagtttcaggtcttagttaccggctcgctgcaccttgtcggcgatgtcttaagattgctcaagaacaataagtaacttcatttggaatggcacattgttcagattgaactggctgcctacggaccactaaggcactaactggagcttatcgaaatttgtgattgggatagcacaacataccaacttggttacaaggctggaagaaattgaaagacatttttatttcagttccaatcagcggtaaaattgttgtatttaatcgtttctttaagttcctggcgttatgtgccatcacatcctcactccagaaggatgtaaccaatttttagaatgtacaattagtggattctcagcgacacatctttgtatgattggtggacgggtctgcgtagcctttgcaacagacaatcaagaagacgctttgacggcctgctaattcatttttggtggaatttatggctggaacgaaataacagaattttccaaagtcagcatagaagcgttaatcaagtggcccttgcagtcatcagatattgctagtagctgaggtcttgttgatctggtctagtgggtttttgttcttctccttttattttttcttttttaccctctcccctccggttctctggttttgtatcttccatttctttgctctctaatctaatatatttcggagtggcaagtcttttgccccttcctttcaaaaaaaaaaaaacaattagtggattata

SEQ ID NO: 89523 - DNA, 1848 bp, Zea Mays
ctttttcttagaggagccctagagctgaaacctgcagaggaagccccgttaatctattctccttgcatccacaccgacgggcaattggtgcgccgtcttctccgtccgcggcggccatcttggtagcggcccgcatcccctcggccctccaaatcaacgaaccagcgcgtccccgctcctccccacgccacgggaaacttccagcaaaaggtcgcgccatcgataaggggagaaaaggagaagtgtcgccgtccccgtcagcgacggcgctggtaccgacggtccccgcgtcgtgtgccttcctcctccgcgagttcgacgacccgctgtgcgtctgctctcttccgcgcgcccaatcctcgtcgagtcgtcgtgccgctgattgacacagatgtgacagatctactttgttccttgctactttttggcatggtcactccctatttgccatcatcgcacaaccatcgccgaaggctgccaattctattgaaaataggatttttgttaatgatgggagaaaataaattgatgggcaaaagatgggaggacatggacactgatgtccttgtgaagatattcaaggaactaaatttggttgagttgtcaccggtatctcaagtttgtcgtttgtggcgcttggcctgttcagatccacttatttggggcactcttgactttggattgttaaaatccaattttattcagacaagagcatcaccatatatttgggttgatgataggtctgacaggagacttgcaagaatactacgggtggctatggcaattagctgtgggaacgtcaactgcatgatatttcattacaatttgttcatgaaagatgagcaccttcatttcatctcagaaagatctcctcatttaaaacggttggttatgccagcatggaaccgcatcaccaaagtgggaatatgtaatgctatccaaaggtggcaggcgctggagtccttgacaatgcctaccatcggacatcctccatatattatggaagagatagcaaggagctgcaagaatttcacagaacttaagatcatgggctcatttgatcaacaatttgcctcggcgattttgcagttccttccaaagctgaaagtgctgagccttcgttgctcgaaggtgtccatggatgcactgcaatgtttgctgaactcgatggagtatcttgaggttctgaatatttcacactgcctgctgttggttgtggcggcaaatgggcggaagcaagtggttcatgaactggacagccaaattctcgagagagcttcacggctgcgtgaattccactactgccaaagtaggttgtgcgtcgcgtgccagcggatggtggtggatgaaggcatcatgcgctggtacaggtacgaggattggttttggcgtcgggatgaggtgaggtcccttgatctgcaagattatgggaagctgtttgatgttggttgcgagaggttgacgtctgtggattagatgctaataataggggagcaaaacctgccctcctcagtctagaaacttgtttattggcattcataaaacatagcaagtgacgaggggtaacagtagattaataatatcgataacaatgtgcgtgaatggtgtgcgcgtgtttagctactgtaaatccatgaatagttcgtgttgtttggagaagtttgttatagccagtatggtgtcaagagtatctctacaatttgtttttaagtgatgtggcattggacatgaatagtatttggctttatacgctagagcgtaaaaggctagacctgatactgctagttaggctgtggccagtgcacacgcaaaacactgttttatattggagattgtactgtttatagg

SEQ ID NO: 89524 - DNA, 1853 bp, Zea Mays
ctttttcttagaggagccctagagctgaaacctgcagaggaagccccgttaatctattctccttgcatccacaccgacgggcaattggtgcgccgtcttctccgtccgcggcggccatcttggtagcggcccgcatcccctcggccctccaaatcaacgaaccagcgcgtccccgctcctccccacgccacgggaaacttccagcaaaaggtcgcgccatcgataaggggagaaaaggagaagtgtcgccgtccccgtcagcgacggcgctggtaccgacggtccccgcgtcgtgtgccttcctcctccgcgagttcgacgacccgctgtgcgtctgctctcttccgcgcgcccaatcctcgtcgagtcgtcgtgccgctgattgacacagcctagatgtgacagatctactttgttccttgctactttttggcatggtcactccctatttgccatcatcgcacaaccatcgccgaaggctgccaattctattgaaaataggatttttgttaatgatgggagaaaataaattgatgggcaaaagatgggaggacatggacactgatgtccttgtgaagatattcaaggaactaaatttggttgagttgtcaccggtatctcaagtttgtcgtttgtggcgcttggcctgttcagatccacttatttggggcactcttgactttggattgttaaaatccaattttattcagacaagagcatcaccatatatttgggttgatgataggtctgacaggagacttgcaagaatactacgggtggctatggcaattagctgtgggaacgtcaactgcatgatatttcattacaatttgttcatgaaagatgagcaccttcatttcatctcagaaagatctcctcatttaaaacggttggttatgccagcatggaaccgcatcaccaaagtgggaatatgtaatgctatccaaaggtggcaggcgctggagtccttgacaatgcctaccatcggacatcctccatatattatggaagagatagcaaggagctgcaagaatttcacagaacttaagatcatgggctcatttgatcaacaatttgcctcggcgattttgcagttccttccaaagctgaaagtgctgagccttcgttgctcgaaggtgtccatggatgcactgcaatgtttgctgaactcgatggagtatcttgaggttctgaatatttcacactgcctgctgttggttgtggcggcaaatgggcggaagcaagtggttcatgaactggacagccaaattctcgagagagcttcacggctgcgtgaattccactactgccaaagtaggttgtgcgtcgcgtgccagcggatggtggtggatgaaggcatcatgcgctggtacaggtacgaggattggttttggcgtcgggatgaggtgaggtcccttgatctgcaagattatgggaagctgtttgatgttggttgcgagaggttgacgtctgtggattagatgctaataataggggagcaaaacctgccctcctcagtctagaaacttgtttattggcattcataaaacatagcaagtgacgaggggtaacagtagattaataatatcgataacaatgtgcgtgaatggtgtgcgcgtgtttagctactgtaaatccatgaatagttcgtgttgtttggagaagtttgttatagccagtatggtgtcaagagtatctctacaatttgtttttaagtgatgtggcattggacatgaatagtatttggctttatacgctagagcgtaaaaggctagacctgatactgctagttaggctgtggccagtgcacacgcaaaacactgttttatattggagattgtactgtttatagg

SEQ ID NO: 89525 - DNA, 1112 bp, Zea Mays
tgctctcatttcttttgtacattattcttctgatcatatatgtcttgttaaaatccatgatgctcagttctgtgttctctcatttcatggaagaggctaatgctatatagtcttgcctgatgtttagcagatctcctcatttaaaacggttggttatgccagcatggaaccgcatcaccaaagtgggaatatgtaatgctatccaaaggtggcaggcgctggagtccttgacaatgcctaccatcggacatcctccatatattatggaagagatagcaaggagctgcaagaatttcacagaacttaagatcatgggctcatttgatcaacaatttgcctcggcgattttgcagttccttccaaagctgaaagtgctgagccttcgttgctcgaaggtgtccatggatgcactgcaatgtttgctgaactcgatggagtatcttgaggttctgaatatttcacactgcctgctgttggttgtggcggcaaatgggcggaagcaagtggttcatgaactggacagccaaattctcgagagagcttcacggctgcgtgaattccactactgccaaagtaggttgtgcgtcgcgtgccagcggatggtggtggatgaaggcatcatgcgctggtacaggtacgaggattggttttggcgtcgggatgaggtgaggtcccttgatctgcaagattatgggaagctgtttgatgttggttgcgagaggttgacgtctgtggattagatgctaataataggggagcaaaacctgccctcctcagtctagaaacttgtttattggcattcataaaacatagcaagtgacgaggggtaacagtagattaataatatcgataacaatgtgcgtgaatggtgtgcgcgtgtttagctactgtaaatccatgaatagttcgtgttgtttggagaagtttgttatagccagtatggtgtcaagagtatctctacaatttgtttttaagtgatgtggcattggacatgaatagtatttggctttatacgctagagcgtaaaaggctagacctgatactgctagttaggctgtggccagtgcacacgcaaaacactgttttatattggagattgtactgtttatagg

SEQ ID NO: 89526 - DNA, 1304 bp, Zea Mays
atacacataggaaggaaacttctacattcacaattttcaatggaagattttcccacgaaaaatcagggatcggatcccttctcatttctagtccgagatcacccctcttcataaaaatgctggagatatttttctccgcctcctcattcactttccaagttgtccgaaaagaccagactaccctgttcccccgaagtcagagggggagaggaggctagggatagagcagcgtcatcgcaccgctcgccggcgagccagatcatcagtgaggaaggcagcgatggcggtggtggagctgtgggagacgctgaagcaggcgatcgttgcgtacacgggcctgtctccggcggccttcttcacggctgtggcggtggcggccgctctgtaccacgttgtgtcggggctcttcgcggccccgcccccgccgccgccgcgcccacgggaggagcccgagacagagccgctccctcctcccgtgcagatgggggaggtctccgaggaggacctccgccagtacgacggctccgaccctaagaagccgctcctcatggccatcaagggccagatctacgacgtcacccagagcagaatgttctatggacctggcggaccttacgccctgttcgccggcaaagatgccagcagagctctagcgaagatgtcgttcgagccacaggacctcaccggcgacatctcgggcctaggtccgtttgagctcgacgccctgcaggactgggagtacaagttcatgagcaagtacgtgaaggtcggcacggtcaagaagagcgtccctgtggaaggcggcagcaccgcgagcaccactgaggctgataaggcaccgacaaccgaagagaagccaagcgaggcggtggttgaggagaaggaagccgcggctaatgaaggtgcccaggaaaactagagcttttctgtgcatgcggcaataattcgacatggtcccattcgggtcgtgtcagggccctgctatcctctcgtgtctcgtgtcgtatatcagcagctatggcccgtgtgattggatacgtccatctgtgccagcgccgtggtgctctataattgctgttagtcccttgtggccttgtgttcgatcggataatcggtgctcttttaaaatgagtaattttctttgcagtagtaccctaagattatcatacgtagtcttcaccgaaggttccttgtaatgtttcgcgcgcgtggggatatgccatgaaagtgtcgtgtggttcctgtcaacgtgcgtggcattgagccagaatcatgtgttctgaggggttgaatggcacggtaaa

SEQ ID NO: 89527 - DNA, 913 bp, Zea Mays
cgatatttgcacattgcacggctgtccatgcgagacacatgcaaggtggaagggtcacttttatattatgcatgctttatgtagtgttttattattcaaggacagttgtgcagatttggcgagcacccccggcccttttcttactttgcatatcgagttctgtacatgtaacagtttgttaaaatgaccctacgcagaatgttctatggacctggcggaccttacgccctgttcgccggcaaagatgccagcagagctctagcgaagatgtcgttcgagccacaggacctcaccggcgacatctcgggcctaggtccgtttgagctcgacgccctgcaggactgggagtacaagttcatgagcaagtacgtgaaggtcggcacggtcaagaagagcgtccctgtggaaggcggcagcaccgcgagcaccactgaggctgataaggcaccgacaaccgaagagaagccaagcgaggcggtggttgaggagaaggaagccgcggctaatgaaggtgcccaggaaaactagagcttttctgtgcatgcggcaataattcgacatggtcccattcgggtcgtgtcagggccctgctatcctctcgtgtctcgtgtcgtatatcagcagctatggcccgtgtgattggatacgtccatctgtgccagcgccgtggtgctctataattgctgttagtcccttgtggccttgtgttcgatcggataatcggtgctcttttaaaatgagtaattttctttgcagtagtaccctaagattatcatacgtagtcttcaccgaaggttccttgtaatgtttcgcgcgcgtggggatatgccatgaaagtgtcgtgtggttcctgtcaacgtgcgtggcattgagccagaatcatgtgttctgaggggttgaatggcacggtaaa

SEQ ID NO: 89528 - DNA, 1419 bp, Zea Mays
caaattcaaaagattttgaattcaaaataaatttgaacaaccacacacatcaaaacatagtgtaccagcatctatgcatagcatttgaatcagttcatttaaaaaactaggaaaaaggggggaaaatcctacgttagagggccttgaagtttcttgcactgcaggctgcagcactgctgcccgggactggcacaccccaagtaattccaatcaaagttgtttaactggcacaaagtgtgtgagcaagatttatgtattttcttccgtttgtatcgaattagttattagggtgaaggagacatcttccaccccactgcatccagcaagtgttctgaatggcttcttgctcctctgtccgcgccgcaccatcgctccccgtctcggcgccgcctagccggcggcgcgcgagtacggccgtatgtcttcagggtgttcgccgcagcagggtcgcgtcctgccgcgtgcggtgtagcgccggggccgggcagggcggggtcaaggtccctgcgaagctggcggagctgtggtcggcggcgaagggcgcgcctcctctggccgtgctcgcgggtgtggcggcggcggtggcgatatacaaggtcgggtccagtctccttgcgccgcgccatcctccgccccgtcggctggaggcccagacggccccgccgcctccagtcccggagccggtgcaggtgggcgagataacggaggaggaactacggcagtacgacgggtccgaccccgagaaaccgctgctgatggccatcaaggggcagatctatgacgtctcagagagcaggatgttctatggacctggcgcagcttatgctctgtttgctggtaaagatgccagtagggcattggctaagatgtcctttgaatcacaggatctgaatggtgatatatctggtctaacgccaatggagctcggcgccttgaatgactgggagtacaagttcgccaccaagtatgcgaaggtaggaaccataagaagagcagcgcccgtcgaagtggtttatggcaacatttcgcctgaaatgagggaagaagttagtgaacctgtggttgaacctgagcttgagcctgagcccgagcctgagccgcatgacgacgatgcaccatgaataggaaaaacacaaagacatcagttcgggtaggaagatgaaatggagggcggcacactgcttataatgttccagaggtagtcagaatttcgaaataatgaaaagcctcataggctcgtacttgttgcgtggatattcagaaagaatagtgtctaaatttaaaccaatagtagatgtgtactctgtagtaggattgaattgttggatatgtacatgtcattcttctattttcgtgaaacgtgtcacttcctgatctctttactatgcaaatgcgcaagaacactctgcatactaaata

SEQ ID NO: 89529 - DNA, 2365 bp, Zea Mays
ctcctgtgaagccaactcgtcccctcgggccaacgcgaggccaaaaccaatctcacatctcctccccctcccaccaccgaggacccttccccaagaactgctccgagtcctggagcgggagagaggtcgagggaggagcccaataagagtttctcctcgcctctctctctctctttctgctcgaaaaattattgtcgcattggtttggttcccttgccaaaggaggctgcttttctgtcctccctgatctaacatgatggcgagcaccgcatcagcgaccgccgccgccgccgccgtggcattcggggcagccgccaagccgcggggaccggcggctgtggcgctccgcgcaagggtgcctgccggcggcaggcggcgctccggcgtggtggtgcgctgcgacgccggcgtggaggtccaggcgcaggcggtggccaaggccgccagcatcgccgcgctcgagcagttcaagatctccgcagaccggtacatgaaggaaaggagtagcgtagctgtgataggtctcagtgtacacacagcaccagtggagatgcgtgaaaaacttgcggttgcagaggaactatggccccgtgctattcaagaacttactagtctaaaccatattgaagaggctgctgttcttagtacttgtaatagaatggaaatttatgtggtagccctatcatggaaccgaggtatcagagaagtagttgactggatgtcaaagaaaagtggtattcctgcttctgagcttaaggagcacctattcatgctgcgtgacagtgatgctacacgccatctgttcgaggtatcagctgggttggactctttggttctcggtgaaggacaaatccttgctcaagtcaaacaagttgtgagaagtgggcaaaatagtggaggcctggggaagaacatcgacagaatgttcaaggatgcaattactgctggaaagcgtgtgcgctccgagaccaacatatcatctggtgctgtttctgtcagttcagcggcagttgaattggccctgatgaagcttccaaagtctgaagccctttcagctaggatgcttttgattggtgctggtaaaatgggaaaactagtgatcaaacatcttattgccaaaggatgcaagaaggtggttgtggtcaaccgttcagtggaaagggtggatgccatccgcgaggagatgaaaggtatcgagattgtgtacaggcctctttcagagatgtacgaagctgctgctgaagctgatgtcctattcacgagcactgcatctgaaaccccattgttcacaaaagagcacgcagaggcacttcccacaatttccgatgccatgggtggtgcccggcttttcgtcgacatatctgtcccaaggaatgtcagcgcgtgcgtctctgaaatcgactccgcgcgagtatacaatgttgatgacctgaaagaggtggtggaagccaacaaggaagaccgtctcaggaaggcgatggaggcacagacaatcatcgccgaagagctgaaacggtttgaggcgtggcgggactcgctggagaccgttccaaccatcaagaagctgaggtcttacgccgacaggatccgggcctcggagctcgagaagtgcctgcagaagatcggggacgacgctctcaccaagaagacaaggagagccatcgaggagctaagcaccggcatcgtgaacaagctcctccacggcccgctgcagcacctgaggtgcgacggcggtaacagccgcacccttgacgagaccctcgagaacatgcacgctctcaatcggatgttcggcctcgacaccgagaaggctatcgtcgagcagaagatcaaggccaaggtggagaagatccaaaactgaggacaggaagcagtttttcttccccgtgtatacataccataccctccaatctgattccatttttttttttttgaccctttcacttactgagctcctcccctgctcgctgagacgtggactgtgccgtgaattagcgccatggcagcagctcaatctgttgagagagagcggcaaattgtctctactccagctgcttttctttcttcatttttgcttgagctgctgtggcaagagcccccattcttaagctatatacttcattcggacggaacaggaatgtatcgatgtgtcagctgatgccgttttcatttgtcattatacttgtaaggtttactgatactgtaataccttttacgctatccctgtattcagattgtcgagcattatcttttccagagagtttaactttgtttagcggttggatcggttcatatgaactttaatttcttctgttcatttaatgttaaatcaacaaatataatgccataattggcatgttcttgc

SEQ ID NO: 89530 - DNA, 701 bp, Zea Mays
accaaagcatcagatttgtgcttgaaactcctcctcctcctcctcctccaccaccacctcgccttctcttctttttgtcttgcgtcgcagcatggtgaggaaccccctaaaagccaggccgacgctggtgctcatcagccttcttctaatggcggacctggcaaccgttggctatagccgaagagttgcagaactgggtgcgttagccgtgagcgacagcggcggcggtggcggtggctcgccgccgggcaaaggctgctgcttgcccaaccagtcatcttcttcagcgtcagggcgacacctcggtgacgattgttgcaagcaaatgcgtattgtgtccaagaggctggtgccccaggggccaaaccctctgcacaactgaccagctccgggctccaggtctgcacttgcatgcatcgagagataggcagaggctttttcctttttgtaacgcagccatgcagagtgattagtggagctgcaggtcttcctcttccatgaggtcatgtaaattataggcctacagcttagtttgccgctagctcatacgctctctctgtcacacacttttgtcacttttgattgagagccgctcttcatcggtgacggtgagagactgaaactttgtaataatggatggtcgagggcaaaactcttgcataggctggaattctattttcctttatctagaaactgccttt

SEQ ID NO: 89531 - DNA, 1161 bp, Zea Mays
tttaaacctcaattcagtatgcttcttttttttttgcatccgcgcgcgcatcagatggatacacgaatcatcatccccaccaaatgggcatgaacaacaaagaaaaaaagaaaggaatgaaccgagcgaggccaagatcaatggcaatggcagtaggagtggcaatggccgctctcccgcgccgcgcccgcgctcgcgcagggggtccgggcctggagcggcggcgccgccacgccgcaggctctccggagctcctcgtacctgcggaggtcgaagccccgggcgcgcatcacgcgcttctgcttggccgcgaaccggctctcgaagaagccttcgaacgacggctccttcttggtgcggaggaagaaggcgtagccggccatgaagtacatggacgtgacgtagaagcagatgggctccatcacgtcccacgacagctcccagaaggtgagccgcatgaacccggccgtctggatcaccaggtacgtcagcccgcaccacagctcccgccgcacccgcgccgccgccgcgcggtcgatctccgccttctccgcctccatggccctcagctcctcctccctcgcggggtcgatctccgcggcggcggcggcggcggcgtgccgcacggggatcgcgttctcgattgccttcacgaccatgtcgggcctgaggaagacggtctttccgagcacgatgacggatccggactcgtcgagcgcgcgcgcgacggaggggcccgcgtccgggccggcggcgtcgcagcagaggcgcaggaagtcggcgtacggcacggcgccggcgccggactcccgaatccgcgcgcgggccgcctccatctgtgtggcgcgcagcaccttgcgcgcctcctccaccgtgaggctcgccgcgggcagcgccgcgtccggctcccgcttggccggcgccggcgccggcgcgggcggcacgaggccgtcgaggttgatccgcgggaatgcgacgccgaccccgaggtcccggatccggtcggccaggggcatgaagcggtcgggcggcacggcggggcggaacgccggctgctcctgcaggaaccgccggagcccgaacgtcgccggcgacgacgacgacgacgacgcgaagcactgcgccacgggctctcctcagcacggccgccattgctgctga

SEQ ID NO: 89532 - DNA, 98 bp, Zea Mays
gaatattatcggcccattgcgtctacatcttccttgcacgctactgtctctctatatatcactcttttcccccattacaaggactttggatgagtcgg

SEQ ID NO: 89533 - DNA, 494 bp, Zea Mays
aggaactaggccatgctgatgttcaaaagagttgtcagcagttcatgacatctggtatttattatatcttcttttgtagagggctggtgtggtttgcttagcagtaggttgcactacaactagcaatgtatggatgaattgaagaaaataaagaaggtagacaatcttacagaaactctacatcttgaaactgccatgattgacaaagaagttggatgcgtcctttgcattggtgtcttcttttcgctaagcagtaatgtgaagcaagttcatttgttgactaagaacggatgaacacaaatcagtgaagagttcgttgcgctagagatggaggatggataggtggtagatttcaatatggatttgataccattgttttcccttacaatctttgtacggaacaagaaaaatgacattgtatgtggatactaatgtaattcaagaatttatttctaaataataaatatatttgtttataaaaaagcaagcaagaa

SEQ ID NO: 89534 - DNA, 686 bp, Zea Mays
gtagcaaacagtttagaatctgttctcctaggattctatgcattgttacgacgaaaaactgagcttaaaagcacccagttgcacaataaagaaccaaaaaggagcgaacagagtatcattatatccataatttattgactcaaattattcgtaacaaagactattataaagaggattaatgcaacttgatcgactacatattcctactacttacgtacgtagctcacgcataggctatggtttcagaccgaagacaatactaaactagagttgttagcagctatcgcccggtcccatcgcgcaacagtgacatatttatggtgtgtttggtctgtggagtcacccaatacttaatgagatgatgtattataagttcatgccattaattttggtagaatcaaccaactcctcatgtatatactaactaggtaagtgcccgtgcgttgcaacgggaacatataaaatgtgtgttatattgttatgagaaaaggttttataatcaatttgtgatcctgaacacacaaatttgcaagtcctccaaaagagaagtttaataaaatgattgttttagctcacacagttgttaactggacatgtagttgatataagatcaaagatatggcatacaagtaaaacctgctttcatattagcagctcactttctagtgttggaggaaacacacatg

SEQ ID NO: 89535 - DNA, 1404 bp, Zea Mays
cactaagcaacagtgactacgaaacatgattgacgcctaggatttttcatactcagccagtcacatttttaacttgattaggtagctaatccccaattgagaattgggcatcaaaggcgattgcagcacattggagacgccaagttgctgctagcaaggggacagcatgatccggctacatcccaaagcgagctacgtagctatcctaccatgtctttcccaatgacttgaaaatttgcgcaatcagagaacgaagaggcggtgcccgcccgcctgcccgcctttgttcgctttacaatggtgcactgtcctcttcttgtgcaccccagttgcctacccgcgccactgtcctctcctcccaatatagtactacatctcagtctgtttctgcagatctgtcagtgattaggatgaagaaagcaggacttgcatcctttgatgagaataagatggaatcaggattggcctcagtagcccagggtatggaaggctgcgttattagcaacaaagagacgggggcgtatggcatgccatcagctaccaacaatccagatgcctctggtcagtccttcagcgaagcgttgaggagttcgaggaagcatccgttgcagtacgatgcctccgaatctgcagacggtggcctaggtggtaagtgcgcaaagaagaaaacgaaaaaaagcaaggaacacaagatcggcggaggcggccagtgccatgccgctgcggggacgatgcggcacgacaagggcggcaagtgccacgcgctgtgctacggcgcgtcccggctcagcgtgtcctcatcggcgtcgtgctcgattttgtcgtctagggagcaaccaagcagcgcccggaggaattcagctccatcctatgcgacggcgaccattccaatgctccctatccaactcctctccggtggccgaacctcctgagatcaacggtgcccgaagcttcccccacctctcggacggacgcggcggtgcccaggcttgcacggtggactcttgccagagcaccaaaacccgatgattaagaaccccaatcccctagcccgacggatcaaagcatagagaaccagagagcgaagtggtggggggtttcattaccggcctccacgtagtgtagttctctgtttgcgatgagagacgaccacgcggtgatgaagcgctccggtgcggaattggccaagcttcaatcgatcaccgcccatagagactccatctgtgcggtgcgtcgccagcgactgccatggcaccggcaccagcaactccatctatgcggcggtgcgaggtggtgtcggggctagggccagcgggattcgacgggtgctctagggttgggctctggacggcgggtggctgaggcgtgggcggtggggcgacagggtataggcgagggggacgc

SEQ ID NO: 89536 - DNA, 388 bp, Zea Mays
ccgcctttgttcgctttacaatggtgcactgtcctcttcttgtgcaccccagttgcctacccgcgccactgtcctctcctcccaatatagtactacatctcagtctgtttctgcagatctgtcagtgattaggatgaagaaagcaggacttgcatcctttgatgagaataagatggaatcaggattggcctcagtagcccagggtatggaaggctgcgttattagcaacaaagagacgggggcgtatggcatgccatcagctaccaacaatccagatgcctctggtcagtccttcagcgaagcgttgaggagttcgaggaagcatccgttgcagtacgatgcctccgaatctgcagacggtggcctaggtggtaagtgcgcaaagaag

SEQ ID NO: 89537 - DNA, 432 bp, Zea Mays
atggcatatgcgcaggctgcggcagcatcagcgcgcgggggcgccagaggatggcgccgcgccaccgcccatcagtcccgactggcgtcgttccgcgcgcagctctacttcaaggagcagcacggtgacccgcccgtggcgtcgtcgacgcagctgccggcggtgcagaccggcagcgacaggtgggcgcaccctctaatgaagcccgagaaggggtgcctcttgatcgccacggagaagctggacggctcgcacatcttcgagcgcacggtgatcttgctgctgtcgtcgctgggccccgacggcgtgatcctgaaccgcccctcgctcatgtcgatcaaggaggcgtcagggtccatctgcgcggacgacgccgacatcgcgtgcgccttcgcgggccggccgctcttcttcggtgggaaggcagactga

SEQ ID NO: 89538 - DNA, 957 bp, Zea Mays
gcacatgcacccaagacaagcaccgaagatggcttgacgcccgaatccagaccctcgtctgttatggcggcggcggaggcggcgccaccgccgatactcgagctggacccgtcgcacgatcgagccgtcagcgttgtcgaggacatcgtgcgtctagagcggaggatctttccgaagcacgaatcgctggcgcggtcactgcacgacgagctaaagcggcggaactccgggctgatctacaagacgtccagcgccgacgggggggaggtcatcgggtatgccatgtacacctgcaacacatccctctgcgccaccatcaccaagctcgccgtgaaggagaactggaggcggcagggccacggcgaggcgctgctgtcgggcgcagtggagcggtgccggcggcggaaggtccagcggctctccctccacgtcgaccccacgaggacggccgccgtggcgctgtactgcaaggccgggttccaggtcgacaccaccgtcgagggctactacgcgcctcacagggacgcctaccggatgttcttggatctgtagaaccgtcgaggacgagaaaaccagcccatgtgttcagggtagctggccgttctgcagctgctgccggcttgtagctggtctggtctggtgatacaatacctcgtgagtgaggatacagccaacaaccgagcagggtggatgattcgaagctgtaagaacgatctgctagaaagatttcgtacgaccaaagtaatttcccgctggattctgaaaatagtgttgccgtattatatgagcataaggtttcagtaactgcaactgtagttaggatatcgctttggctgtatgatagtaattcagttcatagatgctgccacatcagttcctccattgtcaaggtaactcggcaagaatttggtggacaattttgaccttatggtaactaagagatgtttactaatagta

SEQ ID NO: 89539 - DNA, 1411 bp, Zea Mays
cccaagacaagcaccgaagatggcttgacgcccgaatccagaccctcgtctgttatggcggcggcggaggcggcgccaccgccgatactcgagctggacccgtcgcacgatcgagccgtcagcgttgtcgaggacatcgtgcgtctagagcggaggatctttccgaagcacgaatcgctggcgcggtccctgcacgacgagctaaagcggcggaactccgggctgatctacaagacgtccagcgccgacgagggggaggtcatcgggtatgccatgtacacctgcaacacatccctctgcgccaccatcaccaagctcgccgtgaaggagaactgcaggcggcagggccacggcgaggcgctgctggcgggcgcagtggagcggtgccggcggcggaaggtccagcggctctccctccacgtcgaccccacgaggacggctgccgtggcgctgtaccgcaaggccgggttccaggtcgacaccaccgtcgagggctactacgcgcctcacagggacgcctaccggatgttcttggatctgtagtagaaccgtcgaggacgagaaaaccagcccatgtgttccggcagctgctgccggcttgtagctggtctggtctggtgatacaatacctcgtgagtaggatacagccaacagccgagcagggtggatgattcgaagctgtaagaacgatctgctagaaagttttcataccaccaaggtaattcccgctggattctgaaaataatgtttccgtattatatgagcataaggtttcagtaactgcaactgtagttaggatatcactttggctgtatggtagtaattcagttcatagatgctgccacatcagttcctcctccattgtcaaggtagctcggcaagaatttggtggacaattttgaccttatggtaactaagagatgtttactgatagtagctggctaacgccactgacacagagaaaatcgaaagcccaatctgattcagcatcgattcaagtaccccttaggcaatgctgattcacagcaggagggagcaaaccaatcccgcaagtgtgcctggcccatcggaaggccgatgcgctggagtctcggagaacacccagcgggcagtgcctatgcaaggccggcggcggcgacggcgggtcagctcacaggaagattgctcgggacggacggagagggaggctttgcgtcaaggaagaagtcgttggtggtactcattacccagtggtcatgttcaaactcttatccaccttttttttttgaaaggggtcttatccacctcatttaggctttgttcggttagctctcaatccatgtggattgagcgagattggatggatttgaatctcaaataagtcaaacttcttctcaattttttccaatctcatccaatccatgtgttttag

SEQ ID NO: 89540 - DNA, 876 bp, Zea Mays
atgcacttggtctccaagttcctgtcctcaaggctcgacgacggcgtgaagaagccgttgctggagtacctgctggcgctcagcgacaccctggacacagtgtgcaagtttcaggcggcgctgctcgtcgcccagggcttcgactccgagcagcacttggacacgtcgtacaagcagatggcgcacaggttccaggagtgggggctggagaaagaatgggacgacatcgcggctcccgccttggcctccacctgtttgggaattctggctgtcaatgaagattactggtccactgacatatattacaatttcagagatcgtgcctggttcaaaattcatgtgacagaagggaatttaaccaaggtctggtttagggaagatgcagttgcttacttcaacaagatgtttgatgattcccgtgttccatttgggaacatcaggctcacaatgctactacaggattcattcgaggatgacaaatcaacaatcctgatgcttctgtgtgctaatcctgacctaaaggagctgtgcaagacagtttatactttggaatatggtgccgaggcaaattcatccacaaagcttcaaaaggagaacaaattgagagagagggagatgcttgaatatagggaaactgagagaatggacattattgaggaagtgggacacactgacatggaagatcgaagatatcataatggatgtccttctgatcagcggatggaattacttcactaccacagggtgcatattccttatcttagtaaggaggccctccgcttgcacgcgtgcttaagcaaataccagagaactgctggaaccatgcctccgattgatattgtccatcttttcgtaacaattgatcaaggcctctaa

SEQ ID NO: 89541 - DNA, 1381 bp, Zea Mays
cgcctcccagtttcaaatctcaaatcctcatcgttctcctttccccaaaggccaaaaccgaccccgctccacgcctccactcccagccccagcggatcttctcgagcggcggccggcgatggcagcgagcaacatcgggatgatggacggagcctacttcgtcgggcgcaacgagatcctcgcgtggatcaacactacgctgcagctcggcctctccaaggtggaggaggcggcgtcaggcgcggttgcgtgccaactgatggacgcggcgcatcccggcgccgtgccgatgcacaaggtcaacttcgacgccaagacggagtacgacatgatccagaactacaaggtcctgcaggatgtgttcaacaagctcaagatcactaagcatatagaggtgaacaagcttatcaaaggaaggccccttgacaatctggagttcatgcagtggatgaaacgatattgtgattctgtcaatggtggcttcatgagcagctacaatgcttctgagagaagggaaagcagcaaagggggaaaggagacgaacagaagggcatcggtgccctctcacacaccggccaagtctgcatccacaggtcacaaggctcaagcatcacatggtgccaagcgggcaagcgggcagacggcgggtgcaccacagcgcagcgctaagccatcacctgcagccagctctggcggaccagcttatgacgaacaaataactgagctgaagctccttgtggatagcctggagaaggagagagatttctacttctccaagctgcgggacattgagatcttgtgccaaaaccctgaggttgagcacgtgccggtccatgctatccagaacatactctacacatcagaggaggaccctcagcagcaggctccagccctgagccccatcatggaggcgtccgaggagaggccgaagcaagaggcggcgcacaagagaaagagcatctcggacctggacgagtttggtatgtcgtccagctcaaggcagaggctctccgacatctcagacgtgcagctgtgtggatccccgctgacgagtttcagctgaaggaaccgtcatctctacaaaatgggtgtctcgtctttctgttggattggttcgtggtttcgtatttcatgtgttgtttggtggtgaactgtcgtgtgctcttagcaagttgtctgccacagaatttgtggccataaatgctacaagttcctcctgctatgttatctgccacccattccaagctgcataatcgcagcggccgctatgagcatttccgtaacacttgcgacccccaaaaaagcaacgttgcaagcaaagcatcacatgccattttggattaccactacaatgctgtcaacacccgtcatttcgtagtta

SEQ ID NO: 89542 - DNA, 120 bp, Zea Mays
gaagttcgaaaggcatttgtcgtcctcttattggtagtaaattagaataccacaacaaagcaaaaaggctagagttacatagaacccactacacaatgtaaaaaccatcccaacgtattt

SEQ ID NO: 89543 - DNA, 750 bp, Zea Mays
atgccgtcctcctttctgacctcttcttcctcttccgcttcgtcgcacctctcttacctgatccctgctagggcggcgccgccgcctccctttgccatgggacagggatacggtgccaccagtggcggcggcgtggcgaacgccacgagtgccgcggcggcgcctccgcctccgaggcagggagccagcaggaacgcgggcgcggggcacccgccgctgccgcgcccgccgccgcggcagtgcccgcgctgccggtccgccaacaccaagttctgctactacaacaactacagccgcgagcagccacggtacctctgcaaggcgtgccgccgccactggaccgagggcggcacgctccgcgacgtgcccgtcggcggcggccgcaagaacaggcgcggcgccaagggcggcgccgctgcgaaagggtctgcctcggccgcggccgcggctccggcgcagcagggagggaacgtcctcggcgccgacacgttcccaggggacttgctgcggcagctggtgcagttccagccggacgcggccgtgggcgggggcggctacgccatcgacctgagcgcgtggcaccaaatggtcgctgccacggcgccgccgccgccgccgccgggaactggcggcgatgtcagcagtctcggtctcggagcggcgggggcgggagcgggagcggaggccaactgcgtcgcgttgcagtactggagcgaagacggcatgcccggtcttgatggggcctgctaa

SEQ ID NO: 89544 - DNA, 351 bp, Zea Mays
atgggatttgcgggattgccgcgtgctggcgttagggcgggcgctagggcggttcgccaagggtcgcggcttggtttgaggcgtgcggggttccatggatccaccatggcgtgcggcaatggtcggcgcgagcggttcgcggaggtcgtgtcggatgcagaggcgtgtggggcgtgtgggattgcggcgggcttgcggcgcggcgtggggatggtggtagggcggcatcgcagatttcgcggcggactgaggcgggactgcggcttgggatcgaggcgagcggaggtgggcggatttggcggcgacgtttccgacgtgcgcaggtgggcggaggtgggcgcggggttttag

SEQ ID NO: 89545 - DNA, 171 bp, Zea Mays
caggaggagatgaagaggacgagcgcgcaggccctggcgccgccgggccgcagcacggacccgcagcagaagcagcgactggcggcggcggccaccgcctgtcccacgaacaccagcgcgagcgcggcgccgcccagcgccgtggcggcgtccgtgcggtacacgcagtag

SEQ ID NO: 89546 - DNA, 3576 bp, Zea Mays
atgggcaaggctaataagtctccgtcgccggcggtggccaaggaaggcgactactcggcgttgcgggagctgttccggccgcacgtggaatcctttgattacttcctcgataaggggctcgacgagatgattgaatccatccgccccatgggtcatgtgctctcgccgatgaggggtgcccggccaggtgtactacccatctacccccaggagcagtgcagacaagcaagaatttcatatcacggggaattcaaagttgaggtctgcttccagtataatgaaggggcacaaatcaggcataccttcaattttggccatttgcctattatgttgatgtcaaaactgtgtcatctgaggggtgctgatccccataaattagttttccatggtgaagaggcaactgagatgggggggtacttcatatgtggtgggatggagagacttgtgcgtattcttgttttacaaaagcgtaactatcccatgggattggtacgcaattcttttcttaaacgtggtgctggatacactgacaaagcagtggtcataagatgtgtccaacgtgaccagtccagtgtgacaataaagttgtattacatcctaaatggaagtgcaaggcttggattttggttgggtggcagagagtttctgcttcctgttgggattgttctcaaggcccttattgatgcaagtgaccgggaaatctttacaagcttgacttgctgctacagtgataaacatggaagaggaaagggagttgtcagtactcaactaattggtgaaagggcacaaatagttcttgacgaagttgctgaagcggttctaaaggactatatttttgtgcacttggaaaataaccatgataaatttaatctattgatatttatgctgcagaaactttatgctctggtagatcaaactgcttcacctgacaatcccgacgcgctacaataccaggaggctctattgcctgggcacttattcacagtttttctgaaggataggcttcaggagtggctaagaaagtctaagcgtttaatccttgaagaggctgcaaagaacaaaggttttgaccttggtaatgcgctggagataaggaaatttcttactaaatatacaacatctgtcggaagagctgttgagagtatgataaaggttgggaacgtgaattcacgatcaggattggatcttccacagagagaagggatgaccattcatgctgaacggctcaactttcatcgttatatctcacacttccgttctgttcataggggctctgcttttgctaaaatgcgtacaacatctgttagaaagttactcccggaatcatggggtttcctgtgtccagttcatacacctgacggagagccttgtggtttactgaatcacatgacttctacatgccgtgtttcatcattctacaactcagaaggggtgataaaaaattttggggaaatgaagaagttgctttctgctgagttggttcgtgttggaatgaacccagtgttaccgaagattgagcaaaccggtcccccagaagtactccatgtccatttggatgggtgcattcttggtactattgcttctgctatgattgagaaagcagttaattatcttcgtacattgaaacttctggcacactcagggattcctgaagatctggaagttggttatgtcccacctagttttaatggagcttttcctggcctgtacctttttaccaatccggctagatttgtccgacctgtcagaaatctttttattctatctgatggaaagcaaagtattgagctcattgggccattcgaacaggcatttatggagatacggtgtcctgatggtggggatggtgggagacaagaaccatttcctgcaactcatgaagagatccaccctacagctattctcagtgtagttgccaatctgacaccttggtctgatcacaaccaaagtcctaggaacatgtaccaatgccagatggcaaagcagaccatgggtttttgcggacaggccctaaaattccgtactgatgtaaaagcattccatctacagacccctcagacaccaattgttcggacaggtacatataccaaatattgtatggatgaatttccatctggaacgaatgctattgttgcagtgctatcatacacaggttatgacatggaggatgccatgattttgaacaaatcagctgttgagcgtggtatgttccgtggacatatttaccagactgaatgcattgacttatcaacaaaaagcagagataatgttccagaaacttttgcaaagagtatattaacaagggatacaagtaatgtgattgattcagatggccttcctcggcttggacaggctgtacatccaaacgagcaatactatagcgtccataatagccttacaaatgtgataaggcctgtcaaactaaaaggcacagagccagcatttattgactatgttgctgtcaacgggacaggttcaaaatgtggcctgcagaaggcgaacattcgtctgcgtcgtgtaagaaaccctataatcggtgacaagttcagcagtcgacatgggcagaagggtgtttgctctcagttgtggcctgacattgacatgccattctctgcaaatactggcatgagaccagatctgatcattaatcctcatgcatttccttcaagaatgacaatagcaatgcttttagagtctatggcagctaaggctggaagtctacatggaaagttcattgatgcaacaccttttgcaaactcactcaaaaaggacaaggactccgacaagcctaattcgattgtggacgaattgggtcccatgcttgcatcttatgggtttaattatcatggaaacgaagtcctttatagtggagtttttggcactgagatggactgtgagattttcatcggacctgtttattaccaacgtcttcgtcatatggtctcagacaaattccaggtccgcactaccggtcgtatagaccagataacaagacaacccataggaggaaggaagcatggtggagggatccgatttggtgagatggagcgtgatgccctcctcgcccatggttcgtcctacctcttgcatgacaggctccactcctgctcggattaccacatcgcagatgtgtgctccttctgtgggagcctgctgactgcgacaatgatcaaatccgatacccagaagaaagtcaagcacgagatgcttgggctccccactgtgagaccagcgaagaactttgcatgccaggcctgcaaaacaagcaaggggatggagaccgtggcaatgccgtatgtgttcaggtacctggctgctgagttggctgccatgaacataaagctggagctccggttgagcaacaaatcaggattgcctctcagctaagaatcataacaccagaattagcgcttgttcatcgcgggggctgcttcgcaggagaagcttaaatgtaaccattggtccggcgtgtagttgtttcatatgtcggtgtgatgtaccaatgtaacttgtaagaaaaacataaatgacaacacgagttattatagtttgaatggcggttctttttcattgtca

SEQ ID NO: 89547 - DNA, 407 bp, Zea Mays
aatcgctctcagacaccaaacattaggctgaacttggtggcgagagggacagatacgatggcaactcccaacgcgacaccgaatatacgatgcgagattgagaaagtcgcgctgaactgtggcttcttcagaggaaggtggggcgacagcgggcggtttgctacaggagatgacagggggcaactcgagtgcaggagtcgatttccagtagtagaagacatctttggtcgcagagctgctagaggggaagacgtgtagcccctggcttgctcaaggtatgagcttgaactaccaagagcaccagagaacatatataacaaaccagagcaggatttcttaccacggagagcaaatggggtatctctcaagggtgctaactgagtcttgctgttatacttctccattgc

SEQ ID NO: 89548 - DNA, 3126 bp, Zea Mays
ccttcgtcgaagcacccaaccccaccccatcctccgatcccctcccggcctcccctccccttccgctccgcctctggccaccgcgcccgcacccaatggcgtcggcggcggggtcctctaacgtgatgcttgcgattcacgagaagaaaacgactgccactgacctctaccgcccgctgcgcctctacatcgcctccacctactcggaacgcgaggccgcggcggccgacgacgaccttagcgtggtgcgcgacctccgcgccgctgtcgagcagccctccctcccggacccgtcctccctcgagcagcggcgcgacgcgctcctcgcctacgcgcgggccctggcactcgttgagccccgcttccccatctcccctgaccgcgcccacgtccactccctcaccttcacctggcacgacgccttcaaggggaacaagaagtgcgccctcgcctccatccacctcgagaaggcctccgtgctgttcaacctcggcgccgtctactcccagatcgcggtcgctgcggaccgctccaccgacgtcggaatcaagaccgcgtgcggtgccttccagagtgcggcgggggcgttcgcatggctcagggagagcggggtcgcagccaaggctgttgctgcgggaaccaccaccgtggacatcacgcccgagtgcgctggcatgctggagaaactcatgctcgcgcaggcgcaggagtgcttcttcgagaaggtcataggtggagggaagccaccagcgctgtgctccaaggtggcgcggcaggtgggcatattctatgaagaagcatatgcagctctcagtgcacctcctctaagtcagcactttgataagacatgggtgtcccatgtccagctgaaagctgctcaattctatgccgatgcttgctataggtattcattagatcttcatcagaaagaagaaattgctgaggaaattgcacgcttgaagattggtatgagtgccttggcagatgctaagaaggctgcgaagggagttgctgcccagcttatggattccgtcaacaagctggaaagtaacatgaaaacgaacttggaaagggctatgaaggagaatgatcgtgtttacctgatgcgggttcccgctgctggttccttgggagccctctctgcagcgtcccttgtaaagcctacctctttgtctgaagttttagatgccagtaaggaaaggcttttttcatcacttgtgcctgatggcagcatgaaagcactttctaaatacacagagatggtagataatattatccggacccaggcagagaaattgcagcaagctagtgagatcactagagttaggttgaaggaaatggacttaccagattctattctttcattggaaggaaatataaccttgcccttggatctaaaggaagacgtagaggctgtgcagataagtggtggccctgctggtttggaatctgagttgcagcagcttagggatttgagcagggtcaatcaggaactacttgttcagactgaagagcttctacagaaggaggcgaatgaagacgctcagtttcgtacacaatttgggagtcgttggactagacctcaatcaagcaccctaactaagaacattcaggatagattgaatctgtttgcttctaatctgaagaaagctgctgatagtgattctctgattgaacgaggcgtgaaggagaactatcccttgatgtctatccttgacaaaagaccgatagagtctgcacttccaagtatttccaggcctatcatgtccttggatgggaatgaagatgccattgttggagctctgaaacaaagcttgagacaactggaatctcttggagcgcatagggcaggtcttgaagacatgctcaaagaaatgaaaagaaaggatgatatactgcctaagttgatggctggtgttggatcacatgatgatcttttcaagaaagagattgctaagtatgatcctatctgtgctgatattgctgataacattgtggcacaggaacaattattgctgcaaatacaggcacaaaatgagcaatttgctgctgtattcaatatagaggattacaaagctgctcgtgagagatgttacaagcaaattgctgctgctgttgctaaataccgggagtttaagaagaacattaacgagggcttaaacttttacgtgactctgcaggaagcaataggcaaaataaaacagcagtgcagtgacttcataatgacccgaaacattcaatgccgtgaaatgatcgaagatgtgcagaggaagctagcgggtttcagcttctcgtcctccagccactcctctatgcagaggaatgcttctgtaccacctgatcagagcagcccgtcaccaccaccgcatgctcaggctccctatgcctctccacctggggtagactcaagacttggatattctcaaccggagccaagacctgcttactcacagccataccccccatcctatggcgcaccaccacaacagccttcatatggcgcaccacaccctggtcagtaccagccgccagcgcaccagccacctcctggccatgactacggtcagccggcatatcctggatggcgtgggccatattacaatgcccctcagccgcagcaatctgcgccatatccacagccaccgtacaatgcccctggggcttaccctccgcaccagagcaactattacaggcctcagtaagctatcttatcgttcctgcaactatttgtttgcttcttttccattggatcttaccgttgtggagtatgcatacgagaatttggttggtgcaatatcagattgattagaaggtatagcttgtatgatttgtacgtataataatgtgctggatgtattgtaatacacggctatgcatattgcaacacctaccatttgccgttacctatcttgagtgcgtcctaaattgtaattgcagccaagcagcgaaatgtgtagaactaaagaaccctgagcgtcatttatcagttgcaaaataattttcgtaaggactagtttgggaaccatattttttcaagggattactattttcccaaggaaattagttcatttttttcttagaaaaatagaaattccttagtaaaatggagttcccaaactagatcta

SEQ ID NO: 89549 - DNA, 1222 bp, Zea Mays
ctaatgtgtaattttgatttgttacactcttttttttcagctgctcgtgagagatgttacaagcaaattgctgctgctgttgctaaataccgggagtttaagaagaacattaacgagggcttaaacttttacgtgactctgcaggtgtgattgcatttccattttcatattgttccatttgcattgaacataggaatgctgatgtttcctctcgaatgtgctactgattttggggtgatcgctgtgtacaggaagcaataggcaaaataaaacagcagtgcagtgacttcataatgacccgaaacattcaatgccgtgaaatgatcgaagatgtgcagaggaagctagcgggtttcagcttctcgtcctccagccactcctctatgcagaggaatgcttctgtaccacctgatcagagcagcccgtcaccaccaccgcatgctcaggctccctatgcctctccacctggggtagactcaagacttggatattctcaaccggagccaagacctgcttactcacagccataccccccatcctatggcgcaccaccacaacagccttcatatggcgcaccacaccctggtcagtaccagccgccagcgcaccagccacctcctggccatgactacggtcagccggcatatcctggatggcgtgggccatattacaatgcccctcagccgcagcaatctgcgccatatccacagccaccgtacaatgcccctggggcttaccctccgcaccagagcaactattacaggcctcagtaagctatcttatcgttcctgcaactatttgtttgcttcttttccattggatcttaccgttgtggagtatgcatacgagaatttggttggtgcaatatcagattgattagaaggtatagcttgtatgatttgtacgtataataatgtgctggatgtattgtaatacacggctatgcatattgcaacacctaccatttgccgttacctatcttgagtgcgtcctaaattgtaattgcagccaagcagcgaaatgtgtagaactaaagaaccctgagcgtcatttatcagttgcaaaataattttcgtaaggactagtttgggaaccatattttttcaagggattactattttcccaaggaaattagttcatttttttcttagaaaaatagaaattccttagtaaaatggagttcccaaactagatctaagttttctgtttgccggcataaaaa

SEQ ID NO: 89550 - DNA, 165 bp, Zea Mays
atgagctgcatcggcaggaaagtgtccgttggggaatcaaaactctgccatacagtgttacctcctgagtcctcgatgatgaggttcctggtgttcaggagcccagcacgctggacaccggtgaagttgttcccatcagcttgccacacgactgcgtcgtcatag
